United States Patent Application Publication US 2005/0255487 A1 - sequence listing, part 60

SEQ ID NO: 1644935 - RNA, 19 nt, Homo sapiens
  misc_RNA (1)...(19): siRNA sense strand
ggaaucacuauccgagcaa

SEQ ID NO: 1644936 - RNA, 19 nt, Homo sapiens
  misc_RNA (1)...(19): siRNA sense strand
gaaugcagaaagaguuaag

SEQ ID NO: 1644937 - RNA, 19 nt, Homo sapiens
  misc_RNA (1)...(19): siRNA sense strand
ccauuuaugugggccuuuc

SEQ ID NO: 1644938 - RNA, 19 nt, Homo sapiens
  misc_RNA (1)...(19): siRNA sense strand
ugacauugccaaguauuca

SEQ ID NO: 1644939 - RNA, 19 nt, Homo sapiens
  misc_RNA (1)...(19): siRNA sense strand
caacugggaaucacuaucc

SEQ ID NO: 1644940 - RNA, 19 nt, Homo sapiens
  misc_RNA (1)...(19): siRNA sense strand
gggccuuucucgaguuucu

SEQ ID NO: 1644941 - RNA, 19 nt, Homo sapiens
  misc_RNA (1)...(19): siRNA sense strand
cuucuuggauguuugugau

SEQ ID NO: 1644942 - RNA, 19 nt, Homo sapiens
  misc_RNA (1)...(19): siRNA sense strand
gugggccuuucucgaguuu

SEQ ID NO: 1644943 - RNA, 19 nt, Homo sapiens
  misc_RNA (1)...(19): siRNA sense strand
caacugcagcgaugguuac

SEQ ID NO: 1644944 - RNA, 19 nt, Homo sapiens
  misc_RNA (1)...(19): siRNA sense strand
gagggaaugcagaaagagu

SEQ ID NO: 1644945 - RNA, 19 nt, Homo sapiens
  misc_RNA (1)...(19): siRNA sense strand
aacccugucuguuuacugu

SEQ ID NO: 1644946 - RNA, 19 nt, Homo sapiens
  misc_RNA (1)...(19): siRNA sense strand
cacucaaauuccuuuauca

SEQ ID NO: 1644947 - RNA, 19 nt, Homo sapiens
  misc_RNA (1)...(19): siRNA sense strand
agcucugguugcaauauua

SEQ ID NO: 1644948 - RNA, 19 nt, Homo sapiens
  misc_RNA (1)...(19): siRNA sense strand
agggagcucugguugcaau

SEQ ID NO: 1644949 - RNA, 19 nt, Homo sapiens
  misc_RNA (1)...(19): siRNA sense strand
gacauugccaaguauucaa

SEQ ID NO: 1644950 - RNA, 19 nt, Homo sapiens
  misc_RNA (1)...(19): siRNA sense strand
uaucuucaagccaggauga

SEQ ID NO: 1644951 - RNA, 19 nt, Homo sapiens
  misc_RNA (1)...(19): siRNA sense strand
gagcaaucaccagccuuga

SEQ ID NO: 1644952 - RNA, 19 nt, Homo sapiens
  misc_RNA (1)...(19): siRNA sense strand
uuguugccguauccauuua

SEQ ID NO: 1644953 - RNA, 19 nt, Homo sapiens
  misc_RNA (1)...(19): siRNA sense strand
ggagcucugguugcaauau

SEQ ID NO: 1644954 - RNA, 19 nt, Homo sapiens
  misc_RNA (1)...(19): siRNA sense strand
uguacugcaugcuguuugu

SEQ ID NO: 1644955 - RNA, 19 nt, Homo sapiens
  misc_RNA (1)...(19): siRNA sense strand
ugacugacauugccaagua

SEQ ID NO: 1644956 - RNA, 19 nt, Homo sapiens
  misc_RNA (1)...(19): siRNA sense strand
gaggaggacucucauacaa

SEQ ID NO: 1644957 - RNA, 19 nt, Homo sapiens
  misc_RNA (1)...(19): siRNA sense strand
gcacucaaauuccuuuauc

SEQ ID NO: 1644958 - RNA, 19 nt, Homo sapiens
  misc_RNA (1)...(19): siRNA sense strand
cuacauaugucgagggaau

SEQ ID NO: 1644959 - RNA, 19 nt, Homo sapiens
  misc_RNA (1)...(19): siRNA sense strand
gagcucugguugcaauauu

SEQ ID NO: 1644960 - RNA, 19 nt, Homo sapiens
  misc_RNA (1)...(19): siRNA sense strand
ggaggacucucauacaacu

SEQ ID NO: 1644961 - RNA, 19 nt, Homo sapiens
  misc_RNA (1)...(19): siRNA sense strand
gaagggagacugggcaaga

SEQ ID NO: 1644962 - RNA, 19 nt, Homo sapiens
  misc_RNA (1)...(19): siRNA sense strand
caacaacugggaaucacua

SEQ ID NO: 1644963 - RNA, 19 nt, Homo sapiens
  misc_RNA (1)...(19): siRNA sense strand
gggaaugcagaaagaguua

SEQ ID NO: 1644964 - RNA, 19 nt, Homo sapiens
  misc_RNA (1)...(19): siRNA sense strand
cugcagcgaugguuacauu

SEQ ID NO: 1644965 - RNA, 19 nt, Homo sapiens
  misc_RNA (1)...(19): siRNA sense strand
cagcgaugguuacauugaa

SEQ ID NO: 1644966 - RNA, 19 nt, Homo sapiens
  misc_RNA (1)...(19): siRNA sense strand
uguaucggauuucuucaaa

SEQ ID NO: 1644967 - RNA, 19 nt, Homo sapiens
  misc_RNA (1)...(19): siRNA sense strand
guacguggcccucgaugug

SEQ ID NO: 1644968 - RNA, 19 nt, Homo sapiens
  misc_RNA (1)...(19): siRNA sense strand
gcagcgaugguuacauuga

SEQ ID NO: 1644969 - RNA, 19 nt, Homo sapiens
  misc_RNA (1)...(19): siRNA sense strand
uguguugacuggacucauu

SEQ ID NO: 1644970 - RNA, 19 nt, Homo sapiens
  misc_RNA (1)...(19): siRNA sense strand
uuucucgaguuucugauua

SEQ ID NO: 1644971 - RNA, 19 nt, Homo sapiens
  misc_RNA (1)...(19): siRNA sense strand
auacaacucugcaugaaac

SEQ ID NO: 1644972 - RNA, 19 nt, Homo sapiens
  misc_RNA (1)...(19): siRNA sense strand
gcgaugguuacauugaaua

SEQ ID NO: 1644973 - RNA, 19 nt, Homo sapiens
  misc_RNA (1)...(19): siRNA sense strand
cuguauauguaucggauuu

SEQ ID NO: 1644974 - RNA, 19 nt, Homo sapiens
  misc_RNA (1)...(19): siRNA sense strand
acacugcaauuuggucuug

SEQ ID NO: 1644975 - RNA, 19 nt, Homo sapiens
  misc_RNA (1)...(19): siRNA sense strand
ucgagggaaugcagaaaga

SEQ ID NO: 1644976 - RNA, 19 nt, Homo sapiens
  misc_RNA (1)...(19): siRNA sense strand
ccacuggagcgauguguug

SEQ ID NO: 1644977 - RNA, 19 nt, Homo sapiens
  misc_RNA (1)...(19): siRNA sense strand
gcagguuguccuucuauuc

SEQ ID NO: 1644978 - RNA, 19 nt, Homo sapiens
  misc_RNA (1)...(19): siRNA sense strand
ccucacuucuuggauguuu

SEQ ID NO: 1644979 - RNA, 19 nt, Homo sapiens
  misc_RNA (1)...(19): siRNA sense strand
ucagggagcucugguugca

SEQ ID NO: 1644980 - RNA, 19 nt, Homo sapiens
  misc_RNA (1)...(19): siRNA sense strand
acaaagccauuggaaccuu

SEQ ID NO: 1644981 - RNA, 19 nt, Homo sapiens
  misc_RNA (1)...(19): siRNA sense strand
caugaaacaccaacaacug

SEQ ID NO: 1644982 - RNA, 19 nt, Homo sapiens
  misc_RNA (1)...(19): siRNA sense strand
ucucgaguuucugauuaua

SEQ ID NO: 1644983 - RNA, 19 nt, Homo sapiens
  misc_RNA (1)...(19): siRNA sense strand
ggaaugcagaaagaguuaa

SEQ ID NO: 1644984 - RNA, 19 nt, Homo sapiens
  misc_RNA (1)...(19): siRNA sense strand
guauauguaucggauuucu

SEQ ID NO: 1644985 - RNA, 19 nt, Homo sapiens
  misc_RNA (1)...(19): siRNA sense strand
cagguuguccuucuauuca

SEQ ID NO: 1644986 - RNA, 19 nt, Homo sapiens
  misc_RNA (1)...(19): siRNA sense strand
cauacaacucugcaugaaa

SEQ ID NO: 1644987 - RNA, 19 nt, Homo sapiens
  misc_RNA (1)...(19): siRNA sense strand
gacugacauugccaaguau

SEQ ID NO: 1644988 - RNA, 19 nt, Homo sapiens
  misc_RNA (1)...(19): siRNA sense strand
gaaucacuauccgagcaau

SEQ ID NO: 1644989 - RNA, 19 nt, Homo sapiens
  misc_RNA (1)...(19): siRNA sense strand
gcaugaaacaccaacaacu

SEQ ID NO: 1644990 - RNA, 19 nt, Homo sapiens
  misc_RNA (1)...(19): siRNA sense strand
ggcagguuguccuucuauu

SEQ ID NO: 1644991 - RNA, 19 nt, Homo sapiens
  misc_RNA (1)...(19): siRNA sense strand
ucaacugcagcgaugguua

SEQ ID NO: 1644992 - RNA, 19 nt, Homo sapiens
  misc_RNA (1)...(19): siRNA sense strand
ggccucacuucuuggaugu

SEQ ID NO: 1644993 - RNA, 19 nt, Homo sapiens
  misc_RNA (1)...(19): siRNA sense strand
ggaaucacuauccgagcaa

SEQ ID NO: 1644994 - RNA, 19 nt, Homo sapiens
  misc_RNA (1)...(19): siRNA sense strand
gaaugcagaaagaguuaag

SEQ ID NO: 1644995 - RNA, 19 nt, Homo sapiens
  misc_RNA (1)...(19): siRNA sense strand
ccauuuaugugggccuuuc

SEQ ID NO: 1644996 - RNA, 19 nt, Homo sapiens
  misc_RNA (1)...(19): siRNA sense strand
ugacauugccaaguauuca

SEQ ID NO: 1644997 - RNA, 19 nt, Homo sapiens
  misc_RNA (1)...(19): siRNA sense strand
caacugggaaucacuaucc

SEQ ID NO: 1644998 - RNA, 19 nt, Homo sapiens
  misc_RNA (1)...(19): siRNA sense strand
gggccuuucucgaguuucu

SEQ ID NO: 1644999 - RNA, 19 nt, Homo sapiens
  misc_RNA (1)...(19): siRNA sense strand
cuucuuggauguuugugau

SEQ ID NO: 1645000 - RNA, 19 nt, Homo sapiens
  misc_RNA (1)...(19): siRNA sense strand
gugggccuuucucgaguuu

SEQ ID NO: 1645001 - RNA, 19 nt, Homo sapiens
  misc_RNA (1)...(19): siRNA sense strand
caacugcagcgaugguuac

SEQ ID NO: 1645002 - RNA, 19 nt, Homo sapiens
  misc_RNA (1)...(19): siRNA sense strand
gagggaaugcagaaagagu

SEQ ID NO: 1645003 - RNA, 19 nt, Homo sapiens
  misc_RNA (1)...(19): siRNA sense strand
aacccugucuguuuacugu

SEQ ID NO: 1645004 - RNA, 19 nt, Homo sapiens
  misc_RNA (1)...(19): siRNA sense strand
cacucaaauuccuuuauca

SEQ ID NO: 1645005 - RNA, 19 nt, Homo sapiens
  misc_RNA (1)...(19): siRNA sense strand
agcucugguugcaauauua

SEQ ID NO: 1645006 - RNA, 19 nt, Homo sapiens
  misc_RNA (1)...(19): siRNA sense strand
agggagcucugguugcaau

SEQ ID NO: 1645007 - RNA, 19 nt, Homo sapiens
  misc_RNA (1)...(19): siRNA sense strand
gacauugccaaguauucaa

SEQ ID NO: 1645008 - RNA, 19 nt, Homo sapiens
  misc_RNA (1)...(19): siRNA sense strand
uaucuucaagccaggauga

SEQ ID NO: 1645009 - RNA, 19 nt, Homo sapiens
  misc_RNA (1)...(19): siRNA sense strand
gagcaaucaccagccuuga

SEQ ID NO: 1645010 - RNA, 19 nt, Homo sapiens
  misc_RNA (1)...(19): siRNA sense strand
uuguugccguauccauuua

SEQ ID NO: 1645011 - RNA, 19 nt, Homo sapiens
  misc_RNA (1)...(19): siRNA sense strand
ggagcucugguugcaauau

SEQ ID NO: 1645012 - RNA, 19 nt, Homo sapiens
  misc_RNA (1)...(19): siRNA sense strand
uguacugcaugcuguuugu

SEQ ID NO: 1645013 - RNA, 19 nt, Homo sapiens
  misc_RNA (1)...(19): siRNA sense strand
gaagagaucuggaaauuca

SEQ ID NO: 1645014 - RNA, 19 nt, Homo sapiens
  misc_RNA (1)...(19): siRNA sense strand
caaguccgauccaguguua

SEQ ID NO: 1645015 - RNA, 19 nt, Homo sapiens
  misc_RNA (1)...(19): siRNA sense strand
gaagaggcuuugagagaug

SEQ ID NO: 1645016 - RNA, 19 nt, Homo sapiens
  misc_RNA (1)...(19): siRNA sense strand
gagaggagcacuuaaucua

SEQ ID NO: 1645017 - RNA, 19 nt, Homo sapiens
  misc_RNA (1)...(19): siRNA sense strand
gaggagcacuuaaucuaug

SEQ ID NO: 1645018 - RNA, 19 nt, Homo sapiens
  misc_RNA (1)...(19): siRNA sense strand
gaugaaaguccucgaguuu

SEQ ID NO: 1645019 - RNA, 19 nt, Homo sapiens
  misc_RNA (1)...(19): siRNA sense strand
ugagagagcccauuaugaa

SEQ ID NO: 1645020 - RNA, 19 nt, Homo sapiens
  misc_RNA (1)...(19): siRNA sense strand
gcacuacugccacgacuuu

SEQ ID NO: 1645021 - RNA, 19 nt, Homo sapiens
  misc_RNA (1)...(19): siRNA sense strand
guacaaggaucacuucacu

SEQ ID NO: 1645022 - RNA, 19 nt, Homo sapiens
  misc_RNA (1)...(19): siRNA sense strand
ggugugaucuucuuaaagg

SEQ ID NO: 1645023 - RNA, 19 nt, Homo sapiens
  misc_RNA (1)...(19): siRNA sense strand
gcugaagguuguugaugaa

SEQ ID NO: 1645024 - RNA, 19 nt, Homo sapiens
  misc_RNA (1)...(19): siRNA sense strand
aggaagagaucuggaaauu

SEQ ID NO: 1645025 - RNA, 19 nt, Homo sapiens
  misc_RNA (1)...(19): siRNA sense strand
ugacgaaggugccaaaugc

SEQ ID NO: 1645026 - RNA, 19 nt, Homo sapiens
  misc_RNA (1)...(19): siRNA sense strand
gauggaaaccugagcaaug

SEQ ID NO: 1645027 - RNA, 19 nt, Homo sapiens
  misc_RNA (1)...(19): siRNA sense strand
gcugaaaccaccaagauga

SEQ ID NO: 1645028 - RNA, 19 nt, Homo sapiens
  misc_RNA (1)...(19): siRNA sense strand
gcuccgugcucgugagaaa

SEQ ID NO: 1645029 - RNA, 19 nt, Homo sapiens
  misc_RNA (1)...(19): siRNA sense strand
guaaguucaucacccaaga

SEQ ID NO: 1645030 - RNA, 19 nt, Homo sapiens
  misc_RNA (1)...(19): siRNA sense strand
ccuacacccucgucaguaa

SEQ ID NO: 1645031 - RNA, 19 nt, Homo sapiens
  misc_RNA (1)...(19): siRNA sense strand
ggaaaccugagcaaugauu

SEQ ID NO: 1645032 - RNA, 19 nt, Homo sapiens
  misc_RNA (1)...(19): siRNA sense strand
gcuuggagcucgucuuugg

SEQ ID NO: 1645033 - RNA, 19 nt, Homo sapiens
  misc_RNA (1)...(19): siRNA sense strand
gcacuucauucuacguaag

SEQ ID NO: 1645034 - RNA, 19 nt, Homo sapiens
  misc_RNA (1)...(19): siRNA sense strand
ugaagaggcuuugagagau

SEQ ID NO: 1645035 - RNA, 19 nt, Homo sapiens
  misc_RNA (1)...(19): siRNA sense strand
aaggaucacuucacugaga

SEQ ID NO: 1645036 - RNA, 19 nt, Homo sapiens
  misc_RNA (1)...(19): siRNA sense strand
caggaaugcugaugcacuu

SEQ ID NO: 1645037 - RNA, 19 nt, Homo sapiens
  misc_RNA (1)...(19): siRNA sense strand
acaaggaucacuucacuga

SEQ ID NO: 1645038 - RNA, 19 nt, Homo sapiens
  misc_RNA (1)...(19): siRNA sense strand
cagauaugcugaagguugu

SEQ ID NO: 1645039 - RNA, 19 nt, Homo sapiens
  misc_RNA (1)...(19): siRNA sense strand
gaaggcagauaugcugaag

SEQ ID NO: 1645040 - RNA, 19 nt, Homo sapiens
  misc_RNA (1)...(19): siRNA sense strand
gaaggaagacaacccuagu

SEQ ID NO: 1645041 - RNA, 19 nt, Homo sapiens
  misc_RNA (1)...(19): siRNA sense strand
agcuaaaccucaccaauga

SEQ ID NO: 1645042 - RNA, 19 nt, Homo sapiens
  misc_RNA (1)...(19): siRNA sense strand
gccacaacauccacugaga

SEQ ID NO: 1645043 - RNA, 19 nt, Homo sapiens
  misc_RNA (1)...(19): siRNA sense strand
uaccgaaucugacgaaggu

SEQ ID NO: 1645044 - RNA, 19 nt, Homo sapiens
  misc_RNA (1)...(19): siRNA sense strand
gcugaugcacuucauucua

SEQ ID NO: 1645045 - RNA, 19 nt, Homo sapiens
  misc_RNA (1)...(19): siRNA sense strand
aagcuaaaccucaccaaug

SEQ ID NO: 1645046 - RNA, 19 nt, Homo sapiens
  misc_RNA (1)...(19): siRNA sense strand
agaugaaaguccucgaguu

SEQ ID NO: 1645047 - RNA, 19 nt, Homo sapiens
  misc_RNA (1)...(19): siRNA sense strand
caagaucuggugcaggaaa

SEQ ID NO: 1645048 - RNA, 19 nt, Homo sapiens
  misc_RNA (1)...(19): siRNA sense strand
ggaagagaucuggaaauuc

SEQ ID NO: 1645049 - RNA, 19 nt, Homo sapiens
  misc_RNA (1)...(19): siRNA sense strand
auggaaaccugagcaauga

SEQ ID NO: 1645050 - RNA, 19 nt, Homo sapiens
  misc_RNA (1)...(19): siRNA sense strand
caaaugccaaggugaggaa

SEQ ID NO: 1645051 - RNA, 19 nt, Homo sapiens
  misc_RNA (1)...(19): siRNA sense strand
ugacuucccaucccauuau

SEQ ID NO: 1645052 - RNA, 19 nt, Homo sapiens
  misc_RNA (1)...(19): siRNA sense strand
guugggagccuaugaugga

SEQ ID NO: 1645053 - RNA, 19 nt, Homo sapiens
  misc_RNA (1)...(19): siRNA sense strand
ggagaggagcacuuaaucu

SEQ ID NO: 1645054 - RNA, 19 nt, Homo sapiens
  misc_RNA (1)...(19): siRNA sense strand
ggaaugcugaugcacuuca

SEQ ID NO: 1645055 - RNA, 19 nt, Homo sapiens
  misc_RNA (1)...(19): siRNA sense strand
gaaaccaccaagaugaaag

SEQ ID NO: 1645056 - RNA, 19 nt, Homo sapiens
  misc_RNA (1)...(19): siRNA sense strand
gaaugcugaugcacuucau

SEQ ID NO: 1645057 - RNA, 19 nt, Homo sapiens
  misc_RNA (1)...(19): siRNA sense strand
ugauggagaggagcacuua

SEQ ID NO: 1645058 - RNA, 19 nt, Homo sapiens
  misc_RNA (1)...(19): siRNA sense strand
ugcugaagguuguugauga

SEQ ID NO: 1645059 - RNA, 19 nt, Homo sapiens
  misc_RNA (1)...(19): siRNA sense strand
aggcagauaugcugaaggu

SEQ ID NO: 1645060 - RNA, 19 nt, Homo sapiens
  misc_RNA (1)...(19): siRNA sense strand
gagagagcccauuaugaag

SEQ ID NO: 1645061 - RNA, 19 nt, Homo sapiens
  misc_RNA (1)...(19): siRNA sense strand
ugggugugaucuucuuaaa

SEQ ID NO: 1645062 - RNA, 19 nt, Homo sapiens
  misc_RNA (1)...(19): siRNA sense strand
gagagaugaggaagagaga

SEQ ID NO: 1645063 - RNA, 19 nt, Homo sapiens
  misc_RNA (1)...(19): siRNA sense strand
gaggaagagaucuggaaau

SEQ ID NO: 1645064 - RNA, 19 nt, Homo sapiens
  misc_RNA (1)...(19): siRNA sense strand
ugucauguaccgaaucuga

SEQ ID NO: 1645065 - RNA, 19 nt, Homo sapiens
  misc_RNA (1)...(19): siRNA sense strand
cgaggaagagaucuggaaa

SEQ ID NO: 1645066 - RNA, 19 nt, Homo sapiens
  misc_RNA (1)...(19): siRNA sense strand
gaagguuguugaugaaaag

SEQ ID NO: 1645067 - RNA, 19 nt, Homo sapiens
  misc_RNA (1)...(19): siRNA sense strand
cugaugcacuucauucuac

SEQ ID NO: 1645068 - RNA, 19 nt, Homo sapiens
  misc_RNA (1)...(19): siRNA sense strand
gcucgucuuuggccuugau

SEQ ID NO: 1645069 - RNA, 19 nt, Homo sapiens
  misc_RNA (1)...(19): siRNA sense strand
ggaagagagagcccaaguc

SEQ ID NO: 1645070 - RNA, 19 nt, Homo sapiens
  misc_RNA (1)...(19): siRNA sense strand
ucuuuggccuugauuugaa

SEQ ID NO: 1645071 - RNA, 19 nt, Homo sapiens
  misc_RNA (1)...(19): siRNA sense strand
cuaaaccucaccaaugaug

SEQ ID NO: 1645072 - RNA, 19 nt, Homo sapiens
  misc_RNA (1)...(19): siRNA sense strand
ccgagagccuaugcugaaa

SEQ ID NO: 1645073 - RNA, 19 nt, Homo sapiens
  misc_RNA (1)...(19): siRNA sense strand
caacucugccaccgaggaa

SEQ ID NO: 1645074 - RNA, 19 nt, Homo sapiens
  misc_RNA (1)...(19): siRNA sense strand
ugaaaccaccaagaugaaa

SEQ ID NO: 1645075 - RNA, 19 nt, Homo sapiens
  misc_RNA (1)...(19): siRNA sense strand
guucaucacccaagaucug

SEQ ID NO: 1645076 - RNA, 19 nt, Homo sapiens
  misc_RNA (1)...(19): siRNA sense strand
ccgcuuggagcucgucuuu

SEQ ID NO: 1645077 - RNA, 19 nt, Homo sapiens
  misc_RNA (1)...(19): siRNA sense strand
uaagcuaaaccucaccaau

SEQ ID NO: 1645078 - RNA, 19 nt, Homo sapiens
  misc_RNA (1)...(19): siRNA sense strand
augaagaggcuuugagaga

SEQ ID NO: 1645079 - RNA, 19 nt, Homo sapiens
  misc_RNA (1)...(19): siRNA sense strand
gugacuucccaucccauua

SEQ ID NO: 1645080 - RNA, 19 nt, Homo sapiens
  misc_RNA (1)...(19): siRNA sense strand
agaggagcacuuaaucuau

SEQ ID NO: 1645081 - RNA, 19 nt, Homo sapiens
  misc_RNA (1)...(19): siRNA sense strand
gagaucuggaaauucauga

SEQ ID NO: 1645082 - RNA, 19 nt, Homo sapiens
  misc_RNA (1)...(19): siRNA sense strand
gcugugucauguaccgaau

SEQ ID NO: 1645083 - RNA, 19 nt, Homo sapiens
  misc_RNA (1)...(19): siRNA sense strand
uccgagagccuaugcugaa

SEQ ID NO: 1645084 - RNA, 19 nt, Homo sapiens
  misc_RNA (1)...(19): siRNA sense strand
gauggagaggagcacuuaa

SEQ ID NO: 1645085 - RNA, 19 nt, Homo sapiens
  misc_RNA (1)...(19): siRNA sense strand
ugaagguuguugaugaaaa

SEQ ID NO: 1645086 - RNA, 19 nt, Homo sapiens
  misc_RNA (1)...(19): siRNA sense strand
cgucuuuggccuugauuug

SEQ ID NO: 1645087 - RNA, 19 nt, Homo sapiens
  misc_RNA (1)...(19): siRNA sense strand
cugcagcugugucauguac

SEQ ID NO: 1645088 - RNA, 19 nt, Homo sapiens
  misc_RNA (1)...(19): siRNA sense strand
gacuucccaucccauuaug

SEQ ID NO: 1645089 - RNA, 19 nt, Homo sapiens
  misc_RNA (1)...(19): siRNA sense strand
gagagccuaugcugaaacc

SEQ ID NO: 1645090 - RNA, 19 nt, Homo sapiens
  misc_RNA (1)...(19): siRNA sense strand
gcaggugcccaacagugau

SEQ ID NO: 1645091 - RNA, 19 nt, Homo sapiens
  misc_RNA (1)...(19): siRNA sense strand
gaauguguugggagccuau

SEQ ID NO: 1645092 - RNA, 19 nt, Homo sapiens
  misc_RNA (1)...(19): siRNA sense strand
aagaggcuuugagagauga

SEQ ID NO: 1645093 - RNA, 19 nt, Homo sapiens
  misc_RNA (1)...(19): siRNA sense strand
aaaccucaccaaugaugga

SEQ ID NO: 1645094 - RNA, 19 nt, Homo sapiens
  misc_RNA (1)...(19): siRNA sense strand
gaagagaucuggaaauuca

SEQ ID NO: 1645095 - RNA, 19 nt, Homo sapiens
  misc_RNA (1)...(19): siRNA sense strand
caaguccgauccaguguua

SEQ ID NO: 1645096 - RNA, 19 nt, Homo sapiens
  misc_RNA (1)...(19): siRNA sense strand
gaagaggcuuugagagaug

SEQ ID NO: 1645097 - RNA, 19 nt, Homo sapiens
  misc_RNA (1)...(19): siRNA sense strand
gagaggagcacuuaaucua

SEQ ID NO: 1645098 - RNA, 19 nt, Homo sapiens
  misc_RNA (1)...(19): siRNA sense strand
gaggagcacuuaaucuaug

SEQ ID NO: 1645099 - RNA, 19 nt, Homo sapiens
  misc_RNA (1)...(19): siRNA sense strand
gaugaaaguccucgaguuu

SEQ ID NO: 1645100 - RNA, 19 nt, Homo sapiens
  misc_RNA (1)...(19): siRNA sense strand
ugagagagcccauuaugaa

SEQ ID NO: 1645101 - RNA, 19 nt, Homo sapiens
  misc_RNA (1)...(19): siRNA sense strand
gcacuacugccacgacuuu

SEQ ID NO: 1645102 - RNA, 19 nt, Homo sapiens
  misc_RNA (1)...(19): siRNA sense strand
guacaaggaucacuucacu

SEQ ID NO: 1645103 - RNA, 19 nt, Homo sapiens
  misc_RNA (1)...(19): siRNA sense strand
ggugugaucuucuuaaagg

SEQ ID NO: 1645104 - RNA, 19 nt, Homo sapiens
  misc_RNA (1)...(19): siRNA sense strand
gcugaagguuguugaugaa

SEQ ID NO: 1645105 - RNA, 19 nt, Homo sapiens
  misc_RNA (1)...(19): siRNA sense strand
aggaagagaucuggaaauu

SEQ ID NO: 1645106 - RNA, 19 nt, Homo sapiens
  misc_RNA (1)...(19): siRNA sense strand
ugacgaaggugccaaaugc

SEQ ID NO: 1645107 - RNA, 19 nt, Homo sapiens
  misc_RNA (1)...(19): siRNA sense strand
gauggaaaccugagcaaug

SEQ ID NO: 1645108 - RNA, 19 nt, Homo sapiens
  misc_RNA (1)...(19): siRNA sense strand
gcugaaaccaccaagauga

SEQ ID NO: 1645109 - RNA, 19 nt, Homo sapiens
  misc_RNA (1)...(19): siRNA sense strand
gcuccgugcucgugagaaa

SEQ ID NO: 1645110 - RNA, 19 nt, Homo sapiens
  misc_RNA (1)...(19): siRNA sense strand
guaaguucaucacccaaga

SEQ ID NO: 1645111 - RNA, 19 nt, Homo sapiens
  misc_RNA (1)...(19): siRNA sense strand
ccuacacccucgucaguaa

SEQ ID NO: 1645112 - RNA, 19 nt, Homo sapiens
  misc_RNA (1)...(19): siRNA sense strand
ggaaaccugagcaaugauu

SEQ ID NO: 1645113 - RNA, 19 nt, Homo sapiens
  misc_RNA (1)...(19): siRNA sense strand
gcuuggagcucgucuuugg

SEQ ID NO: 1645114 - RNA, 19 nt, Homo sapiens
  misc_RNA (1)...(19): siRNA sense strand
gcacuucauucuacguaag

SEQ ID NO: 1645115 - RNA, 19 nt, Homo sapiens
  misc_RNA (1)...(19): siRNA sense strand
ugaagaggcuuugagagau

SEQ ID NO: 1645116 - RNA, 19 nt, Homo sapiens
  misc_RNA (1)...(19): siRNA sense strand
aaggaucacuucacugaga

SEQ ID NO: 1645117 - RNA, 19 nt, Homo sapiens
  misc_RNA (1)...(19): siRNA sense strand
caggaaugcugaugcacuu

SEQ ID NO: 1645118 - RNA, 19 nt, Homo sapiens
  misc_RNA (1)...(19): siRNA sense strand
acaaggaucacuucacuga

SEQ ID NO: 1645119 - RNA, 19 nt, Homo sapiens
  misc_RNA (1)...(19): siRNA sense strand
cagauaugcugaagguugu

SEQ ID NO: 1645120 - RNA, 19 nt, Homo sapiens
  misc_RNA (1)...(19): siRNA sense strand
gaaggcagauaugcugaag

SEQ ID NO: 1645121 - RNA, 19 nt, Homo sapiens
  misc_RNA (1)...(19): siRNA sense strand
gaaggaagacaacccuagu

SEQ ID NO: 1645122 - RNA, 19 nt, Homo sapiens
  misc_RNA (1)...(19): siRNA sense strand
agcuaaaccucaccaauga

SEQ ID NO: 1645123 - RNA, 19 nt, Homo sapiens
  misc_RNA (1)...(19): siRNA sense strand
gccacaacauccacugaga

SEQ ID NO: 1645124 - RNA, 19 nt, Homo sapiens
  misc_RNA (1)...(19): siRNA sense strand
uaccgaaucugacgaaggu

SEQ ID NO: 1645125 - RNA, 19 nt, Homo sapiens
  misc_RNA (1)...(19): siRNA sense strand
gcugaugcacuucauucua

SEQ ID NO: 1645126 - RNA, 19 nt, Homo sapiens
  misc_RNA (1)...(19): siRNA sense strand
aagcuaaaccucaccaaug

SEQ ID NO: 1645127 - RNA, 19 nt, Homo sapiens
  misc_RNA (1)...(19): siRNA sense strand
agaugaaaguccucgaguu

SEQ ID NO: 1645128 - RNA, 19 nt, Homo sapiens
  misc_RNA (1)...(19): siRNA sense strand
caagaucuggugcaggaaa

SEQ ID NO: 1645129 - RNA, 19 nt, Homo sapiens
  misc_RNA (1)...(19): siRNA sense strand
ggaagagaucuggaaauuc

SEQ ID NO: 1645130 - RNA, 19 nt, Homo sapiens
  misc_RNA (1)...(19): siRNA sense strand
auggaaaccugagcaauga

SEQ ID NO: 1645131 - RNA, 19 nt, Homo sapiens
  misc_RNA (1)...(19): siRNA sense strand
caaaugccaaggugaggaa

SEQ ID NO: 1645132 - RNA, 19 nt, Homo sapiens
  misc_RNA (1)...(19): siRNA sense strand
ugacuucccaucccauuau

SEQ ID NO: 1645133 - RNA, 19 nt, Homo sapiens
  misc_RNA (1)...(19): siRNA sense strand
guugggagccuaugaugga

SEQ ID NO: 1645134 - RNA, 19 nt, Homo sapiens
  misc_RNA (1)...(19): siRNA sense strand
ggagaggagcacuuaaucu

SEQ ID NO: 1645135 - RNA, 19 nt, Homo sapiens
  misc_RNA (1)...(19): siRNA sense strand
ggaaugcugaugcacuuca

SEQ ID NO: 1645136 - RNA, 19 nt, Homo sapiens
  misc_RNA (1)...(19): siRNA sense strand
gaaaccaccaagaugaaag

SEQ ID NO: 1645137 - RNA, 19 nt, Homo sapiens
  misc_RNA (1)...(19): siRNA sense strand
gaaugcugaugcacuucau

SEQ ID NO: 1645138 - RNA, 19 nt, Homo sapiens
  misc_RNA (1)...(19): siRNA sense strand
ugauggagaggagcacuua

SEQ ID NO: 1645139 - RNA, 19 nt, Homo sapiens
  misc_RNA (1)...(19): siRNA sense strand
ugcugaagguuguugauga

SEQ ID NO: 1645140 - RNA, 19 nt, Homo sapiens
  misc_RNA (1)...(19): siRNA sense strand
aggcagauaugcugaaggu

SEQ ID NO: 1645141 - RNA, 19 nt, Homo sapiens
  misc_RNA (1)...(19): siRNA sense strand
gagagagcccauuaugaag

SEQ ID NO: 1645142 - RNA, 19 nt, Homo sapiens
  misc_RNA (1)...(19): siRNA sense strand
ugggugugaucuucuuaaa

SEQ ID NO: 1645143 - RNA, 19 nt, Homo sapiens
  misc_RNA (1)...(19): siRNA sense strand
gagagaugaggaagagaga

SEQ ID NO: 1645144 - RNA, 19 nt, Homo sapiens
  misc_RNA (1)...(19): siRNA sense strand
gaggaagagaucuggaaau

SEQ ID NO: 1645145 - RNA, 19 nt, Homo sapiens
  misc_RNA (1)...(19): siRNA sense strand
ugucauguaccgaaucuga

SEQ ID NO: 1645146 - RNA, 19 nt, Homo sapiens
  misc_RNA (1)...(19): siRNA sense strand
cgaggaagagaucuggaaa

SEQ ID NO: 1645147 - RNA, 19 nt, Homo sapiens
  misc_RNA (1)...(19): siRNA sense strand
gaagguuguugaugaaaag

SEQ ID NO: 1645148 - RNA, 19 nt, Homo sapiens
  misc_RNA (1)...(19): siRNA sense strand
cugaugcacuucauucuac

SEQ ID NO: 1645149 - RNA, 19 nt, Homo sapiens
  misc_RNA (1)...(19): siRNA sense strand
gcucgucuuuggccuugau

SEQ ID NO: 1645150 - RNA, 19 nt, Homo sapiens
  misc_RNA (1)...(19): siRNA sense strand
ggaagagagagcccaaguc

SEQ ID NO: 1645151 - RNA, 19 nt, Homo sapiens
  misc_RNA (1)...(19): siRNA sense strand
ucuuuggccuugauuugaa

SEQ ID NO: 1645152 - RNA, 19 nt, Homo sapiens
  misc_RNA (1)...(19): siRNA sense strand
cuaaaccucaccaaugaug

SEQ ID NO: 1645153 - RNA, 19 nt, Homo sapiens
  misc_RNA (1)...(19): siRNA sense strand
ccgagagccuaugcugaaa

SEQ ID NO: 1645154 - RNA, 19 nt, Homo sapiens
  misc_RNA (1)...(19): siRNA sense strand
caacucugccaccgaggaa

SEQ ID NO: 1645155 - RNA, 19 nt, Homo sapiens
  misc_RNA (1)...(19): siRNA sense strand
ugaaaccaccaagaugaaa

SEQ ID NO: 1645156 - RNA, 19 nt, Homo sapiens
  misc_RNA (1)...(19): siRNA sense strand
guucaucacccaagaucug

SEQ ID NO: 1645157 - RNA, 19 nt, Homo sapiens
  misc_RNA (1)...(19): siRNA sense strand
ccgcuuggagcucgucuuu

SEQ ID NO: 1645158 - RNA, 19 nt, Homo sapiens
  misc_RNA (1)...(19): siRNA sense strand
uaagcuaaaccucaccaau

SEQ ID NO: 1645159 - RNA, 19 nt, Homo sapiens
  misc_RNA (1)...(19): siRNA sense strand
augaagaggcuuugagaga

SEQ ID NO: 1645160 - RNA, 19 nt, Homo sapiens
  misc_RNA (1)...(19): siRNA sense strand
gugacuucccaucccauua

SEQ ID NO: 1645161 - RNA, 19 nt, Homo sapiens
  misc_RNA (1)...(19): siRNA sense strand
agaggagcacuuaaucuau

SEQ ID NO: 1645162 - RNA, 19 nt, Homo sapiens
  misc_RNA (1)...(19): siRNA sense strand
gagaucuggaaauucauga

SEQ ID NO: 1645163 - RNA, 19 nt, Homo sapiens
  misc_RNA (1)...(19): siRNA sense strand
gcugugucauguaccgaau

SEQ ID NO: 1645164 - RNA, 19 nt, Homo sapiens
  misc_RNA (1)...(19): siRNA sense strand
uccgagagccuaugcugaa

SEQ ID NO: 1645165 - RNA, 19 nt, Homo sapiens
  misc_RNA (1)...(19): siRNA sense strand
gauggagaggagcacuuaa

SEQ ID NO: 1645166 - RNA, 19 nt, Homo sapiens
  misc_RNA (1)...(19): siRNA sense strand
ugaagguuguugaugaaaa

SEQ ID NO: 1645167 - RNA, 19 nt, Homo sapiens
  misc_RNA (1)...(19): siRNA sense strand
cgucuuuggccuugauuug

SEQ ID NO: 1645168 - RNA, 19 nt, Homo sapiens
  misc_RNA (1)...(19): siRNA sense strand
cugcagcugugucauguac

SEQ ID NO: 1645169 - RNA, 19 nt, Homo sapiens
  misc_RNA (1)...(19): siRNA sense strand
gacuucccaucccauuaug

SEQ ID NO: 1645170 - RNA, 19 nt, Homo sapiens
  misc_RNA (1)...(19): siRNA sense strand
gagagccuaugcugaaacc

SEQ ID NO: 1645171 - RNA, 19 nt, Homo sapiens
  misc_RNA (1)...(19): siRNA sense strand
gcaggugcccaacagugau

SEQ ID NO: 1645172 - RNA, 19 nt, Homo sapiens
  misc_RNA (1)...(19): siRNA sense strand
gaauguguugggagccuau

SEQ ID NO: 1645173 - RNA, 19 nt, Homo sapiens
  misc_RNA (1)...(19): siRNA sense strand
aagaggcuuugagagauga

SEQ ID NO: 1645174 - RNA, 19 nt, Homo sapiens
  misc_RNA (1)...(19): siRNA sense strand
aaaccucaccaaugaugga

SEQ ID NO: 1645175 - RNA, 19 nt, Homo sapiens
  misc_RNA (1)...(19): siRNA sense strand
gaagagaucuggaaauuca

SEQ ID NO: 1645176 - RNA, 19 nt, Homo sapiens
  misc_RNA (1)...(19): siRNA sense strand
caaguccgauccaguguua

SEQ ID NO: 1645177 - RNA, 19 nt, Homo sapiens
  misc_RNA (1)...(19): siRNA sense strand
gaagaggcuuugagagaug

SEQ ID NO: 1645178 - RNA, 19 nt, Homo sapiens
  misc_RNA (1)...(19): siRNA sense strand
gagaggagcacuuaaucua

SEQ ID NO: 1645179 - RNA, 19 nt, Homo sapiens
  misc_RNA (1)...(19): siRNA sense strand
gaggagcacuuaaucuaug

SEQ ID NO: 1645180 - RNA, 19 nt, Homo sapiens
  misc_RNA (1)...(19): siRNA sense strand
gaugaaaguccucgaguuu

SEQ ID NO: 1645181 - RNA, 19 nt, Homo sapiens
  misc_RNA (1)...(19): siRNA sense strand
ugagagagcccauuaugaa

SEQ ID NO: 1645182 - RNA, 19 nt, Homo sapiens
  misc_RNA (1)...(19): siRNA sense strand
gcacuacugccacgacuuu

SEQ ID NO: 1645183 - RNA, 19 nt, Homo sapiens
  misc_RNA (1)...(19): siRNA sense strand
guacaaggaucacuucacu

SEQ ID NO: 1645184 - RNA, 19 nt, Homo sapiens
  misc_RNA (1)...(19): siRNA sense strand
ggugugaucuucuuaaagg

SEQ ID NO: 1645185 - RNA, 19 nt, Homo sapiens
  misc_RNA (1)...(19): siRNA sense strand
gcugaagguuguugaugaa

SEQ ID NO: 1645186 - RNA, 19 nt, Homo sapiens
  misc_RNA (1)...(19): siRNA sense strand
aggaagagaucuggaaauu

SEQ ID NO: 1645187 - RNA, 19 nt, Homo sapiens
  misc_RNA (1)...(19): siRNA sense strand
ugacgaaggugccaaaugc

SEQ ID NO: 1645188 - RNA, 19 nt, Homo sapiens
  misc_RNA (1)...(19): siRNA sense strand
gauggaaaccugagcaaug

SEQ ID NO: 1645189 - RNA, 19 nt, Homo sapiens
  misc_RNA (1)...(19): siRNA sense strand
gcugaaaccaccaagauga

SEQ ID NO: 1645190 - RNA, 19 nt, Homo sapiens
  misc_RNA (1)...(19): siRNA sense strand
gcuccgugcucgugagaaa

SEQ ID NO: 1645191 - RNA, 19 nt, Homo sapiens
  misc_RNA (1)...(19): siRNA sense strand
guaaguucaucacccaaga

SEQ ID NO: 1645192 - RNA, 19 nt, Homo sapiens
  misc_RNA (1)...(19): siRNA sense strand
ccuacacccucgucaguaa

SEQ ID NO: 1645193 - RNA, 19 nt, Homo sapiens
  misc_RNA (1)...(19): siRNA sense strand
ggaaaccugagcaaugauu

SEQ ID NO: 1645194 - RNA, 19 nt, Homo sapiens
  misc_RNA (1)...(19): siRNA sense strand
gcuuggagcucgucuuugg

SEQ ID NO: 1645195 - RNA, 19 nt, Homo sapiens
  misc_RNA (1)...(19): siRNA sense strand
gcacuucauucuacguaag

SEQ ID NO: 1645196 - RNA, 19 nt, Homo sapiens
  misc_RNA (1)...(19): siRNA sense strand
ugaagaggcuuugagagau

SEQ ID NO: 1645197 - RNA, 19 nt, Homo sapiens
  misc_RNA (1)...(19): siRNA sense strand
aaggaucacuucacugaga

SEQ ID NO: 1645198 - RNA, 19 nt, Homo sapiens
  misc_RNA (1)...(19): siRNA sense strand
caggaaugcugaugcacuu

SEQ ID NO: 1645199 - RNA, 19 nt, Homo sapiens
  misc_RNA (1)...(19): siRNA sense strand
acaaggaucacuucacuga

SEQ ID NO: 1645200 - RNA, 19 nt, Homo sapiens
  misc_RNA (1)...(19): siRNA sense strand
cagauaugcugaagguugu

SEQ ID NO: 1645201 - RNA, 19 nt, Homo sapiens
  misc_RNA (1)...(19): siRNA sense strand
gaaggcagauaugcugaag

SEQ ID NO: 1645202 - RNA, 19 nt, Homo sapiens
  misc_RNA (1)...(19): siRNA sense strand
gaaggaagacaacccuagu

SEQ ID NO: 1645203 - RNA, 19 nt, Homo sapiens
  misc_RNA (1)...(19): siRNA sense strand
agcuaaaccucaccaauga

SEQ ID NO: 1645204 - RNA, 19 nt, Homo sapiens
  misc_RNA (1)...(19): siRNA sense strand
gccacaacauccacugaga

SEQ ID NO: 1645205 - RNA, 19 nt, Homo sapiens
  misc_RNA (1)...(19): siRNA sense strand
uaccgaaucugacgaaggu

SEQ ID NO: 1645206 - RNA, 19 nt, Homo sapiens
  misc_RNA (1)...(19): siRNA sense strand
gcugaugcacuucauucua

SEQ ID NO: 1645207 - RNA, 19 nt, Homo sapiens
  misc_RNA (1)...(19): siRNA sense strand
aagcuaaaccucaccaaug

SEQ ID NO: 1645208 - RNA, 19 nt, Homo sapiens
  misc_RNA (1)...(19): siRNA sense strand
agaugaaaguccucgaguu

SEQ ID NO: 1645209 - RNA, 19 nt, Homo sapiens
  misc_RNA (1)...(19): siRNA sense strand
caagaucuggugcaggaaa

SEQ ID NO: 1645210 - RNA, 19 nt, Homo sapiens
  misc_RNA (1)...(19): siRNA sense strand
ggaagagaucuggaaauuc

SEQ ID NO: 1645211 - RNA, 19 nt, Homo sapiens
  misc_RNA (1)...(19): siRNA sense strand
auggaaaccugagcaauga

SEQ ID NO: 1645212 - RNA, 19 nt, Homo sapiens
  misc_RNA (1)...(19): siRNA sense strand
caaaugccaaggugaggaa

SEQ ID NO: 1645213 - RNA, 19 nt, Homo sapiens
  misc_RNA (1)...(19): siRNA sense strand
ugacuucccaucccauuau

SEQ ID NO: 1645214 - RNA, 19 nt, Homo sapiens
  misc_RNA (1)...(19): siRNA sense strand
guugggagccuaugaugga

SEQ ID NO: 1645215 - RNA, 19 nt, Homo sapiens
  misc_RNA (1)...(19): siRNA sense strand
ggagaggagcacuuaaucu

SEQ ID NO: 1645216 - RNA, 19 nt, Homo sapiens
  misc_RNA (1)...(19): siRNA sense strand
ggaaugcugaugcacuuca

SEQ ID NO: 1645217 - RNA, 19 nt, Homo sapiens
  misc_RNA (1)...(19): siRNA sense strand
gaaaccaccaagaugaaag

SEQ ID NO: 1645218 - RNA, 19 nt, Homo sapiens
  misc_RNA (1)...(19): siRNA sense strand
gaaugcugaugcacuucau

SEQ ID NO: 1645219 - RNA, 19 nt, Homo sapiens
  misc_RNA (1)...(19): siRNA sense strand
ugauggagaggagcacuua

SEQ ID NO: 1645220 - RNA, 19 nt, Homo sapiens
  misc_RNA (1)...(19): siRNA sense strand
ugcugaagguuguugauga

SEQ ID NO: 1645221 - RNA, 19 nt, Homo sapiens
  misc_RNA (1)...(19): siRNA sense strand
aggcagauaugcugaaggu

SEQ ID NO: 1645222 - RNA, 19 nt, Homo sapiens
  misc_RNA (1)...(19): siRNA sense strand
gagagagcccauuaugaag

SEQ ID NO: 1645223 - RNA, 19 nt, Homo sapiens
  misc_RNA (1)...(19): siRNA sense strand
ugggugugaucuucuuaaa

SEQ ID NO: 1645224 - RNA, 19 nt, Homo sapiens
  misc_RNA (1)...(19): siRNA sense strand
gagagaugaggaagagaga

SEQ ID NO: 1645225 - RNA, 19 nt, Homo sapiens
  misc_RNA (1)...(19): siRNA sense strand
gaggaagagaucuggaaau

SEQ ID NO: 1645226 - RNA, 19 nt, Homo sapiens
  misc_RNA (1)...(19): siRNA sense strand
ugucauguaccgaaucuga

SEQ ID NO: 1645227 - RNA, 19 nt, Homo sapiens
  misc_RNA (1)...(19): siRNA sense strand
cgaggaagagaucuggaaa

SEQ ID NO: 1645228 - RNA, 19 nt, Homo sapiens
  misc_RNA (1)...(19): siRNA sense strand
gaagguuguugaugaaaag

SEQ ID NO: 1645229 - RNA, 19 nt, Homo sapiens
  misc_RNA (1)...(19): siRNA sense strand
cugaugcacuucauucuac

SEQ ID NO: 1645230 - RNA, 19 nt, Homo sapiens
  misc_RNA (1)...(19): siRNA sense strand
gcucgucuuuggccuugau

SEQ ID NO: 1645231 - RNA, 19 nt, Homo sapiens
  misc_RNA (1)...(19): siRNA sense strand
ggaagagagagcccaaguc

SEQ ID NO: 1645232 - RNA, 19 nt, Homo sapiens
  misc_RNA (1)...(19): siRNA sense strand
ucuuuggccuugauuugaa

SEQ ID NO: 1645233 - RNA, 19 nt, Homo sapiens
  misc_RNA (1)...(19): siRNA sense strand
cuaaaccucaccaaugaug

SEQ ID NO: 1645234 - RNA, 19 nt, Homo sapiens
  misc_RNA (1)...(19): siRNA sense strand
ccgagagccuaugcugaaa

SEQ ID NO: 1645235 - RNA, 19 nt, Homo sapiens
  misc_RNA (1)...(19): siRNA sense strand
caacucugccaccgaggaa

SEQ ID NO: 1645236 - RNA, 19 nt, Homo sapiens
  misc_RNA (1)...(19): siRNA sense strand
ugaaaccaccaagaugaaa

SEQ ID NO: 1645237 - RNA, 19 nt, Homo sapiens
  misc_RNA (1)...(19): siRNA sense strand
guucaucacccaagaucug

SEQ ID NO: 1645238 - RNA, 19 nt, Homo sapiens
  misc_RNA (1)...(19): siRNA sense strand
ccgcuuggagcucgucuuu

SEQ ID NO: 1645239 - RNA, 19 nt, Homo sapiens
  misc_RNA (1)...(19): siRNA sense strand
uaagcuaaaccucaccaau

SEQ ID NO: 1645240 - RNA, 19 nt, Homo sapiens
  misc_RNA (1)...(19): siRNA sense strand
augaagaggcuuugagaga

SEQ ID NO: 1645241 - RNA, 19 nt, Homo sapiens
  misc_RNA (1)...(19): siRNA sense strand
gugacuucccaucccauua

SEQ ID NO: 1645242 - RNA, 19 nt, Homo sapiens
  misc_RNA (1)...(19): siRNA sense strand
agaggagcacuuaaucuau

SEQ ID NO: 1645243 - RNA, 19 nt, Homo sapiens
  misc_RNA (1)...(19): siRNA sense strand
gagaucuggaaauucauga

SEQ ID NO: 1645244 - RNA, 19 nt, Homo sapiens
  misc_RNA (1)...(19): siRNA sense strand
gcugugucauguaccgaau

SEQ ID NO: 1645245 - RNA, 19 nt, Homo sapiens
  misc_RNA (1)...(19): siRNA sense strand
uccgagagccuaugcugaa

SEQ ID NO: 1645246 - RNA, 19 nt, Homo sapiens
  misc_RNA (1)...(19): siRNA sense strand
gauggagaggagcacuuaa

SEQ ID NO: 1645247 - RNA, 19 nt, Homo sapiens
  misc_RNA (1)...(19): siRNA sense strand
ugaagguuguugaugaaaa

SEQ ID NO: 1645248 - RNA, 19 nt, Homo sapiens
  misc_RNA (1)...(19): siRNA sense strand
cgucuuuggccuugauuug

SEQ ID NO: 1645249 - RNA, 19 nt, Homo sapiens
  misc_RNA (1)...(19): siRNA sense strand
cugcagcugugucauguac

SEQ ID NO: 1645250 - RNA, 19 nt, Homo sapiens
  misc_RNA (1)...(19): siRNA sense strand
gacuucccaucccauuaug

SEQ ID NO: 1645251 - RNA, 19 nt, Homo sapiens
  misc_RNA (1)...(19): siRNA sense strand
gagagccuaugcugaaacc

SEQ ID NO: 1645252 - RNA, 19 nt, Homo sapiens
  misc_RNA (1)...(19): siRNA sense strand
gcaggugcccaacagugau

SEQ ID NO: 1645253 - RNA, 19 nt, Homo sapiens
  misc_RNA (1)...(19): siRNA sense strand
gaauguguugggagccuau

SEQ ID NO: 1645254 - RNA, 19 nt, Homo sapiens
  misc_RNA (1)...(19): siRNA sense strand
aagaggcuuugagagauga

SEQ ID NO: 1645255 - RNA, 19 nt, Homo sapiens
  misc_RNA (1)...(19): siRNA sense strand
aaaccucaccaaugaugga

SEQ ID NO: 1645256 - RNA, 19 nt, Homo sapiens
  misc_RNA (1)...(19): siRNA sense strand
gaacagcccuuuaaauuca

SEQ ID NO: 1645257 - RNA, 19 nt, Homo sapiens
  misc_RNA (1)...(19): siRNA sense strand
agagauaugucuacaaguu

SEQ ID NO: 1645258 - RNA, 19 nt, Homo sapiens
  misc_RNA (1)...(19): siRNA sense strand
caacgaaggcuacguguau

SEQ ID NO: 1645259 - RNA, 19 nt, Homo sapiens
  misc_RNA (1)...(19): siRNA sense strand
ucuccaaacucaacucaua

SEQ ID NO: 1645260 - RNA, 19 nt, Homo sapiens
  misc_RNA (1)...(19): siRNA sense strand
ggccagcuaugaacuauga

SEQ ID NO: 1645261 - RNA, 19 nt, Homo sapiens
  misc_RNA (1)...(19): siRNA sense strand
gagaaauuguaacgagaaa

SEQ ID NO: 1645262 - RNA, 19 nt, Homo sapiens
  misc_RNA (1)...(19): siRNA sense strand
aagaacagcccuuuaaauu

SEQ ID NO: 1645263 - RNA, 19 nt, Homo sapiens
  misc_RNA (1)...(19): siRNA sense strand
aaagguggcuggagagaga

SEQ ID NO: 1645264 - RNA, 19 nt, Homo sapiens
  misc_RNA (1)...(19): siRNA sense strand
gagaaaggaauuaugcaaa

SEQ ID NO: 1645265 - RNA, 19 nt, Homo sapiens
  misc_RNA (1)...(19): siRNA sense strand
ugacaaugaugagcaguuu

SEQ ID NO: 1645266 - RNA, 19 nt, Homo sapiens
  misc_RNA (1)...(19): siRNA sense strand
gccguucacuccgcuauua

SEQ ID NO: 1645267 - RNA, 19 nt, Homo sapiens
  misc_RNA (1)...(19): siRNA sense strand
ggcauggaauuuaaacuga

SEQ ID NO: 1645268 - RNA, 19 nt, Homo sapiens
  misc_RNA (1)...(19): siRNA sense strand
cuaagucaauuacaggaaa

SEQ ID NO: 1645269 - RNA, 19 nt, Homo sapiens
  misc_RNA (1)...(19): siRNA sense strand
ggaaggacccacauaccaa

SEQ ID NO: 1645270 - RNA, 19 nt, Homo sapiens
  misc_RNA (1)...(19): siRNA sense strand
ggagagagauaugucuaca

SEQ ID NO: 1645271 - RNA, 19 nt, Homo sapiens
  misc_RNA (1)...(19): siRNA sense strand
ggucgaggcauggaauuua

SEQ ID NO: 1645272 - RNA, 19 nt, Homo sapiens
  misc_RNA (1)...(19): siRNA sense strand
ggaugacccuucaaauucu

SEQ ID NO: 1645273 - RNA, 19 nt, Homo sapiens
  misc_RNA (1)...(19): siRNA sense strand
ggaaacauggcuugcagaa

SEQ ID NO: 1645274 - RNA, 19 nt, Homo sapiens
  misc_RNA (1)...(19): siRNA sense strand
caagaacagcccuuuaaau

SEQ ID NO: 1645275 - RNA, 19 nt, Homo sapiens
  misc_RNA (1)...(19): siRNA sense strand
ggagaaauuguaacgagaa

SEQ ID NO: 1645276 - RNA, 19 nt, Homo sapiens
  misc_RNA (1)...(19): siRNA sense strand
gagauaugucuacaaguuu

SEQ ID NO: 1645277 - RNA, 19 nt, Homo sapiens
  misc_RNA (1)...(19): siRNA sense strand
guaacuccuuuccuccuuu

SEQ ID NO: 1645278 - RNA, 19 nt, Homo sapiens
  misc_RNA (1)...(19): siRNA sense strand
gaacuaugauaaacuuagc

SEQ ID NO: 1645279 - RNA, 19 nt, Homo sapiens
  misc_RNA (1)...(19): siRNA sense strand
gucaagaacagcccuuuaa

SEQ ID NO: 1645280 - RNA, 19 nt, Homo sapiens
  misc_RNA (1)...(19): siRNA sense strand
uccauggccuuuccagaua

SEQ ID NO: 1645281 - RNA, 19 nt, Homo sapiens
  misc_RNA (1)...(19): siRNA sense strand
agagagauaugucuacaag

SEQ ID NO: 1645282 - RNA, 19 nt, Homo sapiens
  misc_RNA (1)...(19): siRNA sense strand
aaacaggaacccagagauu

SEQ ID NO: 1645283 - RNA, 19 nt, Homo sapiens
  misc_RNA (1)...(19): siRNA sense strand
uaaauucagcuauggagaa

SEQ ID NO: 1645284 - RNA, 19 nt, Homo sapiens
  misc_RNA (1)...(19): siRNA sense strand
gcuaugaacuaugauaaac

SEQ ID NO: 1645285 - RNA, 19 nt, Homo sapiens
  misc_RNA (1)...(19): siRNA sense strand
gucgaggcauggaauuuaa

SEQ ID NO: 1645286 - RNA, 19 nt, Homo sapiens
  misc_RNA (1)...(19): siRNA sense strand
ccagagauuuugcauauga

SEQ ID NO: 1645287 - RNA, 19 nt, Homo sapiens
  misc_RNA (1)...(19): siRNA sense strand
gagaaaccaacaaauguca

SEQ ID NO: 1645288 - RNA, 19 nt, Homo sapiens
  misc_RNA (1)...(19): siRNA sense strand
gcauggaauuuaaacugau

SEQ ID NO: 1645289 - RNA, 19 nt, Homo sapiens
  misc_RNA (1)...(19): siRNA sense strand
caaacaagagccaggaaug

SEQ ID NO: 1645290 - RNA, 19 nt, Homo sapiens
  misc_RNA (1)...(19): siRNA sense strand
cacaguccauguucagaaa

SEQ ID NO: 1645291 - RNA, 19 nt, Homo sapiens
  misc_RNA (1)...(19): siRNA sense strand
aaauucagcuauggagaaa

SEQ ID NO: 1645292 - RNA, 19 nt, Homo sapiens
  misc_RNA (1)...(19): siRNA sense strand
ucacuccgcuauuacuaug

SEQ ID NO: 1645293 - RNA, 19 nt, Homo sapiens
  misc_RNA (1)...(19): siRNA sense strand
ucaagaacagcccuuuaaa

SEQ ID NO: 1645294 - RNA, 19 nt, Homo sapiens
  misc_RNA (1)...(19): siRNA sense strand
guaacgagaaaccaacaaa

SEQ ID NO: 1645295 - RNA, 19 nt, Homo sapiens
  misc_RNA (1)...(19): siRNA sense strand
ucaugcaucuccaaacuca

SEQ ID NO: 1645296 - RNA, 19 nt, Homo sapiens
  misc_RNA (1)...(19): siRNA sense strand
caucaugcaucuccaaacu

SEQ ID NO: 1645297 - RNA, 19 nt, Homo sapiens
  misc_RNA (1)...(19): siRNA sense strand
gaagagguggcccgacguu

SEQ ID NO: 1645298 - RNA, 19 nt, Homo sapiens
  misc_RNA (1)...(19): siRNA sense strand
ccauggccuuuccagauaa

SEQ ID NO: 1645299 - RNA, 19 nt, Homo sapiens
  misc_RNA (1)...(19): siRNA sense strand
agauaugucuacaaguuug

SEQ ID NO: 1645300 - RNA, 19 nt, Homo sapiens
  misc_RNA (1)...(19): siRNA sense strand
uggaugacccuucaaauuc

SEQ ID NO: 1645301 - RNA, 19 nt, Homo sapiens
  misc_RNA (1)...(19): siRNA sense strand
uaacuccuuuccuccuuug

SEQ ID NO: 1645302 - RNA, 19 nt, Homo sapiens
  misc_RNA (1)...(19): siRNA sense strand
ccauuuauaugaggcaaga

SEQ ID NO: 1645303 - RNA, 19 nt, Homo sapiens
  misc_RNA (1)...(19): siRNA sense strand
guaccacgacccaguguau

SEQ ID NO: 1645304 - RNA, 19 nt, Homo sapiens
  misc_RNA (1)...(19): siRNA sense strand
caacaaaugucaggaaaag

SEQ ID NO: 1645305 - RNA, 19 nt, Homo sapiens
  misc_RNA (1)...(19): siRNA sense strand
ugguagcucuucuggauga

SEQ ID NO: 1645306 - RNA, 19 nt, Homo sapiens
  misc_RNA (1)...(19): siRNA sense strand
caacggcgaggaucacuuc

SEQ ID NO: 1645307 - RNA, 19 nt, Homo sapiens
  misc_RNA (1)...(19): siRNA sense strand
acacagugccucuuucuca

SEQ ID NO: 1645308 - RNA, 19 nt, Homo sapiens
  misc_RNA (1)...(19): siRNA sense strand
cgaaggcuacguguauuaa

SEQ ID NO: 1645309 - RNA, 19 nt, Homo sapiens
  misc_RNA (1)...(19): siRNA sense strand
caaugucagugccuaugau

SEQ ID NO: 1645310 - RNA, 19 nt, Homo sapiens
  misc_RNA (1)...(19): siRNA sense strand
cagcuaugaacuaugauaa

SEQ ID NO: 1645311 - RNA, 19 nt, Homo sapiens
  misc_RNA (1)...(19): siRNA sense strand
agaacagcccuuuaaauuc

SEQ ID NO: 1645312 - RNA, 19 nt, Homo sapiens
  misc_RNA (1)...(19): siRNA sense strand
gcugaagacagacauggaa

SEQ ID NO: 1645313 - RNA, 19 nt, Homo sapiens
  misc_RNA (1)...(19): siRNA sense strand
cagcgugggagaaauugua

SEQ ID NO: 1645314 - RNA, 19 nt, Homo sapiens
  misc_RNA (1)...(19): siRNA sense strand
ccacaguccauguucagaa

SEQ ID NO: 1645315 - RNA, 19 nt, Homo sapiens
  misc_RNA (1)...(19): siRNA sense strand
ggacacagugccucuuucu

SEQ ID NO: 1645316 - RNA, 19 nt, Homo sapiens
  misc_RNA (1)...(19): siRNA sense strand
guccacugcugaagacaga

SEQ ID NO: 1645317 - RNA, 19 nt, Homo sapiens
  misc_RNA (1)...(19): siRNA sense strand
agaucuggcucaugauuca

SEQ ID NO: 1645318 - RNA, 19 nt, Homo sapiens
  misc_RNA (1)...(19): siRNA sense strand
uuugguagcucuucuggau

SEQ ID NO: 1645319 - RNA, 19 nt, Homo sapiens
  misc_RNA (1)...(19): siRNA sense strand
uaacgagaaaccaacaaau

SEQ ID NO: 1645320 - RNA, 19 nt, Homo sapiens
  misc_RNA (1)...(19): siRNA sense strand
caagaucuaagucaauuac

SEQ ID NO: 1645321 - RNA, 19 nt, Homo sapiens
  misc_RNA (1)...(19): siRNA sense strand
cuggaugacccuucaaauu

SEQ ID NO: 1645322 - RNA, 19 nt, Homo sapiens
  misc_RNA (1)...(19): siRNA sense strand
gaaggcuguauguuugaaa

SEQ ID NO: 1645323 - RNA, 19 nt, Homo sapiens
  misc_RNA (1)...(19): siRNA sense strand
cuagcugccacuccauuua

SEQ ID NO: 1645324 - RNA, 19 nt, Homo sapiens
  misc_RNA (1)...(19): siRNA sense strand
ugagaaaggaauuaugcaa

SEQ ID NO: 1645325 - RNA, 19 nt, Homo sapiens
  misc_RNA (1)...(19): siRNA sense strand
ccagcuaugaacuaugaua

SEQ ID NO: 1645326 - RNA, 19 nt, Homo sapiens
  misc_RNA (1)...(19): siRNA sense strand
aaacaagagccaggaaugu

SEQ ID NO: 1645327 - RNA, 19 nt, Homo sapiens
  misc_RNA (1)...(19): siRNA sense strand
gggaaggacccacauacca

SEQ ID NO: 1645328 - RNA, 19 nt, Homo sapiens
  misc_RNA (1)...(19): siRNA sense strand
acaagagccaggaauguau

SEQ ID NO: 1645329 - RNA, 19 nt, Homo sapiens
  misc_RNA (1)...(19): siRNA sense strand
auggagacaucaaacaaga

SEQ ID NO: 1645330 - RNA, 19 nt, Homo sapiens
  misc_RNA (1)...(19): siRNA sense strand
gaugagagcauggccuaca

SEQ ID NO: 1645331 - RNA, 19 nt, Homo sapiens
  misc_RNA (1)...(19): siRNA sense strand
cauggaacgucacaucaac

SEQ ID NO: 1645332 - RNA, 19 nt, Homo sapiens
  misc_RNA (1)...(19): siRNA sense strand
gacauggaacgucacauca

SEQ ID NO: 1645333 - RNA, 19 nt, Homo sapiens
  misc_RNA (1)...(19): siRNA sense strand
gaaauuguaacgagaaacc

SEQ ID NO: 1645334 - RNA, 19 nt, Homo sapiens
  misc_RNA (1)...(19): siRNA sense strand
gaaaggaauuaugcaaaag

SEQ ID NO: 1645335 - RNA, 19 nt, Homo sapiens
  misc_RNA (1)...(19): siRNA sense strand
aacaagagccaggaaugua

SEQ ID NO: 1645336 - RNA, 19 nt, Homo sapiens
  misc_RNA (1)...(19): siRNA sense strand
accaacaaaugucaggaaa

SEQ ID NO: 1645337 - RNA, 19 nt, Homo sapiens
  misc_RNA (1)...(19): siRNA sense strand
gagagagauaugucuacaa

SEQ ID NO: 1645338 - RNA, 19 nt, Homo sapiens
  misc_RNA (1)...(19): siRNA sense strand
ugaacccuguaacuccuuu

SEQ ID NO: 1645339 - RNA, 19 nt, Homo sapiens
  misc_RNA (1)...(19): siRNA sense strand
acgaaggcuacguguauua

SEQ ID NO: 1645340 - RNA, 19 nt, Homo sapiens
  misc_RNA (1)...(19): siRNA sense strand
gcaguuuguaccagacuau

SEQ ID NO: 1645341 - RNA, 19 nt, Homo sapiens
  misc_RNA (1)...(19): siRNA sense strand
gagaucuggcucaugauuc

SEQ ID NO: 1645342 - RNA, 19 nt, Homo sapiens
  misc_RNA (1)...(19): siRNA sense strand
ccaggcaguuuuaugauga

SEQ ID NO: 1645343 - RNA, 19 nt, Homo sapiens
  misc_RNA (1)...(19): siRNA sense strand
cagaaggcuguauguuuga

SEQ ID NO: 1645344 - RNA, 19 nt, Homo sapiens
  misc_RNA (1)...(19): siRNA sense strand
gaagacagacauggaacgu

SEQ ID NO: 1645345 - RNA, 19 nt, Homo sapiens
  misc_RNA (1)...(19): siRNA sense strand
guuugugugugauccagaa

SEQ ID NO: 1645346 - RNA, 19 nt, Homo sapiens
  misc_RNA (1)...(19): siRNA sense strand
ugauaaacuuagccguuca

SEQ ID NO: 1645347 - RNA, 19 nt, Homo sapiens
  misc_RNA (1)...(19): siRNA sense strand
cgagaaaccaacaaauguc

SEQ ID NO: 1645348 - RNA, 19 nt, Homo sapiens
  misc_RNA (1)...(19): siRNA sense strand
guacaaugucagugccuau

SEQ ID NO: 1645349 - RNA, 19 nt, Homo sapiens
  misc_RNA (1)...(19): siRNA sense strand
caggccagcuaugaacuau

SEQ ID NO: 1645350 - RNA, 19 nt, Homo sapiens
  misc_RNA (1)...(19): siRNA sense strand
aacaggaacccagagauuu

SEQ ID NO: 1645351 - RNA, 19 nt, Homo sapiens
  misc_RNA (1)...(19): siRNA sense strand
ucgcaguccauaccagaua

SEQ ID NO: 1645352 - RNA, 19 nt, Homo sapiens
  misc_RNA (1)...(19): siRNA sense strand
aacgagaaaccaacaaaug

SEQ ID NO: 1645353 - RNA, 19 nt, Homo sapiens
  misc_RNA (1)...(19): siRNA sense strand
acgagaaaccaacaaaugu

SEQ ID NO: 1645354 - RNA, 19 nt, Homo sapiens
  misc_RNA (1)...(19): siRNA sense strand
guucacuccgcuauuacua

SEQ ID NO: 1645355 - RNA, 19 nt, Homo sapiens
  misc_RNA (1)...(19): siRNA sense strand
agacauggaacgucacauc

SEQ ID NO: 1645356 - RNA, 19 nt, Homo sapiens
  misc_RNA (1)...(19): siRNA sense strand
ggacggagcugccauugcu

SEQ ID NO: 1645357 - RNA, 19 nt, Homo sapiens
  misc_RNA (1)...(19): siRNA sense strand
gagcugccauugcugcuuu

SEQ ID NO: 1645358 - RNA, 19 nt, Homo sapiens
  misc_RNA (1)...(19): siRNA sense strand
cauccugguuuccaucuuu

SEQ ID NO: 1645359 - RNA, 19 nt, Homo sapiens
  misc_RNA (1)...(19): siRNA sense strand
cuacuggaguucuucauca

SEQ ID NO: 1645360 - RNA, 19 nt, Homo sapiens
  misc_RNA (1)...(19): siRNA sense strand
uaugaugccuucaagaucu

SEQ ID NO: 1645361 - RNA, 19 nt, Homo sapiens
  misc_RNA (1)...(19): siRNA sense strand
ucagugccaucaucaucuu

SEQ ID NO: 1645362 - RNA, 19 nt, Homo sapiens
  misc_RNA (1)...(19): siRNA sense strand
cuccaucucugccuacaug

SEQ ID NO: 1645363 - RNA, 19 nt, Homo sapiens
  misc_RNA (1)...(19): siRNA sense strand
ccuaugaugccuucaagau

SEQ ID NO: 1645364 - RNA, 19 nt, Homo sapiens
  misc_RNA (1)...(19): siRNA sense strand
gcccugacccucaucaucu

SEQ ID NO: 1645365 - RNA, 19 nt, Homo sapiens
  misc_RNA (1)...(19): siRNA sense strand
gcaucauccugguuuccau

SEQ ID NO: 1645366 - RNA, 19 nt, Homo sapiens
  misc_RNA (1)...(19): siRNA sense strand
gaauuaacuggcccugucu

SEQ ID NO: 1645367 - RNA, 19 nt, Homo sapiens
  misc_RNA (1)...(19): siRNA sense strand
ucuaugccacccaguacua

SEQ ID NO: 1645368 - RNA, 19 nt, Homo sapiens
  misc_RNA (1)...(19): siRNA sense strand
ggaguucuucaucacacuu

SEQ ID NO: 1645369 - RNA, 19 nt, Homo sapiens
  misc_RNA (1)...(19): siRNA sense strand
ggacggagcugccauugcu

SEQ ID NO: 1645370 - RNA, 19 nt, Homo sapiens
  misc_RNA (1)...(19): siRNA sense strand
gagcugccauugcugcuuu

SEQ ID NO: 1645371 - RNA, 19 nt, Homo sapiens
  misc_RNA (1)...(19): siRNA sense strand
cauccugguuuccaucuuu

SEQ ID NO: 1645372 - RNA, 19 nt, Homo sapiens
  misc_RNA (1)...(19): siRNA sense strand
cuacuggaguucuucauca

SEQ ID NO: 1645373 - RNA, 19 nt, Homo sapiens
  misc_RNA (1)...(19): siRNA sense strand
uaugaugccuucaagaucu

SEQ ID NO: 1645374 - RNA, 19 nt, Homo sapiens
  misc_RNA (1)...(19): siRNA sense strand
ucagugccaucaucaucuu

SEQ ID NO: 1645375 - RNA, 19 nt, Homo sapiens
  misc_RNA (1)...(19): siRNA sense strand
cuccaucucugccuacaug

SEQ ID NO: 1645376 - RNA, 19 nt, Homo sapiens
  misc_RNA (1)...(19): siRNA sense strand
ccuaugaugccuucaagau

SEQ ID NO: 1645377 - RNA, 19 nt, Homo sapiens
  misc_RNA (1)...(19): siRNA sense strand
gcccugacccucaucaucu

SEQ ID NO: 1645378 - RNA, 19 nt, Homo sapiens
  misc_RNA (1)...(19): siRNA sense strand
gcaucauccugguuuccau

SEQ ID NO: 1645379 - RNA, 19 nt, Homo sapiens
  misc_RNA (1)...(19): siRNA sense strand
gaauuaacuggcccugucu

SEQ ID NO: 1645380 - RNA, 19 nt, Homo sapiens
  misc_RNA (1)...(19): siRNA sense strand
ucuaugccacccaguacua

SEQ ID NO: 1645381 - RNA, 19 nt, Homo sapiens
  misc_RNA (1)...(19): siRNA sense strand
ggaguucuucaucacacuu

SEQ ID NO: 1645382 - RNA, 19 nt, Homo sapiens
  misc_RNA (1)...(19): siRNA sense strand
gaaauugagcgcuuugaga

SEQ ID NO: 1645383 - RNA, 19 nt, Homo sapiens
  misc_RNA (1)...(19): siRNA sense strand
gcgagaacgugaaggcauu

SEQ ID NO: 1645384 - RNA, 19 nt, Homo sapiens
  misc_RNA (1)...(19): siRNA sense strand
gguccucccugacaccuuu

SEQ ID NO: 1645385 - RNA, 19 nt, Homo sapiens
  misc_RNA (1)...(19): siRNA sense strand
ggguggacuuugaaauuga

SEQ ID NO: 1645386 - RNA, 19 nt, Homo sapiens
  misc_RNA (1)...(19): siRNA sense strand
caucgcaucugccuacuac

SEQ ID NO: 1645387 - RNA, 19 nt, Homo sapiens
  misc_RNA (1)...(19): siRNA sense strand
gugcagacccuggagcaua

SEQ ID NO: 1645388 - RNA, 19 nt, Homo sapiens
  misc_RNA (1)...(19): siRNA sense strand
gcuggacuguggaagaaug

SEQ ID NO: 1645389 - RNA, 19 nt, Homo sapiens
  misc_RNA (1)...(19): siRNA sense strand
cagcugggcaggagaaguu

SEQ ID NO: 1645390 - RNA, 19 nt, Homo sapiens
  misc_RNA (1)...(19): siRNA sense strand
gggagaugcaggccgagua

SEQ ID NO: 1645391 - RNA, 19 nt, Homo sapiens
  misc_RNA (1)...(19): siRNA sense strand
ucgcuggacuguggaagaa

SEQ ID NO: 1645392 - RNA, 19 nt, Homo sapiens
  misc_RNA (1)...(19): siRNA sense strand
ccuauagccuccagaucug

SEQ ID NO: 1645393 - RNA, 19 nt, Homo sapiens
  misc_RNA (1)...(19): siRNA sense strand
aaauugagcgcuuugagau

SEQ ID NO: 1645394 - RNA, 19 nt, Homo sapiens
  misc_RNA (1)...(19): siRNA sense strand
ggcaggagaaguucaagug

SEQ ID NO: 1645395 - RNA, 19 nt, Homo sapiens
  misc_RNA (1)...(19): siRNA sense strand
auugagcgcuuugagauug

SEQ ID NO: 1645396 - RNA, 19 nt, Homo sapiens
  misc_RNA (1)...(19): siRNA sense strand
ggagaccuaauccaaaugg

SEQ ID NO: 1645397 - RNA, 19 nt, Homo sapiens
  misc_RNA (1)...(19): siRNA sense strand
ccagcuucccuaaguggua

SEQ ID NO: 1645398 - RNA, 19 nt, Homo sapiens
  misc_RNA (1)...(19): siRNA sense strand
gaucaucacggccuuugac

SEQ ID NO: 1645399 - RNA, 19 nt, Homo sapiens
  misc_RNA (1)...(19): siRNA sense strand
gggguggacuuugaaauug

SEQ ID NO: 1645400 - RNA, 19 nt, Homo sapiens
  misc_RNA (1)...(19): siRNA sense strand
ggagaugcaggccgaguac

SEQ ID NO: 1645401 - RNA, 19 nt, Homo sapiens
  misc_RNA (1)...(19): siRNA sense strand
ccacagguuuugcaagaau

SEQ ID NO: 1645402 - RNA, 19 nt, Homo sapiens
  misc_RNA (1)...(19): siRNA sense strand
ggcucaaacucuccaaggu

SEQ ID NO: 1645403 - RNA, 19 nt, Homo sapiens
  misc_RNA (1)...(19): siRNA sense strand
gguggacuuugaaauugag

SEQ ID NO: 1645404 - RNA, 19 nt, Homo sapiens
  misc_RNA (1)...(19): siRNA sense strand
gcaucgcaucugccuacua

SEQ ID NO: 1645405 - RNA, 19 nt, Homo sapiens
  misc_RNA (1)...(19): siRNA sense strand
ccauugggguggacuuuga

SEQ ID NO: 1645406 - RNA, 19 nt, Homo sapiens
  misc_RNA (1)...(19): siRNA sense strand
aggagaaguucaagugcau

SEQ ID NO: 1645407 - RNA, 19 nt, Homo sapiens
  misc_RNA (1)...(19): siRNA sense strand
aggaugcucugagggagaa

SEQ ID NO: 1645408 - RNA, 19 nt, Homo sapiens
  misc_RNA (1)...(19): siRNA sense strand
gaaauggcaucaaauggua

SEQ ID NO: 1645409 - RNA, 19 nt, Homo sapiens
  misc_RNA (1)...(19): siRNA sense strand
gcucauagccuuugacaga

SEQ ID NO: 1645410 - RNA, 19 nt, Homo sapiens
  misc_RNA (1)...(19): siRNA sense strand
caaauacgaucuugagcaa

SEQ ID NO: 1645411 - RNA, 19 nt, Homo sapiens
  misc_RNA (1)...(19): siRNA sense strand
ggcaucaaaugguaaauaa

SEQ ID NO: 1645412 - RNA, 19 nt, Homo sapiens
  misc_RNA (1)...(19): siRNA sense strand
gggcugaaauggcaucaaa

SEQ ID NO: 1645413 - RNA, 19 nt, Homo sapiens
  misc_RNA (1)...(19): siRNA sense strand
guauggaucccuuaauaua

SEQ ID NO: 1645414 - RNA, 19 nt, Homo sapiens
  misc_RNA (1)...(19): siRNA sense strand
gcaacaccaucgucuguga

SEQ ID NO: 1645415 - RNA, 19 nt, Homo sapiens
  misc_RNA (1)...(19): siRNA sense strand
caauaagacugacuguaga

SEQ ID NO: 1645416 - RNA, 19 nt, Homo sapiens
  misc_RNA (1)...(19): siRNA sense strand
ugucguggcugucuucuuu

SEQ ID NO: 1645417 - RNA, 19 nt, Homo sapiens
  misc_RNA (1)...(19): siRNA sense strand
caucagaccuuugagaaau

SEQ ID NO: 1645418 - RNA, 19 nt, Homo sapiens
  misc_RNA (1)...(19): siRNA sense strand
caacuaacauuuguaugga

SEQ ID NO: 1645419 - RNA, 19 nt, Homo sapiens
  misc_RNA (1)...(19): siRNA sense strand
cagagacacucggauagua

SEQ ID NO: 1645420 - RNA, 19 nt, Homo sapiens
  misc_RNA (1)...(19): siRNA sense strand
gcauccugcugaauacuuu

SEQ ID NO: 1645421 - RNA, 19 nt, Homo sapiens
  misc_RNA (1)...(19): siRNA sense strand
gcaacuaacauuuguaugg

SEQ ID NO: 1645422 - RNA, 19 nt, Homo sapiens
  misc_RNA (1)...(19): siRNA sense strand
gcuggaaggcaaaguauuu

SEQ ID NO: 1645423 - RNA, 19 nt, Homo sapiens
  misc_RNA (1)...(19): siRNA sense strand
aaagugugcuuccuuaaag

SEQ ID NO: 1645424 - RNA, 19 nt, Homo sapiens
  misc_RNA (1)...(19): siRNA sense strand
cagaaaagcuaccauguau

SEQ ID NO: 1645425 - RNA, 19 nt, Homo sapiens
  misc_RNA (1)...(19): siRNA sense strand
uuguauggaucccuuaaua

SEQ ID NO: 1645426 - RNA, 19 nt, Homo sapiens
  misc_RNA (1)...(19): siRNA sense strand
gagaaagaccacagcauca

SEQ ID NO: 1645427 - RNA, 19 nt, Homo sapiens
  misc_RNA (1)...(19): siRNA sense strand
acaauaagacugacuguag

SEQ ID NO: 1645428 - RNA, 19 nt, Homo sapiens
  misc_RNA (1)...(19): siRNA sense strand
gacagacaacauaaccuua

SEQ ID NO: 1645429 - RNA, 19 nt, Homo sapiens
  misc_RNA (1)...(19): siRNA sense strand
ugacacucaugcuuccuuu

SEQ ID NO: 1645430 - RNA, 19 nt, Homo sapiens
  misc_RNA (1)...(19): siRNA sense strand
acagucaaaccaacaauaa

SEQ ID NO: 1645431 - RNA, 19 nt, Homo sapiens
  misc_RNA (1)...(19): siRNA sense strand
gcugaaauggcaucaaaug

SEQ ID NO: 1645432 - RNA, 19 nt, Homo sapiens
  misc_RNA (1)...(19): siRNA sense strand
gaucaucagaccuuugaga

SEQ ID NO: 1645433 - RNA, 19 nt, Homo sapiens
  misc_RNA (1)...(19): siRNA sense strand
gaugcaaggcuucaacaga

SEQ ID NO: 1645434 - RNA, 19 nt, Homo sapiens
  misc_RNA (1)...(19): siRNA sense strand
ggcagcaacuaacauuugu

SEQ ID NO: 1645435 - RNA, 19 nt, Homo sapiens
  misc_RNA (1)...(19): siRNA sense strand
ucauagccuuugacagauu

SEQ ID NO: 1645436 - RNA, 19 nt, Homo sapiens
  misc_RNA (1)...(19): siRNA sense strand
aauacgaucuugagcaaca

SEQ ID NO: 1645437 - RNA, 19 nt, Homo sapiens
  misc_RNA (1)...(19): siRNA sense strand
gaacaccacagugaugcaa

SEQ ID NO: 1645438 - RNA, 19 nt, Homo sapiens
  misc_RNA (1)...(19): siRNA sense strand
gaaagaccacagcaucaag

SEQ ID NO: 1645439 - RNA, 19 nt, Homo sapiens
  misc_RNA (1)...(19): siRNA sense strand
aaaccaacaauaagacuga

SEQ ID NO: 1645440 - RNA, 19 nt, Homo sapiens
  misc_RNA (1)...(19): siRNA sense strand
guggccgacuugauaauga

SEQ ID NO: 1645441 - RNA, 19 nt, Homo sapiens
  misc_RNA (1)...(19): siRNA sense strand
gauaguacagcugguauuc

SEQ ID NO: 1645442 - RNA, 19 nt, Homo sapiens
  misc_RNA (1)...(19): siRNA sense strand
ugaaauggcaucaaauggu

SEQ ID NO: 1645443 - RNA, 19 nt, Homo sapiens
  misc_RNA (1)...(19): siRNA sense strand
cagcaacuaacauuuguau

SEQ ID NO: 1645444 - RNA, 19 nt, Homo sapiens
  misc_RNA (1)...(19): siRNA sense strand
acucaugcuuccuuucaaa

SEQ ID NO: 1645445 - RNA, 19 nt, Homo sapiens
  misc_RNA (1)...(19): siRNA sense strand
ucaagaucaucagaccuuu

SEQ ID NO: 1645446 - RNA, 19 nt, Homo sapiens
  misc_RNA (1)...(19): siRNA sense strand
ugacagauuccucaagauc

SEQ ID NO: 1645447 - RNA, 19 nt, Homo sapiens
  misc_RNA (1)...(19): siRNA sense strand
augcaaggcuucaacagau

SEQ ID NO: 1645448 - RNA, 19 nt, Homo sapiens
  misc_RNA (1)...(19): siRNA sense strand
ucagaccuuugagaaauau

SEQ ID NO: 1645449 - RNA, 19 nt, Homo sapiens
  misc_RNA (1)...(19): siRNA sense strand
ggauaguacagcugguauu

SEQ ID NO: 1645450 - RNA, 19 nt, Homo sapiens
  misc_RNA (1)...(19): siRNA sense strand
aaagcuggaaggcaaagua

SEQ ID NO: 1645451 - RNA, 19 nt, Homo sapiens
  misc_RNA (1)...(19): siRNA sense strand
gagcaacaaggaagcaaca

SEQ ID NO: 1645452 - RNA, 19 nt, Homo sapiens
  misc_RNA (1)...(19): siRNA sense strand
gacagauuccucaagauca

SEQ ID NO: 1645453 - RNA, 19 nt, Homo sapiens
  misc_RNA (1)...(19): siRNA sense strand
uuuaugagaccauguaugu

SEQ ID NO: 1645454 - RNA, 19 nt, Homo sapiens
  misc_RNA (1)...(19): siRNA sense strand
agacagacaacauaaccuu

SEQ ID NO: 1645455 - RNA, 19 nt, Homo sapiens
  misc_RNA (1)...(19): siRNA sense strand
gcagucagacagacaacau

SEQ ID NO: 1645456 - RNA, 19 nt, Homo sapiens
  misc_RNA (1)...(19): siRNA sense strand
gcagcaacuaacauuugua

SEQ ID NO: 1645457 - RNA, 19 nt, Homo sapiens
  misc_RNA (1)...(19): siRNA sense strand
agucaaaccaacaauaaga

SEQ ID NO: 1645458 - RNA, 19 nt, Homo sapiens
  misc_RNA (1)...(19): siRNA sense strand
guggcugucuucuuugugu

SEQ ID NO: 1645459 - RNA, 19 nt, Homo sapiens
  misc_RNA (1)...(19): siRNA sense strand
ccauauacucacagucaaa

SEQ ID NO: 1645460 - RNA, 19 nt, Homo sapiens
  misc_RNA (1)...(19): siRNA sense strand
gaaaagcuaccauguaugc

SEQ ID NO: 1645461 - RNA, 19 nt, Homo sapiens
  misc_RNA (1)...(19): siRNA sense strand
cacagucaaaccaacaaua

SEQ ID NO: 1645462 - RNA, 19 nt, Homo sapiens
  misc_RNA (1)...(19): siRNA sense strand
acacuuugguggccgacuu

SEQ ID NO: 1645463 - RNA, 19 nt, Homo sapiens
  misc_RNA (1)...(19): siRNA sense strand
acagauuccucaagaucau

SEQ ID NO: 1645464 - RNA, 19 nt, Homo sapiens
  misc_RNA (1)...(19): siRNA sense strand
cauagccuuugacagauuc

SEQ ID NO: 1645465 - RNA, 19 nt, Homo sapiens
  misc_RNA (1)...(19): siRNA sense strand
uuugguggccgacuugaua

SEQ ID NO: 1645466 - RNA, 19 nt, Homo sapiens
  misc_RNA (1)...(19): siRNA sense strand
caagaucaucagaccuuug

SEQ ID NO: 1645467 - RNA, 19 nt, Homo sapiens
  misc_RNA (1)...(19): siRNA sense strand
uggcagcaacuaacauuug

SEQ ID NO: 1645468 - RNA, 19 nt, Homo sapiens
  misc_RNA (1)...(19): siRNA sense strand
uggcaucaaaugguaaaua

SEQ ID NO: 1645469 - RNA, 19 nt, Homo sapiens
  misc_RNA (1)...(19): siRNA sense strand
aagaucaucagaccuuuga

SEQ ID NO: 1645470 - RNA, 19 nt, Homo sapiens
  misc_RNA (1)...(19): siRNA sense strand
ucaucucccugccaaauac

SEQ ID NO: 1645471 - RNA, 19 nt, Homo sapiens
  misc_RNA (1)...(19): siRNA sense strand
caacaccaucgucugugaa

SEQ ID NO: 1645472 - RNA, 19 nt, Homo sapiens
  misc_RNA (1)...(19): siRNA sense strand
aucagaccuuugagaaaua

SEQ ID NO: 1645473 - RNA, 19 nt, Homo sapiens
  misc_RNA (1)...(19): siRNA sense strand
gaaaaucauagcagucaga

SEQ ID NO: 1645474 - RNA, 19 nt, Homo sapiens
  misc_RNA (1)...(19): siRNA sense strand
gcuaaagaaacaacucucu

SEQ ID NO: 1645475 - RNA, 19 nt, Homo sapiens
  misc_RNA (1)...(19): siRNA sense strand
ugaccggcauccugcugaa

SEQ ID NO: 1645476 - RNA, 19 nt, Homo sapiens
  misc_RNA (1)...(19): siRNA sense strand
ucaucagaccuuugagaaa

SEQ ID NO: 1645477 - RNA, 19 nt, Homo sapiens
  misc_RNA (1)...(19): siRNA sense strand
agucagacagacaacauaa

SEQ ID NO: 1645478 - RNA, 19 nt, Homo sapiens
  misc_RNA (1)...(19): siRNA sense strand
agaaagaccacagcaucaa

SEQ ID NO: 1645479 - RNA, 19 nt, Homo sapiens
  misc_RNA (1)...(19): siRNA sense strand
aaagcuaccauguaugcaa

SEQ ID NO: 1645480 - RNA, 19 nt, Homo sapiens
  misc_RNA (1)...(19): siRNA sense strand
caacaauaagacugacugu

SEQ ID NO: 1645481 - RNA, 19 nt, Homo sapiens
  misc_RNA (1)...(19): siRNA sense strand
acacucaugcuuccuuuca

SEQ ID NO: 1645482 - RNA, 19 nt, Homo sapiens
  misc_RNA (1)...(19): siRNA sense strand
auggaucccuuaauauaca

SEQ ID NO: 1645483 - RNA, 19 nt, Homo sapiens
  misc_RNA (1)...(19): siRNA sense strand
uauccuaaugcuuguguuu

SEQ ID NO: 1645484 - RNA, 19 nt, Homo sapiens
  misc_RNA (1)...(19): siRNA sense strand
ucucaaucuucaucugguu

SEQ ID NO: 1645485 - RNA, 19 nt, Homo sapiens
  misc_RNA (1)...(19): siRNA sense strand
ucccagcccucuacacagu

SEQ ID NO: 1645486 - RNA, 19 nt, Homo sapiens
  misc_RNA (1)...(19): siRNA sense strand
ccuccaccuucaucaucua

SEQ ID NO: 1645487 - RNA, 19 nt, Homo sapiens
  misc_RNA (1)...(19): siRNA sense strand
cagacaacauaaccuuagg

SEQ ID NO: 1645488 - RNA, 19 nt, Homo sapiens
  misc_RNA (1)...(19): siRNA sense strand
acagacaacauaaccuuag

SEQ ID NO: 1645489 - RNA, 19 nt, Homo sapiens
  misc_RNA (1)...(19): siRNA sense strand
ugccagaguuccauauacu

SEQ ID NO: 1645490 - RNA, 19 nt, Homo sapiens
  misc_RNA (1)...(19): siRNA sense strand
cugaauacuuuggcucugu

SEQ ID NO: 1645491 - RNA, 19 nt, Homo sapiens
  misc_RNA (1)...(19): siRNA sense strand
uccuaaugcuuguguuuua

SEQ ID NO: 1645492 - RNA, 19 nt, Homo sapiens
  misc_RNA (1)...(19): siRNA sense strand
cagucagacagacaacaua

SEQ ID NO: 1645493 - RNA, 19 nt, Homo sapiens
  misc_RNA (1)...(19): siRNA sense strand
uguauggaucccuuaauau

SEQ ID NO: 1645494 - RNA, 19 nt, Homo sapiens
  misc_RNA (1)...(19): siRNA sense strand
gcaaggcuucaacagaucu

SEQ ID NO: 1645495 - RNA, 19 nt, Homo sapiens
  misc_RNA (1)...(19): siRNA sense strand
gcucuguggguguuuguuc

SEQ ID NO: 1645496 - RNA, 19 nt, Homo sapiens
  misc_RNA (1)...(19): siRNA sense strand
acagaaaagcuaccaugua

SEQ ID NO: 1645497 - RNA, 19 nt, Homo sapiens
  misc_RNA (1)...(19): siRNA sense strand
gagacacucggauaguaca

SEQ ID NO: 1645498 - RNA, 19 nt, Homo sapiens
  misc_RNA (1)...(19): siRNA sense strand
gacuugauaaugacacuca

SEQ ID NO: 1645499 - RNA, 19 nt, Homo sapiens
  misc_RNA (1)...(19): siRNA sense strand
cuucaucaucuaccucaaa

SEQ ID NO: 1645500 - RNA, 19 nt, Homo sapiens
  misc_RNA (1)...(19): siRNA sense strand
gguauucccagcccucuac

SEQ ID NO: 1645501 - RNA, 19 nt, Homo sapiens
  misc_RNA (1)...(19): siRNA sense strand
aagcaacaccaucgucugu

SEQ ID NO: 1645502 - RNA, 19 nt, Homo sapiens
  misc_RNA (1)...(19): siRNA sense strand
aaaacggucucaaucuuca

SEQ ID NO: 1645503 - RNA, 19 nt, Homo sapiens
  misc_RNA (1)...(19): siRNA sense strand
gaaauggcaucaaauggua

SEQ ID NO: 1645504 - RNA, 19 nt, Homo sapiens
  misc_RNA (1)...(19): siRNA sense strand
gcucauagccuuugacaga

SEQ ID NO: 1645505 - RNA, 19 nt, Homo sapiens
  misc_RNA (1)...(19): siRNA sense strand
caaauacgaucuugagcaa

SEQ ID NO: 1645506 - RNA, 19 nt, Homo sapiens
  misc_RNA (1)...(19): siRNA sense strand
ggcaucaaaugguaaauaa

SEQ ID NO: 1645507 - RNA, 19 nt, Homo sapiens
  misc_RNA (1)...(19): siRNA sense strand
gggcugaaauggcaucaaa

SEQ ID NO: 1645508 - RNA, 19 nt, Homo sapiens
  misc_RNA (1)...(19): siRNA sense strand
guauggaucccuuaauaua

SEQ ID NO: 1645509 - RNA, 19 nt, Homo sapiens
  misc_RNA (1)...(19): siRNA sense strand
gcaacaccaucgucuguga

SEQ ID NO: 1645510 - RNA, 19 nt, Homo sapiens
  misc_RNA (1)...(19): siRNA sense strand
caauaagacugacuguaga

SEQ ID NO: 1645511 - RNA, 19 nt, Homo sapiens
  misc_RNA (1)...(19): siRNA sense strand
ugucguggcugucuucuuu

SEQ ID NO: 1645512 - RNA, 19 nt, Homo sapiens
  misc_RNA (1)...(19): siRNA sense strand
caucagaccuuugagaaau

SEQ ID NO: 1645513 - RNA, 19 nt, Homo sapiens
  misc_RNA (1)...(19): siRNA sense strand
caacuaacauuuguaugga

SEQ ID NO: 1645514 - RNA, 19 nt, Homo sapiens
  misc_RNA (1)...(19): siRNA sense strand
cagagacacucggauagua

SEQ ID NO: 1645515 - RNA, 19 nt, Homo sapiens
  misc_RNA (1)...(19): siRNA sense strand
gcauccugcugaauacuuu

SEQ ID NO: 1645516 - RNA, 19 nt, Homo sapiens
  misc_RNA (1)...(19): siRNA sense strand
gcaacuaacauuuguaugg

SEQ ID NO: 1645517 - RNA, 19 nt, Homo sapiens
  misc_RNA (1)...(19): siRNA sense strand
gcuggaaggcaaaguauuu

SEQ ID NO: 1645518 - RNA, 19 nt, Homo sapiens
  misc_RNA (1)...(19): siRNA sense strand
aaagugugcuuccuuaaag

SEQ ID NO: 1645519 - RNA, 19 nt, Homo sapiens
  misc_RNA (1)...(19): siRNA sense strand
cagaaaagcuaccauguau

SEQ ID NO: 1645520 - RNA, 19 nt, Homo sapiens
  misc_RNA (1)...(19): siRNA sense strand
uuguauggaucccuuaaua

SEQ ID NO: 1645521 - RNA, 19 nt, Homo sapiens
  misc_RNA (1)...(19): siRNA sense strand
gagaaagaccacagcauca

SEQ ID NO: 1645522 - RNA, 19 nt, Homo sapiens
  misc_RNA (1)...(19): siRNA sense strand
acaauaagacugacuguag

SEQ ID NO: 1645523 - RNA, 19 nt, Homo sapiens
  misc_RNA (1)...(19): siRNA sense strand
gacagacaacauaaccuua

SEQ ID NO: 1645524 - RNA, 19 nt, Homo sapiens
  misc_RNA (1)...(19): siRNA sense strand
ugacacucaugcuuccuuu

SEQ ID NO: 1645525 - RNA, 19 nt, Homo sapiens
  misc_RNA (1)...(19): siRNA sense strand
acagucaaaccaacaauaa

SEQ ID NO: 1645526 - RNA, 19 nt, Homo sapiens
  misc_RNA (1)...(19): siRNA sense strand
gcugaaauggcaucaaaug

SEQ ID NO: 1645527 - RNA, 19 nt, Homo sapiens
  misc_RNA (1)...(19): siRNA sense strand
gaucaucagaccuuugaga

SEQ ID NO: 1645528 - RNA, 19 nt, Homo sapiens
  misc_RNA (1)...(19): siRNA sense strand
gaugcaaggcuucaacaga

SEQ ID NO: 1645529 - RNA, 19 nt, Homo sapiens
  misc_RNA (1)...(19): siRNA sense strand
ggcagcaacuaacauuugu

SEQ ID NO: 1645530 - RNA, 19 nt, Homo sapiens
  misc_RNA (1)...(19): siRNA sense strand
ucauagccuuugacagauu

SEQ ID NO: 1645531 - RNA, 19 nt, Homo sapiens
  misc_RNA (1)...(19): siRNA sense strand
aauacgaucuugagcaaca

SEQ ID NO: 1645532 - RNA, 19 nt, Homo sapiens
  misc_RNA (1)...(19): siRNA sense strand
gaacaccacagugaugcaa

SEQ ID NO: 1645533 - RNA, 19 nt, Homo sapiens
  misc_RNA (1)...(19): siRNA sense strand
gaaagaccacagcaucaag

SEQ ID NO: 1645534 - RNA, 19 nt, Homo sapiens
  misc_RNA (1)...(19): siRNA sense strand
aaaccaacaauaagacuga

SEQ ID NO: 1645535 - RNA, 19 nt, Homo sapiens
  misc_RNA (1)...(19): siRNA sense strand
guggccgacuugauaauga

SEQ ID NO: 1645536 - RNA, 19 nt, Homo sapiens
  misc_RNA (1)...(19): siRNA sense strand
gauaguacagcugguauuc

SEQ ID NO: 1645537 - RNA, 19 nt, Homo sapiens
  misc_RNA (1)...(19): siRNA sense strand
ugaaauggcaucaaauggu

SEQ ID NO: 1645538 - RNA, 19 nt, Homo sapiens
  misc_RNA (1)...(19): siRNA sense strand
cagcaacuaacauuuguau

SEQ ID NO: 1645539 - RNA, 19 nt, Homo sapiens
  misc_RNA (1)...(19): siRNA sense strand
acucaugcuuccuuucaaa

SEQ ID NO: 1645540 - RNA, 19 nt, Homo sapiens
  misc_RNA (1)...(19): siRNA sense strand
ucaagaucaucagaccuuu

SEQ ID NO: 1645541 - RNA, 19 nt, Homo sapiens
  misc_RNA (1)...(19): siRNA sense strand
ugacagauuccucaagauc

SEQ ID NO: 1645542 - RNA, 19 nt, Homo sapiens
  misc_RNA (1)...(19): siRNA sense strand
augcaaggcuucaacagau

SEQ ID NO: 1645543 - RNA, 19 nt, Homo sapiens
  misc_RNA (1)...(19): siRNA sense strand
ucagaccuuugagaaauau

SEQ ID NO: 1645544 - RNA, 19 nt, Homo sapiens
  misc_RNA (1)...(19): siRNA sense strand
ggauaguacagcugguauu

SEQ ID NO: 1645545 - RNA, 19 nt, Homo sapiens
  misc_RNA (1)...(19): siRNA sense strand
aaagcuggaaggcaaagua

SEQ ID NO: 1645546 - RNA, 19 nt, Homo sapiens
  misc_RNA (1)...(19): siRNA sense strand
gagcaacaaggaagcaaca

SEQ ID NO: 1645547 - RNA, 19 nt, Homo sapiens
  misc_RNA (1)...(19): siRNA sense strand
gacagauuccucaagauca

SEQ ID NO: 1645548 - RNA, 19 nt, Homo sapiens
  misc_RNA (1)...(19): siRNA sense strand
uuuaugagaccauguaugu

SEQ ID NO: 1645549 - RNA, 19 nt, Homo sapiens
  misc_RNA (1)...(19): siRNA sense strand
agacagacaacauaaccuu

SEQ ID NO: 1645550 - RNA, 19 nt, Homo sapiens
  misc_RNA (1)...(19): siRNA sense strand
gcagucagacagacaacau

SEQ ID NO: 1645551 - RNA, 19 nt, Homo sapiens
  misc_RNA (1)...(19): siRNA sense strand
gcagcaacuaacauuugua

SEQ ID NO: 1645552 - RNA, 19 nt, Homo sapiens
  misc_RNA (1)...(19): siRNA sense strand
agucaaaccaacaauaaga

SEQ ID NO: 1645553 - RNA, 19 nt, Homo sapiens
  misc_RNA (1)...(19): siRNA sense strand
guggcugucuucuuugugu

SEQ ID NO: 1645554 - RNA, 19 nt, Homo sapiens
  misc_RNA (1)...(19): siRNA sense strand
ccauauacucacagucaaa

SEQ ID NO: 1645555 - RNA, 19 nt, Homo sapiens
  misc_RNA (1)...(19): siRNA sense strand
gaaaagcuaccauguaugc

SEQ ID NO: 1645556 - RNA, 19 nt, Homo sapiens
  misc_RNA (1)...(19): siRNA sense strand
cacagucaaaccaacaaua

SEQ ID NO: 1645557 - RNA, 19 nt, Homo sapiens
  misc_RNA (1)...(19): siRNA sense strand
acacuuugguggccgacuu

SEQ ID NO: 1645558 - RNA, 19 nt, Homo sapiens
  misc_RNA (1)...(19): siRNA sense strand
acagauuccucaagaucau

SEQ ID NO: 1645559 - RNA, 19 nt, Homo sapiens
  misc_RNA (1)...(19): siRNA sense strand
cauagccuuugacagauuc

SEQ ID NO: 1645560 - RNA, 19 nt, Homo sapiens
  misc_RNA (1)...(19): siRNA sense strand
uuugguggccgacuugaua

SEQ ID NO: 1645561 - RNA, 19 nt, Homo sapiens
  misc_RNA (1)...(19): siRNA sense strand
caagaucaucagaccuuug

SEQ ID NO: 1645562 - RNA, 19 nt, Homo sapiens
  misc_RNA (1)...(19): siRNA sense strand
uggcagcaacuaacauuug

SEQ ID NO: 1645563 - RNA, 19 nt, Homo sapiens
  misc_RNA (1)...(19): siRNA sense strand
uggcaucaaaugguaaaua

SEQ ID NO: 1645564 - RNA, 19 nt, Homo sapiens
  misc_RNA (1)...(19): siRNA sense strand
aagaucaucagaccuuuga

SEQ ID NO: 1645565 - RNA, 19 nt, Homo sapiens
  misc_RNA (1)...(19): siRNA sense strand
ucaucucccugccaaauac

SEQ ID NO: 1645566 - RNA, 19 nt, Homo sapiens
  misc_RNA (1)...(19): siRNA sense strand
caacaccaucgucugugaa

SEQ ID NO: 1645567 - RNA, 19 nt, Homo sapiens
  misc_RNA (1)...(19): siRNA sense strand
aucagaccuuugagaaaua

SEQ ID NO: 1645568 - RNA, 19 nt, Homo sapiens
  misc_RNA (1)...(19): siRNA sense strand
gaaaaucauagcagucaga

SEQ ID NO: 1645569 - RNA, 19 nt, Homo sapiens
  misc_RNA (1)...(19): siRNA sense strand
gcuaaagaaacaacucucu

SEQ ID NO: 1645570 - RNA, 19 nt, Homo sapiens
  misc_RNA (1)...(19): siRNA sense strand
ugaccggcauccugcugaa

SEQ ID NO: 1645571 - RNA, 19 nt, Homo sapiens
  misc_RNA (1)...(19): siRNA sense strand
ucaucagaccuuugagaaa

SEQ ID NO: 1645572 - RNA, 19 nt, Homo sapiens
  misc_RNA (1)...(19): siRNA sense strand
agucagacagacaacauaa

SEQ ID NO: 1645573 - RNA, 19 nt, Homo sapiens
  misc_RNA (1)...(19): siRNA sense strand
agaaagaccacagcaucaa

SEQ ID NO: 1645574 - RNA, 19 nt, Homo sapiens
  misc_RNA (1)...(19): siRNA sense strand
aaagcuaccauguaugcaa

SEQ ID NO: 1645575 - RNA, 19 nt, Homo sapiens
  misc_RNA (1)...(19): siRNA sense strand
caacaauaagacugacugu

SEQ ID NO: 1645576 - RNA, 19 nt, Homo sapiens
  misc_RNA (1)...(19): siRNA sense strand
acacucaugcuuccuuuca

SEQ ID NO: 1645577 - RNA, 19 nt, Homo sapiens
  misc_RNA (1)...(19): siRNA sense strand
auggaucccuuaauauaca

SEQ ID NO: 1645578 - RNA, 19 nt, Homo sapiens
  misc_RNA (1)...(19): siRNA sense strand
uauccuaaugcuuguguuu

SEQ ID NO: 1645579 - RNA, 19 nt, Homo sapiens
  misc_RNA (1)...(19): siRNA sense strand
ucucaaucuucaucugguu

SEQ ID NO: 1645580 - RNA, 19 nt, Homo sapiens
  misc_RNA (1)...(19): siRNA sense strand
ucccagcccucuacacagu

SEQ ID NO: 1645581 - RNA, 19 nt, Homo sapiens
  misc_RNA (1)...(19): siRNA sense strand
ccuccaccuucaucaucua

SEQ ID NO: 1645582 - RNA, 19 nt, Homo sapiens
  misc_RNA (1)...(19): siRNA sense strand
cagacaacauaaccuuagg

SEQ ID NO: 1645583 - RNA, 19 nt, Homo sapiens
  misc_RNA (1)...(19): siRNA sense strand
acagacaacauaaccuuag

SEQ ID NO: 1645584 - RNA, 19 nt, Homo sapiens
  misc_RNA (1)...(19): siRNA sense strand
ugccagaguuccauauacu

SEQ ID NO: 1645585 - RNA, 19 nt, Homo sapiens
  misc_RNA (1)...(19): siRNA sense strand
cugaauacuuuggcucugu

SEQ ID NO: 1645586 - RNA, 19 nt, Homo sapiens
  misc_RNA (1)...(19): siRNA sense strand
uccuaaugcuuguguuuua

SEQ ID NO: 1645587 - RNA, 19 nt, Homo sapiens
  misc_RNA (1)...(19): siRNA sense strand
cagucagacagacaacaua

SEQ ID NO: 1645588 - RNA, 19 nt, Homo sapiens
  misc_RNA (1)...(19): siRNA sense strand
uguauggaucccuuaauau

SEQ ID NO: 1645589 - RNA, 19 nt, Homo sapiens
  misc_RNA (1)...(19): siRNA sense strand
gcaaggcuucaacagaucu

SEQ ID NO: 1645590 - RNA, 19 nt, Homo sapiens
  misc_RNA (1)...(19): siRNA sense strand
gcucuguggguguuuguuc

SEQ ID NO: 1645591 - RNA, 19 nt, Homo sapiens
  misc_RNA (1)...(19): siRNA sense strand
acagaaaagcuaccaugua

SEQ ID NO: 1645592 - RNA, 19 nt, Homo sapiens
  misc_RNA (1)...(19): siRNA sense strand
gagacacucggauaguaca

SEQ ID NO: 1645593 - RNA, 19 nt, Homo sapiens
  misc_RNA (1)...(19): siRNA sense strand
gacuugauaaugacacuca

SEQ ID NO: 1645594 - RNA, 19 nt, Homo sapiens
  misc_RNA (1)...(19): siRNA sense strand
cuucaucaucuaccucaaa

SEQ ID NO: 1645595 - RNA, 19 nt, Homo sapiens
  misc_RNA (1)...(19): siRNA sense strand
gguauucccagcccucuac

SEQ ID NO: 1645596 - RNA, 19 nt, Homo sapiens
  misc_RNA (1)...(19): siRNA sense strand
aagcaacaccaucgucugu

SEQ ID NO: 1645597 - RNA, 19 nt, Homo sapiens
  misc_RNA (1)...(19): siRNA sense strand
aaaacggucucaaucuuca

SEQ ID NO: 1645598 - RNA, 19 nt, Homo sapiens
  misc_RNA (1)...(19): siRNA sense strand
ugacugacauugccaagua

SEQ ID NO: 1645599 - RNA, 19 nt, Homo sapiens
  misc_RNA (1)...(19): siRNA sense strand
gaggaggacucucauacaa

SEQ ID NO: 1645600 - RNA, 19 nt, Homo sapiens
  misc_RNA (1)...(19): siRNA sense strand
gcacucaaauuccuuuauc

SEQ ID NO: 1645601 - RNA, 19 nt, Homo sapiens
  misc_RNA (1)...(19): siRNA sense strand
cuacauaugucgagggaau

SEQ ID NO: 1645602 - RNA, 19 nt, Homo sapiens
  misc_RNA (1)...(19): siRNA sense strand
gagcucugguugcaauauu

SEQ ID NO: 1645603 - RNA, 19 nt, Homo sapiens
  misc_RNA (1)...(19): siRNA sense strand
ggaggacucucauacaacu

SEQ ID NO: 1645604 - RNA, 19 nt, Homo sapiens
  misc_RNA (1)...(19): siRNA sense strand
gaagggagacugggcaaga

SEQ ID NO: 1645605 - RNA, 19 nt, Homo sapiens
  misc_RNA (1)...(19): siRNA sense strand
caacaacugggaaucacua

SEQ ID NO: 1645606 - RNA, 19 nt, Homo sapiens
  misc_RNA (1)...(19): siRNA sense strand
gggaaugcagaaagaguua

SEQ ID NO: 1645607 - RNA, 19 nt, Homo sapiens
  misc_RNA (1)...(19): siRNA sense strand
cugcagcgaugguuacauu

SEQ ID NO: 1645608 - RNA, 19 nt, Homo sapiens
  misc_RNA (1)...(19): siRNA sense strand
cagcgaugguuacauugaa

SEQ ID NO: 1645609 - RNA, 19 nt, Homo sapiens
  misc_RNA (1)...(19): siRNA sense strand
uguaucggauuucuucaaa

SEQ ID NO: 1645610 - RNA, 19 nt, Homo sapiens
  misc_RNA (1)...(19): siRNA sense strand
guacguggcccucgaugug

SEQ ID NO: 1645611 - RNA, 19 nt, Homo sapiens
  misc_RNA (1)...(19): siRNA sense strand
gcagcgaugguuacauuga

SEQ ID NO: 1645612 - RNA, 19 nt, Homo sapiens
  misc_RNA (1)...(19): siRNA sense strand
uguguugacuggacucauu

SEQ ID NO: 1645613 - RNA, 19 nt, Homo sapiens
  misc_RNA (1)...(19): siRNA sense strand
uuucucgaguuucugauua

SEQ ID NO: 1645614 - RNA, 19 nt, Homo sapiens
  misc_RNA (1)...(19): siRNA sense strand
auacaacucugcaugaaac

SEQ ID NO: 1645615 - RNA, 19 nt, Homo sapiens
  misc_RNA (1)...(19): siRNA sense strand
gcgaugguuacauugaaua

SEQ ID NO: 1645616 - RNA, 19 nt, Homo sapiens
  misc_RNA (1)...(19): siRNA sense strand
cuguauauguaucggauuu

SEQ ID NO: 1645617 - RNA, 19 nt, Homo sapiens
  misc_RNA (1)...(19): siRNA sense strand
acacugcaauuuggucuug

SEQ ID NO: 1645618 - RNA, 19 nt, Homo sapiens
  misc_RNA (1)...(19): siRNA sense strand
ucgagggaaugcagaaaga

SEQ ID NO: 1645619 - RNA, 19 nt, Homo sapiens
  misc_RNA (1)...(19): siRNA sense strand
ccacuggagcgauguguug

SEQ ID NO: 1645620 - RNA, 19 nt, Homo sapiens
  misc_RNA (1)...(19): siRNA sense strand
gcagguuguccuucuauuc

SEQ ID NO: 1645621 - RNA, 19 nt, Homo sapiens
  misc_RNA (1)...(19): siRNA sense strand
ccucacuucuuggauguuu

SEQ ID NO: 1645622 - RNA, 19 nt, Homo sapiens
  misc_RNA (1)...(19): siRNA sense strand
ucagggagcucugguugca

SEQ ID NO: 1645623 - RNA, 19 nt, Homo sapiens
  misc_RNA (1)...(19): siRNA sense strand
acaaagccauuggaaccuu

SEQ ID NO: 1645624 - RNA, 19 nt, Homo sapiens
  misc_RNA (1)...(19): siRNA sense strand
caugaaacaccaacaacug

SEQ ID NO: 1645625 - RNA, 19 nt, Homo sapiens
  misc_RNA (1)...(19): siRNA sense strand
ucucgaguuucugauuaua

SEQ ID NO: 1645626 - RNA, 19 nt, Homo sapiens
  misc_RNA (1)...(19): siRNA sense strand
ggaaugcagaaagaguuaa

SEQ ID NO: 1645627 - RNA, 19 nt, Homo sapiens
  misc_RNA (1)...(19): siRNA sense strand
guauauguaucggauuucu

SEQ ID NO: 1645628 - RNA, 19 nt, Homo sapiens
  misc_RNA (1)...(19): siRNA sense strand
cagguuguccuucuauuca

SEQ ID NO: 1645629 - RNA, 19 nt, Homo sapiens
  misc_RNA (1)...(19): siRNA sense strand
cauacaacucugcaugaaa

SEQ ID NO: 1645630 - RNA, 19 nt, Homo sapiens
  misc_RNA (1)...(19): siRNA sense strand
gacugacauugccaaguau

SEQ ID NO: 1645631 - RNA, 19 nt, Homo sapiens
  misc_RNA (1)...(19): siRNA sense strand
gaaucacuauccgagcaau

SEQ ID NO: 1645632 - RNA, 19 nt, Homo sapiens
  misc_RNA (1)...(19): siRNA sense strand
gcaugaaacaccaacaacu

SEQ ID NO: 1645633 - RNA, 19 nt, Homo sapiens
  misc_RNA (1)...(19): siRNA sense strand
ggcagguuguccuucuauu

SEQ ID NO: 1645634 - RNA, 19 nt, Homo sapiens
  misc_RNA (1)...(19): siRNA sense strand
ucaacugcagcgaugguua

SEQ ID NO: 1645635 - RNA, 19 nt, Homo sapiens
  misc_RNA (1)...(19): siRNA sense strand
ggccucacuucuuggaugu

SEQ ID NO: 1645636 - RNA, 19 nt, Homo sapiens
  misc_RNA (1)...(19): siRNA sense strand
ggaaucacuauccgagcaa

SEQ ID NO: 1645637 - RNA, 19 nt, Homo sapiens
  misc_RNA (1)...(19): siRNA sense strand
gaaugcagaaagaguuaag

SEQ ID NO: 1645638 - RNA, 19 nt, Homo sapiens
  misc_RNA (1)...(19): siRNA sense strand
ccauuuaugugggccuuuc

SEQ ID NO: 1645639 - RNA, 19 nt, Homo sapiens
  misc_RNA (1)...(19): siRNA sense strand
ugacauugccaaguauuca

SEQ ID NO: 1645640 - RNA, 19 nt, Homo sapiens
  misc_RNA (1)...(19): siRNA sense strand
caacugggaaucacuaucc

SEQ ID NO: 1645641 - RNA, 19 nt, Homo sapiens
  misc_RNA (1)...(19): siRNA sense strand
gggccuuucucgaguuucu

SEQ ID NO: 1645642 - RNA, 19 nt, Homo sapiens
  misc_RNA (1)...(19): siRNA sense strand
cuucuuggauguuugugau

SEQ ID NO: 1645643 - RNA, 19 nt, Homo sapiens
  misc_RNA (1)...(19): siRNA sense strand
gugggccuuucucgaguuu

SEQ ID NO: 1645644 - RNA, 19 nt, Homo sapiens
  misc_RNA (1)...(19): siRNA sense strand
caacugcagcgaugguuac

SEQ ID NO: 1645645 - RNA, 19 nt, Homo sapiens
  misc_RNA (1)...(19): siRNA sense strand
gagggaaugcagaaagagu

SEQ ID NO: 1645646 - RNA, 19 nt, Homo sapiens
  misc_RNA (1)...(19): siRNA sense strand
aacccugucuguuuacugu

SEQ ID NO: 1645647 - RNA, 19 nt, Homo sapiens
  misc_RNA (1)...(19): siRNA sense strand
cacucaaauuccuuuauca

SEQ ID NO: 1645648 - RNA, 19 nt, Homo sapiens
  misc_RNA (1)...(19): siRNA sense strand
agcucugguugcaauauua

SEQ ID NO: 1645649 - RNA, 19 nt, Homo sapiens
  misc_RNA (1)...(19): siRNA sense strand
agggagcucugguugcaau

SEQ ID NO: 1645650 - RNA, 19 nt, Homo sapiens
  misc_RNA (1)...(19): siRNA sense strand
gacauugccaaguauucaa

SEQ ID NO: 1645651 - RNA, 19 nt, Homo sapiens
  misc_RNA (1)...(19): siRNA sense strand
uaucuucaagccaggauga

SEQ ID NO: 1645652 - RNA, 19 nt, Homo sapiens
  misc_RNA (1)...(19): siRNA sense strand
gagcaaucaccagccuuga

SEQ ID NO: 1645653 - RNA, 19 nt, Homo sapiens
  misc_RNA (1)...(19): siRNA sense strand
uuguugccguauccauuua

SEQ ID NO: 1645654 - RNA, 19 nt, Homo sapiens
  misc_RNA (1)...(19): siRNA sense strand
ggagcucugguugcaauau

SEQ ID NO: 1645655 - RNA, 19 nt, Homo sapiens
  misc_RNA (1)...(19): siRNA sense strand
uguacugcaugcuguuugu

SEQ ID NO: 1645656 - RNA, 19 nt, Homo sapiens
  misc_RNA (1)...(19): siRNA sense strand
ugacugacauugccaagua

SEQ ID NO: 1645657 - RNA, 19 nt, Homo sapiens
  misc_RNA (1)...(19): siRNA sense strand
gaggaggacucucauacaa

SEQ ID NO: 1645658 - RNA, 19 nt, Homo sapiens
  misc_RNA (1)...(19): siRNA sense strand
gcacucaaauuccuuuauc

SEQ ID NO: 1645659 - RNA, 19 nt, Homo sapiens
  misc_RNA (1)...(19): siRNA sense strand
cuacauaugucgagggaau

SEQ ID NO: 1645660 - RNA, 19 nt, Homo sapiens
  misc_RNA (1)...(19): siRNA sense strand
gagcucugguugcaauauu

SEQ ID NO: 1645661 - RNA, 19 nt, Homo sapiens
  misc_RNA (1)...(19): siRNA sense strand
ggaggacucucauacaacu

SEQ ID NO: 1645662 - RNA, 19 nt, Homo sapiens
  misc_RNA (1)...(19): siRNA sense strand
gaagggagacugggcaaga

SEQ ID NO: 1645663 - RNA, 19 nt, Homo sapiens
  misc_RNA (1)...(19): siRNA sense strand
caacaacugggaaucacua

SEQ ID NO: 1645664 - RNA, 19 nt, Homo sapiens
  misc_RNA (1)...(19): siRNA sense strand
gggaaugcagaaagaguua

SEQ ID NO: 1645665 - RNA, 19 nt, Homo sapiens
  misc_RNA (1)...(19): siRNA sense strand
cugcagcgaugguuacauu

SEQ ID NO: 1645666 - RNA, 19 nt, Homo sapiens
  misc_RNA (1)...(19): siRNA sense strand
cagcgaugguuacauugaa

SEQ ID NO: 1645667 - RNA, 19 nt, Homo sapiens
  misc_RNA (1)...(19): siRNA sense strand
uguaucggauuucuucaaa

SEQ ID NO: 1645668 - RNA, 19 nt, Homo sapiens
  misc_RNA (1)...(19): siRNA sense strand
guacguggcccucgaugug

SEQ ID NO: 1645669 - RNA, 19 nt, Homo sapiens
  misc_RNA (1)...(19): siRNA sense strand
gcagcgaugguuacauuga

SEQ ID NO: 1645670 - RNA, 19 nt, Homo sapiens
  misc_RNA (1)...(19): siRNA sense strand
uguguugacuggacucauu

SEQ ID NO: 1645671 - RNA, 19 nt, Homo sapiens
  misc_RNA (1)...(19): siRNA sense strand
uuucucgaguuucugauua

SEQ ID NO: 1645672 - RNA, 19 nt, Homo sapiens
  misc_RNA (1)...(19): siRNA sense strand
auacaacucugcaugaaac

SEQ ID NO: 1645673 - RNA, 19 nt, Homo sapiens
  misc_RNA (1)...(19): siRNA sense strand
gcgaugguuacauugaaua

SEQ ID NO: 1645674 - RNA, 19 nt, Homo sapiens
  misc_RNA (1)...(19): siRNA sense strand
cuguauauguaucggauuu

SEQ ID NO: 1645675 - RNA, 19 nt, Homo sapiens
  misc_RNA (1)...(19): siRNA sense strand
acacugcaauuuggucuug

SEQ ID NO: 1645676 - RNA, 19 nt, Homo sapiens
  misc_RNA (1)...(19): siRNA sense strand
ucgagggaaugcagaaaga

SEQ ID NO: 1645677 - RNA, 19 nt, Homo sapiens
  misc_RNA (1)...(19): siRNA sense strand
ccacuggagcgauguguug

SEQ ID NO: 1645678 - RNA, 19 nt, Homo sapiens
  misc_RNA (1)...(19): siRNA sense strand
gcagguuguccuucuauuc

SEQ ID NO: 1645679 - RNA, 19 nt, Homo sapiens
  misc_RNA (1)...(19): siRNA sense strand
ccucacuucuuggauguuu

SEQ ID NO: 1645680 - RNA, 19 nt, Homo sapiens
  misc_RNA (1)...(19): siRNA sense strand
ucagggagcucugguugca

SEQ ID NO: 1645681 - RNA, 19 nt, Homo sapiens
  misc_RNA (1)...(19): siRNA sense strand
acaaagccauuggaaccuu

SEQ ID NO: 1645682 - RNA, 19 nt, Homo sapiens
  misc_RNA (1)...(19): siRNA sense strand
caugaaacaccaacaacug

SEQ ID NO: 1645683 - RNA, 19 nt, Homo sapiens
  misc_RNA (1)...(19): siRNA sense strand
ucucgaguuucugauuaua

SEQ ID NO: 1645684 - RNA, 19 nt, Homo sapiens
  misc_RNA (1)...(19): siRNA sense strand
ggaaugcagaaagaguuaa

SEQ ID NO: 1645685 - RNA, 19 nt, Homo sapiens
  misc_RNA (1)...(19): siRNA sense strand
guauauguaucggauuucu

SEQ ID NO: 1645686 - RNA, 19 nt, Homo sapiens
  misc_RNA (1)...(19): siRNA sense strand
cagguuguccuucuauuca

SEQ ID NO: 1645687 - RNA, 19 nt, Homo sapiens
  misc_RNA (1)...(19): siRNA sense strand
cauacaacucugcaugaaa

SEQ ID NO: 1645688 - RNA, 19 nt, Homo sapiens
  misc_RNA (1)...(19): siRNA sense strand
gacugacauugccaaguau

SEQ ID NO: 1645689 - RNA, 19 nt, Homo sapiens
  misc_RNA (1)...(19): siRNA sense strand
gaaucacuauccgagcaau

SEQ ID NO: 1645690 - RNA, 19 nt, Homo sapiens
  misc_RNA (1)...(19): siRNA sense strand
gcaugaaacaccaacaacu

SEQ ID NO: 1645691 - RNA, 19 nt, Homo sapiens
  misc_RNA (1)...(19): siRNA sense strand
ggcagguuguccuucuauu

SEQ ID NO: 1645692 - RNA, 19 nt, Homo sapiens
  misc_RNA (1)...(19): siRNA sense strand
ucaacugcagcgaugguua

SEQ ID NO: 1645693 - RNA, 19 nt, Homo sapiens
  misc_RNA (1)...(19): siRNA sense strand
ggccucacuucuuggaugu

SEQ ID NO: 1645694 - RNA, 19 nt, Homo sapiens
  misc_RNA (1)...(19): siRNA sense strand
ggaaucacuauccgagcaa

SEQ ID NO: 1645695 - RNA, 19 nt, Homo sapiens
  misc_RNA (1)...(19): siRNA sense strand
gaaugcagaaagaguuaag

SEQ ID NO: 1645696 - RNA, 19 nt, Homo sapiens
  misc_RNA (1)...(19): siRNA sense strand
ccauuuaugugggccuuuc

SEQ ID NO: 1645697 - RNA, 19 nt, Homo sapiens
  misc_RNA (1)...(19): siRNA sense strand
ugacauugccaaguauuca

SEQ ID NO: 1645698 - RNA, 19 nt, Homo sapiens
  misc_RNA (1)...(19): siRNA sense strand
caacugggaaucacuaucc

SEQ ID NO: 1645699 - RNA, 19 nt, Homo sapiens
  misc_RNA (1)...(19): siRNA sense strand
gggccuuucucgaguuucu

SEQ ID NO: 1645700 - RNA, 19 nt, Homo sapiens
  misc_RNA (1)...(19): siRNA sense strand
cuucuuggauguuugugau

SEQ ID NO: 1645701 - RNA, 19 nt, Homo sapiens
  misc_RNA (1)...(19): siRNA sense strand
gugggccuuucucgaguuu

SEQ ID NO: 1645702 - RNA, 19 nt, Homo sapiens
  misc_RNA (1)...(19): siRNA sense strand
caacugcagcgaugguuac

SEQ ID NO: 1645703 - RNA, 19 nt, Homo sapiens
  misc_RNA (1)...(19): siRNA sense strand
gagggaaugcagaaagagu

SEQ ID NO: 1645704 - RNA, 19 nt, Homo sapiens
  misc_RNA (1)...(19): siRNA sense strand
aacccugucuguuuacugu

SEQ ID NO: 1645705 - RNA, 19 nt, Homo sapiens
  misc_RNA (1)...(19): siRNA sense strand
cacucaaauuccuuuauca

SEQ ID NO: 1645706 - RNA, 19 nt, Homo sapiens
  misc_RNA (1)...(19): siRNA sense strand
agcucugguugcaauauua

SEQ ID NO: 1645707 - RNA, 19 nt, Homo sapiens
  misc_RNA (1)...(19): siRNA sense strand
agggagcucugguugcaau

SEQ ID NO: 1645708 - RNA, 19 nt, Homo sapiens
  misc_RNA (1)...(19): siRNA sense strand
gacauugccaaguauucaa

SEQ ID NO: 1645709 - RNA, 19 nt, Homo sapiens
  misc_RNA (1)...(19): siRNA sense strand
uaucuucaagccaggauga

SEQ ID NO: 1645710 - RNA, 19 nt, Homo sapiens
  misc_RNA (1)...(19): siRNA sense strand
gagcaaucaccagccuuga

SEQ ID NO: 1645711 - RNA, 19 nt, Homo sapiens
  misc_RNA (1)...(19): siRNA sense strand
uuguugccguauccauuua

SEQ ID NO: 1645712 - RNA, 19 nt, Homo sapiens
  misc_RNA (1)...(19): siRNA sense strand
ggagcucugguugcaauau

SEQ ID NO: 1645713 - RNA, 19 nt, Homo sapiens
  misc_RNA (1)...(19): siRNA sense strand
uguacugcaugcuguuugu

SEQ ID NO: 1645714 - RNA, 19 nt, Homo sapiens
  misc_RNA (1)...(19): siRNA sense strand
cagcgguccuuaccagaaa

SEQ ID NO: 1645715 - RNA, 19 nt, Homo sapiens
  misc_RNA (1)...(19): siRNA sense strand
gaaaggccacgugaagaug

SEQ ID NO: 1645716 - RNA, 19 nt, Homo sapiens
  misc_RNA (1)...(19): siRNA sense strand
ggaagcuucuguucaaucc

SEQ ID NO: 1645717 - RNA, 19 nt, Homo sapiens
  misc_RNA (1)...(19): siRNA sense strand
ugaaaggccacgugaagau

SEQ ID NO: 1645718 - RNA, 19 nt, Homo sapiens
  misc_RNA (1)...(19): siRNA sense strand
gcacuugugacagcaguau

SEQ ID NO: 1645719 - RNA, 19 nt, Homo sapiens
  misc_RNA (1)...(19): siRNA sense strand
accggaagcuucuguucaa

SEQ ID NO: 1645720 - RNA, 19 nt, Homo sapiens
  misc_RNA (1)...(19): siRNA sense strand
gugaaaggccacgugaaga

SEQ ID NO: 1645721 - RNA, 19 nt, Homo sapiens
  misc_RNA (1)...(19): siRNA sense strand
ccagcgguccuuaccagaa

SEQ ID NO: 1645722 - RNA, 19 nt, Homo sapiens
  misc_RNA (1)...(19): siRNA sense strand
cagcgguccuuaccagaaa

SEQ ID NO: 1645723 - RNA, 19 nt, Homo sapiens
  misc_RNA (1)...(19): siRNA sense strand
gaaaggccacgugaagaug

SEQ ID NO: 1645724 - RNA, 19 nt, Homo sapiens
  misc_RNA (1)...(19): siRNA sense strand
ggaagcuucuguucaaucc

SEQ ID NO: 1645725 - RNA, 19 nt, Homo sapiens
  misc_RNA (1)...(19): siRNA sense strand
ugaaaggccacgugaagau

SEQ ID NO: 1645726 - RNA, 19 nt, Homo sapiens
  misc_RNA (1)...(19): siRNA sense strand
gcacuugugacagcaguau

SEQ ID NO: 1645727 - RNA, 19 nt, Homo sapiens
  misc_RNA (1)...(19): siRNA sense strand
accggaagcuucuguucaa

SEQ ID NO: 1645728 - RNA, 19 nt, Homo sapiens
  misc_RNA (1)...(19): siRNA sense strand
gugaaaggccacgugaaga

SEQ ID NO: 1645729 - RNA, 19 nt, Homo sapiens
  misc_RNA (1)...(19): siRNA sense strand
ccagcgguccuuaccagaa

SEQ ID NO: 1645730 - RNA, 19 nt, Homo sapiens
  misc_RNA (1)...(19): siRNA sense strand
cagcgguccuuaccagaaa

SEQ ID NO: 1645731 - RNA, 19 nt, Homo sapiens
  misc_RNA (1)...(19): siRNA sense strand
gaaaggccacgugaagaug

SEQ ID NO: 1645732 - RNA, 19 nt, Homo sapiens
  misc_RNA (1)...(19): siRNA sense strand
ggaagcuucuguucaaucc

SEQ ID NO: 1645733 - RNA, 19 nt, Homo sapiens
  misc_RNA (1)...(19): siRNA sense strand
ugaaaggccacgugaagau

SEQ ID NO: 1645734 - RNA, 19 nt, Homo sapiens
  misc_RNA (1)...(19): siRNA sense strand
gcacuugugacagcaguau

SEQ ID NO: 1645735 - RNA, 19 nt, Homo sapiens
  misc_RNA (1)...(19): siRNA sense strand
accggaagcuucuguucaa

SEQ ID NO: 1645736 - RNA, 19 nt, Homo sapiens
  misc_RNA (1)...(19): siRNA sense strand
gugaaaggccacgugaaga

SEQ ID NO: 1645737 - RNA, 19 nt, Homo sapiens
  misc_RNA (1)...(19): siRNA sense strand
ccagcgguccuuaccagaa

SEQ ID NO: 1645738 - RNA, 19 nt, Homo sapiens
  misc_RNA (1)...(19): siRNA sense strand
cagcgguccuuaccagaaa

SEQ ID NO: 1645739 - RNA, 19 nt, Homo sapiens
  misc_RNA (1)...(19): siRNA sense strand
gaaaggccacgugaagaug

SEQ ID NO: 1645740 - RNA, 19 nt, Homo sapiens
  misc_RNA (1)...(19): siRNA sense strand
ggaagcuucuguucaaucc

SEQ ID NO: 1645741 - RNA, 19 nt, Homo sapiens
  misc_RNA (1)...(19): siRNA sense strand
ugaaaggccacgugaagau

SEQ ID NO: 1645742 - RNA, 19 nt, Homo sapiens
  misc_RNA (1)...(19): siRNA sense strand
gcacuugugacagcaguau

SEQ ID NO: 1645743 - RNA, 19 nt, Homo sapiens
  misc_RNA (1)...(19): siRNA sense strand
accggaagcuucuguucaa

SEQ ID NO: 1645744 - RNA, 19 nt, Homo sapiens
  misc_RNA (1)...(19): siRNA sense strand
gugaaaggccacgugaaga

SEQ ID NO: 1645745 - RNA, 19 nt, Homo sapiens
  misc_RNA (1)...(19): siRNA sense strand
ccagcgguccuuaccagaa

SEQ ID NO: 1645746 - RNA, 19 nt, Homo sapiens
  misc_RNA (1)...(19): siRNA sense strand
cagcgguccuuaccagaaa

SEQ ID NO: 1645747 - RNA, 19 nt, Homo sapiens
  misc_RNA (1)...(19): siRNA sense strand
gaaaggccacgugaagaug

SEQ ID NO: 1645748 - RNA, 19 nt, Homo sapiens
  misc_RNA (1)...(19): siRNA sense strand
ggaagcuucuguucaaucc

SEQ ID NO: 1645749 - RNA, 19 nt, Homo sapiens
  misc_RNA (1)...(19): siRNA sense strand
ugaaaggccacgugaagau

SEQ ID NO: 1645750 - RNA, 19 nt, Homo sapiens
  misc_RNA (1)...(19): siRNA sense strand
gcacuugugacagcaguau

SEQ ID NO: 1645751 - RNA, 19 nt, Homo sapiens
  misc_RNA (1)...(19): siRNA sense strand
accggaagcuucuguucaa

SEQ ID NO: 1645752 - RNA, 19 nt, Homo sapiens
  misc_RNA (1)...(19): siRNA sense strand
gugaaaggccacgugaaga

SEQ ID NO: 1645753 - RNA, 19 nt, Homo sapiens
  misc_RNA (1)...(19): siRNA sense strand
ccagcgguccuuaccagaa

SEQ ID NO: 1645754 - RNA, 19 nt, Homo sapiens
  misc_RNA (1)...(19): siRNA sense strand
cagcgguccuuaccagaaa

SEQ ID NO: 1645755 - RNA, 19 nt, Homo sapiens
  misc_RNA (1)...(19): siRNA sense strand
gaaaggccacgugaagaug

SEQ ID NO: 1645756 - RNA, 19 nt, Homo sapiens
  misc_RNA (1)...(19): siRNA sense strand
ggaagcuucuguucaaucc

SEQ ID NO: 1645757 - RNA, 19 nt, Homo sapiens
  misc_RNA (1)...(19): siRNA sense strand
ugaaaggccacgugaagau

SEQ ID NO: 1645758 - RNA, 19 nt, Homo sapiens
  misc_RNA (1)...(19): siRNA sense strand
gcacuugugacagcaguau

SEQ ID NO: 1645759 - RNA, 19 nt, Homo sapiens
  misc_RNA (1)...(19): siRNA sense strand
accggaagcuucuguucaa

SEQ ID NO: 1645760 - RNA, 19 nt, Homo sapiens
  misc_RNA (1)...(19): siRNA sense strand
gugaaaggccacgugaaga

SEQ ID NO: 1645761 - RNA, 19 nt, Homo sapiens
  misc_RNA (1)...(19): siRNA sense strand
ccagcgguccuuaccagaa

SEQ ID NO: 1645762 - RNA, 19 nt, Homo sapiens
  misc_RNA (1)...(19): siRNA sense strand
cagcgguccuuaccagaaa

SEQ ID NO: 1645763 - RNA, 19 nt, Homo sapiens
  misc_RNA (1)...(19): siRNA sense strand
gaaaggccacgugaagaug

SEQ ID NO: 1645764 - RNA, 19 nt, Homo sapiens
  misc_RNA (1)...(19): siRNA sense strand
ggaagcuucuguucaaucc

SEQ ID NO: 1645765 - RNA, 19 nt, Homo sapiens
  misc_RNA (1)...(19): siRNA sense strand
ugaaaggccacgugaagau

SEQ ID NO: 1645766 - RNA, 19 nt, Homo sapiens
  misc_RNA (1)...(19): siRNA sense strand
gcacuugugacagcaguau

SEQ ID NO: 1645767 - RNA, 19 nt, Homo sapiens
  misc_RNA (1)...(19): siRNA sense strand
accggaagcuucuguucaa

SEQ ID NO: 1645768 - RNA, 19 nt, Homo sapiens
  misc_RNA (1)...(19): siRNA sense strand
gugaaaggccacgugaaga

SEQ ID NO: 1645769 - RNA, 19 nt, Homo sapiens
  misc_RNA (1)...(19): siRNA sense strand
ccagcgguccuuaccagaa

SEQ ID NO: 1645770 - RNA, 19 nt, Homo sapiens
  misc_RNA (1)...(19): siRNA sense strand
cagcgguccuuaccagaaa

SEQ ID NO: 1645771 - RNA, 19 nt, Homo sapiens
  misc_RNA (1)...(19): siRNA sense strand
gaaaggccacgugaagaug

SEQ ID NO: 1645772 - RNA, 19 nt, Homo sapiens
  misc_RNA (1)...(19): siRNA sense strand
ggaagcuucuguucaaucc

SEQ ID NO: 1645773 - RNA, 19 nt, Homo sapiens
  misc_RNA (1)...(19): siRNA sense strand
ugaaaggccacgugaagau

SEQ ID NO: 1645774 - RNA, 19 nt, Homo sapiens
  misc_RNA (1)...(19): siRNA sense strand
gcacuugugacagcaguau

SEQ ID NO: 1645775 - RNA, 19 nt, Homo sapiens
  misc_RNA (1)...(19): siRNA sense strand
accggaagcuucuguucaa

SEQ ID NO: 1645776 - RNA, 19 nt, Homo sapiens
  misc_RNA (1)...(19): siRNA sense strand
gugaaaggccacgugaaga

SEQ ID NO: 1645777 - RNA, 19 nt, Homo sapiens
  misc_RNA (1)...(19): siRNA sense strand
ccagcgguccuuaccagaa

SEQ ID NO: 1645778 - RNA, 19 nt, Homo sapiens
  misc_RNA (1)...(19): siRNA sense strand
gaacucaucuuugucaaug

SEQ ID NO: 1645779 - RNA, 19 nt, Homo sapiens
  misc_RNA (1)...(19): siRNA sense strand
gacauuagcuacccagaaa

SEQ ID NO: 1645780 - RNA, 19 nt, Homo sapiens
  misc_RNA (1)...(19): siRNA sense strand
gaucaaagauauggugaaa

SEQ ID NO: 1645781 - RNA, 19 nt, Homo sapiens
  misc_RNA (1)...(19): siRNA sense strand
cugaaacgcugcacauuaa

SEQ ID NO: 1645782 - RNA, 19 nt, Homo sapiens
  misc_RNA (1)...(19): siRNA sense strand
gaacaguugucagagaaga

SEQ ID NO: 1645783 - RNA, 19 nt, Homo sapiens
  misc_RNA (1)...(19): siRNA sense strand
gggaacaguugucagagaa

SEQ ID NO: 1645784 - RNA, 19 nt, Homo sapiens
  misc_RNA (1)...(19): siRNA sense strand
gaagaggauccaagaagaa

SEQ ID NO: 1645785 - RNA, 19 nt, Homo sapiens
  misc_RNA (1)...(19): siRNA sense strand
caacacccaucccaggaaa

SEQ ID NO: 1645786 - RNA, 19 nt, Homo sapiens
  misc_RNA (1)...(19): siRNA sense strand
gaucgugacugcuguguac

SEQ ID NO: 1645787 - RNA, 19 nt, Homo sapiens
  misc_RNA (1)...(19): siRNA sense strand
gcaagaagaagaagaccaa

SEQ ID NO: 1645788 - RNA, 19 nt, Homo sapiens
  misc_RNA (1)...(19): siRNA sense strand
ccgcagagguggugaacuu

SEQ ID NO: 1645789 - RNA, 19 nt, Homo sapiens
  misc_RNA (1)...(19): siRNA sense strand
gcucuggccucucuacaug

SEQ ID NO: 1645790 - RNA, 19 nt, Homo sapiens
  misc_RNA (1)...(19): siRNA sense strand
guaaagaacagccaaccuu

SEQ ID NO: 1645791 - RNA, 19 nt, Homo sapiens
  misc_RNA (1)...(19): siRNA sense strand
agaagaggauccaagaaga

SEQ ID NO: 1645792 - RNA, 19 nt, Homo sapiens
  misc_RNA (1)...(19): siRNA sense strand
ucaaagauauggugaaagc

SEQ ID NO: 1645793 - RNA, 19 nt, Homo sapiens
  misc_RNA (1)...(19): siRNA sense strand
uggcugggauucuuucuuu

SEQ ID NO: 1645794 - RNA, 19 nt, Homo sapiens
  misc_RNA (1)...(19): siRNA sense strand
cagccaaccuucucuggaa

SEQ ID NO: 1645795 - RNA, 19 nt, Homo sapiens
  misc_RNA (1)...(19): siRNA sense strand
agcagaagcugaacagaaa

SEQ ID NO: 1645796 - RNA, 19 nt, Homo sapiens
  misc_RNA (1)...(19): siRNA sense strand
cagaaauggugacuggauu

SEQ ID NO: 1645797 - RNA, 19 nt, Homo sapiens
  misc_RNA (1)...(19): siRNA sense strand
ccacguugcuguccaugug

SEQ ID NO: 1645798 - RNA, 19 nt, Homo sapiens
  misc_RNA (1)...(19): siRNA sense strand
gauccaagaagaauaugaa

SEQ ID NO: 1645799 - RNA, 19 nt, Homo sapiens
  misc_RNA (1)...(19): siRNA sense strand
gagaagaggauccaagaag

SEQ ID NO: 1645800 - RNA, 19 nt, Homo sapiens
  misc_RNA (1)...(19): siRNA sense strand
ucugaaacgcugcacauua

SEQ ID NO: 1645801 - RNA, 19 nt, Homo sapiens
  misc_RNA (1)...(19): siRNA sense strand
gaggauccaagaagaauau

SEQ ID NO: 1645802 - RNA, 19 nt, Homo sapiens
  misc_RNA (1)...(19): siRNA sense strand
gcacaacgagaaccugaau

SEQ ID NO: 1645803 - RNA, 19 nt, Homo sapiens
  misc_RNA (1)...(19): siRNA sense strand
gaagaggccgaacccauca

SEQ ID NO: 1645804 - RNA, 19 nt, Homo sapiens
  misc_RNA (1)...(19): siRNA sense strand
cagcaaccaucaccaucuu

SEQ ID NO: 1645805 - RNA, 19 nt, Homo sapiens
  misc_RNA (1)...(19): siRNA sense strand
gaaccugcauaagcgcauu

SEQ ID NO: 1645806 - RNA, 19 nt, Homo sapiens
  misc_RNA (1)...(19): siRNA sense strand
caucaaaacugcaaaccaa

SEQ ID NO: 1645807 - RNA, 19 nt, Homo sapiens
  misc_RNA (1)...(19): siRNA sense strand
ucaccacucugaugcacaa

SEQ ID NO: 1645808 - RNA, 19 nt, Homo sapiens
  misc_RNA (1)...(19): siRNA sense strand
aagaaaggcuaccguacug

SEQ ID NO: 1645809 - RNA, 19 nt, Homo sapiens
  misc_RNA (1)...(19): siRNA sense strand
gcggaguacuucaagaaca

SEQ ID NO: 1645810 - RNA, 19 nt, Homo sapiens
  misc_RNA (1)...(19): siRNA sense strand
gaaaggcuaccguacugau

SEQ ID NO: 1645811 - RNA, 19 nt, Homo sapiens
  misc_RNA (1)...(19): siRNA sense strand
agaaguggaaccugcauaa

SEQ ID NO: 1645812 - RNA, 19 nt, Homo sapiens
  misc_RNA (1)...(19): siRNA sense strand
gcagagguggugaacuuug

SEQ ID NO: 1645813 - RNA, 19 nt, Homo sapiens
  misc_RNA (1)...(19): siRNA sense strand
ccaggaagcagaagcugaa

SEQ ID NO: 1645814 - RNA, 19 nt, Homo sapiens
  misc_RNA (1)...(19): siRNA sense strand
aaagggaacaguugucaga

SEQ ID NO: 1645815 - RNA, 19 nt, Homo sapiens
  misc_RNA (1)...(19): siRNA sense strand
gcaacacccaucccaggaa

SEQ ID NO: 1645816 - RNA, 19 nt, Homo sapiens
  misc_RNA (1)...(19): siRNA sense strand
gagaaguggaaccugcaua

SEQ ID NO: 1645817 - RNA, 19 nt, Homo sapiens
  misc_RNA (1)...(19): siRNA sense strand
cagagaagaggauccaaga

SEQ ID NO: 1645818 - RNA, 19 nt, Homo sapiens
  misc_RNA (1)...(19): siRNA sense strand
gcaugcugcugcucugcuu

SEQ ID NO: 1645819 - RNA, 19 nt, Homo sapiens
  misc_RNA (1)...(19): siRNA sense strand
gcugggauucuuucuuuga

SEQ ID NO: 1645820 - RNA, 19 nt, Homo sapiens
  misc_RNA (1)...(19): siRNA sense strand
ggccugggagucaacguua

SEQ ID NO: 1645821 - RNA, 19 nt, Homo sapiens
  misc_RNA (1)...(19): siRNA sense strand
gaccaugcccugggagauu

SEQ ID NO: 1645822 - RNA, 19 nt, Homo sapiens
  misc_RNA (1)...(19): siRNA sense strand
aaagaaugauggagagaac

SEQ ID NO: 1645823 - RNA, 19 nt, Homo sapiens
  misc_RNA (1)...(19): siRNA sense strand
acgcagaccucaccacucu

SEQ ID NO: 1645824 - RNA, 19 nt, Homo sapiens
  misc_RNA (1)...(19): siRNA sense strand
ccugggagauugucauucu

SEQ ID NO: 1645825 - RNA, 19 nt, Homo sapiens
  misc_RNA (1)...(19): siRNA sense strand
aagcagaagcugaacagaa

SEQ ID NO: 1645826 - RNA, 19 nt, Homo sapiens
  misc_RNA (1)...(19): siRNA sense strand
ugaauggugugcccucgau

SEQ ID NO: 1645827 - RNA, 19 nt, Homo sapiens
  misc_RNA (1)...(19): siRNA sense strand
ggaacucaucuuugucaau

SEQ ID NO: 1645828 - RNA, 19 nt, Homo sapiens
  misc_RNA (1)...(19): siRNA sense strand
ccacucugaugcacaacga

SEQ ID NO: 1645829 - RNA, 19 nt, Homo sapiens
  misc_RNA (1)...(19): siRNA sense strand
gccaucgucuucagcuaug

SEQ ID NO: 1645830 - RNA, 19 nt, Homo sapiens
  misc_RNA (1)...(19): siRNA sense strand
ggagauugucauucugguu

SEQ ID NO: 1645831 - RNA, 19 nt, Homo sapiens
  misc_RNA (1)...(19): siRNA sense strand
ggauugggaaccagauguu

SEQ ID NO: 1645832 - RNA, 19 nt, Homo sapiens
  misc_RNA (1)...(19): siRNA sense strand
cuacauggauugggaacca

SEQ ID NO: 1645833 - RNA, 19 nt, Homo sapiens
  misc_RNA (1)...(19): siRNA sense strand
ggaagcagaagcugaacag

SEQ ID NO: 1645834 - RNA, 19 nt, Homo sapiens
  misc_RNA (1)...(19): siRNA sense strand
cugcugcucugcuucaugu

SEQ ID NO: 1645835 - RNA, 19 nt, Homo sapiens
  misc_RNA (1)...(19): siRNA sense strand
ggaccgagcccaucaucac

SEQ ID NO: 1645836 - RNA, 19 nt, Homo sapiens
  misc_RNA (1)...(19): siRNA sense strand
gcaccugguuccucuucag

SEQ ID NO: 1645837 - RNA, 19 nt, Homo sapiens
  misc_RNA (1)...(19): siRNA sense strand
gcaacuccaacaccgaaga

SEQ ID NO: 1645838 - RNA, 19 nt, Homo sapiens
  misc_RNA (1)...(19): siRNA sense strand
ccauaucccucaucaugcu

SEQ ID NO: 1645839 - RNA, 19 nt, Homo sapiens
  misc_RNA (1)...(19): siRNA sense strand
guaccacguugcuguccau

SEQ ID NO: 1645840 - RNA, 19 nt, Homo sapiens
  misc_RNA (1)...(19): siRNA sense strand
gcacugccagaucaaagau

SEQ ID NO: 1645841 - RNA, 19 nt, Homo sapiens
  misc_RNA (1)...(19): siRNA sense strand
cagagguggugaacuuugg

SEQ ID NO: 1645842 - RNA, 19 nt, Homo sapiens
  misc_RNA (1)...(19): siRNA sense strand
guacaggucccaccaugac

SEQ ID NO: 1645843 - RNA, 19 nt, Homo sapiens
  misc_RNA (1)...(19): siRNA sense strand
gcgagggucagcaacauca

SEQ ID NO: 1645844 - RNA, 19 nt, Homo sapiens
  misc_RNA (1)...(19): siRNA sense strand
aaagaaaggcuaccguacu

SEQ ID NO: 1645845 - RNA, 19 nt, Homo sapiens
  misc_RNA (1)...(19): siRNA sense strand
gggcgagggucagcaacau

SEQ ID NO: 1645846 - RNA, 19 nt, Homo sapiens
  misc_RNA (1)...(19): siRNA sense strand
gggagucaacguuauugga

SEQ ID NO: 1645847 - RNA, 19 nt, Homo sapiens
  misc_RNA (1)...(19): siRNA sense strand
ccauguggcuguccaacac

SEQ ID NO: 1645848 - RNA, 19 nt, Homo sapiens
  misc_RNA (1)...(19): siRNA sense strand
gcauugcucugcgcauggu

SEQ ID NO: 1645849 - RNA, 19 nt, Homo sapiens
  misc_RNA (1)...(19): siRNA sense strand
gaaguggaaccugcauaag

SEQ ID NO: 1645850 - RNA, 19 nt, Homo sapiens
  misc_RNA (1)...(19): siRNA sense strand
ucucugagcaagaagaaga

SEQ ID NO: 1645851 - RNA, 19 nt, Homo sapiens
  misc_RNA (1)...(19): siRNA sense strand
gcucugcgcauggucuuga

SEQ ID NO: 1645852 - RNA, 19 nt, Homo sapiens
  misc_RNA (1)...(19): siRNA sense strand
ggacuggugauaguaaugg

SEQ ID NO: 1645853 - RNA, 19 nt, Homo sapiens
  misc_RNA (1)...(19): siRNA sense strand
uuauuggacuggugauagu

SEQ ID NO: 1645854 - RNA, 19 nt, Homo sapiens
  misc_RNA (1)...(19): siRNA sense strand
agggaacaguugucagaga

SEQ ID NO: 1645855 - RNA, 19 nt, Homo sapiens
  misc_RNA (1)...(19): siRNA sense strand
uuccugggcugcaauuuua

SEQ ID NO: 1645856 - RNA, 19 nt, Homo sapiens
  misc_RNA (1)...(19): siRNA sense strand
gaagcugaacagaaaguac

SEQ ID NO: 1645857 - RNA, 19 nt, Homo sapiens
  misc_RNA (1)...(19): siRNA sense strand
acugccagaucaaagauau

SEQ ID NO: 1645858 - RNA, 19 nt, Homo sapiens
  misc_RNA (1)...(19): siRNA sense strand
ggauccaagaagaauauga

SEQ ID NO: 1645859 - RNA, 19 nt, Homo sapiens
  misc_RNA (1)...(19): siRNA sense strand
gugcuuacgugcugaucgu

SEQ ID NO: 1645860 - RNA, 19 nt, Homo sapiens
  misc_RNA (1)...(19): siRNA sense strand
cggcggaguacuucaagaa

SEQ ID NO: 1645861 - RNA, 19 nt, Homo sapiens
  misc_RNA (1)...(19): siRNA sense strand
cugggauucuuucuuugaa

SEQ ID NO: 1645862 - RNA, 19 nt, Homo sapiens
  misc_RNA (1)...(19): siRNA sense strand
agacauuagcuacccagaa

SEQ ID NO: 1645863 - RNA, 19 nt, Homo sapiens
  misc_RNA (1)...(19): siRNA sense strand
acacuucaacaaccaguau

SEQ ID NO: 1645864 - RNA, 19 nt, Homo sapiens
  misc_RNA (1)...(19): siRNA sense strand
uggccucucuacauggauu

SEQ ID NO: 1645865 - RNA, 19 nt, Homo sapiens
  misc_RNA (1)...(19): siRNA sense strand
caccaugugcaucuccuuu

SEQ ID NO: 1645866 - RNA, 19 nt, Homo sapiens
  misc_RNA (1)...(19): siRNA sense strand
acaacgagaaccugaaugg

SEQ ID NO: 1645867 - RNA, 19 nt, Homo sapiens
  misc_RNA (1)...(19): siRNA sense strand
cuaaugccaucgucuucag

SEQ ID NO: 1645868 - RNA, 19 nt, Homo sapiens
  misc_RNA (1)...(19): siRNA sense strand
cauugucacugaguuugug

SEQ ID NO: 1645869 - RNA, 19 nt, Homo sapiens
  misc_RNA (1)...(19): siRNA sense strand
ucguguccauugucacuga

SEQ ID NO: 1645870 - RNA, 19 nt, Homo sapiens
  misc_RNA (1)...(19): siRNA sense strand
ugaugaccguacugugguu

SEQ ID NO: 1645871 - RNA, 19 nt, Homo sapiens
  misc_RNA (1)...(19): siRNA sense strand
gaagcagaagcugaacaga

SEQ ID NO: 1645872 - RNA, 19 nt, Homo sapiens
  misc_RNA (1)...(19): siRNA sense strand
caagaagaagaagaccaaa

SEQ ID NO: 1645873 - RNA, 19 nt, Homo sapiens
  misc_RNA (1)...(19): siRNA sense strand
gaacaacgcugcuauuaua

SEQ ID NO: 1645874 - RNA, 19 nt, Homo sapiens
  misc_RNA (1)...(19): siRNA sense strand
cagaugaacuuaaagauga

SEQ ID NO: 1645875 - RNA, 19 nt, Homo sapiens
  misc_RNA (1)...(19): siRNA sense strand
gaagaaugguuacgugaga

SEQ ID NO: 1645876 - RNA, 19 nt, Homo sapiens
  misc_RNA (1)...(19): siRNA sense strand
caaccucgcuucauugugu

SEQ ID NO: 1645877 - RNA, 19 nt, Homo sapiens
  misc_RNA (1)...(19): siRNA sense strand
uaaugaagauugacaagga

SEQ ID NO: 1645878 - RNA, 19 nt, Homo sapiens
  misc_RNA (1)...(19): siRNA sense strand
caacgcugcuauuauaaug

SEQ ID NO: 1645879 - RNA, 19 nt, Homo sapiens
  misc_RNA (1)...(19): siRNA sense strand
gaacuaaccaagguauuug

SEQ ID NO: 1645880 - RNA, 19 nt, Homo sapiens
  misc_RNA (1)...(19): siRNA sense strand
gauguaagccugaacaaca

SEQ ID NO: 1645881 - RNA, 19 nt, Homo sapiens
  misc_RNA (1)...(19): siRNA sense strand
gaacaacagaugauguaug

SEQ ID NO: 1645882 - RNA, 19 nt, Homo sapiens
  misc_RNA (1)...(19): siRNA sense strand
ccgaagaccuaacugaaga

SEQ ID NO: 1645883 - RNA, 19 nt, Homo sapiens
  misc_RNA (1)...(19): siRNA sense strand
ugaacuaccugaacgacaa

SEQ ID NO: 1645884 - RNA, 19 nt, Homo sapiens
  misc_RNA (1)...(19): siRNA sense strand
uauccucugugcuuuauuu

SEQ ID NO: 1645885 - RNA, 19 nt, Homo sapiens
  misc_RNA (1)...(19): siRNA sense strand
gaugauguaugcuggaagu

SEQ ID NO: 1645886 - RNA, 19 nt, Homo sapiens
  misc_RNA (1)...(19): siRNA sense strand
agaccuaacugaagaaugg

SEQ ID NO: 1645887 - RNA, 19 nt, Homo sapiens
  misc_RNA (1)...(19): siRNA sense strand
gaaguaagaauaagcuagu

SEQ ID NO: 1645888 - RNA, 19 nt, Homo sapiens
  misc_RNA (1)...(19): siRNA sense strand
ugauguugccgaagauuua

SEQ ID NO: 1645889 - RNA, 19 nt, Homo sapiens
  misc_RNA (1)...(19): siRNA sense strand
gaacgacaaccucgcuuca

SEQ ID NO: 1645890 - RNA, 19 nt, Homo sapiens
  misc_RNA (1)...(19): siRNA sense strand
gaagauugacaaggauaaa

SEQ ID NO: 1645891 - RNA, 19 nt, Homo sapiens
  misc_RNA (1)...(19): siRNA sense strand
gauguaugcuggaaguaag

SEQ ID NO: 1645892 - RNA, 19 nt, Homo sapiens
  misc_RNA (1)...(19): siRNA sense strand
ggauaaacgccugguggua

SEQ ID NO: 1645893 - RNA, 19 nt, Homo sapiens
  misc_RNA (1)...(19): siRNA sense strand
gcuucauuguguauaguua

SEQ ID NO: 1645894 - RNA, 19 nt, Homo sapiens
  misc_RNA (1)...(19): siRNA sense strand
ugaacuaaccaagguauuu

SEQ ID NO: 1645895 - RNA, 19 nt, Homo sapiens
  misc_RNA (1)...(19): siRNA sense strand
ugccgaagauuuaguggaa

SEQ ID NO: 1645896 - RNA, 19 nt, Homo sapiens
  misc_RNA (1)...(19): siRNA sense strand
ccagaugaacuuaaagaug

SEQ ID NO: 1645897 - RNA, 19 nt, Homo sapiens
  misc_RNA (1)...(19): siRNA sense strand
gauggaagaguuucauauc

SEQ ID NO: 1645898 - RNA, 19 nt, Homo sapiens
  misc_RNA (1)...(19): siRNA sense strand
ucaacaugaugauggaaga

SEQ ID NO: 1645899 - RNA, 19 nt, Homo sapiens
  misc_RNA (1)...(19): siRNA sense strand
gaaacgaacaacgcugcua

SEQ ID NO: 1645900 - RNA, 19 nt, Homo sapiens
  misc_RNA (1)...(19): siRNA sense strand
acgacaaccucgcuucauu

SEQ ID NO: 1645901 - RNA, 19 nt, Homo sapiens
  misc_RNA (1)...(19): siRNA sense strand
gagugagucuuugguuguu

SEQ ID NO: 1645902 - RNA, 19 nt, Homo sapiens
  misc_RNA (1)...(19): siRNA sense strand
cgaacaacgcugcuauuau

SEQ ID NO: 1645903 - RNA, 19 nt, Homo sapiens
  misc_RNA (1)...(19): siRNA sense strand
gagggcauuucaccagaug

SEQ ID NO: 1645904 - RNA, 19 nt, Homo sapiens
  misc_RNA (1)...(19): siRNA sense strand
cauauccucugugcuuuau

SEQ ID NO: 1645905 - RNA, 19 nt, Homo sapiens
  misc_RNA (1)...(19): siRNA sense strand
cgacaaccucgcuucauug

SEQ ID NO: 1645906 - RNA, 19 nt, Homo sapiens
  misc_RNA (1)...(19): siRNA sense strand
ccaguccuguuggauguaa

SEQ ID NO: 1645907 - RNA, 19 nt, Homo sapiens
  misc_RNA (1)...(19): siRNA sense strand
gaacuuaaagaugaacuac

SEQ ID NO: 1645908 - RNA, 19 nt, Homo sapiens
  misc_RNA (1)...(19): siRNA sense strand
uggaaaagcugagaaaguu

SEQ ID NO: 1645909 - RNA, 19 nt, Homo sapiens
  misc_RNA (1)...(19): siRNA sense strand
acgaacaacgcugcuauua

SEQ ID NO: 1645910 - RNA, 19 nt, Homo sapiens
  misc_RNA (1)...(19): siRNA sense strand
gugagucuuugguuguuug

SEQ ID NO: 1645911 - RNA, 19 nt, Homo sapiens
  misc_RNA (1)...(19): siRNA sense strand
cagaugauguaugcuggaa

SEQ ID NO: 1645912 - RNA, 19 nt, Homo sapiens
  misc_RNA (1)...(19): siRNA sense strand
aacaacagaugauguaugc

SEQ ID NO: 1645913 - RNA, 19 nt, Homo sapiens
  misc_RNA (1)...(19): siRNA sense strand
agucuuugguuguuuguga

SEQ ID NO: 1645914 - RNA, 19 nt, Homo sapiens
  misc_RNA (1)...(19): siRNA sense strand
agaaauaccgaagaccuaa

SEQ ID NO: 1645915 - RNA, 19 nt, Homo sapiens
  misc_RNA (1)...(19): siRNA sense strand
acgcugcuauuauaaugaa

SEQ ID NO: 1645916 - RNA, 19 nt, Homo sapiens
  misc_RNA (1)...(19): siRNA sense strand
cugaacaacagaugaugua

SEQ ID NO: 1645917 - RNA, 19 nt, Homo sapiens
  misc_RNA (1)...(19): siRNA sense strand
ucauauccucugugcuuua

SEQ ID NO: 1645918 - RNA, 19 nt, Homo sapiens
  misc_RNA (1)...(19): siRNA sense strand
aaacgaacaacgcugcuau

SEQ ID NO: 1645919 - RNA, 19 nt, Homo sapiens
  misc_RNA (1)...(19): siRNA sense strand
aauaagaaauaccgaagac

SEQ ID NO: 1645920 - RNA, 19 nt, Homo sapiens
  misc_RNA (1)...(19): siRNA sense strand
ugaagauugacaaggauaa

SEQ ID NO: 1645921 - RNA, 19 nt, Homo sapiens
  misc_RNA (1)...(19): siRNA sense strand
aagaaauaccgaagaccua

SEQ ID NO: 1645922 - RNA, 19 nt, Homo sapiens
  misc_RNA (1)...(19): siRNA sense strand
caccagaugaacuuaaaga

SEQ ID NO: 1645923 - RNA, 19 nt, Homo sapiens
  misc_RNA (1)...(19): siRNA sense strand
gaagaccuaacugaagaau

SEQ ID NO: 1645924 - RNA, 19 nt, Homo sapiens
  misc_RNA (1)...(19): siRNA sense strand
uuucauauccucugugcuu

SEQ ID NO: 1645925 - RNA, 19 nt, Homo sapiens
  misc_RNA (1)...(19): siRNA sense strand
caugaugauggaagaguuu

SEQ ID NO: 1645926 - RNA, 19 nt, Homo sapiens
  misc_RNA (1)...(19): siRNA sense strand
uaaagaugaacuaccugaa

SEQ ID NO: 1645927 - RNA, 19 nt, Homo sapiens
  misc_RNA (1)...(19): siRNA sense strand
gguacuggaugaggagcuu

SEQ ID NO: 1645928 - RNA, 19 nt, Homo sapiens
  misc_RNA (1)...(19): siRNA sense strand
uaugcuggaaguaagaaua

SEQ ID NO: 1645929 - RNA, 19 nt, Homo sapiens
  misc_RNA (1)...(19): siRNA sense strand
ugauguaugcuggaaguaa

SEQ ID NO: 1645930 - RNA, 19 nt, Homo sapiens
  misc_RNA (1)...(19): siRNA sense strand
acaugaugauggaagaguu

SEQ ID NO: 1645931 - RNA, 19 nt, Homo sapiens
  misc_RNA (1)...(19): siRNA sense strand
gugauguugccgaagauuu

SEQ ID NO: 1645932 - RNA, 19 nt, Homo sapiens
  misc_RNA (1)...(19): siRNA sense strand
uuugugauguugccgaaga

SEQ ID NO: 1645933 - RNA, 19 nt, Homo sapiens
  misc_RNA (1)...(19): siRNA sense strand
uaccgaagaccuaacugaa

SEQ ID NO: 1645934 - RNA, 19 nt, Homo sapiens
  misc_RNA (1)...(19): siRNA sense strand
ugauggaagaguuucauau

SEQ ID NO: 1645935 - RNA, 19 nt, Homo sapiens
  misc_RNA (1)...(19): siRNA sense strand
gcugaacuaaccaagguau

SEQ ID NO: 1645936 - RNA, 19 nt, Homo sapiens
  misc_RNA (1)...(19): siRNA sense strand
cuaaccaagguauuugaaa

SEQ ID NO: 1645937 - RNA, 19 nt, Homo sapiens
  misc_RNA (1)...(19): siRNA sense strand
aagaaugguuacgugagaa

SEQ ID NO: 1645938 - RNA, 19 nt, Homo sapiens
  misc_RNA (1)...(19): siRNA sense strand
gccgaagauuuaguggaaa

SEQ ID NO: 1645939 - RNA, 19 nt, Homo sapiens
  misc_RNA (1)...(19): siRNA sense strand
aaugaagauugacaaggau

SEQ ID NO: 1645940 - RNA, 19 nt, Homo sapiens
  misc_RNA (1)...(19): siRNA sense strand
ugagggcauuucaccagau

SEQ ID NO: 1645941 - RNA, 19 nt, Homo sapiens
  misc_RNA (1)...(19): siRNA sense strand
uggaagaguuucauauccu

SEQ ID NO: 1645942 - RNA, 19 nt, Homo sapiens
  misc_RNA (1)...(19): siRNA sense strand
ggaaaagcugagaaaguuu

SEQ ID NO: 1645943 - RNA, 19 nt, Homo sapiens
  misc_RNA (1)...(19): siRNA sense strand
aaagaugaacuaccugaac

SEQ ID NO: 1645944 - RNA, 19 nt, Homo sapiens
  misc_RNA (1)...(19): siRNA sense strand
ccgaagauuuaguggaaaa

SEQ ID NO: 1645945 - RNA, 19 nt, Homo sapiens
  misc_RNA (1)...(19): siRNA sense strand
gaaauaccgaagaccuaac

SEQ ID NO: 1645946 - RNA, 19 nt, Homo sapiens
  misc_RNA (1)...(19): siRNA sense strand
gaagcuaaauggacaguua

SEQ ID NO: 1645947 - RNA, 19 nt, Homo sapiens
  misc_RNA (1)...(19): siRNA sense strand
caaggaagaucuccauuaa

SEQ ID NO: 1645948 - RNA, 19 nt, Homo sapiens
  misc_RNA (1)...(19): siRNA sense strand
ggaagaagcugcaaaauug

SEQ ID NO: 1645949 - RNA, 19 nt, Homo sapiens
  misc_RNA (1)...(19): siRNA sense strand
ggacagauauuuacaaagg

SEQ ID NO: 1645950 - RNA, 19 nt, Homo sapiens
  misc_RNA (1)...(19): siRNA sense strand
ccaaauaccuaaacaggaa

SEQ ID NO: 1645951 - RNA, 19 nt, Homo sapiens
  misc_RNA (1)...(19): siRNA sense strand
cauauuggauuacguagua

SEQ ID NO: 1645952 - RNA, 19 nt, Homo sapiens
  misc_RNA (1)...(19): siRNA sense strand
gaaggaagcaauuaacaaa

SEQ ID NO: 1645953 - RNA, 19 nt, Homo sapiens
  misc_RNA (1)...(19): siRNA sense strand
gggcagagaagcaucauua

SEQ ID NO: 1645954 - RNA, 19 nt, Homo sapiens
  misc_RNA (1)...(19): siRNA sense strand
cagagaagcaucauuauuu

SEQ ID NO: 1645955 - RNA, 19 nt, Homo sapiens
  misc_RNA (1)...(19): siRNA sense strand
ucaagaaacucagcaauau

SEQ ID NO: 1645956 - RNA, 19 nt, Homo sapiens
  misc_RNA (1)...(19): siRNA sense strand
agaaauacuugcugaauug

SEQ ID NO: 1645957 - RNA, 19 nt, Homo sapiens
  misc_RNA (1)...(19): siRNA sense strand
caagcaagguuuccuaaau

SEQ ID NO: 1645958 - RNA, 19 nt, Homo sapiens
  misc_RNA (1)...(19): siRNA sense strand
caacucaaaccauaucaua

SEQ ID NO: 1645959 - RNA, 19 nt, Homo sapiens
  misc_RNA (1)...(19): siRNA sense strand
caucguaccuguuaccaaa

SEQ ID NO: 1645960 - RNA, 19 nt, Homo sapiens
  misc_RNA (1)...(19): siRNA sense strand
ugaaauaacacaaggcaua

SEQ ID NO: 1645961 - RNA, 19 nt, Homo sapiens
  misc_RNA (1)...(19): siRNA sense strand
cauaaacccuugcaacaug

SEQ ID NO: 1645962 - RNA, 19 nt, Homo sapiens
  misc_RNA (1)...(19): siRNA sense strand
ggacaaaucgcauacuuca

SEQ ID NO: 1645963 - RNA, 19 nt, Homo sapiens
  misc_RNA (1)...(19): siRNA sense strand
gcaccucacuggacaaauc

SEQ ID NO: 1645964 - RNA, 19 nt, Homo sapiens
  misc_RNA (1)...(19): siRNA sense strand
cagaaauacuugcugaauu

SEQ ID NO: 1645965 - RNA, 19 nt, Homo sapiens
  misc_RNA (1)...(19): siRNA sense strand
gaaaccaccaaaccaauuu

SEQ ID NO: 1645966 - RNA, 19 nt, Homo sapiens
  misc_RNA (1)...(19): siRNA sense strand
gaaggugucaguaaagaaa

SEQ ID NO: 1645967 - RNA, 19 nt, Homo sapiens
  misc_RNA (1)...(19): siRNA sense strand
gcaugaaguucccauugaa

SEQ ID NO: 1645968 - RNA, 19 nt, Homo sapiens
  misc_RNA (1)...(19): siRNA sense strand
gacaguggguagaugauuu

SEQ ID NO: 1645969 - RNA, 19 nt, Homo sapiens
  misc_RNA (1)...(19): siRNA sense strand
caucaguugucaaagauaa

SEQ ID NO: 1645970 - RNA, 19 nt, Homo sapiens
  misc_RNA (1)...(19): siRNA sense strand
gaugaagccagauauaauu

SEQ ID NO: 1645971 - RNA, 19 nt, Homo sapiens
  misc_RNA (1)...(19): siRNA sense strand
aggaagaucuccauuaaau

SEQ ID NO: 1645972 - RNA, 19 nt, Homo sapiens
  misc_RNA (1)...(19): siRNA sense strand
agaaacggauagacauaua

SEQ ID NO: 1645973 - RNA, 19 nt, Homo sapiens
  misc_RNA (1)...(19): siRNA sense strand
cacaaggcauauuggauua

SEQ ID NO: 1645974 - RNA, 19 nt, Homo sapiens
  misc_RNA (1)...(19): siRNA sense strand
gagagaagaugggcagaga

SEQ ID NO: 1645975 - RNA, 19 nt, Homo sapiens
  misc_RNA (1)...(19): siRNA sense strand
gcagagaagcaucauuauu

SEQ ID NO: 1645976 - RNA, 19 nt, Homo sapiens
  misc_RNA (1)...(19): siRNA sense strand
gaaugcgucucucucaaga

SEQ ID NO: 1645977 - RNA, 19 nt, Homo sapiens
  misc_RNA (1)...(19): siRNA sense strand
ggaagaucuccauuaaaua

SEQ ID NO: 1645978 - RNA, 19 nt, Homo sapiens
  misc_RNA (1)...(19): siRNA sense strand
gcacuagaaauaaagagua

SEQ ID NO: 1645979 - RNA, 19 nt, Homo sapiens
  misc_RNA (1)...(19): siRNA sense strand
gaacgacaguggguagaug

SEQ ID NO: 1645980 - RNA, 19 nt, Homo sapiens
  misc_RNA (1)...(19): siRNA sense strand
gcaauuaacaaaccauaug

SEQ ID NO: 1645981 - RNA, 19 nt, Homo sapiens
  misc_RNA (1)...(19): siRNA sense strand
ugucauaaauccugcauau

SEQ ID NO: 1645982 - RNA, 19 nt, Homo sapiens
  misc_RNA (1)...(19): siRNA sense strand
caggacagauauuuacaaa

SEQ ID NO: 1645983 - RNA, 19 nt, Homo sapiens
  misc_RNA (1)...(19): siRNA sense strand
gaaacggauagacauauaa

SEQ ID NO: 1645984 - RNA, 19 nt, Homo sapiens
  misc_RNA (1)...(19): siRNA sense strand
aggaggacaugcugaaaua

SEQ ID NO: 1645985 - RNA, 19 nt, Homo sapiens
  misc_RNA (1)...(19): siRNA sense strand
acagaaaacucacuacaua

SEQ ID NO: 1645986 - RNA, 19 nt, Homo sapiens
  misc_RNA (1)...(19): siRNA sense strand
gaauugaagcauggaaaua

SEQ ID NO: 1645987 - RNA, 19 nt, Homo sapiens
  misc_RNA (1)...(19): siRNA sense strand
gaucuucaguauacaaauc

SEQ ID NO: 1645988 - RNA, 19 nt, Homo sapiens
  misc_RNA (1)...(19): siRNA sense strand
augcuaagcugauaacauu

SEQ ID NO: 1645989 - RNA, 19 nt, Homo sapiens
  misc_RNA (1)...(19): siRNA sense strand
ggucauaucguucuguuga

SEQ ID NO: 1645990 - RNA, 19 nt, Homo sapiens
  misc_RNA (1)...(19): siRNA sense strand
gaaauaacacaaggcauau

SEQ ID NO: 1645991 - RNA, 19 nt, Homo sapiens
  misc_RNA (1)...(19): siRNA sense strand
cauggaaacuaaggcuuua

SEQ ID NO: 1645992 - RNA, 19 nt, Homo sapiens
  misc_RNA (1)...(19): siRNA sense strand
caaaucgcauacuucauga

SEQ ID NO: 1645993 - RNA, 19 nt, Homo sapiens
  misc_RNA (1)...(19): siRNA sense strand
auacagagcuaagucauau

SEQ ID NO: 1645994 - RNA, 19 nt, Homo sapiens
  misc_RNA (1)...(19): siRNA sense strand
auacaaaucggguagauaa

SEQ ID NO: 1645995 - RNA, 19 nt, Homo sapiens
  misc_RNA (1)...(19): siRNA sense strand
gaaacuaaggcuuuacuca

SEQ ID NO: 1645996 - RNA, 19 nt, Homo sapiens
  misc_RNA (1)...(19): siRNA sense strand
guucgugacuggccagaaa

SEQ ID NO: 1645997 - RNA, 19 nt, Homo sapiens
  misc_RNA (1)...(19): siRNA sense strand
caagugaaggugucaguaa

SEQ ID NO: 1645998 - RNA, 19 nt, Homo sapiens
  misc_RNA (1)...(19): siRNA sense strand
caaaucggguagauaaagu

SEQ ID NO: 1645999 - RNA, 19 nt, Homo sapiens
  misc_RNA (1)...(19): siRNA sense strand
gagauacugauacuuguuu

SEQ ID NO: 1646000 - RNA, 19 nt, Homo sapiens
  misc_RNA (1)...(19): siRNA sense strand
cagaauggaugggucauau

SEQ ID NO: 1646001 - RNA, 19 nt, Homo sapiens
  misc_RNA (1)...(19): siRNA sense strand
acaaggaagaucuccauua

SEQ ID NO: 1646002 - RNA, 19 nt, Homo sapiens
  misc_RNA (1)...(19): siRNA sense strand
ucacuuuauuccagcuuua

SEQ ID NO: 1646003 - RNA, 19 nt, Homo sapiens
  misc_RNA (1)...(19): siRNA sense strand
uuacagaauugcugggaaa

SEQ ID NO: 1646004 - RNA, 19 nt, Homo sapiens
  misc_RNA (1)...(19): siRNA sense strand
aaaggaaagugcaauccaa

SEQ ID NO: 1646005 - RNA, 19 nt, Homo sapiens
  misc_RNA (1)...(19): siRNA sense strand
aagcaagguuuccuaaaug

SEQ ID NO: 1646006 - RNA, 19 nt, Homo sapiens
  misc_RNA (1)...(19): siRNA sense strand
ugaggccacucgcauauug

SEQ ID NO: 1646007 - RNA, 19 nt, Homo sapiens
  misc_RNA (1)...(19): siRNA sense strand
caugcacaaucucacuuua

SEQ ID NO: 1646008 - RNA, 19 nt, Homo sapiens
  misc_RNA (1)...(19): siRNA sense strand
agagcuaagucauaugaaa

SEQ ID NO: 1646009 - RNA, 19 nt, Homo sapiens
  misc_RNA (1)...(19): siRNA sense strand
gaauacaagaaucucagua

SEQ ID NO: 1646010 - RNA, 19 nt, Homo sapiens
  misc_RNA (1)...(19): siRNA sense strand
caaggcaacagugaaauaa

SEQ ID NO: 1646011 - RNA, 19 nt, Homo sapiens
  misc_RNA (1)...(19): siRNA sense strand
uuacuaagccgucuucuca

SEQ ID NO: 1646012 - RNA, 19 nt, Homo sapiens
  misc_RNA (1)...(19): siRNA sense strand
guagaaaccaccaaaccaa

SEQ ID NO: 1646013 - RNA, 19 nt, Homo sapiens
  misc_RNA (1)...(19): siRNA sense strand
gccuucaacucaaaccaua

SEQ ID NO: 1646014 - RNA, 19 nt, Homo sapiens
  misc_RNA (1)...(19): siRNA sense strand
caagaaacucagcaauauu

SEQ ID NO: 1646015 - RNA, 19 nt, Homo sapiens
  misc_RNA (1)...(19): siRNA sense strand
ucaaggcaacagugaaaua

SEQ ID NO: 1646016 - RNA, 19 nt, Homo sapiens
  misc_RNA (1)...(19): siRNA sense strand
acaaaucgcauacuucaug

SEQ ID NO: 1646017 - RNA, 19 nt, Homo sapiens
  misc_RNA (1)...(19): siRNA sense strand
cccacuagcuauucuuauu

SEQ ID NO: 1646018 - RNA, 19 nt, Homo sapiens
  misc_RNA (1)...(19): siRNA sense strand
acacaaggcauauuggauu

SEQ ID NO: 1646019 - RNA, 19 nt, Homo sapiens
  misc_RNA (1)...(19): siRNA sense strand
ugaauugacuaaucuggau

SEQ ID NO: 1646020 - RNA, 19 nt, Homo sapiens
  misc_RNA (1)...(19): siRNA sense strand
ccagaaacggauagacaua

SEQ ID NO: 1646021 - RNA, 19 nt, Homo sapiens
  misc_RNA (1)...(19): siRNA sense strand
aauguuagcccuagagaaa

SEQ ID NO: 1646022 - RNA, 19 nt, Homo sapiens
  misc_RNA (1)...(19): siRNA sense strand
gaagaugggcagagaagca

SEQ ID NO: 1646023 - RNA, 19 nt, Homo sapiens
  misc_RNA (1)...(19): siRNA sense strand
gcuuuacucaucagucuua

SEQ ID NO: 1646024 - RNA, 19 nt, Homo sapiens
  misc_RNA (1)...(19): siRNA sense strand
gcagauaauggaaggaaug

SEQ ID NO: 1646025 - RNA, 19 nt, Homo sapiens
  misc_RNA (1)...(19): siRNA sense strand
uaagccgucuucucaguga

SEQ ID NO: 1646026 - RNA, 19 nt, Homo sapiens
  misc_RNA (1)...(19): siRNA sense strand
ucuaggagcuccagacuac

SEQ ID NO: 1646027 - RNA, 19 nt, Homo sapiens
  misc_RNA (1)...(19): siRNA sense strand
ugaaucaggucagacagaa

SEQ ID NO: 1646028 - RNA, 19 nt, Homo sapiens
  misc_RNA (1)...(19): siRNA sense strand
gauauuaugcgagucugua

SEQ ID NO: 1646029 - RNA, 19 nt, Homo sapiens
  misc_RNA (1)...(19): siRNA sense strand
caugagcagugucacagaa

SEQ ID NO: 1646030 - RNA, 19 nt, Homo sapiens
  misc_RNA (1)...(19): siRNA sense strand
cagcgcauguucuuacaga

SEQ ID NO: 1646031 - RNA, 19 nt, Homo sapiens
  misc_RNA (1)...(19): siRNA sense strand
gagcuaagucauaugaaau

SEQ ID NO: 1646032 - RNA, 19 nt, Homo sapiens
  misc_RNA (1)...(19): siRNA sense strand
uaguacagauucuccuaaa

SEQ ID NO: 1646033 - RNA, 19 nt, Homo sapiens
  misc_RNA (1)...(19): siRNA sense strand
ugcacaaucucacuuuauu

SEQ ID NO: 1646034 - RNA, 19 nt, Homo sapiens
  misc_RNA (1)...(19): siRNA sense strand
gugaaggugucaguaaaga

SEQ ID NO: 1646035 - RNA, 19 nt, Homo sapiens
  misc_RNA (1)...(19): siRNA sense strand
acaagaaucucaguacaag

SEQ ID NO: 1646036 - RNA, 19 nt, Homo sapiens
  misc_RNA (1)...(19): siRNA sense strand
aggacaugcugaaauagua

SEQ ID NO: 1646037 - RNA, 19 nt, Homo sapiens
  misc_RNA (1)...(19): siRNA sense strand
ucagucaaccaguuagaua

SEQ ID NO: 1646038 - RNA, 19 nt, Homo sapiens
  misc_RNA (1)...(19): siRNA sense strand
ucggguagauaaaguggua

SEQ ID NO: 1646039 - RNA, 19 nt, Homo sapiens
  misc_RNA (1)...(19): siRNA sense strand
gaaaacgaguuguacuaau

SEQ ID NO: 1646040 - RNA, 19 nt, Homo sapiens
  misc_RNA (1)...(19): siRNA sense strand
gggagauacugauacuugu

SEQ ID NO: 1646041 - RNA, 19 nt, Homo sapiens
  misc_RNA (1)...(19): siRNA sense strand
acucaucagucuuaaguau

SEQ ID NO: 1646042 - RNA, 19 nt, Homo sapiens
  misc_RNA (1)...(19): siRNA sense strand
ggaauacagagcuaaguca

SEQ ID NO: 1646043 - RNA, 19 nt, Homo sapiens
  misc_RNA (1)...(19): siRNA sense strand
aagaagagaugugagacuu

SEQ ID NO: 1646044 - RNA, 19 nt, Homo sapiens
  misc_RNA (1)...(19): siRNA sense strand
gaaauacuugcugaauuga

SEQ ID NO: 1646045 - RNA, 19 nt, Homo sapiens
  misc_RNA (1)...(19): siRNA sense strand
guucgaauauacagaaugg

SEQ ID NO: 1646046 - RNA, 19 nt, Homo sapiens
  misc_RNA (1)...(19): siRNA sense strand
gaagcuaaauggacaguua

SEQ ID NO: 1646047 - RNA, 19 nt, Homo sapiens
  misc_RNA (1)...(19): siRNA sense strand
caaggaagaucuccauuaa

SEQ ID NO: 1646048 - RNA, 19 nt, Homo sapiens
  misc_RNA (1)...(19): siRNA sense strand
ggaagaagcugcaaaauug

SEQ ID NO: 1646049 - RNA, 19 nt, Homo sapiens
  misc_RNA (1)...(19): siRNA sense strand
ggacagauauuuacaaagg

SEQ ID NO: 1646050 - RNA, 19 nt, Homo sapiens
  misc_RNA (1)...(19): siRNA sense strand
ccaaauaccuaaacaggaa

SEQ ID NO: 1646051 - RNA, 19 nt, Homo sapiens
  misc_RNA (1)...(19): siRNA sense strand
cauauuggauuacguagua

SEQ ID NO: 1646052 - RNA, 19 nt, Homo sapiens
  misc_RNA (1)...(19): siRNA sense strand
gaaggaagcaauuaacaaa

SEQ ID NO: 1646053 - RNA, 19 nt, Homo sapiens
  misc_RNA (1)...(19): siRNA sense strand
gggcagagaagcaucauua

SEQ ID NO: 1646054 - RNA, 19 nt, Homo sapiens
  misc_RNA (1)...(19): siRNA sense strand
cagagaagcaucauuauuu

SEQ ID NO: 1646055 - RNA, 19 nt, Homo sapiens
  misc_RNA (1)...(19): siRNA sense strand
ucaagaaacucagcaauau

SEQ ID NO: 1646056 - RNA, 19 nt, Homo sapiens
  misc_RNA (1)...(19): siRNA sense strand
agaaauacuugcugaauug

SEQ ID NO: 1646057 - RNA, 19 nt, Homo sapiens
  misc_RNA (1)...(19): siRNA sense strand
caagcaagguuuccuaaau

SEQ ID NO: 1646058 - RNA, 19 nt, Homo sapiens
  misc_RNA (1)...(19): siRNA sense strand
caacucaaaccauaucaua

SEQ ID NO: 1646059 - RNA, 19 nt, Homo sapiens
  misc_RNA (1)...(19): siRNA sense strand
caucguaccuguuaccaaa

SEQ ID NO: 1646060 - RNA, 19 nt, Homo sapiens
  misc_RNA (1)...(19): siRNA sense strand
ugaaauaacacaaggcaua

SEQ ID NO: 1646061 - RNA, 19 nt, Homo sapiens
  misc_RNA (1)...(19): siRNA sense strand
cauaaacccuugcaacaug

SEQ ID NO: 1646062 - RNA, 19 nt, Homo sapiens
  misc_RNA (1)...(19): siRNA sense strand
ggacaaaucgcauacuuca

SEQ ID NO: 1646063 - RNA, 19 nt, Homo sapiens
  misc_RNA (1)...(19): siRNA sense strand
gcaccucacuggacaaauc

SEQ ID NO: 1646064 - RNA, 19 nt, Homo sapiens
  misc_RNA (1)...(19): siRNA sense strand
cagaaauacuugcugaauu

SEQ ID NO: 1646065 - RNA, 19 nt, Homo sapiens
  misc_RNA (1)...(19): siRNA sense strand
gaaaccaccaaaccaauuu

SEQ ID NO: 1646066 - RNA, 19 nt, Homo sapiens
  misc_RNA (1)...(19): siRNA sense strand
gaaggugucaguaaagaaa

SEQ ID NO: 1646067 - RNA, 19 nt, Homo sapiens
  misc_RNA (1)...(19): siRNA sense strand
gcaugaaguucccauugaa

SEQ ID NO: 1646068 - RNA, 19 nt, Homo sapiens
  misc_RNA (1)...(19): siRNA sense strand
gacaguggguagaugauuu

SEQ ID NO: 1646069 - RNA, 19 nt, Homo sapiens
  misc_RNA (1)...(19): siRNA sense strand
caucaguugucaaagauaa

SEQ ID NO: 1646070 - RNA, 19 nt, Homo sapiens
  misc_RNA (1)...(19): siRNA sense strand
gaugaagccagauauaauu

SEQ ID NO: 1646071 - RNA, 19 nt, Homo sapiens
  misc_RNA (1)...(19): siRNA sense strand
aggaagaucuccauuaaau

SEQ ID NO: 1646072 - RNA, 19 nt, Homo sapiens
  misc_RNA (1)...(19): siRNA sense strand
agaaacggauagacauaua

SEQ ID NO: 1646073 - RNA, 19 nt, Homo sapiens
  misc_RNA (1)...(19): siRNA sense strand
cacaaggcauauuggauua

SEQ ID NO: 1646074 - RNA, 19 nt, Homo sapiens
  misc_RNA (1)...(19): siRNA sense strand
gagagaagaugggcagaga

SEQ ID NO: 1646075 - RNA, 19 nt, Homo sapiens
  misc_RNA (1)...(19): siRNA sense strand
gcagagaagcaucauuauu

SEQ ID NO: 1646076 - RNA, 19 nt, Homo sapiens
  misc_RNA (1)...(19): siRNA sense strand
gaaugcgucucucucaaga

SEQ ID NO: 1646077 - RNA, 19 nt, Homo sapiens
  misc_RNA (1)...(19): siRNA sense strand
ggaagaucuccauuaaaua

SEQ ID NO: 1646078 - RNA, 19 nt, Homo sapiens
  misc_RNA (1)...(19): siRNA sense strand
gcacuagaaauaaagagua

SEQ ID NO: 1646079 - RNA, 19 nt, Homo sapiens
  misc_RNA (1)...(19): siRNA sense strand
gaacgacaguggguagaug

SEQ ID NO: 1646080 - RNA, 19 nt, Homo sapiens
  misc_RNA (1)...(19): siRNA sense strand
gcaauuaacaaaccauaug

SEQ ID NO: 1646081 - RNA, 19 nt, Homo sapiens
  misc_RNA (1)...(19): siRNA sense strand
ugucauaaauccugcauau

SEQ ID NO: 1646082 - RNA, 19 nt, Homo sapiens
  misc_RNA (1)...(19): siRNA sense strand
caggacagauauuuacaaa

SEQ ID NO: 1646083 - RNA, 19 nt, Homo sapiens
  misc_RNA (1)...(19): siRNA sense strand
gaaacggauagacauauaa

SEQ ID NO: 1646084 - RNA, 19 nt, Homo sapiens
  misc_RNA (1)...(19): siRNA sense strand
aggaggacaugcugaaaua

SEQ ID NO: 1646085 - RNA, 19 nt, Homo sapiens
  misc_RNA (1)...(19): siRNA sense strand
acagaaaacucacuacaua

SEQ ID NO: 1646086 - RNA, 19 nt, Homo sapiens
  misc_RNA (1)...(19): siRNA sense strand
gaauugaagcauggaaaua

SEQ ID NO: 1646087 - RNA, 19 nt, Homo sapiens
  misc_RNA (1)...(19): siRNA sense strand
gaucuucaguauacaaauc

SEQ ID NO: 1646088 - RNA, 19 nt, Homo sapiens
  misc_RNA (1)...(19): siRNA sense strand
augcuaagcugauaacauu

SEQ ID NO: 1646089 - RNA, 19 nt, Homo sapiens
  misc_RNA (1)...(19): siRNA sense strand
ggucauaucguucuguuga

SEQ ID NO: 1646090 - RNA, 19 nt, Homo sapiens
  misc_RNA (1)...(19): siRNA sense strand
gaaauaacacaaggcauau

SEQ ID NO: 1646091 - RNA, 19 nt, Homo sapiens
  misc_RNA (1)...(19): siRNA sense strand
cauggaaacuaaggcuuua

SEQ ID NO: 1646092 - RNA, 19 nt, Homo sapiens
  misc_RNA (1)...(19): siRNA sense strand
caaaucgcauacuucauga

SEQ ID NO: 1646093 - RNA, 19 nt, Homo sapiens
  misc_RNA (1)...(19): siRNA sense strand
auacagagcuaagucauau

SEQ ID NO: 1646094 - RNA, 19 nt, Homo sapiens
  misc_RNA (1)...(19): siRNA sense strand
auacaaaucggguagauaa

SEQ ID NO: 1646095 - RNA, 19 nt, Homo sapiens
  misc_RNA (1)...(19): siRNA sense strand
gaaacuaaggcuuuacuca

SEQ ID NO: 1646096 - RNA, 19 nt, Homo sapiens
  misc_RNA (1)...(19): siRNA sense strand
guucgugacuggccagaaa

SEQ ID NO: 1646097 - RNA, 19 nt, Homo sapiens
  misc_RNA (1)...(19): siRNA sense strand
caagugaaggugucaguaa

SEQ ID NO: 1646098 - RNA, 19 nt, Homo sapiens
  misc_RNA (1)...(19): siRNA sense strand
caaaucggguagauaaagu

SEQ ID NO: 1646099 - RNA, 19 nt, Homo sapiens
  misc_RNA (1)...(19): siRNA sense strand
gagauacugauacuuguuu

SEQ ID NO: 1646100 - RNA, 19 nt, Homo sapiens
  misc_RNA (1)...(19): siRNA sense strand
cagaauggaugggucauau

SEQ ID NO: 1646101 - RNA, 19 nt, Homo sapiens
  misc_RNA (1)...(19): siRNA sense strand
acaaggaagaucuccauua

SEQ ID NO: 1646102 - RNA, 19 nt, Homo sapiens
  misc_RNA (1)...(19): siRNA sense strand
ucacuuuauuccagcuuua

SEQ ID NO: 1646103 - RNA, 19 nt, Homo sapiens
  misc_RNA (1)...(19): siRNA sense strand
uuacagaauugcugggaaa

SEQ ID NO: 1646104 - RNA, 19 nt, Homo sapiens
  misc_RNA (1)...(19): siRNA sense strand
aaaggaaagugcaauccaa

SEQ ID NO: 1646105 - RNA, 19 nt, Homo sapiens
  misc_RNA (1)...(19): siRNA sense strand
aagcaagguuuccuaaaug

SEQ ID NO: 1646106 - RNA, 19 nt, Homo sapiens
  misc_RNA (1)...(19): siRNA sense strand
ugaggccacucgcauauug

SEQ ID NO: 1646107 - RNA, 19 nt, Homo sapiens
  misc_RNA (1)...(19): siRNA sense strand
caugcacaaucucacuuua

SEQ ID NO: 1646108 - RNA, 19 nt, Homo sapiens
  misc_RNA (1)...(19): siRNA sense strand
agagcuaagucauaugaaa

SEQ ID NO: 1646109 - RNA, 19 nt, Homo sapiens
  misc_RNA (1)...(19): siRNA sense strand
gaauacaagaaucucagua

SEQ ID NO: 1646110 - RNA, 19 nt, Homo sapiens
  misc_RNA (1)...(19): siRNA sense strand
caaggcaacagugaaauaa

SEQ ID NO: 1646111 - RNA, 19 nt, Homo sapiens
  misc_RNA (1)...(19): siRNA sense strand
uuacuaagccgucuucuca

SEQ ID NO: 1646112 - RNA, 19 nt, Homo sapiens
  misc_RNA (1)...(19): siRNA sense strand
guagaaaccaccaaaccaa

SEQ ID NO: 1646113 - RNA, 19 nt, Homo sapiens
  misc_RNA (1)...(19): siRNA sense strand
gccuucaacucaaaccaua

SEQ ID NO: 1646114 - RNA, 19 nt, Homo sapiens
  misc_RNA (1)...(19): siRNA sense strand
caagaaacucagcaauauu

SEQ ID NO: 1646115 - RNA, 19 nt, Homo sapiens
  misc_RNA (1)...(19): siRNA sense strand
ucaaggcaacagugaaaua

SEQ ID NO: 1646116 - RNA, 19 nt, Homo sapiens
  misc_RNA (1)...(19): siRNA sense strand
acaaaucgcauacuucaug

SEQ ID NO: 1646117 - RNA, 19 nt, Homo sapiens
  misc_RNA (1)...(19): siRNA sense strand
cccacuagcuauucuuauu

SEQ ID NO: 1646118 - RNA, 19 nt, Homo sapiens
  misc_RNA (1)...(19): siRNA sense strand
acacaaggcauauuggauu

SEQ ID NO: 1646119 - RNA, 19 nt, Homo sapiens
  misc_RNA (1)...(19): siRNA sense strand
ugaauugacuaaucuggau

SEQ ID NO: 1646120 - RNA, 19 nt, Homo sapiens
  misc_RNA (1)...(19): siRNA sense strand
ccagaaacggauagacaua

SEQ ID NO: 1646121 - RNA, 19 nt, Homo sapiens
  misc_RNA (1)...(19): siRNA sense strand
aauguuagcccuagagaaa

SEQ ID NO: 1646122 - RNA, 19 nt, Homo sapiens
  misc_RNA (1)...(19): siRNA sense strand
gaagaugggcagagaagca

SEQ ID NO: 1646123 - RNA, 19 nt, Homo sapiens
  misc_RNA (1)...(19): siRNA sense strand
gcuuuacucaucagucuua

SEQ ID NO: 1646124 - RNA, 19 nt, Homo sapiens
  misc_RNA (1)...(19): siRNA sense strand
gcagauaauggaaggaaug

SEQ ID NO: 1646125 - RNA, 19 nt, Homo sapiens
  misc_RNA (1)...(19): siRNA sense strand
uaagccgucuucucaguga

SEQ ID NO: 1646126 - RNA, 19 nt, Homo sapiens
  misc_RNA (1)...(19): siRNA sense strand
ucuaggagcuccagacuac

SEQ ID NO: 1646127 - RNA, 19 nt, Homo sapiens
  misc_RNA (1)...(19): siRNA sense strand
ugaaucaggucagacagaa

SEQ ID NO: 1646128 - RNA, 19 nt, Homo sapiens
  misc_RNA (1)...(19): siRNA sense strand
gauauuaugcgagucugua

SEQ ID NO: 1646129 - RNA, 19 nt, Homo sapiens
  misc_RNA (1)...(19): siRNA sense strand
caugagcagugucacagaa

SEQ ID NO: 1646130 - RNA, 19 nt, Homo sapiens
  misc_RNA (1)...(19): siRNA sense strand
cagcgcauguucuuacaga

SEQ ID NO: 1646131 - RNA, 19 nt, Homo sapiens
  misc_RNA (1)...(19): siRNA sense strand
gagcuaagucauaugaaau

SEQ ID NO: 1646132 - RNA, 19 nt, Homo sapiens
  misc_RNA (1)...(19): siRNA sense strand
uaguacagauucuccuaaa

SEQ ID NO: 1646133 - RNA, 19 nt, Homo sapiens
  misc_RNA (1)...(19): siRNA sense strand
ugcacaaucucacuuuauu

SEQ ID NO: 1646134 - RNA, 19 nt, Homo sapiens
  misc_RNA (1)...(19): siRNA sense strand
gugaaggugucaguaaaga

SEQ ID NO: 1646135 - RNA, 19 nt, Homo sapiens
  misc_RNA (1)...(19): siRNA sense strand
acaagaaucucaguacaag

SEQ ID NO: 1646136 - RNA, 19 nt, Homo sapiens
  misc_RNA (1)...(19): siRNA sense strand
aggacaugcugaaauagua

SEQ ID NO: 1646137 - RNA, 19 nt, Homo sapiens
  misc_RNA (1)...(19): siRNA sense strand
ucagucaaccaguuagaua

SEQ ID NO: 1646138 - RNA, 19 nt, Homo sapiens
  misc_RNA (1)...(19): siRNA sense strand
ucggguagauaaaguggua

SEQ ID NO: 1646139 - RNA, 19 nt, Homo sapiens
  misc_RNA (1)...(19): siRNA sense strand
gaaaacgaguuguacuaau

SEQ ID NO: 1646140 - RNA, 19 nt, Homo sapiens
  misc_RNA (1)...(19): siRNA sense strand
gggagauacugauacuugu

SEQ ID NO: 1646141 - RNA, 19 nt, Homo sapiens
  misc_RNA (1)...(19): siRNA sense strand
acucaucagucuuaaguau

SEQ ID NO: 1646142 - RNA, 19 nt, Homo sapiens
  misc_RNA (1)...(19): siRNA sense strand
ggaauacagagcuaaguca

SEQ ID NO: 1646143 - RNA, 19 nt, Homo sapiens
  misc_RNA (1)...(19): siRNA sense strand
aagaagagaugugagacuu

SEQ ID NO: 1646144 - RNA, 19 nt, Homo sapiens
  misc_RNA (1)...(19): siRNA sense strand
gaaauacuugcugaauuga

SEQ ID NO: 1646145 - RNA, 19 nt, Homo sapiens
  misc_RNA (1)...(19): siRNA sense strand
guucgaauauacagaaugg

SEQ ID NO: 1646146 - RNA, 19 nt, Homo sapiens
  misc_RNA (1)...(19): siRNA sense strand
gaagcuaaauggacaguua

SEQ ID NO: 1646147 - RNA, 19 nt, Homo sapiens
  misc_RNA (1)...(19): siRNA sense strand
caaggaagaucuccauuaa

SEQ ID NO: 1646148 - RNA, 19 nt, Homo sapiens
  misc_RNA (1)...(19): siRNA sense strand
ggaagaagcugcaaaauug

SEQ ID NO: 1646149 - RNA, 19 nt, Homo sapiens
  misc_RNA (1)...(19): siRNA sense strand
ggacagauauuuacaaagg

SEQ ID NO: 1646150 - RNA, 19 nt, Homo sapiens
  misc_RNA (1)...(19): siRNA sense strand
ccaaauaccuaaacaggaa

SEQ ID NO: 1646151 - RNA, 19 nt, Homo sapiens
  misc_RNA (1)...(19): siRNA sense strand
cauauuggauuacguagua

SEQ ID NO: 1646152 - RNA, 19 nt, Homo sapiens
  misc_RNA (1)...(19): siRNA sense strand
gaaggaagcaauuaacaaa

SEQ ID NO: 1646153 - RNA, 19 nt, Homo sapiens
  misc_RNA (1)...(19): siRNA sense strand
gggcagagaagcaucauua

SEQ ID NO: 1646154 - RNA, 19 nt, Homo sapiens
  misc_RNA (1)...(19): siRNA sense strand
cagagaagcaucauuauuu

SEQ ID NO: 1646155 - RNA, 19 nt, Homo sapiens
  misc_RNA (1)...(19): siRNA sense strand
ucaagaaacucagcaauau

SEQ ID NO: 1646156 - RNA, 19 nt, Homo sapiens
  misc_RNA (1)...(19): siRNA sense strand
agaaauacuugcugaauug

SEQ ID NO: 1646157 - RNA, 19 nt, Homo sapiens
  misc_RNA (1)...(19): siRNA sense strand
caagcaagguuuccuaaau

SEQ ID NO: 1646158 - RNA, 19 nt, Homo sapiens
  misc_RNA (1)...(19): siRNA sense strand
caacucaaaccauaucaua

SEQ ID NO: 1646159 - RNA, 19 nt, Homo sapiens
  misc_RNA (1)...(19): siRNA sense strand
caucguaccuguuaccaaa

SEQ ID NO: 1646160 - RNA, 19 nt, Homo sapiens
  misc_RNA (1)...(19): siRNA sense strand
ugaaauaacacaaggcaua

SEQ ID NO: 1646161 - RNA, 19 nt, Homo sapiens
  misc_RNA (1)...(19): siRNA sense strand
cauaaacccuugcaacaug

SEQ ID NO: 1646162 - RNA, 19 nt, Homo sapiens
  misc_RNA (1)...(19): siRNA sense strand
ggacaaaucgcauacuuca

SEQ ID NO: 1646163 - RNA, 19 nt, Homo sapiens
  misc_RNA (1)...(19): siRNA sense strand
gcaccucacuggacaaauc

SEQ ID NO: 1646164 - RNA, 19 nt, Homo sapiens
  misc_RNA (1)...(19): siRNA sense strand
cagaaauacuugcugaauu

SEQ ID NO: 1646165 - RNA, 19 nt, Homo sapiens
  misc_RNA (1)...(19): siRNA sense strand
gaaaccaccaaaccaauuu

SEQ ID NO: 1646166 - RNA, 19 nt, Homo sapiens
  misc_RNA (1)...(19): siRNA sense strand
gaaggugucaguaaagaaa

SEQ ID NO: 1646167 - RNA, 19 nt, Homo sapiens
  misc_RNA (1)...(19): siRNA sense strand
gcaugaaguucccauugaa

SEQ ID NO: 1646168 - RNA, 19 nt, Homo sapiens
  misc_RNA (1)...(19): siRNA sense strand
gacaguggguagaugauuu

SEQ ID NO: 1646169 - RNA, 19 nt, Homo sapiens
  misc_RNA (1)...(19): siRNA sense strand
caucaguugucaaagauaa

SEQ ID NO: 1646170 - RNA, 19 nt, Homo sapiens
  misc_RNA (1)...(19): siRNA sense strand
gaugaagccagauauaauu

SEQ ID NO: 1646171 - RNA, 19 nt, Homo sapiens
  misc_RNA (1)...(19): siRNA sense strand
aggaagaucuccauuaaau

SEQ ID NO: 1646172 - RNA, 19 nt, Homo sapiens
  misc_RNA (1)...(19): siRNA sense strand
agaaacggauagacauaua

SEQ ID NO: 1646173 - RNA, 19 nt, Homo sapiens
  misc_RNA (1)...(19): siRNA sense strand
cacaaggcauauuggauua

SEQ ID NO: 1646174 - RNA, 19 nt, Homo sapiens
  misc_RNA (1)...(19): siRNA sense strand
gagagaagaugggcagaga

SEQ ID NO: 1646175 - RNA, 19 nt, Homo sapiens
  misc_RNA (1)...(19): siRNA sense strand
gcagagaagcaucauuauu

SEQ ID NO: 1646176 - RNA, 19 nt, Homo sapiens
  misc_RNA (1)...(19): siRNA sense strand
gaaugcgucucucucaaga

SEQ ID NO: 1646177 - RNA, 19 nt, Homo sapiens
  misc_RNA (1)...(19): siRNA sense strand
ggaagaucuccauuaaaua

SEQ ID NO: 1646178 - RNA, 19 nt, Homo sapiens
  misc_RNA (1)...(19): siRNA sense strand
gcacuagaaauaaagagua

SEQ ID NO: 1646179 - RNA, 19 nt, Homo sapiens
  misc_RNA (1)...(19): siRNA sense strand
gaacgacaguggguagaug

SEQ ID NO: 1646180 - RNA, 19 nt, Homo sapiens
  misc_RNA (1)...(19): siRNA sense strand
gcaauuaacaaaccauaug

SEQ ID NO: 1646181 - RNA, 19 nt, Homo sapiens
  misc_RNA (1)...(19): siRNA sense strand
ugucauaaauccugcauau

SEQ ID NO: 1646182 - RNA, 19 nt, Homo sapiens
  misc_RNA (1)...(19): siRNA sense strand
caggacagauauuuacaaa

SEQ ID NO: 1646183 - RNA, 19 nt, Homo sapiens
  misc_RNA (1)...(19): siRNA sense strand
gaaacggauagacauauaa

SEQ ID NO: 1646184 - RNA, 19 nt, Homo sapiens
  misc_RNA (1)...(19): siRNA sense strand
aggaggacaugcugaaaua

SEQ ID NO: 1646185 - RNA, 19 nt, Homo sapiens
  misc_RNA (1)...(19): siRNA sense strand
acagaaaacucacuacaua

SEQ ID NO: 1646186 - RNA, 19 nt, Homo sapiens
  misc_RNA (1)...(19): siRNA sense strand
gaauugaagcauggaaaua

SEQ ID NO: 1646187 - RNA, 19 nt, Homo sapiens
  misc_RNA (1)...(19): siRNA sense strand
gaucuucaguauacaaauc

SEQ ID NO: 1646188 - RNA, 19 nt, Homo sapiens
  misc_RNA (1)...(19): siRNA sense strand
augcuaagcugauaacauu

SEQ ID NO: 1646189 - RNA, 19 nt, Homo sapiens
  misc_RNA (1)...(19): siRNA sense strand
ggucauaucguucuguuga

SEQ ID NO: 1646190 - RNA, 19 nt, Homo sapiens
  misc_RNA (1)...(19): siRNA sense strand
gaaauaacacaaggcauau

SEQ ID NO: 1646191 - RNA, 19 nt, Homo sapiens
  misc_RNA (1)...(19): siRNA sense strand
cauggaaacuaaggcuuua

SEQ ID NO: 1646192 - RNA, 19 nt, Homo sapiens
  misc_RNA (1)...(19): siRNA sense strand
caaaucgcauacuucauga

SEQ ID NO: 1646193 - RNA, 19 nt, Homo sapiens
  misc_RNA (1)...(19): siRNA sense strand
auacagagcuaagucauau

SEQ ID NO: 1646194 - RNA, 19 nt, Homo sapiens
  misc_RNA (1)...(19): siRNA sense strand
auacaaaucggguagauaa

SEQ ID NO: 1646195 - RNA, 19 nt, Homo sapiens
  misc_RNA (1)...(19): siRNA sense strand
gaaacuaaggcuuuacuca

SEQ ID NO: 1646196 - RNA, 19 nt, Homo sapiens
  misc_RNA (1)...(19): siRNA sense strand
guucgugacuggccagaaa

SEQ ID NO: 1646197 - RNA, 19 nt, Homo sapiens
  misc_RNA (1)...(19): siRNA sense strand
caagugaaggugucaguaa

SEQ ID NO: 1646198 - RNA, 19 nt, Homo sapiens
  misc_RNA (1)...(19): siRNA sense strand
caaaucggguagauaaagu

SEQ ID NO: 1646199 - RNA, 19 nt, Homo sapiens
  misc_RNA (1)...(19): siRNA sense strand
gagauacugauacuuguuu

SEQ ID NO: 1646200 - RNA, 19 nt, Homo sapiens
  misc_RNA (1)...(19): siRNA sense strand
cagaauggaugggucauau

SEQ ID NO: 1646201 - RNA, 19 nt, Homo sapiens
  misc_RNA (1)...(19): siRNA sense strand
acaaggaagaucuccauua

SEQ ID NO: 1646202 - RNA, 19 nt, Homo sapiens
  misc_RNA (1)...(19): siRNA sense strand
ucacuuuauuccagcuuua

SEQ ID NO: 1646203 - RNA, 19 nt, Homo sapiens
  misc_RNA (1)...(19): siRNA sense strand
uuacagaauugcugggaaa

SEQ ID NO: 1646204 - RNA, 19 nt, Homo sapiens
  misc_RNA (1)...(19): siRNA sense strand
aaaggaaagugcaauccaa

SEQ ID NO: 1646205 - RNA, 19 nt, Homo sapiens
  misc_RNA (1)...(19): siRNA sense strand
aagcaagguuuccuaaaug

SEQ ID NO: 1646206 - RNA, 19 nt, Homo sapiens
  misc_RNA (1)...(19): siRNA sense strand
ugaggccacucgcauauug

SEQ ID NO: 1646207 - RNA, 19 nt, Homo sapiens
  misc_RNA (1)...(19): siRNA sense strand
caugcacaaucucacuuua

SEQ ID NO: 1646208 - RNA, 19 nt, Homo sapiens
  misc_RNA (1)...(19): siRNA sense strand
agagcuaagucauaugaaa

SEQ ID NO: 1646209 - RNA, 19 nt, Homo sapiens
  misc_RNA (1)...(19): siRNA sense strand
gaauacaagaaucucagua

SEQ ID NO: 1646210 - RNA, 19 nt, Homo sapiens
  misc_RNA (1)...(19): siRNA sense strand
caaggcaacagugaaauaa

SEQ ID NO: 1646211 - RNA, 19 nt, Homo sapiens
  misc_RNA (1)...(19): siRNA sense strand
uuacuaagccgucuucuca

SEQ ID NO: 1646212 - RNA, 19 nt, Homo sapiens
  misc_RNA (1)...(19): siRNA sense strand
guagaaaccaccaaaccaa

SEQ ID NO: 1646213 - RNA, 19 nt, Homo sapiens
  misc_RNA (1)...(19): siRNA sense strand
gccuucaacucaaaccaua

SEQ ID NO: 1646214 - RNA, 19 nt, Homo sapiens
  misc_RNA (1)...(19): siRNA sense strand
caagaaacucagcaauauu

SEQ ID NO: 1646215 - RNA, 19 nt, Homo sapiens
  misc_RNA (1)...(19): siRNA sense strand
ucaaggcaacagugaaaua

SEQ ID NO: 1646216 - RNA, 19 nt, Homo sapiens
  misc_RNA (1)...(19): siRNA sense strand
acaaaucgcauacuucaug

SEQ ID NO: 1646217 - RNA, 19 nt, Homo sapiens
  misc_RNA (1)...(19): siRNA sense strand
cccacuagcuauucuuauu

SEQ ID NO: 1646218 - RNA, 19 nt, Homo sapiens
  misc_RNA (1)...(19): siRNA sense strand
acacaaggcauauuggauu

SEQ ID NO: 1646219 - RNA, 19 nt, Homo sapiens
  misc_RNA (1)...(19): siRNA sense strand
ugaauugacuaaucuggau

SEQ ID NO: 1646220 - RNA, 19 nt, Homo sapiens
  misc_RNA (1)...(19): siRNA sense strand
ccagaaacggauagacaua

SEQ ID NO: 1646221 - RNA, 19 nt, Homo sapiens
  misc_RNA (1)...(19): siRNA sense strand
aauguuagcccuagagaaa

SEQ ID NO: 1646222 - RNA, 19 nt, Homo sapiens
  misc_RNA (1)...(19): siRNA sense strand
gaagaugggcagagaagca

SEQ ID NO: 1646223 - RNA, 19 nt, Homo sapiens
  misc_RNA (1)...(19): siRNA sense strand
gcuuuacucaucagucuua

SEQ ID NO: 1646224 - RNA, 19 nt, Homo sapiens
  misc_RNA (1)...(19): siRNA sense strand
gcagauaauggaaggaaug

SEQ ID NO: 1646225 - RNA, 19 nt, Homo sapiens
  misc_RNA (1)...(19): siRNA sense strand
uaagccgucuucucaguga

SEQ ID NO: 1646226 - RNA, 19 nt, Homo sapiens
  misc_RNA (1)...(19): siRNA sense strand
ucuaggagcuccagacuac

SEQ ID NO: 1646227 - RNA, 19 nt, Homo sapiens
  misc_RNA (1)...(19): siRNA sense strand
ugaaucaggucagacagaa

SEQ ID NO: 1646228 - RNA, 19 nt, Homo sapiens
  misc_RNA (1)...(19): siRNA sense strand
gauauuaugcgagucugua

SEQ ID NO: 1646229 - RNA, 19 nt, Homo sapiens
  misc_RNA (1)...(19): siRNA sense strand
caugagcagugucacagaa

SEQ ID NO: 1646230 - RNA, 19 nt, Homo sapiens
  misc_RNA (1)...(19): siRNA sense strand
cagcgcauguucuuacaga

SEQ ID NO: 1646231 - RNA, 19 nt, Homo sapiens
  misc_RNA (1)...(19): siRNA sense strand
gagcuaagucauaugaaau

SEQ ID NO: 1646232 - RNA, 19 nt, Homo sapiens
  misc_RNA (1)...(19): siRNA sense strand
uaguacagauucuccuaaa

SEQ ID NO: 1646233 - RNA, 19 nt, Homo sapiens
  misc_RNA (1)...(19): siRNA sense strand
ugcacaaucucacuuuauu

SEQ ID NO: 1646234 - RNA, 19 nt, Homo sapiens
  misc_RNA (1)...(19): siRNA sense strand
gugaaggugucaguaaaga

SEQ ID NO: 1646235 - RNA, 19 nt, Homo sapiens
  misc_RNA (1)...(19): siRNA sense strand
acaagaaucucaguacaag

SEQ ID NO: 1646236 - RNA, 19 nt, Homo sapiens
  misc_RNA (1)...(19): siRNA sense strand
aggacaugcugaaauagua

SEQ ID NO: 1646237 - RNA, 19 nt, Homo sapiens
  misc_RNA (1)...(19): siRNA sense strand
ucagucaaccaguuagaua

SEQ ID NO: 1646238 - RNA, 19 nt, Homo sapiens
  misc_RNA (1)...(19): siRNA sense strand
ucggguagauaaaguggua

SEQ ID NO: 1646239 - RNA, 19 nt, Homo sapiens
  misc_RNA (1)...(19): siRNA sense strand
gaaaacgaguuguacuaau

SEQ ID NO: 1646240 - RNA, 19 nt, Homo sapiens
  misc_RNA (1)...(19): siRNA sense strand
gggagauacugauacuugu

SEQ ID NO: 1646241 - RNA, 19 nt, Homo sapiens
  misc_RNA (1)...(19): siRNA sense strand
acucaucagucuuaaguau

SEQ ID NO: 1646242 - RNA, 19 nt, Homo sapiens
  misc_RNA (1)...(19): siRNA sense strand
ggaauacagagcuaaguca

SEQ ID NO: 1646243 - RNA, 19 nt, Homo sapiens
  misc_RNA (1)...(19): siRNA sense strand
aagaagagaugugagacuu

SEQ ID NO: 1646244 - RNA, 19 nt, Homo sapiens
  misc_RNA (1)...(19): siRNA sense strand
gaaauacuugcugaauuga

SEQ ID NO: 1646245 - RNA, 19 nt, Homo sapiens
  misc_RNA (1)...(19): siRNA sense strand
guucgaauauacagaaugg

SEQ ID NO: 1646246 - RNA, 19 nt, Homo sapiens
  misc_RNA (1)...(19): siRNA sense strand
gaagcuaaauggacaguua

SEQ ID NO: 1646247 - RNA, 19 nt, Homo sapiens
  misc_RNA (1)...(19): siRNA sense strand
caaggaagaucuccauuaa

SEQ ID NO: 1646248 - RNA, 19 nt, Homo sapiens
  misc_RNA (1)...(19): siRNA sense strand
ggaagaagcugcaaaauug

SEQ ID NO: 1646249 - RNA, 19 nt, Homo sapiens
  misc_RNA (1)...(19): siRNA sense strand
ggacagauauuuacaaagg

SEQ ID NO: 1646250 - RNA, 19 nt, Homo sapiens
  misc_RNA (1)...(19): siRNA sense strand
ccaaauaccuaaacaggaa

SEQ ID NO: 1646251 - RNA, 19 nt, Homo sapiens
  misc_RNA (1)...(19): siRNA sense strand
cauauuggauuacguagua

SEQ ID NO: 1646252 - RNA, 19 nt, Homo sapiens
  misc_RNA (1)...(19): siRNA sense strand
gaaggaagcaauuaacaaa

SEQ ID NO: 1646253 - RNA, 19 nt, Homo sapiens
  misc_RNA (1)...(19): siRNA sense strand
gggcagagaagcaucauua

SEQ ID NO: 1646254 - RNA, 19 nt, Homo sapiens
  misc_RNA (1)...(19): siRNA sense strand
cagagaagcaucauuauuu

SEQ ID NO: 1646255 - RNA, 19 nt, Homo sapiens
  misc_RNA (1)...(19): siRNA sense strand
ucaagaaacucagcaauau

SEQ ID NO: 1646256 - RNA, 19 nt, Homo sapiens
  misc_RNA (1)...(19): siRNA sense strand
agaaauacuugcugaauug

SEQ ID NO: 1646257 - RNA, 19 nt, Homo sapiens
  misc_RNA (1)...(19): siRNA sense strand
caagcaagguuuccuaaau

SEQ ID NO: 1646258 - RNA, 19 nt, Homo sapiens
  misc_RNA (1)...(19): siRNA sense strand
caacucaaaccauaucaua

SEQ ID NO: 1646259 - RNA, 19 nt, Homo sapiens
  misc_RNA (1)...(19): siRNA sense strand
caucguaccuguuaccaaa

SEQ ID NO: 1646260 - RNA, 19 nt, Homo sapiens
  misc_RNA (1)...(19): siRNA sense strand
ugaaauaacacaaggcaua

SEQ ID NO: 1646261 - RNA, 19 nt, Homo sapiens
  misc_RNA (1)...(19): siRNA sense strand
cauaaacccuugcaacaug

SEQ ID NO: 1646262 - RNA, 19 nt, Homo sapiens
  misc_RNA (1)...(19): siRNA sense strand
ggacaaaucgcauacuuca

SEQ ID NO: 1646263 - RNA, 19 nt, Homo sapiens
  misc_RNA (1)...(19): siRNA sense strand
gcaccucacuggacaaauc

SEQ ID NO: 1646264 - RNA, 19 nt, Homo sapiens
  misc_RNA (1)...(19): siRNA sense strand
cagaaauacuugcugaauu

SEQ ID NO: 1646265 - RNA, 19 nt, Homo sapiens
  misc_RNA (1)...(19): siRNA sense strand
gaaaccaccaaaccaauuu

SEQ ID NO: 1646266 - RNA, 19 nt, Homo sapiens
  misc_RNA (1)...(19): siRNA sense strand
gaaggugucaguaaagaaa

SEQ ID NO: 1646267 - RNA, 19 nt, Homo sapiens
  misc_RNA (1)...(19): siRNA sense strand
gcaugaaguucccauugaa

SEQ ID NO: 1646268 - RNA, 19 nt, Homo sapiens
  misc_RNA (1)...(19): siRNA sense strand
gacaguggguagaugauuu

SEQ ID NO: 1646269 - RNA, 19 nt, Homo sapiens
  misc_RNA (1)...(19): siRNA sense strand
caucaguugucaaagauaa

SEQ ID NO: 1646270 - RNA, 19 nt, Homo sapiens
  misc_RNA (1)...(19): siRNA sense strand
gaugaagccagauauaauu

SEQ ID NO: 1646271 - RNA, 19 nt, Homo sapiens
  misc_RNA (1)...(19): siRNA sense strand
aggaagaucuccauuaaau

SEQ ID NO: 1646272 - RNA, 19 nt, Homo sapiens
  misc_RNA (1)...(19): siRNA sense strand
agaaacggauagacauaua

SEQ ID NO: 1646273 - RNA, 19 nt, Homo sapiens
  misc_RNA (1)...(19): siRNA sense strand
cacaaggcauauuggauua

SEQ ID NO: 1646274 - RNA, 19 nt, Homo sapiens
  misc_RNA (1)...(19): siRNA sense strand
gagagaagaugggcagaga

SEQ ID NO: 1646275 - RNA, 19 nt, Homo sapiens
  misc_RNA (1)...(19): siRNA sense strand
gcagagaagcaucauuauu

SEQ ID NO: 1646276 - RNA, 19 nt, Homo sapiens
  misc_RNA (1)...(19): siRNA sense strand
gaaugcgucucucucaaga

SEQ ID NO: 1646277 - RNA, 19 nt, Homo sapiens
  misc_RNA (1)...(19): siRNA sense strand
ggaagaucuccauuaaaua

SEQ ID NO: 1646278 - RNA, 19 nt, Homo sapiens
  misc_RNA (1)...(19): siRNA sense strand
gcacuagaaauaaagagua

SEQ ID NO: 1646279 - RNA, 19 nt, Homo sapiens
  misc_RNA (1)...(19): siRNA sense strand
gaacgacaguggguagaug

SEQ ID NO: 1646280 - RNA, 19 nt, Homo sapiens
  misc_RNA (1)...(19): siRNA sense strand
gcaauuaacaaaccauaug

SEQ ID NO: 1646281 - RNA, 19 nt, Homo sapiens
  misc_RNA (1)...(19): siRNA sense strand
ugucauaaauccugcauau

SEQ ID NO: 1646282 - RNA, 19 nt, Homo sapiens
  misc_RNA (1)...(19): siRNA sense strand
caggacagauauuuacaaa

SEQ ID NO: 1646283 - RNA, 19 nt, Homo sapiens
  misc_RNA (1)...(19): siRNA sense strand
gaaacggauagacauauaa

SEQ ID NO: 1646284 - RNA, 19 nt, Homo sapiens
  misc_RNA (1)...(19): siRNA sense strand
aggaggacaugcugaaaua

SEQ ID NO: 1646285 - RNA, 19 nt, Homo sapiens
  misc_RNA (1)...(19): siRNA sense strand
acagaaaacucacuacaua

SEQ ID NO: 1646286 - RNA, 19 nt, Homo sapiens
  misc_RNA (1)...(19): siRNA sense strand
gaauugaagcauggaaaua

SEQ ID NO: 1646287 - RNA, 19 nt, Homo sapiens
  misc_RNA (1)...(19): siRNA sense strand
gaucuucaguauacaaauc

SEQ ID NO: 1646288 - RNA, 19 nt, Homo sapiens
  misc_RNA (1)...(19): siRNA sense strand
augcuaagcugauaacauu

SEQ ID NO: 1646289 - RNA, 19 nt, Homo sapiens
  misc_RNA (1)...(19): siRNA sense strand
ggucauaucguucuguuga

SEQ ID NO: 1646290 - RNA, 19 nt, Homo sapiens
  misc_RNA (1)...(19): siRNA sense strand
gaaauaacacaaggcauau

SEQ ID NO: 1646291 - RNA, 19 nt, Homo sapiens
  misc_RNA (1)...(19): siRNA sense strand
cauggaaacuaaggcuuua

SEQ ID NO: 1646292 - RNA, 19 nt, Homo sapiens
  misc_RNA (1)...(19): siRNA sense strand
caaaucgcauacuucauga

SEQ ID NO: 1646293 - RNA, 19 nt, Homo sapiens
  misc_RNA (1)...(19): siRNA sense strand
auacagagcuaagucauau

SEQ ID NO: 1646294 - RNA, 19 nt, Homo sapiens
  misc_RNA (1)...(19): siRNA sense strand
auacaaaucggguagauaa

SEQ ID NO: 1646295 - RNA, 19 nt, Homo sapiens
  misc_RNA (1)...(19): siRNA sense strand
gaaacuaaggcuuuacuca

SEQ ID NO: 1646296 - RNA, 19 nt, Homo sapiens
  misc_RNA (1)...(19): siRNA sense strand
guucgugacuggccagaaa

SEQ ID NO: 1646297 - RNA, 19 nt, Homo sapiens
  misc_RNA (1)...(19): siRNA sense strand
caagugaaggugucaguaa

SEQ ID NO: 1646298 - RNA, 19 nt, Homo sapiens
  misc_RNA (1)...(19): siRNA sense strand
caaaucggguagauaaagu

SEQ ID NO: 1646299 - RNA, 19 nt, Homo sapiens
  misc_RNA (1)...(19): siRNA sense strand
gagauacugauacuuguuu

SEQ ID NO: 1646300 - RNA, 19 nt, Homo sapiens
  misc_RNA (1)...(19): siRNA sense strand
cagaauggaugggucauau

SEQ ID NO: 1646301 - RNA, 19 nt, Homo sapiens
  misc_RNA (1)...(19): siRNA sense strand
acaaggaagaucuccauua

SEQ ID NO: 1646302 - RNA, 19 nt, Homo sapiens
  misc_RNA (1)...(19): siRNA sense strand
ucacuuuauuccagcuuua

SEQ ID NO: 1646303 - RNA, 19 nt, Homo sapiens
  misc_RNA (1)...(19): siRNA sense strand
uuacagaauugcugggaaa

SEQ ID NO: 1646304 - RNA, 19 nt, Homo sapiens
  misc_RNA (1)...(19): siRNA sense strand
aaaggaaagugcaauccaa

SEQ ID NO: 1646305 - RNA, 19 nt, Homo sapiens
  misc_RNA (1)...(19): siRNA sense strand
aagcaagguuuccuaaaug

SEQ ID NO: 1646306 - RNA, 19 nt, Homo sapiens
  misc_RNA (1)...(19): siRNA sense strand
ugaggccacucgcauauug

SEQ ID NO: 1646307 - RNA, 19 nt, Homo sapiens
  misc_RNA (1)...(19): siRNA sense strand
caugcacaaucucacuuua

SEQ ID NO: 1646308 - RNA, 19 nt, Homo sapiens
  misc_RNA (1)...(19): siRNA sense strand
agagcuaagucauaugaaa

SEQ ID NO: 1646309 - RNA, 19 nt, Homo sapiens
  misc_RNA (1)...(19): siRNA sense strand
gaauacaagaaucucagua

SEQ ID NO: 1646310 - RNA, 19 nt, Homo sapiens
  misc_RNA (1)...(19): siRNA sense strand
caaggcaacagugaaauaa

SEQ ID NO: 1646311 - RNA, 19 nt, Homo sapiens
  misc_RNA (1)...(19): siRNA sense strand
uuacuaagccgucuucuca

SEQ ID NO: 1646312 - RNA, 19 nt, Homo sapiens
  misc_RNA (1)...(19): siRNA sense strand
guagaaaccaccaaaccaa

SEQ ID NO: 1646313 - RNA, 19 nt, Homo sapiens
  misc_RNA (1)...(19): siRNA sense strand
gccuucaacucaaaccaua

SEQ ID NO: 1646314 - RNA, 19 nt, Homo sapiens
  misc_RNA (1)...(19): siRNA sense strand
caagaaacucagcaauauu

SEQ ID NO: 1646315 - RNA, 19 nt, Homo sapiens
  misc_RNA (1)...(19): siRNA sense strand
ucaaggcaacagugaaaua

SEQ ID NO: 1646316 - RNA, 19 nt, Homo sapiens
  misc_RNA (1)...(19): siRNA sense strand
acaaaucgcauacuucaug

SEQ ID NO: 1646317 - RNA, 19 nt, Homo sapiens
  misc_RNA (1)...(19): siRNA sense strand
cccacuagcuauucuuauu

SEQ ID NO: 1646318 - RNA, 19 nt, Homo sapiens
  misc_RNA (1)...(19): siRNA sense strand
acacaaggcauauuggauu

SEQ ID NO: 1646319 - RNA, 19 nt, Homo sapiens
  misc_RNA (1)...(19): siRNA sense strand
ugaauugacuaaucuggau

SEQ ID NO: 1646320 - RNA, 19 nt, Homo sapiens
  misc_RNA (1)...(19): siRNA sense strand
ccagaaacggauagacaua

SEQ ID NO: 1646321 - RNA, 19 nt, Homo sapiens
  misc_RNA (1)...(19): siRNA sense strand
aauguuagcccuagagaaa

SEQ ID NO: 1646322 - RNA, 19 nt, Homo sapiens
  misc_RNA (1)...(19): siRNA sense strand
gaagaugggcagagaagca

SEQ ID NO: 1646323 - RNA, 19 nt, Homo sapiens
  misc_RNA (1)...(19): siRNA sense strand
gcuuuacucaucagucuua

SEQ ID NO: 1646324 - RNA, 19 nt, Homo sapiens
  misc_RNA (1)...(19): siRNA sense strand
gcagauaauggaaggaaug

SEQ ID NO: 1646325 - RNA, 19 nt, Homo sapiens
  misc_RNA (1)...(19): siRNA sense strand
uaagccgucuucucaguga

SEQ ID NO: 1646326 - RNA, 19 nt, Homo sapiens
  misc_RNA (1)...(19): siRNA sense strand
ucuaggagcuccagacuac

SEQ ID NO: 1646327 - RNA, 19 nt, Homo sapiens
  misc_RNA (1)...(19): siRNA sense strand
ugaaucaggucagacagaa

SEQ ID NO: 1646328 - RNA, 19 nt, Homo sapiens
  misc_RNA (1)...(19): siRNA sense strand
gauauuaugcgagucugua

SEQ ID NO: 1646329 - RNA, 19 nt, Homo sapiens
  misc_RNA (1)...(19): siRNA sense strand
caugagcagugucacagaa

SEQ ID NO: 1646330 - RNA, 19 nt, Homo sapiens
  misc_RNA (1)...(19): siRNA sense strand
cagcgcauguucuuacaga

SEQ ID NO: 1646331 - RNA, 19 nt, Homo sapiens
  misc_RNA (1)...(19): siRNA sense strand
gagcuaagucauaugaaau

SEQ ID NO: 1646332 - RNA, 19 nt, Homo sapiens
  misc_RNA (1)...(19): siRNA sense strand
uaguacagauucuccuaaa

SEQ ID NO: 1646333 - RNA, 19 nt, Homo sapiens
  misc_RNA (1)...(19): siRNA sense strand
ugcacaaucucacuuuauu

SEQ ID NO: 1646334 - RNA, 19 nt, Homo sapiens
  misc_RNA (1)...(19): siRNA sense strand
gugaaggugucaguaaaga

SEQ ID NO: 1646335 - RNA, 19 nt, Homo sapiens
  misc_RNA (1)...(19): siRNA sense strand
acaagaaucucaguacaag

SEQ ID NO: 1646336 - RNA, 19 nt, Homo sapiens
  misc_RNA (1)...(19): siRNA sense strand
aggacaugcugaaauagua

SEQ ID NO: 1646337 - RNA, 19 nt, Homo sapiens
  misc_RNA (1)...(19): siRNA sense strand
ucagucaaccaguuagaua

SEQ ID NO: 1646338 - RNA, 19 nt, Homo sapiens
  misc_RNA (1)...(19): siRNA sense strand
ucggguagauaaaguggua

SEQ ID NO: 1646339 - RNA, 19 nt, Homo sapiens
  misc_RNA (1)...(19): siRNA sense strand
gaaaacgaguuguacuaau

SEQ ID NO: 1646340 - RNA, 19 nt, Homo sapiens
  misc_RNA (1)...(19): siRNA sense strand
gggagauacugauacuugu

SEQ ID NO: 1646341 - RNA, 19 nt, Homo sapiens
  misc_RNA (1)...(19): siRNA sense strand
acucaucagucuuaaguau

SEQ ID NO: 1646342 - RNA, 19 nt, Homo sapiens
  misc_RNA (1)...(19): siRNA sense strand
ggaauacagagcuaaguca

SEQ ID NO: 1646343 - RNA, 19 nt, Homo sapiens
  misc_RNA (1)...(19): siRNA sense strand
aagaagagaugugagacuu

SEQ ID NO: 1646344 - RNA, 19 nt, Homo sapiens
  misc_RNA (1)...(19): siRNA sense strand
gaaauacuugcugaauuga

SEQ ID NO: 1646345 - RNA, 19 nt, Homo sapiens
  misc_RNA (1)...(19): siRNA sense strand
guucgaauauacagaaugg

SEQ ID NO: 1646346 - RNA, 19 nt, Homo sapiens
  misc_RNA (1)...(19): siRNA sense strand
gaagcuaaauggacaguua

SEQ ID NO: 1646347 - RNA, 19 nt, Homo sapiens
  misc_RNA (1)...(19): siRNA sense strand
caaggaagaucuccauuaa

SEQ ID NO: 1646348 - RNA, 19 nt, Homo sapiens
  misc_RNA (1)...(19): siRNA sense strand
ggaagaagcugcaaaauug

SEQ ID NO: 1646349 - RNA, 19 nt, Homo sapiens
  misc_RNA (1)...(19): siRNA sense strand
ggacagauauuuacaaagg

SEQ ID NO: 1646350 - RNA, 19 nt, Homo sapiens
  misc_RNA (1)...(19): siRNA sense strand
ccaaauaccuaaacaggaa

SEQ ID NO: 1646351 - RNA, 19 nt, Homo sapiens
  misc_RNA (1)...(19): siRNA sense strand
cauauuggauuacguagua

SEQ ID NO: 1646352 - RNA, 19 nt, Homo sapiens
  misc_RNA (1)...(19): siRNA sense strand
gaaggaagcaauuaacaaa

SEQ ID NO: 1646353 - RNA, 19 nt, Homo sapiens
  misc_RNA (1)...(19): siRNA sense strand
gggcagagaagcaucauua

SEQ ID NO: 1646354 - RNA, 19 nt, Homo sapiens
  misc_RNA (1)...(19): siRNA sense strand
cagagaagcaucauuauuu

SEQ ID NO: 1646355 - RNA, 19 nt, Homo sapiens
  misc_RNA (1)...(19): siRNA sense strand
ucaagaaacucagcaauau

SEQ ID NO: 1646356 - RNA, 19 nt, Homo sapiens
  misc_RNA (1)...(19): siRNA sense strand
agaaauacuugcugaauug

SEQ ID NO: 1646357 - RNA, 19 nt, Homo sapiens
  misc_RNA (1)...(19): siRNA sense strand
caagcaagguuuccuaaau

SEQ ID NO: 1646358 - RNA, 19 nt, Homo sapiens
  misc_RNA (1)...(19): siRNA sense strand
caacucaaaccauaucaua

SEQ ID NO: 1646359 - RNA, 19 nt, Homo sapiens
  misc_RNA (1)...(19): siRNA sense strand
caucguaccuguuaccaaa

SEQ ID NO: 1646360 - RNA, 19 nt, Homo sapiens
  misc_RNA (1)...(19): siRNA sense strand
ugaaauaacacaaggcaua

SEQ ID NO: 1646361 - RNA, 19 nt, Homo sapiens
  misc_RNA (1)...(19): siRNA sense strand
cauaaacccuugcaacaug

SEQ ID NO: 1646362 - RNA, 19 nt, Homo sapiens
  misc_RNA (1)...(19): siRNA sense strand
ggacaaaucgcauacuuca

SEQ ID NO: 1646363 - RNA, 19 nt, Homo sapiens
  misc_RNA (1)...(19): siRNA sense strand
gcaccucacuggacaaauc

SEQ ID NO: 1646364 - RNA, 19 nt, Homo sapiens
  misc_RNA (1)...(19): siRNA sense strand
cagaaauacuugcugaauu

SEQ ID NO: 1646365 - RNA, 19 nt, Homo sapiens
  misc_RNA (1)...(19): siRNA sense strand
gaaaccaccaaaccaauuu

SEQ ID NO: 1646366 - RNA, 19 nt, Homo sapiens
  misc_RNA (1)...(19): siRNA sense strand
gaaggugucaguaaagaaa

SEQ ID NO: 1646367 - RNA, 19 nt, Homo sapiens
  misc_RNA (1)...(19): siRNA sense strand
gcaugaaguucccauugaa

SEQ ID NO: 1646368 - RNA, 19 nt, Homo sapiens
  misc_RNA (1)...(19): siRNA sense strand
gacaguggguagaugauuu

SEQ ID NO: 1646369 - RNA, 19 nt, Homo sapiens
  misc_RNA (1)...(19): siRNA sense strand
caucaguugucaaagauaa

SEQ ID NO: 1646370 - RNA, 19 nt, Homo sapiens
  misc_RNA (1)...(19): siRNA sense strand
gaugaagccagauauaauu

SEQ ID NO: 1646371 - RNA, 19 nt, Homo sapiens
  misc_RNA (1)...(19): siRNA sense strand
aggaagaucuccauuaaau

SEQ ID NO: 1646372 - RNA, 19 nt, Homo sapiens
  misc_RNA (1)...(19): siRNA sense strand
agaaacggauagacauaua

SEQ ID NO: 1646373 - RNA, 19 nt, Homo sapiens
  misc_RNA (1)...(19): siRNA sense strand
cacaaggcauauuggauua

SEQ ID NO: 1646374 - RNA, 19 nt, Homo sapiens
  misc_RNA (1)...(19): siRNA sense strand
gagagaagaugggcagaga

SEQ ID NO: 1646375 - RNA, 19 nt, Homo sapiens
  misc_RNA (1)...(19): siRNA sense strand
gcagagaagcaucauuauu

SEQ ID NO: 1646376 - RNA, 19 nt, Homo sapiens
  misc_RNA (1)...(19): siRNA sense strand
gaaugcgucucucucaaga

SEQ ID NO: 1646377 - RNA, 19 nt, Homo sapiens
  misc_RNA (1)...(19): siRNA sense strand
ggaagaucuccauuaaaua

SEQ ID NO: 1646378 - RNA, 19 nt, Homo sapiens
  misc_RNA (1)...(19): siRNA sense strand
gcacuagaaauaaagagua

SEQ ID NO: 1646379 - RNA, 19 nt, Homo sapiens
  misc_RNA (1)...(19): siRNA sense strand
gaacgacaguggguagaug

SEQ ID NO: 1646380 - RNA, 19 nt, Homo sapiens
  misc_RNA (1)...(19): siRNA sense strand
gcaauuaacaaaccauaug

SEQ ID NO: 1646381 - RNA, 19 nt, Homo sapiens
  misc_RNA (1)...(19): siRNA sense strand
ugucauaaauccugcauau

SEQ ID NO: 1646382 - RNA, 19 nt, Homo sapiens
  misc_RNA (1)...(19): siRNA sense strand
caggacagauauuuacaaa

SEQ ID NO: 1646383 - RNA, 19 nt, Homo sapiens
  misc_RNA (1)...(19): siRNA sense strand
gaaacggauagacauauaa

SEQ ID NO: 1646384 - RNA, 19 nt, Homo sapiens
  misc_RNA (1)...(19): siRNA sense strand
aggaggacaugcugaaaua

SEQ ID NO: 1646385 - RNA, 19 nt, Homo sapiens
  misc_RNA (1)...(19): siRNA sense strand
acagaaaacucacuacaua

SEQ ID NO: 1646386 - RNA, 19 nt, Homo sapiens
  misc_RNA (1)...(19): siRNA sense strand
gaauugaagcauggaaaua

SEQ ID NO: 1646387 - RNA, 19 nt, Homo sapiens
  misc_RNA (1)...(19): siRNA sense strand
gaucuucaguauacaaauc

SEQ ID NO: 1646388 - RNA, 19 nt, Homo sapiens
  misc_RNA (1)...(19): siRNA sense strand
augcuaagcugauaacauu

SEQ ID NO: 1646389 - RNA, 19 nt, Homo sapiens
  misc_RNA (1)...(19): siRNA sense strand
ggucauaucguucuguuga

SEQ ID NO: 1646390 - RNA, 19 nt, Homo sapiens
  misc_RNA (1)...(19): siRNA sense strand
gaaauaacacaaggcauau

SEQ ID NO: 1646391 - RNA, 19 nt, Homo sapiens
  misc_RNA (1)...(19): siRNA sense strand
cauggaaacuaaggcuuua

SEQ ID NO: 1646392 - RNA, 19 nt, Homo sapiens
  misc_RNA (1)...(19): siRNA sense strand
caaaucgcauacuucauga

SEQ ID NO: 1646393 - RNA, 19 nt, Homo sapiens
  misc_RNA (1)...(19): siRNA sense strand
auacagagcuaagucauau

SEQ ID NO: 1646394 - RNA, 19 nt, Homo sapiens
  misc_RNA (1)...(19): siRNA sense strand
auacaaaucggguagauaa

SEQ ID NO: 1646395 - RNA, 19 nt, Homo sapiens
  misc_RNA (1)...(19): siRNA sense strand
gaaacuaaggcuuuacuca

SEQ ID NO: 1646396 - RNA, 19 nt, Homo sapiens
  misc_RNA (1)...(19): siRNA sense strand
guucgugacuggccagaaa

SEQ ID NO: 1646397 - RNA, 19 nt, Homo sapiens
  misc_RNA (1)...(19): siRNA sense strand
caagugaaggugucaguaa

SEQ ID NO: 1646398 - RNA, 19 nt, Homo sapiens
  misc_RNA (1)...(19): siRNA sense strand
caaaucggguagauaaagu

SEQ ID NO: 1646399 - RNA, 19 nt, Homo sapiens
  misc_RNA (1)...(19): siRNA sense strand
gagauacugauacuuguuu

SEQ ID NO: 1646400 - RNA, 19 nt, Homo sapiens
  misc_RNA (1)...(19): siRNA sense strand
cagaauggaugggucauau

SEQ ID NO: 1646401 - RNA, 19 nt, Homo sapiens
  misc_RNA (1)...(19): siRNA sense strand
acaaggaagaucuccauua

SEQ ID NO: 1646402 - RNA, 19 nt, Homo sapiens
  misc_RNA (1)...(19): siRNA sense strand
ucacuuuauuccagcuuua

SEQ ID NO: 1646403 - RNA, 19 nt, Homo sapiens
  misc_RNA (1)...(19): siRNA sense strand
uuacagaauugcugggaaa

SEQ ID NO: 1646404 - RNA, 19 nt, Homo sapiens
  misc_RNA (1)...(19): siRNA sense strand
aaaggaaagugcaauccaa

SEQ ID NO: 1646405 - RNA, 19 nt, Homo sapiens
  misc_RNA (1)...(19): siRNA sense strand
aagcaagguuuccuaaaug

SEQ ID NO: 1646406 - RNA, 19 nt, Homo sapiens
  misc_RNA (1)...(19): siRNA sense strand
ugaggccacucgcauauug

SEQ ID NO: 1646407 - RNA, 19 nt, Homo sapiens
  misc_RNA (1)...(19): siRNA sense strand
caugcacaaucucacuuua

SEQ ID NO: 1646408 - RNA, 19 nt, Homo sapiens
  misc_RNA (1)...(19): siRNA sense strand
agagcuaagucauaugaaa

SEQ ID NO: 1646409 - RNA, 19 nt, Homo sapiens
  misc_RNA (1)...(19): siRNA sense strand
gaauacaagaaucucagua

SEQ ID NO: 1646410 - RNA, 19 nt, Homo sapiens
  misc_RNA (1)...(19): siRNA sense strand
caaggcaacagugaaauaa

SEQ ID NO: 1646411 - RNA, 19 nt, Homo sapiens
  misc_RNA (1)...(19): siRNA sense strand
uuacuaagccgucuucuca

SEQ ID NO: 1646412 - RNA, 19 nt, Homo sapiens
  misc_RNA (1)...(19): siRNA sense strand
guagaaaccaccaaaccaa

SEQ ID NO: 1646413 - RNA, 19 nt, Homo sapiens
  misc_RNA (1)...(19): siRNA sense strand
gccuucaacucaaaccaua

SEQ ID NO: 1646414 - RNA, 19 nt, Homo sapiens
  misc_RNA (1)...(19): siRNA sense strand
caagaaacucagcaauauu

SEQ ID NO: 1646415 - RNA, 19 nt, Homo sapiens
  misc_RNA (1)...(19): siRNA sense strand
ucaaggcaacagugaaaua

SEQ ID NO: 1646416 - RNA, 19 nt, Homo sapiens
  misc_RNA (1)...(19): siRNA sense strand
acaaaucgcauacuucaug

SEQ ID NO: 1646417 - RNA, 19 nt, Homo sapiens
  misc_RNA (1)...(19): siRNA sense strand
cccacuagcuauucuuauu

SEQ ID NO: 1646418 - RNA, 19 nt, Homo sapiens
  misc_RNA (1)...(19): siRNA sense strand
acacaaggcauauuggauu

SEQ ID NO: 1646419 - RNA, 19 nt, Homo sapiens
  misc_RNA (1)...(19): siRNA sense strand
ugaauugacuaaucuggau

SEQ ID NO: 1646420 - RNA, 19 nt, Homo sapiens
  misc_RNA (1)...(19): siRNA sense strand
ccagaaacggauagacaua

SEQ ID NO: 1646421 - RNA, 19 nt, Homo sapiens
  misc_RNA (1)...(19): siRNA sense strand
aauguuagcccuagagaaa

SEQ ID NO: 1646422 - RNA, 19 nt, Homo sapiens
  misc_RNA (1)...(19): siRNA sense strand
gaagaugggcagagaagca

SEQ ID NO: 1646423 - RNA, 19 nt, Homo sapiens
  misc_RNA (1)...(19): siRNA sense strand
gcuuuacucaucagucuua

SEQ ID NO: 1646424 - RNA, 19 nt, Homo sapiens
  misc_RNA (1)...(19): siRNA sense strand
gcagauaauggaaggaaug

SEQ ID NO: 1646425 - RNA, 19 nt, Homo sapiens
  misc_RNA (1)...(19): siRNA sense strand
uaagccgucuucucaguga

SEQ ID NO: 1646426 - RNA, 19 nt, Homo sapiens
  misc_RNA (1)...(19): siRNA sense strand
ucuaggagcuccagacuac

SEQ ID NO: 1646427 - RNA, 19 nt, Homo sapiens
  misc_RNA (1)...(19): siRNA sense strand
ugaaucaggucagacagaa

SEQ ID NO: 1646428 - RNA, 19 nt, Homo sapiens
  misc_RNA (1)...(19): siRNA sense strand
gauauuaugcgagucugua

SEQ ID NO: 1646429 - RNA, 19 nt, Homo sapiens
  misc_RNA (1)...(19): siRNA sense strand
caugagcagugucacagaa

SEQ ID NO: 1646430 - RNA, 19 nt, Homo sapiens
  misc_RNA (1)...(19): siRNA sense strand
cagcgcauguucuuacaga

SEQ ID NO: 1646431 - RNA, 19 nt, Homo sapiens
  misc_RNA (1)...(19): siRNA sense strand
gagcuaagucauaugaaau

SEQ ID NO: 1646432 - RNA, 19 nt, Homo sapiens
  misc_RNA (1)...(19): siRNA sense strand
uaguacagauucuccuaaa

SEQ ID NO: 1646433 - RNA, 19 nt, Homo sapiens
  misc_RNA (1)...(19): siRNA sense strand
ugcacaaucucacuuuauu

SEQ ID NO: 1646434 - RNA, 19 nt, Homo sapiens
  misc_RNA (1)...(19): siRNA sense strand
gugaaggugucaguaaaga

SEQ ID NO: 1646435 - RNA, 19 nt, Homo sapiens
  misc_RNA (1)...(19): siRNA sense strand
acaagaaucucaguacaag

SEQ ID NO: 1646436 - RNA, 19 nt, Homo sapiens
  misc_RNA (1)...(19): siRNA sense strand
aggacaugcugaaauagua

SEQ ID NO: 1646437 - RNA, 19 nt, Homo sapiens
  misc_RNA (1)...(19): siRNA sense strand
ucagucaaccaguuagaua

SEQ ID NO: 1646438 - RNA, 19 nt, Homo sapiens
  misc_RNA (1)...(19): siRNA sense strand
ucggguagauaaaguggua

SEQ ID NO: 1646439 - RNA, 19 nt, Homo sapiens
  misc_RNA (1)...(19): siRNA sense strand
gaaaacgaguuguacuaau

SEQ ID NO: 1646440 - RNA, 19 nt, Homo sapiens
  misc_RNA (1)...(19): siRNA sense strand
gggagauacugauacuugu

SEQ ID NO: 1646441 - RNA, 19 nt, Homo sapiens
  misc_RNA (1)...(19): siRNA sense strand
acucaucagucuuaaguau

SEQ ID NO: 1646442 - RNA, 19 nt, Homo sapiens
  misc_RNA (1)...(19): siRNA sense strand
ggaauacagagcuaaguca

SEQ ID NO: 1646443 - RNA, 19 nt, Homo sapiens
  misc_RNA (1)...(19): siRNA sense strand
aagaagagaugugagacuu

SEQ ID NO: 1646444 - RNA, 19 nt, Homo sapiens
  misc_RNA (1)...(19): siRNA sense strand
gaaauacuugcugaauuga

SEQ ID NO: 1646445 - RNA, 19 nt, Homo sapiens
  misc_RNA (1)...(19): siRNA sense strand
guucgaauauacagaaugg

SEQ ID NO: 1646446 - RNA, 19 nt, Homo sapiens
  misc_RNA (1)...(19): siRNA sense strand
gaagcuaaauggacaguua

SEQ ID NO: 1646447 - RNA, 19 nt, Homo sapiens
  misc_RNA (1)...(19): siRNA sense strand
caaggaagaucuccauuaa

SEQ ID NO: 1646448 - RNA, 19 nt, Homo sapiens
  misc_RNA (1)...(19): siRNA sense strand
ggaagaagcugcaaaauug

SEQ ID NO: 1646449 - RNA, 19 nt, Homo sapiens
  misc_RNA (1)...(19): siRNA sense strand
ggacagauauuuacaaagg

SEQ ID NO: 1646450 - RNA, 19 nt, Homo sapiens
  misc_RNA (1)...(19): siRNA sense strand
ccaaauaccuaaacaggaa

SEQ ID NO: 1646451 - RNA, 19 nt, Homo sapiens
  misc_RNA (1)...(19): siRNA sense strand
cauauuggauuacguagua

SEQ ID NO: 1646452 - RNA, 19 nt, Homo sapiens
  misc_RNA (1)...(19): siRNA sense strand
gaaggaagcaauuaacaaa

SEQ ID NO: 1646453 - RNA, 19 nt, Homo sapiens
  misc_RNA (1)...(19): siRNA sense strand
gggcagagaagcaucauua

SEQ ID NO: 1646454 - RNA, 19 nt, Homo sapiens
  misc_RNA (1)...(19): siRNA sense strand
cagagaagcaucauuauuu

SEQ ID NO: 1646455 - RNA, 19 nt, Homo sapiens
  misc_RNA (1)...(19): siRNA sense strand
ucaagaaacucagcaauau

SEQ ID NO: 1646456 - RNA, 19 nt, Homo sapiens
  misc_RNA (1)...(19): siRNA sense strand
agaaauacuugcugaauug

SEQ ID NO: 1646457 - RNA, 19 nt, Homo sapiens
  misc_RNA (1)...(19): siRNA sense strand
caagcaagguuuccuaaau

SEQ ID NO: 1646458 - RNA, 19 nt, Homo sapiens
  misc_RNA (1)...(19): siRNA sense strand
caacucaaaccauaucaua

SEQ ID NO: 1646459 - RNA, 19 nt, Homo sapiens
  misc_RNA (1)...(19): siRNA sense strand
caucguaccuguuaccaaa

SEQ ID NO: 1646460 - RNA, 19 nt, Homo sapiens
  misc_RNA (1)...(19): siRNA sense strand
ugaaauaacacaaggcaua

SEQ ID NO: 1646461 - RNA, 19 nt, Homo sapiens
  misc_RNA (1)...(19): siRNA sense strand
cauaaacccuugcaacaug

SEQ ID NO: 1646462 - RNA, 19 nt, Homo sapiens
  misc_RNA (1)...(19): siRNA sense strand
ggacaaaucgcauacuuca

SEQ ID NO: 1646463 - RNA, 19 nt, Homo sapiens
  misc_RNA (1)...(19): siRNA sense strand
gcaccucacuggacaaauc

SEQ ID NO: 1646464 - RNA, 19 nt, Homo sapiens
  misc_RNA (1)...(19): siRNA sense strand
cagaaauacuugcugaauu

SEQ ID NO: 1646465 - RNA, 19 nt, Homo sapiens
  misc_RNA (1)...(19): siRNA sense strand
gaaaccaccaaaccaauuu

SEQ ID NO: 1646466 - RNA, 19 nt, Homo sapiens
  misc_RNA (1)...(19): siRNA sense strand
gaaggugucaguaaagaaa

SEQ ID NO: 1646467 - RNA, 19 nt, Homo sapiens
  misc_RNA (1)...(19): siRNA sense strand
gcaugaaguucccauugaa

SEQ ID NO: 1646468 - RNA, 19 nt, Homo sapiens
  misc_RNA (1)...(19): siRNA sense strand
gacaguggguagaugauuu

SEQ ID NO: 1646469 - RNA, 19 nt, Homo sapiens
  misc_RNA (1)...(19): siRNA sense strand
caucaguugucaaagauaa

SEQ ID NO: 1646470 - RNA, 19 nt, Homo sapiens
  misc_RNA (1)...(19): siRNA sense strand
gaugaagccagauauaauu

SEQ ID NO: 1646471 - RNA, 19 nt, Homo sapiens
  misc_RNA (1)...(19): siRNA sense strand
aggaagaucuccauuaaau

SEQ ID NO: 1646472 - RNA, 19 nt, Homo sapiens
  misc_RNA (1)...(19): siRNA sense strand
agaaacggauagacauaua

SEQ ID NO: 1646473 - RNA, 19 nt, Homo sapiens
  misc_RNA (1)...(19): siRNA sense strand
cacaaggcauauuggauua

SEQ ID NO: 1646474 - RNA, 19 nt, Homo sapiens
  misc_RNA (1)...(19): siRNA sense strand
gagagaagaugggcagaga

SEQ ID NO: 1646475 - RNA, 19 nt, Homo sapiens
  misc_RNA (1)...(19): siRNA sense strand
gcagagaagcaucauuauu

SEQ ID NO: 1646476 - RNA, 19 nt, Homo sapiens
  misc_RNA (1)...(19): siRNA sense strand
gaaugcgucucucucaaga

SEQ ID NO: 1646477 - RNA, 19 nt, Homo sapiens
  misc_RNA (1)...(19): siRNA sense strand
ggaagaucuccauuaaaua

SEQ ID NO: 1646478 - RNA, 19 nt, Homo sapiens
  misc_RNA (1)...(19): siRNA sense strand
gcacuagaaauaaagagua

SEQ ID NO: 1646479 - RNA, 19 nt, Homo sapiens
  misc_RNA (1)...(19): siRNA sense strand
gaacgacaguggguagaug

SEQ ID NO: 1646480 - RNA, 19 nt, Homo sapiens
  misc_RNA (1)...(19): siRNA sense strand
gcaauuaacaaaccauaug

SEQ ID NO: 1646481 - RNA, 19 nt, Homo sapiens
  misc_RNA (1)...(19): siRNA sense strand
ugucauaaauccugcauau

SEQ ID NO: 1646482 - RNA, 19 nt, Homo sapiens
  misc_RNA (1)...(19): siRNA sense strand
caggacagauauuuacaaa

SEQ ID NO: 1646483 - RNA, 19 nt, Homo sapiens
  misc_RNA (1)...(19): siRNA sense strand
gaaacggauagacauauaa

SEQ ID NO: 1646484 - RNA, 19 nt, Homo sapiens
  misc_RNA (1)...(19): siRNA sense strand
aggaggacaugcugaaaua

SEQ ID NO: 1646485 - RNA, 19 nt, Homo sapiens
  misc_RNA (1)...(19): siRNA sense strand
acagaaaacucacuacaua

SEQ ID NO: 1646486 - RNA, 19 nt, Homo sapiens
  misc_RNA (1)...(19): siRNA sense strand
gaauugaagcauggaaaua

SEQ ID NO: 1646487 - RNA, 19 nt, Homo sapiens
  misc_RNA (1)...(19): siRNA sense strand
gaucuucaguauacaaauc

SEQ ID NO: 1646488 - RNA, 19 nt, Homo sapiens
  misc_RNA (1)...(19): siRNA sense strand
augcuaagcugauaacauu

SEQ ID NO: 1646489 - RNA, 19 nt, Homo sapiens
  misc_RNA (1)...(19): siRNA sense strand
ggucauaucguucuguuga

SEQ ID NO: 1646490 - RNA, 19 nt, Homo sapiens
  misc_RNA (1)...(19): siRNA sense strand
gaaauaacacaaggcauau

SEQ ID NO: 1646491 - RNA, 19 nt, Homo sapiens
  misc_RNA (1)...(19): siRNA sense strand
cauggaaacuaaggcuuua

SEQ ID NO: 1646492 - RNA, 19 nt, Homo sapiens
  misc_RNA (1)...(19): siRNA sense strand
caaaucgcauacuucauga

SEQ ID NO: 1646493 - RNA, 19 nt, Homo sapiens
  misc_RNA (1)...(19): siRNA sense strand
auacagagcuaagucauau

SEQ ID NO: 1646494 - RNA, 19 nt, Homo sapiens
  misc_RNA (1)...(19): siRNA sense strand
auacaaaucggguagauaa

SEQ ID NO: 1646495 - RNA, 19 nt, Homo sapiens
  misc_RNA (1)...(19): siRNA sense strand
gaaacuaaggcuuuacuca

SEQ ID NO: 1646496 - RNA, 19 nt, Homo sapiens
  misc_RNA (1)...(19): siRNA sense strand
guucgugacuggccagaaa

SEQ ID NO: 1646497 - RNA, 19 nt, Homo sapiens
  misc_RNA (1)...(19): siRNA sense strand
caagugaaggugucaguaa

SEQ ID NO: 1646498 - RNA, 19 nt, Homo sapiens
  misc_RNA (1)...(19): siRNA sense strand
caaaucggguagauaaagu

SEQ ID NO: 1646499 - RNA, 19 nt, Homo sapiens
  misc_RNA (1)...(19): siRNA sense strand
gagauacugauacuuguuu

SEQ ID NO: 1646500 - RNA, 19 nt, Homo sapiens
  misc_RNA (1)...(19): siRNA sense strand
cagaauggaugggucauau

SEQ ID NO: 1646501 - RNA, 19 nt, Homo sapiens
  misc_RNA (1)...(19): siRNA sense strand
acaaggaagaucuccauua

SEQ ID NO: 1646502 - RNA, 19 nt, Homo sapiens
  misc_RNA (1)...(19): siRNA sense strand
ucacuuuauuccagcuuua

SEQ ID NO: 1646503 - RNA, 19 nt, Homo sapiens
  misc_RNA (1)...(19): siRNA sense strand
uuacagaauugcugggaaa

SEQ ID NO: 1646504 - RNA, 19 nt, Homo sapiens
  misc_RNA (1)...(19): siRNA sense strand
aaaggaaagugcaauccaa

SEQ ID NO: 1646505 - RNA, 19 nt, Homo sapiens
  misc_RNA (1)...(19): siRNA sense strand
aagcaagguuuccuaaaug

SEQ ID NO: 1646506 - RNA, 19 nt, Homo sapiens
  misc_RNA (1)...(19): siRNA sense strand
ugaggccacucgcauauug

SEQ ID NO: 1646507 - RNA, 19 nt, Homo sapiens
  misc_RNA (1)...(19): siRNA sense strand
caugcacaaucucacuuua

SEQ ID NO: 1646508 - RNA, 19 nt, Homo sapiens
  misc_RNA (1)...(19): siRNA sense strand
agagcuaagucauaugaaa

SEQ ID NO: 1646509 - RNA, 19 nt, Homo sapiens
  misc_RNA (1)...(19): siRNA sense strand
gaauacaagaaucucagua

SEQ ID NO: 1646510 - RNA, 19 nt, Homo sapiens
  misc_RNA (1)...(19): siRNA sense strand
caaggcaacagugaaauaa

SEQ ID NO: 1646511 - RNA, 19 nt, Homo sapiens
  misc_RNA (1)...(19): siRNA sense strand
uuacuaagccgucuucuca

SEQ ID NO: 1646512 - RNA, 19 nt, Homo sapiens
  misc_RNA (1)...(19): siRNA sense strand
guagaaaccaccaaaccaa

SEQ ID NO: 1646513 - RNA, 19 nt, Homo sapiens
  misc_RNA (1)...(19): siRNA sense strand
gccuucaacucaaaccaua

SEQ ID NO: 1646514 - RNA, 19 nt, Homo sapiens
  misc_RNA (1)...(19): siRNA sense strand
caagaaacucagcaauauu

SEQ ID NO: 1646515 - RNA, 19 nt, Homo sapiens
  misc_RNA (1)...(19): siRNA sense strand
ucaaggcaacagugaaaua

SEQ ID NO: 1646516 - RNA, 19 nt, Homo sapiens
  misc_RNA (1)...(19): siRNA sense strand
acaaaucgcauacuucaug

SEQ ID NO: 1646517 - RNA, 19 nt, Homo sapiens
  misc_RNA (1)...(19): siRNA sense strand
cccacuagcuauucuuauu

SEQ ID NO: 1646518 - RNA, 19 nt, Homo sapiens
  misc_RNA (1)...(19): siRNA sense strand
acacaaggcauauuggauu

SEQ ID NO: 1646519 - RNA, 19 nt, Homo sapiens
  misc_RNA (1)...(19): siRNA sense strand
ugaauugacuaaucuggau

SEQ ID NO: 1646520 - RNA, 19 nt, Homo sapiens
  misc_RNA (1)...(19): siRNA sense strand
ccagaaacggauagacaua

SEQ ID NO: 1646521 - RNA, 19 nt, Homo sapiens
  misc_RNA (1)...(19): siRNA sense strand
aauguuagcccuagagaaa

SEQ ID NO: 1646522 - RNA, 19 nt, Homo sapiens
  misc_RNA (1)...(19): siRNA sense strand
gaagaugggcagagaagca

SEQ ID NO: 1646523 - RNA, 19 nt, Homo sapiens
  misc_RNA (1)...(19): siRNA sense strand
gcuuuacucaucagucuua

SEQ ID NO: 1646524 - RNA, 19 nt, Homo sapiens
  misc_RNA (1)...(19): siRNA sense strand
gcagauaauggaaggaaug

SEQ ID NO: 1646525 - RNA, 19 nt, Homo sapiens
  misc_RNA (1)...(19): siRNA sense strand
uaagccgucuucucaguga

SEQ ID NO: 1646526 - RNA, 19 nt, Homo sapiens
  misc_RNA (1)...(19): siRNA sense strand
ucuaggagcuccagacuac

SEQ ID NO: 1646527 - RNA, 19 nt, Homo sapiens
  misc_RNA (1)...(19): siRNA sense strand
ugaaucaggucagacagaa

SEQ ID NO: 1646528 - RNA, 19 nt, Homo sapiens
  misc_RNA (1)...(19): siRNA sense strand
gauauuaugcgagucugua

SEQ ID NO: 1646529 - RNA, 19 nt, Homo sapiens
  misc_RNA (1)...(19): siRNA sense strand
caugagcagugucacagaa

SEQ ID NO: 1646530 - RNA, 19 nt, Homo sapiens
  misc_RNA (1)...(19): siRNA sense strand
cagcgcauguucuuacaga

SEQ ID NO: 1646531 - RNA, 19 nt, Homo sapiens
  misc_RNA (1)...(19): siRNA sense strand
gagcuaagucauaugaaau

SEQ ID NO: 1646532 - RNA, 19 nt, Homo sapiens
  misc_RNA (1)...(19): siRNA sense strand
uaguacagauucuccuaaa

SEQ ID NO: 1646533 - RNA, 19 nt, Homo sapiens
  misc_RNA (1)...(19): siRNA sense strand
ugcacaaucucacuuuauu

SEQ ID NO: 1646534 - RNA, 19 nt, Homo sapiens
  misc_RNA (1)...(19): siRNA sense strand
gugaaggugucaguaaaga

SEQ ID NO: 1646535 - RNA, 19 nt, Homo sapiens
  misc_RNA (1)...(19): siRNA sense strand
acaagaaucucaguacaag

SEQ ID NO: 1646536 - RNA, 19 nt, Homo sapiens
  misc_RNA (1)...(19): siRNA sense strand
aggacaugcugaaauagua

SEQ ID NO: 1646537 - RNA, 19 nt, Homo sapiens
  misc_RNA (1)...(19): siRNA sense strand
ucagucaaccaguuagaua

SEQ ID NO: 1646538 - RNA, 19 nt, Homo sapiens
  misc_RNA (1)...(19): siRNA sense strand
ucggguagauaaaguggua

SEQ ID NO: 1646539 - RNA, 19 nt, Homo sapiens
  misc_RNA (1)...(19): siRNA sense strand
gaaaacgaguuguacuaau

SEQ ID NO: 1646540 - RNA, 19 nt, Homo sapiens
  misc_RNA (1)...(19): siRNA sense strand
gggagauacugauacuugu

SEQ ID NO: 1646541 - RNA, 19 nt, Homo sapiens
  misc_RNA (1)...(19): siRNA sense strand
acucaucagucuuaaguau

SEQ ID NO: 1646542 - RNA, 19 nt, Homo sapiens
  misc_RNA (1)...(19): siRNA sense strand
ggaauacagagcuaaguca

SEQ ID NO: 1646543 - RNA, 19 nt, Homo sapiens
  misc_RNA (1)...(19): siRNA sense strand
aagaagagaugugagacuu

SEQ ID NO: 1646544 - RNA, 19 nt, Homo sapiens
  misc_RNA (1)...(19): siRNA sense strand
gaaauacuugcugaauuga

SEQ ID NO: 1646545 - RNA, 19 nt, Homo sapiens
  misc_RNA (1)...(19): siRNA sense strand
guucgaauauacagaaugg

SEQ ID NO: 1646546 - RNA, 19 nt, Homo sapiens
  misc_RNA (1)...(19): siRNA sense strand
gaagcuaaauggacaguua

SEQ ID NO: 1646547 - RNA, 19 nt, Homo sapiens
  misc_RNA (1)...(19): siRNA sense strand
caaggaagaucuccauuaa

SEQ ID NO: 1646548 - RNA, 19 nt, Homo sapiens
  misc_RNA (1)...(19): siRNA sense strand
ggaagaagcugcaaaauug

SEQ ID NO: 1646549 - RNA, 19 nt, Homo sapiens
  misc_RNA (1)...(19): siRNA sense strand
ggacagauauuuacaaagg

SEQ ID NO: 1646550 - RNA, 19 nt, Homo sapiens
  misc_RNA (1)...(19): siRNA sense strand
ccaaauaccuaaacaggaa

SEQ ID NO: 1646551 - RNA, 19 nt, Homo sapiens
  misc_RNA (1)...(19): siRNA sense strand
cauauuggauuacguagua

SEQ ID NO: 1646552 - RNA, 19 nt, Homo sapiens
  misc_RNA (1)...(19): siRNA sense strand
gaaggaagcaauuaacaaa

SEQ ID NO: 1646553 - RNA, 19 nt, Homo sapiens
  misc_RNA (1)...(19): siRNA sense strand
gggcagagaagcaucauua

SEQ ID NO: 1646554 - RNA, 19 nt, Homo sapiens
  misc_RNA (1)...(19): siRNA sense strand
cagagaagcaucauuauuu

SEQ ID NO: 1646555 - RNA, 19 nt, Homo sapiens
  misc_RNA (1)...(19): siRNA sense strand
ucaagaaacucagcaauau

SEQ ID NO: 1646556 - RNA, 19 nt, Homo sapiens
  misc_RNA (1)...(19): siRNA sense strand
agaaauacuugcugaauug

SEQ ID NO: 1646557 - RNA, 19 nt, Homo sapiens
  misc_RNA (1)...(19): siRNA sense strand
caagcaagguuuccuaaau

SEQ ID NO: 1646558 - RNA, 19 nt, Homo sapiens
  misc_RNA (1)...(19): siRNA sense strand
caacucaaaccauaucaua

SEQ ID NO: 1646559 - RNA, 19 nt, Homo sapiens
  misc_RNA (1)...(19): siRNA sense strand
caucguaccuguuaccaaa

SEQ ID NO: 1646560 - RNA, 19 nt, Homo sapiens
  misc_RNA (1)...(19): siRNA sense strand
ugaaauaacacaaggcaua

SEQ ID NO: 1646561 - RNA, 19 nt, Homo sapiens
  misc_RNA (1)...(19): siRNA sense strand
cauaaacccuugcaacaug

SEQ ID NO: 1646562 - RNA, 19 nt, Homo sapiens
  misc_RNA (1)...(19): siRNA sense strand
ggacaaaucgcauacuuca

SEQ ID NO: 1646563 - RNA, 19 nt, Homo sapiens
  misc_RNA (1)...(19): siRNA sense strand
gcaccucacuggacaaauc

SEQ ID NO: 1646564 - RNA, 19 nt, Homo sapiens
  misc_RNA (1)...(19): siRNA sense strand
cagaaauacuugcugaauu

SEQ ID NO: 1646565 - RNA, 19 nt, Homo sapiens
  misc_RNA (1)...(19): siRNA sense strand
gaaaccaccaaaccaauuu

SEQ ID NO: 1646566 - RNA, 19 nt, Homo sapiens
  misc_RNA (1)...(19): siRNA sense strand
gaaggugucaguaaagaaa

SEQ ID NO: 1646567 - RNA, 19 nt, Homo sapiens
  misc_RNA (1)...(19): siRNA sense strand
gcaugaaguucccauugaa

SEQ ID NO: 1646568 - RNA, 19 nt, Homo sapiens
  misc_RNA (1)...(19): siRNA sense strand
gacaguggguagaugauuu

SEQ ID NO: 1646569 - RNA, 19 nt, Homo sapiens
  misc_RNA (1)...(19): siRNA sense strand
caucaguugucaaagauaa

SEQ ID NO: 1646570 - RNA, 19 nt, Homo sapiens
  misc_RNA (1)...(19): siRNA sense strand
gaugaagccagauauaauu

SEQ ID NO: 1646571 - RNA, 19 nt, Homo sapiens
  misc_RNA (1)...(19): siRNA sense strand
aggaagaucuccauuaaau

SEQ ID NO: 1646572 - RNA, 19 nt, Homo sapiens
  misc_RNA (1)...(19): siRNA sense strand
agaaacggauagacauaua

SEQ ID NO: 1646573 - RNA, 19 nt, Homo sapiens
  misc_RNA (1)...(19): siRNA sense strand
cacaaggcauauuggauua

SEQ ID NO: 1646574 - RNA, 19 nt, Homo sapiens
  misc_RNA (1)...(19): siRNA sense strand
gagagaagaugggcagaga

SEQ ID NO: 1646575 - RNA, 19 nt, Homo sapiens
  misc_RNA (1)...(19): siRNA sense strand
gcagagaagcaucauuauu

SEQ ID NO: 1646576 - RNA, 19 nt, Homo sapiens
  misc_RNA (1)...(19): siRNA sense strand
gaaugcgucucucucaaga

SEQ ID NO: 1646577 - RNA, 19 nt, Homo sapiens
  misc_RNA (1)...(19): siRNA sense strand
ggaagaucuccauuaaaua

SEQ ID NO: 1646578 - RNA, 19 nt, Homo sapiens
  misc_RNA (1)...(19): siRNA sense strand
gcacuagaaauaaagagua

SEQ ID NO: 1646579 - RNA, 19 nt, Homo sapiens
  misc_RNA (1)...(19): siRNA sense strand
gaacgacaguggguagaug

SEQ ID NO: 1646580 - RNA, 19 nt, Homo sapiens
  misc_RNA (1)...(19): siRNA sense strand
gcaauuaacaaaccauaug

SEQ ID NO: 1646581 - RNA, 19 nt, Homo sapiens
  misc_RNA (1)...(19): siRNA sense strand
ugucauaaauccugcauau

SEQ ID NO: 1646582 - RNA, 19 nt, Homo sapiens
  misc_RNA (1)...(19): siRNA sense strand
caggacagauauuuacaaa

SEQ ID NO: 1646583 - RNA, 19 nt, Homo sapiens
  misc_RNA (1)...(19): siRNA sense strand
gaaacggauagacauauaa

SEQ ID NO: 1646584 - RNA, 19 nt, Homo sapiens
  misc_RNA (1)...(19): siRNA sense strand
aggaggacaugcugaaaua

SEQ ID NO: 1646585 - RNA, 19 nt, Homo sapiens
  misc_RNA (1)...(19): siRNA sense strand
acagaaaacucacuacaua

SEQ ID NO: 1646586 - RNA, 19 nt, Homo sapiens
  misc_RNA (1)...(19): siRNA sense strand
gaauugaagcauggaaaua

SEQ ID NO: 1646587 - RNA, 19 nt, Homo sapiens
  misc_RNA (1)...(19): siRNA sense strand
gaucuucaguauacaaauc

SEQ ID NO: 1646588 - RNA, 19 nt, Homo sapiens
  misc_RNA (1)...(19): siRNA sense strand
augcuaagcugauaacauu

SEQ ID NO: 1646589 - RNA, 19 nt, Homo sapiens
  misc_RNA (1)...(19): siRNA sense strand
ggucauaucguucuguuga

SEQ ID NO: 1646590 - RNA, 19 nt, Homo sapiens
  misc_RNA (1)...(19): siRNA sense strand
gaaauaacacaaggcauau

SEQ ID NO: 1646591 - RNA, 19 nt, Homo sapiens
  misc_RNA (1)...(19): siRNA sense strand
cauggaaacuaaggcuuua

SEQ ID NO: 1646592 - RNA, 19 nt, Homo sapiens
  misc_RNA (1)...(19): siRNA sense strand
caaaucgcauacuucauga

SEQ ID NO: 1646593 - RNA, 19 nt, Homo sapiens
  misc_RNA (1)...(19): siRNA sense strand
auacagagcuaagucauau

SEQ ID NO: 1646594 - RNA, 19 nt, Homo sapiens
  misc_RNA (1)...(19): siRNA sense strand
auacaaaucggguagauaa

SEQ ID NO: 1646595 - RNA, 19 nt, Homo sapiens
  misc_RNA (1)...(19): siRNA sense strand
gaaacuaaggcuuuacuca

SEQ ID NO: 1646596 - RNA, 19 nt, Homo sapiens
  misc_RNA (1)...(19): siRNA sense strand
guucgugacuggccagaaa

SEQ ID NO: 1646597 - RNA, 19 nt, Homo sapiens
  misc_RNA (1)...(19): siRNA sense strand
caagugaaggugucaguaa

SEQ ID NO: 1646598 - RNA, 19 nt, Homo sapiens
  misc_RNA (1)...(19): siRNA sense strand
caaaucggguagauaaagu

SEQ ID NO: 1646599 - RNA, 19 nt, Homo sapiens
  misc_RNA (1)...(19): siRNA sense strand
gagauacugauacuuguuu

SEQ ID NO: 1646600 - RNA, 19 nt, Homo sapiens
  misc_RNA (1)...(19): siRNA sense strand
cagaauggaugggucauau

SEQ ID NO: 1646601 - RNA, 19 nt, Homo sapiens
  misc_RNA (1)...(19): siRNA sense strand
acaaggaagaucuccauua

SEQ ID NO: 1646602 - RNA, 19 nt, Homo sapiens
  misc_RNA (1)...(19): siRNA sense strand
ucacuuuauuccagcuuua

SEQ ID NO: 1646603 - RNA, 19 nt, Homo sapiens
  misc_RNA (1)...(19): siRNA sense strand
uuacagaauugcugggaaa

SEQ ID NO: 1646604 - RNA, 19 nt, Homo sapiens
  misc_RNA (1)...(19): siRNA sense strand
aaaggaaagugcaauccaa

SEQ ID NO: 1646605 - RNA, 19 nt, Homo sapiens
  misc_RNA (1)...(19): siRNA sense strand
aagcaagguuuccuaaaug

SEQ ID NO: 1646606 - RNA, 19 nt, Homo sapiens
  misc_RNA (1)...(19): siRNA sense strand
ugaggccacucgcauauug

SEQ ID NO: 1646607 - RNA, 19 nt, Homo sapiens
  misc_RNA (1)...(19): siRNA sense strand
caugcacaaucucacuuua

SEQ ID NO: 1646608 - RNA, 19 nt, Homo sapiens
  misc_RNA (1)...(19): siRNA sense strand
agagcuaagucauaugaaa

SEQ ID NO: 1646609 - RNA, 19 nt, Homo sapiens
  misc_RNA (1)...(19): siRNA sense strand
gaauacaagaaucucagua

SEQ ID NO: 1646610 - RNA, 19 nt, Homo sapiens
  misc_RNA (1)...(19): siRNA sense strand
caaggcaacagugaaauaa

SEQ ID NO: 1646611 - RNA, 19 nt, Homo sapiens
  misc_RNA (1)...(19): siRNA sense strand
uuacuaagccgucuucuca

SEQ ID NO: 1646612 - RNA, 19 nt, Homo sapiens
  misc_RNA (1)...(19): siRNA sense strand
guagaaaccaccaaaccaa

SEQ ID NO: 1646613 - RNA, 19 nt, Homo sapiens
  misc_RNA (1)...(19): siRNA sense strand
gccuucaacucaaaccaua

SEQ ID NO: 1646614 - RNA, 19 nt, Homo sapiens
  misc_RNA (1)...(19): siRNA sense strand
caagaaacucagcaauauu

SEQ ID NO: 1646615 - RNA, 19 nt, Homo sapiens
  misc_RNA (1)...(19): siRNA sense strand
ucaaggcaacagugaaaua

SEQ ID NO: 1646616 - RNA, 19 nt, Homo sapiens
  misc_RNA (1)...(19): siRNA sense strand
acaaaucgcauacuucaug

SEQ ID NO: 1646617 - RNA, 19 nt, Homo sapiens
  misc_RNA (1)...(19): siRNA sense strand
cccacuagcuauucuuauu

SEQ ID NO: 1646618 - RNA, 19 nt, Homo sapiens
  misc_RNA (1)...(19): siRNA sense strand
acacaaggcauauuggauu

SEQ ID NO: 1646619 - RNA, 19 nt, Homo sapiens
  misc_RNA (1)...(19): siRNA sense strand
ugaauugacuaaucuggau

SEQ ID NO: 1646620 - RNA, 19 nt, Homo sapiens
  misc_RNA (1)...(19): siRNA sense strand
ccagaaacggauagacaua

SEQ ID NO: 1646621 - RNA, 19 nt, Homo sapiens
  misc_RNA (1)...(19): siRNA sense strand
aauguuagcccuagagaaa

SEQ ID NO: 1646622 - RNA, 19 nt, Homo sapiens
  misc_RNA (1)...(19): siRNA sense strand
gaagaugggcagagaagca

SEQ ID NO: 1646623 - RNA, 19 nt, Homo sapiens
  misc_RNA (1)...(19): siRNA sense strand
gcuuuacucaucagucuua

SEQ ID NO: 1646624 - RNA, 19 nt, Homo sapiens
  misc_RNA (1)...(19): siRNA sense strand
gcagauaauggaaggaaug

SEQ ID NO: 1646625 - RNA, 19 nt, Homo sapiens
  misc_RNA (1)...(19): siRNA sense strand
uaagccgucuucucaguga

SEQ ID NO: 1646626 - RNA, 19 nt, Homo sapiens
  misc_RNA (1)...(19): siRNA sense strand
ucuaggagcuccagacuac

SEQ ID NO: 1646627 - RNA, 19 nt, Homo sapiens
  misc_RNA (1)...(19): siRNA sense strand
ugaaucaggucagacagaa

SEQ ID NO: 1646628 - RNA, 19 nt, Homo sapiens
  misc_RNA (1)...(19): siRNA sense strand
gauauuaugcgagucugua

SEQ ID NO: 1646629 - RNA, 19 nt, Homo sapiens
  misc_RNA (1)...(19): siRNA sense strand
caugagcagugucacagaa

SEQ ID NO: 1646630 - RNA, 19 nt, Homo sapiens
  misc_RNA (1)...(19): siRNA sense strand
cagcgcauguucuuacaga

SEQ ID NO: 1646631 - RNA, 19 nt, Homo sapiens
  misc_RNA (1)...(19): siRNA sense strand
gagcuaagucauaugaaau

SEQ ID NO: 1646632 - RNA, 19 nt, Homo sapiens
  misc_RNA (1)...(19): siRNA sense strand
uaguacagauucuccuaaa

SEQ ID NO: 1646633 - RNA, 19 nt, Homo sapiens
  misc_RNA (1)...(19): siRNA sense strand
ugcacaaucucacuuuauu

SEQ ID NO: 1646634 - RNA, 19 nt, Homo sapiens
  misc_RNA (1)...(19): siRNA sense strand
gugaaggugucaguaaaga

SEQ ID NO: 1646635 - RNA, 19 nt, Homo sapiens
  misc_RNA (1)...(19): siRNA sense strand
acaagaaucucaguacaag

SEQ ID NO: 1646636 - RNA, 19 nt, Homo sapiens
  misc_RNA (1)...(19): siRNA sense strand
aggacaugcugaaauagua

SEQ ID NO: 1646637 - RNA, 19 nt, Homo sapiens
  misc_RNA (1)...(19): siRNA sense strand
ucagucaaccaguuagaua

SEQ ID NO: 1646638 - RNA, 19 nt, Homo sapiens
  misc_RNA (1)...(19): siRNA sense strand
ucggguagauaaaguggua

SEQ ID NO: 1646639 - RNA, 19 nt, Homo sapiens
  misc_RNA (1)...(19): siRNA sense strand
gaaaacgaguuguacuaau

SEQ ID NO: 1646640 - RNA, 19 nt, Homo sapiens
  misc_RNA (1)...(19): siRNA sense strand
gggagauacugauacuugu

SEQ ID NO: 1646641 - RNA, 19 nt, Homo sapiens
  misc_RNA (1)...(19): siRNA sense strand
acucaucagucuuaaguau

SEQ ID NO: 1646642 - RNA, 19 nt, Homo sapiens
  misc_RNA (1)...(19): siRNA sense strand
ggaauacagagcuaaguca

SEQ ID NO: 1646643 - RNA, 19 nt, Homo sapiens
  misc_RNA (1)...(19): siRNA sense strand
aagaagagaugugagacuu

SEQ ID NO: 1646644 - RNA, 19 nt, Homo sapiens
  misc_RNA (1)...(19): siRNA sense strand
gaaauacuugcugaauuga

SEQ ID NO: 1646645 - RNA, 19 nt, Homo sapiens
  misc_RNA (1)...(19): siRNA sense strand
guucgaauauacagaaugg

SEQ ID NO: 1646646 - RNA, 19 nt, Homo sapiens
  misc_RNA (1)...(19): siRNA sense strand
gaagcuaaauggacaguua

SEQ ID NO: 1646647 - RNA, 19 nt, Homo sapiens
  misc_RNA (1)...(19): siRNA sense strand
caaggaagaucuccauuaa

SEQ ID NO: 1646648 - RNA, 19 nt, Homo sapiens
  misc_RNA (1)...(19): siRNA sense strand
ggaagaagcugcaaaauug

SEQ ID NO: 1646649 - RNA, 19 nt, Homo sapiens
  misc_RNA (1)...(19): siRNA sense strand
ggacagauauuuacaaagg

SEQ ID NO: 1646650 - RNA, 19 nt, Homo sapiens
  misc_RNA (1)...(19): siRNA sense strand
ccaaauaccuaaacaggaa

SEQ ID NO: 1646651 - RNA, 19 nt, Homo sapiens
  misc_RNA (1)...(19): siRNA sense strand
cauauuggauuacguagua

SEQ ID NO: 1646652 - RNA, 19 nt, Homo sapiens
  misc_RNA (1)...(19): siRNA sense strand
gaaggaagcaauuaacaaa

SEQ ID NO: 1646653 - RNA, 19 nt, Homo sapiens
  misc_RNA (1)...(19): siRNA sense strand
gggcagagaagcaucauua

SEQ ID NO: 1646654 - RNA, 19 nt, Homo sapiens
  misc_RNA (1)...(19): siRNA sense strand
cagagaagcaucauuauuu

SEQ ID NO: 1646655 - RNA, 19 nt, Homo sapiens
  misc_RNA (1)...(19): siRNA sense strand
ucaagaaacucagcaauau

SEQ ID NO: 1646656 - RNA, 19 nt, Homo sapiens
  misc_RNA (1)...(19): siRNA sense strand
agaaauacuugcugaauug

SEQ ID NO: 1646657 - RNA, 19 nt, Homo sapiens
  misc_RNA (1)...(19): siRNA sense strand
caagcaagguuuccuaaau

SEQ ID NO: 1646658 - RNA, 19 nt, Homo sapiens
  misc_RNA (1)...(19): siRNA sense strand
caacucaaaccauaucaua

SEQ ID NO: 1646659 - RNA, 19 nt, Homo sapiens
  misc_RNA (1)...(19): siRNA sense strand
caucguaccuguuaccaaa

SEQ ID NO: 1646660 - RNA, 19 nt, Homo sapiens
  misc_RNA (1)...(19): siRNA sense strand
ugaaauaacacaaggcaua

SEQ ID NO: 1646661 - RNA, 19 nt, Homo sapiens
  misc_RNA (1)...(19): siRNA sense strand
cauaaacccuugcaacaug

SEQ ID NO: 1646662 - RNA, 19 nt, Homo sapiens
  misc_RNA (1)...(19): siRNA sense strand
ggacaaaucgcauacuuca

SEQ ID NO: 1646663 - RNA, 19 nt, Homo sapiens
  misc_RNA (1)...(19): siRNA sense strand
gcaccucacuggacaaauc

SEQ ID NO: 1646664 - RNA, 19 nt, Homo sapiens
  misc_RNA (1)...(19): siRNA sense strand
cagaaauacuugcugaauu

SEQ ID NO: 1646665 - RNA, 19 nt, Homo sapiens
  misc_RNA (1)...(19): siRNA sense strand
gaaaccaccaaaccaauuu

SEQ ID NO: 1646666 - RNA, 19 nt, Homo sapiens
  misc_RNA (1)...(19): siRNA sense strand
gaaggugucaguaaagaaa

SEQ ID NO: 1646667 - RNA, 19 nt, Homo sapiens
  misc_RNA (1)...(19): siRNA sense strand
gcaugaaguucccauugaa

SEQ ID NO: 1646668 - RNA, 19 nt, Homo sapiens
  misc_RNA (1)...(19): siRNA sense strand
gacaguggguagaugauuu

SEQ ID NO: 1646669 - RNA, 19 nt, Homo sapiens
  misc_RNA (1)...(19): siRNA sense strand
caucaguugucaaagauaa

SEQ ID NO: 1646670 - RNA, 19 nt, Homo sapiens
  misc_RNA (1)...(19): siRNA sense strand
gaugaagccagauauaauu

SEQ ID NO: 1646671 - RNA, 19 nt, Homo sapiens
  misc_RNA (1)...(19): siRNA sense strand
aggaagaucuccauuaaau

SEQ ID NO: 1646672 - RNA, 19 nt, Homo sapiens
  misc_RNA (1)...(19): siRNA sense strand
agaaacggauagacauaua

SEQ ID NO: 1646673 - RNA, 19 nt, Homo sapiens
  misc_RNA (1)...(19): siRNA sense strand
cacaaggcauauuggauua

SEQ ID NO: 1646674 - RNA, 19 nt, Homo sapiens
  misc_RNA (1)...(19): siRNA sense strand
gagagaagaugggcagaga

SEQ ID NO: 1646675 - RNA, 19 nt, Homo sapiens
  misc_RNA (1)...(19): siRNA sense strand
gcagagaagcaucauuauu

SEQ ID NO: 1646676 - RNA, 19 nt, Homo sapiens
  misc_RNA (1)...(19): siRNA sense strand
gaaugcgucucucucaaga

SEQ ID NO: 1646677 - RNA, 19 nt, Homo sapiens
  misc_RNA (1)...(19): siRNA sense strand
ggaagaucuccauuaaaua

SEQ ID NO: 1646678 - RNA, 19 nt, Homo sapiens
  misc_RNA (1)...(19): siRNA sense strand
gcacuagaaauaaagagua

SEQ ID NO: 1646679 - RNA, 19 nt, Homo sapiens
  misc_RNA (1)...(19): siRNA sense strand
gaacgacaguggguagaug

SEQ ID NO: 1646680 - RNA, 19 nt, Homo sapiens
  misc_RNA (1)...(19): siRNA sense strand
gcaauuaacaaaccauaug

SEQ ID NO: 1646681 - RNA, 19 nt, Homo sapiens
  misc_RNA (1)...(19): siRNA sense strand
ugucauaaauccugcauau

SEQ ID NO: 1646682 - RNA, 19 nt, Homo sapiens
  misc_RNA (1)...(19): siRNA sense strand
caggacagauauuuacaaa

SEQ ID NO: 1646683 - RNA, 19 nt, Homo sapiens
  misc_RNA (1)...(19): siRNA sense strand
gaaacggauagacauauaa

SEQ ID NO: 1646684 - RNA, 19 nt, Homo sapiens
  misc_RNA (1)...(19): siRNA sense strand
aggaggacaugcugaaaua

SEQ ID NO: 1646685 - RNA, 19 nt, Homo sapiens
  misc_RNA (1)...(19): siRNA sense strand
acagaaaacucacuacaua

SEQ ID NO: 1646686 - RNA, 19 nt, Homo sapiens
  misc_RNA (1)...(19): siRNA sense strand
gaauugaagcauggaaaua

SEQ ID NO: 1646687 - RNA, 19 nt, Homo sapiens
  misc_RNA (1)...(19): siRNA sense strand
gaucuucaguauacaaauc

SEQ ID NO: 1646688 - RNA, 19 nt, Homo sapiens
  misc_RNA (1)...(19): siRNA sense strand
augcuaagcugauaacauu

SEQ ID NO: 1646689 - RNA, 19 nt, Homo sapiens
  misc_RNA (1)...(19): siRNA sense strand
ggucauaucguucuguuga

SEQ ID NO: 1646690 - RNA, 19 nt, Homo sapiens
  misc_RNA (1)...(19): siRNA sense strand
gaaauaacacaaggcauau

SEQ ID NO: 1646691 - RNA, 19 nt, Homo sapiens
  misc_RNA (1)...(19): siRNA sense strand
cauggaaacuaaggcuuua

SEQ ID NO: 1646692 - RNA, 19 nt, Homo sapiens
  misc_RNA (1)...(19): siRNA sense strand
caaaucgcauacuucauga

SEQ ID NO: 1646693 - RNA, 19 nt, Homo sapiens
  misc_RNA (1)...(19): siRNA sense strand
auacagagcuaagucauau

SEQ ID NO: 1646694 - RNA, 19 nt, Homo sapiens
  misc_RNA (1)...(19): siRNA sense strand
auacaaaucggguagauaa

SEQ ID NO: 1646695 - RNA, 19 nt, Homo sapiens
  misc_RNA (1)...(19): siRNA sense strand
gaaacuaaggcuuuacuca

SEQ ID NO: 1646696 - RNA, 19 nt, Homo sapiens
  misc_RNA (1)...(19): siRNA sense strand
guucgugacuggccagaaa

SEQ ID NO: 1646697 - RNA, 19 nt, Homo sapiens
  misc_RNA (1)...(19): siRNA sense strand
caagugaaggugucaguaa

SEQ ID NO: 1646698 - RNA, 19 nt, Homo sapiens
  misc_RNA (1)...(19): siRNA sense strand
caaaucggguagauaaagu

SEQ ID NO: 1646699 - RNA, 19 nt, Homo sapiens
  misc_RNA (1)...(19): siRNA sense strand
gagauacugauacuuguuu

SEQ ID NO: 1646700 - RNA, 19 nt, Homo sapiens
  misc_RNA (1)...(19): siRNA sense strand
cagaauggaugggucauau

SEQ ID NO: 1646701 - RNA, 19 nt, Homo sapiens
  misc_RNA (1)...(19): siRNA sense strand
acaaggaagaucuccauua

SEQ ID NO: 1646702 - RNA, 19 nt, Homo sapiens
  misc_RNA (1)...(19): siRNA sense strand
ucacuuuauuccagcuuua

SEQ ID NO: 1646703 - RNA, 19 nt, Homo sapiens
  misc_RNA (1)...(19): siRNA sense strand
uuacagaauugcugggaaa

SEQ ID NO: 1646704 - RNA, 19 nt, Homo sapiens
  misc_RNA (1)...(19): siRNA sense strand
aaaggaaagugcaauccaa

SEQ ID NO: 1646705 - RNA, 19 nt, Homo sapiens
  misc_RNA (1)...(19): siRNA sense strand
aagcaagguuuccuaaaug

SEQ ID NO: 1646706 - RNA, 19 nt, Homo sapiens
  misc_RNA (1)...(19): siRNA sense strand
ugaggccacucgcauauug

SEQ ID NO: 1646707 - RNA, 19 nt, Homo sapiens
  misc_RNA (1)...(19): siRNA sense strand
caugcacaaucucacuuua

SEQ ID NO: 1646708 - RNA, 19 nt, Homo sapiens
  misc_RNA (1)...(19): siRNA sense strand
agagcuaagucauaugaaa

SEQ ID NO: 1646709 - RNA, 19 nt, Homo sapiens
  misc_RNA (1)...(19): siRNA sense strand
gaauacaagaaucucagua

SEQ ID NO: 1646710 - RNA, 19 nt, Homo sapiens
  misc_RNA (1)...(19): siRNA sense strand
caaggcaacagugaaauaa

SEQ ID NO: 1646711 - RNA, 19 nt, Homo sapiens
  misc_RNA (1)...(19): siRNA sense strand
uuacuaagccgucuucuca

SEQ ID NO: 1646712 - RNA, 19 nt, Homo sapiens
  misc_RNA (1)...(19): siRNA sense strand
guagaaaccaccaaaccaa

SEQ ID NO: 1646713 - RNA, 19 nt, Homo sapiens
  misc_RNA (1)...(19): siRNA sense strand
gccuucaacucaaaccaua

SEQ ID NO: 1646714 - RNA, 19 nt, Homo sapiens
  misc_RNA (1)...(19): siRNA sense strand
caagaaacucagcaauauu

SEQ ID NO: 1646715 - RNA, 19 nt, Homo sapiens
  misc_RNA (1)...(19): siRNA sense strand
ucaaggcaacagugaaaua

SEQ ID NO: 1646716 - RNA, 19 nt, Homo sapiens
  misc_RNA (1)...(19): siRNA sense strand
acaaaucgcauacuucaug

SEQ ID NO: 1646717 - RNA, 19 nt, Homo sapiens
  misc_RNA (1)...(19): siRNA sense strand
cccacuagcuauucuuauu

SEQ ID NO: 1646718 - RNA, 19 nt, Homo sapiens
  misc_RNA (1)...(19): siRNA sense strand
acacaaggcauauuggauu

SEQ ID NO: 1646719 - RNA, 19 nt, Homo sapiens
  misc_RNA (1)...(19): siRNA sense strand
ugaauugacuaaucuggau

SEQ ID NO: 1646720 - RNA, 19 nt, Homo sapiens
  misc_RNA (1)...(19): siRNA sense strand
ccagaaacggauagacaua

SEQ ID NO: 1646721 - RNA, 19 nt, Homo sapiens
  misc_RNA (1)...(19): siRNA sense strand
aauguuagcccuagagaaa

SEQ ID NO: 1646722 - RNA, 19 nt, Homo sapiens
  misc_RNA (1)...(19): siRNA sense strand
gaagaugggcagagaagca

SEQ ID NO: 1646723 - RNA, 19 nt, Homo sapiens
  misc_RNA (1)...(19): siRNA sense strand
gcuuuacucaucagucuua

SEQ ID NO: 1646724 - RNA, 19 nt, Homo sapiens
  misc_RNA (1)...(19): siRNA sense strand
gcagauaauggaaggaaug

SEQ ID NO: 1646725 - RNA, 19 nt, Homo sapiens
  misc_RNA (1)...(19): siRNA sense strand
uaagccgucuucucaguga

SEQ ID NO: 1646726 - RNA, 19 nt, Homo sapiens
  misc_RNA (1)...(19): siRNA sense strand
ucuaggagcuccagacuac

SEQ ID NO: 1646727 - RNA, 19 nt, Homo sapiens
  misc_RNA (1)...(19): siRNA sense strand
ugaaucaggucagacagaa

SEQ ID NO: 1646728 - RNA, 19 nt, Homo sapiens
  misc_RNA (1)...(19): siRNA sense strand
gauauuaugcgagucugua

SEQ ID NO: 1646729 - RNA, 19 nt, Homo sapiens
  misc_RNA (1)...(19): siRNA sense strand
caugagcagugucacagaa

SEQ ID NO: 1646730 - RNA, 19 nt, Homo sapiens
  misc_RNA (1)...(19): siRNA sense strand
cagcgcauguucuuacaga

SEQ ID NO: 1646731 - RNA, 19 nt, Homo sapiens
  misc_RNA (1)...(19): siRNA sense strand
gagcuaagucauaugaaau

SEQ ID NO: 1646732 - RNA, 19 nt, Homo sapiens
  misc_RNA (1)...(19): siRNA sense strand
uaguacagauucuccuaaa

SEQ ID NO: 1646733 - RNA, 19 nt, Homo sapiens
  misc_RNA (1)...(19): siRNA sense strand
ugcacaaucucacuuuauu

SEQ ID NO: 1646734 - RNA, 19 nt, Homo sapiens
  misc_RNA (1)...(19): siRNA sense strand
gugaaggugucaguaaaga

SEQ ID NO: 1646735 - RNA, 19 nt, Homo sapiens
  misc_RNA (1)...(19): siRNA sense strand
acaagaaucucaguacaag

SEQ ID NO: 1646736 - RNA, 19 nt, Homo sapiens
  misc_RNA (1)...(19): siRNA sense strand
aggacaugcugaaauagua

SEQ ID NO: 1646737 - RNA, 19 nt, Homo sapiens
  misc_RNA (1)...(19): siRNA sense strand
ucagucaaccaguuagaua

SEQ ID NO: 1646738 - RNA, 19 nt, Homo sapiens
  misc_RNA (1)...(19): siRNA sense strand
ucggguagauaaaguggua

SEQ ID NO: 1646739 - RNA, 19 nt, Homo sapiens
  misc_RNA (1)...(19): siRNA sense strand
gaaaacgaguuguacuaau

SEQ ID NO: 1646740 - RNA, 19 nt, Homo sapiens
  misc_RNA (1)...(19): siRNA sense strand
gggagauacugauacuugu

SEQ ID NO: 1646741 - RNA, 19 nt, Homo sapiens
  misc_RNA (1)...(19): siRNA sense strand
acucaucagucuuaaguau

SEQ ID NO: 1646742 - RNA, 19 nt, Homo sapiens
  misc_RNA (1)...(19): siRNA sense strand
ggaauacagagcuaaguca

SEQ ID NO: 1646743 - RNA, 19 nt, Homo sapiens
  misc_RNA (1)...(19): siRNA sense strand
aagaagagaugugagacuu

SEQ ID NO: 1646744 - RNA, 19 nt, Homo sapiens
  misc_RNA (1)...(19): siRNA sense strand
gaaauacuugcugaauuga

SEQ ID NO: 1646745 - RNA, 19 nt, Homo sapiens
  misc_RNA (1)...(19): siRNA sense strand
guucgaauauacagaaugg

SEQ ID NO: 1646746 - RNA, 19 nt, Homo sapiens
  misc_RNA (1)...(19): siRNA sense strand
gaagcuaaauggacaguua

SEQ ID NO: 1646747 - RNA, 19 nt, Homo sapiens
  misc_RNA (1)...(19): siRNA sense strand
caaggaagaucuccauuaa

SEQ ID NO: 1646748 - RNA, 19 nt, Homo sapiens
  misc_RNA (1)...(19): siRNA sense strand
ggaagaagcugcaaaauug

SEQ ID NO: 1646749 - RNA, 19 nt, Homo sapiens
  misc_RNA (1)...(19): siRNA sense strand
ggacagauauuuacaaagg

SEQ ID NO: 1646750 - RNA, 19 nt, Homo sapiens
  misc_RNA (1)...(19): siRNA sense strand
ccaaauaccuaaacaggaa

SEQ ID NO: 1646751 - RNA, 19 nt, Homo sapiens
  misc_RNA (1)...(19): siRNA sense strand
cauauuggauuacguagua

SEQ ID NO: 1646752 - RNA, 19 nt, Homo sapiens
  misc_RNA (1)...(19): siRNA sense strand
gaaggaagcaauuaacaaa

SEQ ID NO: 1646753 - RNA, 19 nt, Homo sapiens
  misc_RNA (1)...(19): siRNA sense strand
gggcagagaagcaucauua

SEQ ID NO: 1646754 - RNA, 19 nt, Homo sapiens
  misc_RNA (1)...(19): siRNA sense strand
cagagaagcaucauuauuu

SEQ ID NO: 1646755 - RNA, 19 nt, Homo sapiens
  misc_RNA (1)...(19): siRNA sense strand
ucaagaaacucagcaauau

SEQ ID NO: 1646756 - RNA, 19 nt, Homo sapiens
  misc_RNA (1)...(19): siRNA sense strand
agaaauacuugcugaauug

SEQ ID NO: 1646757 - RNA, 19 nt, Homo sapiens
  misc_RNA (1)...(19): siRNA sense strand
caagcaagguuuccuaaau

SEQ ID NO: 1646758 - RNA, 19 nt, Homo sapiens
  misc_RNA (1)...(19): siRNA sense strand
caacucaaaccauaucaua

SEQ ID NO: 1646759 - RNA, 19 nt, Homo sapiens
  misc_RNA (1)...(19): siRNA sense strand
caucguaccuguuaccaaa

SEQ ID NO: 1646760 - RNA, 19 nt, Homo sapiens
  misc_RNA (1)...(19): siRNA sense strand
ugaaauaacacaaggcaua

SEQ ID NO: 1646761 - RNA, 19 nt, Homo sapiens
  misc_RNA (1)...(19): siRNA sense strand
cauaaacccuugcaacaug

SEQ ID NO: 1646762 - RNA, 19 nt, Homo sapiens
  misc_RNA (1)...(19): siRNA sense strand
ggacaaaucgcauacuuca

SEQ ID NO: 1646763 - RNA, 19 nt, Homo sapiens
  misc_RNA (1)...(19): siRNA sense strand
gcaccucacuggacaaauc

SEQ ID NO: 1646764 - RNA, 19 nt, Homo sapiens
  misc_RNA (1)...(19): siRNA sense strand
cagaaauacuugcugaauu

SEQ ID NO: 1646765 - RNA, 19 nt, Homo sapiens
  misc_RNA (1)...(19): siRNA sense strand
gaaaccaccaaaccaauuu

SEQ ID NO: 1646766 - RNA, 19 nt, Homo sapiens
  misc_RNA (1)...(19): siRNA sense strand
gaaggugucaguaaagaaa

SEQ ID NO: 1646767 - RNA, 19 nt, Homo sapiens
  misc_RNA (1)...(19): siRNA sense strand
gcaugaaguucccauugaa

SEQ ID NO: 1646768 - RNA, 19 nt, Homo sapiens
  misc_RNA (1)...(19): siRNA sense strand
gacaguggguagaugauuu

SEQ ID NO: 1646769 - RNA, 19 nt, Homo sapiens
  misc_RNA (1)...(19): siRNA sense strand
caucaguugucaaagauaa

SEQ ID NO: 1646770 - RNA, 19 nt, Homo sapiens
  misc_RNA (1)...(19): siRNA sense strand
gaugaagccagauauaauu

SEQ ID NO: 1646771 - RNA, 19 nt, Homo sapiens
  misc_RNA (1)...(19): siRNA sense strand
aggaagaucuccauuaaau

SEQ ID NO: 1646772 - RNA, 19 nt, Homo sapiens
  misc_RNA (1)...(19): siRNA sense strand
agaaacggauagacauaua

SEQ ID NO: 1646773 - RNA, 19 nt, Homo sapiens
  misc_RNA (1)...(19): siRNA sense strand
cacaaggcauauuggauua

SEQ ID NO: 1646774 - RNA, 19 nt, Homo sapiens
  misc_RNA (1)...(19): siRNA sense strand
gagagaagaugggcagaga

SEQ ID NO: 1646775 - RNA, 19 nt, Homo sapiens
  misc_RNA (1)...(19): siRNA sense strand
gcagagaagcaucauuauu

SEQ ID NO: 1646776 - RNA, 19 nt, Homo sapiens
  misc_RNA (1)...(19): siRNA sense strand
gaaugcgucucucucaaga

SEQ ID NO: 1646777 - RNA, 19 nt, Homo sapiens
  misc_RNA (1)...(19): siRNA sense strand
ggaagaucuccauuaaaua

SEQ ID NO: 1646778 - RNA, 19 nt, Homo sapiens
  misc_RNA (1)...(19): siRNA sense strand
gcacuagaaauaaagagua

SEQ ID NO: 1646779 - RNA, 19 nt, Homo sapiens
  misc_RNA (1)...(19): siRNA sense strand
gaacgacaguggguagaug

SEQ ID NO: 1646780 - RNA, 19 nt, Homo sapiens
  misc_RNA (1)...(19): siRNA sense strand
gcaauuaacaaaccauaug

SEQ ID NO: 1646781 - RNA, 19 nt, Homo sapiens
  misc_RNA (1)...(19): siRNA sense strand
ugucauaaauccugcauau

SEQ ID NO: 1646782 - RNA, 19 nt, Homo sapiens
  misc_RNA (1)...(19): siRNA sense strand
caggacagauauuuacaaa

SEQ ID NO: 1646783 - RNA, 19 nt, Homo sapiens
  misc_RNA (1)...(19): siRNA sense strand
gaaacggauagacauauaa

SEQ ID NO: 1646784 - RNA, 19 nt, Homo sapiens
  misc_RNA (1)...(19): siRNA sense strand
aggaggacaugcugaaaua

SEQ ID NO: 1646785 - RNA, 19 nt, Homo sapiens
  misc_RNA (1)...(19): siRNA sense strand
acagaaaacucacuacaua

SEQ ID NO: 1646786 - RNA, 19 nt, Homo sapiens
  misc_RNA (1)...(19): siRNA sense strand
gaauugaagcauggaaaua

SEQ ID NO: 1646787 - RNA, 19 nt, Homo sapiens
  misc_RNA (1)...(19): siRNA sense strand
gaucuucaguauacaaauc

SEQ ID NO: 1646788 - RNA, 19 nt, Homo sapiens
  misc_RNA (1)...(19): siRNA sense strand
augcuaagcugauaacauu

SEQ ID NO: 1646789 - RNA, 19 nt, Homo sapiens
  misc_RNA (1)...(19): siRNA sense strand
ggucauaucguucuguuga

SEQ ID NO: 1646790 - RNA, 19 nt, Homo sapiens
  misc_RNA (1)...(19): siRNA sense strand
gaaauaacacaaggcauau

SEQ ID NO: 1646791 - RNA, 19 nt, Homo sapiens
  misc_RNA (1)...(19): siRNA sense strand
cauggaaacuaaggcuuua

SEQ ID NO: 1646792 - RNA, 19 nt, Homo sapiens
  misc_RNA (1)...(19): siRNA sense strand
caaaucgcauacuucauga

SEQ ID NO: 1646793 - RNA, 19 nt, Homo sapiens
  misc_RNA (1)...(19): siRNA sense strand
auacagagcuaagucauau

SEQ ID NO: 1646794 - RNA, 19 nt, Homo sapiens
  misc_RNA (1)...(19): siRNA sense strand
auacaaaucggguagauaa

SEQ ID NO: 1646795 - RNA, 19 nt, Homo sapiens
  misc_RNA (1)...(19): siRNA sense strand
gaaacuaaggcuuuacuca

SEQ ID NO: 1646796 - RNA, 19 nt, Homo sapiens
  misc_RNA (1)...(19): siRNA sense strand
guucgugacuggccagaaa

SEQ ID NO: 1646797 - RNA, 19 nt, Homo sapiens
  misc_RNA (1)...(19): siRNA sense strand
caagugaaggugucaguaa

SEQ ID NO: 1646798 - RNA, 19 nt, Homo sapiens
  misc_RNA (1)...(19): siRNA sense strand
caaaucggguagauaaagu

SEQ ID NO: 1646799 - RNA, 19 nt, Homo sapiens
  misc_RNA (1)...(19): siRNA sense strand
gagauacugauacuuguuu

SEQ ID NO: 1646800 - RNA, 19 nt, Homo sapiens
  misc_RNA (1)...(19): siRNA sense strand
cagaauggaugggucauau

SEQ ID NO: 1646801 - RNA, 19 nt, Homo sapiens
  misc_RNA (1)...(19): siRNA sense strand
acaaggaagaucuccauua

SEQ ID NO: 1646802 - RNA, 19 nt, Homo sapiens
  misc_RNA (1)...(19): siRNA sense strand
ucacuuuauuccagcuuua

SEQ ID NO: 1646803 - RNA, 19 nt, Homo sapiens
  misc_RNA (1)...(19): siRNA sense strand
uuacagaauugcugggaaa

SEQ ID NO: 1646804 - RNA, 19 nt, Homo sapiens
  misc_RNA (1)...(19): siRNA sense strand
aaaggaaagugcaauccaa

SEQ ID NO: 1646805 - RNA, 19 nt, Homo sapiens
  misc_RNA (1)...(19): siRNA sense strand
aagcaagguuuccuaaaug

SEQ ID NO: 1646806 - RNA, 19 nt, Homo sapiens
  misc_RNA (1)...(19): siRNA sense strand
ugaggccacucgcauauug

SEQ ID NO: 1646807 - RNA, 19 nt, Homo sapiens
  misc_RNA (1)...(19): siRNA sense strand
caugcacaaucucacuuua

SEQ ID NO: 1646808 - RNA, 19 nt, Homo sapiens
  misc_RNA (1)...(19): siRNA sense strand
agagcuaagucauaugaaa

SEQ ID NO: 1646809 - RNA, 19 nt, Homo sapiens
  misc_RNA (1)...(19): siRNA sense strand
gaauacaagaaucucagua

SEQ ID NO: 1646810 - RNA, 19 nt, Homo sapiens
  misc_RNA (1)...(19): siRNA sense strand
caaggcaacagugaaauaa

SEQ ID NO: 1646811 - RNA, 19 nt, Homo sapiens
  misc_RNA (1)...(19): siRNA sense strand
uuacuaagccgucuucuca

SEQ ID NO: 1646812 - RNA, 19 nt, Homo sapiens
  misc_RNA (1)...(19): siRNA sense strand
guagaaaccaccaaaccaa

SEQ ID NO: 1646813 - RNA, 19 nt, Homo sapiens
  misc_RNA (1)...(19): siRNA sense strand
gccuucaacucaaaccaua

SEQ ID NO: 1646814 - RNA, 19 nt, Homo sapiens
  misc_RNA (1)...(19): siRNA sense strand
caagaaacucagcaauauu

SEQ ID NO: 1646815 - RNA, 19 nt, Homo sapiens
  misc_RNA (1)...(19): siRNA sense strand
ucaaggcaacagugaaaua

SEQ ID NO: 1646816 - RNA, 19 nt, Homo sapiens
  misc_RNA (1)...(19): siRNA sense strand
acaaaucgcauacuucaug

SEQ ID NO: 1646817 - RNA, 19 nt, Homo sapiens
  misc_RNA (1)...(19): siRNA sense strand
cccacuagcuauucuuauu

SEQ ID NO: 1646818 - RNA, 19 nt, Homo sapiens
  misc_RNA (1)...(19): siRNA sense strand
acacaaggcauauuggauu

SEQ ID NO: 1646819 - RNA, 19 nt, Homo sapiens
  misc_RNA (1)...(19): siRNA sense strand
ugaauugacuaaucuggau

SEQ ID NO: 1646820 - RNA, 19 nt, Homo sapiens
  misc_RNA (1)...(19): siRNA sense strand
ccagaaacggauagacaua

SEQ ID NO: 1646821 - RNA, 19 nt, Homo sapiens
  misc_RNA (1)...(19): siRNA sense strand
aauguuagcccuagagaaa

SEQ ID NO: 1646822 - RNA, 19 nt, Homo sapiens
  misc_RNA (1)...(19): siRNA sense strand
gaagaugggcagagaagca

SEQ ID NO: 1646823 - RNA, 19 nt, Homo sapiens
  misc_RNA (1)...(19): siRNA sense strand
gcuuuacucaucagucuua

SEQ ID NO: 1646824 - RNA, 19 nt, Homo sapiens
  misc_RNA (1)...(19): siRNA sense strand
gcagauaauggaaggaaug

SEQ ID NO: 1646825 - RNA, 19 nt, Homo sapiens
  misc_RNA (1)...(19): siRNA sense strand
uaagccgucuucucaguga

SEQ ID NO: 1646826 - RNA, 19 nt, Homo sapiens
  misc_RNA (1)...(19): siRNA sense strand
ucuaggagcuccagacuac

SEQ ID NO: 1646827 - RNA, 19 nt, Homo sapiens
  misc_RNA (1)...(19): siRNA sense strand
ugaaucaggucagacagaa

SEQ ID NO: 1646828 - RNA, 19 nt, Homo sapiens
  misc_RNA (1)...(19): siRNA sense strand
gauauuaugcgagucugua

SEQ ID NO: 1646829 - RNA, 19 nt, Homo sapiens
  misc_RNA (1)...(19): siRNA sense strand
caugagcagugucacagaa

SEQ ID NO: 1646830 - RNA, 19 nt, Homo sapiens
  misc_RNA (1)...(19): siRNA sense strand
cagcgcauguucuuacaga

SEQ ID NO: 1646831 - RNA, 19 nt, Homo sapiens
  misc_RNA (1)...(19): siRNA sense strand
gagcuaagucauaugaaau

SEQ ID NO: 1646832 - RNA, 19 nt, Homo sapiens
  misc_RNA (1)...(19): siRNA sense strand
uaguacagauucuccuaaa

SEQ ID NO: 1646833 - RNA, 19 nt, Homo sapiens
  misc_RNA (1)...(19): siRNA sense strand
ugcacaaucucacuuuauu

SEQ ID NO: 1646834 - RNA, 19 nt, Homo sapiens
  misc_RNA (1)...(19): siRNA sense strand
gugaaggugucaguaaaga

SEQ ID NO: 1646835 - RNA, 19 nt, Homo sapiens
  misc_RNA (1)...(19): siRNA sense strand
acaagaaucucaguacaag

SEQ ID NO: 1646836 - RNA, 19 nt, Homo sapiens
  misc_RNA (1)...(19): siRNA sense strand
aggacaugcugaaauagua

SEQ ID NO: 1646837 - RNA, 19 nt, Homo sapiens
  misc_RNA (1)...(19): siRNA sense strand
ucagucaaccaguuagaua

SEQ ID NO: 1646838 - RNA, 19 nt, Homo sapiens
  misc_RNA (1)...(19): siRNA sense strand
ucggguagauaaaguggua

SEQ ID NO: 1646839 - RNA, 19 nt, Homo sapiens
  misc_RNA (1)...(19): siRNA sense strand
gaaaacgaguuguacuaau

SEQ ID NO: 1646840 - RNA, 19 nt, Homo sapiens
  misc_RNA (1)...(19): siRNA sense strand
gggagauacugauacuugu

SEQ ID NO: 1646841 - RNA, 19 nt, Homo sapiens
  misc_RNA (1)...(19): siRNA sense strand
acucaucagucuuaaguau

SEQ ID NO: 1646842 - RNA, 19 nt, Homo sapiens
  misc_RNA (1)...(19): siRNA sense strand
ggaauacagagcuaaguca

SEQ ID NO: 1646843 - RNA, 19 nt, Homo sapiens
  misc_RNA (1)...(19): siRNA sense strand
aagaagagaugugagacuu

SEQ ID NO: 1646844 - RNA, 19 nt, Homo sapiens
  misc_RNA (1)...(19): siRNA sense strand
gaaauacuugcugaauuga

SEQ ID NO: 1646845 - RNA, 19 nt, Homo sapiens
  misc_RNA (1)...(19): siRNA sense strand
guucgaauauacagaaugg

SEQ ID NO: 1646846 - RNA, 19 nt, Homo sapiens
  misc_RNA (1)...(19): siRNA sense strand
gaagcuaaauggacaguua

SEQ ID NO: 1646847 - RNA, 19 nt, Homo sapiens
  misc_RNA (1)...(19): siRNA sense strand
caaggaagaucuccauuaa

SEQ ID NO: 1646848 - RNA, 19 nt, Homo sapiens
  misc_RNA (1)...(19): siRNA sense strand
ggaagaagcugcaaaauug

SEQ ID NO: 1646849 - RNA, 19 nt, Homo sapiens
  misc_RNA (1)...(19): siRNA sense strand
ggacagauauuuacaaagg

SEQ ID NO: 1646850 - RNA, 19 nt, Homo sapiens
  misc_RNA (1)...(19): siRNA sense strand
ccaaauaccuaaacaggaa

SEQ ID NO: 1646851 - RNA, 19 nt, Homo sapiens
  misc_RNA (1)...(19): siRNA sense strand
cauauuggauuacguagua

SEQ ID NO: 1646852 - RNA, 19 nt, Homo sapiens
  misc_RNA (1)...(19): siRNA sense strand
gaaggaagcaauuaacaaa

SEQ ID NO: 1646853 - RNA, 19 nt, Homo sapiens
  misc_RNA (1)...(19): siRNA sense strand
gggcagagaagcaucauua

SEQ ID NO: 1646854 - RNA, 19 nt, Homo sapiens
  misc_RNA (1)...(19): siRNA sense strand
cagagaagcaucauuauuu

SEQ ID NO: 1646855 - RNA, 19 nt, Homo sapiens
  misc_RNA (1)...(19): siRNA sense strand
ucaagaaacucagcaauau

SEQ ID NO: 1646856 - RNA, 19 nt, Homo sapiens
  misc_RNA (1)...(19): siRNA sense strand
agaaauacuugcugaauug

SEQ ID NO: 1646857 - RNA, 19 nt, Homo sapiens
  misc_RNA (1)...(19): siRNA sense strand
caagcaagguuuccuaaau

SEQ ID NO: 1646858 - RNA, 19 nt, Homo sapiens
  misc_RNA (1)...(19): siRNA sense strand
caacucaaaccauaucaua

SEQ ID NO: 1646859 - RNA, 19 nt, Homo sapiens
  misc_RNA (1)...(19): siRNA sense strand
caucguaccuguuaccaaa

SEQ ID NO: 1646860 - RNA, 19 nt, Homo sapiens
  misc_RNA (1)...(19): siRNA sense strand
ugaaauaacacaaggcaua

SEQ ID NO: 1646861 - RNA, 19 nt, Homo sapiens
  misc_RNA (1)...(19): siRNA sense strand
cauaaacccuugcaacaug

SEQ ID NO: 1646862 - RNA, 19 nt, Homo sapiens
  misc_RNA (1)...(19): siRNA sense strand
ggacaaaucgcauacuuca

SEQ ID NO: 1646863 - RNA, 19 nt, Homo sapiens
  misc_RNA (1)...(19): siRNA sense strand
gcaccucacuggacaaauc

SEQ ID NO: 1646864 - RNA, 19 nt, Homo sapiens
  misc_RNA (1)...(19): siRNA sense strand
cagaaauacuugcugaauu

SEQ ID NO: 1646865 - RNA, 19 nt, Homo sapiens
  misc_RNA (1)...(19): siRNA sense strand
gaaaccaccaaaccaauuu

SEQ ID NO: 1646866 - RNA, 19 nt, Homo sapiens
  misc_RNA (1)...(19): siRNA sense strand
gaaggugucaguaaagaaa

SEQ ID NO: 1646867 - RNA, 19 nt, Homo sapiens
  misc_RNA (1)...(19): siRNA sense strand
gcaugaaguucccauugaa

SEQ ID NO: 1646868 - RNA, 19 nt, Homo sapiens
  misc_RNA (1)...(19): siRNA sense strand
gacaguggguagaugauuu

SEQ ID NO: 1646869 - RNA, 19 nt, Homo sapiens
  misc_RNA (1)...(19): siRNA sense strand
caucaguugucaaagauaa

SEQ ID NO: 1646870 - RNA, 19 nt, Homo sapiens
  misc_RNA (1)...(19): siRNA sense strand
gaugaagccagauauaauu

SEQ ID NO: 1646871 - RNA, 19 nt, Homo sapiens
  misc_RNA (1)...(19): siRNA sense strand
aggaagaucuccauuaaau

SEQ ID NO: 1646872 - RNA, 19 nt, Homo sapiens
  misc_RNA (1)...(19): siRNA sense strand
agaaacggauagacauaua

SEQ ID NO: 1646873 - RNA, 19 nt, Homo sapiens
  misc_RNA (1)...(19): siRNA sense strand
cacaaggcauauuggauua

SEQ ID NO: 1646874 - RNA, 19 nt, Homo sapiens
  misc_RNA (1)...(19): siRNA sense strand
gagagaagaugggcagaga

SEQ ID NO: 1646875 - RNA, 19 nt, Homo sapiens
  misc_RNA (1)...(19): siRNA sense strand
gcagagaagcaucauuauu

SEQ ID NO: 1646876 - RNA, 19 nt, Homo sapiens
  misc_RNA (1)...(19): siRNA sense strand
gaaugcgucucucucaaga

SEQ ID NO: 1646877 - RNA, 19 nt, Homo sapiens
  misc_RNA (1)...(19): siRNA sense strand
ggaagaucuccauuaaaua

SEQ ID NO: 1646878 - RNA, 19 nt, Homo sapiens
  misc_RNA (1)...(19): siRNA sense strand
gcacuagaaauaaagagua

SEQ ID NO: 1646879 - RNA, 19 nt, Homo sapiens
  misc_RNA (1)...(19): siRNA sense strand
gaacgacaguggguagaug

SEQ ID NO: 1646880 - RNA, 19 nt, Homo sapiens
  misc_RNA (1)...(19): siRNA sense strand
gcaauuaacaaaccauaug

SEQ ID NO: 1646881 - RNA, 19 nt, Homo sapiens
  misc_RNA (1)...(19): siRNA sense strand
ugucauaaauccugcauau

SEQ ID NO: 1646882 - RNA, 19 nt, Homo sapiens
  misc_RNA (1)...(19): siRNA sense strand
caggacagauauuuacaaa

SEQ ID NO: 1646883 - RNA, 19 nt, Homo sapiens
  misc_RNA (1)...(19): siRNA sense strand
gaaacggauagacauauaa

SEQ ID NO: 1646884 - RNA, 19 nt, Homo sapiens
  misc_RNA (1)...(19): siRNA sense strand
aggaggacaugcugaaaua

SEQ ID NO: 1646885 - RNA, 19 nt, Homo sapiens
  misc_RNA (1)...(19): siRNA sense strand
acagaaaacucacuacaua

SEQ ID NO: 1646886 - RNA, 19 nt, Homo sapiens
  misc_RNA (1)...(19): siRNA sense strand
gaauugaagcauggaaaua

SEQ ID NO: 1646887 - RNA, 19 nt, Homo sapiens
  misc_RNA (1)...(19): siRNA sense strand
gaucuucaguauacaaauc

SEQ ID NO: 1646888 - RNA, 19 nt, Homo sapiens
  misc_RNA (1)...(19): siRNA sense strand
augcuaagcugauaacauu

SEQ ID NO: 1646889 - RNA, 19 nt, Homo sapiens
  misc_RNA (1)...(19): siRNA sense strand
ggucauaucguucuguuga

SEQ ID NO: 1646890 - RNA, 19 nt, Homo sapiens
  misc_RNA (1)...(19): siRNA sense strand
gaaauaacacaaggcauau

SEQ ID NO: 1646891 - RNA, 19 nt, Homo sapiens
  misc_RNA (1)...(19): siRNA sense strand
cauggaaacuaaggcuuua

SEQ ID NO: 1646892 - RNA, 19 nt, Homo sapiens
  misc_RNA (1)...(19): siRNA sense strand
caaaucgcauacuucauga

SEQ ID NO: 1646893 - RNA, 19 nt, Homo sapiens
  misc_RNA (1)...(19): siRNA sense strand
auacagagcuaagucauau

SEQ ID NO: 1646894 - RNA, 19 nt, Homo sapiens
  misc_RNA (1)...(19): siRNA sense strand
auacaaaucggguagauaa

SEQ ID NO: 1646895 - RNA, 19 nt, Homo sapiens
  misc_RNA (1)...(19): siRNA sense strand
gaaacuaaggcuuuacuca

SEQ ID NO: 1646896 - RNA, 19 nt, Homo sapiens
  misc_RNA (1)...(19): siRNA sense strand
guucgugacuggccagaaa

SEQ ID NO: 1646897 - RNA, 19 nt, Homo sapiens
  misc_RNA (1)...(19): siRNA sense strand
caagugaaggugucaguaa

SEQ ID NO: 1646898 - RNA, 19 nt, Homo sapiens
  misc_RNA (1)...(19): siRNA sense strand
caaaucggguagauaaagu

SEQ ID NO: 1646899 - RNA, 19 nt, Homo sapiens
  misc_RNA (1)...(19): siRNA sense strand
gagauacugauacuuguuu

SEQ ID NO: 1646900 - RNA, 19 nt, Homo sapiens
  misc_RNA (1)...(19): siRNA sense strand
cagaauggaugggucauau

SEQ ID NO: 1646901 - RNA, 19 nt, Homo sapiens
  misc_RNA (1)...(19): siRNA sense strand
acaaggaagaucuccauua

SEQ ID NO: 1646902 - RNA, 19 nt, Homo sapiens
  misc_RNA (1)...(19): siRNA sense strand
ucacuuuauuccagcuuua

SEQ ID NO: 1646903 - RNA, 19 nt, Homo sapiens
  misc_RNA (1)...(19): siRNA sense strand
uuacagaauugcugggaaa

SEQ ID NO: 1646904 - RNA, 19 nt, Homo sapiens
  misc_RNA (1)...(19): siRNA sense strand
aaaggaaagugcaauccaa

SEQ ID NO: 1646905 - RNA, 19 nt, Homo sapiens
  misc_RNA (1)...(19): siRNA sense strand
aagcaagguuuccuaaaug

SEQ ID NO: 1646906 - RNA, 19 nt, Homo sapiens
  misc_RNA (1)...(19): siRNA sense strand
ugaggccacucgcauauug

SEQ ID NO: 1646907 - RNA, 19 nt, Homo sapiens
  misc_RNA (1)...(19): siRNA sense strand
caugcacaaucucacuuua

SEQ ID NO: 1646908 - RNA, 19 nt, Homo sapiens
  misc_RNA (1)...(19): siRNA sense strand
agagcuaagucauaugaaa

SEQ ID NO: 1646909 - RNA, 19 nt, Homo sapiens
  misc_RNA (1)...(19): siRNA sense strand
gaauacaagaaucucagua

SEQ ID NO: 1646910 - RNA, 19 nt, Homo sapiens
  misc_RNA (1)...(19): siRNA sense strand
caaggcaacagugaaauaa

SEQ ID NO: 1646911 - RNA, 19 nt, Homo sapiens
  misc_RNA (1)...(19): siRNA sense strand
uuacuaagccgucuucuca

SEQ ID NO: 1646912 - RNA, 19 nt, Homo sapiens
  misc_RNA (1)...(19): siRNA sense strand
guagaaaccaccaaaccaa

SEQ ID NO: 1646913 - RNA, 19 nt, Homo sapiens
  misc_RNA (1)...(19): siRNA sense strand
gccuucaacucaaaccaua

SEQ ID NO: 1646914 - RNA, 19 nt, Homo sapiens
  misc_RNA (1)...(19): siRNA sense strand
caagaaacucagcaauauu

SEQ ID NO: 1646915 - RNA, 19 nt, Homo sapiens
  misc_RNA (1)...(19): siRNA sense strand
ucaaggcaacagugaaaua

SEQ ID NO: 1646916 - RNA, 19 nt, Homo sapiens
  misc_RNA (1)...(19): siRNA sense strand
acaaaucgcauacuucaug

SEQ ID NO: 1646917 - RNA, 19 nt, Homo sapiens
  misc_RNA (1)...(19): siRNA sense strand
cccacuagcuauucuuauu

SEQ ID NO: 1646918 - RNA, 19 nt, Homo sapiens
  misc_RNA (1)...(19): siRNA sense strand
acacaaggcauauuggauu

SEQ ID NO: 1646919 - RNA, 19 nt, Homo sapiens
  misc_RNA (1)...(19): siRNA sense strand
ugaauugacuaaucuggau

SEQ ID NO: 1646920 - RNA, 19 nt, Homo sapiens
  misc_RNA (1)...(19): siRNA sense strand
ccagaaacggauagacaua

SEQ ID NO: 1646921 - RNA, 19 nt, Homo sapiens
  misc_RNA (1)...(19): siRNA sense strand
aauguuagcccuagagaaa

SEQ ID NO: 1646922 - RNA, 19 nt, Homo sapiens
  misc_RNA (1)...(19): siRNA sense strand
gaagaugggcagagaagca

SEQ ID NO: 1646923 - RNA, 19 nt, Homo sapiens
  misc_RNA (1)...(19): siRNA sense strand
gcuuuacucaucagucuua

SEQ ID NO: 1646924 - RNA, 19 nt, Homo sapiens
  misc_RNA (1)...(19): siRNA sense strand
gcagauaauggaaggaaug

SEQ ID NO: 1646925 - RNA, 19 nt, Homo sapiens
  misc_RNA (1)...(19): siRNA sense strand
uaagccgucuucucaguga

SEQ ID NO: 1646926 - RNA, 19 nt, Homo sapiens
  misc_RNA (1)...(19): siRNA sense strand
ucuaggagcuccagacuac

SEQ ID NO: 1646927 - RNA, 19 nt, Homo sapiens
  misc_RNA (1)...(19): siRNA sense strand
ugaaucaggucagacagaa

SEQ ID NO: 1646928 - RNA, 19 nt, Homo sapiens
  misc_RNA (1)...(19): siRNA sense strand
gauauuaugcgagucugua

SEQ ID NO: 1646929 - RNA, 19 nt, Homo sapiens
  misc_RNA (1)...(19): siRNA sense strand
caugagcagugucacagaa

SEQ ID NO: 1646930 - RNA, 19 nt, Homo sapiens
  misc_RNA (1)...(19): siRNA sense strand
cagcgcauguucuuacaga

SEQ ID NO: 1646931 - RNA, 19 nt, Homo sapiens
  misc_RNA (1)...(19): siRNA sense strand
gagcuaagucauaugaaau

SEQ ID NO: 1646932 - RNA, 19 nt, Homo sapiens
  misc_RNA (1)...(19): siRNA sense strand
uaguacagauucuccuaaa

SEQ ID NO: 1646933 - RNA, 19 nt, Homo sapiens
  misc_RNA (1)...(19): siRNA sense strand
ugcacaaucucacuuuauu

SEQ ID NO: 1646934 - RNA, 19 nt, Homo sapiens
  misc_RNA (1)...(19): siRNA sense strand
gugaaggugucaguaaaga

SEQ ID NO: 1646935 - RNA, 19 nt, Homo sapiens
  misc_RNA (1)...(19): siRNA sense strand
acaagaaucucaguacaag

SEQ ID NO: 1646936 - RNA, 19 nt, Homo sapiens
  misc_RNA (1)...(19): siRNA sense strand
aggacaugcugaaauagua

SEQ ID NO: 1646937 - RNA, 19 nt, Homo sapiens
  misc_RNA (1)...(19): siRNA sense strand
ucagucaaccaguuagaua

SEQ ID NO: 1646938 - RNA, 19 nt, Homo sapiens
  misc_RNA (1)...(19): siRNA sense strand
ucggguagauaaaguggua

SEQ ID NO: 1646939 - RNA, 19 nt, Homo sapiens
  misc_RNA (1)...(19): siRNA sense strand
gaaaacgaguuguacuaau

SEQ ID NO: 1646940 - RNA, 19 nt, Homo sapiens
  misc_RNA (1)...(19): siRNA sense strand
gggagauacugauacuugu

SEQ ID NO: 1646941 - RNA, 19 nt, Homo sapiens
  misc_RNA (1)...(19): siRNA sense strand
acucaucagucuuaaguau

SEQ ID NO: 1646942 - RNA, 19 nt, Homo sapiens
  misc_RNA (1)...(19): siRNA sense strand
ggaauacagagcuaaguca

SEQ ID NO: 1646943 - RNA, 19 nt, Homo sapiens
  misc_RNA (1)...(19): siRNA sense strand
aagaagagaugugagacuu

SEQ ID NO: 1646944 - RNA, 19 nt, Homo sapiens
  misc_RNA (1)...(19): siRNA sense strand
gaaauacuugcugaauuga

SEQ ID NO: 1646945 - RNA, 19 nt, Homo sapiens
  misc_RNA (1)...(19): siRNA sense strand
guucgaauauacagaaugg

SEQ ID NO: 1646946 - RNA, 19 nt, Homo sapiens
  misc_RNA (1)...(19): siRNA sense strand
gaagcuaaauggacaguua

SEQ ID NO: 1646947 - RNA, 19 nt, Homo sapiens
  misc_RNA (1)...(19): siRNA sense strand
caaggaagaucuccauuaa

SEQ ID NO: 1646948 - RNA, 19 nt, Homo sapiens
  misc_RNA (1)...(19): siRNA sense strand
ggaagaagcugcaaaauug

SEQ ID NO: 1646949 - RNA, 19 nt, Homo sapiens
  misc_RNA (1)...(19): siRNA sense strand
ggacagauauuuacaaagg

SEQ ID NO: 1646950 - RNA, 19 nt, Homo sapiens
  misc_RNA (1)...(19): siRNA sense strand
ccaaauaccuaaacaggaa

SEQ ID NO: 1646951 - RNA, 19 nt, Homo sapiens
  misc_RNA (1)...(19): siRNA sense strand
cauauuggauuacguagua

SEQ ID NO: 1646952 - RNA, 19 nt, Homo sapiens
  misc_RNA (1)...(19): siRNA sense strand
gaaggaagcaauuaacaaa

SEQ ID NO: 1646953 - RNA, 19 nt, Homo sapiens
  misc_RNA (1)...(19): siRNA sense strand
gggcagagaagcaucauua

SEQ ID NO: 1646954 - RNA, 19 nt, Homo sapiens
  misc_RNA (1)...(19): siRNA sense strand
cagagaagcaucauuauuu

SEQ ID NO: 1646955 - RNA, 19 nt, Homo sapiens
  misc_RNA (1)...(19): siRNA sense strand
ucaagaaacucagcaauau

SEQ ID NO: 1646956 - RNA, 19 nt, Homo sapiens
  misc_RNA (1)...(19): siRNA sense strand
agaaauacuugcugaauug

SEQ ID NO: 1646957 - RNA, 19 nt, Homo sapiens
  misc_RNA (1)...(19): siRNA sense strand
caagcaagguuuccuaaau

SEQ ID NO: 1646958 - RNA, 19 nt, Homo sapiens
  misc_RNA (1)...(19): siRNA sense strand
caacucaaaccauaucaua

SEQ ID NO: 1646959 - RNA, 19 nt, Homo sapiens
  misc_RNA (1)...(19): siRNA sense strand
caucguaccuguuaccaaa

SEQ ID NO: 1646960 - RNA, 19 nt, Homo sapiens
  misc_RNA (1)...(19): siRNA sense strand
ugaaauaacacaaggcaua

SEQ ID NO: 1646961 - RNA, 19 nt, Homo sapiens
  misc_RNA (1)...(19): siRNA sense strand
cauaaacccuugcaacaug

SEQ ID NO: 1646962 - RNA, 19 nt, Homo sapiens
  misc_RNA (1)...(19): siRNA sense strand
ggacaaaucgcauacuuca

SEQ ID NO: 1646963 - RNA, 19 nt, Homo sapiens
  misc_RNA (1)...(19): siRNA sense strand
gcaccucacuggacaaauc

SEQ ID NO: 1646964 - RNA, 19 nt, Homo sapiens
  misc_RNA (1)...(19): siRNA sense strand
cagaaauacuugcugaauu

SEQ ID NO: 1646965 - RNA, 19 nt, Homo sapiens
  misc_RNA (1)...(19): siRNA sense strand
gaaaccaccaaaccaauuu

SEQ ID NO: 1646966 - RNA, 19 nt, Homo sapiens
  misc_RNA (1)...(19): siRNA sense strand
gaaggugucaguaaagaaa

SEQ ID NO: 1646967 - RNA, 19 nt, Homo sapiens
  misc_RNA (1)...(19): siRNA sense strand
gcaugaaguucccauugaa

SEQ ID NO: 1646968 - RNA, 19 nt, Homo sapiens
  misc_RNA (1)...(19): siRNA sense strand
gacaguggguagaugauuu

SEQ ID NO: 1646969 - RNA, 19 nt, Homo sapiens
  misc_RNA (1)...(19): siRNA sense strand
caucaguugucaaagauaa

SEQ ID NO: 1646970 - RNA, 19 nt, Homo sapiens
  misc_RNA (1)...(19): siRNA sense strand
gaugaagccagauauaauu

SEQ ID NO: 1646971 - RNA, 19 nt, Homo sapiens
  misc_RNA (1)...(19): siRNA sense strand
aggaagaucuccauuaaau

SEQ ID NO: 1646972 - RNA, 19 nt, Homo sapiens
  misc_RNA (1)...(19): siRNA sense strand
agaaacggauagacauaua

SEQ ID NO: 1646973 - RNA, 19 nt, Homo sapiens
  misc_RNA (1)...(19): siRNA sense strand
cacaaggcauauuggauua

SEQ ID NO: 1646974 - RNA, 19 nt, Homo sapiens
  misc_RNA (1)...(19): siRNA sense strand
gagagaagaugggcagaga

SEQ ID NO: 1646975 - RNA, 19 nt, Homo sapiens
  misc_RNA (1)...(19): siRNA sense strand
gcagagaagcaucauuauu

SEQ ID NO: 1646976 - RNA, 19 nt, Homo sapiens
  misc_RNA (1)...(19): siRNA sense strand
gaaugcgucucucucaaga

SEQ ID NO: 1646977 - RNA, 19 nt, Homo sapiens
  misc_RNA (1)...(19): siRNA sense strand
ggaagaucuccauuaaaua

SEQ ID NO: 1646978 - RNA, 19 nt, Homo sapiens
  misc_RNA (1)...(19): siRNA sense strand
gcacuagaaauaaagagua

SEQ ID NO: 1646979 - RNA, 19 nt, Homo sapiens
  misc_RNA (1)...(19): siRNA sense strand
gaacgacaguggguagaug

SEQ ID NO: 1646980 - RNA, 19 nt, Homo sapiens
  misc_RNA (1)...(19): siRNA sense strand
gcaauuaacaaaccauaug

SEQ ID NO: 1646981 - RNA, 19 nt, Homo sapiens
  misc_RNA (1)...(19): siRNA sense strand
ugucauaaauccugcauau

SEQ ID NO: 1646982 - RNA, 19 nt, Homo sapiens
  misc_RNA (1)...(19): siRNA sense strand
caggacagauauuuacaaa

SEQ ID NO: 1646983 - RNA, 19 nt, Homo sapiens
  misc_RNA (1)...(19): siRNA sense strand
gaaacggauagacauauaa

SEQ ID NO: 1646984 - RNA, 19 nt, Homo sapiens
  misc_RNA (1)...(19): siRNA sense strand
aggaggacaugcugaaaua

SEQ ID NO: 1646985 - RNA, 19 nt, Homo sapiens
  misc_RNA (1)...(19): siRNA sense strand
acagaaaacucacuacaua

SEQ ID NO: 1646986 - RNA, 19 nt, Homo sapiens
  misc_RNA (1)...(19): siRNA sense strand
gaauugaagcauggaaaua

SEQ ID NO: 1646987 - RNA, 19 nt, Homo sapiens
  misc_RNA (1)...(19): siRNA sense strand
gaucuucaguauacaaauc

SEQ ID NO: 1646988 - RNA, 19 nt, Homo sapiens
  misc_RNA (1)...(19): siRNA sense strand
augcuaagcugauaacauu

SEQ ID NO: 1646989 - RNA, 19 nt, Homo sapiens
  misc_RNA (1)...(19): siRNA sense strand
ggucauaucguucuguuga

SEQ ID NO: 1646990 - RNA, 19 nt, Homo sapiens
  misc_RNA (1)...(19): siRNA sense strand
gaaauaacacaaggcauau

SEQ ID NO: 1646991 - RNA, 19 nt, Homo sapiens
  misc_RNA (1)...(19): siRNA sense strand
cauggaaacuaaggcuuua

SEQ ID NO: 1646992 - RNA, 19 nt, Homo sapiens
  misc_RNA (1)...(19): siRNA sense strand
caaaucgcauacuucauga

SEQ ID NO: 1646993 - RNA, 19 nt, Homo sapiens
  misc_RNA (1)...(19): siRNA sense strand
auacagagcuaagucauau

SEQ ID NO: 1646994 - RNA, 19 nt, Homo sapiens
  misc_RNA (1)...(19): siRNA sense strand
auacaaaucggguagauaa

SEQ ID NO: 1646995 - RNA, 19 nt, Homo sapiens
  misc_RNA (1)...(19): siRNA sense strand
gaaacuaaggcuuuacuca

SEQ ID NO: 1646996 - RNA, 19 nt, Homo sapiens
  misc_RNA (1)...(19): siRNA sense strand
guucgugacuggccagaaa

SEQ ID NO: 1646997 - RNA, 19 nt, Homo sapiens
  misc_RNA (1)...(19): siRNA sense strand
caagugaaggugucaguaa

SEQ ID NO: 1646998 - RNA, 19 nt, Homo sapiens
  misc_RNA (1)...(19): siRNA sense strand
caaaucggguagauaaagu

SEQ ID NO: 1646999 - RNA, 19 nt, Homo sapiens
  misc_RNA (1)...(19): siRNA sense strand
gagauacugauacuuguuu

SEQ ID NO: 1647000 - RNA, 19 nt, Homo sapiens
  misc_RNA (1)...(19): siRNA sense strand
cagaauggaugggucauau

SEQ ID NO: 1647001 - RNA, 19 nt, Homo sapiens
  misc_RNA (1)...(19): siRNA sense strand
acaaggaagaucuccauua

SEQ ID NO: 1647002 - RNA, 19 nt, Homo sapiens
  misc_RNA (1)...(19): siRNA sense strand
ucacuuuauuccagcuuua

SEQ ID NO: 1647003 - RNA, 19 nt, Homo sapiens
  misc_RNA (1)...(19): siRNA sense strand
uuacagaauugcugggaaa

SEQ ID NO: 1647004 - RNA, 19 nt, Homo sapiens
  misc_RNA (1)...(19): siRNA sense strand
aaaggaaagugcaauccaa

SEQ ID NO: 1647005 - RNA, 19 nt, Homo sapiens
  misc_RNA (1)...(19): siRNA sense strand
aagcaagguuuccuaaaug

SEQ ID NO: 1647006 - RNA, 19 nt, Homo sapiens
  misc_RNA (1)...(19): siRNA sense strand
ugaggccacucgcauauug

SEQ ID NO: 1647007 - RNA, 19 nt, Homo sapiens
  misc_RNA (1)...(19): siRNA sense strand
caugcacaaucucacuuua

SEQ ID NO: 1647008 - RNA, 19 nt, Homo sapiens
  misc_RNA (1)...(19): siRNA sense strand
agagcuaagucauaugaaa

SEQ ID NO: 1647009 - RNA, 19 nt, Homo sapiens
  misc_RNA (1)...(19): siRNA sense strand
gaauacaagaaucucagua

SEQ ID NO: 1647010 - RNA, 19 nt, Homo sapiens
  misc_RNA (1)...(19): siRNA sense strand
caaggcaacagugaaauaa

SEQ ID NO: 1647011 - RNA, 19 nt, Homo sapiens
  misc_RNA (1)...(19): siRNA sense strand
uuacuaagccgucuucuca

SEQ ID NO: 1647012 - RNA, 19 nt, Homo sapiens
  misc_RNA (1)...(19): siRNA sense strand
guagaaaccaccaaaccaa

SEQ ID NO: 1647013 - RNA, 19 nt, Homo sapiens
  misc_RNA (1)...(19): siRNA sense strand
gccuucaacucaaaccaua

SEQ ID NO: 1647014 - RNA, 19 nt, Homo sapiens
  misc_RNA (1)...(19): siRNA sense strand
caagaaacucagcaauauu

SEQ ID NO: 1647015 - RNA, 19 nt, Homo sapiens
  misc_RNA (1)...(19): siRNA sense strand
ucaaggcaacagugaaaua

SEQ ID NO: 1647016 - RNA, 19 nt, Homo sapiens
  misc_RNA (1)...(19): siRNA sense strand
acaaaucgcauacuucaug

SEQ ID NO: 1647017 - RNA, 19 nt, Homo sapiens
  misc_RNA (1)...(19): siRNA sense strand
cccacuagcuauucuuauu

SEQ ID NO: 1647018 - RNA, 19 nt, Homo sapiens
  misc_RNA (1)...(19): siRNA sense strand
acacaaggcauauuggauu

SEQ ID NO: 1647019 - RNA, 19 nt, Homo sapiens
  misc_RNA (1)...(19): siRNA sense strand
ugaauugacuaaucuggau

SEQ ID NO: 1647020 - RNA, 19 nt, Homo sapiens
  misc_RNA (1)...(19): siRNA sense strand
ccagaaacggauagacaua

SEQ ID NO: 1647021 - RNA, 19 nt, Homo sapiens
  misc_RNA (1)...(19): siRNA sense strand
aauguuagcccuagagaaa

SEQ ID NO: 1647022 - RNA, 19 nt, Homo sapiens
  misc_RNA (1)...(19): siRNA sense strand
gaagaugggcagagaagca

SEQ ID NO: 1647023 - RNA, 19 nt, Homo sapiens
  misc_RNA (1)...(19): siRNA sense strand
gcuuuacucaucagucuua

SEQ ID NO: 1647024 - RNA, 19 nt, Homo sapiens
  misc_RNA (1)...(19): siRNA sense strand
gcagauaauggaaggaaug

SEQ ID NO: 1647025 - RNA, 19 nt, Homo sapiens
  misc_RNA (1)...(19): siRNA sense strand
uaagccgucuucucaguga

SEQ ID NO: 1647026 - RNA, 19 nt, Homo sapiens
  misc_RNA (1)...(19): siRNA sense strand
ucuaggagcuccagacuac

SEQ ID NO: 1647027 - RNA, 19 nt, Homo sapiens
  misc_RNA (1)...(19): siRNA sense strand
ugaaucaggucagacagaa

SEQ ID NO: 1647028 - RNA, 19 nt, Homo sapiens
  misc_RNA (1)...(19): siRNA sense strand
gauauuaugcgagucugua

SEQ ID NO: 1647029 - RNA, 19 nt, Homo sapiens
  misc_RNA (1)...(19): siRNA sense strand
caugagcagugucacagaa

SEQ ID NO: 1647030 - RNA, 19 nt, Homo sapiens
  misc_RNA (1)...(19): siRNA sense strand
cagcgcauguucuuacaga

SEQ ID NO: 1647031 - RNA, 19 nt, Homo sapiens
  misc_RNA (1)...(19): siRNA sense strand
gagcuaagucauaugaaau

SEQ ID NO: 1647032 - RNA, 19 nt, Homo sapiens
  misc_RNA (1)...(19): siRNA sense strand
uaguacagauucuccuaaa

SEQ ID NO: 1647033 - RNA, 19 nt, Homo sapiens
  misc_RNA (1)...(19): siRNA sense strand
ugcacaaucucacuuuauu

SEQ ID NO: 1647034 - RNA, 19 nt, Homo sapiens
  misc_RNA (1)...(19): siRNA sense strand
gugaaggugucaguaaaga

SEQ ID NO: 1647035 - RNA, 19 nt, Homo sapiens
  misc_RNA (1)...(19): siRNA sense strand
acaagaaucucaguacaag

SEQ ID NO: 1647036 - RNA, 19 nt, Homo sapiens
  misc_RNA (1)...(19): siRNA sense strand
aggacaugcugaaauagua

SEQ ID NO: 1647037 - RNA, 19 nt, Homo sapiens
  misc_RNA (1)...(19): siRNA sense strand
ucagucaaccaguuagaua

SEQ ID NO: 1647038 - RNA, 19 nt, Homo sapiens
  misc_RNA (1)...(19): siRNA sense strand
ucggguagauaaaguggua

SEQ ID NO: 1647039 - RNA, 19 nt, Homo sapiens
  misc_RNA (1)...(19): siRNA sense strand
gaaaacgaguuguacuaau

SEQ ID NO: 1647040 - RNA, 19 nt, Homo sapiens
  misc_RNA (1)...(19): siRNA sense strand
gggagauacugauacuugu

SEQ ID NO: 1647041 - RNA, 19 nt, Homo sapiens
  misc_RNA (1)...(19): siRNA sense strand
acucaucagucuuaaguau

SEQ ID NO: 1647042 - RNA, 19 nt, Homo sapiens
  misc_RNA (1)...(19): siRNA sense strand
ggaauacagagcuaaguca

SEQ ID NO: 1647043 - RNA, 19 nt, Homo sapiens
  misc_RNA (1)...(19): siRNA sense strand
aagaagagaugugagacuu

SEQ ID NO: 1647044 - RNA, 19 nt, Homo sapiens
  misc_RNA (1)...(19): siRNA sense strand
gaaauacuugcugaauuga

SEQ ID NO: 1647045 - RNA, 19 nt, Homo sapiens
  misc_RNA (1)...(19): siRNA sense strand
guucgaauauacagaaugg

SEQ ID NO: 1647046 - RNA, 19 nt, Homo sapiens
  misc_RNA (1)...(19): siRNA sense strand
gaagcuaaauggacaguua

SEQ ID NO: 1647047 - RNA, 19 nt, Homo sapiens
  misc_RNA (1)...(19): siRNA sense strand
caaggaagaucuccauuaa

SEQ ID NO: 1647048 - RNA, 19 nt, Homo sapiens
  misc_RNA (1)...(19): siRNA sense strand
ggaagaagcugcaaaauug

SEQ ID NO: 1647049 - RNA, 19 nt, Homo sapiens
  misc_RNA (1)...(19): siRNA sense strand
ggacagauauuuacaaagg

SEQ ID NO: 1647050 - RNA, 19 nt, Homo sapiens
  misc_RNA (1)...(19): siRNA sense strand
ccaaauaccuaaacaggaa

SEQ ID NO: 1647051 - RNA, 19 nt, Homo sapiens
  misc_RNA (1)...(19): siRNA sense strand
cauauuggauuacguagua

SEQ ID NO: 1647052 - RNA, 19 nt, Homo sapiens
  misc_RNA (1)...(19): siRNA sense strand
gaaggaagcaauuaacaaa

SEQ ID NO: 1647053 - RNA, 19 nt, Homo sapiens
  misc_RNA (1)...(19): siRNA sense strand
gggcagagaagcaucauua

SEQ ID NO: 1647054 - RNA, 19 nt, Homo sapiens
  misc_RNA (1)...(19): siRNA sense strand
cagagaagcaucauuauuu

SEQ ID NO: 1647055 - RNA, 19 nt, Homo sapiens
  misc_RNA (1)...(19): siRNA sense strand
ucaagaaacucagcaauau

SEQ ID NO: 1647056 - RNA, 19 nt, Homo sapiens
  misc_RNA (1)...(19): siRNA sense strand
agaaauacuugcugaauug

SEQ ID NO: 1647057 - RNA, 19 nt, Homo sapiens
  misc_RNA (1)...(19): siRNA sense strand
caagcaagguuuccuaaau

SEQ ID NO: 1647058 - RNA, 19 nt, Homo sapiens
  misc_RNA (1)...(19): siRNA sense strand
caacucaaaccauaucaua

SEQ ID NO: 1647059 - RNA, 19 nt, Homo sapiens
  misc_RNA (1)...(19): siRNA sense strand
caucguaccuguuaccaaa

SEQ ID NO: 1647060 - RNA, 19 nt, Homo sapiens
  misc_RNA (1)...(19): siRNA sense strand
ugaaauaacacaaggcaua

SEQ ID NO: 1647061 - RNA, 19 nt, Homo sapiens
  misc_RNA (1)...(19): siRNA sense strand
cauaaacccuugcaacaug

SEQ ID NO: 1647062 - RNA, 19 nt, Homo sapiens
  misc_RNA (1)...(19): siRNA sense strand
ggacaaaucgcauacuuca

SEQ ID NO: 1647063 - RNA, 19 nt, Homo sapiens
  misc_RNA (1)...(19): siRNA sense strand
gcaccucacuggacaaauc

SEQ ID NO: 1647064 - RNA, 19 nt, Homo sapiens
  misc_RNA (1)...(19): siRNA sense strand
cagaaauacuugcugaauu

SEQ ID NO: 1647065 - RNA, 19 nt, Homo sapiens
  misc_RNA (1)...(19): siRNA sense strand
gaaaccaccaaaccaauuu

SEQ ID NO: 1647066 - RNA, 19 nt, Homo sapiens
  misc_RNA (1)...(19): siRNA sense strand
gaaggugucaguaaagaaa

SEQ ID NO: 1647067 - RNA, 19 nt, Homo sapiens
  misc_RNA (1)...(19): siRNA sense strand
gcaugaaguucccauugaa

SEQ ID NO: 1647068 - RNA, 19 nt, Homo sapiens
  misc_RNA (1)...(19): siRNA sense strand
gacaguggguagaugauuu

SEQ ID NO: 1647069 - RNA, 19 nt, Homo sapiens
  misc_RNA (1)...(19): siRNA sense strand
caucaguugucaaagauaa

SEQ ID NO: 1647070 - RNA, 19 nt, Homo sapiens
  misc_RNA (1)...(19): siRNA sense strand
gaugaagccagauauaauu

SEQ ID NO: 1647071 - RNA, 19 nt, Homo sapiens
  misc_RNA (1)...(19): siRNA sense strand
aggaagaucuccauuaaau

SEQ ID NO: 1647072 - RNA, 19 nt, Homo sapiens
  misc_RNA (1)...(19): siRNA sense strand
agaaacggauagacauaua

SEQ ID NO: 1647073 - RNA, 19 nt, Homo sapiens
  misc_RNA (1)...(19): siRNA sense strand
cacaaggcauauuggauua

SEQ ID NO: 1647074 - RNA, 19 nt, Homo sapiens
  misc_RNA (1)...(19): siRNA sense strand
gagagaagaugggcagaga

SEQ ID NO: 1647075 - RNA, 19 nt, Homo sapiens
  misc_RNA (1)...(19): siRNA sense strand
gcagagaagcaucauuauu

SEQ ID NO: 1647076 - RNA, 19 nt, Homo sapiens
  misc_RNA (1)...(19): siRNA sense strand
gaaugcgucucucucaaga

SEQ ID NO: 1647077 - RNA, 19 nt, Homo sapiens
  misc_RNA (1)...(19): siRNA sense strand
ggaagaucuccauuaaaua

SEQ ID NO: 1647078 - RNA, 19 nt, Homo sapiens
  misc_RNA (1)...(19): siRNA sense strand
gcacuagaaauaaagagua

SEQ ID NO: 1647079 - RNA, 19 nt, Homo sapiens
  misc_RNA (1)...(19): siRNA sense strand
gaacgacaguggguagaug

SEQ ID NO: 1647080 - RNA, 19 nt, Homo sapiens
  misc_RNA (1)...(19): siRNA sense strand
gcaauuaacaaaccauaug

SEQ ID NO: 1647081 - RNA, 19 nt, Homo sapiens
  misc_RNA (1)...(19): siRNA sense strand
ugucauaaauccugcauau

SEQ ID NO: 1647082 - RNA, 19 nt, Homo sapiens
  misc_RNA (1)...(19): siRNA sense strand
caggacagauauuuacaaa

SEQ ID NO: 1647083 - RNA, 19 nt, Homo sapiens
  misc_RNA (1)...(19): siRNA sense strand
gaaacggauagacauauaa

SEQ ID NO: 1647084 - RNA, 19 nt, Homo sapiens
  misc_RNA (1)...(19): siRNA sense strand
aggaggacaugcugaaaua

SEQ ID NO: 1647085 - RNA, 19 nt, Homo sapiens
  misc_RNA (1)...(19): siRNA sense strand
acagaaaacucacuacaua

SEQ ID NO: 1647086 - RNA, 19 nt, Homo sapiens
  misc_RNA (1)...(19): siRNA sense strand
gaauugaagcauggaaaua

SEQ ID NO: 1647087 - RNA, 19 nt, Homo sapiens
  misc_RNA (1)...(19): siRNA sense strand
gaucuucaguauacaaauc

SEQ ID NO: 1647088 - RNA, 19 nt, Homo sapiens
  misc_RNA (1)...(19): siRNA sense strand
augcuaagcugauaacauu

SEQ ID NO: 1647089 - RNA, 19 nt, Homo sapiens
  misc_RNA (1)...(19): siRNA sense strand
ggucauaucguucuguuga

SEQ ID NO: 1647090 - RNA, 19 nt, Homo sapiens
  misc_RNA (1)...(19): siRNA sense strand
gaaauaacacaaggcauau

SEQ ID NO: 1647091 - RNA, 19 nt, Homo sapiens
  misc_RNA (1)...(19): siRNA sense strand
cauggaaacuaaggcuuua

SEQ ID NO: 1647092 - RNA, 19 nt, Homo sapiens
  misc_RNA (1)...(19): siRNA sense strand
caaaucgcauacuucauga

SEQ ID NO: 1647093 - RNA, 19 nt, Homo sapiens
  misc_RNA (1)...(19): siRNA sense strand
auacagagcuaagucauau

SEQ ID NO: 1647094 - RNA, 19 nt, Homo sapiens
  misc_RNA (1)...(19): siRNA sense strand
auacaaaucggguagauaa

SEQ ID NO: 1647095 - RNA, 19 nt, Homo sapiens
  misc_RNA (1)...(19): siRNA sense strand
gaaacuaaggcuuuacuca

SEQ ID NO: 1647096 - RNA, 19 nt, Homo sapiens
  misc_RNA (1)...(19): siRNA sense strand
guucgugacuggccagaaa

SEQ ID NO: 1647097 - RNA, 19 nt, Homo sapiens
  misc_RNA (1)...(19): siRNA sense strand
caagugaaggugucaguaa

SEQ ID NO: 1647098 - RNA, 19 nt, Homo sapiens
  misc_RNA (1)...(19): siRNA sense strand
caaaucggguagauaaagu

SEQ ID NO: 1647099 - RNA, 19 nt, Homo sapiens
  misc_RNA (1)...(19): siRNA sense strand
gagauacugauacuuguuu

SEQ ID NO: 1647100 - RNA, 19 nt, Homo sapiens
  misc_RNA (1)...(19): siRNA sense strand
cagaauggaugggucauau

SEQ ID NO: 1647101 - RNA, 19 nt, Homo sapiens
  misc_RNA (1)...(19): siRNA sense strand
acaaggaagaucuccauua

SEQ ID NO: 1647102 - RNA, 19 nt, Homo sapiens
  misc_RNA (1)...(19): siRNA sense strand
ucacuuuauuccagcuuua

SEQ ID NO: 1647103 - RNA, 19 nt, Homo sapiens
  misc_RNA (1)...(19): siRNA sense strand
uuacagaauugcugggaaa

SEQ ID NO: 1647104 - RNA, 19 nt, Homo sapiens
  misc_RNA (1)...(19): siRNA sense strand
aaaggaaagugcaauccaa

SEQ ID NO: 1647105 - RNA, 19 nt, Homo sapiens
  misc_RNA (1)...(19): siRNA sense strand
aagcaagguuuccuaaaug

SEQ ID NO: 1647106 - RNA, 19 nt, Homo sapiens
  misc_RNA (1)...(19): siRNA sense strand
ugaggccacucgcauauug

SEQ ID NO: 1647107 - RNA, 19 nt, Homo sapiens
  misc_RNA (1)...(19): siRNA sense strand
caugcacaaucucacuuua

SEQ ID NO: 1647108 - RNA, 19 nt, Homo sapiens
  misc_RNA (1)...(19): siRNA sense strand
agagcuaagucauaugaaa

SEQ ID NO: 1647109 - RNA, 19 nt, Homo sapiens
  misc_RNA (1)...(19): siRNA sense strand
gaauacaagaaucucagua

SEQ ID NO: 1647110 - RNA, 19 nt, Homo sapiens
  misc_RNA (1)...(19): siRNA sense strand
caaggcaacagugaaauaa

SEQ ID NO: 1647111 - RNA, 19 nt, Homo sapiens
  misc_RNA (1)...(19): siRNA sense strand
uuacuaagccgucuucuca

SEQ ID NO: 1647112 - RNA, 19 nt, Homo sapiens
  misc_RNA (1)...(19): siRNA sense strand
guagaaaccaccaaaccaa

SEQ ID NO: 1647113 - RNA, 19 nt, Homo sapiens
  misc_RNA (1)...(19): siRNA sense strand
gccuucaacucaaaccaua

SEQ ID NO: 1647114 - RNA, 19 nt, Homo sapiens
  misc_RNA (1)...(19): siRNA sense strand
caagaaacucagcaauauu

SEQ ID NO: 1647115 - RNA, 19 nt, Homo sapiens
  misc_RNA (1)...(19): siRNA sense strand
ucaaggcaacagugaaaua

SEQ ID NO: 1647116 - RNA, 19 nt, Homo sapiens
  misc_RNA (1)...(19): siRNA sense strand
acaaaucgcauacuucaug

SEQ ID NO: 1647117 - RNA, 19 nt, Homo sapiens
  misc_RNA (1)...(19): siRNA sense strand
cccacuagcuauucuuauu

SEQ ID NO: 1647118 - RNA, 19 nt, Homo sapiens
  misc_RNA (1)...(19): siRNA sense strand
acacaaggcauauuggauu

SEQ ID NO: 1647119 - RNA, 19 nt, Homo sapiens
  misc_RNA (1)...(19): siRNA sense strand
ugaauugacuaaucuggau

SEQ ID NO: 1647120 - RNA, 19 nt, Homo sapiens
  misc_RNA (1)...(19): siRNA sense strand
ccagaaacggauagacaua

SEQ ID NO: 1647121 - RNA, 19 nt, Homo sapiens
  misc_RNA (1)...(19): siRNA sense strand
aauguuagcccuagagaaa

SEQ ID NO: 1647122 - RNA, 19 nt, Homo sapiens
  misc_RNA (1)...(19): siRNA sense strand
gaagaugggcagagaagca

SEQ ID NO: 1647123 - RNA, 19 nt, Homo sapiens
  misc_RNA (1)...(19): siRNA sense strand
gcuuuacucaucagucuua

SEQ ID NO: 1647124 - RNA, 19 nt, Homo sapiens
  misc_RNA (1)...(19): siRNA sense strand
gcagauaauggaaggaaug

SEQ ID NO: 1647125 - RNA, 19 nt, Homo sapiens
  misc_RNA (1)...(19): siRNA sense strand
uaagccgucuucucaguga

SEQ ID NO: 1647126 - RNA, 19 nt, Homo sapiens
  misc_RNA (1)...(19): siRNA sense strand
ucuaggagcuccagacuac

SEQ ID NO: 1647127 - RNA, 19 nt, Homo sapiens
  misc_RNA (1)...(19): siRNA sense strand
ugaaucaggucagacagaa

SEQ ID NO: 1647128 - RNA, 19 nt, Homo sapiens
  misc_RNA (1)...(19): siRNA sense strand
gauauuaugcgagucugua

SEQ ID NO: 1647129 - RNA, 19 nt, Homo sapiens
  misc_RNA (1)...(19): siRNA sense strand
caugagcagugucacagaa

SEQ ID NO: 1647130 - RNA, 19 nt, Homo sapiens
  misc_RNA (1)...(19): siRNA sense strand
cagcgcauguucuuacaga

SEQ ID NO: 1647131 - RNA, 19 nt, Homo sapiens
  misc_RNA (1)...(19): siRNA sense strand
gagcuaagucauaugaaau

SEQ ID NO: 1647132 - RNA, 19 nt, Homo sapiens
  misc_RNA (1)...(19): siRNA sense strand
uaguacagauucuccuaaa

SEQ ID NO: 1647133 - RNA, 19 nt, Homo sapiens
  misc_RNA (1)...(19): siRNA sense strand
ugcacaaucucacuuuauu

SEQ ID NO: 1647134 - RNA, 19 nt, Homo sapiens
  misc_RNA (1)...(19): siRNA sense strand
gugaaggugucaguaaaga

SEQ ID NO: 1647135 - RNA, 19 nt, Homo sapiens
  misc_RNA (1)...(19): siRNA sense strand
acaagaaucucaguacaag

SEQ ID NO: 1647136 - RNA, 19 nt, Homo sapiens
  misc_RNA (1)...(19): siRNA sense strand
aggacaugcugaaauagua

SEQ ID NO: 1647137 - RNA, 19 nt, Homo sapiens
  misc_RNA (1)...(19): siRNA sense strand
ucagucaaccaguuagaua

SEQ ID NO: 1647138 - RNA, 19 nt, Homo sapiens
  misc_RNA (1)...(19): siRNA sense strand
ucggguagauaaaguggua

SEQ ID NO: 1647139 - RNA, 19 nt, Homo sapiens
  misc_RNA (1)...(19): siRNA sense strand
gaaaacgaguuguacuaau

SEQ ID NO: 1647140 - RNA, 19 nt, Homo sapiens
  misc_RNA (1)...(19): siRNA sense strand
gggagauacugauacuugu

SEQ ID NO: 1647141 - RNA, 19 nt, Homo sapiens
  misc_RNA (1)...(19): siRNA sense strand
acucaucagucuuaaguau

SEQ ID NO: 1647142 - RNA, 19 nt, Homo sapiens
  misc_RNA (1)...(19): siRNA sense strand
ggaauacagagcuaaguca

SEQ ID NO: 1647143 - RNA, 19 nt, Homo sapiens
  misc_RNA (1)...(19): siRNA sense strand
aagaagagaugugagacuu

SEQ ID NO: 1647144 - RNA, 19 nt, Homo sapiens
  misc_RNA (1)...(19): siRNA sense strand
gaaauacuugcugaauuga

SEQ ID NO: 1647145 - RNA, 19 nt, Homo sapiens
  misc_RNA (1)...(19): siRNA sense strand
guucgaauauacagaaugg

SEQ ID NO: 1647146 - RNA, 19 nt, Homo sapiens
  misc_RNA (1)...(19): siRNA sense strand
gaagcuaaauggacaguua

SEQ ID NO: 1647147 - RNA, 19 nt, Homo sapiens
  misc_RNA (1)...(19): siRNA sense strand
caaggaagaucuccauuaa

SEQ ID NO: 1647148 - RNA, 19 nt, Homo sapiens
  misc_RNA (1)...(19): siRNA sense strand
ggaagaagcugcaaaauug

SEQ ID NO: 1647149 - RNA, 19 nt, Homo sapiens
  misc_RNA (1)...(19): siRNA sense strand
ggacagauauuuacaaagg

SEQ ID NO: 1647150 - RNA, 19 nt, Homo sapiens
  misc_RNA (1)...(19): siRNA sense strand
ccaaauaccuaaacaggaa

SEQ ID NO: 1647151 - RNA, 19 nt, Homo sapiens
  misc_RNA (1)...(19): siRNA sense strand
cauauuggauuacguagua

SEQ ID NO: 1647152 - RNA, 19 nt, Homo sapiens
  misc_RNA (1)...(19): siRNA sense strand
gaaggaagcaauuaacaaa

SEQ ID NO: 1647153 - RNA, 19 nt, Homo sapiens
  misc_RNA (1)...(19): siRNA sense strand
gggcagagaagcaucauua

SEQ ID NO: 1647154 - RNA, 19 nt, Homo sapiens
  misc_RNA (1)...(19): siRNA sense strand
cagagaagcaucauuauuu

SEQ ID NO: 1647155 - RNA, 19 nt, Homo sapiens
  misc_RNA (1)...(19): siRNA sense strand
ucaagaaacucagcaauau

SEQ ID NO: 1647156 - RNA, 19 nt, Homo sapiens
  misc_RNA (1)...(19): siRNA sense strand
agaaauacuugcugaauug

SEQ ID NO: 1647157 - RNA, 19 nt, Homo sapiens
  misc_RNA (1)...(19): siRNA sense strand
caagcaagguuuccuaaau

SEQ ID NO: 1647158 - RNA, 19 nt, Homo sapiens
  misc_RNA (1)...(19): siRNA sense strand
caacucaaaccauaucaua

SEQ ID NO: 1647159 - RNA, 19 nt, Homo sapiens
  misc_RNA (1)...(19): siRNA sense strand
caucguaccuguuaccaaa

SEQ ID NO: 1647160 - RNA, 19 nt, Homo sapiens
  misc_RNA (1)...(19): siRNA sense strand
ugaaauaacacaaggcaua

SEQ ID NO: 1647161 - RNA, 19 nt, Homo sapiens
  misc_RNA (1)...(19): siRNA sense strand
cauaaacccuugcaacaug

SEQ ID NO: 1647162 - RNA, 19 nt, Homo sapiens
  misc_RNA (1)...(19): siRNA sense strand
ggacaaaucgcauacuuca

SEQ ID NO: 1647163 - RNA, 19 nt, Homo sapiens
  misc_RNA (1)...(19): siRNA sense strand
gcaccucacuggacaaauc

SEQ ID NO: 1647164 - RNA, 19 nt, Homo sapiens
  misc_RNA (1)...(19): siRNA sense strand
cagaaauacuugcugaauu

SEQ ID NO: 1647165 - RNA, 19 nt, Homo sapiens
  misc_RNA (1)...(19): siRNA sense strand
gaaaccaccaaaccaauuu

SEQ ID NO: 1647166 - RNA, 19 nt, Homo sapiens
  misc_RNA (1)...(19): siRNA sense strand
gaaggugucaguaaagaaa

SEQ ID NO: 1647167 - RNA, 19 nt, Homo sapiens
  misc_RNA (1)...(19): siRNA sense strand
gcaugaaguucccauugaa

SEQ ID NO: 1647168 - RNA, 19 nt, Homo sapiens
  misc_RNA (1)...(19): siRNA sense strand
gacaguggguagaugauuu

SEQ ID NO: 1647169 - RNA, 19 nt, Homo sapiens
  misc_RNA (1)...(19): siRNA sense strand
caucaguugucaaagauaa

SEQ ID NO: 1647170 - RNA, 19 nt, Homo sapiens
  misc_RNA (1)...(19): siRNA sense strand
gaugaagccagauauaauu

SEQ ID NO: 1647171 - RNA, 19 nt, Homo sapiens
  misc_RNA (1)...(19): siRNA sense strand
aggaagaucuccauuaaau

SEQ ID NO: 1647172 - RNA, 19 nt, Homo sapiens
  misc_RNA (1)...(19): siRNA sense strand
agaaacggauagacauaua

SEQ ID NO: 1647173 - RNA, 19 nt, Homo sapiens
  misc_RNA (1)...(19): siRNA sense strand
cacaaggcauauuggauua

SEQ ID NO: 1647174 - RNA, 19 nt, Homo sapiens
  misc_RNA (1)...(19): siRNA sense strand
gagagaagaugggcagaga

SEQ ID NO: 1647175 - RNA, 19 nt, Homo sapiens
  misc_RNA (1)...(19): siRNA sense strand
gcagagaagcaucauuauu

SEQ ID NO: 1647176 - RNA, 19 nt, Homo sapiens
  misc_RNA (1)...(19): siRNA sense strand
gaaugcgucucucucaaga

SEQ ID NO: 1647177 - RNA, 19 nt, Homo sapiens
  misc_RNA (1)...(19): siRNA sense strand
ggaagaucuccauuaaaua

SEQ ID NO: 1647178 - RNA, 19 nt, Homo sapiens
  misc_RNA (1)...(19): siRNA sense strand
gcacuagaaauaaagagua

SEQ ID NO: 1647179 - RNA, 19 nt, Homo sapiens
  misc_RNA (1)...(19): siRNA sense strand
gaacgacaguggguagaug

SEQ ID NO: 1647180 - RNA, 19 nt, Homo sapiens
  misc_RNA (1)...(19): siRNA sense strand
gcaauuaacaaaccauaug

SEQ ID NO: 1647181 - RNA, 19 nt, Homo sapiens
  misc_RNA (1)...(19): siRNA sense strand
ugucauaaauccugcauau

SEQ ID NO: 1647182 - RNA, 19 nt, Homo sapiens
  misc_RNA (1)...(19): siRNA sense strand
caggacagauauuuacaaa

SEQ ID NO: 1647183 - RNA, 19 nt, Homo sapiens
  misc_RNA (1)...(19): siRNA sense strand
gaaacggauagacauauaa

SEQ ID NO: 1647184 - RNA, 19 nt, Homo sapiens
  misc_RNA (1)...(19): siRNA sense strand
aggaggacaugcugaaaua

SEQ ID NO: 1647185 - RNA, 19 nt, Homo sapiens
  misc_RNA (1)...(19): siRNA sense strand
acagaaaacucacuacaua

SEQ ID NO: 1647186 - RNA, 19 nt, Homo sapiens
  misc_RNA (1)...(19): siRNA sense strand
gaauugaagcauggaaaua

SEQ ID NO: 1647187 - RNA, 19 nt, Homo sapiens
  misc_RNA (1)...(19): siRNA sense strand
gaucuucaguauacaaauc

SEQ ID NO: 1647188 - RNA, 19 nt, Homo sapiens
  misc_RNA (1)...(19): siRNA sense strand
augcuaagcugauaacauu

SEQ ID NO: 1647189 - RNA, 19 nt, Homo sapiens
  misc_RNA (1)...(19): siRNA sense strand
ggucauaucguucuguuga

SEQ ID NO: 1647190 - RNA, 19 nt, Homo sapiens
  misc_RNA (1)...(19): siRNA sense strand
gaaauaacacaaggcauau

SEQ ID NO: 1647191 - RNA, 19 nt, Homo sapiens
  misc_RNA (1)...(19): siRNA sense strand
cauggaaacuaaggcuuua

SEQ ID NO: 1647192 - RNA, 19 nt, Homo sapiens
  misc_RNA (1)...(19): siRNA sense strand
caaaucgcauacuucauga

SEQ ID NO: 1647193 - RNA, 19 nt, Homo sapiens
  misc_RNA (1)...(19): siRNA sense strand
auacagagcuaagucauau

SEQ ID NO: 1647194 - RNA, 19 nt, Homo sapiens
  misc_RNA (1)...(19): siRNA sense strand
auacaaaucggguagauaa

SEQ ID NO: 1647195 - RNA, 19 nt, Homo sapiens
  misc_RNA (1)...(19): siRNA sense strand
gaaacuaaggcuuuacuca

SEQ ID NO: 1647196 - RNA, 19 nt, Homo sapiens
  misc_RNA (1)...(19): siRNA sense strand
guucgugacuggccagaaa

SEQ ID NO: 1647197 - RNA, 19 nt, Homo sapiens
  misc_RNA (1)...(19): siRNA sense strand
caagugaaggugucaguaa

SEQ ID NO: 1647198 - RNA, 19 nt, Homo sapiens
  misc_RNA (1)...(19): siRNA sense strand
caaaucggguagauaaagu

SEQ ID NO: 1647199 - RNA, 19 nt, Homo sapiens
  misc_RNA (1)...(19): siRNA sense strand
gagauacugauacuuguuu

SEQ ID NO: 1647200 - RNA, 19 nt, Homo sapiens
  misc_RNA (1)...(19): siRNA sense strand
cagaauggaugggucauau

SEQ ID NO: 1647201 - RNA, 19 nt, Homo sapiens
  misc_RNA (1)...(19): siRNA sense strand
acaaggaagaucuccauua

SEQ ID NO: 1647202 - RNA, 19 nt, Homo sapiens
  misc_RNA (1)...(19): siRNA sense strand
ucacuuuauuccagcuuua

SEQ ID NO: 1647203 - RNA, 19 nt, Homo sapiens
  misc_RNA (1)...(19): siRNA sense strand
uuacagaauugcugggaaa

SEQ ID NO: 1647204 - RNA, 19 nt, Homo sapiens
  misc_RNA (1)...(19): siRNA sense strand
aaaggaaagugcaauccaa

SEQ ID NO: 1647205 - RNA, 19 nt, Homo sapiens
  misc_RNA (1)...(19): siRNA sense strand
aagcaagguuuccuaaaug

SEQ ID NO: 1647206 - RNA, 19 nt, Homo sapiens
  misc_RNA (1)...(19): siRNA sense strand
ugaggccacucgcauauug

SEQ ID NO: 1647207 - RNA, 19 nt, Homo sapiens
  misc_RNA (1)...(19): siRNA sense strand
caugcacaaucucacuuua

SEQ ID NO: 1647208 - RNA, 19 nt, Homo sapiens
  misc_RNA (1)...(19): siRNA sense strand
agagcuaagucauaugaaa

SEQ ID NO: 1647209 - RNA, 19 nt, Homo sapiens
  misc_RNA (1)...(19): siRNA sense strand
gaauacaagaaucucagua

SEQ ID NO: 1647210 - RNA, 19 nt, Homo sapiens
  misc_RNA (1)...(19): siRNA sense strand
caaggcaacagugaaauaa

SEQ ID NO: 1647211 - RNA, 19 nt, Homo sapiens
  misc_RNA (1)...(19): siRNA sense strand
uuacuaagccgucuucuca

SEQ ID NO: 1647212 - RNA, 19 nt, Homo sapiens
  misc_RNA (1)...(19): siRNA sense strand
guagaaaccaccaaaccaa

SEQ ID NO: 1647213 - RNA, 19 nt, Homo sapiens
  misc_RNA (1)...(19): siRNA sense strand
gccuucaacucaaaccaua

SEQ ID NO: 1647214 - RNA, 19 nt, Homo sapiens
  misc_RNA (1)...(19): siRNA sense strand
caagaaacucagcaauauu

SEQ ID NO: 1647215 - RNA, 19 nt, Homo sapiens
  misc_RNA (1)...(19): siRNA sense strand
ucaaggcaacagugaaaua

SEQ ID NO: 1647216 - RNA, 19 nt, Homo sapiens
  misc_RNA (1)...(19): siRNA sense strand
acaaaucgcauacuucaug

SEQ ID NO: 1647217 - RNA, 19 nt, Homo sapiens
  misc_RNA (1)...(19): siRNA sense strand
cccacuagcuauucuuauu

SEQ ID NO: 1647218 - RNA, 19 nt, Homo sapiens
  misc_RNA (1)...(19): siRNA sense strand
acacaaggcauauuggauu

SEQ ID NO: 1647219 - RNA, 19 nt, Homo sapiens
  misc_RNA (1)...(19): siRNA sense strand
ugaauugacuaaucuggau

SEQ ID NO: 1647220 - RNA, 19 nt, Homo sapiens
  misc_RNA (1)...(19): siRNA sense strand
ccagaaacggauagacaua

SEQ ID NO: 1647221 - RNA, 19 nt, Homo sapiens
  misc_RNA (1)...(19): siRNA sense strand
aauguuagcccuagagaaa

SEQ ID NO: 1647222 - RNA, 19 nt, Homo sapiens
  misc_RNA (1)...(19): siRNA sense strand
gaagaugggcagagaagca

SEQ ID NO: 1647223 - RNA, 19 nt, Homo sapiens
  misc_RNA (1)...(19): siRNA sense strand
gcuuuacucaucagucuua

SEQ ID NO: 1647224 - RNA, 19 nt, Homo sapiens
  misc_RNA (1)...(19): siRNA sense strand
gcagauaauggaaggaaug

SEQ ID NO: 1647225 - RNA, 19 nt, Homo sapiens
  misc_RNA (1)...(19): siRNA sense strand
uaagccgucuucucaguga

SEQ ID NO: 1647226 - RNA, 19 nt, Homo sapiens
  misc_RNA (1)...(19): siRNA sense strand
ucuaggagcuccagacuac

SEQ ID NO: 1647227 - RNA, 19 nt, Homo sapiens
  misc_RNA (1)...(19): siRNA sense strand
ugaaucaggucagacagaa

SEQ ID NO: 1647228 - RNA, 19 nt, Homo sapiens
  misc_RNA (1)...(19): siRNA sense strand
gauauuaugcgagucugua

SEQ ID NO: 1647229 - RNA, 19 nt, Homo sapiens
  misc_RNA (1)...(19): siRNA sense strand
caugagcagugucacagaa

SEQ ID NO: 1647230 - RNA, 19 nt, Homo sapiens
  misc_RNA (1)...(19): siRNA sense strand
cagcgcauguucuuacaga

SEQ ID NO: 1647231 - RNA, 19 nt, Homo sapiens
  misc_RNA (1)...(19): siRNA sense strand
gagcuaagucauaugaaau

SEQ ID NO: 1647232 - RNA, 19 nt, Homo sapiens
  misc_RNA (1)...(19): siRNA sense strand
uaguacagauucuccuaaa

SEQ ID NO: 1647233 - RNA, 19 nt, Homo sapiens
  misc_RNA (1)...(19): siRNA sense strand
ugcacaaucucacuuuauu

SEQ ID NO: 1647234 - RNA, 19 nt, Homo sapiens
  misc_RNA (1)...(19): siRNA sense strand
gugaaggugucaguaaaga

SEQ ID NO: 1647235 - RNA, 19 nt, Homo sapiens
  misc_RNA (1)...(19): siRNA sense strand
acaagaaucucaguacaag

SEQ ID NO: 1647236 - RNA, 19 nt, Homo sapiens
  misc_RNA (1)...(19): siRNA sense strand
aggacaugcugaaauagua

SEQ ID NO: 1647237 - RNA, 19 nt, Homo sapiens
  misc_RNA (1)...(19): siRNA sense strand
ucagucaaccaguuagaua

SEQ ID NO: 1647238 - RNA, 19 nt, Homo sapiens
  misc_RNA (1)...(19): siRNA sense strand
ucggguagauaaaguggua

SEQ ID NO: 1647239 - RNA, 19 nt, Homo sapiens
  misc_RNA (1)...(19): siRNA sense strand
gaaaacgaguuguacuaau

SEQ ID NO: 1647240 - RNA, 19 nt, Homo sapiens
  misc_RNA (1)...(19): siRNA sense strand
gggagauacugauacuugu

SEQ ID NO: 1647241 - RNA, 19 nt, Homo sapiens
  misc_RNA (1)...(19): siRNA sense strand
acucaucagucuuaaguau

SEQ ID NO: 1647242 - RNA, 19 nt, Homo sapiens
  misc_RNA (1)...(19): siRNA sense strand
ggaauacagagcuaaguca

SEQ ID NO: 1647243 - RNA, 19 nt, Homo sapiens
  misc_RNA (1)...(19): siRNA sense strand
aagaagagaugugagacuu

SEQ ID NO: 1647244 - RNA, 19 nt, Homo sapiens
  misc_RNA (1)...(19): siRNA sense strand
gaaauacuugcugaauuga

SEQ ID NO: 1647245 - RNA, 19 nt, Homo sapiens
  misc_RNA (1)...(19): siRNA sense strand
guucgaauauacagaaugg

SEQ ID NO: 1647246 - RNA, 19 nt, Homo sapiens
  misc_RNA (1)...(19): siRNA sense strand
gaagcuaaauggacaguua

SEQ ID NO: 1647247 - RNA, 19 nt, Homo sapiens
  misc_RNA (1)...(19): siRNA sense strand
caaggaagaucuccauuaa

SEQ ID NO: 1647248 - RNA, 19 nt, Homo sapiens
  misc_RNA (1)...(19): siRNA sense strand
ggaagaagcugcaaaauug

SEQ ID NO: 1647249 - RNA, 19 nt, Homo sapiens
  misc_RNA (1)...(19): siRNA sense strand
ggacagauauuuacaaagg

SEQ ID NO: 1647250 - RNA, 19 nt, Homo sapiens
  misc_RNA (1)...(19): siRNA sense strand
ccaaauaccuaaacaggaa

SEQ ID NO: 1647251 - RNA, 19 nt, Homo sapiens
  misc_RNA (1)...(19): siRNA sense strand
cauauuggauuacguagua

SEQ ID NO: 1647252 - RNA, 19 nt, Homo sapiens
  misc_RNA (1)...(19): siRNA sense strand
gaaggaagcaauuaacaaa

SEQ ID NO: 1647253 - RNA, 19 nt, Homo sapiens
  misc_RNA (1)...(19): siRNA sense strand
gggcagagaagcaucauua

SEQ ID NO: 1647254 - RNA, 19 nt, Homo sapiens
  misc_RNA (1)...(19): siRNA sense strand
cagagaagcaucauuauuu

SEQ ID NO: 1647255 - RNA, 19 nt, Homo sapiens
  misc_RNA (1)...(19): siRNA sense strand
ucaagaaacucagcaauau

SEQ ID NO: 1647256 - RNA, 19 nt, Homo sapiens
  misc_RNA (1)...(19): siRNA sense strand
agaaauacuugcugaauug

SEQ ID NO: 1647257 - RNA, 19 nt, Homo sapiens
  misc_RNA (1)...(19): siRNA sense strand
caagcaagguuuccuaaau

SEQ ID NO: 1647258 - RNA, 19 nt, Homo sapiens
  misc_RNA (1)...(19): siRNA sense strand
caacucaaaccauaucaua

SEQ ID NO: 1647259 - RNA, 19 nt, Homo sapiens
  misc_RNA (1)...(19): siRNA sense strand
caucguaccuguuaccaaa

SEQ ID NO: 1647260 - RNA, 19 nt, Homo sapiens
  misc_RNA (1)...(19): siRNA sense strand
ugaaauaacacaaggcaua

SEQ ID NO: 1647261 - RNA, 19 nt, Homo sapiens
  misc_RNA (1)...(19): siRNA sense strand
cauaaacccuugcaacaug

SEQ ID NO: 1647262 - RNA, 19 nt, Homo sapiens
  misc_RNA (1)...(19): siRNA sense strand
ggacaaaucgcauacuuca

SEQ ID NO: 1647263 - RNA, 19 nt, Homo sapiens
  misc_RNA (1)...(19): siRNA sense strand
gcaccucacuggacaaauc

SEQ ID NO: 1647264 - RNA, 19 nt, Homo sapiens
  misc_RNA (1)...(19): siRNA sense strand
cagaaauacuugcugaauu

SEQ ID NO: 1647265 - RNA, 19 nt, Homo sapiens
  misc_RNA (1)...(19): siRNA sense strand
gaaaccaccaaaccaauuu

SEQ ID NO: 1647266 - RNA, 19 nt, Homo sapiens
  misc_RNA (1)...(19): siRNA sense strand
gaaggugucaguaaagaaa

SEQ ID NO: 1647267 - RNA, 19 nt, Homo sapiens
  misc_RNA (1)...(19): siRNA sense strand
gcaugaaguucccauugaa

SEQ ID NO: 1647268 - RNA, 19 nt, Homo sapiens
  misc_RNA (1)...(19): siRNA sense strand
gacaguggguagaugauuu

SEQ ID NO: 1647269 - RNA, 19 nt, Homo sapiens
  misc_RNA (1)...(19): siRNA sense strand
caucaguugucaaagauaa

SEQ ID NO: 1647270 - RNA, 19 nt, Homo sapiens
  misc_RNA (1)...(19): siRNA sense strand
gaugaagccagauauaauu

SEQ ID NO: 1647271 - RNA, 19 nt, Homo sapiens
  misc_RNA (1)...(19): siRNA sense strand
aggaagaucuccauuaaau

SEQ ID NO: 1647272 - RNA, 19 nt, Homo sapiens
  misc_RNA (1)...(19): siRNA sense strand
agaaacggauagacauaua

SEQ ID NO: 1647273 - RNA, 19 nt, Homo sapiens
  misc_RNA (1)...(19): siRNA sense strand
cacaaggcauauuggauua

SEQ ID NO: 1647274 - RNA, 19 nt, Homo sapiens
  misc_RNA (1)...(19): siRNA sense strand
gagagaagaugggcagaga

SEQ ID NO: 1647275 - RNA, 19 nt, Homo sapiens
  misc_RNA (1)...(19): siRNA sense strand
gcagagaagcaucauuauu

SEQ ID NO: 1647276 - RNA, 19 nt, Homo sapiens
  misc_RNA (1)...(19): siRNA sense strand
gaaugcgucucucucaaga

SEQ ID NO: 1647277 - RNA, 19 nt, Homo sapiens
  misc_RNA (1)...(19): siRNA sense strand
ggaagaucuccauuaaaua

SEQ ID NO: 1647278 - RNA, 19 nt, Homo sapiens
  misc_RNA (1)...(19): siRNA sense strand
gcacuagaaauaaagagua

SEQ ID NO: 1647279 - RNA, 19 nt, Homo sapiens
  misc_RNA (1)...(19): siRNA sense strand
gaacgacaguggguagaug

SEQ ID NO: 1647280 - RNA, 19 nt, Homo sapiens
  misc_RNA (1)...(19): siRNA sense strand
gcaauuaacaaaccauaug

SEQ ID NO: 1647281 - RNA, 19 nt, Homo sapiens
  misc_RNA (1)...(19): siRNA sense strand
ugucauaaauccugcauau

SEQ ID NO: 1647282 - RNA, 19 nt, Homo sapiens
  misc_RNA (1)...(19): siRNA sense strand
caggacagauauuuacaaa

SEQ ID NO: 1647283 - RNA, 19 nt, Homo sapiens
  misc_RNA (1)...(19): siRNA sense strand
gaaacggauagacauauaa

SEQ ID NO: 1647284 - RNA, 19 nt, Homo sapiens
  misc_RNA (1)...(19): siRNA sense strand
aggaggacaugcugaaaua

SEQ ID NO: 1647285 - RNA, 19 nt, Homo sapiens
  misc_RNA (1)...(19): siRNA sense strand
acagaaaacucacuacaua

SEQ ID NO: 1647286 - RNA, 19 nt, Homo sapiens
  misc_RNA (1)...(19): siRNA sense strand
gaauugaagcauggaaaua

SEQ ID NO: 1647287 - RNA, 19 nt, Homo sapiens
  misc_RNA (1)...(19): siRNA sense strand
gaucuucaguauacaaauc

SEQ ID NO: 1647288 - RNA, 19 nt, Homo sapiens
  misc_RNA (1)...(19): siRNA sense strand
augcuaagcugauaacauu

SEQ ID NO: 1647289 - RNA, 19 nt, Homo sapiens
  misc_RNA (1)...(19): siRNA sense strand
ggucauaucguucuguuga

SEQ ID NO: 1647290 - RNA, 19 nt, Homo sapiens
  misc_RNA (1)...(19): siRNA sense strand
gaaauaacacaaggcauau

SEQ ID NO: 1647291 - RNA, 19 nt, Homo sapiens
  misc_RNA (1)...(19): siRNA sense strand
cauggaaacuaaggcuuua

SEQ ID NO: 1647292 - RNA, 19 nt, Homo sapiens
  misc_RNA (1)...(19): siRNA sense strand
caaaucgcauacuucauga

SEQ ID NO: 1647293 - RNA, 19 nt, Homo sapiens
  misc_RNA (1)...(19): siRNA sense strand
auacagagcuaagucauau

SEQ ID NO: 1647294 - RNA, 19 nt, Homo sapiens
  misc_RNA (1)...(19): siRNA sense strand
auacaaaucggguagauaa

SEQ ID NO: 1647295 - RNA, 19 nt, Homo sapiens
  misc_RNA (1)...(19): siRNA sense strand
gaaacuaaggcuuuacuca

SEQ ID NO: 1647296 - RNA, 19 nt, Homo sapiens
  misc_RNA (1)...(19): siRNA sense strand
guucgugacuggccagaaa

SEQ ID NO: 1647297 - RNA, 19 nt, Homo sapiens
  misc_RNA (1)...(19): siRNA sense strand
caagugaaggugucaguaa

SEQ ID NO: 1647298 - RNA, 19 nt, Homo sapiens
  misc_RNA (1)...(19): siRNA sense strand
caaaucggguagauaaagu

SEQ ID NO: 1647299 - RNA, 19 nt, Homo sapiens
  misc_RNA (1)...(19): siRNA sense strand
gagauacugauacuuguuu

SEQ ID NO: 1647300 - RNA, 19 nt, Homo sapiens
  misc_RNA (1)...(19): siRNA sense strand
cagaauggaugggucauau

SEQ ID NO: 1647301 - RNA, 19 nt, Homo sapiens
  misc_RNA (1)...(19): siRNA sense strand
acaaggaagaucuccauua

SEQ ID NO: 1647302 - RNA, 19 nt, Homo sapiens
  misc_RNA (1)...(19): siRNA sense strand
ucacuuuauuccagcuuua

SEQ ID NO: 1647303 - RNA, 19 nt, Homo sapiens
  misc_RNA (1)...(19): siRNA sense strand
uuacagaauugcugggaaa

SEQ ID NO: 1647304 - RNA, 19 nt, Homo sapiens
  misc_RNA (1)...(19): siRNA sense strand
aaaggaaagugcaauccaa

SEQ ID NO: 1647305 - RNA, 19 nt, Homo sapiens
  misc_RNA (1)...(19): siRNA sense strand
aagcaagguuuccuaaaug

SEQ ID NO: 1647306 - RNA, 19 nt, Homo sapiens
  misc_RNA (1)...(19): siRNA sense strand
ugaggccacucgcauauug

SEQ ID NO: 1647307 - RNA, 19 nt, Homo sapiens
  misc_RNA (1)...(19): siRNA sense strand
caugcacaaucucacuuua

SEQ ID NO: 1647308 - RNA, 19 nt, Homo sapiens
  misc_RNA (1)...(19): siRNA sense strand
agagcuaagucauaugaaa

SEQ ID NO: 1647309 - RNA, 19 nt, Homo sapiens
  misc_RNA (1)...(19): siRNA sense strand
gaauacaagaaucucagua

SEQ ID NO: 1647310 - RNA, 19 nt, Homo sapiens
  misc_RNA (1)...(19): siRNA sense strand
caaggcaacagugaaauaa

SEQ ID NO: 1647311 - RNA, 19 nt, Homo sapiens
  misc_RNA (1)...(19): siRNA sense strand
uuacuaagccgucuucuca

SEQ ID NO: 1647312 - RNA, 19 nt, Homo sapiens
  misc_RNA (1)...(19): siRNA sense strand
guagaaaccaccaaaccaa

SEQ ID NO: 1647313 - RNA, 19 nt, Homo sapiens
  misc_RNA (1)...(19): siRNA sense strand
gccuucaacucaaaccaua

SEQ ID NO: 1647314 - RNA, 19 nt, Homo sapiens
  misc_RNA (1)...(19): siRNA sense strand
caagaaacucagcaauauu

SEQ ID NO: 1647315 - RNA, 19 nt, Homo sapiens
  misc_RNA (1)...(19): siRNA sense strand
ucaaggcaacagugaaaua

SEQ ID NO: 1647316 - RNA, 19 nt, Homo sapiens
  misc_RNA (1)...(19): siRNA sense strand
acaaaucgcauacuucaug

SEQ ID NO: 1647317 - RNA, 19 nt, Homo sapiens
  misc_RNA (1)...(19): siRNA sense strand
cccacuagcuauucuuauu

SEQ ID NO: 1647318 - RNA, 19 nt, Homo sapiens
  misc_RNA (1)...(19): siRNA sense strand
acacaaggcauauuggauu

SEQ ID NO: 1647319 - RNA, 19 nt, Homo sapiens
  misc_RNA (1)...(19): siRNA sense strand
ugaauugacuaaucuggau

SEQ ID NO: 1647320 - RNA, 19 nt, Homo sapiens
  misc_RNA (1)...(19): siRNA sense strand
ccagaaacggauagacaua

SEQ ID NO: 1647321 - RNA, 19 nt, Homo sapiens
  misc_RNA (1)...(19): siRNA sense strand
aauguuagcccuagagaaa

SEQ ID NO: 1647322 - RNA, 19 nt, Homo sapiens
  misc_RNA (1)...(19): siRNA sense strand
gaagaugggcagagaagca

SEQ ID NO: 1647323 - RNA, 19 nt, Homo sapiens
  misc_RNA (1)...(19): siRNA sense strand
gcuuuacucaucagucuua

SEQ ID NO: 1647324 - RNA, 19 nt, Homo sapiens
  misc_RNA (1)...(19): siRNA sense strand
gcagauaauggaaggaaug

SEQ ID NO: 1647325 - RNA, 19 nt, Homo sapiens
  misc_RNA (1)...(19): siRNA sense strand
uaagccgucuucucaguga

SEQ ID NO: 1647326 - RNA, 19 nt, Homo sapiens
  misc_RNA (1)...(19): siRNA sense strand
ucuaggagcuccagacuac

SEQ ID NO: 1647327 - RNA, 19 nt, Homo sapiens
  misc_RNA (1)...(19): siRNA sense strand
ugaaucaggucagacagaa

SEQ ID NO: 1647328 - RNA, 19 nt, Homo sapiens
  misc_RNA (1)...(19): siRNA sense strand
gauauuaugcgagucugua

SEQ ID NO: 1647329 - RNA, 19 nt, Homo sapiens
  misc_RNA (1)...(19): siRNA sense strand
caugagcagugucacagaa

SEQ ID NO: 1647330 - RNA, 19 nt, Homo sapiens
  misc_RNA (1)...(19): siRNA sense strand
cagcgcauguucuuacaga

SEQ ID NO: 1647331 - RNA, 19 nt, Homo sapiens
  misc_RNA (1)...(19): siRNA sense strand
gagcuaagucauaugaaau

SEQ ID NO: 1647332 - RNA, 19 nt, Homo sapiens
  misc_RNA (1)...(19): siRNA sense strand
uaguacagauucuccuaaa

SEQ ID NO: 1647333 - RNA, 19 nt, Homo sapiens
  misc_RNA (1)...(19): siRNA sense strand
ugcacaaucucacuuuauu

SEQ ID NO: 1647334 - RNA, 19 nt, Homo sapiens
  misc_RNA (1)...(19): siRNA sense strand
gugaaggugucaguaaaga

SEQ ID NO: 1647335 - RNA, 19 nt, Homo sapiens
  misc_RNA (1)...(19): siRNA sense strand
acaagaaucucaguacaag

SEQ ID NO: 1647336 - RNA, 19 nt, Homo sapiens
  misc_RNA (1)...(19): siRNA sense strand
aggacaugcugaaauagua

SEQ ID NO: 1647337 - RNA, 19 nt, Homo sapiens
  misc_RNA (1)...(19): siRNA sense strand
ucagucaaccaguuagaua

SEQ ID NO: 1647338 - RNA, 19 nt, Homo sapiens
  misc_RNA (1)...(19): siRNA sense strand
ucggguagauaaaguggua

SEQ ID NO: 1647339 - RNA, 19 nt, Homo sapiens
  misc_RNA (1)...(19): siRNA sense strand
gaaaacgaguuguacuaau

SEQ ID NO: 1647340 - RNA, 19 nt, Homo sapiens
  misc_RNA (1)...(19): siRNA sense strand
gggagauacugauacuugu

SEQ ID NO: 1647341 - RNA, 19 nt, Homo sapiens
  misc_RNA (1)...(19): siRNA sense strand
acucaucagucuuaaguau

SEQ ID NO: 1647342 - RNA, 19 nt, Homo sapiens
  misc_RNA (1)...(19): siRNA sense strand
ggaauacagagcuaaguca

SEQ ID NO: 1647343 - RNA, 19 nt, Homo sapiens
  misc_RNA (1)...(19): siRNA sense strand
aagaagagaugugagacuu

SEQ ID NO: 1647344 - RNA, 19 nt, Homo sapiens
  misc_RNA (1)...(19): siRNA sense strand
gaaauacuugcugaauuga

SEQ ID NO: 1647345 - RNA, 19 nt, Homo sapiens
  misc_RNA (1)...(19): siRNA sense strand
guucgaauauacagaaugg

SEQ ID NO: 1647346 - RNA, 19 nt, Homo sapiens
  misc_RNA (1)...(19): siRNA sense strand
gaagcuaaauggacaguua

SEQ ID NO: 1647347 - RNA, 19 nt, Homo sapiens
  misc_RNA (1)...(19): siRNA sense strand
caaggaagaucuccauuaa

SEQ ID NO: 1647348 - RNA, 19 nt, Homo sapiens
  misc_RNA (1)...(19): siRNA sense strand
ggaagaagcugcaaaauug

SEQ ID NO: 1647349 - RNA, 19 nt, Homo sapiens
  misc_RNA (1)...(19): siRNA sense strand
ggacagauauuuacaaagg

SEQ ID NO: 1647350 - RNA, 19 nt, Homo sapiens
  misc_RNA (1)...(19): siRNA sense strand
ccaaauaccuaaacaggaa

SEQ ID NO: 1647351 - RNA, 19 nt, Homo sapiens
  misc_RNA (1)...(19): siRNA sense strand
cauauuggauuacguagua

SEQ ID NO: 1647352 - RNA, 19 nt, Homo sapiens
  misc_RNA (1)...(19): siRNA sense strand
gaaggaagcaauuaacaaa

SEQ ID NO: 1647353 - RNA, 19 nt, Homo sapiens
  misc_RNA (1)...(19): siRNA sense strand
gggcagagaagcaucauua

SEQ ID NO: 1647354 - RNA, 19 nt, Homo sapiens
  misc_RNA (1)...(19): siRNA sense strand
cagagaagcaucauuauuu

SEQ ID NO: 1647355 - RNA, 19 nt, Homo sapiens
  misc_RNA (1)...(19): siRNA sense strand
ucaagaaacucagcaauau

SEQ ID NO: 1647356 - RNA, 19 nt, Homo sapiens
  misc_RNA (1)...(19): siRNA sense strand
agaaauacuugcugaauug

SEQ ID NO: 1647357 - RNA, 19 nt, Homo sapiens
  misc_RNA (1)...(19): siRNA sense strand
caagcaagguuuccuaaau

SEQ ID NO: 1647358 - RNA, 19 nt, Homo sapiens
  misc_RNA (1)...(19): siRNA sense strand
caacucaaaccauaucaua

SEQ ID NO: 1647359 - RNA, 19 nt, Homo sapiens
  misc_RNA (1)...(19): siRNA sense strand
caucguaccuguuaccaaa

SEQ ID NO: 1647360 - RNA, 19 nt, Homo sapiens
  misc_RNA (1)...(19): siRNA sense strand
ugaaauaacacaaggcaua

SEQ ID NO: 1647361 - RNA, 19 nt, Homo sapiens
  misc_RNA (1)...(19): siRNA sense strand
cauaaacccuugcaacaug

SEQ ID NO: 1647362 - RNA, 19 nt, Homo sapiens
  misc_RNA (1)...(19): siRNA sense strand
ggacaaaucgcauacuuca

SEQ ID NO: 1647363 - RNA, 19 nt, Homo sapiens
  misc_RNA (1)...(19): siRNA sense strand
gcaccucacuggacaaauc

SEQ ID NO: 1647364 - RNA, 19 nt, Homo sapiens
  misc_RNA (1)...(19): siRNA sense strand
cagaaauacuugcugaauu

SEQ ID NO: 1647365 - RNA, 19 nt, Homo sapiens
  misc_RNA (1)...(19): siRNA sense strand
gaaaccaccaaaccaauuu

SEQ ID NO: 1647366 - RNA, 19 nt, Homo sapiens
  misc_RNA (1)...(19): siRNA sense strand
gaaggugucaguaaagaaa

SEQ ID NO: 1647367 - RNA, 19 nt, Homo sapiens
  misc_RNA (1)...(19): siRNA sense strand
gcaugaaguucccauugaa

SEQ ID NO: 1647368 - RNA, 19 nt, Homo sapiens
  misc_RNA (1)...(19): siRNA sense strand
gacaguggguagaugauuu

SEQ ID NO: 1647369 - RNA, 19 nt, Homo sapiens
  misc_RNA (1)...(19): siRNA sense strand
caucaguugucaaagauaa

SEQ ID NO: 1647370 - RNA, 19 nt, Homo sapiens
  misc_RNA (1)...(19): siRNA sense strand
gaugaagccagauauaauu

SEQ ID NO: 1647371 - RNA, 19 nt, Homo sapiens
  misc_RNA (1)...(19): siRNA sense strand
aggaagaucuccauuaaau

SEQ ID NO: 1647372 - RNA, 19 nt, Homo sapiens
  misc_RNA (1)...(19): siRNA sense strand
agaaacggauagacauaua

SEQ ID NO: 1647373 - RNA, 19 nt, Homo sapiens
  misc_RNA (1)...(19): siRNA sense strand
cacaaggcauauuggauua

SEQ ID NO: 1647374 - RNA, 19 nt, Homo sapiens
  misc_RNA (1)...(19): siRNA sense strand
gagagaagaugggcagaga

SEQ ID NO: 1647375 - RNA, 19 nt, Homo sapiens
  misc_RNA (1)...(19): siRNA sense strand
gcagagaagcaucauuauu

SEQ ID NO: 1647376 - RNA, 19 nt, Homo sapiens
  misc_RNA (1)...(19): siRNA sense strand
gaaugcgucucucucaaga

SEQ ID NO: 1647377 - RNA, 19 nt, Homo sapiens
  misc_RNA (1)...(19): siRNA sense strand
ggaagaucuccauuaaaua

SEQ ID NO: 1647378 - RNA, 19 nt, Homo sapiens
  misc_RNA (1)...(19): siRNA sense strand
gcacuagaaauaaagagua

SEQ ID NO: 1647379 - RNA, 19 nt, Homo sapiens
  misc_RNA (1)...(19): siRNA sense strand
gaacgacaguggguagaug

SEQ ID NO: 1647380 - RNA, 19 nt, Homo sapiens
  misc_RNA (1)...(19): siRNA sense strand
gcaauuaacaaaccauaug

SEQ ID NO: 1647381 - RNA, 19 nt, Homo sapiens
  misc_RNA (1)...(19): siRNA sense strand
ugucauaaauccugcauau

SEQ ID NO: 1647382 - RNA, 19 nt, Homo sapiens
  misc_RNA (1)...(19): siRNA sense strand
caggacagauauuuacaaa

SEQ ID NO: 1647383 - RNA, 19 nt, Homo sapiens
  misc_RNA (1)...(19): siRNA sense strand
gaaacggauagacauauaa

SEQ ID NO: 1647384 - RNA, 19 nt, Homo sapiens
  misc_RNA (1)...(19): siRNA sense strand
aggaggacaugcugaaaua

SEQ ID NO: 1647385 - RNA, 19 nt, Homo sapiens
  misc_RNA (1)...(19): siRNA sense strand
acagaaaacucacuacaua

SEQ ID NO: 1647386 - RNA, 19 nt, Homo sapiens
  misc_RNA (1)...(19): siRNA sense strand
gaauugaagcauggaaaua

SEQ ID NO: 1647387 - RNA, 19 nt, Homo sapiens
  misc_RNA (1)...(19): siRNA sense strand
gaucuucaguauacaaauc

SEQ ID NO: 1647388 - RNA, 19 nt, Homo sapiens
  misc_RNA (1)...(19): siRNA sense strand
augcuaagcugauaacauu

SEQ ID NO: 1647389 - RNA, 19 nt, Homo sapiens
  misc_RNA (1)...(19): siRNA sense strand
ggucauaucguucuguuga

SEQ ID NO: 1647390 - RNA, 19 nt, Homo sapiens
  misc_RNA (1)...(19): siRNA sense strand
gaaauaacacaaggcauau

SEQ ID NO: 1647391 - RNA, 19 nt, Homo sapiens
  misc_RNA (1)...(19): siRNA sense strand
cauggaaacuaaggcuuua

SEQ ID NO: 1647392 - RNA, 19 nt, Homo sapiens
  misc_RNA (1)...(19): siRNA sense strand
caaaucgcauacuucauga

SEQ ID NO: 1647393 - RNA, 19 nt, Homo sapiens
  misc_RNA (1)...(19): siRNA sense strand
auacagagcuaagucauau

SEQ ID NO: 1647394 - RNA, 19 nt, Homo sapiens
  misc_RNA (1)...(19): siRNA sense strand
auacaaaucggguagauaa

SEQ ID NO: 1647395 - RNA, 19 nt, Homo sapiens
  misc_RNA (1)...(19): siRNA sense strand
gaaacuaaggcuuuacuca

SEQ ID NO: 1647396 - RNA, 19 nt, Homo sapiens
  misc_RNA (1)...(19): siRNA sense strand
guucgugacuggccagaaa

SEQ ID NO: 1647397 - RNA, 19 nt, Homo sapiens
  misc_RNA (1)...(19): siRNA sense strand
caagugaaggugucaguaa

SEQ ID NO: 1647398 - RNA, 19 nt, Homo sapiens
  misc_RNA (1)...(19): siRNA sense strand
caaaucggguagauaaagu

SEQ ID NO: 1647399 - RNA, 19 nt, Homo sapiens
  misc_RNA (1)...(19): siRNA sense strand
gagauacugauacuuguuu

SEQ ID NO: 1647400 - RNA, 19 nt, Homo sapiens
  misc_RNA (1)...(19): siRNA sense strand
cagaauggaugggucauau

SEQ ID NO: 1647401 - RNA, 19 nt, Homo sapiens
  misc_RNA (1)...(19): siRNA sense strand
acaaggaagaucuccauua

SEQ ID NO: 1647402 - RNA, 19 nt, Homo sapiens
  misc_RNA (1)...(19): siRNA sense strand
ucacuuuauuccagcuuua

SEQ ID NO: 1647403 - RNA, 19 nt, Homo sapiens
  misc_RNA (1)...(19): siRNA sense strand
uuacagaauugcugggaaa

SEQ ID NO: 1647404 - RNA, 19 nt, Homo sapiens
  misc_RNA (1)...(19): siRNA sense strand
aaaggaaagugcaauccaa

SEQ ID NO: 1647405 - RNA, 19 nt, Homo sapiens
  misc_RNA (1)...(19): siRNA sense strand
aagcaagguuuccuaaaug

SEQ ID NO: 1647406 - RNA, 19 nt, Homo sapiens
  misc_RNA (1)...(19): siRNA sense strand
ugaggccacucgcauauug

SEQ ID NO: 1647407 - RNA, 19 nt, Homo sapiens
  misc_RNA (1)...(19): siRNA sense strand
caugcacaaucucacuuua

SEQ ID NO: 1647408 - RNA, 19 nt, Homo sapiens
  misc_RNA (1)...(19): siRNA sense strand
agagcuaagucauaugaaa

SEQ ID NO: 1647409 - RNA, 19 nt, Homo sapiens
  misc_RNA (1)...(19): siRNA sense strand
gaauacaagaaucucagua

SEQ ID NO: 1647410 - RNA, 19 nt, Homo sapiens
  misc_RNA (1)...(19): siRNA sense strand
caaggcaacagugaaauaa

SEQ ID NO: 1647411 - RNA, 19 nt, Homo sapiens
  misc_RNA (1)...(19): siRNA sense strand
uuacuaagccgucuucuca

SEQ ID NO: 1647412 - RNA, 19 nt, Homo sapiens
  misc_RNA (1)...(19): siRNA sense strand
guagaaaccaccaaaccaa

SEQ ID NO: 1647413 - RNA, 19 nt, Homo sapiens
  misc_RNA (1)...(19): siRNA sense strand
gccuucaacucaaaccaua

SEQ ID NO: 1647414 - RNA, 19 nt, Homo sapiens
  misc_RNA (1)...(19): siRNA sense strand
caagaaacucagcaauauu

SEQ ID NO: 1647415 - RNA, 19 nt, Homo sapiens
  misc_RNA (1)...(19): siRNA sense strand
ucaaggcaacagugaaaua

SEQ ID NO: 1647416 - RNA, 19 nt, Homo sapiens
  misc_RNA (1)...(19): siRNA sense strand
acaaaucgcauacuucaug

SEQ ID NO: 1647417 - RNA, 19 nt, Homo sapiens
  misc_RNA (1)...(19): siRNA sense strand
cccacuagcuauucuuauu

SEQ ID NO: 1647418 - RNA, 19 nt, Homo sapiens
  misc_RNA (1)...(19): siRNA sense strand
acacaaggcauauuggauu

SEQ ID NO: 1647419 - RNA, 19 nt, Homo sapiens
  misc_RNA (1)...(19): siRNA sense strand
ugaauugacuaaucuggau

SEQ ID NO: 1647420 - RNA, 19 nt, Homo sapiens
  misc_RNA (1)...(19): siRNA sense strand
ccagaaacggauagacaua

SEQ ID NO: 1647421 - RNA, 19 nt, Homo sapiens
  misc_RNA (1)...(19): siRNA sense strand
aauguuagcccuagagaaa

SEQ ID NO: 1647422 - RNA, 19 nt, Homo sapiens
  misc_RNA (1)...(19): siRNA sense strand
gaagaugggcagagaagca

SEQ ID NO: 1647423 - RNA, 19 nt, Homo sapiens
  misc_RNA (1)...(19): siRNA sense strand
gcuuuacucaucagucuua

SEQ ID NO: 1647424 - RNA, 19 nt, Homo sapiens
  misc_RNA (1)...(19): siRNA sense strand
gcagauaauggaaggaaug

SEQ ID NO: 1647425 - RNA, 19 nt, Homo sapiens
  misc_RNA (1)...(19): siRNA sense strand
uaagccgucuucucaguga

SEQ ID NO: 1647426 - RNA, 19 nt, Homo sapiens
  misc_RNA (1)...(19): siRNA sense strand
ucuaggagcuccagacuac

SEQ ID NO: 1647427 - RNA, 19 nt, Homo sapiens
  misc_RNA (1)...(19): siRNA sense strand
ugaaucaggucagacagaa

SEQ ID NO: 1647428 - RNA, 19 nt, Homo sapiens
  misc_RNA (1)...(19): siRNA sense strand
gauauuaugcgagucugua

SEQ ID NO: 1647429 - RNA, 19 nt, Homo sapiens
  misc_RNA (1)...(19): siRNA sense strand
caugagcagugucacagaa

SEQ ID NO: 1647430 - RNA, 19 nt, Homo sapiens
  misc_RNA (1)...(19): siRNA sense strand
cagcgcauguucuuacaga

SEQ ID NO: 1647431 - RNA, 19 nt, Homo sapiens
  misc_RNA (1)...(19): siRNA sense strand
gagcuaagucauaugaaau

SEQ ID NO: 1647432 - RNA, 19 nt, Homo sapiens
  misc_RNA (1)...(19): siRNA sense strand
uaguacagauucuccuaaa

SEQ ID NO: 1647433 - RNA, 19 nt, Homo sapiens
  misc_RNA (1)...(19): siRNA sense strand
ugcacaaucucacuuuauu

SEQ ID NO: 1647434 - RNA, 19 nt, Homo sapiens
  misc_RNA (1)...(19): siRNA sense strand
gugaaggugucaguaaaga

SEQ ID NO: 1647435 - RNA, 19 nt, Homo sapiens
  misc_RNA (1)...(19): siRNA sense strand
acaagaaucucaguacaag

SEQ ID NO: 1647436 - RNA, 19 nt, Homo sapiens
  misc_RNA (1)...(19): siRNA sense strand
aggacaugcugaaauagua

SEQ ID NO: 1647437 - RNA, 19 nt, Homo sapiens
  misc_RNA (1)...(19): siRNA sense strand
ucagucaaccaguuagaua

SEQ ID NO: 1647438 - RNA, 19 nt, Homo sapiens
  misc_RNA (1)...(19): siRNA sense strand
ucggguagauaaaguggua

SEQ ID NO: 1647439 - RNA, 19 nt, Homo sapiens
  misc_RNA (1)...(19): siRNA sense strand
gaaaacgaguuguacuaau

SEQ ID NO: 1647440 - RNA, 19 nt, Homo sapiens
  misc_RNA (1)...(19): siRNA sense strand
gggagauacugauacuugu

SEQ ID NO: 1647441 - RNA, 19 nt, Homo sapiens
  misc_RNA (1)...(19): siRNA sense strand
acucaucagucuuaaguau

SEQ ID NO: 1647442 - RNA, 19 nt, Homo sapiens
  misc_RNA (1)...(19): siRNA sense strand
ggaauacagagcuaaguca

SEQ ID NO: 1647443 - RNA, 19 nt, Homo sapiens
  misc_RNA (1)...(19): siRNA sense strand
aagaagagaugugagacuu

SEQ ID NO: 1647444 - RNA, 19 nt, Homo sapiens
  misc_RNA (1)...(19): siRNA sense strand
gaaauacuugcugaauuga

SEQ ID NO: 1647445 - RNA, 19 nt, Homo sapiens
  misc_RNA (1)...(19): siRNA sense strand
guucgaauauacagaaugg

SEQ ID NO: 1647446 - RNA, 19 nt, Homo sapiens
  misc_RNA (1)...(19): siRNA sense strand
gaagcuaaauggacaguua

SEQ ID NO: 1647447 - RNA, 19 nt, Homo sapiens
  misc_RNA (1)...(19): siRNA sense strand
caaggaagaucuccauuaa

SEQ ID NO: 1647448 - RNA, 19 nt, Homo sapiens
  misc_RNA (1)...(19): siRNA sense strand
ggaagaagcugcaaaauug

SEQ ID NO: 1647449 - RNA, 19 nt, Homo sapiens
  misc_RNA (1)...(19): siRNA sense strand
ggacagauauuuacaaagg

SEQ ID NO: 1647450 - RNA, 19 nt, Homo sapiens
  misc_RNA (1)...(19): siRNA sense strand
ccaaauaccuaaacaggaa

SEQ ID NO: 1647451 - RNA, 19 nt, Homo sapiens
  misc_RNA (1)...(19): siRNA sense strand
cauauuggauuacguagua

SEQ ID NO: 1647452 - RNA, 19 nt, Homo sapiens
  misc_RNA (1)...(19): siRNA sense strand
gaaggaagcaauuaacaaa

SEQ ID NO: 1647453 - RNA, 19 nt, Homo sapiens
  misc_RNA (1)...(19): siRNA sense strand
gggcagagaagcaucauua

SEQ ID NO: 1647454 - RNA, 19 nt, Homo sapiens
  misc_RNA (1)...(19): siRNA sense strand
cagagaagcaucauuauuu

SEQ ID NO: 1647455 - RNA, 19 nt, Homo sapiens
  misc_RNA (1)...(19): siRNA sense strand
ucaagaaacucagcaauau

SEQ ID NO: 1647456 - RNA, 19 nt, Homo sapiens
  misc_RNA (1)...(19): siRNA sense strand
agaaauacuugcugaauug

SEQ ID NO: 1647457 - RNA, 19 nt, Homo sapiens
  misc_RNA (1)...(19): siRNA sense strand
caagcaagguuuccuaaau

SEQ ID NO: 1647458 - RNA, 19 nt, Homo sapiens
  misc_RNA (1)...(19): siRNA sense strand
caacucaaaccauaucaua

SEQ ID NO: 1647459 - RNA, 19 nt, Homo sapiens
  misc_RNA (1)...(19): siRNA sense strand
caucguaccuguuaccaaa

SEQ ID NO: 1647460 - RNA, 19 nt, Homo sapiens
  misc_RNA (1)...(19): siRNA sense strand
ugaaauaacacaaggcaua

SEQ ID NO: 1647461 - RNA, 19 nt, Homo sapiens
  misc_RNA (1)...(19): siRNA sense strand
cauaaacccuugcaacaug

SEQ ID NO: 1647462 - RNA, 19 nt, Homo sapiens
  misc_RNA (1)...(19): siRNA sense strand
ggacaaaucgcauacuuca

SEQ ID NO: 1647463 - RNA, 19 nt, Homo sapiens
  misc_RNA (1)...(19): siRNA sense strand
gcaccucacuggacaaauc

SEQ ID NO: 1647464 - RNA, 19 nt, Homo sapiens
  misc_RNA (1)...(19): siRNA sense strand
cagaaauacuugcugaauu

SEQ ID NO: 1647465 - RNA, 19 nt, Homo sapiens
  misc_RNA (1)...(19): siRNA sense strand
gaaaccaccaaaccaauuu

SEQ ID NO: 1647466 - RNA, 19 nt, Homo sapiens
  misc_RNA (1)...(19): siRNA sense strand
gaaggugucaguaaagaaa

SEQ ID NO: 1647467 - RNA, 19 nt, Homo sapiens
  misc_RNA (1)...(19): siRNA sense strand
gcaugaaguucccauugaa

SEQ ID NO: 1647468 - RNA, 19 nt, Homo sapiens
  misc_RNA (1)...(19): siRNA sense strand
gacaguggguagaugauuu

SEQ ID NO: 1647469 - RNA, 19 nt, Homo sapiens
  misc_RNA (1)...(19): siRNA sense strand
caucaguugucaaagauaa

SEQ ID NO: 1647470 - RNA, 19 nt, Homo sapiens
  misc_RNA (1)...(19): siRNA sense strand
gaugaagccagauauaauu

SEQ ID NO: 1647471 - RNA, 19 nt, Homo sapiens
  misc_RNA (1)...(19): siRNA sense strand
aggaagaucuccauuaaau

SEQ ID NO: 1647472 - RNA, 19 nt, Homo sapiens
  misc_RNA (1)...(19): siRNA sense strand
agaaacggauagacauaua

SEQ ID NO: 1647473 - RNA, 19 nt, Homo sapiens
  misc_RNA (1)...(19): siRNA sense strand
cacaaggcauauuggauua

SEQ ID NO: 1647474 - RNA, 19 nt, Homo sapiens
  misc_RNA (1)...(19): siRNA sense strand
gagagaagaugggcagaga

SEQ ID NO: 1647475 - RNA, 19 nt, Homo sapiens
  misc_RNA (1)...(19): siRNA sense strand
gcagagaagcaucauuauu

SEQ ID NO: 1647476 - RNA, 19 nt, Homo sapiens
  misc_RNA (1)...(19): siRNA sense strand
gaaugcgucucucucaaga

SEQ ID NO: 1647477 - RNA, 19 nt, Homo sapiens
  misc_RNA (1)...(19): siRNA sense strand
ggaagaucuccauuaaaua

SEQ ID NO: 1647478 - RNA, 19 nt, Homo sapiens
  misc_RNA (1)...(19): siRNA sense strand
gcacuagaaauaaagagua

SEQ ID NO: 1647479 - RNA, 19 nt, Homo sapiens
  misc_RNA (1)...(19): siRNA sense strand
gaacgacaguggguagaug

SEQ ID NO: 1647480 - RNA, 19 nt, Homo sapiens
  misc_RNA (1)...(19): siRNA sense strand
gcaauuaacaaaccauaug

SEQ ID NO: 1647481 - RNA, 19 nt, Homo sapiens
  misc_RNA (1)...(19): siRNA sense strand
ugucauaaauccugcauau

SEQ ID NO: 1647482 - RNA, 19 nt, Homo sapiens
  misc_RNA (1)...(19): siRNA sense strand
caggacagauauuuacaaa

SEQ ID NO: 1647483 - RNA, 19 nt, Homo sapiens
  misc_RNA (1)...(19): siRNA sense strand
gaaacggauagacauauaa

SEQ ID NO: 1647484 - RNA, 19 nt, Homo sapiens
  misc_RNA (1)...(19): siRNA sense strand
aggaggacaugcugaaaua

SEQ ID NO: 1647485 - RNA, 19 nt, Homo sapiens
  misc_RNA (1)...(19): siRNA sense strand
acagaaaacucacuacaua

SEQ ID NO: 1647486 - RNA, 19 nt, Homo sapiens
  misc_RNA (1)...(19): siRNA sense strand
gaauugaagcauggaaaua

SEQ ID NO: 1647487 - RNA, 19 nt, Homo sapiens
  misc_RNA (1)...(19): siRNA sense strand
gaucuucaguauacaaauc

SEQ ID NO: 1647488 - RNA, 19 nt, Homo sapiens
  misc_RNA (1)...(19): siRNA sense strand
augcuaagcugauaacauu

SEQ ID NO: 1647489 - RNA, 19 nt, Homo sapiens
  misc_RNA (1)...(19): siRNA sense strand
ggucauaucguucuguuga

SEQ ID NO: 1647490 - RNA, 19 nt, Homo sapiens
  misc_RNA (1)...(19): siRNA sense strand
gaaauaacacaaggcauau

SEQ ID NO: 1647491 - RNA, 19 nt, Homo sapiens
  misc_RNA (1)...(19): siRNA sense strand
cauggaaacuaaggcuuua

SEQ ID NO: 1647492 - RNA, 19 nt, Homo sapiens
  misc_RNA (1)...(19): siRNA sense strand
caaaucgcauacuucauga

SEQ ID NO: 1647493 - RNA, 19 nt, Homo sapiens
  misc_RNA (1)...(19): siRNA sense strand
auacagagcuaagucauau

SEQ ID NO: 1647494 - RNA, 19 nt, Homo sapiens
  misc_RNA (1)...(19): siRNA sense strand
auacaaaucggguagauaa

SEQ ID NO: 1647495 - RNA, 19 nt, Homo sapiens
  misc_RNA (1)...(19): siRNA sense strand
gaaacuaaggcuuuacuca

SEQ ID NO: 1647496 - RNA, 19 nt, Homo sapiens
  misc_RNA (1)...(19): siRNA sense strand
guucgugacuggccagaaa

SEQ ID NO: 1647497 - RNA, 19 nt, Homo sapiens
  misc_RNA (1)...(19): siRNA sense strand
caagugaaggugucaguaa

SEQ ID NO: 1647498 - RNA, 19 nt, Homo sapiens
  misc_RNA (1)...(19): siRNA sense strand
caaaucggguagauaaagu

SEQ ID NO: 1647499 - RNA, 19 nt, Homo sapiens
  misc_RNA (1)...(19): siRNA sense strand
gagauacugauacuuguuu

SEQ ID NO: 1647500 - RNA, 19 nt, Homo sapiens
  misc_RNA (1)...(19): siRNA sense strand
cagaauggaugggucauau

SEQ ID NO: 1647501 - RNA, 19 nt, Homo sapiens
  misc_RNA (1)...(19): siRNA sense strand
acaaggaagaucuccauua

SEQ ID NO: 1647502 - RNA, 19 nt, Homo sapiens
  misc_RNA (1)...(19): siRNA sense strand
ucacuuuauuccagcuuua

SEQ ID NO: 1647503 - RNA, 19 nt, Homo sapiens
  misc_RNA (1)...(19): siRNA sense strand
uuacagaauugcugggaaa

SEQ ID NO: 1647504 - RNA, 19 nt, Homo sapiens
  misc_RNA (1)...(19): siRNA sense strand
aaaggaaagugcaauccaa

SEQ ID NO: 1647505 - RNA, 19 nt, Homo sapiens
  misc_RNA (1)...(19): siRNA sense strand
aagcaagguuuccuaaaug

SEQ ID NO: 1647506 - RNA, 19 nt, Homo sapiens
  misc_RNA (1)...(19): siRNA sense strand
ugaggccacucgcauauug

SEQ ID NO: 1647507 - RNA, 19 nt, Homo sapiens
  misc_RNA (1)...(19): siRNA sense strand
caugcacaaucucacuuua

SEQ ID NO: 1647508 - RNA, 19 nt, Homo sapiens
  misc_RNA (1)...(19): siRNA sense strand
agagcuaagucauaugaaa

SEQ ID NO: 1647509 - RNA, 19 nt, Homo sapiens
  misc_RNA (1)...(19): siRNA sense strand
gaauacaagaaucucagua

SEQ ID NO: 1647510 - RNA, 19 nt, Homo sapiens
  misc_RNA (1)...(19): siRNA sense strand
caaggcaacagugaaauaa

SEQ ID NO: 1647511 - RNA, 19 nt, Homo sapiens
  misc_RNA (1)...(19): siRNA sense strand
uuacuaagccgucuucuca

SEQ ID NO: 1647512 - RNA, 19 nt, Homo sapiens
  misc_RNA (1)...(19): siRNA sense strand
guagaaaccaccaaaccaa

SEQ ID NO: 1647513 - RNA, 19 nt, Homo sapiens
  misc_RNA (1)...(19): siRNA sense strand
gccuucaacucaaaccaua

SEQ ID NO: 1647514 - RNA, 19 nt, Homo sapiens
  misc_RNA (1)...(19): siRNA sense strand
caagaaacucagcaauauu

SEQ ID NO: 1647515 - RNA, 19 nt, Homo sapiens
  misc_RNA (1)...(19): siRNA sense strand
ucaaggcaacagugaaaua

SEQ ID NO: 1647516 - RNA, 19 nt, Homo sapiens
  misc_RNA (1)...(19): siRNA sense strand
acaaaucgcauacuucaug

SEQ ID NO: 1647517 - RNA, 19 nt, Homo sapiens
  misc_RNA (1)...(19): siRNA sense strand
cccacuagcuauucuuauu

SEQ ID NO: 1647518 - RNA, 19 nt, Homo sapiens
  misc_RNA (1)...(19): siRNA sense strand
acacaaggcauauuggauu

SEQ ID NO: 1647519 - RNA, 19 nt, Homo sapiens
  misc_RNA (1)...(19): siRNA sense strand
ugaauugacuaaucuggau

SEQ ID NO: 1647520 - RNA, 19 nt, Homo sapiens
  misc_RNA (1)...(19): siRNA sense strand
ccagaaacggauagacaua

SEQ ID NO: 1647521 - RNA, 19 nt, Homo sapiens
  misc_RNA (1)...(19): siRNA sense strand
aauguuagcccuagagaaa

SEQ ID NO: 1647522 - RNA, 19 nt, Homo sapiens
  misc_RNA (1)...(19): siRNA sense strand
gaagaugggcagagaagca

SEQ ID NO: 1647523 - RNA, 19 nt, Homo sapiens
  misc_RNA (1)...(19): siRNA sense strand
gcuuuacucaucagucuua

SEQ ID NO: 1647524 - RNA, 19 nt, Homo sapiens
  misc_RNA (1)...(19): siRNA sense strand
gcagauaauggaaggaaug

SEQ ID NO: 1647525 - RNA, 19 nt, Homo sapiens
  misc_RNA (1)...(19): siRNA sense strand
uaagccgucuucucaguga

SEQ ID NO: 1647526 - RNA, 19 nt, Homo sapiens
  misc_RNA (1)...(19): siRNA sense strand
ucuaggagcuccagacuac

SEQ ID NO: 1647527 - RNA, 19 nt, Homo sapiens
  misc_RNA (1)...(19): siRNA sense strand
ugaaucaggucagacagaa

SEQ ID NO: 1647528 - RNA, 19 nt, Homo sapiens
  misc_RNA (1)...(19): siRNA sense strand
gauauuaugcgagucugua

SEQ ID NO: 1647529 - RNA, 19 nt, Homo sapiens
  misc_RNA (1)...(19): siRNA sense strand
caugagcagugucacagaa

SEQ ID NO: 1647530 - RNA, 19 nt, Homo sapiens
  misc_RNA (1)...(19): siRNA sense strand
cagcgcauguucuuacaga

SEQ ID NO: 1647531 - RNA, 19 nt, Homo sapiens
  misc_RNA (1)...(19): siRNA sense strand
gagcuaagucauaugaaau

SEQ ID NO: 1647532 - RNA, 19 nt, Homo sapiens
  misc_RNA (1)...(19): siRNA sense strand
uaguacagauucuccuaaa

SEQ ID NO: 1647533 - RNA, 19 nt, Homo sapiens
  misc_RNA (1)...(19): siRNA sense strand
ugcacaaucucacuuuauu

SEQ ID NO: 1647534 - RNA, 19 nt, Homo sapiens
  misc_RNA (1)...(19): siRNA sense strand
gugaaggugucaguaaaga

SEQ ID NO: 1647535 - RNA, 19 nt, Homo sapiens
  misc_RNA (1)...(19): siRNA sense strand
acaagaaucucaguacaag

SEQ ID NO: 1647536 - RNA, 19 nt, Homo sapiens
  misc_RNA (1)...(19): siRNA sense strand
aggacaugcugaaauagua

SEQ ID NO: 1647537 - RNA, 19 nt, Homo sapiens
  misc_RNA (1)...(19): siRNA sense strand
ucagucaaccaguuagaua

SEQ ID NO: 1647538 - RNA, 19 nt, Homo sapiens
  misc_RNA (1)...(19): siRNA sense strand
ucggguagauaaaguggua

SEQ ID NO: 1647539 - RNA, 19 nt, Homo sapiens
  misc_RNA (1)...(19): siRNA sense strand
gaaaacgaguuguacuaau

SEQ ID NO: 1647540 - RNA, 19 nt, Homo sapiens
  misc_RNA (1)...(19): siRNA sense strand
gggagauacugauacuugu

SEQ ID NO: 1647541 - RNA, 19 nt, Homo sapiens
  misc_RNA (1)...(19): siRNA sense strand
acucaucagucuuaaguau

SEQ ID NO: 1647542 - RNA, 19 nt, Homo sapiens
  misc_RNA (1)...(19): siRNA sense strand
ggaauacagagcuaaguca

SEQ ID NO: 1647543 - RNA, 19 nt, Homo sapiens
  misc_RNA (1)...(19): siRNA sense strand
aagaagagaugugagacuu

SEQ ID NO: 1647544 - RNA, 19 nt, Homo sapiens
  misc_RNA (1)...(19): siRNA sense strand
gaaauacuugcugaauuga

SEQ ID NO: 1647545 - RNA, 19 nt, Homo sapiens
  misc_RNA (1)...(19): siRNA sense strand
guucgaauauacagaaugg

SEQ ID NO: 1647546 - RNA, 19 nt, Homo sapiens
  misc_RNA (1)...(19): siRNA sense strand
ggagaaccauggaaaucua

SEQ ID NO: 1647547 - RNA, 19 nt, Homo sapiens
  misc_RNA (1)...(19): siRNA sense strand
ggauuuggcuucauuaaca

SEQ ID NO: 1647548 - RNA, 19 nt, Homo sapiens
  misc_RNA (1)...(19): siRNA sense strand
gaaauuggauacacucaca

SEQ ID NO: 1647549 - RNA, 19 nt, Homo sapiens
  misc_RNA (1)...(19): siRNA sense strand
caguaaagcugaaugaaau

SEQ ID NO: 1647550 - RNA, 19 nt, Homo sapiens
  misc_RNA (1)...(19): siRNA sense strand
ugacgaagccuacaagauu

SEQ ID NO: 1647551 - RNA, 19 nt, Homo sapiens
  misc_RNA (1)...(19): siRNA sense strand
gcaaggcugugucagaaga

SEQ ID NO: 1647552 - RNA, 19 nt, Homo sapiens
  misc_RNA (1)...(19): siRNA sense strand
gaacugccguggguugaaa

SEQ ID NO: 1647553 - RNA, 19 nt, Homo sapiens
  misc_RNA (1)...(19): siRNA sense strand
ccauggaaaucuacucuaa

SEQ ID NO: 1647554 - RNA, 19 nt, Homo sapiens
  misc_RNA (1)...(19): siRNA sense strand
ggaacucaaugcuucaaau

SEQ ID NO: 1647555 - RNA, 19 nt, Homo sapiens
  misc_RNA (1)...(19): siRNA sense strand
caacaucuuucgagugugu

SEQ ID NO: 1647556 - RNA, 19 nt, Homo sapiens
  misc_RNA (1)...(19): siRNA sense strand
acucaaagaugccauguug

SEQ ID NO: 1647557 - RNA, 19 nt, Homo sapiens
  misc_RNA (1)...(19): siRNA sense strand
ucaccaggcugaugaaugu

SEQ ID NO: 1647558 - RNA, 19 nt, Homo sapiens
  misc_RNA (1)...(19): siRNA sense strand
ggcaacaucuuucgagugu

SEQ ID NO: 1647559 - RNA, 19 nt, Homo sapiens
  misc_RNA (1)...(19): siRNA sense strand
gaaugaaauugucgggaau

SEQ ID NO: 1647560 - RNA, 19 nt, Homo sapiens
  misc_RNA (1)...(19): siRNA sense strand
gaaauugucgggaaugaag

SEQ ID NO: 1647561 - RNA, 19 nt, Homo sapiens
  misc_RNA (1)...(19): siRNA sense strand
gaagauaucauuggcaaca

SEQ ID NO: 1647562 - RNA, 19 nt, Homo sapiens
  misc_RNA (1)...(19): siRNA sense strand
gaacucaaugcuucaaaug

SEQ ID NO: 1647563 - RNA, 19 nt, Homo sapiens
  misc_RNA (1)...(19): siRNA sense strand
uggauacacucacaugaaa

SEQ ID NO: 1647564 - RNA, 19 nt, Homo sapiens
  misc_RNA (1)...(19): siRNA sense strand
gacgaagccuacaagauuc

SEQ ID NO: 1647565 - RNA, 19 nt, Homo sapiens
  misc_RNA (1)...(19): siRNA sense strand
ccaguaaagcugaaugaaa

SEQ ID NO: 1647566 - RNA, 19 nt, Homo sapiens
  misc_RNA (1)...(19): siRNA sense strand
ugaugaauguuaucgagaa

SEQ ID NO: 1647567 - RNA, 19 nt, Homo sapiens
  misc_RNA (1)...(19): siRNA sense strand
gcuucgcccuugcuuguaa

SEQ ID NO: 1647568 - RNA, 19 nt, Homo sapiens
  misc_RNA (1)...(19): siRNA sense strand
ucaaagaugccauguugga

SEQ ID NO: 1647569 - RNA, 19 nt, Homo sapiens
  misc_RNA (1)...(19): siRNA sense strand
ugaauguuaucgagaagga

SEQ ID NO: 1647570 - RNA, 19 nt, Homo sapiens
  misc_RNA (1)...(19): siRNA sense strand
caaggaaauuggauacacu

SEQ ID NO: 1647571 - RNA, 19 nt, Homo sapiens
  misc_RNA (1)...(19): siRNA sense strand
uggcaaggcugugucagaa

SEQ ID NO: 1647572 - RNA, 19 nt, Homo sapiens
  misc_RNA (1)...(19): siRNA sense strand
ggcaagaccacaagcauuc

SEQ ID NO: 1647573 - RNA, 19 nt, Homo sapiens
  misc_RNA (1)...(19): siRNA sense strand
gaggagaaccauggaaauc

SEQ ID NO: 1647574 - RNA, 19 nt, Homo sapiens
  misc_RNA (1)...(19): siRNA sense strand
guaaagcugaaugaaauug

SEQ ID NO: 1647575 - RNA, 19 nt, Homo sapiens
  misc_RNA (1)...(19): siRNA sense strand
guguaaaacuuuccaaaug

SEQ ID NO: 1647576 - RNA, 19 nt, Homo sapiens
  misc_RNA (1)...(19): siRNA sense strand
gaaggaaaugugcccaaca

SEQ ID NO: 1647577 - RNA, 19 nt, Homo sapiens
  misc_RNA (1)...(19): siRNA sense strand
uaucauuggcaacaucuuu

SEQ ID NO: 1647578 - RNA, 19 nt, Homo sapiens
  misc_RNA (1)...(19): siRNA sense strand
gaugaauguuaucgagaag

SEQ ID NO: 1647579 - RNA, 19 nt, Homo sapiens
  misc_RNA (1)...(19): siRNA sense strand
guaaugcuucggauaagau

SEQ ID NO: 1647580 - RNA, 19 nt, Homo sapiens
  misc_RNA (1)...(19): siRNA sense strand
gaguuuaucaaggaaauug

SEQ ID NO: 1647581 - RNA, 19 nt, Homo sapiens
  misc_RNA (1)...(19): siRNA sense strand
ccaggcugaugaauguuau

SEQ ID NO: 1647582 - RNA, 19 nt, Homo sapiens
  misc_RNA (1)...(19): siRNA sense strand
caaagaugccauguuggaa

SEQ ID NO: 1647583 - RNA, 19 nt, Homo sapiens
  misc_RNA (1)...(19): siRNA sense strand
gcaguccuccgguacacaa

SEQ ID NO: 1647584 - RNA, 19 nt, Homo sapiens
  misc_RNA (1)...(19): siRNA sense strand
gaaaucuacucuaaaacca

SEQ ID NO: 1647585 - RNA, 19 nt, Homo sapiens
  misc_RNA (1)...(19): siRNA sense strand
gcuacucaccagaagauau

SEQ ID NO: 1647586 - RNA, 19 nt, Homo sapiens
  misc_RNA (1)...(19): siRNA sense strand
cuuguaaugcuucggauaa

SEQ ID NO: 1647587 - RNA, 19 nt, Homo sapiens
  misc_RNA (1)...(19): siRNA sense strand
cauggaaaucuacucuaaa

SEQ ID NO: 1647588 - RNA, 19 nt, Homo sapiens
  misc_RNA (1)...(19): siRNA sense strand
gggcuacucaccagaagau

SEQ ID NO: 1647589 - RNA, 19 nt, Homo sapiens
  misc_RNA (1)...(19): siRNA sense strand
uguaaugcuucggauaaga

SEQ ID NO: 1647590 - RNA, 19 nt, Homo sapiens
  misc_RNA (1)...(19): siRNA sense strand
gaugccauguuggaacuca

SEQ ID NO: 1647591 - RNA, 19 nt, Homo sapiens
  misc_RNA (1)...(19): siRNA sense strand
gagcaggcuagaggucuuu

SEQ ID NO: 1647592 - RNA, 19 nt, Homo sapiens
  misc_RNA (1)...(19): siRNA sense strand
gauccagcacugugugaau

SEQ ID NO: 1647593 - RNA, 19 nt, Homo sapiens
  misc_RNA (1)...(19): siRNA sense strand
ggcaggcgcugaacaaccu

SEQ ID NO: 1647594 - RNA, 19 nt, Homo sapiens
  misc_RNA (1)...(19): siRNA sense strand
aaagcugaaugaaauuguc

SEQ ID NO: 1647595 - RNA, 19 nt, Homo sapiens
  misc_RNA (1)...(19): siRNA sense strand
gcccuugcuuguaaugcuu

SEQ ID NO: 1647596 - RNA, 19 nt, Homo sapiens
  misc_RNA (1)...(19): siRNA sense strand
ucaaggaaauuggauacac

SEQ ID NO: 1647597 - RNA, 19 nt, Homo sapiens
  misc_RNA (1)...(19): siRNA sense strand
cucaggauuuggcuucauu

SEQ ID NO: 1647598 - RNA, 19 nt, Homo sapiens
  misc_RNA (1)...(19): siRNA sense strand
caggauuuggcuucauuaa

SEQ ID NO: 1647599 - RNA, 19 nt, Homo sapiens
  misc_RNA (1)...(19): siRNA sense strand
gggcccagcacucaaagau

SEQ ID NO: 1647600 - RNA, 19 nt, Homo sapiens
  misc_RNA (1)...(19): siRNA sense strand
ggccaguaaagcugaauga

SEQ ID NO: 1647601 - RNA, 19 nt, Homo sapiens
  misc_RNA (1)...(19): siRNA sense strand
cggcaagaccacaagcauu

SEQ ID NO: 1647602 - RNA, 19 nt, Homo sapiens
  misc_RNA (1)...(19): siRNA sense strand
ugaggcaggcgcugaacaa

SEQ ID NO: 1647603 - RNA, 19 nt, Homo sapiens
  misc_RNA (1)...(19): siRNA sense strand
gaaccggcaagaccacaag

SEQ ID NO: 1647604 - RNA, 19 nt, Homo sapiens
  misc_RNA (1)...(19): siRNA sense strand
gaucaucgagcccauucag

SEQ ID NO: 1647605 - RNA, 19 nt, Homo sapiens
  misc_RNA (1)...(19): siRNA sense strand
ugagcaggcuagaggucuu

SEQ ID NO: 1647606 - RNA, 19 nt, Homo sapiens
  misc_RNA (1)...(19): siRNA sense strand
uggaguuuaucaaggaaau

SEQ ID NO: 1647607 - RNA, 19 nt, Homo sapiens
  misc_RNA (1)...(19): siRNA sense strand
acucaaugcuucaaaugac

SEQ ID NO: 1647608 - RNA, 19 nt, Homo sapiens
  misc_RNA (1)...(19): siRNA sense strand
agauaucauuggcaacauc

SEQ ID NO: 1647609 - RNA, 19 nt, Homo sapiens
  misc_RNA (1)...(19): siRNA sense strand
cuacucaccagaagauauc

SEQ ID NO: 1647610 - RNA, 19 nt, Homo sapiens
  misc_RNA (1)...(19): siRNA sense strand
ggagaugauccagcacugu

SEQ ID NO: 1647611 - RNA, 19 nt, Homo sapiens
  misc_RNA (1)...(19): siRNA sense strand
gauuuggcuucauuaacag

SEQ ID NO: 1647612 - RNA, 19 nt, Homo sapiens
  misc_RNA (1)...(19): siRNA sense strand
ucaggauuuggcuucauua

SEQ ID NO: 1647613 - RNA, 19 nt, Homo sapiens
  misc_RNA (1)...(19): siRNA sense strand
gcuuguaaugcuucggaua

SEQ ID NO: 1647614 - RNA, 19 nt, Homo sapiens
  misc_RNA (1)...(19): siRNA sense strand
gugcccaacaucaucauug

SEQ ID NO: 1647615 - RNA, 19 nt, Homo sapiens
  misc_RNA (1)...(19): siRNA sense strand
cuuuccaaauggcagaaua

SEQ ID NO: 1647616 - RNA, 19 nt, Homo sapiens
  misc_RNA (1)...(19): siRNA sense strand
ugaggagaaccauggaaau

SEQ ID NO: 1647617 - RNA, 19 nt, Homo sapiens
  misc_RNA (1)...(19): siRNA sense strand
ggaaccggcaagaccacaa

SEQ ID NO: 1647618 - RNA, 19 nt, Homo sapiens
  misc_RNA (1)...(19): siRNA sense strand
ggaguuuaucaaggaaauu

SEQ ID NO: 1647619 - RNA, 19 nt, Homo sapiens
  misc_RNA (1)...(19): siRNA sense strand
ggagaaccauggaaaucua

SEQ ID NO: 1647620 - RNA, 19 nt, Homo sapiens
  misc_RNA (1)...(19): siRNA sense strand
ggauuuggcuucauuaaca

SEQ ID NO: 1647621 - RNA, 19 nt, Homo sapiens
  misc_RNA (1)...(19): siRNA sense strand
gaaauuggauacacucaca

SEQ ID NO: 1647622 - RNA, 19 nt, Homo sapiens
  misc_RNA (1)...(19): siRNA sense strand
caguaaagcugaaugaaau

SEQ ID NO: 1647623 - RNA, 19 nt, Homo sapiens
  misc_RNA (1)...(19): siRNA sense strand
ugacgaagccuacaagauu

SEQ ID NO: 1647624 - RNA, 19 nt, Homo sapiens
  misc_RNA (1)...(19): siRNA sense strand
gcaaggcugugucagaaga

SEQ ID NO: 1647625 - RNA, 19 nt, Homo sapiens
  misc_RNA (1)...(19): siRNA sense strand
gaacugccguggguugaaa

SEQ ID NO: 1647626 - RNA, 19 nt, Homo sapiens
  misc_RNA (1)...(19): siRNA sense strand
ccauggaaaucuacucuaa

SEQ ID NO: 1647627 - RNA, 19 nt, Homo sapiens
  misc_RNA (1)...(19): siRNA sense strand
caacaucuuucgagugugu

SEQ ID NO: 1647628 - RNA, 19 nt, Homo sapiens
  misc_RNA (1)...(19): siRNA sense strand
acucaaagaugccauguug

SEQ ID NO: 1647629 - RNA, 19 nt, Homo sapiens
  misc_RNA (1)...(19): siRNA sense strand
ucaccaggcugaugaaugu

SEQ ID NO: 1647630 - RNA, 19 nt, Homo sapiens
  misc_RNA (1)...(19): siRNA sense strand
ggcaacaucuuucgagugu

SEQ ID NO: 1647631 - RNA, 19 nt, Homo sapiens
  misc_RNA (1)...(19): siRNA sense strand
gaaugaaauugucgggaau

SEQ ID NO: 1647632 - RNA, 19 nt, Homo sapiens
  misc_RNA (1)...(19): siRNA sense strand
gaaauugucgggaaugaag

SEQ ID NO: 1647633 - RNA, 19 nt, Homo sapiens
  misc_RNA (1)...(19): siRNA sense strand
gaagauaucauuggcaaca

SEQ ID NO: 1647634 - RNA, 19 nt, Homo sapiens
  misc_RNA (1)...(19): siRNA sense strand
uggauacacucacaugaaa

SEQ ID NO: 1647635 - RNA, 19 nt, Homo sapiens
  misc_RNA (1)...(19): siRNA sense strand
ccaguaaagcugaaugaaa

SEQ ID NO: 1647636 - RNA, 19 nt, Homo sapiens
  misc_RNA (1)...(19): siRNA sense strand
gacgaagccuacaagauuc

SEQ ID NO: 1647637 - RNA, 19 nt, Homo sapiens
  misc_RNA (1)...(19): siRNA sense strand
ugaugaauguuaucgagaa

SEQ ID NO: 1647638 - RNA, 19 nt, Homo sapiens
  misc_RNA (1)...(19): siRNA sense strand
gcuucgcccuugcuuguaa

SEQ ID NO: 1647639 - RNA, 19 nt, Homo sapiens
  misc_RNA (1)...(19): siRNA sense strand
ucaaagaugccauguugga

SEQ ID NO: 1647640 - RNA, 19 nt, Homo sapiens
  misc_RNA (1)...(19): siRNA sense strand
ugaauguuaucgagaagga

SEQ ID NO: 1647641 - RNA, 19 nt, Homo sapiens
  misc_RNA (1)...(19): siRNA sense strand
caaggaaauuggauacacu

SEQ ID NO: 1647642 - RNA, 19 nt, Homo sapiens
  misc_RNA (1)...(19): siRNA sense strand
uggcaaggcugugucagaa

SEQ ID NO: 1647643 - RNA, 19 nt, Homo sapiens
  misc_RNA (1)...(19): siRNA sense strand
ggcaagaccacaagcauuc

SEQ ID NO: 1647644 - RNA, 19 nt, Homo sapiens
  misc_RNA (1)...(19): siRNA sense strand
gaggagaaccauggaaauc

SEQ ID NO: 1647645 - RNA, 19 nt, Homo sapiens
  misc_RNA (1)...(19): siRNA sense strand
guguaaaacuuuccaaaug

SEQ ID NO: 1647646 - RNA, 19 nt, Homo sapiens
  misc_RNA (1)...(19): siRNA sense strand
guaaagcugaaugaaauug

SEQ ID NO: 1647647 - RNA, 19 nt, Homo sapiens
  misc_RNA (1)...(19): siRNA sense strand
gaaggaaaugugcccaaca

SEQ ID NO: 1647648 - RNA, 19 nt, Homo sapiens
  misc_RNA (1)...(19): siRNA sense strand
uaucauuggcaacaucuuu

SEQ ID NO: 1647649 - RNA, 19 nt, Homo sapiens
  misc_RNA (1)...(19): siRNA sense strand
gaugaauguuaucgagaag

SEQ ID NO: 1647650 - RNA, 19 nt, Homo sapiens
  misc_RNA (1)...(19): siRNA sense strand
guaaugcuucggauaagau

SEQ ID NO: 1647651 - RNA, 19 nt, Homo sapiens
  misc_RNA (1)...(19): siRNA sense strand
gaguuuaucaaggaaauug

SEQ ID NO: 1647652 - RNA, 19 nt, Homo sapiens
  misc_RNA (1)...(19): siRNA sense strand
ccaggcugaugaauguuau

SEQ ID NO: 1647653 - RNA, 19 nt, Homo sapiens
  misc_RNA (1)...(19): siRNA sense strand
gcaguccuccgguacacaa

SEQ ID NO: 1647654 - RNA, 19 nt, Homo sapiens
  misc_RNA (1)...(19): siRNA sense strand
gaaaucuacucuaaaacca

SEQ ID NO: 1647655 - RNA, 19 nt, Homo sapiens
  misc_RNA (1)...(19): siRNA sense strand
gcuacucaccagaagauau

SEQ ID NO: 1647656 - RNA, 19 nt, Homo sapiens
  misc_RNA (1)...(19): siRNA sense strand
cuuguaaugcuucggauaa

SEQ ID NO: 1647657 - RNA, 19 nt, Homo sapiens
  misc_RNA (1)...(19): siRNA sense strand
cauggaaaucuacucuaaa

SEQ ID NO: 1647658 - RNA, 19 nt, Homo sapiens
  misc_RNA (1)...(19): siRNA sense strand
gggcuacucaccagaagau

SEQ ID NO: 1647659 - RNA, 19 nt, Homo sapiens
  misc_RNA (1)...(19): siRNA sense strand
uguaaugcuucggauaaga

SEQ ID NO: 1647660 - RNA, 19 nt, Homo sapiens
  misc_RNA (1)...(19): siRNA sense strand
aaagcugaaugaaauuguc

SEQ ID NO: 1647661 - RNA, 19 nt, Homo sapiens
  misc_RNA (1)...(19): siRNA sense strand
gagcaggcuagaggucuuu

SEQ ID NO: 1647662 - RNA, 19 nt, Homo sapiens
  misc_RNA (1)...(19): siRNA sense strand
gauccagcacugugugaau

SEQ ID NO: 1647663 - RNA, 19 nt, Homo sapiens
  misc_RNA (1)...(19): siRNA sense strand
ggcaggcgcugaacaaccu

SEQ ID NO: 1647664 - RNA, 19 nt, Homo sapiens
  misc_RNA (1)...(19): siRNA sense strand
gcccuugcuuguaaugcuu

SEQ ID NO: 1647665 - RNA, 19 nt, Homo sapiens
  misc_RNA (1)...(19): siRNA sense strand
ucaaggaaauuggauacac

SEQ ID NO: 1647666 - RNA, 19 nt, Homo sapiens
  misc_RNA (1)...(19): siRNA sense strand
cucaggauuuggcuucauu

SEQ ID NO: 1647667 - RNA, 19 nt, Homo sapiens
  misc_RNA (1)...(19): siRNA sense strand
caggauuuggcuucauuaa

SEQ ID NO: 1647668 - RNA, 19 nt, Homo sapiens
  misc_RNA (1)...(19): siRNA sense strand
gggcccagcacucaaagau

SEQ ID NO: 1647669 - RNA, 19 nt, Homo sapiens
  misc_RNA (1)...(19): siRNA sense strand
ugaggcaggcgcugaacaa

SEQ ID NO: 1647670 - RNA, 19 nt, Homo sapiens
  misc_RNA (1)...(19): siRNA sense strand
ggccaguaaagcugaauga

SEQ ID NO: 1647671 - RNA, 19 nt, Homo sapiens
  misc_RNA (1)...(19): siRNA sense strand
cggcaagaccacaagcauu

SEQ ID NO: 1647672 - RNA, 19 nt, Homo sapiens
  misc_RNA (1)...(19): siRNA sense strand
gaaccggcaagaccacaag

SEQ ID NO: 1647673 - RNA, 19 nt, Homo sapiens
  misc_RNA (1)...(19): siRNA sense strand
ugagcaggcuagaggucuu

SEQ ID NO: 1647674 - RNA, 19 nt, Homo sapiens
  misc_RNA (1)...(19): siRNA sense strand
uggaguuuaucaaggaaau

SEQ ID NO: 1647675 - RNA, 19 nt, Homo sapiens
  misc_RNA (1)...(19): siRNA sense strand
gaucaucgagcccauucag

SEQ ID NO: 1647676 - RNA, 19 nt, Homo sapiens
  misc_RNA (1)...(19): siRNA sense strand
gcuuguaaugcuucggaua

SEQ ID NO: 1647677 - RNA, 19 nt, Homo sapiens
  misc_RNA (1)...(19): siRNA sense strand
agauaucauuggcaacauc

SEQ ID NO: 1647678 - RNA, 19 nt, Homo sapiens
  misc_RNA (1)...(19): siRNA sense strand
cuacucaccagaagauauc

SEQ ID NO: 1647679 - RNA, 19 nt, Homo sapiens
  misc_RNA (1)...(19): siRNA sense strand
ggagaugauccagcacugu

SEQ ID NO: 1647680 - RNA, 19 nt, Homo sapiens
  misc_RNA (1)...(19): siRNA sense strand
gauuuggcuucauuaacag

SEQ ID NO: 1647681 - RNA, 19 nt, Homo sapiens
  misc_RNA (1)...(19): siRNA sense strand
ucaggauuuggcuucauua

SEQ ID NO: 1647682 - RNA, 19 nt, Homo sapiens
  misc_RNA (1)...(19): siRNA sense strand
gugcccaacaucaucauug

SEQ ID NO: 1647683 - RNA, 19 nt, Homo sapiens
  misc_RNA (1)...(19): siRNA sense strand
cuuuccaaauggcagaaua

SEQ ID NO: 1647684 - RNA, 19 nt, Homo sapiens
  misc_RNA (1)...(19): siRNA sense strand
ugaggagaaccauggaaau

SEQ ID NO: 1647685 - RNA, 19 nt, Homo sapiens
  misc_RNA (1)...(19): siRNA sense strand
ggaaccggcaagaccacaa

SEQ ID NO: 1647686 - RNA, 19 nt, Homo sapiens
  misc_RNA (1)...(19): siRNA sense strand
ggaguuuaucaaggaaauu

SEQ ID NO: 1647687 - RNA, 19 nt, Homo sapiens
  misc_RNA (1)...(19): siRNA sense strand
ggaaaaggcugucuacauu

SEQ ID NO: 1647688 - RNA, 19 nt, Homo sapiens
  misc_RNA (1)...(19): siRNA sense strand
gaaacuaaacccugugauu

SEQ ID NO: 1647689 - RNA, 19 nt, Homo sapiens
  misc_RNA (1)...(19): siRNA sense strand
uguagcaucuucuuuauga

SEQ ID NO: 1647690 - RNA, 19 nt, Homo sapiens
  misc_RNA (1)...(19): siRNA sense strand
gaccaguucuccauuucua

SEQ ID NO: 1647691 - RNA, 19 nt, Homo sapiens
  misc_RNA (1)...(19): siRNA sense strand
gcagaaguccguggucaua

SEQ ID NO: 1647692 - RNA, 19 nt, Homo sapiens
  misc_RNA (1)...(19): siRNA sense strand
ugacuuauguacccagaaa

SEQ ID NO: 1647693 - RNA, 19 nt, Homo sapiens
  misc_RNA (1)...(19): siRNA sense strand
uagcagaucuacuuugugu

SEQ ID NO: 1647694 - RNA, 19 nt, Homo sapiens
  misc_RNA (1)...(19): siRNA sense strand
gcaauggcuuugugcucua

SEQ ID NO: 1647695 - RNA, 19 nt, Homo sapiens
  misc_RNA (1)...(19): siRNA sense strand
gcaccuaugcuuuguaugu

SEQ ID NO: 1647696 - RNA, 19 nt, Homo sapiens
  misc_RNA (1)...(19): siRNA sense strand
gaugaaacaggaaaucuga

SEQ ID NO: 1647697 - RNA, 19 nt, Homo sapiens
  misc_RNA (1)...(19): siRNA sense strand
ggucuauuauguucacaaa

SEQ ID NO: 1647698 - RNA, 19 nt, Homo sapiens
  misc_RNA (1)...(19): siRNA sense strand
gcucuuuggugacuucuug

SEQ ID NO: 1647699 - RNA, 19 nt, Homo sapiens
  misc_RNA (1)...(19): siRNA sense strand
caggaaaucugacaguauc

SEQ ID NO: 1647700 - RNA, 19 nt, Homo sapiens
  misc_RNA (1)...(19): siRNA sense strand
gaaggccucuuugccagaa

SEQ ID NO: 1647701 - RNA, 19 nt, Homo sapiens
  misc_RNA (1)...(19): siRNA sense strand
ggucuugcauuauguguca

SEQ ID NO: 1647702 - RNA, 19 nt, Homo sapiens
  misc_RNA (1)...(19): siRNA sense strand
ccacaagacaaucaaacua

SEQ ID NO: 1647703 - RNA, 19 nt, Homo sapiens
  misc_RNA (1)...(19): siRNA sense strand
gcagaucuacuuugugugu

SEQ ID NO: 1647704 - RNA, 19 nt, Homo sapiens
  misc_RNA (1)...(19): siRNA sense strand
cacaagacaaucaaacuaa

SEQ ID NO: 1647705 - RNA, 19 nt, Homo sapiens
  misc_RNA (1)...(19): siRNA sense strand
ggagaagaaauauguaaag

SEQ ID NO: 1647706 - RNA, 19 nt, Homo sapiens
  misc_RNA (1)...(19): siRNA sense strand
gcuuugacccucuccuaua

SEQ ID NO: 1647707 - RNA, 19 nt, Homo sapiens
  misc_RNA (1)...(19): siRNA sense strand
ccagaacauuaauuugguu

SEQ ID NO: 1647708 - RNA, 19 nt, Homo sapiens
  misc_RNA (1)...(19): siRNA sense strand
gccaugacacuauugauga

SEQ ID NO: 1647709 - RNA, 19 nt, Homo sapiens
  misc_RNA (1)...(19): siRNA sense strand
aaacuaaacccugugauuc

SEQ ID NO: 1647710 - RNA, 19 nt, Homo sapiens
  misc_RNA (1)...(19): siRNA sense strand
cauuaugugucauuguuug

SEQ ID NO: 1647711 - RNA, 19 nt, Homo sapiens
  misc_RNA (1)...(19): siRNA sense strand
gaaaucugacaguaucuuc

SEQ ID NO: 1647712 - RNA, 19 nt, Homo sapiens
  misc_RNA (1)...(19): siRNA sense strand
uaugucaaccucuauugua

SEQ ID NO: 1647713 - RNA, 19 nt, Homo sapiens
  misc_RNA (1)...(19): siRNA sense strand
ucuaugaucucuguuguag

SEQ ID NO: 1647714 - RNA, 19 nt, Homo sapiens
  misc_RNA (1)...(19): siRNA sense strand
uaauuuagcaguagcagau

SEQ ID NO: 1647715 - RNA, 19 nt, Homo sapiens
  misc_RNA (1)...(19): siRNA sense strand
guaccauucaccuucauuu

SEQ ID NO: 1647716 - RNA, 19 nt, Homo sapiens
  misc_RNA (1)...(19): siRNA sense strand
ucaguuucaugccauauca

SEQ ID NO: 1647717 - RNA, 19 nt, Homo sapiens
  misc_RNA (1)...(19): siRNA sense strand
ucuauuauguucacaaagg

SEQ ID NO: 1647718 - RNA, 19 nt, Homo sapiens
  misc_RNA (1)...(19): siRNA sense strand
guguguagguauuuggauu

SEQ ID NO: 1647719 - RNA, 19 nt, Homo sapiens
  misc_RNA (1)...(19): siRNA sense strand
ugcauuaugugucauuguu

SEQ ID NO: 1647720 - RNA, 19 nt, Homo sapiens
  misc_RNA (1)...(19): siRNA sense strand
agucagccuuccaaguaua

SEQ ID NO: 1647721 - RNA, 19 nt, Homo sapiens
  misc_RNA (1)...(19): siRNA sense strand
gcauccaauuguugcuuug

SEQ ID NO: 1647722 - RNA, 19 nt, Homo sapiens
  misc_RNA (1)...(19): siRNA sense strand
gcauuaugugucauuguuu

SEQ ID NO: 1647723 - RNA, 19 nt, Homo sapiens
  misc_RNA (1)...(19): siRNA sense strand
uugacccucuccuauauuu

SEQ ID NO: 1647724 - RNA, 19 nt, Homo sapiens
  misc_RNA (1)...(19): siRNA sense strand
aacaggaaaucugacagua

SEQ ID NO: 1647725 - RNA, 19 nt, Homo sapiens
  misc_RNA (1)...(19): siRNA sense strand
gucauuguuuguuggcuuu

SEQ ID NO: 1647726 - RNA, 19 nt, Homo sapiens
  misc_RNA (1)...(19): siRNA sense strand
uaugugucauuguuuguug

SEQ ID NO: 1647727 - RNA, 19 nt, Homo sapiens
  misc_RNA (1)...(19): siRNA sense strand
ggaugaaacaggaaaucug

SEQ ID NO: 1647728 - RNA, 19 nt, Homo sapiens
  misc_RNA (1)...(19): siRNA sense strand
ggaaaucugacaguaucuu

SEQ ID NO: 1647729 - RNA, 19 nt, Homo sapiens
  misc_RNA (1)...(19): siRNA sense strand
cguguggucuauuauguuc

SEQ ID NO: 1647730 - RNA, 19 nt, Homo sapiens
  misc_RNA (1)...(19): siRNA sense strand
aaaccuaucacaagaaguc

SEQ ID NO: 1647731 - RNA, 19 nt, Homo sapiens
  misc_RNA (1)...(19): siRNA sense strand
cauauucaacguaccauuc

SEQ ID NO: 1647732 - RNA, 19 nt, Homo sapiens
  misc_RNA (1)...(19): siRNA sense strand
aauaauaccaagugcuuug

SEQ ID NO: 1647733 - RNA, 19 nt, Homo sapiens
  misc_RNA (1)...(19): siRNA sense strand
ugacacuauugaugacuuc

SEQ ID NO: 1647734 - RNA, 19 nt, Homo sapiens
  misc_RNA (1)...(19): siRNA sense strand
cuuugacccucuccuauau

SEQ ID NO: 1647735 - RNA, 19 nt, Homo sapiens
  misc_RNA (1)...(19): siRNA sense strand
caauggcuuugugcucuau

SEQ ID NO: 1647736 - RNA, 19 nt, Homo sapiens
  misc_RNA (1)...(19): siRNA sense strand
uuugaccaguucuccauuu

SEQ ID NO: 1647737 - RNA, 19 nt, Homo sapiens
  misc_RNA (1)...(19): siRNA sense strand
guuuguguguguagguauu

SEQ ID NO: 1647738 - RNA, 19 nt, Homo sapiens
  misc_RNA (1)...(19): siRNA sense strand
guccagaacauuaauuugg

SEQ ID NO: 1647739 - RNA, 19 nt, Homo sapiens
  misc_RNA (1)...(19): siRNA sense strand
cuaauggccaaaccacaaa

SEQ ID NO: 1647740 - RNA, 19 nt, Homo sapiens
  misc_RNA (1)...(19): siRNA sense strand
caguccagaacauuaauuu

SEQ ID NO: 1647741 - RNA, 19 nt, Homo sapiens
  misc_RNA (1)...(19): siRNA sense strand
ucuaauggccaaaccacaa

SEQ ID NO: 1647742 - RNA, 19 nt, Homo sapiens
  misc_RNA (1)...(19): siRNA sense strand
aaacaggaaaucugacagu

SEQ ID NO: 1647743 - RNA, 19 nt, Homo sapiens
  misc_RNA (1)...(19): siRNA sense strand
guaggcuucuuuggcaaug

SEQ ID NO: 1647744 - RNA, 19 nt, Homo sapiens
  misc_RNA (1)...(19): siRNA sense strand
gucaaccucuauuguagca

SEQ ID NO: 1647745 - RNA, 19 nt, Homo sapiens
  misc_RNA (1)...(19): siRNA sense strand
acaggaaaucugacaguau

SEQ ID NO: 1647746 - RNA, 19 nt, Homo sapiens
  misc_RNA (1)...(19): siRNA sense strand
cagaaguccguggucauaa

SEQ ID NO: 1647747 - RNA, 19 nt, Homo sapiens
  misc_RNA (1)...(19): siRNA sense strand
uaugacagccaugagcuuu

SEQ ID NO: 1647748 - RNA, 19 nt, Homo sapiens
  misc_RNA (1)...(19): siRNA sense strand
ugaaacaggaaaucugaca

SEQ ID NO: 1647749 - RNA, 19 nt, Homo sapiens
  misc_RNA (1)...(19): siRNA sense strand
guaugucaaccucuauugu

SEQ ID NO: 1647750 - RNA, 19 nt, Homo sapiens
  misc_RNA (1)...(19): siRNA sense strand
uauuccaccuuguacucua

SEQ ID NO: 1647751 - RNA, 19 nt, Homo sapiens
  misc_RNA (1)...(19): siRNA sense strand
agaaguccguggucauaac

SEQ ID NO: 1647752 - RNA, 19 nt, Homo sapiens
  misc_RNA (1)...(19): siRNA sense strand
ccaguucuccauuucuaau

SEQ ID NO: 1647753 - RNA, 19 nt, Homo sapiens
  misc_RNA (1)...(19): siRNA sense strand
uguacucuaugaucucugu

SEQ ID NO: 1647754 - RNA, 19 nt, Homo sapiens
  misc_RNA (1)...(19): siRNA sense strand
uguccagcgugacuuaugu

SEQ ID NO: 1647755 - RNA, 19 nt, Homo sapiens
  misc_RNA (1)...(19): siRNA sense strand
ugcauccaauuguugcuuu

SEQ ID NO: 1647756 - RNA, 19 nt, Homo sapiens
  misc_RNA (1)...(19): siRNA sense strand
cuauaggaaugaucauggu

SEQ ID NO: 1647757 - RNA, 19 nt, Homo sapiens
  misc_RNA (1)...(19): siRNA sense strand
uccagaacauuaauuuggu

SEQ ID NO: 1647758 - RNA, 19 nt, Homo sapiens
  misc_RNA (1)...(19): siRNA sense strand
gacccucuccuauauuucu

SEQ ID NO: 1647759 - RNA, 19 nt, Homo sapiens
  misc_RNA (1)...(19): siRNA sense strand
cuuccgcaaucaaguguau

SEQ ID NO: 1647760 - RNA, 19 nt, Homo sapiens
  misc_RNA (1)...(19): siRNA sense strand
aagucagccuuccaaguau

SEQ ID NO: 1647761 - RNA, 19 nt, Homo sapiens
  misc_RNA (1)...(19): siRNA sense strand
uuuccaguccagaacauua

SEQ ID NO: 1647762 - RNA, 19 nt, Homo sapiens
  misc_RNA (1)...(19): siRNA sense strand
cuuuguaugucaaccucua

SEQ ID NO: 1647763 - RNA, 19 nt, Homo sapiens
  misc_RNA (1)...(19): siRNA sense strand
ccuaugcuuuguaugucaa

SEQ ID NO: 1647764 - RNA, 19 nt, Homo sapiens
  misc_RNA (1)...(19): siRNA sense strand
gaugacuuccgcaaucaag

SEQ ID NO: 1647765 - RNA, 19 nt, Homo sapiens
  misc_RNA (1)...(19): siRNA sense strand
uagcaucuucuuuaugaca

SEQ ID NO: 1647766 - RNA, 19 nt, Homo sapiens
  misc_RNA (1)...(19): siRNA sense strand
aagccagguuugugugugu

SEQ ID NO: 1647767 - RNA, 19 nt, Homo sapiens
  misc_RNA (1)...(19): siRNA sense strand
cggagcaccuggucuauaa

SEQ ID NO: 1647768 - RNA, 19 nt, Homo sapiens
  misc_RNA (1)...(19): siRNA sense strand
gcaacaagaacaacuuuga

SEQ ID NO: 1647769 - RNA, 19 nt, Homo sapiens
  misc_RNA (1)...(19): siRNA sense strand
gcaagaguuucguuuaugg

SEQ ID NO: 1647770 - RNA, 19 nt, Homo sapiens
  misc_RNA (1)...(19): siRNA sense strand
gaaaggcgccauccagugu

SEQ ID NO: 1647771 - RNA, 19 nt, Homo sapiens
  misc_RNA (1)...(19): siRNA sense strand
ggaaggcaccuaccuguuc

SEQ ID NO: 1647772 - RNA, 19 nt, Homo sapiens
  misc_RNA (1)...(19): siRNA sense strand
gaacaacuuugaggaagag

SEQ ID NO: 1647773 - RNA, 19 nt, Homo sapiens
  misc_RNA (1)...(19): siRNA sense strand
caagaacaacuuugaggaa

SEQ ID NO: 1647774 - RNA, 19 nt, Homo sapiens
  misc_RNA (1)...(19): siRNA sense strand
gggagggcuucaucaacua

SEQ ID NO: 1647775 - RNA, 19 nt, Homo sapiens
  misc_RNA (1)...(19): siRNA sense strand
gcauagacuugaagguaca

SEQ ID NO: 1647776 - RNA, 19 nt, Homo sapiens
  misc_RNA (1)...(19): siRNA sense strand
gggcaggcauagacuugaa

SEQ ID NO: 1647777 - RNA, 19 nt, Homo sapiens
  misc_RNA (1)...(19): siRNA sense strand
ucacugugcuguccaccaa

SEQ ID NO: 1647778 - RNA, 19 nt, Homo sapiens
  misc_RNA (1)...(19): siRNA sense strand
ccaccaagcagacagaaga

SEQ ID NO: 1647779 - RNA, 19 nt, Homo sapiens
  misc_RNA (1)...(19): siRNA sense strand
acacaggacucugcaagga

SEQ ID NO: 1647780 - RNA, 19 nt, Homo sapiens
  misc_RNA (1)...(19): siRNA sense strand
gcugcugcaucgacaguuu

SEQ ID NO: 1647781 - RNA, 19 nt, Homo sapiens
  misc_RNA (1)...(19): siRNA sense strand
ggacacggccaacgucaca

SEQ ID NO: 1647782 - RNA, 19 nt, Homo sapiens
  misc_RNA (1)...(19): siRNA sense strand
cugcaagaguuucguuuau

SEQ ID NO: 1647783 - RNA, 19 nt, Homo sapiens
  misc_RNA (1)...(19): siRNA sense strand
caacaagaacaacuaccuu

SEQ ID NO: 1647784 - RNA, 19 nt, Homo sapiens
  misc_RNA (1)...(19): siRNA sense strand
acaguuuccuggaguguga

SEQ ID NO: 1647785 - RNA, 19 nt, Homo sapiens
  misc_RNA (1)...(19): siRNA sense strand
agaacaacuuugaggaaga

SEQ ID NO: 1647786 - RNA, 19 nt, Homo sapiens
  misc_RNA (1)...(19): siRNA sense strand
ccaagcagacagaagacua

SEQ ID NO: 1647787 - RNA, 19 nt, Homo sapiens
  misc_RNA (1)...(19): siRNA sense strand
ugguagccaucuuggguua

SEQ ID NO: 1647788 - RNA, 19 nt, Homo sapiens
  misc_RNA (1)...(19): siRNA sense strand
ggagccgacugccugaaca

SEQ ID NO: 1647789 - RNA, 19 nt, Homo sapiens
  misc_RNA (1)...(19): siRNA sense strand
acacggagcaccuggucua

SEQ ID NO: 1647790 - RNA, 19 nt, Homo sapiens
  misc_RNA (1)...(19): siRNA sense strand
aggcauagacuugaaggua

SEQ ID NO: 1647791 - RNA, 19 nt, Homo sapiens
  misc_RNA (1)...(19): siRNA sense strand
caguuccgcugcagcaaug

SEQ ID NO: 1647792 - RNA, 19 nt, Homo sapiens
  misc_RNA (1)...(19): siRNA sense strand
ucaagaaccagagaaagga

SEQ ID NO: 1647793 - RNA, 19 nt, Homo sapiens
  misc_RNA (1)...(19): siRNA sense strand
gcaccacccagaacugcaa

SEQ ID NO: 1647794 - RNA, 19 nt, Homo sapiens
  misc_RNA (1)...(19): siRNA sense strand
caacaagaacaacuuugag

SEQ ID NO: 1647795 - RNA, 19 nt, Homo sapiens
  misc_RNA (1)...(19): siRNA sense strand
acacggaugucaggguaga

SEQ ID NO: 1647796 - RNA, 19 nt, Homo sapiens
  misc_RNA (1)...(19): siRNA sense strand
ggaggcugcuugggcaaca

SEQ ID NO: 1647797 - RNA, 19 nt, Homo sapiens
  misc_RNA (1)...(19): siRNA sense strand
ugcaagaguuucguuuaug

SEQ ID NO: 1647798 - RNA, 19 nt, Homo sapiens
  misc_RNA (1)...(19): siRNA sense strand
gcaacaagaacaacuaccu

SEQ ID NO: 1647799 - RNA, 19 nt, Homo sapiens
  misc_RNA (1)...(19): siRNA sense strand
ucugcaagaguuucguuua

SEQ ID NO: 1647800 - RNA, 19 nt, Homo sapiens
  misc_RNA (1)...(19): siRNA sense strand
ccagggagggcuucaucaa

SEQ ID NO: 1647801 - RNA, 19 nt, Homo sapiens
  misc_RNA (1)...(19): siRNA sense strand
gcuccacugucuccacuac

SEQ ID NO: 1647802 - RNA, 19 nt, Homo sapiens
  misc_RNA (1)...(19): siRNA sense strand
agcagugccucgagucuug

SEQ ID NO: 1647803 - RNA, 19 nt, Homo sapiens
  misc_RNA (1)...(19): siRNA sense strand
uuaccuauggugguuguua

SEQ ID NO: 1647804 - RNA, 19 nt, Homo sapiens
  misc_RNA (1)...(19): siRNA sense strand
gaucugcaagaguuucguu

SEQ ID NO: 1647805 - RNA, 19 nt, Homo sapiens
  misc_RNA (1)...(19): siRNA sense strand
gagcuccagcgcauccauu

SEQ ID NO: 1647806 - RNA, 19 nt, Homo sapiens
  misc_RNA (1)...(19): siRNA sense strand
ccgacugccugaacagcuu

SEQ ID NO: 1647807 - RNA, 19 nt, Homo sapiens
  misc_RNA (1)...(19): siRNA sense strand
caagaguuucguuuaugga

SEQ ID NO: 1647808 - RNA, 19 nt, Homo sapiens
  misc_RNA (1)...(19): siRNA sense strand
agggagggcuucaucaacu

SEQ ID NO: 1647809 - RNA, 19 nt, Homo sapiens
  misc_RNA (1)...(19): siRNA sense strand
ugacagugacuagcucaga

SEQ ID NO: 1647810 - RNA, 19 nt, Homo sapiens
  misc_RNA (1)...(19): siRNA sense strand
ccugucagcccacccaguu

SEQ ID NO: 1647811 - RNA, 19 nt, Homo sapiens
  misc_RNA (1)...(19): siRNA sense strand
gaagguacaaccccaggaa

SEQ ID NO: 1647812 - RNA, 19 nt, Homo sapiens
  misc_RNA (1)...(19): siRNA sense strand
gcuucgugcuggacaccaa

SEQ ID NO: 1647813 - RNA, 19 nt, Homo sapiens
  misc_RNA (1)...(19): siRNA sense strand
cggagcaccuggucuauaa

SEQ ID NO: 1647814 - RNA, 19 nt, Homo sapiens
  misc_RNA (1)...(19): siRNA sense strand
gcaacaagaacaacuuuga

SEQ ID NO: 1647815 - RNA, 19 nt, Homo sapiens
  misc_RNA (1)...(19): siRNA sense strand
gcaagaguuucguuuaugg

SEQ ID NO: 1647816 - RNA, 19 nt, Homo sapiens
  misc_RNA (1)...(19): siRNA sense strand
gaaaggcgccauccagugu

SEQ ID NO: 1647817 - RNA, 19 nt, Homo sapiens
  misc_RNA (1)...(19): siRNA sense strand
ggaaggcaccuaccuguuc

SEQ ID NO: 1647818 - RNA, 19 nt, Homo sapiens
  misc_RNA (1)...(19): siRNA sense strand
gaacaacuuugaggaagag

SEQ ID NO: 1647819 - RNA, 19 nt, Homo sapiens
  misc_RNA (1)...(19): siRNA sense strand
caagaacaacuuugaggaa

SEQ ID NO: 1647820 - RNA, 19 nt, Homo sapiens
  misc_RNA (1)...(19): siRNA sense strand
gggagggcuucaucaacua

SEQ ID NO: 1647821 - RNA, 19 nt, Homo sapiens
  misc_RNA (1)...(19): siRNA sense strand
gcauagacuugaagguaca

SEQ ID NO: 1647822 - RNA, 19 nt, Homo sapiens
  misc_RNA (1)...(19): siRNA sense strand
gggcaggcauagacuugaa

SEQ ID NO: 1647823 - RNA, 19 nt, Homo sapiens
  misc_RNA (1)...(19): siRNA sense strand
ucacugugcuguccaccaa

SEQ ID NO: 1647824 - RNA, 19 nt, Homo sapiens
  misc_RNA (1)...(19): siRNA sense strand
ccaccaagcagacagaaga

SEQ ID NO: 1647825 - RNA, 19 nt, Homo sapiens
  misc_RNA (1)...(19): siRNA sense strand
acacaggacucugcaagga

SEQ ID NO: 1647826 - RNA, 19 nt, Homo sapiens
  misc_RNA (1)...(19): siRNA sense strand
gcugcugcaucgacaguuu

SEQ ID NO: 1647827 - RNA, 19 nt, Homo sapiens
  misc_RNA (1)...(19): siRNA sense strand
ggacacggccaacgucaca

SEQ ID NO: 1647828 - RNA, 19 nt, Homo sapiens
  misc_RNA (1)...(19): siRNA sense strand
cugcaagaguuucguuuau

SEQ ID NO: 1647829 - RNA, 19 nt, Homo sapiens
  misc_RNA (1)...(19): siRNA sense strand
caacaagaacaacuaccuu

SEQ ID NO: 1647830 - RNA, 19 nt, Homo sapiens
  misc_RNA (1)...(19): siRNA sense strand
acaguuuccuggaguguga

SEQ ID NO: 1647831 - RNA, 19 nt, Homo sapiens
  misc_RNA (1)...(19): siRNA sense strand
agaacaacuuugaggaaga

SEQ ID NO: 1647832 - RNA, 19 nt, Homo sapiens
  misc_RNA (1)...(19): siRNA sense strand
ccaagcagacagaagacua

SEQ ID NO: 1647833 - RNA, 19 nt, Homo sapiens
  misc_RNA (1)...(19): siRNA sense strand
ugguagccaucuuggguua

SEQ ID NO: 1647834 - RNA, 19 nt, Homo sapiens
  misc_RNA (1)...(19): siRNA sense strand
ggagccgacugccugaaca

SEQ ID NO: 1647835 - RNA, 19 nt, Homo sapiens
  misc_RNA (1)...(19): siRNA sense strand
acacggagcaccuggucua

SEQ ID NO: 1647836 - RNA, 19 nt, Homo sapiens
  misc_RNA (1)...(19): siRNA sense strand
aggcauagacuugaaggua

SEQ ID NO: 1647837 - RNA, 19 nt, Homo sapiens
  misc_RNA (1)...(19): siRNA sense strand
caguuccgcugcagcaaug

SEQ ID NO: 1647838 - RNA, 19 nt, Homo sapiens
  misc_RNA (1)...(19): siRNA sense strand
ucaagaaccagagaaagga

SEQ ID NO: 1647839 - RNA, 19 nt, Homo sapiens
  misc_RNA (1)...(19): siRNA sense strand
gcaccacccagaacugcaa

SEQ ID NO: 1647840 - RNA, 19 nt, Homo sapiens
  misc_RNA (1)...(19): siRNA sense strand
caacaagaacaacuuugag

SEQ ID NO: 1647841 - RNA, 19 nt, Homo sapiens
  misc_RNA (1)...(19): siRNA sense strand
acacggaugucaggguaga

SEQ ID NO: 1647842 - RNA, 19 nt, Homo sapiens
  misc_RNA (1)...(19): siRNA sense strand
ggaggcugcuugggcaaca

SEQ ID NO: 1647843 - RNA, 19 nt, Homo sapiens
  misc_RNA (1)...(19): siRNA sense strand
ugcaagaguuucguuuaug

SEQ ID NO: 1647844 - RNA, 19 nt, Homo sapiens
  misc_RNA (1)...(19): siRNA sense strand
gcaacaagaacaacuaccu

SEQ ID NO: 1647845 - RNA, 19 nt, Homo sapiens
  misc_RNA (1)...(19): siRNA sense strand
ucugcaagaguuucguuua

SEQ ID NO: 1647846 - RNA, 19 nt, Homo sapiens
  misc_RNA (1)...(19): siRNA sense strand
ccagggagggcuucaucaa

SEQ ID NO: 1647847 - RNA, 19 nt, Homo sapiens
  misc_RNA (1)...(19): siRNA sense strand
gcuccacugucuccacuac

SEQ ID NO: 1647848 - RNA, 19 nt, Homo sapiens
  misc_RNA (1)...(19): siRNA sense strand
agcagugccucgagucuug

SEQ ID NO: 1647849 - RNA, 19 nt, Homo sapiens
  misc_RNA (1)...(19): siRNA sense strand
uuaccuauggugguuguua

SEQ ID NO: 1647850 - RNA, 19 nt, Homo sapiens
  misc_RNA (1)...(19): siRNA sense strand
gaucugcaagaguuucguu

SEQ ID NO: 1647851 - RNA, 19 nt, Homo sapiens
  misc_RNA (1)...(19): siRNA sense strand
gagcuccagcgcauccauu

SEQ ID NO: 1647852 - RNA, 19 nt, Homo sapiens
  misc_RNA (1)...(19): siRNA sense strand
ccgacugccugaacagcuu

SEQ ID NO: 1647853 - RNA, 19 nt, Homo sapiens
  misc_RNA (1)...(19): siRNA sense strand
caagaguuucguuuaugga

SEQ ID NO: 1647854 - RNA, 19 nt, Homo sapiens
  misc_RNA (1)...(19): siRNA sense strand
agggagggcuucaucaacu

SEQ ID NO: 1647855 - RNA, 19 nt, Homo sapiens
  misc_RNA (1)...(19): siRNA sense strand
ugacagugacuagcucaga

SEQ ID NO: 1647856 - RNA, 19 nt, Homo sapiens
  misc_RNA (1)...(19): siRNA sense strand
ccugucagcccacccaguu

SEQ ID NO: 1647857 - RNA, 19 nt, Homo sapiens
  misc_RNA (1)...(19): siRNA sense strand
gaagguacaaccccaggaa

SEQ ID NO: 1647858 - RNA, 19 nt, Homo sapiens
  misc_RNA (1)...(19): siRNA sense strand
gcuucgugcuggacaccaa

SEQ ID NO: 1647859 - RNA, 19 nt, Homo sapiens
  misc_RNA (1)...(19): siRNA sense strand
gcauaaaggucaagaguua

SEQ ID NO: 1647860 - RNA, 19 nt, Homo sapiens
  misc_RNA (1)...(19): siRNA sense strand
gaccuuacuugucauaaua

SEQ ID NO: 1647861 - RNA, 19 nt, Homo sapiens
  misc_RNA (1)...(19): siRNA sense strand
uuaccaggauccuuuauua

SEQ ID NO: 1647862 - RNA, 19 nt, Homo sapiens
  misc_RNA (1)...(19): siRNA sense strand
gaucgugcauucauggaua

SEQ ID NO: 1647863 - RNA, 19 nt, Homo sapiens
  misc_RNA (1)...(19): siRNA sense strand
gaauugcucuuuacuaugg

SEQ ID NO: 1647864 - RNA, 19 nt, Homo sapiens
  misc_RNA (1)...(19): siRNA sense strand
ucagcaagcucgaguuaaa

SEQ ID NO: 1647865 - RNA, 19 nt, Homo sapiens
  misc_RNA (1)...(19): siRNA sense strand
caugaaagcugugguucua

SEQ ID NO: 1647866 - RNA, 19 nt, Homo sapiens
  misc_RNA (1)...(19): siRNA sense strand
gauaugcuaggaaacauua

SEQ ID NO: 1647867 - RNA, 19 nt, Homo sapiens
  misc_RNA (1)...(19): siRNA sense strand
gugaaucgcuacaucaaga

SEQ ID NO: 1647868 - RNA, 19 nt, Homo sapiens
  misc_RNA (1)...(19): siRNA sense strand
ggaacaggaacugaaauua

SEQ ID NO: 1647869 - RNA, 19 nt, Homo sapiens
  misc_RNA (1)...(19): siRNA sense strand
gaacaggaacugaaauuac

SEQ ID NO: 1647870 - RNA, 19 nt, Homo sapiens
  misc_RNA (1)...(19): siRNA sense strand
gaagaugaaacaagaauag

SEQ ID NO: 1647871 - RNA, 19 nt, Homo sapiens
  misc_RNA (1)...(19): siRNA sense strand
gauacaggaugaccaugaa

SEQ ID NO: 1647872 - RNA, 19 nt, Homo sapiens
  misc_RNA (1)...(19): siRNA sense strand
uagaggaccuuacuuguca

SEQ ID NO: 1647873 - RNA, 19 nt, Homo sapiens
  misc_RNA (1)...(19): siRNA sense strand
ggaccuuacuugucauaau

SEQ ID NO: 1647874 - RNA, 19 nt, Homo sapiens
  misc_RNA (1)...(19): siRNA sense strand
auacaaauguuccuucaga

SEQ ID NO: 1647875 - RNA, 19 nt, Homo sapiens
  misc_RNA (1)...(19): siRNA sense strand
aaaccuaaauuccaagaug

SEQ ID NO: 1647876 - RNA, 19 nt, Homo sapiens
  misc_RNA (1)...(19): siRNA sense strand
uggaauugcucuuuacuau

SEQ ID NO: 1647877 - RNA, 19 nt, Homo sapiens
  misc_RNA (1)...(19): siRNA sense strand
ggacaaaacuggguucaga

SEQ ID NO: 1647878 - RNA, 19 nt, Homo sapiens
  misc_RNA (1)...(19): siRNA sense strand
gaucaacaacugccuaugu

SEQ ID NO: 1647879 - RNA, 19 nt, Homo sapiens
  misc_RNA (1)...(19): siRNA sense strand
uaucacagaucaacaacug

SEQ ID NO: 1647880 - RNA, 19 nt, Homo sapiens
  misc_RNA (1)...(19): siRNA sense strand
uaaagaaggcgaaauagag

SEQ ID NO: 1647881 - RNA, 19 nt, Homo sapiens
  misc_RNA (1)...(19): siRNA sense strand
gaaggauccuauuguuucu

SEQ ID NO: 1647882 - RNA, 19 nt, Homo sapiens
  misc_RNA (1)...(19): siRNA sense strand
ugaaagcugugguucuaau

SEQ ID NO: 1647883 - RNA, 19 nt, Homo sapiens
  misc_RNA (1)...(19): siRNA sense strand
ucagaacucgucuucauuu

SEQ ID NO: 1647884 - RNA, 19 nt, Homo sapiens
  misc_RNA (1)...(19): siRNA sense strand
gcagaauguuauacaguag

SEQ ID NO: 1647885 - RNA, 19 nt, Homo sapiens
  misc_RNA (1)...(19): siRNA sense strand
gaucuacagcuuucacuau

SEQ ID NO: 1647886 - RNA, 19 nt, Homo sapiens
  misc_RNA (1)...(19): siRNA sense strand
uacaguaggugaauuaugg

SEQ ID NO: 1647887 - RNA, 19 nt, Homo sapiens
  misc_RNA (1)...(19): siRNA sense strand
ugcagaauguuauacagua

SEQ ID NO: 1647888 - RNA, 19 nt, Homo sapiens
  misc_RNA (1)...(19): siRNA sense strand
ggauacaggaugaccauga

SEQ ID NO: 1647889 - RNA, 19 nt, Homo sapiens
  misc_RNA (1)...(19): siRNA sense strand
ugaaggauccuauuguuuc

SEQ ID NO: 1647890 - RNA, 19 nt, Homo sapiens
  misc_RNA (1)...(19): siRNA sense strand
caacuuggaauugcucuuu

SEQ ID NO: 1647891 - RNA, 19 nt, Homo sapiens
  misc_RNA (1)...(19): siRNA sense strand
gaaugccagugguaaaaua

SEQ ID NO: 1647892 - RNA, 19 nt, Homo sapiens
  misc_RNA (1)...(19): siRNA sense strand
uaaguggacauauucauga

SEQ ID NO: 1647893 - RNA, 19 nt, Homo sapiens
  misc_RNA (1)...(19): siRNA sense strand
caucaaccaugcaucaaca

SEQ ID NO: 1647894 - RNA, 19 nt, Homo sapiens
  misc_RNA (1)...(19): siRNA sense strand
ccaggauccuuuauuauac

SEQ ID NO: 1647895 - RNA, 19 nt, Homo sapiens
  misc_RNA (1)...(19): siRNA sense strand
ggauauuucugcaacugau

SEQ ID NO: 1647896 - RNA, 19 nt, Homo sapiens
  misc_RNA (1)...(19): siRNA sense strand
gaaagcugugguucuaauu

SEQ ID NO: 1647897 - RNA, 19 nt, Homo sapiens
  misc_RNA (1)...(19): siRNA sense strand
ugccugcaauugugaguua

SEQ ID NO: 1647898 - RNA, 19 nt, Homo sapiens
  misc_RNA (1)...(19): siRNA sense strand
agaguuauauucacagcaa

SEQ ID NO: 1647899 - RNA, 19 nt, Homo sapiens
  misc_RNA (1)...(19): siRNA sense strand
gaaacuuaaggaugggaua

SEQ ID NO: 1647900 - RNA, 19 nt, Homo sapiens
  misc_RNA (1)...(19): siRNA sense strand
cauuacagguucugaagau

SEQ ID NO: 1647901 - RNA, 19 nt, Homo sapiens
  misc_RNA (1)...(19): siRNA sense strand
gaaauagaggaccuuacuu

SEQ ID NO: 1647902 - RNA, 19 nt, Homo sapiens
  misc_RNA (1)...(19): siRNA sense strand
uccuacagauccugacuua

SEQ ID NO: 1647903 - RNA, 19 nt, Homo sapiens
  misc_RNA (1)...(19): siRNA sense strand
uuaaugagcuaugugaauc

SEQ ID NO: 1647904 - RNA, 19 nt, Homo sapiens
  misc_RNA (1)...(19): siRNA sense strand
gaacucgucuucauuuuac

SEQ ID NO: 1647905 - RNA, 19 nt, Homo sapiens
  misc_RNA (1)...(19): siRNA sense strand
gaaacaagaauagauaugc

SEQ ID NO: 1647906 - RNA, 19 nt, Homo sapiens
  misc_RNA (1)...(19): siRNA sense strand
aaauagaggaccuuacuug

SEQ ID NO: 1647907 - RNA, 19 nt, Homo sapiens
  misc_RNA (1)...(19): siRNA sense strand
gauuagacgaguuguaaau

SEQ ID NO: 1647908 - RNA, 19 nt, Homo sapiens
  misc_RNA (1)...(19): siRNA sense strand
cugccuauguuuauucgua

SEQ ID NO: 1647909 - RNA, 19 nt, Homo sapiens
  misc_RNA (1)...(19): siRNA sense strand
gugcauucauggauauuuc

SEQ ID NO: 1647910 - RNA, 19 nt, Homo sapiens
  misc_RNA (1)...(19): siRNA sense strand
ggaacgauccugcaucaac

SEQ ID NO: 1647911 - RNA, 19 nt, Homo sapiens
  misc_RNA (1)...(19): siRNA sense strand
guacaguuugucuugauaa

SEQ ID NO: 1647912 - RNA, 19 nt, Homo sapiens
  misc_RNA (1)...(19): siRNA sense strand
aagaugauaucguccuuuc

SEQ ID NO: 1647913 - RNA, 19 nt, Homo sapiens
  misc_RNA (1)...(19): siRNA sense strand
aaaguuggaugugcuggaa

SEQ ID NO: 1647914 - RNA, 19 nt, Homo sapiens
  misc_RNA (1)...(19): siRNA sense strand
ggaauugcucuuuacuaug

SEQ ID NO: 1647915 - RNA, 19 nt, Homo sapiens
  misc_RNA (1)...(19): siRNA sense strand
accaggauccuuuauuaua

SEQ ID NO: 1647916 - RNA, 19 nt, Homo sapiens
  misc_RNA (1)...(19): siRNA sense strand
ucaauacuauggaaugcau

SEQ ID NO: 1647917 - RNA, 19 nt, Homo sapiens
  misc_RNA (1)...(19): siRNA sense strand
gucaagaguuauauucaca

SEQ ID NO: 1647918 - RNA, 19 nt, Homo sapiens
  misc_RNA (1)...(19): siRNA sense strand
gcucuuuacuauggagaaa

SEQ ID NO: 1647919 - RNA, 19 nt, Homo sapiens
  misc_RNA (1)...(19): siRNA sense strand
cuucagaacucgucuucau

SEQ ID NO: 1647920 - RNA, 19 nt, Homo sapiens
  misc_RNA (1)...(19): siRNA sense strand
gaagaugauaucguccuuu

SEQ ID NO: 1647921 - RNA, 19 nt, Homo sapiens
  misc_RNA (1)...(19): siRNA sense strand
gacgaguuguaaauaaugu

SEQ ID NO: 1647922 - RNA, 19 nt, Homo sapiens
  misc_RNA (1)...(19): siRNA sense strand
ugacuuaccaccagguuau

SEQ ID NO: 1647923 - RNA, 19 nt, Homo sapiens
  misc_RNA (1)...(19): siRNA sense strand
ggaacugaaauuaccauuc

SEQ ID NO: 1647924 - RNA, 19 nt, Homo sapiens
  misc_RNA (1)...(19): siRNA sense strand
uauauucacagcaagauga

SEQ ID NO: 1647925 - RNA, 19 nt, Homo sapiens
  misc_RNA (1)...(19): siRNA sense strand
cgaaauagaggaccuuacu

SEQ ID NO: 1647926 - RNA, 19 nt, Homo sapiens
  misc_RNA (1)...(19): siRNA sense strand
caacugccuauguuuauuc

SEQ ID NO: 1647927 - RNA, 19 nt, Homo sapiens
  misc_RNA (1)...(19): siRNA sense strand
cgucggaucuacagcuuuc

SEQ ID NO: 1647928 - RNA, 19 nt, Homo sapiens
  misc_RNA (1)...(19): siRNA sense strand
gcugagaaagguuaucaau

SEQ ID NO: 1647929 - RNA, 19 nt, Homo sapiens
  misc_RNA (1)...(19): siRNA sense strand
caagcucgaguuaaaguug

SEQ ID NO: 1647930 - RNA, 19 nt, Homo sapiens
  misc_RNA (1)...(19): siRNA sense strand
uuaaagaaggcgaaauaga

SEQ ID NO: 1647931 - RNA, 19 nt, Homo sapiens
  misc_RNA (1)...(19): siRNA sense strand
uguacaguuugucuugaua

SEQ ID NO: 1647932 - RNA, 19 nt, Homo sapiens
  misc_RNA (1)...(19): siRNA sense strand
caggauccuuuauuauaca

SEQ ID NO: 1647933 - RNA, 19 nt, Homo sapiens
  misc_RNA (1)...(19): siRNA sense strand
uuugaaggauccuauuguu

SEQ ID NO: 1647934 - RNA, 19 nt, Homo sapiens
  misc_RNA (1)...(19): siRNA sense strand
cagguuaugugcagagucu

SEQ ID NO: 1647935 - RNA, 19 nt, Homo sapiens
  misc_RNA (1)...(19): siRNA sense strand
ugggaacgauccugcauca

SEQ ID NO: 1647936 - RNA, 19 nt, Homo sapiens
  misc_RNA (1)...(19): siRNA sense strand
ucaugggccugguccuuug

SEQ ID NO: 1647937 - RNA, 19 nt, Homo sapiens
  misc_RNA (1)...(19): siRNA sense strand
ggucaagaguuauauucac

SEQ ID NO: 1647938 - RNA, 19 nt, Homo sapiens
  misc_RNA (1)...(19): siRNA sense strand
cuaggaaacauuacagguu

SEQ ID NO: 1647939 - RNA, 19 nt, Homo sapiens
  misc_RNA (1)...(19): siRNA sense strand
aaacggaaugccaguggua

SEQ ID NO: 1647940 - RNA, 19 nt, Homo sapiens
  misc_RNA (1)...(19): siRNA sense strand
ugaagaugauaucguccuu

SEQ ID NO: 1647941 - RNA, 19 nt, Homo sapiens
  misc_RNA (1)...(19): siRNA sense strand
aggcaacggugacuuucaa

SEQ ID NO: 1647942 - RNA, 19 nt, Homo sapiens
  misc_RNA (1)...(19): siRNA sense strand
aagcacagacuuugaagga

SEQ ID NO: 1647943 - RNA, 19 nt, Homo sapiens
  misc_RNA (1)...(19): siRNA sense strand
aaagauaugcuaggaaaca

SEQ ID NO: 1647944 - RNA, 19 nt, Homo sapiens
  misc_RNA (1)...(19): siRNA sense strand
gcuggaacaggaacugaaa

SEQ ID NO: 1647945 - RNA, 19 nt, Homo sapiens
  misc_RNA (1)...(19): siRNA sense strand
uacaaauguuccuucagaa

SEQ ID NO: 1647946 - RNA, 19 nt, Homo sapiens
  misc_RNA (1)...(19): siRNA sense strand
cugauuuggugcugagaaa

SEQ ID NO: 1647947 - RNA, 19 nt, Homo sapiens
  misc_RNA (1)...(19): siRNA sense strand
uacagguucugaagaugaa

SEQ ID NO: 1647948 - RNA, 19 nt, Homo sapiens
  misc_RNA (1)...(19): siRNA sense strand
gaggaccuuacuugucaua

SEQ ID NO: 1647949 - RNA, 19 nt, Homo sapiens
  misc_RNA (1)...(19): siRNA sense strand
acaacugccuauguuuauu

SEQ ID NO: 1647950 - RNA, 19 nt, Homo sapiens
  misc_RNA (1)...(19): siRNA sense strand
cugauuagacgaguuguaa

SEQ ID NO: 1647951 - RNA, 19 nt, Homo sapiens
  misc_RNA (1)...(19): siRNA sense strand
aaacauuacagguucugaa

SEQ ID NO: 1647952 - RNA, 19 nt, Homo sapiens
  misc_RNA (1)...(19): siRNA sense strand
ggaucuacagcuuucacua

SEQ ID NO: 1647953 - RNA, 19 nt, Homo sapiens
  misc_RNA (1)...(19): siRNA sense strand
gccuauguuuauucguaua

SEQ ID NO: 1647954 - RNA, 19 nt, Homo sapiens
  misc_RNA (1)...(19): siRNA sense strand
guuauacaguaggugaauu

SEQ ID NO: 1647955 - RNA, 19 nt, Homo sapiens
  misc_RNA (1)...(19): siRNA sense strand
agucauauguaacuccaau

SEQ ID NO: 1647956 - RNA, 19 nt, Homo sapiens
  misc_RNA (1)...(19): siRNA sense strand
uuacagguucugaagauga

SEQ ID NO: 1647957 - RNA, 19 nt, Homo sapiens
  misc_RNA (1)...(19): siRNA sense strand
aggaugggauacaggauga

SEQ ID NO: 1647958 - RNA, 19 nt, Homo sapiens
  misc_RNA (1)...(19): siRNA sense strand
ggauccuauuguuucuaua

SEQ ID NO: 1647959 - RNA, 19 nt, Homo sapiens
  misc_RNA (1)...(19): siRNA sense strand
gcauaaaggucaagaguua

SEQ ID NO: 1647960 - RNA, 19 nt, Homo sapiens
  misc_RNA (1)...(19): siRNA sense strand
gaccuuacuugucauaaua

SEQ ID NO: 1647961 - RNA, 19 nt, Homo sapiens
  misc_RNA (1)...(19): siRNA sense strand
uuaccaggauccuuuauua

SEQ ID NO: 1647962 - RNA, 19 nt, Homo sapiens
  misc_RNA (1)...(19): siRNA sense strand
gaucgugcauucauggaua

SEQ ID NO: 1647963 - RNA, 19 nt, Homo sapiens
  misc_RNA (1)...(19): siRNA sense strand
gaauugcucuuuacuaugg

SEQ ID NO: 1647964 - RNA, 19 nt, Homo sapiens
  misc_RNA (1)...(19): siRNA sense strand
ucagcaagcucgaguuaaa

SEQ ID NO: 1647965 - RNA, 19 nt, Homo sapiens
  misc_RNA (1)...(19): siRNA sense strand
caugaaagcugugguucua

SEQ ID NO: 1647966 - RNA, 19 nt, Homo sapiens
  misc_RNA (1)...(19): siRNA sense strand
gauaugcuaggaaacauua

SEQ ID NO: 1647967 - RNA, 19 nt, Homo sapiens
  misc_RNA (1)...(19): siRNA sense strand
gugaaucgcuacaucaaga

SEQ ID NO: 1647968 - RNA, 19 nt, Homo sapiens
  misc_RNA (1)...(19): siRNA sense strand
ggaacaggaacugaaauua

SEQ ID NO: 1647969 - RNA, 19 nt, Homo sapiens
  misc_RNA (1)...(19): siRNA sense strand
gaacaggaacugaaauuac

SEQ ID NO: 1647970 - RNA, 19 nt, Homo sapiens
  misc_RNA (1)...(19): siRNA sense strand
gaagaugaaacaagaauag

SEQ ID NO: 1647971 - RNA, 19 nt, Homo sapiens
  misc_RNA (1)...(19): siRNA sense strand
gauacaggaugaccaugaa

SEQ ID NO: 1647972 - RNA, 19 nt, Homo sapiens
  misc_RNA (1)...(19): siRNA sense strand
uagaggaccuuacuuguca

SEQ ID NO: 1647973 - RNA, 19 nt, Homo sapiens
  misc_RNA (1)...(19): siRNA sense strand
ggaccuuacuugucauaau

SEQ ID NO: 1647974 - RNA, 19 nt, Homo sapiens
  misc_RNA (1)...(19): siRNA sense strand
auacaaauguuccuucaga

SEQ ID NO: 1647975 - RNA, 19 nt, Homo sapiens
  misc_RNA (1)...(19): siRNA sense strand
aaaccuaaauuccaagaug

SEQ ID NO: 1647976 - RNA, 19 nt, Homo sapiens
  misc_RNA (1)...(19): siRNA sense strand
uggaauugcucuuuacuau

SEQ ID NO: 1647977 - RNA, 19 nt, Homo sapiens
  misc_RNA (1)...(19): siRNA sense strand
ggacaaaacuggguucaga

SEQ ID NO: 1647978 - RNA, 19 nt, Homo sapiens
  misc_RNA (1)...(19): siRNA sense strand
gaucaacaacugccuaugu

SEQ ID NO: 1647979 - RNA, 19 nt, Homo sapiens
  misc_RNA (1)...(19): siRNA sense strand
uaucacagaucaacaacug

SEQ ID NO: 1647980 - RNA, 19 nt, Homo sapiens
  misc_RNA (1)...(19): siRNA sense strand
uaaagaaggcgaaauagag

SEQ ID NO: 1647981 - RNA, 19 nt, Homo sapiens
  misc_RNA (1)...(19): siRNA sense strand
gaaggauccuauuguuucu

SEQ ID NO: 1647982 - RNA, 19 nt, Homo sapiens
  misc_RNA (1)...(19): siRNA sense strand
ugaaagcugugguucuaau

SEQ ID NO: 1647983 - RNA, 19 nt, Homo sapiens
  misc_RNA (1)...(19): siRNA sense strand
ucagaacucgucuucauuu

SEQ ID NO: 1647984 - RNA, 19 nt, Homo sapiens
  misc_RNA (1)...(19): siRNA sense strand
gcagaauguuauacaguag

SEQ ID NO: 1647985 - RNA, 19 nt, Homo sapiens
  misc_RNA (1)...(19): siRNA sense strand
gaucuacagcuuucacuau

SEQ ID NO: 1647986 - RNA, 19 nt, Homo sapiens
  misc_RNA (1)...(19): siRNA sense strand
uacaguaggugaauuaugg

SEQ ID NO: 1647987 - RNA, 19 nt, Homo sapiens
  misc_RNA (1)...(19): siRNA sense strand
ugcagaauguuauacagua

SEQ ID NO: 1647988 - RNA, 19 nt, Homo sapiens
  misc_RNA (1)...(19): siRNA sense strand
ggauacaggaugaccauga

SEQ ID NO: 1647989 - RNA, 19 nt, Homo sapiens
  misc_RNA (1)...(19): siRNA sense strand
ugaaggauccuauuguuuc

SEQ ID NO: 1647990 - RNA, 19 nt, Homo sapiens
  misc_RNA (1)...(19): siRNA sense strand
caacuuggaauugcucuuu

SEQ ID NO: 1647991 - RNA, 19 nt, Homo sapiens
  misc_RNA (1)...(19): siRNA sense strand
gaaugccagugguaaaaua

SEQ ID NO: 1647992 - RNA, 19 nt, Homo sapiens
  misc_RNA (1)...(19): siRNA sense strand
uaaguggacauauucauga

SEQ ID NO: 1647993 - RNA, 19 nt, Homo sapiens
  misc_RNA (1)...(19): siRNA sense strand
caucaaccaugcaucaaca

SEQ ID NO: 1647994 - RNA, 19 nt, Homo sapiens
  misc_RNA (1)...(19): siRNA sense strand
ccaggauccuuuauuauac

SEQ ID NO: 1647995 - RNA, 19 nt, Homo sapiens
  misc_RNA (1)...(19): siRNA sense strand
ggauauuucugcaacugau

SEQ ID NO: 1647996 - RNA, 19 nt, Homo sapiens
  misc_RNA (1)...(19): siRNA sense strand
gaaagcugugguucuaauu

SEQ ID NO: 1647997 - RNA, 19 nt, Homo sapiens
  misc_RNA (1)...(19): siRNA sense strand
ugccugcaauugugaguua

SEQ ID NO: 1647998 - RNA, 19 nt, Homo sapiens
  misc_RNA (1)...(19): siRNA sense strand
agaguuauauucacagcaa

SEQ ID NO: 1647999 - RNA, 19 nt, Homo sapiens
  misc_RNA (1)...(19): siRNA sense strand
gaaacuuaaggaugggaua

SEQ ID NO: 1648000 - RNA, 19 nt, Homo sapiens
  misc_RNA (1)...(19): siRNA sense strand
cauuacagguucugaagau

SEQ ID NO: 1648001 - RNA, 19 nt, Homo sapiens
  misc_RNA (1)...(19): siRNA sense strand
gaaauagaggaccuuacuu

SEQ ID NO: 1648002 - RNA, 19 nt, Homo sapiens
  misc_RNA (1)...(19): siRNA sense strand
uccuacagauccugacuua

SEQ ID NO: 1648003 - RNA, 19 nt, Homo sapiens
  misc_RNA (1)...(19): siRNA sense strand
uuaaugagcuaugugaauc

SEQ ID NO: 1648004 - RNA, 19 nt, Homo sapiens
  misc_RNA (1)...(19): siRNA sense strand
gaacucgucuucauuuuac

SEQ ID NO: 1648005 - RNA, 19 nt, Homo sapiens
  misc_RNA (1)...(19): siRNA sense strand
gaaacaagaauagauaugc

SEQ ID NO: 1648006 - RNA, 19 nt, Homo sapiens
  misc_RNA (1)...(19): siRNA sense strand
aaauagaggaccuuacuug

SEQ ID NO: 1648007 - RNA, 19 nt, Homo sapiens
  misc_RNA (1)...(19): siRNA sense strand
gauuagacgaguuguaaau

SEQ ID NO: 1648008 - RNA, 19 nt, Homo sapiens
  misc_RNA (1)...(19): siRNA sense strand
cugccuauguuuauucgua

SEQ ID NO: 1648009 - RNA, 19 nt, Homo sapiens
  misc_RNA (1)...(19): siRNA sense strand
gugcauucauggauauuuc

SEQ ID NO: 1648010 - RNA, 19 nt, Homo sapiens
  misc_RNA (1)...(19): siRNA sense strand
ggaacgauccugcaucaac

SEQ ID NO: 1648011 - RNA, 19 nt, Homo sapiens
  misc_RNA (1)...(19): siRNA sense strand
guacaguuugucuugauaa

SEQ ID NO: 1648012 - RNA, 19 nt, Homo sapiens
  misc_RNA (1)...(19): siRNA sense strand
aagaugauaucguccuuuc

SEQ ID NO: 1648013 - RNA, 19 nt, Homo sapiens
  misc_RNA (1)...(19): siRNA sense strand
aaaguuggaugugcuggaa

SEQ ID NO: 1648014 - RNA, 19 nt, Homo sapiens
  misc_RNA (1)...(19): siRNA sense strand
ggaauugcucuuuacuaug

SEQ ID NO: 1648015 - RNA, 19 nt, Homo sapiens
  misc_RNA (1)...(19): siRNA sense strand
accaggauccuuuauuaua

SEQ ID NO: 1648016 - RNA, 19 nt, Homo sapiens
  misc_RNA (1)...(19): siRNA sense strand
ucaauacuauggaaugcau

SEQ ID NO: 1648017 - RNA, 19 nt, Homo sapiens
  misc_RNA (1)...(19): siRNA sense strand
gucaagaguuauauucaca

SEQ ID NO: 1648018 - RNA, 19 nt, Homo sapiens
  misc_RNA (1)...(19): siRNA sense strand
gcucuuuacuauggagaaa

SEQ ID NO: 1648019 - RNA, 19 nt, Homo sapiens
  misc_RNA (1)...(19): siRNA sense strand
cuucagaacucgucuucau

SEQ ID NO: 1648020 - RNA, 19 nt, Homo sapiens
  misc_RNA (1)...(19): siRNA sense strand
gaagaugauaucguccuuu

SEQ ID NO: 1648021 - RNA, 19 nt, Homo sapiens
  misc_RNA (1)...(19): siRNA sense strand
gacgaguuguaaauaaugu

SEQ ID NO: 1648022 - RNA, 19 nt, Homo sapiens
  misc_RNA (1)...(19): siRNA sense strand
ugacuuaccaccagguuau

SEQ ID NO: 1648023 - RNA, 19 nt, Homo sapiens
  misc_RNA (1)...(19): siRNA sense strand
ggaacugaaauuaccauuc

SEQ ID NO: 1648024 - RNA, 19 nt, Homo sapiens
  misc_RNA (1)...(19): siRNA sense strand
uauauucacagcaagauga

SEQ ID NO: 1648025 - RNA, 19 nt, Homo sapiens
  misc_RNA (1)...(19): siRNA sense strand
cgaaauagaggaccuuacu

SEQ ID NO: 1648026 - RNA, 19 nt, Homo sapiens
  misc_RNA (1)...(19): siRNA sense strand
caacugccuauguuuauuc

SEQ ID NO: 1648027 - RNA, 19 nt, Homo sapiens
  misc_RNA (1)...(19): siRNA sense strand
cgucggaucuacagcuuuc

SEQ ID NO: 1648028 - RNA, 19 nt, Homo sapiens
  misc_RNA (1)...(19): siRNA sense strand
gcugagaaagguuaucaau

SEQ ID NO: 1648029 - RNA, 19 nt, Homo sapiens
  misc_RNA (1)...(19): siRNA sense strand
caagcucgaguuaaaguug

SEQ ID NO: 1648030 - RNA, 19 nt, Homo sapiens
  misc_RNA (1)...(19): siRNA sense strand
uuaaagaaggcgaaauaga

SEQ ID NO: 1648031 - RNA, 19 nt, Homo sapiens
  misc_RNA (1)...(19): siRNA sense strand
uguacaguuugucuugaua

SEQ ID NO: 1648032 - RNA, 19 nt, Homo sapiens
  misc_RNA (1)...(19): siRNA sense strand
caggauccuuuauuauaca

SEQ ID NO: 1648033 - RNA, 19 nt, Homo sapiens
  misc_RNA (1)...(19): siRNA sense strand
uuugaaggauccuauuguu

SEQ ID NO: 1648034 - RNA, 19 nt, Homo sapiens
  misc_RNA (1)...(19): siRNA sense strand
cagguuaugugcagagucu

SEQ ID NO: 1648035 - RNA, 19 nt, Homo sapiens
  misc_RNA (1)...(19): siRNA sense strand
ugggaacgauccugcauca

SEQ ID NO: 1648036 - RNA, 19 nt, Homo sapiens
  misc_RNA (1)...(19): siRNA sense strand
ucaugggccugguccuuug

SEQ ID NO: 1648037 - RNA, 19 nt, Homo sapiens
  misc_RNA (1)...(19): siRNA sense strand
ggucaagaguuauauucac

SEQ ID NO: 1648038 - RNA, 19 nt, Homo sapiens
  misc_RNA (1)...(19): siRNA sense strand
cuaggaaacauuacagguu

SEQ ID NO: 1648039 - RNA, 19 nt, Homo sapiens
  misc_RNA (1)...(19): siRNA sense strand
aaacggaaugccaguggua

SEQ ID NO: 1648040 - RNA, 19 nt, Homo sapiens
  misc_RNA (1)...(19): siRNA sense strand
ugaagaugauaucguccuu

SEQ ID NO: 1648041 - RNA, 19 nt, Homo sapiens
  misc_RNA (1)...(19): siRNA sense strand
aggcaacggugacuuucaa

SEQ ID NO: 1648042 - RNA, 19 nt, Homo sapiens
  misc_RNA (1)...(19): siRNA sense strand
aagcacagacuuugaagga

SEQ ID NO: 1648043 - RNA, 19 nt, Homo sapiens
  misc_RNA (1)...(19): siRNA sense strand
aaagauaugcuaggaaaca

SEQ ID NO: 1648044 - RNA, 19 nt, Homo sapiens
  misc_RNA (1)...(19): siRNA sense strand
gcuggaacaggaacugaaa

SEQ ID NO: 1648045 - RNA, 19 nt, Homo sapiens
  misc_RNA (1)...(19): siRNA sense strand
uacaaauguuccuucagaa

SEQ ID NO: 1648046 - RNA, 19 nt, Homo sapiens
  misc_RNA (1)...(19): siRNA sense strand
cugauuuggugcugagaaa

SEQ ID NO: 1648047 - RNA, 19 nt, Homo sapiens
  misc_RNA (1)...(19): siRNA sense strand
uacagguucugaagaugaa

SEQ ID NO: 1648048 - RNA, 19 nt, Homo sapiens
  misc_RNA (1)...(19): siRNA sense strand
gaggaccuuacuugucaua

SEQ ID NO: 1648049 - RNA, 19 nt, Homo sapiens
  misc_RNA (1)...(19): siRNA sense strand
acaacugccuauguuuauu

SEQ ID NO: 1648050 - RNA, 19 nt, Homo sapiens
  misc_RNA (1)...(19): siRNA sense strand
cugauuagacgaguuguaa

SEQ ID NO: 1648051 - RNA, 19 nt, Homo sapiens
  misc_RNA (1)...(19): siRNA sense strand
aaacauuacagguucugaa

SEQ ID NO: 1648052 - RNA, 19 nt, Homo sapiens
  misc_RNA (1)...(19): siRNA sense strand
ggaucuacagcuuucacua

SEQ ID NO: 1648053 - RNA, 19 nt, Homo sapiens
  misc_RNA (1)...(19): siRNA sense strand
gccuauguuuauucguaua

SEQ ID NO: 1648054 - RNA, 19 nt, Homo sapiens
  misc_RNA (1)...(19): siRNA sense strand
guuauacaguaggugaauu

SEQ ID NO: 1648055 - RNA, 19 nt, Homo sapiens
  misc_RNA (1)...(19): siRNA sense strand
agucauauguaacuccaau

SEQ ID NO: 1648056 - RNA, 19 nt, Homo sapiens
  misc_RNA (1)...(19): siRNA sense strand
uuacagguucugaagauga

SEQ ID NO: 1648057 - RNA, 19 nt, Homo sapiens
  misc_RNA (1)...(19): siRNA sense strand
aggaugggauacaggauga

SEQ ID NO: 1648058 - RNA, 19 nt, Homo sapiens
  misc_RNA (1)...(19): siRNA sense strand
ggauccuauuguuucuaua

SEQ ID NO: 1648059 - RNA, 19 nt, Homo sapiens
  misc_RNA (1)...(19): siRNA sense strand
gcauaaaggucaagaguua

SEQ ID NO: 1648060 - RNA, 19 nt, Homo sapiens
  misc_RNA (1)...(19): siRNA sense strand
gaccuuacuugucauaaua

SEQ ID NO: 1648061 - RNA, 19 nt, Homo sapiens
  misc_RNA (1)...(19): siRNA sense strand
uuaccaggauccuuuauua

SEQ ID NO: 1648062 - RNA, 19 nt, Homo sapiens
  misc_RNA (1)...(19): siRNA sense strand
gaucgugcauucauggaua

SEQ ID NO: 1648063 - RNA, 19 nt, Homo sapiens
  misc_RNA (1)...(19): siRNA sense strand
gaauugcucuuuacuaugg

SEQ ID NO: 1648064 - RNA, 19 nt, Homo sapiens
  misc_RNA (1)...(19): siRNA sense strand
ucagcaagcucgaguuaaa

SEQ ID NO: 1648065 - RNA, 19 nt, Homo sapiens
  misc_RNA (1)...(19): siRNA sense strand
caugaaagcugugguucua

SEQ ID NO: 1648066 - RNA, 19 nt, Homo sapiens
  misc_RNA (1)...(19): siRNA sense strand
gauaugcuaggaaacauua

SEQ ID NO: 1648067 - RNA, 19 nt, Homo sapiens
  misc_RNA (1)...(19): siRNA sense strand
gugaaucgcuacaucaaga

SEQ ID NO: 1648068 - RNA, 19 nt, Homo sapiens
  misc_RNA (1)...(19): siRNA sense strand
ggaacaggaacugaaauua

SEQ ID NO: 1648069 - RNA, 19 nt, Homo sapiens
  misc_RNA (1)...(19): siRNA sense strand
gaacaggaacugaaauuac

SEQ ID NO: 1648070 - RNA, 19 nt, Homo sapiens
  misc_RNA (1)...(19): siRNA sense strand
gaagaugaaacaagaauag

SEQ ID NO: 1648071 - RNA, 19 nt, Homo sapiens
  misc_RNA (1)...(19): siRNA sense strand
gauacaggaugaccaugaa

SEQ ID NO: 1648072 - RNA, 19 nt, Homo sapiens
  misc_RNA (1)...(19): siRNA sense strand
uagaggaccuuacuuguca

SEQ ID NO: 1648073 - RNA, 19 nt, Homo sapiens
  misc_RNA (1)...(19): siRNA sense strand
ggaccuuacuugucauaau

SEQ ID NO: 1648074 - RNA, 19 nt, Homo sapiens
  misc_RNA (1)...(19): siRNA sense strand
auacaaauguuccuucaga

SEQ ID NO: 1648075 - RNA, 19 nt, Homo sapiens
  misc_RNA (1)...(19): siRNA sense strand
aaaccuaaauuccaagaug

SEQ ID NO: 1648076 - RNA, 19 nt, Homo sapiens
  misc_RNA (1)...(19): siRNA sense strand
uggaauugcucuuuacuau

SEQ ID NO: 1648077 - RNA, 19 nt, Homo sapiens
  misc_RNA (1)...(19): siRNA sense strand
ggacaaaacuggguucaga

SEQ ID NO: 1648078 - RNA, 19 nt, Homo sapiens
  misc_RNA (1)...(19): siRNA sense strand
gaucaacaacugccuaugu

SEQ ID NO: 1648079 - RNA, 19 nt, Homo sapiens
  misc_RNA (1)...(19): siRNA sense strand
uaucacagaucaacaacug

SEQ ID NO: 1648080 - RNA, 19 nt, Homo sapiens
  misc_RNA (1)...(19): siRNA sense strand
uaaagaaggcgaaauagag

SEQ ID NO: 1648081 - RNA, 19 nt, Homo sapiens
  misc_RNA (1)...(19): siRNA sense strand
gaaggauccuauuguuucu

SEQ ID NO: 1648082 - RNA, 19 nt, Homo sapiens
  misc_RNA (1)...(19): siRNA sense strand
ugaaagcugugguucuaau

SEQ ID NO: 1648083 - RNA, 19 nt, Homo sapiens
  misc_RNA (1)...(19): siRNA sense strand
ucagaacucgucuucauuu

SEQ ID NO: 1648084 - RNA, 19 nt, Homo sapiens
  misc_RNA (1)...(19): siRNA sense strand
gcagaauguuauacaguag

SEQ ID NO: 1648085 - RNA, 19 nt, Homo sapiens
  misc_RNA (1)...(19): siRNA sense strand
gaucuacagcuuucacuau

SEQ ID NO: 1648086 - RNA, 19 nt, Homo sapiens
  misc_RNA (1)...(19): siRNA sense strand
uacaguaggugaauuaugg

SEQ ID NO: 1648087 - RNA, 19 nt, Homo sapiens
  misc_RNA (1)...(19): siRNA sense strand
ugcagaauguuauacagua

SEQ ID NO: 1648088 - RNA, 19 nt, Homo sapiens
  misc_RNA (1)...(19): siRNA sense strand
ggauacaggaugaccauga

SEQ ID NO: 1648089 - RNA, 19 nt, Homo sapiens
  misc_RNA (1)...(19): siRNA sense strand
ugaaggauccuauuguuuc

SEQ ID NO: 1648090 - RNA, 19 nt, Homo sapiens
  misc_RNA (1)...(19): siRNA sense strand
caacuuggaauugcucuuu

SEQ ID NO: 1648091 - RNA, 19 nt, Homo sapiens
  misc_RNA (1)...(19): siRNA sense strand
gaaugccagugguaaaaua

SEQ ID NO: 1648092 - RNA, 19 nt, Homo sapiens
  misc_RNA (1)...(19): siRNA sense strand
uaaguggacauauucauga

SEQ ID NO: 1648093 - RNA, 19 nt, Homo sapiens
  misc_RNA (1)...(19): siRNA sense strand
caucaaccaugcaucaaca

SEQ ID NO: 1648094 - RNA, 19 nt, Homo sapiens
  misc_RNA (1)...(19): siRNA sense strand
ccaggauccuuuauuauac

SEQ ID NO: 1648095 - RNA, 19 nt, Homo sapiens
  misc_RNA (1)...(19): siRNA sense strand
ggauauuucugcaacugau

SEQ ID NO: 1648096 - RNA, 19 nt, Homo sapiens
  misc_RNA (1)...(19): siRNA sense strand
gaaagcugugguucuaauu

SEQ ID NO: 1648097 - RNA, 19 nt, Homo sapiens
  misc_RNA (1)...(19): siRNA sense strand
ugccugcaauugugaguua

SEQ ID NO: 1648098 - RNA, 19 nt, Homo sapiens
  misc_RNA (1)...(19): siRNA sense strand
agaguuauauucacagcaa

SEQ ID NO: 1648099 - RNA, 19 nt, Homo sapiens
  misc_RNA (1)...(19): siRNA sense strand
gaaacuuaaggaugggaua

SEQ ID NO: 1648100 - RNA, 19 nt, Homo sapiens
  misc_RNA (1)...(19): siRNA sense strand
cauuacagguucugaagau

SEQ ID NO: 1648101 - RNA, 19 nt, Homo sapiens
  misc_RNA (1)...(19): siRNA sense strand
gaaauagaggaccuuacuu

SEQ ID NO: 1648102 - RNA, 19 nt, Homo sapiens
  misc_RNA (1)...(19): siRNA sense strand
uccuacagauccugacuua

SEQ ID NO: 1648103 - RNA, 19 nt, Homo sapiens
  misc_RNA (1)...(19): siRNA sense strand
uuaaugagcuaugugaauc

SEQ ID NO: 1648104 - RNA, 19 nt, Homo sapiens
  misc_RNA (1)...(19): siRNA sense strand
gaacucgucuucauuuuac

SEQ ID NO: 1648105 - RNA, 19 nt, Homo sapiens
  misc_RNA (1)...(19): siRNA sense strand
gaaacaagaauagauaugc

SEQ ID NO: 1648106 - RNA, 19 nt, Homo sapiens
  misc_RNA (1)...(19): siRNA sense strand
aaauagaggaccuuacuug

SEQ ID NO: 1648107 - RNA, 19 nt, Homo sapiens
  misc_RNA (1)...(19): siRNA sense strand
gauuagacgaguuguaaau

SEQ ID NO: 1648108 - RNA, 19 nt, Homo sapiens
  misc_RNA (1)...(19): siRNA sense strand
cugccuauguuuauucgua

SEQ ID NO: 1648109 - RNA, 19 nt, Homo sapiens
  misc_RNA (1)...(19): siRNA sense strand
gugcauucauggauauuuc

SEQ ID NO: 1648110 - RNA, 19 nt, Homo sapiens
  misc_RNA (1)...(19): siRNA sense strand
ggaacgauccugcaucaac

SEQ ID NO: 1648111 - RNA, 19 nt, Homo sapiens
  misc_RNA (1)...(19): siRNA sense strand
guacaguuugucuugauaa

SEQ ID NO: 1648112 - RNA, 19 nt, Homo sapiens
  misc_RNA (1)...(19): siRNA sense strand
aagaugauaucguccuuuc

SEQ ID NO: 1648113 - RNA, 19 nt, Homo sapiens
  misc_RNA (1)...(19): siRNA sense strand
aaaguuggaugugcuggaa

SEQ ID NO: 1648114 - RNA, 19 nt, Homo sapiens
  misc_RNA (1)...(19): siRNA sense strand
ggaauugcucuuuacuaug

SEQ ID NO: 1648115 - RNA, 19 nt, Homo sapiens
  misc_RNA (1)...(19): siRNA sense strand
accaggauccuuuauuaua

SEQ ID NO: 1648116 - RNA, 19 nt, Homo sapiens
  misc_RNA (1)...(19): siRNA sense strand
ucaauacuauggaaugcau

SEQ ID NO: 1648117 - RNA, 19 nt, Homo sapiens
  misc_RNA (1)...(19): siRNA sense strand
gucaagaguuauauucaca

SEQ ID NO: 1648118 - RNA, 19 nt, Homo sapiens
  misc_RNA (1)...(19): siRNA sense strand
gcucuuuacuauggagaaa

SEQ ID NO: 1648119 - RNA, 19 nt, Homo sapiens
  misc_RNA (1)...(19): siRNA sense strand
cuucagaacucgucuucau

SEQ ID NO: 1648120 - RNA, 19 nt, Homo sapiens
  misc_RNA (1)...(19): siRNA sense strand
gaagaugauaucguccuuu

SEQ ID NO: 1648121 - RNA, 19 nt, Homo sapiens
  misc_RNA (1)...(19): siRNA sense strand
gacgaguuguaaauaaugu

SEQ ID NO: 1648122 - RNA, 19 nt, Homo sapiens
  misc_RNA (1)...(19): siRNA sense strand
ugacuuaccaccagguuau

SEQ ID NO: 1648123 - RNA, 19 nt, Homo sapiens
  misc_RNA (1)...(19): siRNA sense strand
ggaacugaaauuaccauuc

SEQ ID NO: 1648124 - RNA, 19 nt, Homo sapiens
  misc_RNA (1)...(19): siRNA sense strand
uauauucacagcaagauga

SEQ ID NO: 1648125 - RNA, 19 nt, Homo sapiens
  misc_RNA (1)...(19): siRNA sense strand
cgaaauagaggaccuuacu

SEQ ID NO: 1648126 - RNA, 19 nt, Homo sapiens
  misc_RNA (1)...(19): siRNA sense strand
caacugccuauguuuauuc

SEQ ID NO: 1648127 - RNA, 19 nt, Homo sapiens
  misc_RNA (1)...(19): siRNA sense strand
cgucggaucuacagcuuuc

SEQ ID NO: 1648128 - RNA, 19 nt, Homo sapiens
  misc_RNA (1)...(19): siRNA sense strand
gcugagaaagguuaucaau

SEQ ID NO: 1648129 - RNA, 19 nt, Homo sapiens
  misc_RNA (1)...(19): siRNA sense strand
caagcucgaguuaaaguug

SEQ ID NO: 1648130 - RNA, 19 nt, Homo sapiens
  misc_RNA (1)...(19): siRNA sense strand
uuaaagaaggcgaaauaga

SEQ ID NO: 1648131 - RNA, 19 nt, Homo sapiens
  misc_RNA (1)...(19): siRNA sense strand
uguacaguuugucuugaua

SEQ ID NO: 1648132 - RNA, 19 nt, Homo sapiens
  misc_RNA (1)...(19): siRNA sense strand
caggauccuuuauuauaca

SEQ ID NO: 1648133 - RNA, 19 nt, Homo sapiens
  misc_RNA (1)...(19): siRNA sense strand
uuugaaggauccuauuguu

SEQ ID NO: 1648134 - RNA, 19 nt, Homo sapiens
  misc_RNA (1)...(19): siRNA sense strand
cagguuaugugcagagucu

SEQ ID NO: 1648135 - RNA, 19 nt, Homo sapiens
  misc_RNA (1)...(19): siRNA sense strand
ugggaacgauccugcauca

SEQ ID NO: 1648136 - RNA, 19 nt, Homo sapiens
  misc_RNA (1)...(19): siRNA sense strand
ucaugggccugguccuuug

SEQ ID NO: 1648137 - RNA, 19 nt, Homo sapiens
  misc_RNA (1)...(19): siRNA sense strand
ggucaagaguuauauucac

SEQ ID NO: 1648138 - RNA, 19 nt, Homo sapiens
  misc_RNA (1)...(19): siRNA sense strand
cuaggaaacauuacagguu

SEQ ID NO: 1648139 - RNA, 19 nt, Homo sapiens
  misc_RNA (1)...(19): siRNA sense strand
aaacggaaugccaguggua

SEQ ID NO: 1648140 - RNA, 19 nt, Homo sapiens
  misc_RNA (1)...(19): siRNA sense strand
ugaagaugauaucguccuu

SEQ ID NO: 1648141 - RNA, 19 nt, Homo sapiens
  misc_RNA (1)...(19): siRNA sense strand
aggcaacggugacuuucaa

SEQ ID NO: 1648142 - RNA, 19 nt, Homo sapiens
  misc_RNA (1)...(19): siRNA sense strand
aagcacagacuuugaagga

SEQ ID NO: 1648143 - RNA, 19 nt, Homo sapiens
  misc_RNA (1)...(19): siRNA sense strand
aaagauaugcuaggaaaca

SEQ ID NO: 1648144 - RNA, 19 nt, Homo sapiens
  misc_RNA (1)...(19): siRNA sense strand
gcuggaacaggaacugaaa

SEQ ID NO: 1648145 - RNA, 19 nt, Homo sapiens
  misc_RNA (1)...(19): siRNA sense strand
uacaaauguuccuucagaa

SEQ ID NO: 1648146 - RNA, 19 nt, Homo sapiens
  misc_RNA (1)...(19): siRNA sense strand
cugauuuggugcugagaaa

SEQ ID NO: 1648147 - RNA, 19 nt, Homo sapiens
  misc_RNA (1)...(19): siRNA sense strand
uacagguucugaagaugaa

SEQ ID NO: 1648148 - RNA, 19 nt, Homo sapiens
  misc_RNA (1)...(19): siRNA sense strand
gaggaccuuacuugucaua

SEQ ID NO: 1648149 - RNA, 19 nt, Homo sapiens
  misc_RNA (1)...(19): siRNA sense strand
acaacugccuauguuuauu

SEQ ID NO: 1648150 - RNA, 19 nt, Homo sapiens
  misc_RNA (1)...(19): siRNA sense strand
cugauuagacgaguuguaa

SEQ ID NO: 1648151 - RNA, 19 nt, Homo sapiens
  misc_RNA (1)...(19): siRNA sense strand
aaacauuacagguucugaa

SEQ ID NO: 1648152 - RNA, 19 nt, Homo sapiens
  misc_RNA (1)...(19): siRNA sense strand
ggaucuacagcuuucacua

SEQ ID NO: 1648153 - RNA, 19 nt, Homo sapiens
  misc_RNA (1)...(19): siRNA sense strand
gccuauguuuauucguaua

SEQ ID NO: 1648154 - RNA, 19 nt, Homo sapiens
  misc_RNA (1)...(19): siRNA sense strand
guuauacaguaggugaauu

SEQ ID NO: 1648155 - RNA, 19 nt, Homo sapiens
  misc_RNA (1)...(19): siRNA sense strand
agucauauguaacuccaau

SEQ ID NO: 1648156 - RNA, 19 nt, Homo sapiens
  misc_RNA (1)...(19): siRNA sense strand
uuacagguucugaagauga

SEQ ID NO: 1648157 - RNA, 19 nt, Homo sapiens
  misc_RNA (1)...(19): siRNA sense strand
aggaugggauacaggauga

SEQ ID NO: 1648158 - RNA, 19 nt, Homo sapiens
  misc_RNA (1)...(19): siRNA sense strand
ggauccuauuguuucuaua

SEQ ID NO: 1648159 - RNA, 19 nt, Homo sapiens
  misc_RNA (1)...(19): siRNA sense strand
gcauaaaggucaagaguua

SEQ ID NO: 1648160 - RNA, 19 nt, Homo sapiens
  misc_RNA (1)...(19): siRNA sense strand
gaccuuacuugucauaaua

SEQ ID NO: 1648161 - RNA, 19 nt, Homo sapiens
  misc_RNA (1)...(19): siRNA sense strand
uuaccaggauccuuuauua

SEQ ID NO: 1648162 - RNA, 19 nt, Homo sapiens
  misc_RNA (1)...(19): siRNA sense strand
gaucgugcauucauggaua

SEQ ID NO: 1648163 - RNA, 19 nt, Homo sapiens
  misc_RNA (1)...(19): siRNA sense strand
gaauugcucuuuacuaugg

SEQ ID NO: 1648164 - RNA, 19 nt, Homo sapiens
  misc_RNA (1)...(19): siRNA sense strand
ucagcaagcucgaguuaaa

SEQ ID NO: 1648165 - RNA, 19 nt, Homo sapiens
  misc_RNA (1)...(19): siRNA sense strand
caugaaagcugugguucua

SEQ ID NO: 1648166 - RNA, 19 nt, Homo sapiens
  misc_RNA (1)...(19): siRNA sense strand
gauaugcuaggaaacauua

SEQ ID NO: 1648167 - RNA, 19 nt, Homo sapiens
  misc_RNA (1)...(19): siRNA sense strand
gugaaucgcuacaucaaga

SEQ ID NO: 1648168 - RNA, 19 nt, Homo sapiens
  misc_RNA (1)...(19): siRNA sense strand
ggaacaggaacugaaauua

SEQ ID NO: 1648169 - RNA, 19 nt, Homo sapiens
  misc_RNA (1)...(19): siRNA sense strand
gaacaggaacugaaauuac

SEQ ID NO: 1648170 - RNA, 19 nt, Homo sapiens
  misc_RNA (1)...(19): siRNA sense strand
gaagaugaaacaagaauag

SEQ ID NO: 1648171 - RNA, 19 nt, Homo sapiens
  misc_RNA (1)...(19): siRNA sense strand
gauacaggaugaccaugaa

SEQ ID NO: 1648172 - RNA, 19 nt, Homo sapiens
  misc_RNA (1)...(19): siRNA sense strand
uagaggaccuuacuuguca

SEQ ID NO: 1648173 - RNA, 19 nt, Homo sapiens
  misc_RNA (1)...(19): siRNA sense strand
ggaccuuacuugucauaau

SEQ ID NO: 1648174 - RNA, 19 nt, Homo sapiens
  misc_RNA (1)...(19): siRNA sense strand
auacaaauguuccuucaga

SEQ ID NO: 1648175 - RNA, 19 nt, Homo sapiens
  misc_RNA (1)...(19): siRNA sense strand
aaaccuaaauuccaagaug

SEQ ID NO: 1648176 - RNA, 19 nt, Homo sapiens
  misc_RNA (1)...(19): siRNA sense strand
uggaauugcucuuuacuau

SEQ ID NO: 1648177 - RNA, 19 nt, Homo sapiens
  misc_RNA (1)...(19): siRNA sense strand
ggacaaaacuggguucaga

SEQ ID NO: 1648178 - RNA, 19 nt, Homo sapiens
  misc_RNA (1)...(19): siRNA sense strand
gaucaacaacugccuaugu

SEQ ID NO: 1648179 - RNA, 19 nt, Homo sapiens
  misc_RNA (1)...(19): siRNA sense strand
uaucacagaucaacaacug

SEQ ID NO: 1648180 - RNA, 19 nt, Homo sapiens
  misc_RNA (1)...(19): siRNA sense strand
uaaagaaggcgaaauagag

SEQ ID NO: 1648181 - RNA, 19 nt, Homo sapiens
  misc_RNA (1)...(19): siRNA sense strand
gaaggauccuauuguuucu

SEQ ID NO: 1648182 - RNA, 19 nt, Homo sapiens
  misc_RNA (1)...(19): siRNA sense strand
ugaaagcugugguucuaau

SEQ ID NO: 1648183 - RNA, 19 nt, Homo sapiens
  misc_RNA (1)...(19): siRNA sense strand
ucagaacucgucuucauuu

SEQ ID NO: 1648184 - RNA, 19 nt, Homo sapiens
  misc_RNA (1)...(19): siRNA sense strand
gcagaauguuauacaguag

SEQ ID NO: 1648185 - RNA, 19 nt, Homo sapiens
  misc_RNA (1)...(19): siRNA sense strand
gaucuacagcuuucacuau

SEQ ID NO: 1648186 - RNA, 19 nt, Homo sapiens
  misc_RNA (1)...(19): siRNA sense strand
uacaguaggugaauuaugg

SEQ ID NO: 1648187 - RNA, 19 nt, Homo sapiens
  misc_RNA (1)...(19): siRNA sense strand
ugcagaauguuauacagua

SEQ ID NO: 1648188 - RNA, 19 nt, Homo sapiens
  misc_RNA (1)...(19): siRNA sense strand
ggauacaggaugaccauga

SEQ ID NO: 1648189 - RNA, 19 nt, Homo sapiens
  misc_RNA (1)...(19): siRNA sense strand
ugaaggauccuauuguuuc

SEQ ID NO: 1648190 - RNA, 19 nt, Homo sapiens
  misc_RNA (1)...(19): siRNA sense strand
caacuuggaauugcucuuu

SEQ ID NO: 1648191 - RNA, 19 nt, Homo sapiens
  misc_RNA (1)...(19): siRNA sense strand
gaaugccagugguaaaaua

SEQ ID NO: 1648192 - RNA, 19 nt, Homo sapiens
  misc_RNA (1)...(19): siRNA sense strand
uaaguggacauauucauga

SEQ ID NO: 1648193 - RNA, 19 nt, Homo sapiens
  misc_RNA (1)...(19): siRNA sense strand
caucaaccaugcaucaaca

SEQ ID NO: 1648194 - RNA, 19 nt, Homo sapiens
  misc_RNA (1)...(19): siRNA sense strand
ccaggauccuuuauuauac

SEQ ID NO: 1648195 - RNA, 19 nt, Homo sapiens
  misc_RNA (1)...(19): siRNA sense strand
ggauauuucugcaacugau

SEQ ID NO: 1648196 - RNA, 19 nt, Homo sapiens
  misc_RNA (1)...(19): siRNA sense strand
gaaagcugugguucuaauu

SEQ ID NO: 1648197 - RNA, 19 nt, Homo sapiens
  misc_RNA (1)...(19): siRNA sense strand
ugccugcaauugugaguua

SEQ ID NO: 1648198 - RNA, 19 nt, Homo sapiens
  misc_RNA (1)...(19): siRNA sense strand
agaguuauauucacagcaa

SEQ ID NO: 1648199 - RNA, 19 nt, Homo sapiens
  misc_RNA (1)...(19): siRNA sense strand
gaaacuuaaggaugggaua

SEQ ID NO: 1648200 - RNA, 19 nt, Homo sapiens
  misc_RNA (1)...(19): siRNA sense strand
cauuacagguucugaagau

SEQ ID NO: 1648201 - RNA, 19 nt, Homo sapiens
  misc_RNA (1)...(19): siRNA sense strand
gaaauagaggaccuuacuu

SEQ ID NO: 1648202 - RNA, 19 nt, Homo sapiens
  misc_RNA (1)...(19): siRNA sense strand
uccuacagauccugacuua

SEQ ID NO: 1648203 - RNA, 19 nt, Homo sapiens
  misc_RNA (1)...(19): siRNA sense strand
uuaaugagcuaugugaauc

SEQ ID NO: 1648204 - RNA, 19 nt, Homo sapiens
  misc_RNA (1)...(19): siRNA sense strand
gaacucgucuucauuuuac

SEQ ID NO: 1648205 - RNA, 19 nt, Homo sapiens
  misc_RNA (1)...(19): siRNA sense strand
gaaacaagaauagauaugc

SEQ ID NO: 1648206 - RNA, 19 nt, Homo sapiens
  misc_RNA (1)...(19): siRNA sense strand
aaauagaggaccuuacuug

SEQ ID NO: 1648207 - RNA, 19 nt, Homo sapiens
  misc_RNA (1)...(19): siRNA sense strand
gauuagacgaguuguaaau

SEQ ID NO: 1648208 - RNA, 19 nt, Homo sapiens
  misc_RNA (1)...(19): siRNA sense strand
cugccuauguuuauucgua

SEQ ID NO: 1648209 - RNA, 19 nt, Homo sapiens
  misc_RNA (1)...(19): siRNA sense strand
gugcauucauggauauuuc

SEQ ID NO: 1648210 - RNA, 19 nt, Homo sapiens
  misc_RNA (1)...(19): siRNA sense strand
ggaacgauccugcaucaac

SEQ ID NO: 1648211 - RNA, 19 nt, Homo sapiens
  misc_RNA (1)...(19): siRNA sense strand
guacaguuugucuugauaa

SEQ ID NO: 1648212 - RNA, 19 nt, Homo sapiens
  misc_RNA (1)...(19): siRNA sense strand
aagaugauaucguccuuuc

SEQ ID NO: 1648213 - RNA, 19 nt, Homo sapiens
  misc_RNA (1)...(19): siRNA sense strand
aaaguuggaugugcuggaa

SEQ ID NO: 1648214 - RNA, 19 nt, Homo sapiens
  misc_RNA (1)...(19): siRNA sense strand
ggaauugcucuuuacuaug

SEQ ID NO: 1648215 - RNA, 19 nt, Homo sapiens
  misc_RNA (1)...(19): siRNA sense strand
accaggauccuuuauuaua

SEQ ID NO: 1648216 - RNA, 19 nt, Homo sapiens
  misc_RNA (1)...(19): siRNA sense strand
ucaauacuauggaaugcau

SEQ ID NO: 1648217 - RNA, 19 nt, Homo sapiens
  misc_RNA (1)...(19): siRNA sense strand
gucaagaguuauauucaca

SEQ ID NO: 1648218 - RNA, 19 nt, Homo sapiens
  misc_RNA (1)...(19): siRNA sense strand
gcucuuuacuauggagaaa

SEQ ID NO: 1648219 - RNA, 19 nt, Homo sapiens
  misc_RNA (1)...(19): siRNA sense strand
cuucagaacucgucuucau

SEQ ID NO: 1648220 - RNA, 19 nt, Homo sapiens
  misc_RNA (1)...(19): siRNA sense strand
gaagaugauaucguccuuu

SEQ ID NO: 1648221 - RNA, 19 nt, Homo sapiens
  misc_RNA (1)...(19): siRNA sense strand
gacgaguuguaaauaaugu

SEQ ID NO: 1648222 - RNA, 19 nt, Homo sapiens
  misc_RNA (1)...(19): siRNA sense strand
ugacuuaccaccagguuau

SEQ ID NO: 1648223 - RNA, 19 nt, Homo sapiens
  misc_RNA (1)...(19): siRNA sense strand
ggaacugaaauuaccauuc

SEQ ID NO: 1648224 - RNA, 19 nt, Homo sapiens
  misc_RNA (1)...(19): siRNA sense strand
uauauucacagcaagauga

SEQ ID NO: 1648225 - RNA, 19 nt, Homo sapiens
  misc_RNA (1)...(19): siRNA sense strand
cgaaauagaggaccuuacu

SEQ ID NO: 1648226 - RNA, 19 nt, Homo sapiens
  misc_RNA (1)...(19): siRNA sense strand
caacugccuauguuuauuc

SEQ ID NO: 1648227 - RNA, 19 nt, Homo sapiens
  misc_RNA (1)...(19): siRNA sense strand
cgucggaucuacagcuuuc

SEQ ID NO: 1648228 - RNA, 19 nt, Homo sapiens
  misc_RNA (1)...(19): siRNA sense strand
gcugagaaagguuaucaau

SEQ ID NO: 1648229 - RNA, 19 nt, Homo sapiens
  misc_RNA (1)...(19): siRNA sense strand
caagcucgaguuaaaguug

SEQ ID NO: 1648230 - RNA, 19 nt, Homo sapiens
  misc_RNA (1)...(19): siRNA sense strand
uuaaagaaggcgaaauaga

SEQ ID NO: 1648231 - RNA, 19 nt, Homo sapiens
  misc_RNA (1)...(19): siRNA sense strand
uguacaguuugucuugaua

SEQ ID NO: 1648232 - RNA, 19 nt, Homo sapiens
  misc_RNA (1)...(19): siRNA sense strand
caggauccuuuauuauaca

SEQ ID NO: 1648233 - RNA, 19 nt, Homo sapiens
  misc_RNA (1)...(19): siRNA sense strand
uuugaaggauccuauuguu

SEQ ID NO: 1648234 - RNA, 19 nt, Homo sapiens
  misc_RNA (1)...(19): siRNA sense strand
cagguuaugugcagagucu

SEQ ID NO: 1648235 - RNA, 19 nt, Homo sapiens
  misc_RNA (1)...(19): siRNA sense strand
ugggaacgauccugcauca

SEQ ID NO: 1648236 - RNA, 19 nt, Homo sapiens
  misc_RNA (1)...(19): siRNA sense strand
ucaugggccugguccuuug

SEQ ID NO: 1648237 - RNA, 19 nt, Homo sapiens
  misc_RNA (1)...(19): siRNA sense strand
ggucaagaguuauauucac

SEQ ID NO: 1648238 - RNA, 19 nt, Homo sapiens
  misc_RNA (1)...(19): siRNA sense strand
cuaggaaacauuacagguu

SEQ ID NO: 1648239 - RNA, 19 nt, Homo sapiens
  misc_RNA (1)...(19): siRNA sense strand
aaacggaaugccaguggua

SEQ ID NO: 1648240 - RNA, 19 nt, Homo sapiens
  misc_RNA (1)...(19): siRNA sense strand
ugaagaugauaucguccuu

SEQ ID NO: 1648241 - RNA, 19 nt, Homo sapiens
  misc_RNA (1)...(19): siRNA sense strand
aggcaacggugacuuucaa

SEQ ID NO: 1648242 - RNA, 19 nt, Homo sapiens
  misc_RNA (1)...(19): siRNA sense strand
aagcacagacuuugaagga

SEQ ID NO: 1648243 - RNA, 19 nt, Homo sapiens
  misc_RNA (1)...(19): siRNA sense strand
aaagauaugcuaggaaaca

SEQ ID NO: 1648244 - RNA, 19 nt, Homo sapiens
  misc_RNA (1)...(19): siRNA sense strand
gcuggaacaggaacugaaa

SEQ ID NO: 1648245 - RNA, 19 nt, Homo sapiens
  misc_RNA (1)...(19): siRNA sense strand
uacaaauguuccuucagaa

SEQ ID NO: 1648246 - RNA, 19 nt, Homo sapiens
  misc_RNA (1)...(19): siRNA sense strand
cugauuuggugcugagaaa

SEQ ID NO: 1648247 - RNA, 19 nt, Homo sapiens
  misc_RNA (1)...(19): siRNA sense strand
uacagguucugaagaugaa

SEQ ID NO: 1648248 - RNA, 19 nt, Homo sapiens
  misc_RNA (1)...(19): siRNA sense strand
gaggaccuuacuugucaua

SEQ ID NO: 1648249 - RNA, 19 nt, Homo sapiens
  misc_RNA (1)...(19): siRNA sense strand
acaacugccuauguuuauu

SEQ ID NO: 1648250 - RNA, 19 nt, Homo sapiens
  misc_RNA (1)...(19): siRNA sense strand
cugauuagacgaguuguaa

SEQ ID NO: 1648251 - RNA, 19 nt, Homo sapiens
  misc_RNA (1)...(19): siRNA sense strand
aaacauuacagguucugaa

SEQ ID NO: 1648252 - RNA, 19 nt, Homo sapiens
  misc_RNA (1)...(19): siRNA sense strand
ggaucuacagcuuucacua

SEQ ID NO: 1648253 - RNA, 19 nt, Homo sapiens
  misc_RNA (1)...(19): siRNA sense strand
gccuauguuuauucguaua

SEQ ID NO: 1648254 - RNA, 19 nt, Homo sapiens
  misc_RNA (1)...(19): siRNA sense strand
guuauacaguaggugaauu

SEQ ID NO: 1648255 - RNA, 19 nt, Homo sapiens
  misc_RNA (1)...(19): siRNA sense strand
agucauauguaacuccaau

SEQ ID NO: 1648256 - RNA, 19 nt, Homo sapiens
  misc_RNA (1)...(19): siRNA sense strand
uuacagguucugaagauga

SEQ ID NO: 1648257 - RNA, 19 nt, Homo sapiens
  misc_RNA (1)...(19): siRNA sense strand
aggaugggauacaggauga

SEQ ID NO: 1648258 - RNA, 19 nt, Homo sapiens
  misc_RNA (1)...(19): siRNA sense strand
ggauccuauuguuucuaua

SEQ ID NO: 1648259 - RNA, 19 nt, Homo sapiens
  misc_RNA (1)...(19): siRNA sense strand
gcauaaaggucaagaguua

SEQ ID NO: 1648260 - RNA, 19 nt, Homo sapiens
  misc_RNA (1)...(19): siRNA sense strand
gaccuuacuugucauaaua

SEQ ID NO: 1648261 - RNA, 19 nt, Homo sapiens
  misc_RNA (1)...(19): siRNA sense strand
uuaccaggauccuuuauua

SEQ ID NO: 1648262 - RNA, 19 nt, Homo sapiens
  misc_RNA (1)...(19): siRNA sense strand
gaucgugcauucauggaua

SEQ ID NO: 1648263 - RNA, 19 nt, Homo sapiens
  misc_RNA (1)...(19): siRNA sense strand
gaauugcucuuuacuaugg

SEQ ID NO: 1648264 - RNA, 19 nt, Homo sapiens
  misc_RNA (1)...(19): siRNA sense strand
ucagcaagcucgaguuaaa

SEQ ID NO: 1648265 - RNA, 19 nt, Homo sapiens
  misc_RNA (1)...(19): siRNA sense strand
caugaaagcugugguucua

SEQ ID NO: 1648266 - RNA, 19 nt, Homo sapiens
  misc_RNA (1)...(19): siRNA sense strand
gauaugcuaggaaacauua

SEQ ID NO: 1648267 - RNA, 19 nt, Homo sapiens
  misc_RNA (1)...(19): siRNA sense strand
gugaaucgcuacaucaaga

SEQ ID NO: 1648268 - RNA, 19 nt, Homo sapiens
  misc_RNA (1)...(19): siRNA sense strand
ggaacaggaacugaaauua

SEQ ID NO: 1648269 - RNA, 19 nt, Homo sapiens
  misc_RNA (1)...(19): siRNA sense strand
gaacaggaacugaaauuac

SEQ ID NO: 1648270 - RNA, 19 nt, Homo sapiens
  misc_RNA (1)...(19): siRNA sense strand
gaagaugaaacaagaauag

SEQ ID NO: 1648271 - RNA, 19 nt, Homo sapiens
  misc_RNA (1)...(19): siRNA sense strand
gauacaggaugaccaugaa

SEQ ID NO: 1648272 - RNA, 19 nt, Homo sapiens
  misc_RNA (1)...(19): siRNA sense strand
uagaggaccuuacuuguca

SEQ ID NO: 1648273 - RNA, 19 nt, Homo sapiens
  misc_RNA (1)...(19): siRNA sense strand
ggaccuuacuugucauaau

SEQ ID NO: 1648274 - RNA, 19 nt, Homo sapiens
  misc_RNA (1)...(19): siRNA sense strand
auacaaauguuccuucaga

SEQ ID NO: 1648275 - RNA, 19 nt, Homo sapiens
  misc_RNA (1)...(19): siRNA sense strand
aaaccuaaauuccaagaug

SEQ ID NO: 1648276 - RNA, 19 nt, Homo sapiens
  misc_RNA (1)...(19): siRNA sense strand
uggaauugcucuuuacuau

SEQ ID NO: 1648277 - RNA, 19 nt, Homo sapiens
  misc_RNA (1)...(19): siRNA sense strand
ggacaaaacuggguucaga

SEQ ID NO: 1648278 - RNA, 19 nt, Homo sapiens
  misc_RNA (1)...(19): siRNA sense strand
gaucaacaacugccuaugu

SEQ ID NO: 1648279 - RNA, 19 nt, Homo sapiens
  misc_RNA (1)...(19): siRNA sense strand
uaucacagaucaacaacug

SEQ ID NO: 1648280 - RNA, 19 nt, Homo sapiens
  misc_RNA (1)...(19): siRNA sense strand
uaaagaaggcgaaauagag

SEQ ID NO: 1648281 - RNA, 19 nt, Homo sapiens
  misc_RNA (1)...(19): siRNA sense strand
gaaggauccuauuguuucu

SEQ ID NO: 1648282 - RNA, 19 nt, Homo sapiens
  misc_RNA (1)...(19): siRNA sense strand
ugaaagcugugguucuaau

SEQ ID NO: 1648283 - RNA, 19 nt, Homo sapiens
  misc_RNA (1)...(19): siRNA sense strand
ucagaacucgucuucauuu

SEQ ID NO: 1648284 - RNA, 19 nt, Homo sapiens
  misc_RNA (1)...(19): siRNA sense strand
gcagaauguuauacaguag

SEQ ID NO: 1648285 - RNA, 19 nt, Homo sapiens
  misc_RNA (1)...(19): siRNA sense strand
gaucuacagcuuucacuau

SEQ ID NO: 1648286 - RNA, 19 nt, Homo sapiens
  misc_RNA (1)...(19): siRNA sense strand
uacaguaggugaauuaugg

SEQ ID NO: 1648287 - RNA, 19 nt, Homo sapiens
  misc_RNA (1)...(19): siRNA sense strand
ugcagaauguuauacagua

SEQ ID NO: 1648288 - RNA, 19 nt, Homo sapiens
  misc_RNA (1)...(19): siRNA sense strand
ggauacaggaugaccauga

SEQ ID NO: 1648289 - RNA, 19 nt, Homo sapiens
  misc_RNA (1)...(19): siRNA sense strand
ugaaggauccuauuguuuc

SEQ ID NO: 1648290 - RNA, 19 nt, Homo sapiens
  misc_RNA (1)...(19): siRNA sense strand
caacuuggaauugcucuuu

SEQ ID NO: 1648291 - RNA, 19 nt, Homo sapiens
  misc_RNA (1)...(19): siRNA sense strand
gaaugccagugguaaaaua

SEQ ID NO: 1648292 - RNA, 19 nt, Homo sapiens
  misc_RNA (1)...(19): siRNA sense strand
uaaguggacauauucauga

SEQ ID NO: 1648293 - RNA, 19 nt, Homo sapiens
  misc_RNA (1)...(19): siRNA sense strand
caucaaccaugcaucaaca

SEQ ID NO: 1648294 - RNA, 19 nt, Homo sapiens
  misc_RNA (1)...(19): siRNA sense strand
ccaggauccuuuauuauac

SEQ ID NO: 1648295 - RNA, 19 nt, Homo sapiens
  misc_RNA (1)...(19): siRNA sense strand
ggauauuucugcaacugau

SEQ ID NO: 1648296 - RNA, 19 nt, Homo sapiens
  misc_RNA (1)...(19): siRNA sense strand
gaaagcugugguucuaauu

SEQ ID NO: 1648297 - RNA, 19 nt, Homo sapiens
  misc_RNA (1)...(19): siRNA sense strand
ugccugcaauugugaguua

SEQ ID NO: 1648298 - RNA, 19 nt, Homo sapiens
  misc_RNA (1)...(19): siRNA sense strand
agaguuauauucacagcaa

SEQ ID NO: 1648299 - RNA, 19 nt, Homo sapiens
  misc_RNA (1)...(19): siRNA sense strand
gaaacuuaaggaugggaua

SEQ ID NO: 1648300 - RNA, 19 nt, Homo sapiens
  misc_RNA (1)...(19): siRNA sense strand
cauuacagguucugaagau

SEQ ID NO: 1648301 - RNA, 19 nt, Homo sapiens
  misc_RNA (1)...(19): siRNA sense strand
gaaauagaggaccuuacuu

SEQ ID NO: 1648302 - RNA, 19 nt, Homo sapiens
  misc_RNA (1)...(19): siRNA sense strand
uccuacagauccugacuua

SEQ ID NO: 1648303 - RNA, 19 nt, Homo sapiens
  misc_RNA (1)...(19): siRNA sense strand
uuaaugagcuaugugaauc

SEQ ID NO: 1648304 - RNA, 19 nt, Homo sapiens
  misc_RNA (1)...(19): siRNA sense strand
gaacucgucuucauuuuac

SEQ ID NO: 1648305 - RNA, 19 nt, Homo sapiens
  misc_RNA (1)...(19): siRNA sense strand
gaaacaagaauagauaugc

SEQ ID NO: 1648306 - RNA, 19 nt, Homo sapiens
  misc_RNA (1)...(19): siRNA sense strand
aaauagaggaccuuacuug

SEQ ID NO: 1648307 - RNA, 19 nt, Homo sapiens
  misc_RNA (1)...(19): siRNA sense strand
gauuagacgaguuguaaau

SEQ ID NO: 1648308 - RNA, 19 nt, Homo sapiens
  misc_RNA (1)...(19): siRNA sense strand
cugccuauguuuauucgua

SEQ ID NO: 1648309 - RNA, 19 nt, Homo sapiens
  misc_RNA (1)...(19): siRNA sense strand
gugcauucauggauauuuc

SEQ ID NO: 1648310 - RNA, 19 nt, Homo sapiens
  misc_RNA (1)...(19): siRNA sense strand
ggaacgauccugcaucaac

SEQ ID NO: 1648311 - RNA, 19 nt, Homo sapiens
  misc_RNA (1)...(19): siRNA sense strand
guacaguuugucuugauaa

SEQ ID NO: 1648312 - RNA, 19 nt, Homo sapiens
  misc_RNA (1)...(19): siRNA sense strand
aagaugauaucguccuuuc

SEQ ID NO: 1648313 - RNA, 19 nt, Homo sapiens
  misc_RNA (1)...(19): siRNA sense strand
aaaguuggaugugcuggaa

SEQ ID NO: 1648314 - RNA, 19 nt, Homo sapiens
  misc_RNA (1)...(19): siRNA sense strand
ggaauugcucuuuacuaug

SEQ ID NO: 1648315 - RNA, 19 nt, Homo sapiens
  misc_RNA (1)...(19): siRNA sense strand
accaggauccuuuauuaua

SEQ ID NO: 1648316 - RNA, 19 nt, Homo sapiens
  misc_RNA (1)...(19): siRNA sense strand
ucaauacuauggaaugcau

SEQ ID NO: 1648317 - RNA, 19 nt, Homo sapiens
  misc_RNA (1)...(19): siRNA sense strand
gucaagaguuauauucaca

SEQ ID NO: 1648318 - RNA, 19 nt, Homo sapiens
  misc_RNA (1)...(19): siRNA sense strand
gcucuuuacuauggagaaa

SEQ ID NO: 1648319 - RNA, 19 nt, Homo sapiens
  misc_RNA (1)...(19): siRNA sense strand
cuucagaacucgucuucau

SEQ ID NO: 1648320 - RNA, 19 nt, Homo sapiens
  misc_RNA (1)...(19): siRNA sense strand
gaagaugauaucguccuuu

SEQ ID NO: 1648321 - RNA, 19 nt, Homo sapiens
  misc_RNA (1)...(19): siRNA sense strand
gacgaguuguaaauaaugu

SEQ ID NO: 1648322 - RNA, 19 nt, Homo sapiens
  misc_RNA (1)...(19): siRNA sense strand
ugacuuaccaccagguuau

SEQ ID NO: 1648323 - RNA, 19 nt, Homo sapiens
  misc_RNA (1)...(19): siRNA sense strand
ggaacugaaauuaccauuc

SEQ ID NO: 1648324 - RNA, 19 nt, Homo sapiens
  misc_RNA (1)...(19): siRNA sense strand
uauauucacagcaagauga

SEQ ID NO: 1648325 - RNA, 19 nt, Homo sapiens
  misc_RNA (1)...(19): siRNA sense strand
cgaaauagaggaccuuacu

SEQ ID NO: 1648326 - RNA, 19 nt, Homo sapiens
  misc_RNA (1)...(19): siRNA sense strand
caacugccuauguuuauuc

SEQ ID NO: 1648327 - RNA, 19 nt, Homo sapiens
  misc_RNA (1)...(19): siRNA sense strand
cgucggaucuacagcuuuc

SEQ ID NO: 1648328 - RNA, 19 nt, Homo sapiens
  misc_RNA (1)...(19): siRNA sense strand
gcugagaaagguuaucaau

SEQ ID NO: 1648329 - RNA, 19 nt, Homo sapiens
  misc_RNA (1)...(19): siRNA sense strand
caagcucgaguuaaaguug

SEQ ID NO: 1648330 - RNA, 19 nt, Homo sapiens
  misc_RNA (1)...(19): siRNA sense strand
uuaaagaaggcgaaauaga

SEQ ID NO: 1648331 - RNA, 19 nt, Homo sapiens
  misc_RNA (1)...(19): siRNA sense strand
uguacaguuugucuugaua

SEQ ID NO: 1648332 - RNA, 19 nt, Homo sapiens
  misc_RNA (1)...(19): siRNA sense strand
caggauccuuuauuauaca

SEQ ID NO: 1648333 - RNA, 19 nt, Homo sapiens
  misc_RNA (1)...(19): siRNA sense strand
uuugaaggauccuauuguu

SEQ ID NO: 1648334 - RNA, 19 nt, Homo sapiens
  misc_RNA (1)...(19): siRNA sense strand
cagguuaugugcagagucu

SEQ ID NO: 1648335 - RNA, 19 nt, Homo sapiens
  misc_RNA (1)...(19): siRNA sense strand
ugggaacgauccugcauca

SEQ ID NO: 1648336 - RNA, 19 nt, Homo sapiens
  misc_RNA (1)...(19): siRNA sense strand
ucaugggccugguccuuug

SEQ ID NO: 1648337 - RNA, 19 nt, Homo sapiens
  misc_RNA (1)...(19): siRNA sense strand
ggucaagaguuauauucac

SEQ ID NO: 1648338 - RNA, 19 nt, Homo sapiens
  misc_RNA (1)...(19): siRNA sense strand
cuaggaaacauuacagguu

SEQ ID NO: 1648339 - RNA, 19 nt, Homo sapiens
  misc_RNA (1)...(19): siRNA sense strand
aaacggaaugccaguggua

SEQ ID NO: 1648340 - RNA, 19 nt, Homo sapiens
  misc_RNA (1)...(19): siRNA sense strand
ugaagaugauaucguccuu

SEQ ID NO: 1648341 - RNA, 19 nt, Homo sapiens
  misc_RNA (1)...(19): siRNA sense strand
aggcaacggugacuuucaa

SEQ ID NO: 1648342 - RNA, 19 nt, Homo sapiens
  misc_RNA (1)...(19): siRNA sense strand
aagcacagacuuugaagga

SEQ ID NO: 1648343 - RNA, 19 nt, Homo sapiens
  misc_RNA (1)...(19): siRNA sense strand
aaagauaugcuaggaaaca

SEQ ID NO: 1648344 - RNA, 19 nt, Homo sapiens
  misc_RNA (1)...(19): siRNA sense strand
gcuggaacaggaacugaaa

SEQ ID NO: 1648345 - RNA, 19 nt, Homo sapiens
  misc_RNA (1)...(19): siRNA sense strand
uacaaauguuccuucagaa

SEQ ID NO: 1648346 - RNA, 19 nt, Homo sapiens
  misc_RNA (1)...(19): siRNA sense strand
cugauuuggugcugagaaa

SEQ ID NO: 1648347 - RNA, 19 nt, Homo sapiens
  misc_RNA (1)...(19): siRNA sense strand
uacagguucugaagaugaa

SEQ ID NO: 1648348 - RNA, 19 nt, Homo sapiens
  misc_RNA (1)...(19): siRNA sense strand
gaggaccuuacuugucaua

SEQ ID NO: 1648349 - RNA, 19 nt, Homo sapiens
  misc_RNA (1)...(19): siRNA sense strand
acaacugccuauguuuauu

SEQ ID NO: 1648350 - RNA, 19 nt, Homo sapiens
  misc_RNA (1)...(19): siRNA sense strand
cugauuagacgaguuguaa

SEQ ID NO: 1648351 - RNA, 19 nt, Homo sapiens
  misc_RNA (1)...(19): siRNA sense strand
aaacauuacagguucugaa

SEQ ID NO: 1648352 - RNA, 19 nt, Homo sapiens
  misc_RNA (1)...(19): siRNA sense strand
ggaucuacagcuuucacua

SEQ ID NO: 1648353 - RNA, 19 nt, Homo sapiens
  misc_RNA (1)...(19): siRNA sense strand
gccuauguuuauucguaua

SEQ ID NO: 1648354 - RNA, 19 nt, Homo sapiens
  misc_RNA (1)...(19): siRNA sense strand
guuauacaguaggugaauu

SEQ ID NO: 1648355 - RNA, 19 nt, Homo sapiens
  misc_RNA (1)...(19): siRNA sense strand
agucauauguaacuccaau

SEQ ID NO: 1648356 - RNA, 19 nt, Homo sapiens
  misc_RNA (1)...(19): siRNA sense strand
uuacagguucugaagauga

SEQ ID NO: 1648357 - RNA, 19 nt, Homo sapiens
  misc_RNA (1)...(19): siRNA sense strand
aggaugggauacaggauga

SEQ ID NO: 1648358 - RNA, 19 nt, Homo sapiens
  misc_RNA (1)...(19): siRNA sense strand
ggauccuauuguuucuaua

SEQ ID NO: 1648359 - RNA, 19 nt, Homo sapiens
  misc_RNA (1)...(19): siRNA sense strand
gugcagaucuuaauucuuu

SEQ ID NO: 1648360 - RNA, 19 nt, Homo sapiens
  misc_RNA (1)...(19): siRNA sense strand
gaaagaacguggcuauaau

SEQ ID NO: 1648361 - RNA, 19 nt, Homo sapiens
  misc_RNA (1)...(19): siRNA sense strand
gaacguggcuauaauggau

SEQ ID NO: 1648362 - RNA, 19 nt, Homo sapiens
  misc_RNA (1)...(19): siRNA sense strand
gagcacagguggaguagaa

SEQ ID NO: 1648363 - RNA, 19 nt, Homo sapiens
  misc_RNA (1)...(19): siRNA sense strand
caagacggcugcugaacua

SEQ ID NO: 1648364 - RNA, 19 nt, Homo sapiens
  misc_RNA (1)...(19): siRNA sense strand
gggcagagcuugaaauaag

SEQ ID NO: 1648365 - RNA, 19 nt, Homo sapiens
  misc_RNA (1)...(19): siRNA sense strand
gcuauaauguucuuuguga

SEQ ID NO: 1648366 - RNA, 19 nt, Homo sapiens
  misc_RNA (1)...(19): siRNA sense strand
ucagggagcuccauuuaaa

SEQ ID NO: 1648367 - RNA, 19 nt, Homo sapiens
  misc_RNA (1)...(19): siRNA sense strand
uaacucaccugacagcuuu

SEQ ID NO: 1648368 - RNA, 19 nt, Homo sapiens
  misc_RNA (1)...(19): siRNA sense strand
cggaggauguauacaauua

SEQ ID NO: 1648369 - RNA, 19 nt, Homo sapiens
  misc_RNA (1)...(19): siRNA sense strand
caggauauauugaaccuuu

SEQ ID NO: 1648370 - RNA, 19 nt, Homo sapiens
  misc_RNA (1)...(19): siRNA sense strand
ggaaccagauggaacaaga

SEQ ID NO: 1648371 - RNA, 19 nt, Homo sapiens
  misc_RNA (1)...(19): siRNA sense strand
gaguugagguauaaugaaa

SEQ ID NO: 1648372 - RNA, 19 nt, Homo sapiens
  misc_RNA (1)...(19): siRNA sense strand
gaaggaaucgauugaaaug

SEQ ID NO: 1648373 - RNA, 19 nt, Homo sapiens
  misc_RNA (1)...(19): siRNA sense strand
gaacaagaaaggaaacaug

SEQ ID NO: 1648374 - RNA, 19 nt, Homo sapiens
  misc_RNA (1)...(19): siRNA sense strand
gaagugaagaacauuauug

SEQ ID NO: 1648375 - RNA, 19 nt, Homo sapiens
  misc_RNA (1)...(19): siRNA sense strand
ggaaggaucacucaugguu

SEQ ID NO: 1648376 - RNA, 19 nt, Homo sapiens
  misc_RNA (1)...(19): siRNA sense strand
ugaaagaacguggcuauaa

SEQ ID NO: 1648377 - RNA, 19 nt, Homo sapiens
  misc_RNA (1)...(19): siRNA sense strand
uuaaggaguugagguauaa

SEQ ID NO: 1648378 - RNA, 19 nt, Homo sapiens
  misc_RNA (1)...(19): siRNA sense strand
gaacaagacggcugcugaa

SEQ ID NO: 1648379 - RNA, 19 nt, Homo sapiens
  misc_RNA (1)...(19): siRNA sense strand
gaugugaaguugguacaaa

SEQ ID NO: 1648380 - RNA, 19 nt, Homo sapiens
  misc_RNA (1)...(19): siRNA sense strand
agaguggccugaugccuua

SEQ ID NO: 1648381 - RNA, 19 nt, Homo sapiens
  misc_RNA (1)...(19): siRNA sense strand
gacggcugcugaacuauuu

SEQ ID NO: 1648382 - RNA, 19 nt, Homo sapiens
  misc_RNA (1)...(19): siRNA sense strand
guugauggcugugcaauau

SEQ ID NO: 1648383 - RNA, 19 nt, Homo sapiens
  misc_RNA (1)...(19): siRNA sense strand
gaggauguauacaauuaug

SEQ ID NO: 1648384 - RNA, 19 nt, Homo sapiens
  misc_RNA (1)...(19): siRNA sense strand
gggagaauuuggaacuauu

SEQ ID NO: 1648385 - RNA, 19 nt, Homo sapiens
  misc_RNA (1)...(19): siRNA sense strand
ggucuuggauuauguuaca

SEQ ID NO: 1648386 - RNA, 19 nt, Homo sapiens
  misc_RNA (1)...(19): siRNA sense strand
caagaaaggaaacauguug

SEQ ID NO: 1648387 - RNA, 19 nt, Homo sapiens
  misc_RNA (1)...(19): siRNA sense strand
cugcaaugcugauaucgua

SEQ ID NO: 1648388 - RNA, 19 nt, Homo sapiens
  misc_RNA (1)...(19): siRNA sense strand
ggaccugucaucuaauaaa

SEQ ID NO: 1648389 - RNA, 19 nt, Homo sapiens
  misc_RNA (1)...(19): siRNA sense strand
ugaauacucugaugugaag

SEQ ID NO: 1648390 - RNA, 19 nt, Homo sapiens
  misc_RNA (1)...(19): siRNA sense strand
cggaaggaaucgauugaaa

SEQ ID NO: 1648391 - RNA, 19 nt, Homo sapiens
  misc_RNA (1)...(19): siRNA sense strand
ggaaggaaucgauugaaau

SEQ ID NO: 1648392 - RNA, 19 nt, Homo sapiens
  misc_RNA (1)...(19): siRNA sense strand
ccgaauuccuucagacauu

SEQ ID NO: 1648393 - RNA, 19 nt, Homo sapiens
  misc_RNA (1)...(19): siRNA sense strand
ggaaacaugguaucacuca

SEQ ID NO: 1648394 - RNA, 19 nt, Homo sapiens
  misc_RNA (1)...(19): siRNA sense strand
gagcugcaaugcugauauc

SEQ ID NO: 1648395 - RNA, 19 nt, Homo sapiens
  misc_RNA (1)...(19): siRNA sense strand
gaaaggaaacauguugaug

SEQ ID NO: 1648396 - RNA, 19 nt, Homo sapiens
  misc_RNA (1)...(19): siRNA sense strand
ucaaggguauaauagacua

SEQ ID NO: 1648397 - RNA, 19 nt, Homo sapiens
  misc_RNA (1)...(19): siRNA sense strand
ugaacagagucaugacaaa

SEQ ID NO: 1648398 - RNA, 19 nt, Homo sapiens
  misc_RNA (1)...(19): siRNA sense strand
ggaaagccacaucuuggaa

SEQ ID NO: 1648399 - RNA, 19 nt, Homo sapiens
  misc_RNA (1)...(19): siRNA sense strand
ccugacagcuuugcauuug

SEQ ID NO: 1648400 - RNA, 19 nt, Homo sapiens
  misc_RNA (1)...(19): siRNA sense strand
gaaggaucacucaugguuu

SEQ ID NO: 1648401 - RNA, 19 nt, Homo sapiens
  misc_RNA (1)...(19): siRNA sense strand
gcugauaucguaagucuuc

SEQ ID NO: 1648402 - RNA, 19 nt, Homo sapiens
  misc_RNA (1)...(19): siRNA sense strand
uucacaaucugguguauuu

SEQ ID NO: 1648403 - RNA, 19 nt, Homo sapiens
  misc_RNA (1)...(19): siRNA sense strand
gagcuccauuuaaauaaca

SEQ ID NO: 1648404 - RNA, 19 nt, Homo sapiens
  misc_RNA (1)...(19): siRNA sense strand
gcaucuuuguggucacuaa

SEQ ID NO: 1648405 - RNA, 19 nt, Homo sapiens
  misc_RNA (1)...(19): siRNA sense strand
ucugaccacuucucacuuu

SEQ ID NO: 1648406 - RNA, 19 nt, Homo sapiens
  misc_RNA (1)...(19): siRNA sense strand
acucugguguuguagaaua

SEQ ID NO: 1648407 - RNA, 19 nt, Homo sapiens
  misc_RNA (1)...(19): siRNA sense strand
gaacuauuccacuuguguu

SEQ ID NO: 1648408 - RNA, 19 nt, Homo sapiens
  misc_RNA (1)...(19): siRNA sense strand
cuugauaauuugucaggua

SEQ ID NO: 1648409 - RNA, 19 nt, Homo sapiens
  misc_RNA (1)...(19): siRNA sense strand
uuuaaggaguugagguaua

SEQ ID NO: 1648410 - RNA, 19 nt, Homo sapiens
  misc_RNA (1)...(19): siRNA sense strand
gaauggaaccaccaaugga

SEQ ID NO: 1648411 - RNA, 19 nt, Homo sapiens
  misc_RNA (1)...(19): siRNA sense strand
ggaacaguauuacaguuuu

SEQ ID NO: 1648412 - RNA, 19 nt, Homo sapiens
  misc_RNA (1)...(19): siRNA sense strand
ucacaaacuucagcuguca

SEQ ID NO: 1648413 - RNA, 19 nt, Homo sapiens
  misc_RNA (1)...(19): siRNA sense strand
gguacaaacuaugauguuc

SEQ ID NO: 1648414 - RNA, 19 nt, Homo sapiens
  misc_RNA (1)...(19): siRNA sense strand
aaacugggacuacaggaaa

SEQ ID NO: 1648415 - RNA, 19 nt, Homo sapiens
  misc_RNA (1)...(19): siRNA sense strand
gaaaugccgucuggaaagc

SEQ ID NO: 1648416 - RNA, 19 nt, Homo sapiens
  misc_RNA (1)...(19): siRNA sense strand
aauuaugucuucugaggaa

SEQ ID NO: 1648417 - RNA, 19 nt, Homo sapiens
  misc_RNA (1)...(19): siRNA sense strand
ucagaagugaagaacauua

SEQ ID NO: 1648418 - RNA, 19 nt, Homo sapiens
  misc_RNA (1)...(19): siRNA sense strand
ucucagaagugaagaacau

SEQ ID NO: 1648419 - RNA, 19 nt, Homo sapiens
  misc_RNA (1)...(19): siRNA sense strand
cgaauuccuucagacauug

SEQ ID NO: 1648420 - RNA, 19 nt, Homo sapiens
  misc_RNA (1)...(19): siRNA sense strand
agaaacaaaucacaaagac

SEQ ID NO: 1648421 - RNA, 19 nt, Homo sapiens
  misc_RNA (1)...(19): siRNA sense strand
ggaagcagcaaauggaaag

SEQ ID NO: 1648422 - RNA, 19 nt, Homo sapiens
  misc_RNA (1)...(19): siRNA sense strand
gauaauuugucagguacug

SEQ ID NO: 1648423 - RNA, 19 nt, Homo sapiens
  misc_RNA (1)...(19): siRNA sense strand
ggaguugagguauaaugaa

SEQ ID NO: 1648424 - RNA, 19 nt, Homo sapiens
  misc_RNA (1)...(19): siRNA sense strand
aaccucaaauccaguguuu

SEQ ID NO: 1648425 - RNA, 19 nt, Homo sapiens
  misc_RNA (1)...(19): siRNA sense strand
uuacuuugguucagaaaca

SEQ ID NO: 1648426 - RNA, 19 nt, Homo sapiens
  misc_RNA (1)...(19): siRNA sense strand
gcgcuaaacugggacuaca

SEQ ID NO: 1648427 - RNA, 19 nt, Homo sapiens
  misc_RNA (1)...(19): siRNA sense strand
ggagcuccauuuaaauaac

SEQ ID NO: 1648428 - RNA, 19 nt, Homo sapiens
  misc_RNA (1)...(19): siRNA sense strand
uaaugaaagucucacaaac

SEQ ID NO: 1648429 - RNA, 19 nt, Homo sapiens
  misc_RNA (1)...(19): siRNA sense strand
gcugaaagaacguggcuau

SEQ ID NO: 1648430 - RNA, 19 nt, Homo sapiens
  misc_RNA (1)...(19): siRNA sense strand
gaacucggaaacaugguau

SEQ ID NO: 1648431 - RNA, 19 nt, Homo sapiens
  misc_RNA (1)...(19): siRNA sense strand
gaucacucaugguuucaag

SEQ ID NO: 1648432 - RNA, 19 nt, Homo sapiens
  misc_RNA (1)...(19): siRNA sense strand
aaggaucacucaugguuuc

SEQ ID NO: 1648433 - RNA, 19 nt, Homo sapiens
  misc_RNA (1)...(19): siRNA sense strand
agacucugguguuguagaa

SEQ ID NO: 1648434 - RNA, 19 nt, Homo sapiens
  misc_RNA (1)...(19): siRNA sense strand
ugauggcugugcaauauuc

SEQ ID NO: 1648435 - RNA, 19 nt, Homo sapiens
  misc_RNA (1)...(19): siRNA sense strand
gagcuugaaauaaguggaa

SEQ ID NO: 1648436 - RNA, 19 nt, Homo sapiens
  misc_RNA (1)...(19): siRNA sense strand
gggagcuccauuuaaauaa

SEQ ID NO: 1648437 - RNA, 19 nt, Homo sapiens
  misc_RNA (1)...(19): siRNA sense strand
uuggaccugucaucuaaua

SEQ ID NO: 1648438 - RNA, 19 nt, Homo sapiens
  misc_RNA (1)...(19): siRNA sense strand
ccugaugccuuacacgaau

SEQ ID NO: 1648439 - RNA, 19 nt, Homo sapiens
  misc_RNA (1)...(19): siRNA sense strand
ccgcagaacucggaaacau

SEQ ID NO: 1648440 - RNA, 19 nt, Homo sapiens
  misc_RNA (1)...(19): siRNA sense strand
acucagggagcuccauuua

SEQ ID NO: 1648441 - RNA, 19 nt, Homo sapiens
  misc_RNA (1)...(19): siRNA sense strand
ggaagaauggaaccaccaa

SEQ ID NO: 1648442 - RNA, 19 nt, Homo sapiens
  misc_RNA (1)...(19): siRNA sense strand
cagguggaguagaaacaaa

SEQ ID NO: 1648443 - RNA, 19 nt, Homo sapiens
  misc_RNA (1)...(19): siRNA sense strand
ccacaucuuggaacagaaa

SEQ ID NO: 1648444 - RNA, 19 nt, Homo sapiens
  misc_RNA (1)...(19): siRNA sense strand
gaagcuuaagcgcaucuuu

SEQ ID NO: 1648445 - RNA, 19 nt, Homo sapiens
  misc_RNA (1)...(19): siRNA sense strand
ggucugaagcuaugcugaa

SEQ ID NO: 1648446 - RNA, 19 nt, Homo sapiens
  misc_RNA (1)...(19): siRNA sense strand
uugaaacggaacaguauua

SEQ ID NO: 1648447 - RNA, 19 nt, Homo sapiens
  misc_RNA (1)...(19): siRNA sense strand
auuuggaccugucaucuaa

SEQ ID NO: 1648448 - RNA, 19 nt, Homo sapiens
  misc_RNA (1)...(19): siRNA sense strand
guugagguauaaugaaagu

SEQ ID NO: 1648449 - RNA, 19 nt, Homo sapiens
  misc_RNA (1)...(19): siRNA sense strand
cagcuuugcauuugaguga

SEQ ID NO: 1648450 - RNA, 19 nt, Homo sapiens
  misc_RNA (1)...(19): siRNA sense strand
uugccaagcuucacaaucu

SEQ ID NO: 1648451 - RNA, 19 nt, Homo sapiens
  misc_RNA (1)...(19): siRNA sense strand
gaacagagucaugacaaaa

SEQ ID NO: 1648452 - RNA, 19 nt, Homo sapiens
  misc_RNA (1)...(19): siRNA sense strand
cggaacaguauuacaguuu

SEQ ID NO: 1648453 - RNA, 19 nt, Homo sapiens
  misc_RNA (1)...(19): siRNA sense strand
gaaacggaacaguauuaca

SEQ ID NO: 1648454 - RNA, 19 nt, Homo sapiens
  misc_RNA (1)...(19): siRNA sense strand
ugaggaagcagcaaaugga

SEQ ID NO: 1648455 - RNA, 19 nt, Homo sapiens
  misc_RNA (1)...(19): siRNA sense strand
gucaugugcuauaauguuc

SEQ ID NO: 1648456 - RNA, 19 nt, Homo sapiens
  misc_RNA (1)...(19): siRNA sense strand
aaccucagcugaacaccuu

SEQ ID NO: 1648457 - RNA, 19 nt, Homo sapiens
  misc_RNA (1)...(19): siRNA sense strand
gcauugggacccugaauac

SEQ ID NO: 1648458 - RNA, 19 nt, Homo sapiens
  misc_RNA (1)...(19): siRNA sense strand
aaagaacguggcuauaaug

SEQ ID NO: 1648459 - RNA, 19 nt, Homo sapiens
  misc_RNA (1)...(19): siRNA sense strand
ggaccagccucaugaacua

SEQ ID NO: 1648460 - RNA, 19 nt, Homo sapiens
  misc_RNA (1)...(19): siRNA sense strand
ggaacuacaugcagucgaa

SEQ ID NO: 1648461 - RNA, 19 nt, Homo sapiens
  misc_RNA (1)...(19): siRNA sense strand
guacaucggccaacauuug

SEQ ID NO: 1648462 - RNA, 19 nt, Homo sapiens
  misc_RNA (1)...(19): siRNA sense strand
ucaaggagauccgugauga

SEQ ID NO: 1648463 - RNA, 19 nt, Homo sapiens
  misc_RNA (1)...(19): siRNA sense strand
ggagaacauugguggcauu

SEQ ID NO: 1648464 - RNA, 19 nt, Homo sapiens
  misc_RNA (1)...(19): siRNA sense strand
gggagaaggucaucgacuu

SEQ ID NO: 1648465 - RNA, 19 nt, Homo sapiens
  misc_RNA (1)...(19): siRNA sense strand
ccacaccacugcucaagga

SEQ ID NO: 1648466 - RNA, 19 nt, Homo sapiens
  misc_RNA (1)...(19): siRNA sense strand
ggaggaccaucgagcuaaa

SEQ ID NO: 1648467 - RNA, 19 nt, Homo sapiens
  misc_RNA (1)...(19): siRNA sense strand
ggagauccgugaugacaag

SEQ ID NO: 1648468 - RNA, 19 nt, Homo sapiens
  misc_RNA (1)...(19): siRNA sense strand
ucacaaccauccuggagaa

SEQ ID NO: 1648469 - RNA, 19 nt, Homo sapiens
  misc_RNA (1)...(19): siRNA sense strand
caccaugugucagaucuua

SEQ ID NO: 1648470 - RNA, 19 nt, Homo sapiens
  misc_RNA (1)...(19): siRNA sense strand
gggaaugaccucagcguuu

SEQ ID NO: 1648471 - RNA, 19 nt, Homo sapiens
  misc_RNA (1)...(19): siRNA sense strand
ggagaaggucaucgacuuu

SEQ ID NO: 1648472 - RNA, 19 nt, Homo sapiens
  misc_RNA (1)...(19): siRNA sense strand
ggaaugaccucagcguuuu

SEQ ID NO: 1648473 - RNA, 19 nt, Homo sapiens
  misc_RNA (1)...(19): siRNA sense strand
ugucagaucuuacccaaag

SEQ ID NO: 1648474 - RNA, 19 nt, Homo sapiens
  misc_RNA (1)...(19): siRNA sense strand
ccgaugaccuggcagauca

SEQ ID NO: 1648475 - RNA, 19 nt, Homo sapiens
  misc_RNA (1)...(19): siRNA sense strand
ggagaacccauacgucaug

SEQ ID NO: 1648476 - RNA, 19 nt, Homo sapiens
  misc_RNA (1)...(19): siRNA sense strand
cagcagggcucggagauca

SEQ ID NO: 1648477 - RNA, 19 nt, Homo sapiens
  misc_RNA (1)...(19): siRNA sense strand
gcaaagggcagagaaccaa

SEQ ID NO: 1648478 - RNA, 19 nt, Homo sapiens
  misc_RNA (1)...(19): siRNA sense strand
gcucaucuguggccucauc

SEQ ID NO: 1648479 - RNA, 19 nt, Homo sapiens
  misc_RNA (1)...(19): siRNA sense strand
ccaucgagcuaaagguuug

SEQ ID NO: 1648480 - RNA, 19 nt, Homo sapiens
  misc_RNA (1)...(19): siRNA sense strand
ggaaguagacaucuuugag

SEQ ID NO: 1648481 - RNA, 19 nt, Homo sapiens
  misc_RNA (1)...(19): siRNA sense strand
gugcguggcuuccucaucu

SEQ ID NO: 1648482 - RNA, 19 nt, Homo sapiens
  misc_RNA (1)...(19): siRNA sense strand
ccaccacccuggacaucaa

SEQ ID NO: 1648483 - RNA, 19 nt, Homo sapiens
  misc_RNA (1)...(19): siRNA sense strand
ggucauggaauucauaugg

SEQ ID NO: 1648484 - RNA, 19 nt, Homo sapiens
  misc_RNA (1)...(19): siRNA sense strand
gcagggccaccgugagauu

SEQ ID NO: 1648485 - RNA, 19 nt, Homo sapiens
  misc_RNA (1)...(19): siRNA sense strand
gaccaucgagcuaaagguu

SEQ ID NO: 1648486 - RNA, 19 nt, Homo sapiens
  misc_RNA (1)...(19): siRNA sense strand
gaggaggaccaucgagcua

SEQ ID NO: 1648487 - RNA, 19 nt, Homo sapiens
  misc_RNA (1)...(19): siRNA sense strand
ccaaggagacgcugucagu

SEQ ID NO: 1648488 - RNA, 19 nt, Homo sapiens
  misc_RNA (1)...(19): siRNA sense strand
agaccaacaucgaguaugg

SEQ ID NO: 1648489 - RNA, 19 nt, Homo sapiens
  misc_RNA (1)...(19): siRNA sense strand
gaguggaaguagacaucuu

SEQ ID NO: 1648490 - RNA, 19 nt, Homo sapiens
  misc_RNA (1)...(19): siRNA sense strand
ccaaagggguugugucugu

SEQ ID NO: 1648491 - RNA, 19 nt, Homo sapiens
  misc_RNA (1)...(19): siRNA sense strand
ccucaucauugcugucuuc

SEQ ID NO: 1648492 - RNA, 19 nt, Homo sapiens
  misc_RNA (1)...(19): siRNA sense strand
ccauaucuguggagagaag

SEQ ID NO: 1648493 - RNA, 19 nt, Homo sapiens
  misc_RNA (1)...(19): siRNA sense strand
gccaggagaucggugugaa

SEQ ID NO: 1648494 - RNA, 19 nt, Homo sapiens
  misc_RNA (1)...(19): siRNA sense strand
ccucagcguuuuacaagua

SEQ ID NO: 1648495 - RNA, 19 nt, Homo sapiens
  misc_RNA (1)...(19): siRNA sense strand
aguccaccaugaacgaaua

SEQ ID NO: 1648496 - RNA, 19 nt, Homo sapiens
  misc_RNA (1)...(19): siRNA sense strand
gagaacauugguggcauuu

SEQ ID NO: 1648497 - RNA, 19 nt, Homo sapiens
  misc_RNA (1)...(19): siRNA sense strand
ugaagccucuggccuguac

SEQ ID NO: 1648498 - RNA, 19 nt, Homo sapiens
  misc_RNA (1)...(19): siRNA sense strand
gaagcagcccagcguguuc

SEQ ID NO: 1648499 - RNA, 19 nt, Homo sapiens
  misc_RNA (1)...(19): siRNA sense strand
gggcagagaaccaacuaca

SEQ ID NO: 1648500 - RNA, 19 nt, Homo sapiens
  misc_RNA (1)...(19): siRNA sense strand
cgcagacacuggccaacaa

SEQ ID NO: 1648501 - RNA, 19 nt, Homo sapiens
  misc_RNA (1)...(19): siRNA sense strand
gaacaaccggcuggagauc

SEQ ID NO: 1648502 - RNA, 19 nt, Homo sapiens
  misc_RNA (1)...(19): siRNA sense strand
gagcacagaagagggcauu

SEQ ID NO: 1648503 - RNA, 19 nt, Homo sapiens
  misc_RNA (1)...(19): siRNA sense strand
cugagugccugcugcgauu

SEQ ID NO: 1648504 - RNA, 19 nt, Homo sapiens
  misc_RNA (1)...(19): siRNA sense strand
acacggaggucagcugagu

SEQ ID NO: 1648505 - RNA, 19 nt, Homo sapiens
  misc_RNA (1)...(19): siRNA sense strand
gcuccaccaugaccuucuu

SEQ ID NO: 1648506 - RNA, 19 nt, Homo sapiens
  misc_RNA (1)...(19): siRNA sense strand
agccauaucuguggagaga

SEQ ID NO: 1648507 - RNA, 19 nt, Homo sapiens
  misc_RNA (1)...(19): siRNA sense strand
guaacgaggacgucagcuu

SEQ ID NO: 1648508 - RNA, 19 nt, Homo sapiens
  misc_RNA (1)...(19): siRNA sense strand
cagcugagcgggagaaggu

SEQ ID NO: 1648509 - RNA, 19 nt, Homo sapiens
  misc_RNA (1)...(19): siRNA sense strand
caucuguggccucaucauu

SEQ ID NO: 1648510 - RNA, 19 nt, Homo sapiens
  misc_RNA (1)...(19): siRNA sense strand
ugucagcugcguccuguuu

SEQ ID NO: 1648511 - RNA, 19 nt, Homo sapiens
  misc_RNA (1)...(19): siRNA sense strand
aaggagacgcugucaguga

SEQ ID NO: 1648512 - RNA, 19 nt, Homo sapiens
  misc_RNA (1)...(19): siRNA sense strand
caccacugcucaaggagau

SEQ ID NO: 1648513 - RNA, 19 nt, Homo sapiens
  misc_RNA (1)...(19): siRNA sense strand
ccucaaguccuucaacuac

SEQ ID NO: 1648514 - RNA, 19 nt, Homo sapiens
  misc_RNA (1)...(19): siRNA sense strand
caccaagggcuacggcauu

SEQ ID NO: 1648515 - RNA, 19 nt, Homo sapiens
  misc_RNA (1)...(19): siRNA sense strand
cagcgcauguggaacuaca

SEQ ID NO: 1648516 - RNA, 19 nt, Homo sapiens
  misc_RNA (1)...(19): siRNA sense strand
gcugccaggugcucucauc

SEQ ID NO: 1648517 - RNA, 19 nt, Homo sapiens
  misc_RNA (1)...(19): siRNA sense strand
caacagcaaagggcagaga

SEQ ID NO: 1648518 - RNA, 19 nt, Homo sapiens
  misc_RNA (1)...(19): siRNA sense strand
cgaagcagcccagcguguu

SEQ ID NO: 1648519 - RNA, 19 nt, Homo sapiens
  misc_RNA (1)...(19): siRNA sense strand
gccaggugcucucaucacu

SEQ ID NO: 1648520 - RNA, 19 nt, Homo sapiens
  misc_RNA (1)...(19): siRNA sense strand
gggucgaguucaacagcaa

SEQ ID NO: 1648521 - RNA, 19 nt, Homo sapiens
  misc_RNA (1)...(19): siRNA sense strand
ugaacuaccugcgcauggu

SEQ ID NO: 1648522 - RNA, 19 nt, Homo sapiens
  misc_RNA (1)...(19): siRNA sense strand
gcuuggcggucucccgaau

SEQ ID NO: 1648523 - RNA, 19 nt, Homo sapiens
  misc_RNA (1)...(19): siRNA sense strand
ucguggcggucauggaauu

SEQ ID NO: 1648524 - RNA, 19 nt, Homo sapiens
  misc_RNA (1)...(19): siRNA sense strand
guccgcagccucaacaugu

SEQ ID NO: 1648525 - RNA, 19 nt, Homo sapiens
  misc_RNA (1)...(19): siRNA sense strand
cuaaagguuugggcaugga

SEQ ID NO: 1648526 - RNA, 19 nt, Homo sapiens
  misc_RNA (1)...(19): siRNA sense strand
gcacagaagagggcauugc

SEQ ID NO: 1648527 - RNA, 19 nt, Homo sapiens
  misc_RNA (1)...(19): siRNA sense strand
gcagggcucggagaucaug

SEQ ID NO: 1648528 - RNA, 19 nt, Homo sapiens
  misc_RNA (1)...(19): siRNA sense strand
gcaucuggacgguauugug

SEQ ID NO: 1648529 - RNA, 19 nt, Homo sapiens
  misc_RNA (1)...(19): siRNA sense strand
cagaucagaccaacaucga

SEQ ID NO: 1648530 - RNA, 19 nt, Homo sapiens
  misc_RNA (1)...(19): siRNA sense strand
gguggaggaugggcuguac

SEQ ID NO: 1648531 - RNA, 19 nt, Homo sapiens
  misc_RNA (1)...(19): siRNA sense strand
gucauggaauucauauggu

SEQ ID NO: 1648532 - RNA, 19 nt, Homo sapiens
  misc_RNA (1)...(19): siRNA sense strand
uggcagaucagaccaacau

SEQ ID NO: 1648533 - RNA, 19 nt, Homo sapiens
  misc_RNA (1)...(19): siRNA sense strand
gaaccgcagccaggagauc

SEQ ID NO: 1648534 - RNA, 19 nt, Homo sapiens
  misc_RNA (1)...(19): siRNA sense strand
accaagggcuacggcauug

SEQ ID NO: 1648535 - RNA, 19 nt, Homo sapiens
  misc_RNA (1)...(19): siRNA sense strand
aaacguaccagcgcaugug

SEQ ID NO: 1648536 - RNA, 19 nt, Homo sapiens
  misc_RNA (1)...(19): siRNA sense strand
cacgggaccagccucauga

SEQ ID NO: 1648537 - RNA, 19 nt, Homo sapiens
  misc_RNA (1)...(19): siRNA sense strand
ggaaauggaugaagaaaga

SEQ ID NO: 1648538 - RNA, 19 nt, Homo sapiens
  misc_RNA (1)...(19): siRNA sense strand
gaagcagucuccuuucuua

SEQ ID NO: 1648539 - RNA, 19 nt, Homo sapiens
  misc_RNA (1)...(19): siRNA sense strand
gaucaaauauuggccauua

SEQ ID NO: 1648540 - RNA, 19 nt, Homo sapiens
  misc_RNA (1)...(19): siRNA sense strand
gagaggagcuuaaagguau

SEQ ID NO: 1648541 - RNA, 19 nt, Homo sapiens
  misc_RNA (1)...(19): siRNA sense strand
agacagggaucaaagauua

SEQ ID NO: 1648542 - RNA, 19 nt, Homo sapiens
  misc_RNA (1)...(19): siRNA sense strand
gagaagaaacuccaaauuu

SEQ ID NO: 1648543 - RNA, 19 nt, Homo sapiens
  misc_RNA (1)...(19): siRNA sense strand
gaggagaacuuggagauuu

SEQ ID NO: 1648544 - RNA, 19 nt, Homo sapiens
  misc_RNA (1)...(19): siRNA sense strand
caagauuguugaacuagua

SEQ ID NO: 1648545 - RNA, 19 nt, Homo sapiens
  misc_RNA (1)...(19): siRNA sense strand
cagaggaacuguuguagaa

SEQ ID NO: 1648546 - RNA, 19 nt, Homo sapiens
  misc_RNA (1)...(19): siRNA sense strand
gguccuagcuugcucauug

SEQ ID NO: 1648547 - RNA, 19 nt, Homo sapiens
  misc_RNA (1)...(19): siRNA sense strand
gcaugcagcuuuauggaaa

SEQ ID NO: 1648548 - RNA, 19 nt, Homo sapiens
  misc_RNA (1)...(19): siRNA sense strand
aagaagaacuuguggauga

SEQ ID NO: 1648549 - RNA, 19 nt, Homo sapiens
  misc_RNA (1)...(19): siRNA sense strand
ggaagauaaugaagaagaa

SEQ ID NO: 1648550 - RNA, 19 nt, Homo sapiens
  misc_RNA (1)...(19): siRNA sense strand
gaaccaaggcgcacugaaa

SEQ ID NO: 1648551 - RNA, 19 nt, Homo sapiens
  misc_RNA (1)...(19): siRNA sense strand
uauuggagaugaacucuua

SEQ ID NO: 1648552 - RNA, 19 nt, Homo sapiens
  misc_RNA (1)...(19): siRNA sense strand
ucuaauaacucgacuguau

SEQ ID NO: 1648553 - RNA, 19 nt, Homo sapiens
  misc_RNA (1)...(19): siRNA sense strand
acacacagauugcagauga

SEQ ID NO: 1648554 - RNA, 19 nt, Homo sapiens
  misc_RNA (1)...(19): siRNA sense strand
gacaggaaaugauuauaga

SEQ ID NO: 1648555 - RNA, 19 nt, Homo sapiens
  misc_RNA (1)...(19): siRNA sense strand
ggaaagguuuguuaguguu

SEQ ID NO: 1648556 - RNA, 19 nt, Homo sapiens
  misc_RNA (1)...(19): siRNA sense strand
ucaauggcaugcagcuuua

SEQ ID NO: 1648557 - RNA, 19 nt, Homo sapiens
  misc_RNA (1)...(19): siRNA sense strand
gggcagagucuuggaauua

SEQ ID NO: 1648558 - RNA, 19 nt, Homo sapiens
  misc_RNA (1)...(19): siRNA sense strand
ggagggagcaagaagauuu

SEQ ID NO: 1648559 - RNA, 19 nt, Homo sapiens
  misc_RNA (1)...(19): siRNA sense strand
acacagugguugcaugaua

SEQ ID NO: 1648560 - RNA, 19 nt, Homo sapiens
  misc_RNA (1)...(19): siRNA sense strand
caacauacaagccuuagaa

SEQ ID NO: 1648561 - RNA, 19 nt, Homo sapiens
  misc_RNA (1)...(19): siRNA sense strand
gcacauuauugaacuugaa

SEQ ID NO: 1648562 - RNA, 19 nt, Homo sapiens
  misc_RNA (1)...(19): siRNA sense strand
gaaacuuccuccuccuuau

SEQ ID NO: 1648563 - RNA, 19 nt, Homo sapiens
  misc_RNA (1)...(19): siRNA sense strand
gguggaagauaaugaagaa

SEQ ID NO: 1648564 - RNA, 19 nt, Homo sapiens
  misc_RNA (1)...(19): siRNA sense strand
caagaagauuugccuuuau

SEQ ID NO: 1648565 - RNA, 19 nt, Homo sapiens
  misc_RNA (1)...(19): siRNA sense strand
gacuguaucuggguuauuu

SEQ ID NO: 1648566 - RNA, 19 nt, Homo sapiens
  misc_RNA (1)...(19): siRNA sense strand
auaaagcucugacugauga

SEQ ID NO: 1648567 - RNA, 19 nt, Homo sapiens
  misc_RNA (1)...(19): siRNA sense strand
gaaguggauuccuuugaug

SEQ ID NO: 1648568 - RNA, 19 nt, Homo sapiens
  misc_RNA (1)...(19): siRNA sense strand
gaaaccaccagcucucuuu

SEQ ID NO: 1648569 - RNA, 19 nt, Homo sapiens
  misc_RNA (1)...(19): siRNA sense strand
gaacauuucccaucagcaa

SEQ ID NO: 1648570 - RNA, 19 nt, Homo sapiens
  misc_RNA (1)...(19): siRNA sense strand
agacagagguugaccacaa

SEQ ID NO: 1648571 - RNA, 19 nt, Homo sapiens
  misc_RNA (1)...(19): siRNA sense strand
guugggaaaugaagacuuu

SEQ ID NO: 1648572 - RNA, 19 nt, Homo sapiens
  misc_RNA (1)...(19): siRNA sense strand
ggagaggagcuuaaaggua

SEQ ID NO: 1648573 - RNA, 19 nt, Homo sapiens
  misc_RNA (1)...(19): siRNA sense strand
ugaugaagcuucuguagau

SEQ ID NO: 1648574 - RNA, 19 nt, Homo sapiens
  misc_RNA (1)...(19): siRNA sense strand
gcaauugcauuauuacaac

SEQ ID NO: 1648575 - RNA, 19 nt, Homo sapiens
  misc_RNA (1)...(19): siRNA sense strand
ggagguuguuugaugauga

SEQ ID NO: 1648576 - RNA, 19 nt, Homo sapiens
  misc_RNA (1)...(19): siRNA sense strand
cuaaggaacugugggaauu

SEQ ID NO: 1648577 - RNA, 19 nt, Homo sapiens
  misc_RNA (1)...(19): siRNA sense strand
ggaauguugucuucuagau

SEQ ID NO: 1648578 - RNA, 19 nt, Homo sapiens
  misc_RNA (1)...(19): siRNA sense strand
gaagagguugagcucauua

SEQ ID NO: 1648579 - RNA, 19 nt, Homo sapiens
  misc_RNA (1)...(19): siRNA sense strand
ggacaggaaaugauuauag

SEQ ID NO: 1648580 - RNA, 19 nt, Homo sapiens
  misc_RNA (1)...(19): siRNA sense strand
cgucgaaguugguauuaaa

SEQ ID NO: 1648581 - RNA, 19 nt, Homo sapiens
  misc_RNA (1)...(19): siRNA sense strand
gcaccgaaccuauuaguag

SEQ ID NO: 1648582 - RNA, 19 nt, Homo sapiens
  misc_RNA (1)...(19): siRNA sense strand
ggagaugcaugaauuucug

SEQ ID NO: 1648583 - RNA, 19 nt, Homo sapiens
  misc_RNA (1)...(19): siRNA sense strand
gaugaaccauuucuagauc

SEQ ID NO: 1648584 - RNA, 19 nt, Homo sapiens
  misc_RNA (1)...(19): siRNA sense strand
gguuugggauucagcauuu

SEQ ID NO: 1648585 - RNA, 19 nt, Homo sapiens
  misc_RNA (1)...(19): siRNA sense strand
caaagcugcugccuauuca

SEQ ID NO: 1648586 - RNA, 19 nt, Homo sapiens
  misc_RNA (1)...(19): siRNA sense strand
gaagauugguggcacaaac

SEQ ID NO: 1648587 - RNA, 19 nt, Homo sapiens
  misc_RNA (1)...(19): siRNA sense strand
aaacgaggaugcagucaau

SEQ ID NO: 1648588 - RNA, 19 nt, Homo sapiens
  misc_RNA (1)...(19): siRNA sense strand
gaagacgaacgcacuuaaa

SEQ ID NO: 1648589 - RNA, 19 nt, Homo sapiens
  misc_RNA (1)...(19): siRNA sense strand
ggaagacgaacgcacuuaa

SEQ ID NO: 1648590 - RNA, 19 nt, Homo sapiens
  misc_RNA (1)...(19): siRNA sense strand
caggaacaauucaugauau

SEQ ID NO: 1648591 - RNA, 19 nt, Homo sapiens
  misc_RNA (1)...(19): siRNA sense strand
aaagaccgaucacgcauga

SEQ ID NO: 1648592 - RNA, 19 nt, Homo sapiens
  misc_RNA (1)...(19): siRNA sense strand
ggagaacugcacauuauug

SEQ ID NO: 1648593 - RNA, 19 nt, Homo sapiens
  misc_RNA (1)...(19): siRNA sense strand
guugaaguauuacgaaaug

SEQ ID NO: 1648594 - RNA, 19 nt, Homo sapiens
  misc_RNA (1)...(19): siRNA sense strand
ggaguagauuugcagaaug

SEQ ID NO: 1648595 - RNA, 19 nt, Homo sapiens
  misc_RNA (1)...(19): siRNA sense strand
gaaggaaacagucaacaag

SEQ ID NO: 1648596 - RNA, 19 nt, Homo sapiens
  misc_RNA (1)...(19): siRNA sense strand
gaaaugaagacuuuaacuc

SEQ ID NO: 1648597 - RNA, 19 nt, Homo sapiens
  misc_RNA (1)...(19): siRNA sense strand
gaauguugucuucuagaua

SEQ ID NO: 1648598 - RNA, 19 nt, Homo sapiens
  misc_RNA (1)...(19): siRNA sense strand
guaaugaagacaagacuga

SEQ ID NO: 1648599 - RNA, 19 nt, Homo sapiens
  misc_RNA (1)...(19): siRNA sense strand
ggaugucaauacugaagaa

SEQ ID NO: 1648600 - RNA, 19 nt, Homo sapiens
  misc_RNA (1)...(19): siRNA sense strand
gggaaccaguccacacaaa

SEQ ID NO: 1648601 - RNA, 19 nt, Homo sapiens
  misc_RNA (1)...(19): siRNA sense strand
gaacuucacuuugguacac

SEQ ID NO: 1648602 - RNA, 19 nt, Homo sapiens
  misc_RNA (1)...(19): siRNA sense strand
ccugggagaugcaugaauu

SEQ ID NO: 1648603 - RNA, 19 nt, Homo sapiens
  misc_RNA (1)...(19): siRNA sense strand
ucuagcagccuaaaugaua

SEQ ID NO: 1648604 - RNA, 19 nt, Homo sapiens
  misc_RNA (1)...(19): siRNA sense strand
gugaagaugaggaaauuaa

SEQ ID NO: 1648605 - RNA, 19 nt, Homo sapiens
  misc_RNA (1)...(19): siRNA sense strand
gaacuccagccacgaagaa

SEQ ID NO: 1648606 - RNA, 19 nt, Homo sapiens
  misc_RNA (1)...(19): siRNA sense strand
caucauaccauucaacaga

SEQ ID NO: 1648607 - RNA, 19 nt, Homo sapiens
  misc_RNA (1)...(19): siRNA sense strand
acaauugccugaaagugaa

SEQ ID NO: 1648608 - RNA, 19 nt, Homo sapiens
  misc_RNA (1)...(19): siRNA sense strand
gcuuaaagguauauucauc

SEQ ID NO: 1648609 - RNA, 19 nt, Homo sapiens
  misc_RNA (1)...(19): siRNA sense strand
acaggaauguugucuucua

SEQ ID NO: 1648610 - RNA, 19 nt, Homo sapiens
  misc_RNA (1)...(19): siRNA sense strand
acacaggaauguugucuuc

SEQ ID NO: 1648611 - RNA, 19 nt, Homo sapiens
  misc_RNA (1)...(19): siRNA sense strand
gcagagucuuggaauuaga

SEQ ID NO: 1648612 - RNA, 19 nt, Homo sapiens
  misc_RNA (1)...(19): siRNA sense strand
gaucacgcaugagcauauu

SEQ ID NO: 1648613 - RNA, 19 nt, Homo sapiens
  misc_RNA (1)...(19): siRNA sense strand
cuggagaacugcacauuau

SEQ ID NO: 1648614 - RNA, 19 nt, Homo sapiens
  misc_RNA (1)...(19): siRNA sense strand
ugaagaagaagaugccuuu

SEQ ID NO: 1648615 - RNA, 19 nt, Homo sapiens
  misc_RNA (1)...(19): siRNA sense strand
gaaccaggacacccaagaa

SEQ ID NO: 1648616 - RNA, 19 nt, Homo sapiens
  misc_RNA (1)...(19): siRNA sense strand
cacagugguugcaugauaa

SEQ ID NO: 1648617 - RNA, 19 nt, Homo sapiens
  misc_RNA (1)...(19): siRNA sense strand
caagggauuuagagaugaa

SEQ ID NO: 1648618 - RNA, 19 nt, Homo sapiens
  misc_RNA (1)...(19): siRNA sense strand
auucaaagcugcugccuau

SEQ ID NO: 1648619 - RNA, 19 nt, Homo sapiens
  misc_RNA (1)...(19): siRNA sense strand
cgaaguugguauuaaacaa

SEQ ID NO: 1648620 - RNA, 19 nt, Homo sapiens
  misc_RNA (1)...(19): siRNA sense strand
gagaacugcacauuauuga

SEQ ID NO: 1648621 - RNA, 19 nt, Homo sapiens
  misc_RNA (1)...(19): siRNA sense strand
ugaguuaccugagagagaa

SEQ ID NO: 1648622 - RNA, 19 nt, Homo sapiens
  misc_RNA (1)...(19): siRNA sense strand
caauauggaugucaauacu

SEQ ID NO: 1648623 - RNA, 19 nt, Homo sapiens
  misc_RNA (1)...(19): siRNA sense strand
gguagcagaugguguagca

SEQ ID NO: 1648624 - RNA, 19 nt, Homo sapiens
  misc_RNA (1)...(19): siRNA sense strand
caucuucuauugaggauca

SEQ ID NO: 1648625 - RNA, 19 nt, Homo sapiens
  misc_RNA (1)...(19): siRNA sense strand
gaacugcacauuauugaac

SEQ ID NO: 1648626 - RNA, 19 nt, Homo sapiens
  misc_RNA (1)...(19): siRNA sense strand
gaagaagaagaugccuuua

SEQ ID NO: 1648627 - RNA, 19 nt, Homo sapiens
  misc_RNA (1)...(19): siRNA sense strand
gagcuuaaagguauauuca

SEQ ID NO: 1648628 - RNA, 19 nt, Homo sapiens
  misc_RNA (1)...(19): siRNA sense strand
cgacacgaguuauuuccaa

SEQ ID NO: 1648629 - RNA, 19 nt, Homo sapiens
  misc_RNA (1)...(19): siRNA sense strand
aaacuagucuggauuuagg

SEQ ID NO: 1648630 - RNA, 19 nt, Homo sapiens
  misc_RNA (1)...(19): siRNA sense strand
guccacaggcccucuaaua

SEQ ID NO: 1648631 - RNA, 19 nt, Homo sapiens
  misc_RNA (1)...(19): siRNA sense strand
gagagaagaaggcgaagga

SEQ ID NO: 1648632 - RNA, 19 nt, Homo sapiens
  misc_RNA (1)...(19): siRNA sense strand
caagaucccucaccaucca

SEQ ID NO: 1648633 - RNA, 19 nt, Homo sapiens
  misc_RNA (1)...(19): siRNA sense strand
gagguuguuugaugaugaa

SEQ ID NO: 1648634 - RNA, 19 nt, Homo sapiens
  misc_RNA (1)...(19): siRNA sense strand
ugucggagguuguuugaug

SEQ ID NO: 1648635 - RNA, 19 nt, Homo sapiens
  misc_RNA (1)...(19): siRNA sense strand
uaauguggauggugaagau

SEQ ID NO: 1648636 - RNA, 19 nt, Homo sapiens
  misc_RNA (1)...(19): siRNA sense strand
gccggcaaauugaauauau

SEQ ID NO: 1648637 - RNA, 19 nt, Homo sapiens
  misc_RNA (1)...(19): siRNA sense strand
ggaaauggaugaagaaaga

SEQ ID NO: 1648638 - RNA, 19 nt, Homo sapiens
  misc_RNA (1)...(19): siRNA sense strand
gaagcagucuccuuucuua

SEQ ID NO: 1648639 - RNA, 19 nt, Homo sapiens
  misc_RNA (1)...(19): siRNA sense strand
gaucaaauauuggccauua

SEQ ID NO: 1648640 - RNA, 19 nt, Homo sapiens
  misc_RNA (1)...(19): siRNA sense strand
gagaggagcuuaaagguau

SEQ ID NO: 1648641 - RNA, 19 nt, Homo sapiens
  misc_RNA (1)...(19): siRNA sense strand
agacagggaucaaagauua

SEQ ID NO: 1648642 - RNA, 19 nt, Homo sapiens
  misc_RNA (1)...(19): siRNA sense strand
gagaagaaacuccaaauuu

SEQ ID NO: 1648643 - RNA, 19 nt, Homo sapiens
  misc_RNA (1)...(19): siRNA sense strand
gaggagaacuuggagauuu

SEQ ID NO: 1648644 - RNA, 19 nt, Homo sapiens
  misc_RNA (1)...(19): siRNA sense strand
caagauuguugaacuagua

SEQ ID NO: 1648645 - RNA, 19 nt, Homo sapiens
  misc_RNA (1)...(19): siRNA sense strand
cagaggaacuguuguagaa

SEQ ID NO: 1648646 - RNA, 19 nt, Homo sapiens
  misc_RNA (1)...(19): siRNA sense strand
gguccuagcuugcucauug

SEQ ID NO: 1648647 - RNA, 19 nt, Homo sapiens
  misc_RNA (1)...(19): siRNA sense strand
gcaugcagcuuuauggaaa

SEQ ID NO: 1648648 - RNA, 19 nt, Homo sapiens
  misc_RNA (1)...(19): siRNA sense strand
aagaagaacuuguggauga

SEQ ID NO: 1648649 - RNA, 19 nt, Homo sapiens
  misc_RNA (1)...(19): siRNA sense strand
ggaagauaaugaagaagaa

SEQ ID NO: 1648650 - RNA, 19 nt, Homo sapiens
  misc_RNA (1)...(19): siRNA sense strand
gaaccaaggcgcacugaaa

SEQ ID NO: 1648651 - RNA, 19 nt, Homo sapiens
  misc_RNA (1)...(19): siRNA sense strand
uauuggagaugaacucuua

SEQ ID NO: 1648652 - RNA, 19 nt, Homo sapiens
  misc_RNA (1)...(19): siRNA sense strand
ucuaauaacucgacuguau

SEQ ID NO: 1648653 - RNA, 19 nt, Homo sapiens
  misc_RNA (1)...(19): siRNA sense strand
acacacagauugcagauga

SEQ ID NO: 1648654 - RNA, 19 nt, Homo sapiens
  misc_RNA (1)...(19): siRNA sense strand
gacaggaaaugauuauaga

SEQ ID NO: 1648655 - RNA, 19 nt, Homo sapiens
  misc_RNA (1)...(19): siRNA sense strand
ggaaagguuuguuaguguu

SEQ ID NO: 1648656 - RNA, 19 nt, Homo sapiens
  misc_RNA (1)...(19): siRNA sense strand
ucaauggcaugcagcuuua

SEQ ID NO: 1648657 - RNA, 19 nt, Homo sapiens
  misc_RNA (1)...(19): siRNA sense strand
gggcagagucuuggaauua

SEQ ID NO: 1648658 - RNA, 19 nt, Homo sapiens
  misc_RNA (1)...(19): siRNA sense strand
ggagggagcaagaagauuu

SEQ ID NO: 1648659 - RNA, 19 nt, Homo sapiens
  misc_RNA (1)...(19): siRNA sense strand
acacagugguugcaugaua

SEQ ID NO: 1648660 - RNA, 19 nt, Homo sapiens
  misc_RNA (1)...(19): siRNA sense strand
caacauacaagccuuagaa

SEQ ID NO: 1648661 - RNA, 19 nt, Homo sapiens
  misc_RNA (1)...(19): siRNA sense strand
gcacauuauugaacuugaa

SEQ ID NO: 1648662 - RNA, 19 nt, Homo sapiens
  misc_RNA (1)...(19): siRNA sense strand
gaaacuuccuccuccuuau

SEQ ID NO: 1648663 - RNA, 19 nt, Homo sapiens
  misc_RNA (1)...(19): siRNA sense strand
gguggaagauaaugaagaa

SEQ ID NO: 1648664 - RNA, 19 nt, Homo sapiens
  misc_RNA (1)...(19): siRNA sense strand
caagaagauuugccuuuau

SEQ ID NO: 1648665 - RNA, 19 nt, Homo sapiens
  misc_RNA (1)...(19): siRNA sense strand
gacuguaucuggguuauuu

SEQ ID NO: 1648666 - RNA, 19 nt, Homo sapiens
  misc_RNA (1)...(19): siRNA sense strand
auaaagcucugacugauga

SEQ ID NO: 1648667 - RNA, 19 nt, Homo sapiens
  misc_RNA (1)...(19): siRNA sense strand
gaaguggauuccuuugaug

SEQ ID NO: 1648668 - RNA, 19 nt, Homo sapiens
  misc_RNA (1)...(19): siRNA sense strand
gaaaccaccagcucucuuu

SEQ ID NO: 1648669 - RNA, 19 nt, Homo sapiens
  misc_RNA (1)...(19): siRNA sense strand
gaacauuucccaucagcaa

SEQ ID NO: 1648670 - RNA, 19 nt, Homo sapiens
  misc_RNA (1)...(19): siRNA sense strand
agacagagguugaccacaa

SEQ ID NO: 1648671 - RNA, 19 nt, Homo sapiens
  misc_RNA (1)...(19): siRNA sense strand
guugggaaaugaagacuuu

SEQ ID NO: 1648672 - RNA, 19 nt, Homo sapiens
  misc_RNA (1)...(19): siRNA sense strand
ggagaggagcuuaaaggua

SEQ ID NO: 1648673 - RNA, 19 nt, Homo sapiens
  misc_RNA (1)...(19): siRNA sense strand
ugaugaagcuucuguagau

SEQ ID NO: 1648674 - RNA, 19 nt, Homo sapiens
  misc_RNA (1)...(19): siRNA sense strand
gcaauugcauuauuacaac

SEQ ID NO: 1648675 - RNA, 19 nt, Homo sapiens
  misc_RNA (1)...(19): siRNA sense strand
ggagguuguuugaugauga

SEQ ID NO: 1648676 - RNA, 19 nt, Homo sapiens
  misc_RNA (1)...(19): siRNA sense strand
cuaaggaacugugggaauu

SEQ ID NO: 1648677 - RNA, 19 nt, Homo sapiens
  misc_RNA (1)...(19): siRNA sense strand
ggaauguugucuucuagau

SEQ ID NO: 1648678 - RNA, 19 nt, Homo sapiens
  misc_RNA (1)...(19): siRNA sense strand
gaagagguugagcucauua

SEQ ID NO: 1648679 - RNA, 19 nt, Homo sapiens
  misc_RNA (1)...(19): siRNA sense strand
ggacaggaaaugauuauag

SEQ ID NO: 1648680 - RNA, 19 nt, Homo sapiens
  misc_RNA (1)...(19): siRNA sense strand
cgucgaaguugguauuaaa

SEQ ID NO: 1648681 - RNA, 19 nt, Homo sapiens
  misc_RNA (1)...(19): siRNA sense strand
gcaccgaaccuauuaguag

SEQ ID NO: 1648682 - RNA, 19 nt, Homo sapiens
  misc_RNA (1)...(19): siRNA sense strand
ggagaugcaugaauuucug

SEQ ID NO: 1648683 - RNA, 19 nt, Homo sapiens
  misc_RNA (1)...(19): siRNA sense strand
gaugaaccauuucuagauc

SEQ ID NO: 1648684 - RNA, 19 nt, Homo sapiens
  misc_RNA (1)...(19): siRNA sense strand
gguuugggauucagcauuu

SEQ ID NO: 1648685 - RNA, 19 nt, Homo sapiens
  misc_RNA (1)...(19): siRNA sense strand
caaagcugcugccuauuca

SEQ ID NO: 1648686 - RNA, 19 nt, Homo sapiens
  misc_RNA (1)...(19): siRNA sense strand
gaagauugguggcacaaac

SEQ ID NO: 1648687 - RNA, 19 nt, Homo sapiens
  misc_RNA (1)...(19): siRNA sense strand
aaacgaggaugcagucaau

SEQ ID NO: 1648688 - RNA, 19 nt, Homo sapiens
  misc_RNA (1)...(19): siRNA sense strand
gaagacgaacgcacuuaaa

SEQ ID NO: 1648689 - RNA, 19 nt, Homo sapiens
  misc_RNA (1)...(19): siRNA sense strand
ggaagacgaacgcacuuaa

SEQ ID NO: 1648690 - RNA, 19 nt, Homo sapiens
  misc_RNA (1)...(19): siRNA sense strand
caggaacaauucaugauau

SEQ ID NO: 1648691 - RNA, 19 nt, Homo sapiens
  misc_RNA (1)...(19): siRNA sense strand
aaagaccgaucacgcauga

SEQ ID NO: 1648692 - RNA, 19 nt, Homo sapiens
  misc_RNA (1)...(19): siRNA sense strand
ggagaacugcacauuauug

SEQ ID NO: 1648693 - RNA, 19 nt, Homo sapiens
  misc_RNA (1)...(19): siRNA sense strand
guugaaguauuacgaaaug

SEQ ID NO: 1648694 - RNA, 19 nt, Homo sapiens
  misc_RNA (1)...(19): siRNA sense strand
ggaguagauuugcagaaug

SEQ ID NO: 1648695 - RNA, 19 nt, Homo sapiens
  misc_RNA (1)...(19): siRNA sense strand
gaaggaaacagucaacaag

SEQ ID NO: 1648696 - RNA, 19 nt, Homo sapiens
  misc_RNA (1)...(19): siRNA sense strand
gaaaugaagacuuuaacuc

SEQ ID NO: 1648697 - RNA, 19 nt, Homo sapiens
  misc_RNA (1)...(19): siRNA sense strand
gaauguugucuucuagaua

SEQ ID NO: 1648698 - RNA, 19 nt, Homo sapiens
  misc_RNA (1)...(19): siRNA sense strand
guaaugaagacaagacuga

SEQ ID NO: 1648699 - RNA, 19 nt, Homo sapiens
  misc_RNA (1)...(19): siRNA sense strand
ggaugucaauacugaagaa

SEQ ID NO: 1648700 - RNA, 19 nt, Homo sapiens
  misc_RNA (1)...(19): siRNA sense strand
gggaaccaguccacacaaa

SEQ ID NO: 1648701 - RNA, 19 nt, Homo sapiens
  misc_RNA (1)...(19): siRNA sense strand
gaacuucacuuugguacac

SEQ ID NO: 1648702 - RNA, 19 nt, Homo sapiens
  misc_RNA (1)...(19): siRNA sense strand
ccugggagaugcaugaauu

SEQ ID NO: 1648703 - RNA, 19 nt, Homo sapiens
  misc_RNA (1)...(19): siRNA sense strand
ucuagcagccuaaaugaua

SEQ ID NO: 1648704 - RNA, 19 nt, Homo sapiens
  misc_RNA (1)...(19): siRNA sense strand
gugaagaugaggaaauuaa

SEQ ID NO: 1648705 - RNA, 19 nt, Homo sapiens
  misc_RNA (1)...(19): siRNA sense strand
gaacuccagccacgaagaa

SEQ ID NO: 1648706 - RNA, 19 nt, Homo sapiens
  misc_RNA (1)...(19): siRNA sense strand
caucauaccauucaacaga

SEQ ID NO: 1648707 - RNA, 19 nt, Homo sapiens
  misc_RNA (1)...(19): siRNA sense strand
acaauugccugaaagugaa

SEQ ID NO: 1648708 - RNA, 19 nt, Homo sapiens
  misc_RNA (1)...(19): siRNA sense strand
gcuuaaagguauauucauc

SEQ ID NO: 1648709 - RNA, 19 nt, Homo sapiens
  misc_RNA (1)...(19): siRNA sense strand
acaggaauguugucuucua

SEQ ID NO: 1648710 - RNA, 19 nt, Homo sapiens
  misc_RNA (1)...(19): siRNA sense strand
acacaggaauguugucuuc

SEQ ID NO: 1648711 - RNA, 19 nt, Homo sapiens
  misc_RNA (1)...(19): siRNA sense strand
gcagagucuuggaauuaga

SEQ ID NO: 1648712 - RNA, 19 nt, Homo sapiens
  misc_RNA (1)...(19): siRNA sense strand
gaucacgcaugagcauauu

SEQ ID NO: 1648713 - RNA, 19 nt, Homo sapiens
  misc_RNA (1)...(19): siRNA sense strand
cuggagaacugcacauuau

SEQ ID NO: 1648714 - RNA, 19 nt, Homo sapiens
  misc_RNA (1)...(19): siRNA sense strand
ugaagaagaagaugccuuu

SEQ ID NO: 1648715 - RNA, 19 nt, Homo sapiens
  misc_RNA (1)...(19): siRNA sense strand
gaaccaggacacccaagaa

SEQ ID NO: 1648716 - RNA, 19 nt, Homo sapiens
  misc_RNA (1)...(19): siRNA sense strand
cacagugguugcaugauaa

SEQ ID NO: 1648717 - RNA, 19 nt, Homo sapiens
  misc_RNA (1)...(19): siRNA sense strand
caagggauuuagagaugaa

SEQ ID NO: 1648718 - RNA, 19 nt, Homo sapiens
  misc_RNA (1)...(19): siRNA sense strand
auucaaagcugcugccuau

SEQ ID NO: 1648719 - RNA, 19 nt, Homo sapiens
  misc_RNA (1)...(19): siRNA sense strand
cgaaguugguauuaaacaa

SEQ ID NO: 1648720 - RNA, 19 nt, Homo sapiens
  misc_RNA (1)...(19): siRNA sense strand
gagaacugcacauuauuga

SEQ ID NO: 1648721 - RNA, 19 nt, Homo sapiens
  misc_RNA (1)...(19): siRNA sense strand
ugaguuaccugagagagaa

SEQ ID NO: 1648722 - RNA, 19 nt, Homo sapiens
  misc_RNA (1)...(19): siRNA sense strand
caauauggaugucaauacu

SEQ ID NO: 1648723 - RNA, 19 nt, Homo sapiens
  misc_RNA (1)...(19): siRNA sense strand
gguagcagaugguguagca

SEQ ID NO: 1648724 - RNA, 19 nt, Homo sapiens
  misc_RNA (1)...(19): siRNA sense strand
caucuucuauugaggauca

SEQ ID NO: 1648725 - RNA, 19 nt, Homo sapiens
  misc_RNA (1)...(19): siRNA sense strand
gaacugcacauuauugaac

SEQ ID NO: 1648726 - RNA, 19 nt, Homo sapiens
  misc_RNA (1)...(19): siRNA sense strand
gaagaagaagaugccuuua

SEQ ID NO: 1648727 - RNA, 19 nt, Homo sapiens
  misc_RNA (1)...(19): siRNA sense strand
gagcuuaaagguauauuca

SEQ ID NO: 1648728 - RNA, 19 nt, Homo sapiens
  misc_RNA (1)...(19): siRNA sense strand
cgacacgaguuauuuccaa

SEQ ID NO: 1648729 - RNA, 19 nt, Homo sapiens
  misc_RNA (1)...(19): siRNA sense strand
aaacuagucuggauuuagg

SEQ ID NO: 1648730 - RNA, 19 nt, Homo sapiens
  misc_RNA (1)...(19): siRNA sense strand
guccacaggcccucuaaua

SEQ ID NO: 1648731 - RNA, 19 nt, Homo sapiens
  misc_RNA (1)...(19): siRNA sense strand
gagagaagaaggcgaagga

SEQ ID NO: 1648732 - RNA, 19 nt, Homo sapiens
  misc_RNA (1)...(19): siRNA sense strand
caagaucccucaccaucca

SEQ ID NO: 1648733 - RNA, 19 nt, Homo sapiens
  misc_RNA (1)...(19): siRNA sense strand
gagguuguuugaugaugaa

SEQ ID NO: 1648734 - RNA, 19 nt, Homo sapiens
  misc_RNA (1)...(19): siRNA sense strand
ugucggagguuguuugaug

SEQ ID NO: 1648735 - RNA, 19 nt, Homo sapiens
  misc_RNA (1)...(19): siRNA sense strand
uaauguggauggugaagau

SEQ ID NO: 1648736 - RNA, 19 nt, Homo sapiens
  misc_RNA (1)...(19): siRNA sense strand
gccggcaaauugaauauau

SEQ ID NO: 1648737 - RNA, 19 nt, Homo sapiens
  misc_RNA (1)...(19): siRNA sense strand
ggaaauggaugaagaaaga

SEQ ID NO: 1648738 - RNA, 19 nt, Homo sapiens
  misc_RNA (1)...(19): siRNA sense strand
gaagcagucuccuuucuua

SEQ ID NO: 1648739 - RNA, 19 nt, Homo sapiens
  misc_RNA (1)...(19): siRNA sense strand
gaucaaauauuggccauua

SEQ ID NO: 1648740 - RNA, 19 nt, Homo sapiens
  misc_RNA (1)...(19): siRNA sense strand
gagaggagcuuaaagguau

SEQ ID NO: 1648741 - RNA, 19 nt, Homo sapiens
  misc_RNA (1)...(19): siRNA sense strand
agacagggaucaaagauua

SEQ ID NO: 1648742 - RNA, 19 nt, Homo sapiens
  misc_RNA (1)...(19): siRNA sense strand
gagaagaaacuccaaauuu

SEQ ID NO: 1648743 - RNA, 19 nt, Homo sapiens
  misc_RNA (1)...(19): siRNA sense strand
gaggagaacuuggagauuu

SEQ ID NO: 1648744 - RNA, 19 nt, Homo sapiens
  misc_RNA (1)...(19): siRNA sense strand
caagauuguugaacuagua

SEQ ID NO: 1648745 - RNA, 19 nt, Homo sapiens
  misc_RNA (1)...(19): siRNA sense strand
cagaggaacuguuguagaa

SEQ ID NO: 1648746 - RNA, 19 nt, Homo sapiens
  misc_RNA (1)...(19): siRNA sense strand
gguccuagcuugcucauug

SEQ ID NO: 1648747 - RNA, 19 nt, Homo sapiens
  misc_RNA (1)...(19): siRNA sense strand
gcaugcagcuuuauggaaa

SEQ ID NO: 1648748 - RNA, 19 nt, Homo sapiens
  misc_RNA (1)...(19): siRNA sense strand
aagaagaacuuguggauga

SEQ ID NO: 1648749 - RNA, 19 nt, Homo sapiens
  misc_RNA (1)...(19): siRNA sense strand
ggaagauaaugaagaagaa

SEQ ID NO: 1648750 - RNA, 19 nt, Homo sapiens
  misc_RNA (1)...(19): siRNA sense strand
gaaccaaggcgcacugaaa

SEQ ID NO: 1648751 - RNA, 19 nt, Homo sapiens
  misc_RNA (1)...(19): siRNA sense strand
uauuggagaugaacucuua

SEQ ID NO: 1648752 - RNA, 19 nt, Homo sapiens
  misc_RNA (1)...(19): siRNA sense strand
ucuaauaacucgacuguau

SEQ ID NO: 1648753 - RNA, 19 nt, Homo sapiens
  misc_RNA (1)...(19): siRNA sense strand
acacacagauugcagauga

SEQ ID NO: 1648754 - RNA, 19 nt, Homo sapiens
  misc_RNA (1)...(19): siRNA sense strand
gacaggaaaugauuauaga

SEQ ID NO: 1648755 - RNA, 19 nt, Homo sapiens
  misc_RNA (1)...(19): siRNA sense strand
ggaaagguuuguuaguguu

SEQ ID NO: 1648756 - RNA, 19 nt, Homo sapiens
  misc_RNA (1)...(19): siRNA sense strand
ucaauggcaugcagcuuua

SEQ ID NO: 1648757 - RNA, 19 nt, Homo sapiens
  misc_RNA (1)...(19): siRNA sense strand
gggcagagucuuggaauua

SEQ ID NO: 1648758 - RNA, 19 nt, Homo sapiens
  misc_RNA (1)...(19): siRNA sense strand
ggagggagcaagaagauuu

SEQ ID NO: 1648759 - RNA, 19 nt, Homo sapiens
  misc_RNA (1)...(19): siRNA sense strand
acacagugguugcaugaua

SEQ ID NO: 1648760 - RNA, 19 nt, Homo sapiens
  misc_RNA (1)...(19): siRNA sense strand
caacauacaagccuuagaa

SEQ ID NO: 1648761 - RNA, 19 nt, Homo sapiens
  misc_RNA (1)...(19): siRNA sense strand
gcacauuauugaacuugaa

SEQ ID NO: 1648762 - RNA, 19 nt, Homo sapiens
  misc_RNA (1)...(19): siRNA sense strand
gaaacuuccuccuccuuau

SEQ ID NO: 1648763 - RNA, 19 nt, Homo sapiens
  misc_RNA (1)...(19): siRNA sense strand
gguggaagauaaugaagaa

SEQ ID NO: 1648764 - RNA, 19 nt, Homo sapiens
  misc_RNA (1)...(19): siRNA sense strand
caagaagauuugccuuuau

SEQ ID NO: 1648765 - RNA, 19 nt, Homo sapiens
  misc_RNA (1)...(19): siRNA sense strand
gacuguaucuggguuauuu

SEQ ID NO: 1648766 - RNA, 19 nt, Homo sapiens
  misc_RNA (1)...(19): siRNA sense strand
auaaagcucugacugauga

SEQ ID NO: 1648767 - RNA, 19 nt, Homo sapiens
  misc_RNA (1)...(19): siRNA sense strand
gaaguggauuccuuugaug

SEQ ID NO: 1648768 - RNA, 19 nt, Homo sapiens
  misc_RNA (1)...(19): siRNA sense strand
gaaaccaccagcucucuuu

SEQ ID NO: 1648769 - RNA, 19 nt, Homo sapiens
  misc_RNA (1)...(19): siRNA sense strand
gaacauuucccaucagcaa

SEQ ID NO: 1648770 - RNA, 19 nt, Homo sapiens
  misc_RNA (1)...(19): siRNA sense strand
agacagagguugaccacaa

SEQ ID NO: 1648771 - RNA, 19 nt, Homo sapiens
  misc_RNA (1)...(19): siRNA sense strand
guugggaaaugaagacuuu

SEQ ID NO: 1648772 - RNA, 19 nt, Homo sapiens
  misc_RNA (1)...(19): siRNA sense strand
ggagaggagcuuaaaggua

SEQ ID NO: 1648773 - RNA, 19 nt, Homo sapiens
  misc_RNA (1)...(19): siRNA sense strand
ugaugaagcuucuguagau

SEQ ID NO: 1648774 - RNA, 19 nt, Homo sapiens
  misc_RNA (1)...(19): siRNA sense strand
gcaauugcauuauuacaac

SEQ ID NO: 1648775 - RNA, 19 nt, Homo sapiens
  misc_RNA (1)...(19): siRNA sense strand
ggagguuguuugaugauga

SEQ ID NO: 1648776 - RNA, 19 nt, Homo sapiens
  misc_RNA (1)...(19): siRNA sense strand
cuaaggaacugugggaauu

SEQ ID NO: 1648777 - RNA, 19 nt, Homo sapiens
  misc_RNA (1)...(19): siRNA sense strand
ggaauguugucuucuagau

SEQ ID NO: 1648778 - RNA, 19 nt, Homo sapiens
  misc_RNA (1)...(19): siRNA sense strand
gaagagguugagcucauua

SEQ ID NO: 1648779 - RNA, 19 nt, Homo sapiens
  misc_RNA (1)...(19): siRNA sense strand
ggacaggaaaugauuauag

SEQ ID NO: 1648780 - RNA, 19 nt, Homo sapiens
  misc_RNA (1)...(19): siRNA sense strand
cgucgaaguugguauuaaa

SEQ ID NO: 1648781 - RNA, 19 nt, Homo sapiens
  misc_RNA (1)...(19): siRNA sense strand
gcaccgaaccuauuaguag

SEQ ID NO: 1648782 - RNA, 19 nt, Homo sapiens
  misc_RNA (1)...(19): siRNA sense strand
ggagaugcaugaauuucug

SEQ ID NO: 1648783 - RNA, 19 nt, Homo sapiens
  misc_RNA (1)...(19): siRNA sense strand
gaugaaccauuucuagauc

SEQ ID NO: 1648784 - RNA, 19 nt, Homo sapiens
  misc_RNA (1)...(19): siRNA sense strand
gguuugggauucagcauuu

SEQ ID NO: 1648785 - RNA, 19 nt, Homo sapiens
  misc_RNA (1)...(19): siRNA sense strand
caaagcugcugccuauuca

SEQ ID NO: 1648786 - RNA, 19 nt, Homo sapiens
  misc_RNA (1)...(19): siRNA sense strand
gaagauugguggcacaaac

SEQ ID NO: 1648787 - RNA, 19 nt, Homo sapiens
  misc_RNA (1)...(19): siRNA sense strand
aaacgaggaugcagucaau

SEQ ID NO: 1648788 - RNA, 19 nt, Homo sapiens
  misc_RNA (1)...(19): siRNA sense strand
gaagacgaacgcacuuaaa

SEQ ID NO: 1648789 - RNA, 19 nt, Homo sapiens
  misc_RNA (1)...(19): siRNA sense strand
ggaagacgaacgcacuuaa

SEQ ID NO: 1648790 - RNA, 19 nt, Homo sapiens
  misc_RNA (1)...(19): siRNA sense strand
caggaacaauucaugauau

SEQ ID NO: 1648791 - RNA, 19 nt, Homo sapiens
  misc_RNA (1)...(19): siRNA sense strand
aaagaccgaucacgcauga

SEQ ID NO: 1648792 - RNA, 19 nt, Homo sapiens
  misc_RNA (1)...(19): siRNA sense strand
ggagaacugcacauuauug

SEQ ID NO: 1648793 - RNA, 19 nt, Homo sapiens
  misc_RNA (1)...(19): siRNA sense strand
guugaaguauuacgaaaug

SEQ ID NO: 1648794 - RNA, 19 nt, Homo sapiens
  misc_RNA (1)...(19): siRNA sense strand
ggaguagauuugcagaaug

SEQ ID NO: 1648795 - RNA, 19 nt, Homo sapiens
  misc_RNA (1)...(19): siRNA sense strand
gaaggaaacagucaacaag

SEQ ID NO: 1648796 - RNA, 19 nt, Homo sapiens
  misc_RNA (1)...(19): siRNA sense strand
gaaaugaagacuuuaacuc

SEQ ID NO: 1648797 - RNA, 19 nt, Homo sapiens
  misc_RNA (1)...(19): siRNA sense strand
gaauguugucuucuagaua

SEQ ID NO: 1648798 - RNA, 19 nt, Homo sapiens
  misc_RNA (1)...(19): siRNA sense strand
guaaugaagacaagacuga

SEQ ID NO: 1648799 - RNA, 19 nt, Homo sapiens
  misc_RNA (1)...(19): siRNA sense strand
ggaugucaauacugaagaa

SEQ ID NO: 1648800 - RNA, 19 nt, Homo sapiens
  misc_RNA (1)...(19): siRNA sense strand
gggaaccaguccacacaaa

SEQ ID NO: 1648801 - RNA, 19 nt, Homo sapiens
  misc_RNA (1)...(19): siRNA sense strand
gaacuucacuuugguacac

SEQ ID NO: 1648802 - RNA, 19 nt, Homo sapiens
  misc_RNA (1)...(19): siRNA sense strand
ccugggagaugcaugaauu

SEQ ID NO: 1648803 - RNA, 19 nt, Homo sapiens
  misc_RNA (1)...(19): siRNA sense strand
ucuagcagccuaaaugaua

SEQ ID NO: 1648804 - RNA, 19 nt, Homo sapiens
  misc_RNA (1)...(19): siRNA sense strand
gugaagaugaggaaauuaa

SEQ ID NO: 1648805 - RNA, 19 nt, Homo sapiens
  misc_RNA (1)...(19): siRNA sense strand
gaacuccagccacgaagaa

SEQ ID NO: 1648806 - RNA, 19 nt, Homo sapiens
  misc_RNA (1)...(19): siRNA sense strand
caucauaccauucaacaga

SEQ ID NO: 1648807 - RNA, 19 nt, Homo sapiens
  misc_RNA (1)...(19): siRNA sense strand
acaauugccugaaagugaa

SEQ ID NO: 1648808 - RNA, 19 nt, Homo sapiens
  misc_RNA (1)...(19): siRNA sense strand
gcuuaaagguauauucauc

SEQ ID NO: 1648809 - RNA, 19 nt, Homo sapiens
  misc_RNA (1)...(19): siRNA sense strand
acaggaauguugucuucua

SEQ ID NO: 1648810 - RNA, 19 nt, Homo sapiens
  misc_RNA (1)...(19): siRNA sense strand
acacaggaauguugucuuc

SEQ ID NO: 1648811 - RNA, 19 nt, Homo sapiens
  misc_RNA (1)...(19): siRNA sense strand
gcagagucuuggaauuaga

SEQ ID NO: 1648812 - RNA, 19 nt, Homo sapiens
  misc_RNA (1)...(19): siRNA sense strand
gaucacgcaugagcauauu

SEQ ID NO: 1648813 - RNA, 19 nt, Homo sapiens
  misc_RNA (1)...(19): siRNA sense strand
cuggagaacugcacauuau

SEQ ID NO: 1648814 - RNA, 19 nt, Homo sapiens
  misc_RNA (1)...(19): siRNA sense strand
ugaagaagaagaugccuuu

SEQ ID NO: 1648815 - RNA, 19 nt, Homo sapiens
  misc_RNA (1)...(19): siRNA sense strand
gaaccaggacacccaagaa

SEQ ID NO: 1648816 - RNA, 19 nt, Homo sapiens
  misc_RNA (1)...(19): siRNA sense strand
cacagugguugcaugauaa

SEQ ID NO: 1648817 - RNA, 19 nt, Homo sapiens
  misc_RNA (1)...(19): siRNA sense strand
caagggauuuagagaugaa

SEQ ID NO: 1648818 - RNA, 19 nt, Homo sapiens
  misc_RNA (1)...(19): siRNA sense strand
auucaaagcugcugccuau

SEQ ID NO: 1648819 - RNA, 19 nt, Homo sapiens
  misc_RNA (1)...(19): siRNA sense strand
cgaaguugguauuaaacaa

SEQ ID NO: 1648820 - RNA, 19 nt, Homo sapiens
  misc_RNA (1)...(19): siRNA sense strand
gagaacugcacauuauuga

SEQ ID NO: 1648821 - RNA, 19 nt, Homo sapiens
  misc_RNA (1)...(19): siRNA sense strand
ugaguuaccugagagagaa

SEQ ID NO: 1648822 - RNA, 19 nt, Homo sapiens
  misc_RNA (1)...(19): siRNA sense strand
caauauggaugucaauacu

SEQ ID NO: 1648823 - RNA, 19 nt, Homo sapiens
  misc_RNA (1)...(19): siRNA sense strand
gguagcagaugguguagca

SEQ ID NO: 1648824 - RNA, 19 nt, Homo sapiens
  misc_RNA (1)...(19): siRNA sense strand
caucuucuauugaggauca

SEQ ID NO: 1648825 - RNA, 19 nt, Homo sapiens
  misc_RNA (1)...(19): siRNA sense strand
gaacugcacauuauugaac

SEQ ID NO: 1648826 - RNA, 19 nt, Homo sapiens
  misc_RNA (1)...(19): siRNA sense strand
gaagaagaagaugccuuua

SEQ ID NO: 1648827 - RNA, 19 nt, Homo sapiens
  misc_RNA (1)...(19): siRNA sense strand
gagcuuaaagguauauuca

SEQ ID NO: 1648828 - RNA, 19 nt, Homo sapiens
  misc_RNA (1)...(19): siRNA sense strand
cgacacgaguuauuuccaa

SEQ ID NO: 1648829 - RNA, 19 nt, Homo sapiens
  misc_RNA (1)...(19): siRNA sense strand
aaacuagucuggauuuagg

SEQ ID NO: 1648830 - RNA, 19 nt, Homo sapiens
  misc_RNA (1)...(19): siRNA sense strand
guccacaggcccucuaaua

SEQ ID NO: 1648831 - RNA, 19 nt, Homo sapiens
  misc_RNA (1)...(19): siRNA sense strand
gagagaagaaggcgaagga

SEQ ID NO: 1648832 - RNA, 19 nt, Homo sapiens
  misc_RNA (1)...(19): siRNA sense strand
caagaucccucaccaucca

SEQ ID NO: 1648833 - RNA, 19 nt, Homo sapiens
  misc_RNA (1)...(19): siRNA sense strand
gagguuguuugaugaugaa

SEQ ID NO: 1648834 - RNA, 19 nt, Homo sapiens
  misc_RNA (1)...(19): siRNA sense strand
ugucggagguuguuugaug

SEQ ID NO: 1648835 - RNA, 19 nt, Homo sapiens
  misc_RNA (1)...(19): siRNA sense strand
uaauguggauggugaagau

SEQ ID NO: 1648836 - RNA, 19 nt, Homo sapiens
  misc_RNA (1)...(19): siRNA sense strand
gccggcaaauugaauauau

SEQ ID NO: 1648837 - RNA, 19 nt, Homo sapiens
  misc_RNA (1)...(19): siRNA sense strand
ggaaauggaugaagaaaga

SEQ ID NO: 1648838 - RNA, 19 nt, Homo sapiens
  misc_RNA (1)...(19): siRNA sense strand
gaagcagucuccuuucuua

SEQ ID NO: 1648839 - RNA, 19 nt, Homo sapiens
  misc_RNA (1)...(19): siRNA sense strand
gaucaaauauuggccauua

SEQ ID NO: 1648840 - RNA, 19 nt, Homo sapiens
  misc_RNA (1)...(19): siRNA sense strand
gagaggagcuuaaagguau

SEQ ID NO: 1648841 - RNA, 19 nt, Homo sapiens
  misc_RNA (1)...(19): siRNA sense strand
agacagggaucaaagauua

SEQ ID NO: 1648842 - RNA, 19 nt, Homo sapiens
  misc_RNA (1)...(19): siRNA sense strand
gagaagaaacuccaaauuu

SEQ ID NO: 1648843 - RNA, 19 nt, Homo sapiens
  misc_RNA (1)...(19): siRNA sense strand
gaggagaacuuggagauuu

SEQ ID NO: 1648844 - RNA, 19 nt, Homo sapiens
  misc_RNA (1)...(19): siRNA sense strand
caagauuguugaacuagua

SEQ ID NO: 1648845 - RNA, 19 nt, Homo sapiens
  misc_RNA (1)...(19): siRNA sense strand
cagaggaacuguuguagaa

SEQ ID NO: 1648846 - RNA, 19 nt, Homo sapiens
  misc_RNA (1)...(19): siRNA sense strand
gguccuagcuugcucauug

SEQ ID NO: 1648847 - RNA, 19 nt, Homo sapiens
  misc_RNA (1)...(19): siRNA sense strand
gcaugcagcuuuauggaaa

SEQ ID NO: 1648848 - RNA, 19 nt, Homo sapiens
  misc_RNA (1)...(19): siRNA sense strand
aagaagaacuuguggauga

SEQ ID NO: 1648849 - RNA, 19 nt, Homo sapiens
  misc_RNA (1)...(19): siRNA sense strand
ggaagauaaugaagaagaa

SEQ ID NO: 1648850 - RNA, 19 nt, Homo sapiens
  misc_RNA (1)...(19): siRNA sense strand
gaaccaaggcgcacugaaa

SEQ ID NO: 1648851 - RNA, 19 nt, Homo sapiens
  misc_RNA (1)...(19): siRNA sense strand
uauuggagaugaacucuua

SEQ ID NO: 1648852 - RNA, 19 nt, Homo sapiens
  misc_RNA (1)...(19): siRNA sense strand
ucuaauaacucgacuguau

SEQ ID NO: 1648853 - RNA, 19 nt, Homo sapiens
  misc_RNA (1)...(19): siRNA sense strand
acacacagauugcagauga

SEQ ID NO: 1648854 - RNA, 19 nt, Homo sapiens
  misc_RNA (1)...(19): siRNA sense strand
gacaggaaaugauuauaga

SEQ ID NO: 1648855 - RNA, 19 nt, Homo sapiens
  misc_RNA (1)...(19): siRNA sense strand
ggaaagguuuguuaguguu

SEQ ID NO: 1648856 - RNA, 19 nt, Homo sapiens
  misc_RNA (1)...(19): siRNA sense strand
ucaauggcaugcagcuuua

SEQ ID NO: 1648857 - RNA, 19 nt, Homo sapiens
  misc_RNA (1)...(19): siRNA sense strand
gggcagagucuuggaauua

SEQ ID NO: 1648858 - RNA, 19 nt, Homo sapiens
  misc_RNA (1)...(19): siRNA sense strand
ggagggagcaagaagauuu

SEQ ID NO: 1648859 - RNA, 19 nt, Homo sapiens
  misc_RNA (1)...(19): siRNA sense strand
acacagugguugcaugaua

SEQ ID NO: 1648860 - RNA, 19 nt, Homo sapiens
  misc_RNA (1)...(19): siRNA sense strand
caacauacaagccuuagaa

SEQ ID NO: 1648861 - RNA, 19 nt, Homo sapiens
  misc_RNA (1)...(19): siRNA sense strand
gcacauuauugaacuugaa

SEQ ID NO: 1648862 - RNA, 19 nt, Homo sapiens
  misc_RNA (1)...(19): siRNA sense strand
gaaacuuccuccuccuuau

SEQ ID NO: 1648863 - RNA, 19 nt, Homo sapiens
  misc_RNA (1)...(19): siRNA sense strand
gguggaagauaaugaagaa

SEQ ID NO: 1648864 - RNA, 19 nt, Homo sapiens
  misc_RNA (1)...(19): siRNA sense strand
caagaagauuugccuuuau

SEQ ID NO: 1648865 - RNA, 19 nt, Homo sapiens
  misc_RNA (1)...(19): siRNA sense strand
gacuguaucuggguuauuu

SEQ ID NO: 1648866 - RNA, 19 nt, Homo sapiens
  misc_RNA (1)...(19): siRNA sense strand
auaaagcucugacugauga

SEQ ID NO: 1648867 - RNA, 19 nt, Homo sapiens
  misc_RNA (1)...(19): siRNA sense strand
gaaguggauuccuuugaug

SEQ ID NO: 1648868 - RNA, 19 nt, Homo sapiens
  misc_RNA (1)...(19): siRNA sense strand
gaaaccaccagcucucuuu

SEQ ID NO: 1648869 - RNA, 19 nt, Homo sapiens
  misc_RNA (1)...(19): siRNA sense strand
gaacauuucccaucagcaa

SEQ ID NO: 1648870 - RNA, 19 nt, Homo sapiens
  misc_RNA (1)...(19): siRNA sense strand
agacagagguugaccacaa

SEQ ID NO: 1648871 - RNA, 19 nt, Homo sapiens
  misc_RNA (1)...(19): siRNA sense strand
guugggaaaugaagacuuu

SEQ ID NO: 1648872 - RNA, 19 nt, Homo sapiens
  misc_RNA (1)...(19): siRNA sense strand
ggagaggagcuuaaaggua

SEQ ID NO: 1648873 - RNA, 19 nt, Homo sapiens
  misc_RNA (1)...(19): siRNA sense strand
ugaugaagcuucuguagau

SEQ ID NO: 1648874 - RNA, 19 nt, Homo sapiens
  misc_RNA (1)...(19): siRNA sense strand
gcaauugcauuauuacaac

SEQ ID NO: 1648875 - RNA, 19 nt, Homo sapiens
  misc_RNA (1)...(19): siRNA sense strand
ggagguuguuugaugauga

SEQ ID NO: 1648876 - RNA, 19 nt, Homo sapiens
  misc_RNA (1)...(19): siRNA sense strand
cuaaggaacugugggaauu

SEQ ID NO: 1648877 - RNA, 19 nt, Homo sapiens
  misc_RNA (1)...(19): siRNA sense strand
ggaauguugucuucuagau

SEQ ID NO: 1648878 - RNA, 19 nt, Homo sapiens
  misc_RNA (1)...(19): siRNA sense strand
gaagagguugagcucauua

SEQ ID NO: 1648879 - RNA, 19 nt, Homo sapiens
  misc_RNA (1)...(19): siRNA sense strand
ggacaggaaaugauuauag

SEQ ID NO: 1648880 - RNA, 19 nt, Homo sapiens
  misc_RNA (1)...(19): siRNA sense strand
cgucgaaguugguauuaaa

SEQ ID NO: 1648881 - RNA, 19 nt, Homo sapiens
  misc_RNA (1)...(19): siRNA sense strand
gcaccgaaccuauuaguag

SEQ ID NO: 1648882 - RNA, 19 nt, Homo sapiens
  misc_RNA (1)...(19): siRNA sense strand
ggagaugcaugaauuucug

SEQ ID NO: 1648883 - RNA, 19 nt, Homo sapiens
  misc_RNA (1)...(19): siRNA sense strand
gaugaaccauuucuagauc

SEQ ID NO: 1648884 - RNA, 19 nt, Homo sapiens
  misc_RNA (1)...(19): siRNA sense strand
gguuugggauucagcauuu

SEQ ID NO: 1648885 - RNA, 19 nt, Homo sapiens
  misc_RNA (1)...(19): siRNA sense strand
caaagcugcugccuauuca

SEQ ID NO: 1648886 - RNA, 19 nt, Homo sapiens
  misc_RNA (1)...(19): siRNA sense strand
gaagauugguggcacaaac

SEQ ID NO: 1648887 - RNA, 19 nt, Homo sapiens
  misc_RNA (1)...(19): siRNA sense strand
aaacgaggaugcagucaau

SEQ ID NO: 1648888 - RNA, 19 nt, Homo sapiens
  misc_RNA (1)...(19): siRNA sense strand
gaagacgaacgcacuuaaa

SEQ ID NO: 1648889 - RNA, 19 nt, Homo sapiens
  misc_RNA (1)...(19): siRNA sense strand
ggaagacgaacgcacuuaa

SEQ ID NO: 1648890 - RNA, 19 nt, Homo sapiens
  misc_RNA (1)...(19): siRNA sense strand
caggaacaauucaugauau

SEQ ID NO: 1648891 - RNA, 19 nt, Homo sapiens
  misc_RNA (1)...(19): siRNA sense strand
aaagaccgaucacgcauga

SEQ ID NO: 1648892 - RNA, 19 nt, Homo sapiens
  misc_RNA (1)...(19): siRNA sense strand
ggagaacugcacauuauug

SEQ ID NO: 1648893 - RNA, 19 nt, Homo sapiens
  misc_RNA (1)...(19): siRNA sense strand
guugaaguauuacgaaaug

SEQ ID NO: 1648894 - RNA, 19 nt, Homo sapiens
  misc_RNA (1)...(19): siRNA sense strand
ggaguagauuugcagaaug

SEQ ID NO: 1648895 - RNA, 19 nt, Homo sapiens
  misc_RNA (1)...(19): siRNA sense strand
gaaggaaacagucaacaag

SEQ ID NO: 1648896 - RNA, 19 nt, Homo sapiens
  misc_RNA (1)...(19): siRNA sense strand
gaaaugaagacuuuaacuc

SEQ ID NO: 1648897 - RNA, 19 nt, Homo sapiens
  misc_RNA (1)...(19): siRNA sense strand
gaauguugucuucuagaua

SEQ ID NO: 1648898 - RNA, 19 nt, Homo sapiens
  misc_RNA (1)...(19): siRNA sense strand
guaaugaagacaagacuga

SEQ ID NO: 1648899 - RNA, 19 nt, Homo sapiens
  misc_RNA (1)...(19): siRNA sense strand
ggaugucaauacugaagaa

SEQ ID NO: 1648900 - RNA, 19 nt, Homo sapiens
  misc_RNA (1)...(19): siRNA sense strand
gggaaccaguccacacaaa

SEQ ID NO: 1648901 - RNA, 19 nt, Homo sapiens
  misc_RNA (1)...(19): siRNA sense strand
gaacuucacuuugguacac

SEQ ID NO: 1648902 - RNA, 19 nt, Homo sapiens
  misc_RNA (1)...(19): siRNA sense strand
ccugggagaugcaugaauu

SEQ ID NO: 1648903 - RNA, 19 nt, Homo sapiens
  misc_RNA (1)...(19): siRNA sense strand
ucuagcagccuaaaugaua

SEQ ID NO: 1648904 - RNA, 19 nt, Homo sapiens
  misc_RNA (1)...(19): siRNA sense strand
gugaagaugaggaaauuaa

SEQ ID NO: 1648905 - RNA, 19 nt, Homo sapiens
  misc_RNA (1)...(19): siRNA sense strand
gaacuccagccacgaagaa

SEQ ID NO: 1648906 - RNA, 19 nt, Homo sapiens
  misc_RNA (1)...(19): siRNA sense strand
caucauaccauucaacaga

SEQ ID NO: 1648907 - RNA, 19 nt, Homo sapiens
  misc_RNA (1)...(19): siRNA sense strand
acaauugccugaaagugaa

SEQ ID NO: 1648908 - RNA, 19 nt, Homo sapiens
  misc_RNA (1)...(19): siRNA sense strand
gcuuaaagguauauucauc

SEQ ID NO: 1648909 - RNA, 19 nt, Homo sapiens
  misc_RNA (1)...(19): siRNA sense strand
acaggaauguugucuucua

SEQ ID NO: 1648910 - RNA, 19 nt, Homo sapiens
  misc_RNA (1)...(19): siRNA sense strand
acacaggaauguugucuuc

SEQ ID NO: 1648911 - RNA, 19 nt, Homo sapiens
  misc_RNA (1)...(19): siRNA sense strand
gcagagucuuggaauuaga

SEQ ID NO: 1648912 - RNA, 19 nt, Homo sapiens
  misc_RNA (1)...(19): siRNA sense strand
gaucacgcaugagcauauu

SEQ ID NO: 1648913 - RNA, 19 nt, Homo sapiens
  misc_RNA (1)...(19): siRNA sense strand
cuggagaacugcacauuau

SEQ ID NO: 1648914 - RNA, 19 nt, Homo sapiens
  misc_RNA (1)...(19): siRNA sense strand
ugaagaagaagaugccuuu

SEQ ID NO: 1648915 - RNA, 19 nt, Homo sapiens
  misc_RNA (1)...(19): siRNA sense strand
gaaccaggacacccaagaa

SEQ ID NO: 1648916 - RNA, 19 nt, Homo sapiens
  misc_RNA (1)...(19): siRNA sense strand
cacagugguugcaugauaa

SEQ ID NO: 1648917 - RNA, 19 nt, Homo sapiens
  misc_RNA (1)...(19): siRNA sense strand
caagggauuuagagaugaa

SEQ ID NO: 1648918 - RNA, 19 nt, Homo sapiens
  misc_RNA (1)...(19): siRNA sense strand
auucaaagcugcugccuau

SEQ ID NO: 1648919 - RNA, 19 nt, Homo sapiens
  misc_RNA (1)...(19): siRNA sense strand
cgaaguugguauuaaacaa

SEQ ID NO: 1648920 - RNA, 19 nt, Homo sapiens
  misc_RNA (1)...(19): siRNA sense strand
gagaacugcacauuauuga

SEQ ID NO: 1648921 - RNA, 19 nt, Homo sapiens
  misc_RNA (1)...(19): siRNA sense strand
ugaguuaccugagagagaa

SEQ ID NO: 1648922 - RNA, 19 nt, Homo sapiens
  misc_RNA (1)...(19): siRNA sense strand
caauauggaugucaauacu

SEQ ID NO: 1648923 - RNA, 19 nt, Homo sapiens
  misc_RNA (1)...(19): siRNA sense strand
gguagcagaugguguagca

SEQ ID NO: 1648924 - RNA, 19 nt, Homo sapiens
  misc_RNA (1)...(19): siRNA sense strand
caucuucuauugaggauca

SEQ ID NO: 1648925 - RNA, 19 nt, Homo sapiens
  misc_RNA (1)...(19): siRNA sense strand
gaacugcacauuauugaac

SEQ ID NO: 1648926 - RNA, 19 nt, Homo sapiens
  misc_RNA (1)...(19): siRNA sense strand
gaagaagaagaugccuuua

SEQ ID NO: 1648927 - RNA, 19 nt, Homo sapiens
  misc_RNA (1)...(19): siRNA sense strand
gagcuuaaagguauauuca

SEQ ID NO: 1648928 - RNA, 19 nt, Homo sapiens
  misc_RNA (1)...(19): siRNA sense strand
cgacacgaguuauuuccaa

SEQ ID NO: 1648929 - RNA, 19 nt, Homo sapiens
  misc_RNA (1)...(19): siRNA sense strand
aaacuagucuggauuuagg

SEQ ID NO: 1648930 - RNA, 19 nt, Homo sapiens
  misc_RNA (1)...(19): siRNA sense strand
guccacaggcccucuaaua

SEQ ID NO: 1648931 - RNA, 19 nt, Homo sapiens
  misc_RNA (1)...(19): siRNA sense strand
gagagaagaaggcgaagga

SEQ ID NO: 1648932 - RNA, 19 nt, Homo sapiens
  misc_RNA (1)...(19): siRNA sense strand
caagaucccucaccaucca

SEQ ID NO: 1648933 - RNA, 19 nt, Homo sapiens
  misc_RNA (1)...(19): siRNA sense strand
gagguuguuugaugaugaa

SEQ ID NO: 1648934 - RNA, 19 nt, Homo sapiens
  misc_RNA (1)...(19): siRNA sense strand
ugucggagguuguuugaug

SEQ ID NO: 1648935 - RNA, 19 nt, Homo sapiens
  misc_RNA (1)...(19): siRNA sense strand
uaauguggauggugaagau

SEQ ID NO: 1648936 - RNA, 19 nt, Homo sapiens
  misc_RNA (1)...(19): siRNA sense strand
gccggcaaauugaauauau

SEQ ID NO: 1648937 - RNA, 19 nt, Homo sapiens
  misc_RNA (1)...(19): siRNA sense strand
ggaaauggaugaagaaaga

SEQ ID NO: 1648938 - RNA, 19 nt, Homo sapiens
  misc_RNA (1)...(19): siRNA sense strand
gaagcagucuccuuucuua

SEQ ID NO: 1648939 - RNA, 19 nt, Homo sapiens
  misc_RNA (1)...(19): siRNA sense strand
gaucaaauauuggccauua

SEQ ID NO: 1648940 - RNA, 19 nt, Homo sapiens
  misc_RNA (1)...(19): siRNA sense strand
gagaggagcuuaaagguau

SEQ ID NO: 1648941 - RNA, 19 nt, Homo sapiens
  misc_RNA (1)...(19): siRNA sense strand
agacagggaucaaagauua

SEQ ID NO: 1648942 - RNA, 19 nt, Homo sapiens
  misc_RNA (1)...(19): siRNA sense strand
gagaagaaacuccaaauuu

SEQ ID NO: 1648943 - RNA, 19 nt, Homo sapiens
  misc_RNA (1)...(19): siRNA sense strand
gaggagaacuuggagauuu

SEQ ID NO: 1648944 - RNA, 19 nt, Homo sapiens
  misc_RNA (1)...(19): siRNA sense strand
caagauuguugaacuagua

SEQ ID NO: 1648945 - RNA, 19 nt, Homo sapiens
  misc_RNA (1)...(19): siRNA sense strand
cagaggaacuguuguagaa

SEQ ID NO: 1648946 - RNA, 19 nt, Homo sapiens
  misc_RNA (1)...(19): siRNA sense strand
gguccuagcuugcucauug

SEQ ID NO: 1648947 - RNA, 19 nt, Homo sapiens
  misc_RNA (1)...(19): siRNA sense strand
gcaugcagcuuuauggaaa

SEQ ID NO: 1648948 - RNA, 19 nt, Homo sapiens
  misc_RNA (1)...(19): siRNA sense strand
aagaagaacuuguggauga

SEQ ID NO: 1648949 - RNA, 19 nt, Homo sapiens
  misc_RNA (1)...(19): siRNA sense strand
ggaagauaaugaagaagaa

SEQ ID NO: 1648950 - RNA, 19 nt, Homo sapiens
  misc_RNA (1)...(19): siRNA sense strand
gaaccaaggcgcacugaaa

SEQ ID NO: 1648951 - RNA, 19 nt, Homo sapiens
  misc_RNA (1)...(19): siRNA sense strand
uauuggagaugaacucuua

SEQ ID NO: 1648952 - RNA, 19 nt, Homo sapiens
  misc_RNA (1)...(19): siRNA sense strand
ucuaauaacucgacuguau

SEQ ID NO: 1648953 - RNA, 19 nt, Homo sapiens
  misc_RNA (1)...(19): siRNA sense strand
acacacagauugcagauga

SEQ ID NO: 1648954 - RNA, 19 nt, Homo sapiens
  misc_RNA (1)...(19): siRNA sense strand
gacaggaaaugauuauaga

SEQ ID NO: 1648955 - RNA, 19 nt, Homo sapiens
  misc_RNA (1)...(19): siRNA sense strand
ggaaagguuuguuaguguu

SEQ ID NO: 1648956 - RNA, 19 nt, Homo sapiens
  misc_RNA (1)...(19): siRNA sense strand
ucaauggcaugcagcuuua

SEQ ID NO: 1648957 - RNA, 19 nt, Homo sapiens
  misc_RNA (1)...(19): siRNA sense strand
gggcagagucuuggaauua

SEQ ID NO: 1648958 - RNA, 19 nt, Homo sapiens
  misc_RNA (1)...(19): siRNA sense strand
ggagggagcaagaagauuu

SEQ ID NO: 1648959 - RNA, 19 nt, Homo sapiens
  misc_RNA (1)...(19): siRNA sense strand
acacagugguugcaugaua

SEQ ID NO: 1648960 - RNA, 19 nt, Homo sapiens
  misc_RNA (1)...(19): siRNA sense strand
caacauacaagccuuagaa

SEQ ID NO: 1648961 - RNA, 19 nt, Homo sapiens
  misc_RNA (1)...(19): siRNA sense strand
gcacauuauugaacuugaa

SEQ ID NO: 1648962 - RNA, 19 nt, Homo sapiens
  misc_RNA (1)...(19): siRNA sense strand
gaaacuuccuccuccuuau

SEQ ID NO: 1648963 - RNA, 19 nt, Homo sapiens
  misc_RNA (1)...(19): siRNA sense strand
gguggaagauaaugaagaa

SEQ ID NO: 1648964 - RNA, 19 nt, Homo sapiens
  misc_RNA (1)...(19): siRNA sense strand
caagaagauuugccuuuau

SEQ ID NO: 1648965 - RNA, 19 nt, Homo sapiens
  misc_RNA (1)...(19): siRNA sense strand
gacuguaucuggguuauuu

SEQ ID NO: 1648966 - RNA, 19 nt, Homo sapiens
  misc_RNA (1)...(19): siRNA sense strand
auaaagcucugacugauga

SEQ ID NO: 1648967 - RNA, 19 nt, Homo sapiens
  misc_RNA (1)...(19): siRNA sense strand
gaaguggauuccuuugaug

SEQ ID NO: 1648968 - RNA, 19 nt, Homo sapiens
  misc_RNA (1)...(19): siRNA sense strand
gaaaccaccagcucucuuu

SEQ ID NO: 1648969 - RNA, 19 nt, Homo sapiens
  misc_RNA (1)...(19): siRNA sense strand
gaacauuucccaucagcaa

SEQ ID NO: 1648970 - RNA, 19 nt, Homo sapiens
  misc_RNA (1)...(19): siRNA sense strand
agacagagguugaccacaa

SEQ ID NO: 1648971 - RNA, 19 nt, Homo sapiens
  misc_RNA (1)...(19): siRNA sense strand
guugggaaaugaagacuuu

SEQ ID NO: 1648972 - RNA, 19 nt, Homo sapiens
  misc_RNA (1)...(19): siRNA sense strand
ggagaggagcuuaaaggua

SEQ ID NO: 1648973 - RNA, 19 nt, Homo sapiens
  misc_RNA (1)...(19): siRNA sense strand
ugaugaagcuucuguagau

SEQ ID NO: 1648974 - RNA, 19 nt, Homo sapiens
  misc_RNA (1)...(19): siRNA sense strand
gcaauugcauuauuacaac

SEQ ID NO: 1648975 - RNA, 19 nt, Homo sapiens
  misc_RNA (1)...(19): siRNA sense strand
ggagguuguuugaugauga

SEQ ID NO: 1648976 - RNA, 19 nt, Homo sapiens
  misc_RNA (1)...(19): siRNA sense strand
cuaaggaacugugggaauu

SEQ ID NO: 1648977 - RNA, 19 nt, Homo sapiens
  misc_RNA (1)...(19): siRNA sense strand
ggaauguugucuucuagau

SEQ ID NO: 1648978 - RNA, 19 nt, Homo sapiens
  misc_RNA (1)...(19): siRNA sense strand
gaagagguugagcucauua

SEQ ID NO: 1648979 - RNA, 19 nt, Homo sapiens
  misc_RNA (1)...(19): siRNA sense strand
ggacaggaaaugauuauag

SEQ ID NO: 1648980 - RNA, 19 nt, Homo sapiens
  misc_RNA (1)...(19): siRNA sense strand
cgucgaaguugguauuaaa

SEQ ID NO: 1648981 - RNA, 19 nt, Homo sapiens
  misc_RNA (1)...(19): siRNA sense strand
gcaccgaaccuauuaguag

SEQ ID NO: 1648982 - RNA, 19 nt, Homo sapiens
  misc_RNA (1)...(19): siRNA sense strand
ggagaugcaugaauuucug

SEQ ID NO: 1648983 - RNA, 19 nt, Homo sapiens
  misc_RNA (1)...(19): siRNA sense strand
gaugaaccauuucuagauc

SEQ ID NO: 1648984 - RNA, 19 nt, Homo sapiens
  misc_RNA (1)...(19): siRNA sense strand
gguuugggauucagcauuu

SEQ ID NO: 1648985 - RNA, 19 nt, Homo sapiens
  misc_RNA (1)...(19): siRNA sense strand
caaagcugcugccuauuca

SEQ ID NO: 1648986 - RNA, 19 nt, Homo sapiens
  misc_RNA (1)...(19): siRNA sense strand
gaagauugguggcacaaac

SEQ ID NO: 1648987 - RNA, 19 nt, Homo sapiens
  misc_RNA (1)...(19): siRNA sense strand
aaacgaggaugcagucaau

SEQ ID NO: 1648988 - RNA, 19 nt, Homo sapiens
  misc_RNA (1)...(19): siRNA sense strand
gaagacgaacgcacuuaaa

SEQ ID NO: 1648989 - RNA, 19 nt, Homo sapiens
  misc_RNA (1)...(19): siRNA sense strand
ggaagacgaacgcacuuaa

SEQ ID NO: 1648990 - RNA, 19 nt, Homo sapiens
  misc_RNA (1)...(19): siRNA sense strand
caggaacaauucaugauau

SEQ ID NO: 1648991 - RNA, 19 nt, Homo sapiens
  misc_RNA (1)...(19): siRNA sense strand
aaagaccgaucacgcauga

SEQ ID NO: 1648992 - RNA, 19 nt, Homo sapiens
  misc_RNA (1)...(19): siRNA sense strand
ggagaacugcacauuauug

SEQ ID NO: 1648993 - RNA, 19 nt, Homo sapiens
  misc_RNA (1)...(19): siRNA sense strand
guugaaguauuacgaaaug

SEQ ID NO: 1648994 - RNA, 19 nt, Homo sapiens
  misc_RNA (1)...(19): siRNA sense strand
ggaguagauuugcagaaug

SEQ ID NO: 1648995 - RNA, 19 nt, Homo sapiens
  misc_RNA (1)...(19): siRNA sense strand
gaaggaaacagucaacaag

SEQ ID NO: 1648996 - RNA, 19 nt, Homo sapiens
  misc_RNA (1)...(19): siRNA sense strand
gaaaugaagacuuuaacuc

SEQ ID NO: 1648997 - RNA, 19 nt, Homo sapiens
  misc_RNA (1)...(19): siRNA sense strand
gaauguugucuucuagaua

SEQ ID NO: 1648998 - RNA, 19 nt, Homo sapiens
  misc_RNA (1)...(19): siRNA sense strand
guaaugaagacaagacuga

SEQ ID NO: 1648999 - RNA, 19 nt, Homo sapiens
  misc_RNA (1)...(19): siRNA sense strand
ggaugucaauacugaagaa

SEQ ID NO: 1649000 - RNA, 19 nt, Homo sapiens
  misc_RNA (1)...(19): siRNA sense strand
gggaaccaguccacacaaa

SEQ ID NO: 1649001 - RNA, 19 nt, Homo sapiens
  misc_RNA (1)...(19): siRNA sense strand
gaacuucacuuugguacac

SEQ ID NO: 1649002 - RNA, 19 nt, Homo sapiens
  misc_RNA (1)...(19): siRNA sense strand
ccugggagaugcaugaauu

SEQ ID NO: 1649003 - RNA, 19 nt, Homo sapiens
  misc_RNA (1)...(19): siRNA sense strand
ucuagcagccuaaaugaua

SEQ ID NO: 1649004 - RNA, 19 nt, Homo sapiens
  misc_RNA (1)...(19): siRNA sense strand
gugaagaugaggaaauuaa

SEQ ID NO: 1649005 - RNA, 19 nt, Homo sapiens
  misc_RNA (1)...(19): siRNA sense strand
gaacuccagccacgaagaa

SEQ ID NO: 1649006 - RNA, 19 nt, Homo sapiens
  misc_RNA (1)...(19): siRNA sense strand
caucauaccauucaacaga

SEQ ID NO: 1649007 - RNA, 19 nt, Homo sapiens
  misc_RNA (1)...(19): siRNA sense strand
acaauugccugaaagugaa

SEQ ID NO: 1649008 - RNA, 19 nt, Homo sapiens
  misc_RNA (1)...(19): siRNA sense strand
gcuuaaagguauauucauc

SEQ ID NO: 1649009 - RNA, 19 nt, Homo sapiens
  misc_RNA (1)...(19): siRNA sense strand
acaggaauguugucuucua

SEQ ID NO: 1649010 - RNA, 19 nt, Homo sapiens
  misc_RNA (1)...(19): siRNA sense strand
acacaggaauguugucuuc

SEQ ID NO: 1649011 - RNA, 19 nt, Homo sapiens
  misc_RNA (1)...(19): siRNA sense strand
gcagagucuuggaauuaga

SEQ ID NO: 1649012 - RNA, 19 nt, Homo sapiens
  misc_RNA (1)...(19): siRNA sense strand
gaucacgcaugagcauauu

SEQ ID NO: 1649013 - RNA, 19 nt, Homo sapiens
  misc_RNA (1)...(19): siRNA sense strand
cuggagaacugcacauuau

SEQ ID NO: 1649014 - RNA, 19 nt, Homo sapiens
  misc_RNA (1)...(19): siRNA sense strand
ugaagaagaagaugccuuu

SEQ ID NO: 1649015 - RNA, 19 nt, Homo sapiens
  misc_RNA (1)...(19): siRNA sense strand
gaaccaggacacccaagaa

SEQ ID NO: 1649016 - RNA, 19 nt, Homo sapiens
  misc_RNA (1)...(19): siRNA sense strand
cacagugguugcaugauaa

SEQ ID NO: 1649017 - RNA, 19 nt, Homo sapiens
  misc_RNA (1)...(19): siRNA sense strand
caagggauuuagagaugaa

SEQ ID NO: 1649018 - RNA, 19 nt, Homo sapiens
  misc_RNA (1)...(19): siRNA sense strand
auucaaagcugcugccuau

SEQ ID NO: 1649019 - RNA, 19 nt, Homo sapiens
  misc_RNA (1)...(19): siRNA sense strand
cgaaguugguauuaaacaa

SEQ ID NO: 1649020 - RNA, 19 nt, Homo sapiens
  misc_RNA (1)...(19): siRNA sense strand
gagaacugcacauuauuga

SEQ ID NO: 1649021 - RNA, 19 nt, Homo sapiens
  misc_RNA (1)...(19): siRNA sense strand
ugaguuaccugagagagaa

SEQ ID NO: 1649022 - RNA, 19 nt, Homo sapiens
  misc_RNA (1)...(19): siRNA sense strand
caauauggaugucaauacu

SEQ ID NO: 1649023 - RNA, 19 nt, Homo sapiens
  misc_RNA (1)...(19): siRNA sense strand
gguagcagaugguguagca

SEQ ID NO: 1649024 - RNA, 19 nt, Homo sapiens
  misc_RNA (1)...(19): siRNA sense strand
caucuucuauugaggauca

SEQ ID NO: 1649025 - RNA, 19 nt, Homo sapiens
  misc_RNA (1)...(19): siRNA sense strand
gaacugcacauuauugaac

SEQ ID NO: 1649026 - RNA, 19 nt, Homo sapiens
  misc_RNA (1)...(19): siRNA sense strand
gaagaagaagaugccuuua

SEQ ID NO: 1649027 - RNA, 19 nt, Homo sapiens
  misc_RNA (1)...(19): siRNA sense strand
gagcuuaaagguauauuca

SEQ ID NO: 1649028 - RNA, 19 nt, Homo sapiens
  misc_RNA (1)...(19): siRNA sense strand
cgacacgaguuauuuccaa

SEQ ID NO: 1649029 - RNA, 19 nt, Homo sapiens
  misc_RNA (1)...(19): siRNA sense strand
aaacuagucuggauuuagg

SEQ ID NO: 1649030 - RNA, 19 nt, Homo sapiens
  misc_RNA (1)...(19): siRNA sense strand
guccacaggcccucuaaua

SEQ ID NO: 1649031 - RNA, 19 nt, Homo sapiens
  misc_RNA (1)...(19): siRNA sense strand
gagagaagaaggcgaagga

SEQ ID NO: 1649032 - RNA, 19 nt, Homo sapiens
  misc_RNA (1)...(19): siRNA sense strand
caagaucccucaccaucca

SEQ ID NO: 1649033 - RNA, 19 nt, Homo sapiens
  misc_RNA (1)...(19): siRNA sense strand
gagguuguuugaugaugaa

SEQ ID NO: 1649034 - RNA, 19 nt, Homo sapiens
  misc_RNA (1)...(19): siRNA sense strand
ugucggagguuguuugaug

SEQ ID NO: 1649035 - RNA, 19 nt, Homo sapiens
  misc_RNA (1)...(19): siRNA sense strand
uaauguggauggugaagau

SEQ ID NO: 1649036 - RNA, 19 nt, Homo sapiens
  misc_RNA (1)...(19): siRNA sense strand
gccggcaaauugaauauau

SEQ ID NO: 1649037 - RNA, 19 nt, Homo sapiens
  misc_RNA (1)...(19): siRNA sense strand
ggaaauggaugaagaaaga

SEQ ID NO: 1649038 - RNA, 19 nt, Homo sapiens
  misc_RNA (1)...(19): siRNA sense strand
gaagcagucuccuuucuua

SEQ ID NO: 1649039 - RNA, 19 nt, Homo sapiens
  misc_RNA (1)...(19): siRNA sense strand
gaucaaauauuggccauua

SEQ ID NO: 1649040 - RNA, 19 nt, Homo sapiens
  misc_RNA (1)...(19): siRNA sense strand
gagaggagcuuaaagguau

SEQ ID NO: 1649041 - RNA, 19 nt, Homo sapiens
  misc_RNA (1)...(19): siRNA sense strand
agacagggaucaaagauua

SEQ ID NO: 1649042 - RNA, 19 nt, Homo sapiens
  misc_RNA (1)...(19): siRNA sense strand
gagaagaaacuccaaauuu

SEQ ID NO: 1649043 - RNA, 19 nt, Homo sapiens
  misc_RNA (1)...(19): siRNA sense strand
gaggagaacuuggagauuu

SEQ ID NO: 1649044 - RNA, 19 nt, Homo sapiens
  misc_RNA (1)...(19): siRNA sense strand
caagauuguugaacuagua

SEQ ID NO: 1649045 - RNA, 19 nt, Homo sapiens
  misc_RNA (1)...(19): siRNA sense strand
cagaggaacuguuguagaa

SEQ ID NO: 1649046 - RNA, 19 nt, Homo sapiens
  misc_RNA (1)...(19): siRNA sense strand
gguccuagcuugcucauug

SEQ ID NO: 1649047 - RNA, 19 nt, Homo sapiens
  misc_RNA (1)...(19): siRNA sense strand
gcaugcagcuuuauggaaa

SEQ ID NO: 1649048 - RNA, 19 nt, Homo sapiens
  misc_RNA (1)...(19): siRNA sense strand
aagaagaacuuguggauga

SEQ ID NO: 1649049 - RNA, 19 nt, Homo sapiens
  misc_RNA (1)...(19): siRNA sense strand
ggaagauaaugaagaagaa

SEQ ID NO: 1649050 - RNA, 19 nt, Homo sapiens
  misc_RNA (1)...(19): siRNA sense strand
gaaccaaggcgcacugaaa

SEQ ID NO: 1649051 - RNA, 19 nt, Homo sapiens
  misc_RNA (1)...(19): siRNA sense strand
uauuggagaugaacucuua

SEQ ID NO: 1649052 - RNA, 19 nt, Homo sapiens
  misc_RNA (1)...(19): siRNA sense strand
ucuaauaacucgacuguau

SEQ ID NO: 1649053 - RNA, 19 nt, Homo sapiens
  misc_RNA (1)...(19): siRNA sense strand
acacacagauugcagauga

SEQ ID NO: 1649054 - RNA, 19 nt, Homo sapiens
  misc_RNA (1)...(19): siRNA sense strand
gacaggaaaugauuauaga

SEQ ID NO: 1649055 - RNA, 19 nt, Homo sapiens
  misc_RNA (1)...(19): siRNA sense strand
ggaaagguuuguuaguguu

SEQ ID NO: 1649056 - RNA, 19 nt, Homo sapiens
  misc_RNA (1)...(19): siRNA sense strand
ucaauggcaugcagcuuua

SEQ ID NO: 1649057 - RNA, 19 nt, Homo sapiens
  misc_RNA (1)...(19): siRNA sense strand
gggcagagucuuggaauua

SEQ ID NO: 1649058 - RNA, 19 nt, Homo sapiens
  misc_RNA (1)...(19): siRNA sense strand
ggagggagcaagaagauuu

SEQ ID NO: 1649059 - RNA, 19 nt, Homo sapiens
  misc_RNA (1)...(19): siRNA sense strand
acacagugguugcaugaua

SEQ ID NO: 1649060 - RNA, 19 nt, Homo sapiens
  misc_RNA (1)...(19): siRNA sense strand
caacauacaagccuuagaa

SEQ ID NO: 1649061 - RNA, 19 nt, Homo sapiens
  misc_RNA (1)...(19): siRNA sense strand
gcacauuauugaacuugaa

SEQ ID NO: 1649062 - RNA, 19 nt, Homo sapiens
  misc_RNA (1)...(19): siRNA sense strand
gaaacuuccuccuccuuau

SEQ ID NO: 1649063 - RNA, 19 nt, Homo sapiens
  misc_RNA (1)...(19): siRNA sense strand
gguggaagauaaugaagaa

SEQ ID NO: 1649064 - RNA, 19 nt, Homo sapiens
  misc_RNA (1)...(19): siRNA sense strand
caagaagauuugccuuuau

SEQ ID NO: 1649065 - RNA, 19 nt, Homo sapiens
  misc_RNA (1)...(19): siRNA sense strand
gacuguaucuggguuauuu

SEQ ID NO: 1649066 - RNA, 19 nt, Homo sapiens
  misc_RNA (1)...(19): siRNA sense strand
auaaagcucugacugauga

SEQ ID NO: 1649067 - RNA, 19 nt, Homo sapiens
  misc_RNA (1)...(19): siRNA sense strand
gaaguggauuccuuugaug

SEQ ID NO: 1649068 - RNA, 19 nt, Homo sapiens
  misc_RNA (1)...(19): siRNA sense strand
gaaaccaccagcucucuuu

SEQ ID NO: 1649069 - RNA, 19 nt, Homo sapiens
  misc_RNA (1)...(19): siRNA sense strand
gaacauuucccaucagcaa

SEQ ID NO: 1649070 - RNA, 19 nt, Homo sapiens
  misc_RNA (1)...(19): siRNA sense strand
agacagagguugaccacaa

SEQ ID NO: 1649071 - RNA, 19 nt, Homo sapiens
  misc_RNA (1)...(19): siRNA sense strand
guugggaaaugaagacuuu

SEQ ID NO: 1649072 - RNA, 19 nt, Homo sapiens
  misc_RNA (1)...(19): siRNA sense strand
ggagaggagcuuaaaggua

SEQ ID NO: 1649073 - RNA, 19 nt, Homo sapiens
  misc_RNA (1)...(19): siRNA sense strand
ugaugaagcuucuguagau

SEQ ID NO: 1649074 - RNA, 19 nt, Homo sapiens
  misc_RNA (1)...(19): siRNA sense strand
gcaauugcauuauuacaac

SEQ ID NO: 1649075 - RNA, 19 nt, Homo sapiens
  misc_RNA (1)...(19): siRNA sense strand
ggagguuguuugaugauga

SEQ ID NO: 1649076 - RNA, 19 nt, Homo sapiens
  misc_RNA (1)...(19): siRNA sense strand
cuaaggaacugugggaauu

SEQ ID NO: 1649077 - RNA, 19 nt, Homo sapiens
  misc_RNA (1)...(19): siRNA sense strand
ggaauguugucuucuagau

SEQ ID NO: 1649078 - RNA, 19 nt, Homo sapiens
  misc_RNA (1)...(19): siRNA sense strand
gaagagguugagcucauua

SEQ ID NO: 1649079 - RNA, 19 nt, Homo sapiens
  misc_RNA (1)...(19): siRNA sense strand
ggacaggaaaugauuauag

SEQ ID NO: 1649080 - RNA, 19 nt, Homo sapiens
  misc_RNA (1)...(19): siRNA sense strand
cgucgaaguugguauuaaa

SEQ ID NO: 1649081 - RNA, 19 nt, Homo sapiens
  misc_RNA (1)...(19): siRNA sense strand
gcaccgaaccuauuaguag

SEQ ID NO: 1649082 - RNA, 19 nt, Homo sapiens
  misc_RNA (1)...(19): siRNA sense strand
ggagaugcaugaauuucug

SEQ ID NO: 1649083 - RNA, 19 nt, Homo sapiens
  misc_RNA (1)...(19): siRNA sense strand
gaugaaccauuucuagauc

SEQ ID NO: 1649084 - RNA, 19 nt, Homo sapiens
  misc_RNA (1)...(19): siRNA sense strand
gguuugggauucagcauuu

SEQ ID NO: 1649085 - RNA, 19 nt, Homo sapiens
  misc_RNA (1)...(19): siRNA sense strand
caaagcugcugccuauuca

SEQ ID NO: 1649086 - RNA, 19 nt, Homo sapiens
  misc_RNA (1)...(19): siRNA sense strand
gaagauugguggcacaaac

SEQ ID NO: 1649087 - RNA, 19 nt, Homo sapiens
  misc_RNA (1)...(19): siRNA sense strand
aaacgaggaugcagucaau

SEQ ID NO: 1649088 - RNA, 19 nt, Homo sapiens
  misc_RNA (1)...(19): siRNA sense strand
gaagacgaacgcacuuaaa

SEQ ID NO: 1649089 - RNA, 19 nt, Homo sapiens
  misc_RNA (1)...(19): siRNA sense strand
ggaagacgaacgcacuuaa

SEQ ID NO: 1649090 - RNA, 19 nt, Homo sapiens
  misc_RNA (1)...(19): siRNA sense strand
caggaacaauucaugauau

SEQ ID NO: 1649091 - RNA, 19 nt, Homo sapiens
  misc_RNA (1)...(19): siRNA sense strand
aaagaccgaucacgcauga

SEQ ID NO: 1649092 - RNA, 19 nt, Homo sapiens
  misc_RNA (1)...(19): siRNA sense strand
ggagaacugcacauuauug

SEQ ID NO: 1649093 - RNA, 19 nt, Homo sapiens
  misc_RNA (1)...(19): siRNA sense strand
guugaaguauuacgaaaug

SEQ ID NO: 1649094 - RNA, 19 nt, Homo sapiens
  misc_RNA (1)...(19): siRNA sense strand
ggaguagauuugcagaaug

SEQ ID NO: 1649095 - RNA, 19 nt, Homo sapiens
  misc_RNA (1)...(19): siRNA sense strand
gaaggaaacagucaacaag

SEQ ID NO: 1649096 - RNA, 19 nt, Homo sapiens
  misc_RNA (1)...(19): siRNA sense strand
gaaaugaagacuuuaacuc

SEQ ID NO: 1649097 - RNA, 19 nt, Homo sapiens
  misc_RNA (1)...(19): siRNA sense strand
gaauguugucuucuagaua

SEQ ID NO: 1649098 - RNA, 19 nt, Homo sapiens
  misc_RNA (1)...(19): siRNA sense strand
guaaugaagacaagacuga

SEQ ID NO: 1649099 - RNA, 19 nt, Homo sapiens
  misc_RNA (1)...(19): siRNA sense strand
ggaugucaauacugaagaa

SEQ ID NO: 1649100 - RNA, 19 nt, Homo sapiens
  misc_RNA (1)...(19): siRNA sense strand
gggaaccaguccacacaaa

SEQ ID NO: 1649101 - RNA, 19 nt, Homo sapiens
  misc_RNA (1)...(19): siRNA sense strand
gaacuucacuuugguacac

SEQ ID NO: 1649102 - RNA, 19 nt, Homo sapiens
  misc_RNA (1)...(19): siRNA sense strand
ccugggagaugcaugaauu

SEQ ID NO: 1649103 - RNA, 19 nt, Homo sapiens
  misc_RNA (1)...(19): siRNA sense strand
ucuagcagccuaaaugaua

SEQ ID NO: 1649104 - RNA, 19 nt, Homo sapiens
  misc_RNA (1)...(19): siRNA sense strand
gugaagaugaggaaauuaa

SEQ ID NO: 1649105 - RNA, 19 nt, Homo sapiens
  misc_RNA (1)...(19): siRNA sense strand
gaacuccagccacgaagaa

SEQ ID NO: 1649106 - RNA, 19 nt, Homo sapiens
  misc_RNA (1)...(19): siRNA sense strand
caucauaccauucaacaga

SEQ ID NO: 1649107 - RNA, 19 nt, Homo sapiens
  misc_RNA (1)...(19): siRNA sense strand
acaauugccugaaagugaa

SEQ ID NO: 1649108 - RNA, 19 nt, Homo sapiens
  misc_RNA (1)...(19): siRNA sense strand
gcuuaaagguauauucauc

SEQ ID NO: 1649109 - RNA, 19 nt, Homo sapiens
  misc_RNA (1)...(19): siRNA sense strand
acaggaauguugucuucua

SEQ ID NO: 1649110 - RNA, 19 nt, Homo sapiens
  misc_RNA (1)...(19): siRNA sense strand
acacaggaauguugucuuc

SEQ ID NO: 1649111 - RNA, 19 nt, Homo sapiens
  misc_RNA (1)...(19): siRNA sense strand
gcagagucuuggaauuaga

SEQ ID NO: 1649112 - RNA, 19 nt, Homo sapiens
  misc_RNA (1)...(19): siRNA sense strand
gaucacgcaugagcauauu

SEQ ID NO: 1649113 - RNA, 19 nt, Homo sapiens
  misc_RNA (1)...(19): siRNA sense strand
cuggagaacugcacauuau

SEQ ID NO: 1649114 - RNA, 19 nt, Homo sapiens
  misc_RNA (1)...(19): siRNA sense strand
ugaagaagaagaugccuuu

SEQ ID NO: 1649115 - RNA, 19 nt, Homo sapiens
  misc_RNA (1)...(19): siRNA sense strand
gaaccaggacacccaagaa

SEQ ID NO: 1649116 - RNA, 19 nt, Homo sapiens
  misc_RNA (1)...(19): siRNA sense strand
cacagugguugcaugauaa

SEQ ID NO: 1649117 - RNA, 19 nt, Homo sapiens
  misc_RNA (1)...(19): siRNA sense strand
caagggauuuagagaugaa

SEQ ID NO: 1649118 - RNA, 19 nt, Homo sapiens
  misc_RNA (1)...(19): siRNA sense strand
auucaaagcugcugccuau

SEQ ID NO: 1649119 - RNA, 19 nt, Homo sapiens
  misc_RNA (1)...(19): siRNA sense strand
cgaaguugguauuaaacaa

SEQ ID NO: 1649120 - RNA, 19 nt, Homo sapiens
  misc_RNA (1)...(19): siRNA sense strand
gagaacugcacauuauuga

SEQ ID NO: 1649121 - RNA, 19 nt, Homo sapiens
  misc_RNA (1)...(19): siRNA sense strand
ugaguuaccugagagagaa

SEQ ID NO: 1649122 - RNA, 19 nt, Homo sapiens
  misc_RNA (1)...(19): siRNA sense strand
caauauggaugucaauacu

SEQ ID NO: 1649123 - RNA, 19 nt, Homo sapiens
  misc_RNA (1)...(19): siRNA sense strand
gguagcagaugguguagca

SEQ ID NO: 1649124 - RNA, 19 nt, Homo sapiens
  misc_RNA (1)...(19): siRNA sense strand
caucuucuauugaggauca

SEQ ID NO: 1649125 - RNA, 19 nt, Homo sapiens
  misc_RNA (1)...(19): siRNA sense strand
gaacugcacauuauugaac

SEQ ID NO: 1649126 - RNA, 19 nt, Homo sapiens
  misc_RNA (1)...(19): siRNA sense strand
gaagaagaagaugccuuua

SEQ ID NO: 1649127 - RNA, 19 nt, Homo sapiens
  misc_RNA (1)...(19): siRNA sense strand
gagcuuaaagguauauuca

SEQ ID NO: 1649128 - RNA, 19 nt, Homo sapiens
  misc_RNA (1)...(19): siRNA sense strand
cgacacgaguuauuuccaa

SEQ ID NO: 1649129 - RNA, 19 nt, Homo sapiens
  misc_RNA (1)...(19): siRNA sense strand
aaacuagucuggauuuagg

SEQ ID NO: 1649130 - RNA, 19 nt, Homo sapiens
  misc_RNA (1)...(19): siRNA sense strand
guccacaggcccucuaaua

SEQ ID NO: 1649131 - RNA, 19 nt, Homo sapiens
  misc_RNA (1)...(19): siRNA sense strand
gagagaagaaggcgaagga

SEQ ID NO: 1649132 - RNA, 19 nt, Homo sapiens
  misc_RNA (1)...(19): siRNA sense strand
caagaucccucaccaucca

SEQ ID NO: 1649133 - RNA, 19 nt, Homo sapiens
  misc_RNA (1)...(19): siRNA sense strand
gagguuguuugaugaugaa

SEQ ID NO: 1649134 - RNA, 19 nt, Homo sapiens
  misc_RNA (1)...(19): siRNA sense strand
ugucggagguuguuugaug

SEQ ID NO: 1649135 - RNA, 19 nt, Homo sapiens
  misc_RNA (1)...(19): siRNA sense strand
uaauguggauggugaagau

SEQ ID NO: 1649136 - RNA, 19 nt, Homo sapiens
  misc_RNA (1)...(19): siRNA sense strand
gccggcaaauugaauauau

SEQ ID NO: 1649137 - RNA, 19 nt, Homo sapiens
  misc_RNA (1)...(19): siRNA sense strand
ggaaauggaugaagaaaga

SEQ ID NO: 1649138 - RNA, 19 nt, Homo sapiens
  misc_RNA (1)...(19): siRNA sense strand
gaagcagucuccuuucuua

SEQ ID NO: 1649139 - RNA, 19 nt, Homo sapiens
  misc_RNA (1)...(19): siRNA sense strand
gaucaaauauuggccauua

SEQ ID NO: 1649140 - RNA, 19 nt, Homo sapiens
  misc_RNA (1)...(19): siRNA sense strand
gagaggagcuuaaagguau

SEQ ID NO: 1649141 - RNA, 19 nt, Homo sapiens
  misc_RNA (1)...(19): siRNA sense strand
agacagggaucaaagauua

SEQ ID NO: 1649142 - RNA, 19 nt, Homo sapiens
  misc_RNA (1)...(19): siRNA sense strand
gagaagaaacuccaaauuu

SEQ ID NO: 1649143 - RNA, 19 nt, Homo sapiens
  misc_RNA (1)...(19): siRNA sense strand
gaggagaacuuggagauuu

SEQ ID NO: 1649144 - RNA, 19 nt, Homo sapiens
  misc_RNA (1)...(19): siRNA sense strand
caagauuguugaacuagua

SEQ ID NO: 1649145 - RNA, 19 nt, Homo sapiens
  misc_RNA (1)...(19): siRNA sense strand
cagaggaacuguuguagaa

SEQ ID NO: 1649146 - RNA, 19 nt, Homo sapiens
  misc_RNA (1)...(19): siRNA sense strand
gguccuagcuugcucauug

SEQ ID NO: 1649147 - RNA, 19 nt, Homo sapiens
  misc_RNA (1)...(19): siRNA sense strand
gcaugcagcuuuauggaaa

SEQ ID NO: 1649148 - RNA, 19 nt, Homo sapiens
  misc_RNA (1)...(19): siRNA sense strand
aagaagaacuuguggauga

SEQ ID NO: 1649149 - RNA, 19 nt, Homo sapiens
  misc_RNA (1)...(19): siRNA sense strand
ggaagauaaugaagaagaa

SEQ ID NO: 1649150 - RNA, 19 nt, Homo sapiens
  misc_RNA (1)...(19): siRNA sense strand
gaaccaaggcgcacugaaa

SEQ ID NO: 1649151 - RNA, 19 nt, Homo sapiens
  misc_RNA (1)...(19): siRNA sense strand
uauuggagaugaacucuua

SEQ ID NO: 1649152 - RNA, 19 nt, Homo sapiens
  misc_RNA (1)...(19): siRNA sense strand
ucuaauaacucgacuguau

SEQ ID NO: 1649153 - RNA, 19 nt, Homo sapiens
  misc_RNA (1)...(19): siRNA sense strand
acacacagauugcagauga

SEQ ID NO: 1649154 - RNA, 19 nt, Homo sapiens
  misc_RNA (1)...(19): siRNA sense strand
gacaggaaaugauuauaga

SEQ ID NO: 1649155 - RNA, 19 nt, Homo sapiens
  misc_RNA (1)...(19): siRNA sense strand
ggaaagguuuguuaguguu

SEQ ID NO: 1649156 - RNA, 19 nt, Homo sapiens
  misc_RNA (1)...(19): siRNA sense strand
ucaauggcaugcagcuuua

SEQ ID NO: 1649157 - RNA, 19 nt, Homo sapiens
  misc_RNA (1)...(19): siRNA sense strand
gggcagagucuuggaauua

SEQ ID NO: 1649158 - RNA, 19 nt, Homo sapiens
  misc_RNA (1)...(19): siRNA sense strand
ggagggagcaagaagauuu

SEQ ID NO: 1649159 - RNA, 19 nt, Homo sapiens
  misc_RNA (1)...(19): siRNA sense strand
acacagugguugcaugaua

SEQ ID NO: 1649160 - RNA, 19 nt, Homo sapiens
  misc_RNA (1)...(19): siRNA sense strand
caacauacaagccuuagaa

SEQ ID NO: 1649161 - RNA, 19 nt, Homo sapiens
  misc_RNA (1)...(19): siRNA sense strand
gcacauuauugaacuugaa

SEQ ID NO: 1649162 - RNA, 19 nt, Homo sapiens
  misc_RNA (1)...(19): siRNA sense strand
gaaacuuccuccuccuuau

SEQ ID NO: 1649163 - RNA, 19 nt, Homo sapiens
  misc_RNA (1)...(19): siRNA sense strand
gguggaagauaaugaagaa

SEQ ID NO: 1649164 - RNA, 19 nt, Homo sapiens
  misc_RNA (1)...(19): siRNA sense strand
caagaagauuugccuuuau

SEQ ID NO: 1649165 - RNA, 19 nt, Homo sapiens
  misc_RNA (1)...(19): siRNA sense strand
gacuguaucuggguuauuu

SEQ ID NO: 1649166 - RNA, 19 nt, Homo sapiens
  misc_RNA (1)...(19): siRNA sense strand
auaaagcucugacugauga

SEQ ID NO: 1649167 - RNA, 19 nt, Homo sapiens
  misc_RNA (1)...(19): siRNA sense strand
gaaguggauuccuuugaug

SEQ ID NO: 1649168 - RNA, 19 nt, Homo sapiens
  misc_RNA (1)...(19): siRNA sense strand
gaaaccaccagcucucuuu

SEQ ID NO: 1649169 - RNA, 19 nt, Homo sapiens
  misc_RNA (1)...(19): siRNA sense strand
gaacauuucccaucagcaa

SEQ ID NO: 1649170 - RNA, 19 nt, Homo sapiens
  misc_RNA (1)...(19): siRNA sense strand
agacagagguugaccacaa

SEQ ID NO: 1649171 - RNA, 19 nt, Homo sapiens
  misc_RNA (1)...(19): siRNA sense strand
guugggaaaugaagacuuu

SEQ ID NO: 1649172 - RNA, 19 nt, Homo sapiens
  misc_RNA (1)...(19): siRNA sense strand
ggagaggagcuuaaaggua

SEQ ID NO: 1649173 - RNA, 19 nt, Homo sapiens
  misc_RNA (1)...(19): siRNA sense strand
ugaugaagcuucuguagau

SEQ ID NO: 1649174 - RNA, 19 nt, Homo sapiens
  misc_RNA (1)...(19): siRNA sense strand
gcaauugcauuauuacaac

SEQ ID NO: 1649175 - RNA, 19 nt, Homo sapiens
  misc_RNA (1)...(19): siRNA sense strand
ggagguuguuugaugauga

SEQ ID NO: 1649176 - RNA, 19 nt, Homo sapiens
  misc_RNA (1)...(19): siRNA sense strand
cuaaggaacugugggaauu

SEQ ID NO: 1649177 - RNA, 19 nt, Homo sapiens
  misc_RNA (1)...(19): siRNA sense strand
ggaauguugucuucuagau

SEQ ID NO: 1649178 - RNA, 19 nt, Homo sapiens
  misc_RNA (1)...(19): siRNA sense strand
gaagagguugagcucauua

SEQ ID NO: 1649179 - RNA, 19 nt, Homo sapiens
  misc_RNA (1)...(19): siRNA sense strand
ggacaggaaaugauuauag

SEQ ID NO: 1649180 - RNA, 19 nt, Homo sapiens
  misc_RNA (1)...(19): siRNA sense strand
cgucgaaguugguauuaaa

SEQ ID NO: 1649181 - RNA, 19 nt, Homo sapiens
  misc_RNA (1)...(19): siRNA sense strand
gcaccgaaccuauuaguag

SEQ ID NO: 1649182 - RNA, 19 nt, Homo sapiens
  misc_RNA (1)...(19): siRNA sense strand
ggagaugcaugaauuucug

SEQ ID NO: 1649183 - RNA, 19 nt, Homo sapiens
  misc_RNA (1)...(19): siRNA sense strand
gaugaaccauuucuagauc

SEQ ID NO: 1649184 - RNA, 19 nt, Homo sapiens
  misc_RNA (1)...(19): siRNA sense strand
gguuugggauucagcauuu

SEQ ID NO: 1649185 - RNA, 19 nt, Homo sapiens
  misc_RNA (1)...(19): siRNA sense strand
caaagcugcugccuauuca

SEQ ID NO: 1649186 - RNA, 19 nt, Homo sapiens
  misc_RNA (1)...(19): siRNA sense strand
gaagauugguggcacaaac

SEQ ID NO: 1649187 - RNA, 19 nt, Homo sapiens
  misc_RNA (1)...(19): siRNA sense strand
aaacgaggaugcagucaau

SEQ ID NO: 1649188 - RNA, 19 nt, Homo sapiens
  misc_RNA (1)...(19): siRNA sense strand
gaagacgaacgcacuuaaa

SEQ ID NO: 1649189 - RNA, 19 nt, Homo sapiens
  misc_RNA (1)...(19): siRNA sense strand
ggaagacgaacgcacuuaa

SEQ ID NO: 1649190 - RNA, 19 nt, Homo sapiens
  misc_RNA (1)...(19): siRNA sense strand
caggaacaauucaugauau

SEQ ID NO: 1649191 - RNA, 19 nt, Homo sapiens
  misc_RNA (1)...(19): siRNA sense strand
aaagaccgaucacgcauga

SEQ ID NO: 1649192 - RNA, 19 nt, Homo sapiens
  misc_RNA (1)...(19): siRNA sense strand
ggagaacugcacauuauug

SEQ ID NO: 1649193 - RNA, 19 nt, Homo sapiens
  misc_RNA (1)...(19): siRNA sense strand
guugaaguauuacgaaaug

SEQ ID NO: 1649194 - RNA, 19 nt, Homo sapiens
  misc_RNA (1)...(19): siRNA sense strand
ggaguagauuugcagaaug

SEQ ID NO: 1649195 - RNA, 19 nt, Homo sapiens
  misc_RNA (1)...(19): siRNA sense strand
gaaggaaacagucaacaag

SEQ ID NO: 1649196 - RNA, 19 nt, Homo sapiens
  misc_RNA (1)...(19): siRNA sense strand
gaaaugaagacuuuaacuc

SEQ ID NO: 1649197 - RNA, 19 nt, Homo sapiens
  misc_RNA (1)...(19): siRNA sense strand
gaauguugucuucuagaua

SEQ ID NO: 1649198 - RNA, 19 nt, Homo sapiens
  misc_RNA (1)...(19): siRNA sense strand
guaaugaagacaagacuga

SEQ ID NO: 1649199 - RNA, 19 nt, Homo sapiens
  misc_RNA (1)...(19): siRNA sense strand
ggaugucaauacugaagaa

SEQ ID NO: 1649200 - RNA, 19 nt, Homo sapiens
  misc_RNA (1)...(19): siRNA sense strand
gggaaccaguccacacaaa

SEQ ID NO: 1649201 - RNA, 19 nt, Homo sapiens
  misc_RNA (1)...(19): siRNA sense strand
gaacuucacuuugguacac

SEQ ID NO: 1649202 - RNA, 19 nt, Homo sapiens
  misc_RNA (1)...(19): siRNA sense strand
ccugggagaugcaugaauu

SEQ ID NO: 1649203 - RNA, 19 nt, Homo sapiens
  misc_RNA (1)...(19): siRNA sense strand
ucuagcagccuaaaugaua

SEQ ID NO: 1649204 - RNA, 19 nt, Homo sapiens
  misc_RNA (1)...(19): siRNA sense strand
gugaagaugaggaaauuaa

SEQ ID NO: 1649205 - RNA, 19 nt, Homo sapiens
  misc_RNA (1)...(19): siRNA sense strand
gaacuccagccacgaagaa

SEQ ID NO: 1649206 - RNA, 19 nt, Homo sapiens
  misc_RNA (1)...(19): siRNA sense strand
caucauaccauucaacaga

SEQ ID NO: 1649207 - RNA, 19 nt, Homo sapiens
  misc_RNA (1)...(19): siRNA sense strand
acaauugccugaaagugaa

SEQ ID NO: 1649208 - RNA, 19 nt, Homo sapiens
  misc_RNA (1)...(19): siRNA sense strand
gcuuaaagguauauucauc

SEQ ID NO: 1649209 - RNA, 19 nt, Homo sapiens
  misc_RNA (1)...(19): siRNA sense strand
acaggaauguugucuucua

SEQ ID NO: 1649210 - RNA, 19 nt, Homo sapiens
  misc_RNA (1)...(19): siRNA sense strand
acacaggaauguugucuuc

SEQ ID NO: 1649211 - RNA, 19 nt, Homo sapiens
  misc_RNA (1)...(19): siRNA sense strand
gcagagucuuggaauuaga

SEQ ID NO: 1649212 - RNA, 19 nt, Homo sapiens
  misc_RNA (1)...(19): siRNA sense strand
gaucacgcaugagcauauu

SEQ ID NO: 1649213 - RNA, 19 nt, Homo sapiens
  misc_RNA (1)...(19): siRNA sense strand
cuggagaacugcacauuau

SEQ ID NO: 1649214 - RNA, 19 nt, Homo sapiens
  misc_RNA (1)...(19): siRNA sense strand
ugaagaagaagaugccuuu

SEQ ID NO: 1649215 - RNA, 19 nt, Homo sapiens
  misc_RNA (1)...(19): siRNA sense strand
gaaccaggacacccaagaa

SEQ ID NO: 1649216 - RNA, 19 nt, Homo sapiens
  misc_RNA (1)...(19): siRNA sense strand
cacagugguugcaugauaa

SEQ ID NO: 1649217 - RNA, 19 nt, Homo sapiens
  misc_RNA (1)...(19): siRNA sense strand
caagggauuuagagaugaa

SEQ ID NO: 1649218 - RNA, 19 nt, Homo sapiens
  misc_RNA (1)...(19): siRNA sense strand
auucaaagcugcugccuau

SEQ ID NO: 1649219 - RNA, 19 nt, Homo sapiens
  misc_RNA (1)...(19): siRNA sense strand
cgaaguugguauuaaacaa

SEQ ID NO: 1649220 - RNA, 19 nt, Homo sapiens
  misc_RNA (1)...(19): siRNA sense strand
gagaacugcacauuauuga

SEQ ID NO: 1649221 - RNA, 19 nt, Homo sapiens
  misc_RNA (1)...(19): siRNA sense strand
ugaguuaccugagagagaa

SEQ ID NO: 1649222 - RNA, 19 nt, Homo sapiens
  misc_RNA (1)...(19): siRNA sense strand
caauauggaugucaauacu

SEQ ID NO: 1649223 - RNA, 19 nt, Homo sapiens
  misc_RNA (1)...(19): siRNA sense strand
gguagcagaugguguagca

SEQ ID NO: 1649224 - RNA, 19 nt, Homo sapiens
  misc_RNA (1)...(19): siRNA sense strand
caucuucuauugaggauca

SEQ ID NO: 1649225 - RNA, 19 nt, Homo sapiens
  misc_RNA (1)...(19): siRNA sense strand
gaacugcacauuauugaac

SEQ ID NO: 1649226 - RNA, 19 nt, Homo sapiens
  misc_RNA (1)...(19): siRNA sense strand
gaagaagaagaugccuuua

SEQ ID NO: 1649227 - RNA, 19 nt, Homo sapiens
  misc_RNA (1)...(19): siRNA sense strand
gagcuuaaagguauauuca

SEQ ID NO: 1649228 - RNA, 19 nt, Homo sapiens
  misc_RNA (1)...(19): siRNA sense strand
cgacacgaguuauuuccaa

SEQ ID NO: 1649229 - RNA, 19 nt, Homo sapiens
  misc_RNA (1)...(19): siRNA sense strand
aaacuagucuggauuuagg

SEQ ID NO: 1649230 - RNA, 19 nt, Homo sapiens
  misc_RNA (1)...(19): siRNA sense strand
guccacaggcccucuaaua

SEQ ID NO: 1649231 - RNA, 19 nt, Homo sapiens
  misc_RNA (1)...(19): siRNA sense strand
gagagaagaaggcgaagga

SEQ ID NO: 1649232 - RNA, 19 nt, Homo sapiens
  misc_RNA (1)...(19): siRNA sense strand
caagaucccucaccaucca

SEQ ID NO: 1649233 - RNA, 19 nt, Homo sapiens
  misc_RNA (1)...(19): siRNA sense strand
gagguuguuugaugaugaa

SEQ ID NO: 1649234 - RNA, 19 nt, Homo sapiens
  misc_RNA (1)...(19): siRNA sense strand
ugucggagguuguuugaug

SEQ ID NO: 1649235 - RNA, 19 nt, Homo sapiens
  misc_RNA (1)...(19): siRNA sense strand
uaauguggauggugaagau

SEQ ID NO: 1649236 - RNA, 19 nt, Homo sapiens
  misc_RNA (1)...(19): siRNA sense strand
gccggcaaauugaauauau

SEQ ID NO: 1649237 - RNA, 19 nt, Homo sapiens
  misc_RNA (1)...(19): siRNA sense strand
ggaaauggaugaagaaaga

SEQ ID NO: 1649238 - RNA, 19 nt, Homo sapiens
  misc_RNA (1)...(19): siRNA sense strand
gaagcagucuccuuucuua

SEQ ID NO: 1649239 - RNA, 19 nt, Homo sapiens
  misc_RNA (1)...(19): siRNA sense strand
gaucaaauauuggccauua

SEQ ID NO: 1649240 - RNA, 19 nt, Homo sapiens
  misc_RNA (1)...(19): siRNA sense strand
gagaggagcuuaaagguau

SEQ ID NO: 1649241 - RNA, 19 nt, Homo sapiens
  misc_RNA (1)...(19): siRNA sense strand
agacagggaucaaagauua

SEQ ID NO: 1649242 - RNA, 19 nt, Homo sapiens
  misc_RNA (1)...(19): siRNA sense strand
gagaagaaacuccaaauuu

SEQ ID NO: 1649243 - RNA, 19 nt, Homo sapiens
  misc_RNA (1)...(19): siRNA sense strand
gaggagaacuuggagauuu

SEQ ID NO: 1649244 - RNA, 19 nt, Homo sapiens
  misc_RNA (1)...(19): siRNA sense strand
caagauuguugaacuagua

SEQ ID NO: 1649245 - RNA, 19 nt, Homo sapiens
  misc_RNA (1)...(19): siRNA sense strand
cagaggaacuguuguagaa

SEQ ID NO: 1649246 - RNA, 19 nt, Homo sapiens
  misc_RNA (1)...(19): siRNA sense strand
gguccuagcuugcucauug

SEQ ID NO: 1649247 - RNA, 19 nt, Homo sapiens
  misc_RNA (1)...(19): siRNA sense strand
gcaugcagcuuuauggaaa

SEQ ID NO: 1649248 - RNA, 19 nt, Homo sapiens
  misc_RNA (1)...(19): siRNA sense strand
aagaagaacuuguggauga

SEQ ID NO: 1649249 - RNA, 19 nt, Homo sapiens
  misc_RNA (1)...(19): siRNA sense strand
ggaagauaaugaagaagaa

SEQ ID NO: 1649250 - RNA, 19 nt, Homo sapiens
  misc_RNA (1)...(19): siRNA sense strand
gaaccaaggcgcacugaaa

SEQ ID NO: 1649251 - RNA, 19 nt, Homo sapiens
  misc_RNA (1)...(19): siRNA sense strand
uauuggagaugaacucuua

SEQ ID NO: 1649252 - RNA, 19 nt, Homo sapiens
  misc_RNA (1)...(19): siRNA sense strand
ucuaauaacucgacuguau

SEQ ID NO: 1649253 - RNA, 19 nt, Homo sapiens
  misc_RNA (1)...(19): siRNA sense strand
acacacagauugcagauga

SEQ ID NO: 1649254 - RNA, 19 nt, Homo sapiens
  misc_RNA (1)...(19): siRNA sense strand
gacaggaaaugauuauaga

SEQ ID NO: 1649255 - RNA, 19 nt, Homo sapiens
  misc_RNA (1)...(19): siRNA sense strand
ggaaagguuuguuaguguu

SEQ ID NO: 1649256 - RNA, 19 nt, Homo sapiens
  misc_RNA (1)...(19): siRNA sense strand
ucaauggcaugcagcuuua

SEQ ID NO: 1649257 - RNA, 19 nt, Homo sapiens
  misc_RNA (1)...(19): siRNA sense strand
gggcagagucuuggaauua

SEQ ID NO: 1649258 - RNA, 19 nt, Homo sapiens
  misc_RNA (1)...(19): siRNA sense strand
ggagggagcaagaagauuu

SEQ ID NO: 1649259 - RNA, 19 nt, Homo sapiens
  misc_RNA (1)...(19): siRNA sense strand
acacagugguugcaugaua

SEQ ID NO: 1649260 - RNA, 19 nt, Homo sapiens
  misc_RNA (1)...(19): siRNA sense strand
caacauacaagccuuagaa

SEQ ID NO: 1649261 - RNA, 19 nt, Homo sapiens
  misc_RNA (1)...(19): siRNA sense strand
gcacauuauugaacuugaa

SEQ ID NO: 1649262 - RNA, 19 nt, Homo sapiens
  misc_RNA (1)...(19): siRNA sense strand
gaaacuuccuccuccuuau

SEQ ID NO: 1649263 - RNA, 19 nt, Homo sapiens
  misc_RNA (1)...(19): siRNA sense strand
gguggaagauaaugaagaa

SEQ ID NO: 1649264 - RNA, 19 nt, Homo sapiens
  misc_RNA (1)...(19): siRNA sense strand
caagaagauuugccuuuau

SEQ ID NO: 1649265 - RNA, 19 nt, Homo sapiens
  misc_RNA (1)...(19): siRNA sense strand
gacuguaucuggguuauuu

SEQ ID NO: 1649266 - RNA, 19 nt, Homo sapiens
  misc_RNA (1)...(19): siRNA sense strand
auaaagcucugacugauga

SEQ ID NO: 1649267 - RNA, 19 nt, Homo sapiens
  misc_RNA (1)...(19): siRNA sense strand
gaaguggauuccuuugaug

SEQ ID NO: 1649268 - RNA, 19 nt, Homo sapiens
  misc_RNA (1)...(19): siRNA sense strand
gaaaccaccagcucucuuu

SEQ ID NO: 1649269 - RNA, 19 nt, Homo sapiens
  misc_RNA (1)...(19): siRNA sense strand
gaacauuucccaucagcaa

SEQ ID NO: 1649270 - RNA, 19 nt, Homo sapiens
  misc_RNA (1)...(19): siRNA sense strand
agacagagguugaccacaa

SEQ ID NO: 1649271 - RNA, 19 nt, Homo sapiens
  misc_RNA (1)...(19): siRNA sense strand
guugggaaaugaagacuuu

SEQ ID NO: 1649272 - RNA, 19 nt, Homo sapiens
  misc_RNA (1)...(19): siRNA sense strand
ggagaggagcuuaaaggua

SEQ ID NO: 1649273 - RNA, 19 nt, Homo sapiens
  misc_RNA (1)...(19): siRNA sense strand
ugaugaagcuucuguagau

SEQ ID NO: 1649274 - RNA, 19 nt, Homo sapiens
  misc_RNA (1)...(19): siRNA sense strand
gcaauugcauuauuacaac

SEQ ID NO: 1649275 - RNA, 19 nt, Homo sapiens
  misc_RNA (1)...(19): siRNA sense strand
ggagguuguuugaugauga

SEQ ID NO: 1649276 - RNA, 19 nt, Homo sapiens
  misc_RNA (1)...(19): siRNA sense strand
cuaaggaacugugggaauu

SEQ ID NO: 1649277 - RNA, 19 nt, Homo sapiens
  misc_RNA (1)...(19): siRNA sense strand
ggaauguugucuucuagau

SEQ ID NO: 1649278 - RNA, 19 nt, Homo sapiens
  misc_RNA (1)...(19): siRNA sense strand
gaagagguugagcucauua

SEQ ID NO: 1649279 - RNA, 19 nt, Homo sapiens
  misc_RNA (1)...(19): siRNA sense strand
ggacaggaaaugauuauag

SEQ ID NO: 1649280 - RNA, 19 nt, Homo sapiens
  misc_RNA (1)...(19): siRNA sense strand
cgucgaaguugguauuaaa

SEQ ID NO: 1649281 - RNA, 19 nt, Homo sapiens
  misc_RNA (1)...(19): siRNA sense strand
gcaccgaaccuauuaguag

SEQ ID NO: 1649282 - RNA, 19 nt, Homo sapiens
  misc_RNA (1)...(19): siRNA sense strand
ggagaugcaugaauuucug

SEQ ID NO: 1649283 - RNA, 19 nt, Homo sapiens
  misc_RNA (1)...(19): siRNA sense strand
gaugaaccauuucuagauc

SEQ ID NO: 1649284 - RNA, 19 nt, Homo sapiens
  misc_RNA (1)...(19): siRNA sense strand
gguuugggauucagcauuu

SEQ ID NO: 1649285 - RNA, 19 nt, Homo sapiens
  misc_RNA (1)...(19): siRNA sense strand
caaagcugcugccuauuca

SEQ ID NO: 1649286 - RNA, 19 nt, Homo sapiens
  misc_RNA (1)...(19): siRNA sense strand
gaagauugguggcacaaac

SEQ ID NO: 1649287 - RNA, 19 nt, Homo sapiens
  misc_RNA (1)...(19): siRNA sense strand
aaacgaggaugcagucaau

SEQ ID NO: 1649288 - RNA, 19 nt, Homo sapiens
  misc_RNA (1)...(19): siRNA sense strand
gaagacgaacgcacuuaaa

SEQ ID NO: 1649289 - RNA, 19 nt, Homo sapiens
  misc_RNA (1)...(19): siRNA sense strand
ggaagacgaacgcacuuaa

SEQ ID NO: 1649290 - RNA, 19 nt, Homo sapiens
  misc_RNA (1)...(19): siRNA sense strand
caggaacaauucaugauau

SEQ ID NO: 1649291 - RNA, 19 nt, Homo sapiens
  misc_RNA (1)...(19): siRNA sense strand
aaagaccgaucacgcauga

SEQ ID NO: 1649292 - RNA, 19 nt, Homo sapiens
  misc_RNA (1)...(19): siRNA sense strand
ggagaacugcacauuauug

SEQ ID NO: 1649293 - RNA, 19 nt, Homo sapiens
  misc_RNA (1)...(19): siRNA sense strand
guugaaguauuacgaaaug

SEQ ID NO: 1649294 - RNA, 19 nt, Homo sapiens
  misc_RNA (1)...(19): siRNA sense strand
ggaguagauuugcagaaug

SEQ ID NO: 1649295 - RNA, 19 nt, Homo sapiens
  misc_RNA (1)...(19): siRNA sense strand
gaaggaaacagucaacaag

SEQ ID NO: 1649296 - RNA, 19 nt, Homo sapiens
  misc_RNA (1)...(19): siRNA sense strand
gaaaugaagacuuuaacuc

SEQ ID NO: 1649297 - RNA, 19 nt, Homo sapiens
  misc_RNA (1)...(19): siRNA sense strand
gaauguugucuucuagaua

SEQ ID NO: 1649298 - RNA, 19 nt, Homo sapiens
  misc_RNA (1)...(19): siRNA sense strand
guaaugaagacaagacuga

SEQ ID NO: 1649299 - RNA, 19 nt, Homo sapiens
  misc_RNA (1)...(19): siRNA sense strand
ggaugucaauacugaagaa

SEQ ID NO: 1649300 - RNA, 19 nt, Homo sapiens
  misc_RNA (1)...(19): siRNA sense strand
gggaaccaguccacacaaa

SEQ ID NO: 1649301 - RNA, 19 nt, Homo sapiens
  misc_RNA (1)...(19): siRNA sense strand
gaacuucacuuugguacac

SEQ ID NO: 1649302 - RNA, 19 nt, Homo sapiens
  misc_RNA (1)...(19): siRNA sense strand
ccugggagaugcaugaauu

SEQ ID NO: 1649303 - RNA, 19 nt, Homo sapiens
  misc_RNA (1)...(19): siRNA sense strand
ucuagcagccuaaaugaua

SEQ ID NO: 1649304 - RNA, 19 nt, Homo sapiens
  misc_RNA (1)...(19): siRNA sense strand
gugaagaugaggaaauuaa

SEQ ID NO: 1649305 - RNA, 19 nt, Homo sapiens
  misc_RNA (1)...(19): siRNA sense strand
gaacuccagccacgaagaa

SEQ ID NO: 1649306 - RNA, 19 nt, Homo sapiens
  misc_RNA (1)...(19): siRNA sense strand
caucauaccauucaacaga

SEQ ID NO: 1649307 - RNA, 19 nt, Homo sapiens
  misc_RNA (1)...(19): siRNA sense strand
acaauugccugaaagugaa

SEQ ID NO: 1649308 - RNA, 19 nt, Homo sapiens
  misc_RNA (1)...(19): siRNA sense strand
gcuuaaagguauauucauc

SEQ ID NO: 1649309 - RNA, 19 nt, Homo sapiens
  misc_RNA (1)...(19): siRNA sense strand
acaggaauguugucuucua

SEQ ID NO: 1649310 - RNA, 19 nt, Homo sapiens
  misc_RNA (1)...(19): siRNA sense strand
acacaggaauguugucuuc

SEQ ID NO: 1649311 - RNA, 19 nt, Homo sapiens
  misc_RNA (1)...(19): siRNA sense strand
gcagagucuuggaauuaga

SEQ ID NO: 1649312 - RNA, 19 nt, Homo sapiens
  misc_RNA (1)...(19): siRNA sense strand
gaucacgcaugagcauauu

SEQ ID NO: 1649313 - RNA, 19 nt, Homo sapiens
  misc_RNA (1)...(19): siRNA sense strand
cuggagaacugcacauuau

SEQ ID NO: 1649314 - RNA, 19 nt, Homo sapiens
  misc_RNA (1)...(19): siRNA sense strand
ugaagaagaagaugccuuu

SEQ ID NO: 1649315 - RNA, 19 nt, Homo sapiens
  misc_RNA (1)...(19): siRNA sense strand
gaaccaggacacccaagaa

SEQ ID NO: 1649316 - RNA, 19 nt, Homo sapiens
  misc_RNA (1)...(19): siRNA sense strand
cacagugguugcaugauaa

SEQ ID NO: 1649317 - RNA, 19 nt, Homo sapiens
  misc_RNA (1)...(19): siRNA sense strand
caagggauuuagagaugaa

SEQ ID NO: 1649318 - RNA, 19 nt, Homo sapiens
  misc_RNA (1)...(19): siRNA sense strand
auucaaagcugcugccuau

SEQ ID NO: 1649319 - RNA, 19 nt, Homo sapiens
  misc_RNA (1)...(19): siRNA sense strand
cgaaguugguauuaaacaa

SEQ ID NO: 1649320 - RNA, 19 nt, Homo sapiens
  misc_RNA (1)...(19): siRNA sense strand
gagaacugcacauuauuga

SEQ ID NO: 1649321 - RNA, 19 nt, Homo sapiens
  misc_RNA (1)...(19): siRNA sense strand
ugaguuaccugagagagaa

SEQ ID NO: 1649322 - RNA, 19 nt, Homo sapiens
  misc_RNA (1)...(19): siRNA sense strand
caauauggaugucaauacu

SEQ ID NO: 1649323 - RNA, 19 nt, Homo sapiens
  misc_RNA (1)...(19): siRNA sense strand
gguagcagaugguguagca

SEQ ID NO: 1649324 - RNA, 19 nt, Homo sapiens
  misc_RNA (1)...(19): siRNA sense strand
caucuucuauugaggauca

SEQ ID NO: 1649325 - RNA, 19 nt, Homo sapiens
  misc_RNA (1)...(19): siRNA sense strand
gaacugcacauuauugaac

SEQ ID NO: 1649326 - RNA, 19 nt, Homo sapiens
  misc_RNA (1)...(19): siRNA sense strand
gaagaagaagaugccuuua

SEQ ID NO: 1649327 - RNA, 19 nt, Homo sapiens
  misc_RNA (1)...(19): siRNA sense strand
gagcuuaaagguauauuca

SEQ ID NO: 1649328 - RNA, 19 nt, Homo sapiens
  misc_RNA (1)...(19): siRNA sense strand
cgacacgaguuauuuccaa

SEQ ID NO: 1649329 - RNA, 19 nt, Homo sapiens
  misc_RNA (1)...(19): siRNA sense strand
aaacuagucuggauuuagg

SEQ ID NO: 1649330 - RNA, 19 nt, Homo sapiens
  misc_RNA (1)...(19): siRNA sense strand
guccacaggcccucuaaua

SEQ ID NO: 1649331 - RNA, 19 nt, Homo sapiens
  misc_RNA (1)...(19): siRNA sense strand
gagagaagaaggcgaagga

SEQ ID NO: 1649332 - RNA, 19 nt, Homo sapiens
  misc_RNA (1)...(19): siRNA sense strand
caagaucccucaccaucca

SEQ ID NO: 1649333 - RNA, 19 nt, Homo sapiens
  misc_RNA (1)...(19): siRNA sense strand
gagguuguuugaugaugaa

SEQ ID NO: 1649334 - RNA, 19 nt, Homo sapiens
  misc_RNA (1)...(19): siRNA sense strand
ugucggagguuguuugaug

SEQ ID NO: 1649335 - RNA, 19 nt, Homo sapiens
  misc_RNA (1)...(19): siRNA sense strand
uaauguggauggugaagau

SEQ ID NO: 1649336 - RNA, 19 nt, Homo sapiens
  misc_RNA (1)...(19): siRNA sense strand
gccggcaaauugaauauau

SEQ ID NO: 1649337 - RNA, 19 nt, Homo sapiens
  misc_RNA (1)...(19): siRNA sense strand
gaaggagacagacuuauua

SEQ ID NO: 1649338 - RNA, 19 nt, Homo sapiens
  misc_RNA (1)...(19): siRNA sense strand
ggagacagacuuauuacua

SEQ ID NO: 1649339 - RNA, 19 nt, Homo sapiens
  misc_RNA (1)...(19): siRNA sense strand
ggaaggagacagacuuauu

SEQ ID NO: 1649340 - RNA, 19 nt, Homo sapiens
  misc_RNA (1)...(19): siRNA sense strand
gagacagacuuauuacuag

SEQ ID NO: 1649341 - RNA, 19 nt, Homo sapiens
  misc_RNA (1)...(19): siRNA sense strand
gcaagacggugcagugaag

SEQ ID NO: 1649342 - RNA, 19 nt, Homo sapiens
  misc_RNA (1)...(19): siRNA sense strand
gguacaggauggcauagug

SEQ ID NO: 1649343 - RNA, 19 nt, Homo sapiens
  misc_RNA (1)...(19): siRNA sense strand
agacagacuuauuacuaga

SEQ ID NO: 1649344 - RNA, 19 nt, Homo sapiens
  misc_RNA (1)...(19): siRNA sense strand
guacaggauggcauaguga

SEQ ID NO: 1649345 - RNA, 19 nt, Homo sapiens
  misc_RNA (1)...(19): siRNA sense strand
ggugguacaggauggcaua

SEQ ID NO: 1649346 - RNA, 19 nt, Homo sapiens
  misc_RNA (1)...(19): siRNA sense strand
cacccaauaucaucucaca

SEQ ID NO: 1649347 - RNA, 19 nt, Homo sapiens
  misc_RNA (1)...(19): siRNA sense strand
acagacuuauuacuagaug

SEQ ID NO: 1649348 - RNA, 19 nt, Homo sapiens
  misc_RNA (1)...(19): siRNA sense strand
ucgcugguguccaucuuug

SEQ ID NO: 1649349 - RNA, 19 nt, Homo sapiens
  misc_RNA (1)...(19): siRNA sense strand
ugggaaggagacagacuua

SEQ ID NO: 1649350 - RNA, 19 nt, Homo sapiens
  misc_RNA (1)...(19): siRNA sense strand
cagcaagacggugcaguga

SEQ ID NO: 1649351 - RNA, 19 nt, Homo sapiens
  misc_RNA (1)...(19): siRNA sense strand
uagugaaggcccugaaugu

SEQ ID NO: 1649352 - RNA, 19 nt, Homo sapiens
  misc_RNA (1)...(19): siRNA sense strand
cagacuuauuacuagauga

SEQ ID NO: 1649353 - RNA, 19 nt, Homo sapiens
  misc_RNA (1)...(19): siRNA sense strand
gcauagugaaggcccugaa

SEQ ID NO: 1649354 - RNA, 19 nt, Homo sapiens
  misc_RNA (1)...(19): siRNA sense strand
gcucagcgggcuauauacu

SEQ ID NO: 1649355 - RNA, 19 nt, Homo sapiens
  misc_RNA (1)...(19): siRNA sense strand
gaaggagacagacuuauua

SEQ ID NO: 1649356 - RNA, 19 nt, Homo sapiens
  misc_RNA (1)...(19): siRNA sense strand
ggagacagacuuauuacua

SEQ ID NO: 1649357 - RNA, 19 nt, Homo sapiens
  misc_RNA (1)...(19): siRNA sense strand
ggaaggagacagacuuauu

SEQ ID NO: 1649358 - RNA, 19 nt, Homo sapiens
  misc_RNA (1)...(19): siRNA sense strand
gagacagacuuauuacuag

SEQ ID NO: 1649359 - RNA, 19 nt, Homo sapiens
  misc_RNA (1)...(19): siRNA sense strand
gcaagacggugcagugaag

SEQ ID NO: 1649360 - RNA, 19 nt, Homo sapiens
  misc_RNA (1)...(19): siRNA sense strand
gguacaggauggcauagug

SEQ ID NO: 1649361 - RNA, 19 nt, Homo sapiens
  misc_RNA (1)...(19): siRNA sense strand
agacagacuuauuacuaga

SEQ ID NO: 1649362 - RNA, 19 nt, Homo sapiens
  misc_RNA (1)...(19): siRNA sense strand
guacaggauggcauaguga

SEQ ID NO: 1649363 - RNA, 19 nt, Homo sapiens
  misc_RNA (1)...(19): siRNA sense strand
ggugguacaggauggcaua

SEQ ID NO: 1649364 - RNA, 19 nt, Homo sapiens
  misc_RNA (1)...(19): siRNA sense strand
cacccaauaucaucucaca

SEQ ID NO: 1649365 - RNA, 19 nt, Homo sapiens
  misc_RNA (1)...(19): siRNA sense strand
acagacuuauuacuagaug

SEQ ID NO: 1649366 - RNA, 19 nt, Homo sapiens
  misc_RNA (1)...(19): siRNA sense strand
ucgcugguguccaucuuug

SEQ ID NO: 1649367 - RNA, 19 nt, Homo sapiens
  misc_RNA (1)...(19): siRNA sense strand
ugggaaggagacagacuua

SEQ ID NO: 1649368 - RNA, 19 nt, Homo sapiens
  misc_RNA (1)...(19): siRNA sense strand
cagcaagacggugcaguga

SEQ ID NO: 1649369 - RNA, 19 nt, Homo sapiens
  misc_RNA (1)...(19): siRNA sense strand
uagugaaggcccugaaugu

SEQ ID NO: 1649370 - RNA, 19 nt, Homo sapiens
  misc_RNA (1)...(19): siRNA sense strand
cagacuuauuacuagauga

SEQ ID NO: 1649371 - RNA, 19 nt, Homo sapiens
  misc_RNA (1)...(19): siRNA sense strand
gcauagugaaggcccugaa

SEQ ID NO: 1649372 - RNA, 19 nt, Homo sapiens
  misc_RNA (1)...(19): siRNA sense strand
gcucagcgggcuauauacu

SEQ ID NO: 1649373 - RNA, 19 nt, Homo sapiens
  misc_RNA (1)...(19): siRNA sense strand
gaaggagacagacuuauua

SEQ ID NO: 1649374 - RNA, 19 nt, Homo sapiens
  misc_RNA (1)...(19): siRNA sense strand
ggagacagacuuauuacua

SEQ ID NO: 1649375 - RNA, 19 nt, Homo sapiens
  misc_RNA (1)...(19): siRNA sense strand
ggaaggagacagacuuauu

SEQ ID NO: 1649376 - RNA, 19 nt, Homo sapiens
  misc_RNA (1)...(19): siRNA sense strand
gagacagacuuauuacuag

SEQ ID NO: 1649377 - RNA, 19 nt, Homo sapiens
  misc_RNA (1)...(19): siRNA sense strand
gcaagacggugcagugaag

SEQ ID NO: 1649378 - RNA, 19 nt, Homo sapiens
  misc_RNA (1)...(19): siRNA sense strand
gguacaggauggcauagug

SEQ ID NO: 1649379 - RNA, 19 nt, Homo sapiens
  misc_RNA (1)...(19): siRNA sense strand
agacagacuuauuacuaga

SEQ ID NO: 1649380 - RNA, 19 nt, Homo sapiens
  misc_RNA (1)...(19): siRNA sense strand
guacaggauggcauaguga

SEQ ID NO: 1649381 - RNA, 19 nt, Homo sapiens
  misc_RNA (1)...(19): siRNA sense strand
ggugguacaggauggcaua

SEQ ID NO: 1649382 - RNA, 19 nt, Homo sapiens
  misc_RNA (1)...(19): siRNA sense strand
cacccaauaucaucucaca

SEQ ID NO: 1649383 - RNA, 19 nt, Homo sapiens
  misc_RNA (1)...(19): siRNA sense strand
acagacuuauuacuagaug

SEQ ID NO: 1649384 - RNA, 19 nt, Homo sapiens
  misc_RNA (1)...(19): siRNA sense strand
ucgcugguguccaucuuug

SEQ ID NO: 1649385 - RNA, 19 nt, Homo sapiens
  misc_RNA (1)...(19): siRNA sense strand
ugggaaggagacagacuua

SEQ ID NO: 1649386 - RNA, 19 nt, Homo sapiens
  misc_RNA (1)...(19): siRNA sense strand
cagcaagacggugcaguga

SEQ ID NO: 1649387 - RNA, 19 nt, Homo sapiens
  misc_RNA (1)...(19): siRNA sense strand
uagugaaggcccugaaugu

SEQ ID NO: 1649388 - RNA, 19 nt, Homo sapiens
  misc_RNA (1)...(19): siRNA sense strand
cagacuuauuacuagauga

SEQ ID NO: 1649389 - RNA, 19 nt, Homo sapiens
  misc_RNA (1)...(19): siRNA sense strand
gcauagugaaggcccugaa

SEQ ID NO: 1649390 - RNA, 19 nt, Homo sapiens
  misc_RNA (1)...(19): siRNA sense strand
gcucagcgggcuauauacu

SEQ ID NO: 1649391 - RNA, 19 nt, Homo sapiens
  misc_RNA (1)...(19): siRNA sense strand
gaaggagacagacuuauua

SEQ ID NO: 1649392 - RNA, 19 nt, Homo sapiens
  misc_RNA (1)...(19): siRNA sense strand
ggagacagacuuauuacua

SEQ ID NO: 1649393 - RNA, 19 nt, Homo sapiens
  misc_RNA (1)...(19): siRNA sense strand
ggaaggagacagacuuauu

SEQ ID NO: 1649394 - RNA, 19 nt, Homo sapiens
  misc_RNA (1)...(19): siRNA sense strand
gagacagacuuauuacuag

SEQ ID NO: 1649395 - RNA, 19 nt, Homo sapiens
  misc_RNA (1)...(19): siRNA sense strand
gcaagacggugcagugaag

SEQ ID NO: 1649396 - RNA, 19 nt, Homo sapiens
  misc_RNA (1)...(19): siRNA sense strand
gguacaggauggcauagug

SEQ ID NO: 1649397 - RNA, 19 nt, Homo sapiens
  misc_RNA (1)...(19): siRNA sense strand
agacagacuuauuacuaga

SEQ ID NO: 1649398 - RNA, 19 nt, Homo sapiens
  misc_RNA (1)...(19): siRNA sense strand
guacaggauggcauaguga

SEQ ID NO: 1649399 - RNA, 19 nt, Homo sapiens
  misc_RNA (1)...(19): siRNA sense strand
ggugguacaggauggcaua

SEQ ID NO: 1649400 - RNA, 19 nt, Homo sapiens
  misc_RNA (1)...(19): siRNA sense strand
cacccaauaucaucucaca

SEQ ID NO: 1649401 - RNA, 19 nt, Homo sapiens
  misc_RNA (1)...(19): siRNA sense strand
acagacuuauuacuagaug

SEQ ID NO: 1649402 - RNA, 19 nt, Homo sapiens
  misc_RNA (1)...(19): siRNA sense strand
ucgcugguguccaucuuug

SEQ ID NO: 1649403 - RNA, 19 nt, Homo sapiens
  misc_RNA (1)...(19): siRNA sense strand
ugggaaggagacagacuua

SEQ ID NO: 1649404 - RNA, 19 nt, Homo sapiens
  misc_RNA (1)...(19): siRNA sense strand
cagcaagacggugcaguga

SEQ ID NO: 1649405 - RNA, 19 nt, Homo sapiens
  misc_RNA (1)...(19): siRNA sense strand
uagugaaggcccugaaugu

SEQ ID NO: 1649406 - RNA, 19 nt, Homo sapiens
  misc_RNA (1)...(19): siRNA sense strand
cagacuuauuacuagauga

SEQ ID NO: 1649407 - RNA, 19 nt, Homo sapiens
  misc_RNA (1)...(19): siRNA sense strand
gcauagugaaggcccugaa

SEQ ID NO: 1649408 - RNA, 19 nt, Homo sapiens
  misc_RNA (1)...(19): siRNA sense strand
gcucagcgggcuauauacu

SEQ ID NO: 1649409 - RNA, 19 nt, Homo sapiens
  misc_RNA (1)...(19): siRNA sense strand
gaaggagacagacuuauua

SEQ ID NO: 1649410 - RNA, 19 nt, Homo sapiens
  misc_RNA (1)...(19): siRNA sense strand
ggagacagacuuauuacua

SEQ ID NO: 1649411 - RNA, 19 nt, Homo sapiens
  misc_RNA (1)...(19): siRNA sense strand
ggaaggagacagacuuauu

SEQ ID NO: 1649412 - RNA, 19 nt, Homo sapiens
  misc_RNA (1)...(19): siRNA sense strand
gagacagacuuauuacuag

SEQ ID NO: 1649413 - RNA, 19 nt, Homo sapiens
  misc_RNA (1)...(19): siRNA sense strand
gcaagacggugcagugaag

SEQ ID NO: 1649414 - RNA, 19 nt, Homo sapiens
  misc_RNA (1)...(19): siRNA sense strand
gguacaggauggcauagug

SEQ ID NO: 1649415 - RNA, 19 nt, Homo sapiens
  misc_RNA (1)...(19): siRNA sense strand
agacagacuuauuacuaga

SEQ ID NO: 1649416 - RNA, 19 nt, Homo sapiens
  misc_RNA (1)...(19): siRNA sense strand
guacaggauggcauaguga

SEQ ID NO: 1649417 - RNA, 19 nt, Homo sapiens
  misc_RNA (1)...(19): siRNA sense strand
ggugguacaggauggcaua

SEQ ID NO: 1649418 - RNA, 19 nt, Homo sapiens
  misc_RNA (1)...(19): siRNA sense strand
cacccaauaucaucucaca

SEQ ID NO: 1649419 - RNA, 19 nt, Homo sapiens
  misc_RNA (1)...(19): siRNA sense strand
acagacuuauuacuagaug

SEQ ID NO: 1649420 - RNA, 19 nt, Homo sapiens
  misc_RNA (1)...(19): siRNA sense strand
ucgcugguguccaucuuug

SEQ ID NO: 1649421 - RNA, 19 nt, Homo sapiens
  misc_RNA (1)...(19): siRNA sense strand
ugggaaggagacagacuua

SEQ ID NO: 1649422 - RNA, 19 nt, Homo sapiens
  misc_RNA (1)...(19): siRNA sense strand
cagcaagacggugcaguga

SEQ ID NO: 1649423 - RNA, 19 nt, Homo sapiens
  misc_RNA (1)...(19): siRNA sense strand
uagugaaggcccugaaugu

SEQ ID NO: 1649424 - RNA, 19 nt, Homo sapiens
  misc_RNA (1)...(19): siRNA sense strand
cagacuuauuacuagauga

SEQ ID NO: 1649425 - RNA, 19 nt, Homo sapiens
  misc_RNA (1)...(19): siRNA sense strand
gcauagugaaggcccugaa

SEQ ID NO: 1649426 - RNA, 19 nt, Homo sapiens
  misc_RNA (1)...(19): siRNA sense strand
gcucagcgggcuauauacu

SEQ ID NO: 1649427 - RNA, 19 nt, Homo sapiens
  misc_RNA (1)...(19): siRNA sense strand
gaaggagacagacuuauua

SEQ ID NO: 1649428 - RNA, 19 nt, Homo sapiens
  misc_RNA (1)...(19): siRNA sense strand
ggagacagacuuauuacua

SEQ ID NO: 1649429 - RNA, 19 nt, Homo sapiens
  misc_RNA (1)...(19): siRNA sense strand
ggaaggagacagacuuauu

SEQ ID NO: 1649430 - RNA, 19 nt, Homo sapiens
  misc_RNA (1)...(19): siRNA sense strand
gagacagacuuauuacuag

SEQ ID NO: 1649431 - RNA, 19 nt, Homo sapiens
  misc_RNA (1)...(19): siRNA sense strand
gcaagacggugcagugaag

SEQ ID NO: 1649432 - RNA, 19 nt, Homo sapiens
  misc_RNA (1)...(19): siRNA sense strand
gguacaggauggcauagug

SEQ ID NO: 1649433 - RNA, 19 nt, Homo sapiens
  misc_RNA (1)...(19): siRNA sense strand
agacagacuuauuacuaga

SEQ ID NO: 1649434 - RNA, 19 nt, Homo sapiens
  misc_RNA (1)...(19): siRNA sense strand
guacaggauggcauaguga

SEQ ID NO: 1649435 - RNA, 19 nt, Homo sapiens
  misc_RNA (1)...(19): siRNA sense strand
ggugguacaggauggcaua

SEQ ID NO: 1649436 - RNA, 19 nt, Homo sapiens
  misc_RNA (1)...(19): siRNA sense strand
cacccaauaucaucucaca

SEQ ID NO: 1649437 - RNA, 19 nt, Homo sapiens
  misc_RNA (1)...(19): siRNA sense strand
acagacuuauuacuagaug

SEQ ID NO: 1649438 - RNA, 19 nt, Homo sapiens
  misc_RNA (1)...(19): siRNA sense strand
ucgcugguguccaucuuug

SEQ ID NO: 1649439 - RNA, 19 nt, Homo sapiens
  misc_RNA (1)...(19): siRNA sense strand
ugggaaggagacagacuua

SEQ ID NO: 1649440 - RNA, 19 nt, Homo sapiens
  misc_RNA (1)...(19): siRNA sense strand
cagcaagacggugcaguga

SEQ ID NO: 1649441 - RNA, 19 nt, Homo sapiens
  misc_RNA (1)...(19): siRNA sense strand
uagugaaggcccugaaugu

SEQ ID NO: 1649442 - RNA, 19 nt, Homo sapiens
  misc_RNA (1)...(19): siRNA sense strand
cagacuuauuacuagauga

SEQ ID NO: 1649443 - RNA, 19 nt, Homo sapiens
  misc_RNA (1)...(19): siRNA sense strand
gcauagugaaggcccugaa

SEQ ID NO: 1649444 - RNA, 19 nt, Homo sapiens
  misc_RNA (1)...(19): siRNA sense strand
gcucagcgggcuauauacu

SEQ ID NO: 1649445 - RNA, 19 nt, Homo sapiens
  misc_RNA (1)...(19): siRNA sense strand
gaaggagacagacuuauua

SEQ ID NO: 1649446 - RNA, 19 nt, Homo sapiens
  misc_RNA (1)...(19): siRNA sense strand
ggagacagacuuauuacua

SEQ ID NO: 1649447 - RNA, 19 nt, Homo sapiens
  misc_RNA (1)...(19): siRNA sense strand
ggaaggagacagacuuauu

SEQ ID NO: 1649448 - RNA, 19 nt, Homo sapiens
  misc_RNA (1)...(19): siRNA sense strand
gagacagacuuauuacuag

SEQ ID NO: 1649449 - RNA, 19 nt, Homo sapiens
  misc_RNA (1)...(19): siRNA sense strand
gcaagacggugcagugaag

SEQ ID NO: 1649450 - RNA, 19 nt, Homo sapiens
  misc_RNA (1)...(19): siRNA sense strand
gguacaggauggcauagug

SEQ ID NO: 1649451 - RNA, 19 nt, Homo sapiens
  misc_RNA (1)...(19): siRNA sense strand
agacagacuuauuacuaga

SEQ ID NO: 1649452 - RNA, 19 nt, Homo sapiens
  misc_RNA (1)...(19): siRNA sense strand
guacaggauggcauaguga

SEQ ID NO: 1649453 - RNA, 19 nt, Homo sapiens
  misc_RNA (1)...(19): siRNA sense strand
ggugguacaggauggcaua

SEQ ID NO: 1649454 - RNA, 19 nt, Homo sapiens
  misc_RNA (1)...(19): siRNA sense strand
cacccaauaucaucucaca

SEQ ID NO: 1649455 - RNA, 19 nt, Homo sapiens
  misc_RNA (1)...(19): siRNA sense strand
acagacuuauuacuagaug

SEQ ID NO: 1649456 - RNA, 19 nt, Homo sapiens
  misc_RNA (1)...(19): siRNA sense strand
ucgcugguguccaucuuug

SEQ ID NO: 1649457 - RNA, 19 nt, Homo sapiens
  misc_RNA (1)...(19): siRNA sense strand
ugggaaggagacagacuua

SEQ ID NO: 1649458 - RNA, 19 nt, Homo sapiens
  misc_RNA (1)...(19): siRNA sense strand
cagcaagacggugcaguga

SEQ ID NO: 1649459 - RNA, 19 nt, Homo sapiens
  misc_RNA (1)...(19): siRNA sense strand
uagugaaggcccugaaugu

SEQ ID NO: 1649460 - RNA, 19 nt, Homo sapiens
  misc_RNA (1)...(19): siRNA sense strand
cagacuuauuacuagauga

SEQ ID NO: 1649461 - RNA, 19 nt, Homo sapiens
  misc_RNA (1)...(19): siRNA sense strand
gcauagugaaggcccugaa

SEQ ID NO: 1649462 - RNA, 19 nt, Homo sapiens
  misc_RNA (1)...(19): siRNA sense strand
gcucagcgggcuauauacu

SEQ ID NO: 1649463 - RNA, 19 nt, Homo sapiens
  misc_RNA (1)...(19): siRNA sense strand
gaaggagacagacuuauua

SEQ ID NO: 1649464 - RNA, 19 nt, Homo sapiens
  misc_RNA (1)...(19): siRNA sense strand
ggagacagacuuauuacua

SEQ ID NO: 1649465 - RNA, 19 nt, Homo sapiens
  misc_RNA (1)...(19): siRNA sense strand
ggaaggagacagacuuauu

SEQ ID NO: 1649466 - RNA, 19 nt, Homo sapiens
  misc_RNA (1)...(19): siRNA sense strand
gagacagacuuauuacuag

SEQ ID NO: 1649467 - RNA, 19 nt, Homo sapiens
  misc_RNA (1)...(19): siRNA sense strand
gcaagacggugcagugaag

SEQ ID NO: 1649468 - RNA, 19 nt, Homo sapiens
  misc_RNA (1)...(19): siRNA sense strand
gguacaggauggcauagug

SEQ ID NO: 1649469 - RNA, 19 nt, Homo sapiens
  misc_RNA (1)...(19): siRNA sense strand
agacagacuuauuacuaga

SEQ ID NO: 1649470 - RNA, 19 nt, Homo sapiens
  misc_RNA (1)...(19): siRNA sense strand
guacaggauggcauaguga

SEQ ID NO: 1649471 - RNA, 19 nt, Homo sapiens
  misc_RNA (1)...(19): siRNA sense strand
ggugguacaggauggcaua

SEQ ID NO: 1649472 - RNA, 19 nt, Homo sapiens
  misc_RNA (1)...(19): siRNA sense strand
cacccaauaucaucucaca

SEQ ID NO: 1649473 - RNA, 19 nt, Homo sapiens
  misc_RNA (1)...(19): siRNA sense strand
acagacuuauuacuagaug

SEQ ID NO: 1649474 - RNA, 19 nt, Homo sapiens
  misc_RNA (1)...(19): siRNA sense strand
ucgcugguguccaucuuug

SEQ ID NO: 1649475 - RNA, 19 nt, Homo sapiens
  misc_RNA (1)...(19): siRNA sense strand
ugggaaggagacagacuua

SEQ ID NO: 1649476 - RNA, 19 nt, Homo sapiens
  misc_RNA (1)...(19): siRNA sense strand
cagcaagacggugcaguga

SEQ ID NO: 1649477 - RNA, 19 nt, Homo sapiens
  misc_RNA (1)...(19): siRNA sense strand
uagugaaggcccugaaugu

SEQ ID NO: 1649478 - RNA, 19 nt, Homo sapiens
  misc_RNA (1)...(19): siRNA sense strand
cagacuuauuacuagauga

SEQ ID NO: 1649479 - RNA, 19 nt, Homo sapiens
  misc_RNA (1)...(19): siRNA sense strand
gcauagugaaggcccugaa

SEQ ID NO: 1649480 - RNA, 19 nt, Homo sapiens
  misc_RNA (1)...(19): siRNA sense strand
gcucagcgggcuauauacu

SEQ ID NO: 1649481 - RNA, 19 nt, Homo sapiens
  misc_RNA (1)...(19): siRNA sense strand
gaaggagacagacuuauua

SEQ ID NO: 1649482 - RNA, 19 nt, Homo sapiens
  misc_RNA (1)...(19): siRNA sense strand
ggagacagacuuauuacua

SEQ ID NO: 1649483 - RNA, 19 nt, Homo sapiens
  misc_RNA (1)...(19): siRNA sense strand
ggaaggagacagacuuauu

SEQ ID NO: 1649484 - RNA, 19 nt, Homo sapiens
  misc_RNA (1)...(19): siRNA sense strand
gagacagacuuauuacuag

SEQ ID NO: 1649485 - RNA, 19 nt, Homo sapiens
  misc_RNA (1)...(19): siRNA sense strand
gcaagacggugcagugaag

SEQ ID NO: 1649486 - RNA, 19 nt, Homo sapiens
  misc_RNA (1)...(19): siRNA sense strand
gguacaggauggcauagug

SEQ ID NO: 1649487 - RNA, 19 nt, Homo sapiens
  misc_RNA (1)...(19): siRNA sense strand
agacagacuuauuacuaga

SEQ ID NO: 1649488 - RNA, 19 nt, Homo sapiens
  misc_RNA (1)...(19): siRNA sense strand
guacaggauggcauaguga

SEQ ID NO: 1649489 - RNA, 19 nt, Homo sapiens
  misc_RNA (1)...(19): siRNA sense strand
ggugguacaggauggcaua

SEQ ID NO: 1649490 - RNA, 19 nt, Homo sapiens
  misc_RNA (1)...(19): siRNA sense strand
cacccaauaucaucucaca

SEQ ID NO: 1649491 - RNA, 19 nt, Homo sapiens
  misc_RNA (1)...(19): siRNA sense strand
acagacuuauuacuagaug

SEQ ID NO: 1649492 - RNA, 19 nt, Homo sapiens
  misc_RNA (1)...(19): siRNA sense strand
ucgcugguguccaucuuug

SEQ ID NO: 1649493 - RNA, 19 nt, Homo sapiens
  misc_RNA (1)...(19): siRNA sense strand
ugggaaggagacagacuua

SEQ ID NO: 1649494 - RNA, 19 nt, Homo sapiens
  misc_RNA (1)...(19): siRNA sense strand
cagcaagacggugcaguga

SEQ ID NO: 1649495 - RNA, 19 nt, Homo sapiens
  misc_RNA (1)...(19): siRNA sense strand
uagugaaggcccugaaugu

SEQ ID NO: 1649496 - RNA, 19 nt, Homo sapiens
  misc_RNA (1)...(19): siRNA sense strand
cagacuuauuacuagauga

SEQ ID NO: 1649497 - RNA, 19 nt, Homo sapiens
  misc_RNA (1)...(19): siRNA sense strand
gcauagugaaggcccugaa

SEQ ID NO: 1649498 - RNA, 19 nt, Homo sapiens
  misc_RNA (1)...(19): siRNA sense strand
gcucagcgggcuauauacu

SEQ ID NO: 1649499 - RNA, 19 nt, Homo sapiens
  misc_RNA (1)...(19): siRNA sense strand
gcagaugauuugcggauua

SEQ ID NO: 1649500 - RNA, 19 nt, Homo sapiens
  misc_RNA (1)...(19): siRNA sense strand
gaauggaucugacaguguu

SEQ ID NO: 1649501 - RNA, 19 nt, Homo sapiens
  misc_RNA (1)...(19): siRNA sense strand
gaaaggagcaguagaugau

SEQ ID NO: 1649502 - RNA, 19 nt, Homo sapiens
  misc_RNA (1)...(19): siRNA sense strand
aaacagcuguaacacauuu

SEQ ID NO: 1649503 - RNA, 19 nt, Homo sapiens
  misc_RNA (1)...(19): siRNA sense strand
ccaaacagcuguaacacau

SEQ ID NO: 1649504 - RNA, 19 nt, Homo sapiens
  misc_RNA (1)...(19): siRNA sense strand
gauuacagcagcagaauuu

SEQ ID NO: 1649505 - RNA, 19 nt, Homo sapiens
  misc_RNA (1)...(19): siRNA sense strand
gcucauacauaucacauca

SEQ ID NO: 1649506 - RNA, 19 nt, Homo sapiens
  misc_RNA (1)...(19): siRNA sense strand
cauaccaggugcaugaaua

SEQ ID NO: 1649507 - RNA, 19 nt, Homo sapiens
  misc_RNA (1)...(19): siRNA sense strand
gcgaaagaaagaugaaaua

SEQ ID NO: 1649508 - RNA, 19 nt, Homo sapiens
  misc_RNA (1)...(19): siRNA sense strand
caauaagccucgcacaguu

SEQ ID NO: 1649509 - RNA, 19 nt, Homo sapiens
  misc_RNA (1)...(19): siRNA sense strand
gaaguaaacucuguucacu

SEQ ID NO: 1649510 - RNA, 19 nt, Homo sapiens
  misc_RNA (1)...(19): siRNA sense strand
aaacauaccaggugcauga

SEQ ID NO: 1649511 - RNA, 19 nt, Homo sapiens
  misc_RNA (1)...(19): siRNA sense strand
gcagaagcagauauaauuu

SEQ ID NO: 1649512 - RNA, 19 nt, Homo sapiens
  misc_RNA (1)...(19): siRNA sense strand
gaacuauucggcuauguga

SEQ ID NO: 1649513 - RNA, 19 nt, Homo sapiens
  misc_RNA (1)...(19): siRNA sense strand
cagcagaauuucauccaaa

SEQ ID NO: 1649514 - RNA, 19 nt, Homo sapiens
  misc_RNA (1)...(19): siRNA sense strand
guauagagauccuacuaca

SEQ ID NO: 1649515 - RNA, 19 nt, Homo sapiens
  misc_RNA (1)...(19): siRNA sense strand
uaucaagccugccaauaug

SEQ ID NO: 1649516 - RNA, 19 nt, Homo sapiens
  misc_RNA (1)...(19): siRNA sense strand
ccagaaggguauaacuuga

SEQ ID NO: 1649517 - RNA, 19 nt, Homo sapiens
  misc_RNA (1)...(19): siRNA sense strand
uaaacucuguucacuguau

SEQ ID NO: 1649518 - RNA, 19 nt, Homo sapiens
  misc_RNA (1)...(19): siRNA sense strand
cacaucaacucaauuucua

SEQ ID NO: 1649519 - RNA, 19 nt, Homo sapiens
  misc_RNA (1)...(19): siRNA sense strand
agauaaaggugguagaguu

SEQ ID NO: 1649520 - RNA, 19 nt, Homo sapiens
  misc_RNA (1)...(19): siRNA sense strand
gacuggaucuuacaauaau

SEQ ID NO: 1649521 - RNA, 19 nt, Homo sapiens
  misc_RNA (1)...(19): siRNA sense strand
cgaagaauauuugccaaug

SEQ ID NO: 1649522 - RNA, 19 nt, Homo sapiens
  misc_RNA (1)...(19): siRNA sense strand
gauggaagguauagagauc

SEQ ID NO: 1649523 - RNA, 19 nt, Homo sapiens
  misc_RNA (1)...(19): siRNA sense strand
gcaaguggcaagcgaaaga

SEQ ID NO: 1649524 - RNA, 19 nt, Homo sapiens
  misc_RNA (1)...(19): siRNA sense strand
aaacacaaagcgagacaua

SEQ ID NO: 1649525 - RNA, 19 nt, Homo sapiens
  misc_RNA (1)...(19): siRNA sense strand
gaagaauauuugccaaugc

SEQ ID NO: 1649526 - RNA, 19 nt, Homo sapiens
  misc_RNA (1)...(19): siRNA sense strand
ggauuaaucuuuggcaucu

SEQ ID NO: 1649527 - RNA, 19 nt, Homo sapiens
  misc_RNA (1)...(19): siRNA sense strand
gauguaaaauucagccaua

SEQ ID NO: 1649528 - RNA, 19 nt, Homo sapiens
  misc_RNA (1)...(19): siRNA sense strand
ucagaauguuugacagaaa

SEQ ID NO: 1649529 - RNA, 19 nt, Homo sapiens
  misc_RNA (1)...(19): siRNA sense strand
gauaaaggugguagaguug

SEQ ID NO: 1649530 - RNA, 19 nt, Homo sapiens
  misc_RNA (1)...(19): siRNA sense strand
augaauaccucagaaguaa

SEQ ID NO: 1649531 - RNA, 19 nt, Homo sapiens
  misc_RNA (1)...(19): siRNA sense strand
cagaugauuugcggauuaa

SEQ ID NO: 1649532 - RNA, 19 nt, Homo sapiens
  misc_RNA (1)...(19): siRNA sense strand
guagaguugucaucuuuca

SEQ ID NO: 1649533 - RNA, 19 nt, Homo sapiens
  misc_RNA (1)...(19): siRNA sense strand
cauaucacaucaacucaau

SEQ ID NO: 1649534 - RNA, 19 nt, Homo sapiens
  misc_RNA (1)...(19): siRNA sense strand
ugguagaguugucaucuuu

SEQ ID NO: 1649535 - RNA, 19 nt, Homo sapiens
  misc_RNA (1)...(19): siRNA sense strand
ugacuggaucuuacaauaa

SEQ ID NO: 1649536 - RNA, 19 nt, Homo sapiens
  misc_RNA (1)...(19): siRNA sense strand
gcagcagaauuucauccaa

SEQ ID NO: 1649537 - RNA, 19 nt, Homo sapiens
  misc_RNA (1)...(19): siRNA sense strand
ccaaugcucauacauauca

SEQ ID NO: 1649538 - RNA, 19 nt, Homo sapiens
  misc_RNA (1)...(19): siRNA sense strand
agcaguagaugaugaugua

SEQ ID NO: 1649539 - RNA, 19 nt, Homo sapiens
  misc_RNA (1)...(19): siRNA sense strand
agaaggguauaacuugaaa

SEQ ID NO: 1649540 - RNA, 19 nt, Homo sapiens
  misc_RNA (1)...(19): siRNA sense strand
caugaauaccucagaagua

SEQ ID NO: 1649541 - RNA, 19 nt, Homo sapiens
  misc_RNA (1)...(19): siRNA sense strand
gcaucugcccucugugaua

SEQ ID NO: 1649542 - RNA, 19 nt, Homo sapiens
  misc_RNA (1)...(19): siRNA sense strand
gauaucaagccugccaaua

SEQ ID NO: 1649543 - RNA, 19 nt, Homo sapiens
  misc_RNA (1)...(19): siRNA sense strand
agacauaacccuagaagca

SEQ ID NO: 1649544 - RNA, 19 nt, Homo sapiens
  misc_RNA (1)...(19): siRNA sense strand
gagcuaacagaggugauua

SEQ ID NO: 1649545 - RNA, 19 nt, Homo sapiens
  misc_RNA (1)...(19): siRNA sense strand
gccuagacuucaauaagaa

SEQ ID NO: 1649546 - RNA, 19 nt, Homo sapiens
  misc_RNA (1)...(19): siRNA sense strand
aguaaacucuguucacugu

SEQ ID NO: 1649547 - RNA, 19 nt, Homo sapiens
  misc_RNA (1)...(19): siRNA sense strand
aaccagaguuugacuacuu

SEQ ID NO: 1649548 - RNA, 19 nt, Homo sapiens
  misc_RNA (1)...(19): siRNA sense strand
gacuagagacuauuuguca

SEQ ID NO: 1649549 - RNA, 19 nt, Homo sapiens
  misc_RNA (1)...(19): siRNA sense strand
ugccaaugcucauacauau

SEQ ID NO: 1649550 - RNA, 19 nt, Homo sapiens
  misc_RNA (1)...(19): siRNA sense strand
cagaggagaauauaauguu

SEQ ID NO: 1649551 - RNA, 19 nt, Homo sapiens
  misc_RNA (1)...(19): siRNA sense strand
gaauguuguuggaauggau

SEQ ID NO: 1649552 - RNA, 19 nt, Homo sapiens
  misc_RNA (1)...(19): siRNA sense strand
gcuguaacacauuuguaua

SEQ ID NO: 1649553 - RNA, 19 nt, Homo sapiens
  misc_RNA (1)...(19): siRNA sense strand
gcagauauaauuucuacag

SEQ ID NO: 1649554 - RNA, 19 nt, Homo sapiens
  misc_RNA (1)...(19): siRNA sense strand
cuauggaucuaaugguuga

SEQ ID NO: 1649555 - RNA, 19 nt, Homo sapiens
  misc_RNA (1)...(19): siRNA sense strand
gccuauggaucuaaugguu

SEQ ID NO: 1649556 - RNA, 19 nt, Homo sapiens
  misc_RNA (1)...(19): siRNA sense strand
gaccagaaggguauaacuu

SEQ ID NO: 1649557 - RNA, 19 nt, Homo sapiens
  misc_RNA (1)...(19): siRNA sense strand
gcaagcgaaagaaagauga

SEQ ID NO: 1649558 - RNA, 19 nt, Homo sapiens
  misc_RNA (1)...(19): siRNA sense strand
gugcaugaauaccucagaa

SEQ ID NO: 1649559 - RNA, 19 nt, Homo sapiens
  misc_RNA (1)...(19): siRNA sense strand
gaaccugaagaucccagua

SEQ ID NO: 1649560 - RNA, 19 nt, Homo sapiens
  misc_RNA (1)...(19): siRNA sense strand
cuagaagcaucgcgggaaa

SEQ ID NO: 1649561 - RNA, 19 nt, Homo sapiens
  misc_RNA (1)...(19): siRNA sense strand
uagcagaggagaauauaau

SEQ ID NO: 1649562 - RNA, 19 nt, Homo sapiens
  misc_RNA (1)...(19): siRNA sense strand
gccaugaaccagaguuuga

SEQ ID NO: 1649563 - RNA, 19 nt, Homo sapiens
  misc_RNA (1)...(19): siRNA sense strand
gcagaggagaauauaaugu

SEQ ID NO: 1649564 - RNA, 19 nt, Homo sapiens
  misc_RNA (1)...(19): siRNA sense strand
agaggaggauggaagguau

SEQ ID NO: 1649565 - RNA, 19 nt, Homo sapiens
  misc_RNA (1)...(19): siRNA sense strand
cgaaaucaucuccucuauu

SEQ ID NO: 1649566 - RNA, 19 nt, Homo sapiens
  misc_RNA (1)...(19): siRNA sense strand
guauacagcagcaguaaag

SEQ ID NO: 1649567 - RNA, 19 nt, Homo sapiens
  misc_RNA (1)...(19): siRNA sense strand
gcuggaggagggaaugaua

SEQ ID NO: 1649568 - RNA, 19 nt, Homo sapiens
  misc_RNA (1)...(19): siRNA sense strand
ggugaaaggagcaguagau

SEQ ID NO: 1649569 - RNA, 19 nt, Homo sapiens
  misc_RNA (1)...(19): siRNA sense strand
ggaauggaucugacagugu

SEQ ID NO: 1649570 - RNA, 19 nt, Homo sapiens
  misc_RNA (1)...(19): siRNA sense strand
ccgaaaucaucuccucuau

SEQ ID NO: 1649571 - RNA, 19 nt, Homo sapiens
  misc_RNA (1)...(19): siRNA sense strand
ugaaaggagcaguagauga

SEQ ID NO: 1649572 - RNA, 19 nt, Homo sapiens
  misc_RNA (1)...(19): siRNA sense strand
agccuagacuucaauaaga

SEQ ID NO: 1649573 - RNA, 19 nt, Homo sapiens
  misc_RNA (1)...(19): siRNA sense strand
augacuggaucuuacaaua

SEQ ID NO: 1649574 - RNA, 19 nt, Homo sapiens
  misc_RNA (1)...(19): siRNA sense strand
agcagaagcagauauaauu

SEQ ID NO: 1649575 - RNA, 19 nt, Homo sapiens
  misc_RNA (1)...(19): siRNA sense strand
caucugcccucugugauag

SEQ ID NO: 1649576 - RNA, 19 nt, Homo sapiens
  misc_RNA (1)...(19): siRNA sense strand
gaauaccucagaaguaaac

SEQ ID NO: 1649577 - RNA, 19 nt, Homo sapiens
  misc_RNA (1)...(19): siRNA sense strand
gcaugaauaccucagaagu

SEQ ID NO: 1649578 - RNA, 19 nt, Homo sapiens
  misc_RNA (1)...(19): siRNA sense strand
cauagcagaggagaauaua

SEQ ID NO: 1649579 - RNA, 19 nt, Homo sapiens
  misc_RNA (1)...(19): siRNA sense strand
ugucaugacuggaucuuac

SEQ ID NO: 1649580 - RNA, 19 nt, Homo sapiens
  misc_RNA (1)...(19): siRNA sense strand
ggaacuauucggcuaugug

SEQ ID NO: 1649581 - RNA, 19 nt, Homo sapiens
  misc_RNA (1)...(19): siRNA sense strand
ggccaguccacgaagaaua

SEQ ID NO: 1649582 - RNA, 19 nt, Homo sapiens
  misc_RNA (1)...(19): siRNA sense strand
agagauccuacuacaguua

SEQ ID NO: 1649583 - RNA, 19 nt, Homo sapiens
  misc_RNA (1)...(19): siRNA sense strand
caaaagaccagaaggguau

SEQ ID NO: 1649584 - RNA, 19 nt, Homo sapiens
  misc_RNA (1)...(19): siRNA sense strand
gaggaggauggaagguaua

SEQ ID NO: 1649585 - RNA, 19 nt, Homo sapiens
  misc_RNA (1)...(19): siRNA sense strand
uagagauccuacuacaguu

SEQ ID NO: 1649586 - RNA, 19 nt, Homo sapiens
  misc_RNA (1)...(19): siRNA sense strand
cagaagcagauauaauuuc

SEQ ID NO: 1649587 - RNA, 19 nt, Homo sapiens
  misc_RNA (1)...(19): siRNA sense strand
uguagcagaagcagauaua

SEQ ID NO: 1649588 - RNA, 19 nt, Homo sapiens
  misc_RNA (1)...(19): siRNA sense strand
aaggagcaguagaugauga

SEQ ID NO: 1649589 - RNA, 19 nt, Homo sapiens
  misc_RNA (1)...(19): siRNA sense strand
ucacaucaacucaauuucu

SEQ ID NO: 1649590 - RNA, 19 nt, Homo sapiens
  misc_RNA (1)...(19): siRNA sense strand
gagccaugaaccagaguuu

SEQ ID NO: 1649591 - RNA, 19 nt, Homo sapiens
  misc_RNA (1)...(19): siRNA sense strand
guaacacauuuguauacag

SEQ ID NO: 1649592 - RNA, 19 nt, Homo sapiens
  misc_RNA (1)...(19): siRNA sense strand
gccaguccacgaagaauau

SEQ ID NO: 1649593 - RNA, 19 nt, Homo sapiens
  misc_RNA (1)...(19): siRNA sense strand
uaaaggugguagaguuguc

SEQ ID NO: 1649594 - RNA, 19 nt, Homo sapiens
  misc_RNA (1)...(19): siRNA sense strand
cagaaggguauaacuugaa

SEQ ID NO: 1649595 - RNA, 19 nt, Homo sapiens
  misc_RNA (1)...(19): siRNA sense strand
ucugaagccucgcaaaguc

SEQ ID NO: 1649596 - RNA, 19 nt, Homo sapiens
  misc_RNA (1)...(19): siRNA sense strand
uagcagaagcagauauaau

SEQ ID NO: 1649597 - RNA, 19 nt, Homo sapiens
  misc_RNA (1)...(19): siRNA sense strand
cuacuacaguuacuacacu

SEQ ID NO: 1649598 - RNA, 19 nt, Homo sapiens
  misc_RNA (1)...(19): siRNA sense strand
gaggauggaagguauagag

SEQ ID NO: 1649599 - RNA, 19 nt, Homo sapiens
  misc_RNA (1)...(19): siRNA sense strand
cuccagcccucucaaguua

SEQ ID NO: 1649600 - RNA, 19 nt, Homo sapiens
  misc_RNA (1)...(19): siRNA sense strand
ccagcccucucaaguuaaa

SEQ ID NO: 1649601 - RNA, 19 nt, Homo sapiens
  misc_RNA (1)...(19): siRNA sense strand
gcaggcaucuggguguugu

SEQ ID NO: 1649602 - RNA, 19 nt, Homo sapiens
  misc_RNA (1)...(19): siRNA sense strand
ggccuuccaucuaaucuuc

SEQ ID NO: 1649603 - RNA, 19 nt, Homo sapiens
  misc_RNA (1)...(19): siRNA sense strand
gguguggaguauccugaaa

SEQ ID NO: 1649604 - RNA, 19 nt, Homo sapiens
  misc_RNA (1)...(19): siRNA sense strand
gcaucuggguguuguccuu

SEQ ID NO: 1649605 - RNA, 19 nt, Homo sapiens
  misc_RNA (1)...(19): siRNA sense strand
caaggcaccuggaguuuug

SEQ ID NO: 1649606 - RNA, 19 nt, Homo sapiens
  misc_RNA (1)...(19): siRNA sense strand
gcccaaggcaccuggaguu

SEQ ID NO: 1649607 - RNA, 19 nt, Homo sapiens
  misc_RNA (1)...(19): siRNA sense strand
ggccagcuacucggacaua

SEQ ID NO: 1649608 - RNA, 19 nt, Homo sapiens
  misc_RNA (1)...(19): siRNA sense strand
ucacggccaugagucuaga

SEQ ID NO: 1649609 - RNA, 19 nt, Homo sapiens
  misc_RNA (1)...(19): siRNA sense strand
cucacuagguguagaguuc

SEQ ID NO: 1649610 - RNA, 19 nt, Homo sapiens
  misc_RNA (1)...(19): siRNA sense strand
gccagcguccugcuuauca

SEQ ID NO: 1649611 - RNA, 19 nt, Homo sapiens
  misc_RNA (1)...(19): siRNA sense strand
guagugcccuggaaaacga

SEQ ID NO: 1649612 - RNA, 19 nt, Homo sapiens
  misc_RNA (1)...(19): siRNA sense strand
cccagaagcuacgcaccaa

SEQ ID NO: 1649613 - RNA, 19 nt, Homo sapiens
  misc_RNA (1)...(19): siRNA sense strand
gcuuugugguguggaguau

SEQ ID NO: 1649614 - RNA, 19 nt, Homo sapiens
  misc_RNA (1)...(19): siRNA sense strand
ccuccagcccucucaaguu

SEQ ID NO: 1649615 - RNA, 19 nt, Homo sapiens
  misc_RNA (1)...(19): siRNA sense strand
guuaaacgaacugaacuag

SEQ ID NO: 1649616 - RNA, 19 nt, Homo sapiens
  misc_RNA (1)...(19): siRNA sense strand
gcauugggcucauguucua

SEQ ID NO: 1649617 - RNA, 19 nt, Homo sapiens
  misc_RNA (1)...(19): siRNA sense strand
ggaaggaucacgugaaguu

SEQ ID NO: 1649618 - RNA, 19 nt, Homo sapiens
  misc_RNA (1)...(19): siRNA sense strand
gcaguacccugaaggacaa

SEQ ID NO: 1649619 - RNA, 19 nt, Homo sapiens
  misc_RNA (1)...(19): siRNA sense strand
gacauccgcuugacuccua

SEQ ID NO: 1649620 - RNA, 19 nt, Homo sapiens
  misc_RNA (1)...(19): siRNA sense strand
gcaugaagcccaacacguu

SEQ ID NO: 1649621 - RNA, 19 nt, Homo sapiens
  misc_RNA (1)...(19): siRNA sense strand
ccucugugcucaucaguuu

SEQ ID NO: 1649622 - RNA, 19 nt, Homo sapiens
  misc_RNA (1)...(19): siRNA sense strand
cgucuuugcuguccucuuu

SEQ ID NO: 1649623 - RNA, 19 nt, Homo sapiens
  misc_RNA (1)...(19): siRNA sense strand
cagcuguacuuuauucuug

SEQ ID NO: 1649624 - RNA, 19 nt, Homo sapiens
  misc_RNA (1)...(19): siRNA sense strand
gcuggaaccugcuguaugg

SEQ ID NO: 1649625 - RNA, 19 nt, Homo sapiens
  misc_RNA (1)...(19): siRNA sense strand
gggcagcuguacuuuauuc

SEQ ID NO: 1649626 - RNA, 19 nt, Homo sapiens
  misc_RNA (1)...(19): siRNA sense strand
gggcggagccuacuucaug

SEQ ID NO: 1649627 - RNA, 19 nt, Homo sapiens
  misc_RNA (1)...(19): siRNA sense strand
cgggagccgugaugaauuu

SEQ ID NO: 1649628 - RNA, 19 nt, Homo sapiens
  misc_RNA (1)...(19): siRNA sense strand
gguccuagguuucuacgau

SEQ ID NO: 1649629 - RNA, 19 nt, Homo sapiens
  misc_RNA (1)...(19): siRNA sense strand
caccugcacugaucuguga

SEQ ID NO: 1649630 - RNA, 19 nt, Homo sapiens
  misc_RNA (1)...(19): siRNA sense strand
ccacuguccuguccauguu

SEQ ID NO: 1649631 - RNA, 19 nt, Homo sapiens
  misc_RNA (1)...(19): siRNA sense strand
caacagcaguacccugaag

SEQ ID NO: 1649632 - RNA, 19 nt, Homo sapiens
  misc_RNA (1)...(19): siRNA sense strand
ccucucagcugcaccaugu

SEQ ID NO: 1649633 - RNA, 19 nt, Homo sapiens
  misc_RNA (1)...(19): siRNA sense strand
acacguugguccuagguuu

SEQ ID NO: 1649634 - RNA, 19 nt, Homo sapiens
  misc_RNA (1)...(19): siRNA sense strand
caacuugggcgcuggcuau

SEQ ID NO: 1649635 - RNA, 19 nt, Homo sapiens
  misc_RNA (1)...(19): siRNA sense strand
gcacugcugagccaacuga

SEQ ID NO: 1649636 - RNA, 19 nt, Homo sapiens
  misc_RNA (1)...(19): siRNA sense strand
gugcccaggugaaggcuuu

SEQ ID NO: 1649637 - RNA, 19 nt, Homo sapiens
  misc_RNA (1)...(19): siRNA sense strand
ggagccuacuucaugauca

SEQ ID NO: 1649638 - RNA, 19 nt, Homo sapiens
  misc_RNA (1)...(19): siRNA sense strand
cugggcagcuguacuuuau

SEQ ID NO: 1649639 - RNA, 19 nt, Homo sapiens
  misc_RNA (1)...(19): siRNA sense strand
cuaccuggcuaacgucugu

SEQ ID NO: 1649640 - RNA, 19 nt, Homo sapiens
  misc_RNA (1)...(19): siRNA sense strand
ggcggagccuacuucauga

SEQ ID NO: 1649641 - RNA, 19 nt, Homo sapiens
  misc_RNA (1)...(19): siRNA sense strand
gggccucauuccucacauu

SEQ ID NO: 1649642 - RNA, 19 nt, Homo sapiens
  misc_RNA (1)...(19): siRNA sense strand
cccggaagcuguccaccuu

SEQ ID NO: 1649643 - RNA, 19 nt, Homo sapiens
  misc_RNA (1)...(19): siRNA sense strand
ggugaaggcuuuuguggau

SEQ ID NO: 1649644 - RNA, 19 nt, Homo sapiens
  misc_RNA (1)...(19): siRNA sense strand
ccgacgcccucaagaugaa

SEQ ID NO: 1649645 - RNA, 19 nt, Homo sapiens
  misc_RNA (1)...(19): siRNA sense strand
ucuuugcuguccucuuuaa

SEQ ID NO: 1649646 - RNA, 19 nt, Homo sapiens
  misc_RNA (1)...(19): siRNA sense strand
gcagcuguacuuuauucuu

SEQ ID NO: 1649647 - RNA, 19 nt, Homo sapiens
  misc_RNA (1)...(19): siRNA sense strand
ccggaaggaucacgugaag

SEQ ID NO: 1649648 - RNA, 19 nt, Homo sapiens
  misc_RNA (1)...(19): siRNA sense strand
ucaagaugaacaagaaugu

SEQ ID NO: 1649649 - RNA, 19 nt, Homo sapiens
  misc_RNA (1)...(19): siRNA sense strand
gaaggggacuuugugaaca

SEQ ID NO: 1649650 - RNA, 19 nt, Homo sapiens
  misc_RNA (1)...(19): siRNA sense strand
gggcagcauugggcucaug

SEQ ID NO: 1649651 - RNA, 19 nt, Homo sapiens
  misc_RNA (1)...(19): siRNA sense strand
ucacagcccucaccuuccu

SEQ ID NO: 1649652 - RNA, 19 nt, Homo sapiens
  misc_RNA (1)...(19): siRNA sense strand
cccucaagaugaacaagaa

SEQ ID NO: 1649653 - RNA, 19 nt, Homo sapiens
  misc_RNA (1)...(19): siRNA sense strand
gcugcugguugccuacuuc

SEQ ID NO: 1649654 - RNA, 19 nt, Homo sapiens
  misc_RNA (1)...(19): siRNA sense strand
gagccuacuucaugaucag

SEQ ID NO: 1649655 - RNA, 19 nt, Homo sapiens
  misc_RNA (1)...(19): siRNA sense strand
uggagucugugcuugaugu

SEQ ID NO: 1649656 - RNA, 19 nt, Homo sapiens
  misc_RNA (1)...(19): siRNA sense strand
gguggagucugugcuugau

SEQ ID NO: 1649657 - RNA, 19 nt, Homo sapiens
  misc_RNA (1)...(19): siRNA sense strand
cugggaagcugaacacacu

SEQ ID NO: 1649658 - RNA, 19 nt, Homo sapiens
  misc_RNA (1)...(19): siRNA sense strand
gcgcuacuggagacucuaa

SEQ ID NO: 1649659 - RNA, 19 nt, Homo sapiens
  misc_RNA (1)...(19): siRNA sense strand
gaauuuugccagcgucuuu

SEQ ID NO: 1649660 - RNA, 19 nt, Homo sapiens
  misc_RNA (1)...(19): siRNA sense strand
gaaggaucacgugaaguuc

SEQ ID NO: 1649661 - RNA, 19 nt, Homo sapiens
  misc_RNA (1)...(19): siRNA sense strand
ccacuucaccggcuucaac

SEQ ID NO: 1649662 - RNA, 19 nt, Homo sapiens
  misc_RNA (1)...(19): siRNA sense strand
ggaugucugcggccucuuc

SEQ ID NO: 1649663 - RNA, 19 nt, Homo sapiens
  misc_RNA (1)...(19): siRNA sense strand
ccugggcagcuguacuuua

SEQ ID NO: 1649664 - RNA, 19 nt, Homo sapiens
  misc_RNA (1)...(19): siRNA sense strand
uguggucacugucuucuac

SEQ ID NO: 1649665 - RNA, 19 nt, Homo sapiens
  misc_RNA (1)...(19): siRNA sense strand
gcugguugccuacuucauc

SEQ ID NO: 1649666 - RNA, 19 nt, Homo sapiens
  misc_RNA (1)...(19): siRNA sense strand
gccgacgcccucaagauga

SEQ ID NO: 1649667 - RNA, 19 nt, Homo sapiens
  misc_RNA (1)...(19): siRNA sense strand
gguguugaucggaaucuau

SEQ ID NO: 1649668 - RNA, 19 nt, Homo sapiens
  misc_RNA (1)...(19): siRNA sense strand
agucugugcuugaugucuu

SEQ ID NO: 1649669 - RNA, 19 nt, Homo sapiens
  misc_RNA (1)...(19): siRNA sense strand
gcccucaccuuccuguacu

SEQ ID NO: 1649670 - RNA, 19 nt, Homo sapiens
  misc_RNA (1)...(19): siRNA sense strand
ccuccugccugcucaugau

SEQ ID NO: 1649671 - RNA, 19 nt, Homo sapiens
  misc_RNA (1)...(19): siRNA sense strand
uggcugcuguggucacugu

SEQ ID NO: 1649672 - RNA, 19 nt, Homo sapiens
  misc_RNA (1)...(19): siRNA sense strand
cuacaccuucuucgucuau

SEQ ID NO: 1649673 - RNA, 19 nt, Homo sapiens
  misc_RNA (1)...(19): siRNA sense strand
ugacggacccggcuuucuc

SEQ ID NO: 1649674 - RNA, 19 nt, Homo sapiens
  misc_RNA (1)...(19): siRNA sense strand
uggccaaccagcuuaagaa

SEQ ID NO: 1649675 - RNA, 19 nt, Homo sapiens
  misc_RNA (1)...(19): siRNA sense strand
cagcauugggcucauguuc

SEQ ID NO: 1649676 - RNA, 19 nt, Homo sapiens
  misc_RNA (1)...(19): siRNA sense strand
cuucgucuauguccugcuu

SEQ ID NO: 1649677 - RNA, 19 nt, Homo sapiens
  misc_RNA (1)...(19): siRNA sense strand
caagaugaacaagaaugug

SEQ ID NO: 1649678 - RNA, 19 nt, Homo sapiens
  misc_RNA (1)...(19): siRNA sense strand
ugaccucuuuggcgugauc

SEQ ID NO: 1649679 - RNA, 19 nt, Homo sapiens
  misc_RNA (1)...(19): siRNA sense strand
caacaacgaucaugaauug

SEQ ID NO: 1649680 - RNA, 19 nt, Homo sapiens
  misc_RNA (1)...(19): siRNA sense strand
gaucuaagguugaacguaa

SEQ ID NO: 1649681 - RNA, 19 nt, Homo sapiens
  misc_RNA (1)...(19): siRNA sense strand
ggaaucaacuggucacauu

SEQ ID NO: 1649682 - RNA, 19 nt, Homo sapiens
  misc_RNA (1)...(19): siRNA sense strand
gaagucacauuaccagaaa

SEQ ID NO: 1649683 - RNA, 19 nt, Homo sapiens
  misc_RNA (1)...(19): siRNA sense strand
gaaauugacugcuguggau

SEQ ID NO: 1649684 - RNA, 19 nt, Homo sapiens
  misc_RNA (1)...(19): siRNA sense strand
caaauuaucuguccuacau

SEQ ID NO: 1649685 - RNA, 19 nt, Homo sapiens
  misc_RNA (1)...(19): siRNA sense strand
ggaggaacuugaagaaauu

SEQ ID NO: 1649686 - RNA, 19 nt, Homo sapiens
  misc_RNA (1)...(19): siRNA sense strand
gaacgccucugcgaacaaa

SEQ ID NO: 1649687 - RNA, 19 nt, Homo sapiens
  misc_RNA (1)...(19): siRNA sense strand
gugaauaacuucugugaca

SEQ ID NO: 1649688 - RNA, 19 nt, Homo sapiens
  misc_RNA (1)...(19): siRNA sense strand
uuaaugaacugcaaagguu

SEQ ID NO: 1649689 - RNA, 19 nt, Homo sapiens
  misc_RNA (1)...(19): siRNA sense strand
ucaaagaaaucaugaagca

SEQ ID NO: 1649690 - RNA, 19 nt, Homo sapiens
  misc_RNA (1)...(19): siRNA sense strand
gaagagcugaagaggauua

SEQ ID NO: 1649691 - RNA, 19 nt, Homo sapiens
  misc_RNA (1)...(19): siRNA sense strand
gauauuggccauaaucaaa

SEQ ID NO: 1649692 - RNA, 19 nt, Homo sapiens
  misc_RNA (1)...(19): siRNA sense strand
ugaauaauauccgcuguuu

SEQ ID NO: 1649693 - RNA, 19 nt, Homo sapiens
  misc_RNA (1)...(19): siRNA sense strand
cggcauggcuuccgagauu

SEQ ID NO: 1649694 - RNA, 19 nt, Homo sapiens
  misc_RNA (1)...(19): siRNA sense strand
gucuuaaccuuuccaauaa

SEQ ID NO: 1649695 - RNA, 19 nt, Homo sapiens
  misc_RNA (1)...(19): siRNA sense strand
aagaagagcugaagaggau

SEQ ID NO: 1649696 - RNA, 19 nt, Homo sapiens
  misc_RNA (1)...(19): siRNA sense strand
guccagaucuuacaucaug

SEQ ID NO: 1649697 - RNA, 19 nt, Homo sapiens
  misc_RNA (1)...(19): siRNA sense strand
guaaugagcuaagugaagu

SEQ ID NO: 1649698 - RNA, 19 nt, Homo sapiens
  misc_RNA (1)...(19): siRNA sense strand
uggaccagcugccagauua

SEQ ID NO: 1649699 - RNA, 19 nt, Homo sapiens
  misc_RNA (1)...(19): siRNA sense strand
gaagaggaggucaaagaaa

SEQ ID NO: 1649700 - RNA, 19 nt, Homo sapiens
  misc_RNA (1)...(19): siRNA sense strand
gaagaauacauggucaaua

SEQ ID NO: 1649701 - RNA, 19 nt, Homo sapiens
  misc_RNA (1)...(19): siRNA sense strand
ucaaggaaccgcuuagaaa

SEQ ID NO: 1649702 - RNA, 19 nt, Homo sapiens
  misc_RNA (1)...(19): siRNA sense strand
gaauguauaauguccguaa

SEQ ID NO: 1649703 - RNA, 19 nt, Homo sapiens
  misc_RNA (1)...(19): siRNA sense strand
ggaagaggaggucaaagaa

SEQ ID NO: 1649704 - RNA, 19 nt, Homo sapiens
  misc_RNA (1)...(19): siRNA sense strand
ggaggauccuucaccuuga

SEQ ID NO: 1649705 - RNA, 19 nt, Homo sapiens
  misc_RNA (1)...(19): siRNA sense strand
caccuaaccuucugaugaa

SEQ ID NO: 1649706 - RNA, 19 nt, Homo sapiens
  misc_RNA (1)...(19): siRNA sense strand
ggauaaacuuuguaugucu

SEQ ID NO: 1649707 - RNA, 19 nt, Homo sapiens
  misc_RNA (1)...(19): siRNA sense strand
ugauagagguggcuacaga

SEQ ID NO: 1649708 - RNA, 19 nt, Homo sapiens
  misc_RNA (1)...(19): siRNA sense strand
gacaaacaguaucuuacaa

SEQ ID NO: 1649709 - RNA, 19 nt, Homo sapiens
  misc_RNA (1)...(19): siRNA sense strand
gccaagaccucacucaucu

SEQ ID NO: 1649710 - RNA, 19 nt, Homo sapiens
  misc_RNA (1)...(19): siRNA sense strand
ggaagcugauagcagauga

SEQ ID NO: 1649711 - RNA, 19 nt, Homo sapiens
  misc_RNA (1)...(19): siRNA sense strand
aagaauacauggucaauac

SEQ ID NO: 1649712 - RNA, 19 nt, Homo sapiens
  misc_RNA (1)...(19): siRNA sense strand
ccaccuaaccuucugauga

SEQ ID NO: 1649713 - RNA, 19 nt, Homo sapiens
  misc_RNA (1)...(19): siRNA sense strand
gcugauagcagaugaagug

SEQ ID NO: 1649714 - RNA, 19 nt, Homo sapiens
  misc_RNA (1)...(19): siRNA sense strand
gaaucaacuggucacauua

SEQ ID NO: 1649715 - RNA, 19 nt, Homo sapiens
  misc_RNA (1)...(19): siRNA sense strand
ugaucuagaugcuaugauu

SEQ ID NO: 1649716 - RNA, 19 nt, Homo sapiens
  misc_RNA (1)...(19): siRNA sense strand
caauaagcuuggugaucua

SEQ ID NO: 1649717 - RNA, 19 nt, Homo sapiens
  misc_RNA (1)...(19): siRNA sense strand
aagaggaggucaaagaaau

SEQ ID NO: 1649718 - RNA, 19 nt, Homo sapiens
  misc_RNA (1)...(19): siRNA sense strand
acaaggccauuaucacuga

SEQ ID NO: 1649719 - RNA, 19 nt, Homo sapiens
  misc_RNA (1)...(19): siRNA sense strand
uggaggaacuugaagaaau

SEQ ID NO: 1649720 - RNA, 19 nt, Homo sapiens
  misc_RNA (1)...(19): siRNA sense strand
gaaacuggaggaacuugaa

SEQ ID NO: 1649721 - RNA, 19 nt, Homo sapiens
  misc_RNA (1)...(19): siRNA sense strand
ccucacucaucucaauuua

SEQ ID NO: 1649722 - RNA, 19 nt, Homo sapiens
  misc_RNA (1)...(19): siRNA sense strand
ugaacuuccugcccgcuua

SEQ ID NO: 1649723 - RNA, 19 nt, Homo sapiens
  misc_RNA (1)...(19): siRNA sense strand
agacaucuguggcuauuuc

SEQ ID NO: 1649724 - RNA, 19 nt, Homo sapiens
  misc_RNA (1)...(19): siRNA sense strand
acaauaagcuuggugaucu

SEQ ID NO: 1649725 - RNA, 19 nt, Homo sapiens
  misc_RNA (1)...(19): siRNA sense strand
ugacauucccgaaguauug

SEQ ID NO: 1649726 - RNA, 19 nt, Homo sapiens
  misc_RNA (1)...(19): siRNA sense strand
agucuuaaccuuuccaaua

SEQ ID NO: 1649727 - RNA, 19 nt, Homo sapiens
  misc_RNA (1)...(19): siRNA sense strand
gcaaugcccugcgaucagu

SEQ ID NO: 1649728 - RNA, 19 nt, Homo sapiens
  misc_RNA (1)...(19): siRNA sense strand
caaaugugugcccuuguua

SEQ ID NO: 1649729 - RNA, 19 nt, Homo sapiens
  misc_RNA (1)...(19): siRNA sense strand
ucucaggaauguauaaugu

SEQ ID NO: 1649730 - RNA, 19 nt, Homo sapiens
  misc_RNA (1)...(19): siRNA sense strand
ggguagcucugaacggauu

SEQ ID NO: 1649731 - RNA, 19 nt, Homo sapiens
  misc_RNA (1)...(19): siRNA sense strand
gcacaaggccauuaucacu

SEQ ID NO: 1649732 - RNA, 19 nt, Homo sapiens
  misc_RNA (1)...(19): siRNA sense strand
aaacgaagaagaauacaug

SEQ ID NO: 1649733 - RNA, 19 nt, Homo sapiens
  misc_RNA (1)...(19): siRNA sense strand
gagcuagaccugacuggaa

SEQ ID NO: 1649734 - RNA, 19 nt, Homo sapiens
  misc_RNA (1)...(19): siRNA sense strand
caaauaacagccucacaga

SEQ ID NO: 1649735 - RNA, 19 nt, Homo sapiens
  misc_RNA (1)...(19): siRNA sense strand
gaagagacaaacaguaucu

SEQ ID NO: 1649736 - RNA, 19 nt, Homo sapiens
  misc_RNA (1)...(19): siRNA sense strand
cagccacgcuuuccgaaga

SEQ ID NO: 1649737 - RNA, 19 nt, Homo sapiens
  misc_RNA (1)...(19): siRNA sense strand
uaauagcagucuccggaaa

SEQ ID NO: 1649738 - RNA, 19 nt, Homo sapiens
  misc_RNA (1)...(19): siRNA sense strand
caguggaccucucguguug

SEQ ID NO: 1649739 - RNA, 19 nt, Homo sapiens
  misc_RNA (1)...(19): siRNA sense strand
aauauccgcuguuucaaga

SEQ ID NO: 1649740 - RNA, 19 nt, Homo sapiens
  misc_RNA (1)...(19): siRNA sense strand
aauaauauccgcuguuuca

SEQ ID NO: 1649741 - RNA, 19 nt, Homo sapiens
  misc_RNA (1)...(19): siRNA sense strand
guggaccucucguguugua

SEQ ID NO: 1649742 - RNA, 19 nt, Homo sapiens
  misc_RNA (1)...(19): siRNA sense strand
ugaagaaauugaucucagu

SEQ ID NO: 1649743 - RNA, 19 nt, Homo sapiens
  misc_RNA (1)...(19): siRNA sense strand
acaacggccuugacaguga

SEQ ID NO: 1649744 - RNA, 19 nt, Homo sapiens
  misc_RNA (1)...(19): siRNA sense strand
gcaaagguucaccaaguug

SEQ ID NO: 1649745 - RNA, 19 nt, Homo sapiens
  misc_RNA (1)...(19): siRNA sense strand
ggaaagccgcugccucugu

SEQ ID NO: 1649746 - RNA, 19 nt, Homo sapiens
  misc_RNA (1)...(19): siRNA sense strand
gcacaacuuacagacauuu

SEQ ID NO: 1649747 - RNA, 19 nt, Homo sapiens
  misc_RNA (1)...(19): siRNA sense strand
agagacaaacaguaucuua

SEQ ID NO: 1649748 - RNA, 19 nt, Homo sapiens
  misc_RNA (1)...(19): siRNA sense strand
gaucuagaugcuaugauuu

SEQ ID NO: 1649749 - RNA, 19 nt, Homo sapiens
  misc_RNA (1)...(19): siRNA sense strand
aagccagacuuacuacauu

SEQ ID NO: 1649750 - RNA, 19 nt, Homo sapiens
  misc_RNA (1)...(19): siRNA sense strand
gcuacaggcuuuaagaaaa

SEQ ID NO: 1649751 - RNA, 19 nt, Homo sapiens
  misc_RNA (1)...(19): siRNA sense strand
guggauaaacuuuguaugu

SEQ ID NO: 1649752 - RNA, 19 nt, Homo sapiens
  misc_RNA (1)...(19): siRNA sense strand
ccaaggagaaggagaaaca

SEQ ID NO: 1649753 - RNA, 19 nt, Homo sapiens
  misc_RNA (1)...(19): siRNA sense strand
aaacagcacaaggccauua

SEQ ID NO: 1649754 - RNA, 19 nt, Homo sapiens
  misc_RNA (1)...(19): siRNA sense strand
caucaugagcugugaagaa

SEQ ID NO: 1649755 - RNA, 19 nt, Homo sapiens
  misc_RNA (1)...(19): siRNA sense strand
ucccagagaucaagugugu

SEQ ID NO: 1649756 - RNA, 19 nt, Homo sapiens
  misc_RNA (1)...(19): siRNA sense strand
gcagaacccuagccuucca

SEQ ID NO: 1649757 - RNA, 19 nt, Homo sapiens
  misc_RNA (1)...(19): siRNA sense strand
ggucaacagccuccgauga

SEQ ID NO: 1649758 - RNA, 19 nt, Homo sapiens
  misc_RNA (1)...(19): siRNA sense strand
ggagucaugguuacacuga

SEQ ID NO: 1649759 - RNA, 19 nt, Homo sapiens
  misc_RNA (1)...(19): siRNA sense strand
cccuggaacuacugaauaa

SEQ ID NO: 1649760 - RNA, 19 nt, Homo sapiens
  misc_RNA (1)...(19): siRNA sense strand
gaacuugaagaaauugauc

SEQ ID NO: 1649761 - RNA, 19 nt, Homo sapiens
  misc_RNA (1)...(19): siRNA sense strand
guaauuaggaagcugauag

SEQ ID NO: 1649762 - RNA, 19 nt, Homo sapiens
  misc_RNA (1)...(19): siRNA sense strand
cauuaaacauguggaucua

SEQ ID NO: 1649763 - RNA, 19 nt, Homo sapiens
  misc_RNA (1)...(19): siRNA sense strand
cugcaaagguucaccaagu

SEQ ID NO: 1649764 - RNA, 19 nt, Homo sapiens
  misc_RNA (1)...(19): siRNA sense strand
agaccucacucaucucaau

SEQ ID NO: 1649765 - RNA, 19 nt, Homo sapiens
  misc_RNA (1)...(19): siRNA sense strand
guaaaggcaagaugcaguu

SEQ ID NO: 1649766 - RNA, 19 nt, Homo sapiens
  misc_RNA (1)...(19): siRNA sense strand
gaacauggugaucaaggau

SEQ ID NO: 1649767 - RNA, 19 nt, Homo sapiens
  misc_RNA (1)...(19): siRNA sense strand
cauggucaauacauucauu

SEQ ID NO: 1649768 - RNA, 19 nt, Homo sapiens
  misc_RNA (1)...(19): siRNA sense strand
gcugaaagccaucccaaca

SEQ ID NO: 1649769 - RNA, 19 nt, Homo sapiens
  misc_RNA (1)...(19): siRNA sense strand
ucaaauaugugaacuuccu

SEQ ID NO: 1649770 - RNA, 19 nt, Homo sapiens
  misc_RNA (1)...(19): siRNA sense strand
ccgaaguauuggagaaauu

SEQ ID NO: 1649771 - RNA, 19 nt, Homo sapiens
  misc_RNA (1)...(19): siRNA sense strand
uuuguuggauggaaacuuu

SEQ ID NO: 1649772 - RNA, 19 nt, Homo sapiens
  misc_RNA (1)...(19): siRNA sense strand
gccgaaagcuagaaguuuu

SEQ ID NO: 1649773 - RNA, 19 nt, Homo sapiens
  misc_RNA (1)...(19): siRNA sense strand
cagcagaggccagugauga

SEQ ID NO: 1649774 - RNA, 19 nt, Homo sapiens
  misc_RNA (1)...(19): siRNA sense strand
aaaccugccucccaaacug

SEQ ID NO: 1649775 - RNA, 19 nt, Homo sapiens
  misc_RNA (1)...(19): siRNA sense strand
guguggaccugagcuguaa

SEQ ID NO: 1649776 - RNA, 19 nt, Homo sapiens
  misc_RNA (1)...(19): siRNA sense strand
cgaggucuuucccgaaguu

SEQ ID NO: 1649777 - RNA, 19 nt, Homo sapiens
  misc_RNA (1)...(19): siRNA sense strand
auaaccgacuucagaguuu

SEQ ID NO: 1649778 - RNA, 19 nt, Homo sapiens
  misc_RNA (1)...(19): siRNA sense strand
ccgaagagacaaacaguau

SEQ ID NO: 1649779 - RNA, 19 nt, Homo sapiens
  misc_RNA (1)...(19): siRNA sense strand
caacaacgaucaugaauug

SEQ ID NO: 1649780 - RNA, 19 nt, Homo sapiens
  misc_RNA (1)...(19): siRNA sense strand
gaucuaagguugaacguaa

SEQ ID NO: 1649781 - RNA, 19 nt, Homo sapiens
  misc_RNA (1)...(19): siRNA sense strand
ggaaucaacuggucacauu

SEQ ID NO: 1649782 - RNA, 19 nt, Homo sapiens
  misc_RNA (1)...(19): siRNA sense strand
gaagucacauuaccagaaa

SEQ ID NO: 1649783 - RNA, 19 nt, Homo sapiens
  misc_RNA (1)...(19): siRNA sense strand
gaaauugacugcuguggau

SEQ ID NO: 1649784 - RNA, 19 nt, Homo sapiens
  misc_RNA (1)...(19): siRNA sense strand
caaauuaucuguccuacau

SEQ ID NO: 1649785 - RNA, 19 nt, Homo sapiens
  misc_RNA (1)...(19): siRNA sense strand
ggaggaacuugaagaaauu

SEQ ID NO: 1649786 - RNA, 19 nt, Homo sapiens
  misc_RNA (1)...(19): siRNA sense strand
gaacgccucugcgaacaaa

SEQ ID NO: 1649787 - RNA, 19 nt, Homo sapiens
  misc_RNA (1)...(19): siRNA sense strand
gugaauaacuucugugaca

SEQ ID NO: 1649788 - RNA, 19 nt, Homo sapiens
  misc_RNA (1)...(19): siRNA sense strand
uuaaugaacugcaaagguu

SEQ ID NO: 1649789 - RNA, 19 nt, Homo sapiens
  misc_RNA (1)...(19): siRNA sense strand
ucaaagaaaucaugaagca

SEQ ID NO: 1649790 - RNA, 19 nt, Homo sapiens
  misc_RNA (1)...(19): siRNA sense strand
gaagagcugaagaggauua

SEQ ID NO: 1649791 - RNA, 19 nt, Homo sapiens
  misc_RNA (1)...(19): siRNA sense strand
gauauuggccauaaucaaa

SEQ ID NO: 1649792 - RNA, 19 nt, Homo sapiens
  misc_RNA (1)...(19): siRNA sense strand
ugaauaauauccgcuguuu

SEQ ID NO: 1649793 - RNA, 19 nt, Homo sapiens
  misc_RNA (1)...(19): siRNA sense strand
cggcauggcuuccgagauu

SEQ ID NO: 1649794 - RNA, 19 nt, Homo sapiens
  misc_RNA (1)...(19): siRNA sense strand
gucuuaaccuuuccaauaa

SEQ ID NO: 1649795 - RNA, 19 nt, Homo sapiens
  misc_RNA (1)...(19): siRNA sense strand
aagaagagcugaagaggau

SEQ ID NO: 1649796 - RNA, 19 nt, Homo sapiens
  misc_RNA (1)...(19): siRNA sense strand
guccagaucuuacaucaug

SEQ ID NO: 1649797 - RNA, 19 nt, Homo sapiens
  misc_RNA (1)...(19): siRNA sense strand
guaaugagcuaagugaagu

SEQ ID NO: 1649798 - RNA, 19 nt, Homo sapiens
  misc_RNA (1)...(19): siRNA sense strand
uggaccagcugccagauua

SEQ ID NO: 1649799 - RNA, 19 nt, Homo sapiens
  misc_RNA (1)...(19): siRNA sense strand
gaagaggaggucaaagaaa

SEQ ID NO: 1649800 - RNA, 19 nt, Homo sapiens
  misc_RNA (1)...(19): siRNA sense strand
gaagaauacauggucaaua

SEQ ID NO: 1649801 - RNA, 19 nt, Homo sapiens
  misc_RNA (1)...(19): siRNA sense strand
ucaaggaaccgcuuagaaa

SEQ ID NO: 1649802 - RNA, 19 nt, Homo sapiens
  misc_RNA (1)...(19): siRNA sense strand
gaauguauaauguccguaa

SEQ ID NO: 1649803 - RNA, 19 nt, Homo sapiens
  misc_RNA (1)...(19): siRNA sense strand
ggaagaggaggucaaagaa

SEQ ID NO: 1649804 - RNA, 19 nt, Homo sapiens
  misc_RNA (1)...(19): siRNA sense strand
ggaggauccuucaccuuga

SEQ ID NO: 1649805 - RNA, 19 nt, Homo sapiens
  misc_RNA (1)...(19): siRNA sense strand
caccuaaccuucugaugaa

SEQ ID NO: 1649806 - RNA, 19 nt, Homo sapiens
  misc_RNA (1)...(19): siRNA sense strand
ggauaaacuuuguaugucu

SEQ ID NO: 1649807 - RNA, 19 nt, Homo sapiens
  misc_RNA (1)...(19): siRNA sense strand
ugauagagguggcuacaga

SEQ ID NO: 1649808 - RNA, 19 nt, Homo sapiens
  misc_RNA (1)...(19): siRNA sense strand
gacaaacaguaucuuacaa

SEQ ID NO: 1649809 - RNA, 19 nt, Homo sapiens
  misc_RNA (1)...(19): siRNA sense strand
gccaagaccucacucaucu

SEQ ID NO: 1649810 - RNA, 19 nt, Homo sapiens
  misc_RNA (1)...(19): siRNA sense strand
ggaagcugauagcagauga

SEQ ID NO: 1649811 - RNA, 19 nt, Homo sapiens
  misc_RNA (1)...(19): siRNA sense strand
aagaauacauggucaauac

SEQ ID NO: 1649812 - RNA, 19 nt, Homo sapiens
  misc_RNA (1)...(19): siRNA sense strand
ccaccuaaccuucugauga

SEQ ID NO: 1649813 - RNA, 19 nt, Homo sapiens
  misc_RNA (1)...(19): siRNA sense strand
gcugauagcagaugaagug

SEQ ID NO: 1649814 - RNA, 19 nt, Homo sapiens
  misc_RNA (1)...(19): siRNA sense strand
gaaucaacuggucacauua

SEQ ID NO: 1649815 - RNA, 19 nt, Homo sapiens
  misc_RNA (1)...(19): siRNA sense strand
ugaucuagaugcuaugauu

SEQ ID NO: 1649816 - RNA, 19 nt, Homo sapiens
  misc_RNA (1)...(19): siRNA sense strand
caauaagcuuggugaucua

SEQ ID NO: 1649817 - RNA, 19 nt, Homo sapiens
  misc_RNA (1)...(19): siRNA sense strand
aagaggaggucaaagaaau

SEQ ID NO: 1649818 - RNA, 19 nt, Homo sapiens
  misc_RNA (1)...(19): siRNA sense strand
acaaggccauuaucacuga

SEQ ID NO: 1649819 - RNA, 19 nt, Homo sapiens
  misc_RNA (1)...(19): siRNA sense strand
uggaggaacuugaagaaau

SEQ ID NO: 1649820 - RNA, 19 nt, Homo sapiens
  misc_RNA (1)...(19): siRNA sense strand
gaaacuggaggaacuugaa

SEQ ID NO: 1649821 - RNA, 19 nt, Homo sapiens
  misc_RNA (1)...(19): siRNA sense strand
ccucacucaucucaauuua

SEQ ID NO: 1649822 - RNA, 19 nt, Homo sapiens
  misc_RNA (1)...(19): siRNA sense strand
ugaacuuccugcccgcuua

SEQ ID NO: 1649823 - RNA, 19 nt, Homo sapiens
  misc_RNA (1)...(19): siRNA sense strand
agacaucuguggcuauuuc

SEQ ID NO: 1649824 - RNA, 19 nt, Homo sapiens
  misc_RNA (1)...(19): siRNA sense strand
acaauaagcuuggugaucu

SEQ ID NO: 1649825 - RNA, 19 nt, Homo sapiens
  misc_RNA (1)...(19): siRNA sense strand
ugacauucccgaaguauug

SEQ ID NO: 1649826 - RNA, 19 nt, Homo sapiens
  misc_RNA (1)...(19): siRNA sense strand
agucuuaaccuuuccaaua

SEQ ID NO: 1649827 - RNA, 19 nt, Homo sapiens
  misc_RNA (1)...(19): siRNA sense strand
gcaaugcccugcgaucagu

SEQ ID NO: 1649828 - RNA, 19 nt, Homo sapiens
  misc_RNA (1)...(19): siRNA sense strand
caaaugugugcccuuguua

SEQ ID NO: 1649829 - RNA, 19 nt, Homo sapiens
  misc_RNA (1)...(19): siRNA sense strand
ucucaggaauguauaaugu

SEQ ID NO: 1649830 - RNA, 19 nt, Homo sapiens
  misc_RNA (1)...(19): siRNA sense strand
gcacaaggccauuaucacu

SEQ ID NO: 1649831 - RNA, 19 nt, Homo sapiens
  misc_RNA (1)...(19): siRNA sense strand
aaacgaagaagaauacaug

SEQ ID NO: 1649832 - RNA, 19 nt, Homo sapiens
  misc_RNA (1)...(19): siRNA sense strand
gagcuagaccugacuggaa

SEQ ID NO: 1649833 - RNA, 19 nt, Homo sapiens
  misc_RNA (1)...(19): siRNA sense strand
ggguagcucugaacggauu

SEQ ID NO: 1649834 - RNA, 19 nt, Homo sapiens
  misc_RNA (1)...(19): siRNA sense strand
caaauaacagccucacaga

SEQ ID NO: 1649835 - RNA, 19 nt, Homo sapiens
  misc_RNA (1)...(19): siRNA sense strand
gaagagacaaacaguaucu

SEQ ID NO: 1649836 - RNA, 19 nt, Homo sapiens
  misc_RNA (1)...(19): siRNA sense strand
cagccacgcuuuccgaaga

SEQ ID NO: 1649837 - RNA, 19 nt, Homo sapiens
  misc_RNA (1)...(19): siRNA sense strand
uaauagcagucuccggaaa

SEQ ID NO: 1649838 - RNA, 19 nt, Homo sapiens
  misc_RNA (1)...(19): siRNA sense strand
caguggaccucucguguug

SEQ ID NO: 1649839 - RNA, 19 nt, Homo sapiens
  misc_RNA (1)...(19): siRNA sense strand
aauauccgcuguuucaaga

SEQ ID NO: 1649840 - RNA, 19 nt, Homo sapiens
  misc_RNA (1)...(19): siRNA sense strand
aauaauauccgcuguuuca

SEQ ID NO: 1649841 - RNA, 19 nt, Homo sapiens
  misc_RNA (1)...(19): siRNA sense strand
guggaccucucguguugua

SEQ ID NO: 1649842 - RNA, 19 nt, Homo sapiens
  misc_RNA (1)...(19): siRNA sense strand
ugaagaaauugaucucagu

SEQ ID NO: 1649843 - RNA, 19 nt, Homo sapiens
  misc_RNA (1)...(19): siRNA sense strand
acaacggccuugacaguga

SEQ ID NO: 1649844 - RNA, 19 nt, Homo sapiens
  misc_RNA (1)...(19): siRNA sense strand
gcaaagguucaccaaguug

SEQ ID NO: 1649845 - RNA, 19 nt, Homo sapiens
  misc_RNA (1)...(19): siRNA sense strand
ggaaagccgcugccucugu

SEQ ID NO: 1649846 - RNA, 19 nt, Homo sapiens
  misc_RNA (1)...(19): siRNA sense strand
gcacaacuuacagacauuu

SEQ ID NO: 1649847 - RNA, 19 nt, Homo sapiens
  misc_RNA (1)...(19): siRNA sense strand
agagacaaacaguaucuua

SEQ ID NO: 1649848 - RNA, 19 nt, Homo sapiens
  misc_RNA (1)...(19): siRNA sense strand
gaucuagaugcuaugauuu

SEQ ID NO: 1649849 - RNA, 19 nt, Homo sapiens
  misc_RNA (1)...(19): siRNA sense strand
aagccagacuuacuacauu

SEQ ID NO: 1649850 - RNA, 19 nt, Homo sapiens
  misc_RNA (1)...(19): siRNA sense strand
gcuacaggcuuuaagaaaa

SEQ ID NO: 1649851 - RNA, 19 nt, Homo sapiens
  misc_RNA (1)...(19): siRNA sense strand
guggauaaacuuuguaugu

SEQ ID NO: 1649852 - RNA, 19 nt, Homo sapiens
  misc_RNA (1)...(19): siRNA sense strand
ccaaggagaaggagaaaca

SEQ ID NO: 1649853 - RNA, 19 nt, Homo sapiens
  misc_RNA (1)...(19): siRNA sense strand
aaacagcacaaggccauua

SEQ ID NO: 1649854 - RNA, 19 nt, Homo sapiens
  misc_RNA (1)...(19): siRNA sense strand
caucaugagcugugaagaa

SEQ ID NO: 1649855 - RNA, 19 nt, Homo sapiens
  misc_RNA (1)...(19): siRNA sense strand
ucccagagaucaagugugu

SEQ ID NO: 1649856 - RNA, 19 nt, Homo sapiens
  misc_RNA (1)...(19): siRNA sense strand
gcagaacccuagccuucca

SEQ ID NO: 1649857 - RNA, 19 nt, Homo sapiens
  misc_RNA (1)...(19): siRNA sense strand
ggucaacagccuccgauga

SEQ ID NO: 1649858 - RNA, 19 nt, Homo sapiens
  misc_RNA (1)...(19): siRNA sense strand
ggagucaugguuacacuga

SEQ ID NO: 1649859 - RNA, 19 nt, Homo sapiens
  misc_RNA (1)...(19): siRNA sense strand
cccuggaacuacugaauaa

SEQ ID NO: 1649860 - RNA, 19 nt, Homo sapiens
  misc_RNA (1)...(19): siRNA sense strand
gaacuugaagaaauugauc

SEQ ID NO: 1649861 - RNA, 19 nt, Homo sapiens
  misc_RNA (1)...(19): siRNA sense strand
guaauuaggaagcugauag

SEQ ID NO: 1649862 - RNA, 19 nt, Homo sapiens
  misc_RNA (1)...(19): siRNA sense strand
cauuaaacauguggaucua

SEQ ID NO: 1649863 - RNA, 19 nt, Homo sapiens
  misc_RNA (1)...(19): siRNA sense strand
cugcaaagguucaccaagu

SEQ ID NO: 1649864 - RNA, 19 nt, Homo sapiens
  misc_RNA (1)...(19): siRNA sense strand
agaccucacucaucucaau

SEQ ID NO: 1649865 - RNA, 19 nt, Homo sapiens
  misc_RNA (1)...(19): siRNA sense strand
gaacauggugaucaaggau

SEQ ID NO: 1649866 - RNA, 19 nt, Homo sapiens
  misc_RNA (1)...(19): siRNA sense strand
cauggucaauacauucauu

SEQ ID NO: 1649867 - RNA, 19 nt, Homo sapiens
  misc_RNA (1)...(19): siRNA sense strand
gcugaaagccaucccaaca

SEQ ID NO: 1649868 - RNA, 19 nt, Homo sapiens
  misc_RNA (1)...(19): siRNA sense strand
ucaaauaugugaacuuccu

SEQ ID NO: 1649869 - RNA, 19 nt, Homo sapiens
  misc_RNA (1)...(19): siRNA sense strand
guaaaggcaagaugcaguu

SEQ ID NO: 1649870 - RNA, 19 nt, Homo sapiens
  misc_RNA (1)...(19): siRNA sense strand
ccgaaguauuggagaaauu

SEQ ID NO: 1649871 - RNA, 19 nt, Homo sapiens
  misc_RNA (1)...(19): siRNA sense strand
uuuguuggauggaaacuuu

SEQ ID NO: 1649872 - RNA, 19 nt, Homo sapiens
  misc_RNA (1)...(19): siRNA sense strand
gccgaaagcuagaaguuuu

SEQ ID NO: 1649873 - RNA, 19 nt, Homo sapiens
  misc_RNA (1)...(19): siRNA sense strand
cagcagaggccagugauga

SEQ ID NO: 1649874 - RNA, 19 nt, Homo sapiens
  misc_RNA (1)...(19): siRNA sense strand
aaaccugccucccaaacug

SEQ ID NO: 1649875 - RNA, 19 nt, Homo sapiens
  misc_RNA (1)...(19): siRNA sense strand
guguggaccugagcuguaa

SEQ ID NO: 1649876 - RNA, 19 nt, Homo sapiens
  misc_RNA (1)...(19): siRNA sense strand
cgaggucuuucccgaaguu

SEQ ID NO: 1649877 - RNA, 19 nt, Homo sapiens
  misc_RNA (1)...(19): siRNA sense strand
auaaccgacuucagaguuu

SEQ ID NO: 1649878 - RNA, 19 nt, Homo sapiens
  misc_RNA (1)...(19): siRNA sense strand
ccgaagagacaaacaguau

SEQ ID NO: 1649879 - RNA, 19 nt, Homo sapiens
  misc_RNA (1)...(19): siRNA sense strand
gcagugaucuuccugauga

SEQ ID NO: 1649880 - RNA, 19 nt, Homo sapiens
  misc_RNA (1)...(19): siRNA sense strand
gaaauaugcucaucaucgu

SEQ ID NO: 1649881 - RNA, 19 nt, Homo sapiens
  misc_RNA (1)...(19): siRNA sense strand
ccauuagaaucacucuuua

SEQ ID NO: 1649882 - RNA, 19 nt, Homo sapiens
  misc_RNA (1)...(19): siRNA sense strand
gcuccuaucuccuucauuc

SEQ ID NO: 1649883 - RNA, 19 nt, Homo sapiens
  misc_RNA (1)...(19): siRNA sense strand
gaggaaauaugcucaucau

SEQ ID NO: 1649884 - RNA, 19 nt, Homo sapiens
  misc_RNA (1)...(19): siRNA sense strand
ccaagcugcuggcuaagaa

SEQ ID NO: 1649885 - RNA, 19 nt, Homo sapiens
  misc_RNA (1)...(19): siRNA sense strand
ccagggcucuucccgauga

SEQ ID NO: 1649886 - RNA, 19 nt, Homo sapiens
  misc_RNA (1)...(19): siRNA sense strand
gaugagcguuggaggaaau

SEQ ID NO: 1649887 - RNA, 19 nt, Homo sapiens
  misc_RNA (1)...(19): siRNA sense strand
gccauuagaaucacucuuu

SEQ ID NO: 1649888 - RNA, 19 nt, Homo sapiens
  misc_RNA (1)...(19): siRNA sense strand
gaauuggagcuggccauua

SEQ ID NO: 1649889 - RNA, 19 nt, Homo sapiens
  misc_RNA (1)...(19): siRNA sense strand
gagcuggccauuagaauca

SEQ ID NO: 1649890 - RNA, 19 nt, Homo sapiens
  misc_RNA (1)...(19): siRNA sense strand
gcaaggcgguuuccuaccu

SEQ ID NO: 1649891 - RNA, 19 nt, Homo sapiens
  misc_RNA (1)...(19): siRNA sense strand
gugaguguguccacgcuaa

SEQ ID NO: 1649892 - RNA, 19 nt, Homo sapiens
  misc_RNA (1)...(19): siRNA sense strand
gaauguugcuggugaucgu

SEQ ID NO: 1649893 - RNA, 19 nt, Homo sapiens
  misc_RNA (1)...(19): siRNA sense strand
cuacuuagggcuucgcuuu

SEQ ID NO: 1649894 - RNA, 19 nt, Homo sapiens
  misc_RNA (1)...(19): siRNA sense strand
uguguugguugccaguuua

SEQ ID NO: 1649895 - RNA, 19 nt, Homo sapiens
  misc_RNA (1)...(19): siRNA sense strand
aauuggagcuggccauuag

SEQ ID NO: 1649896 - RNA, 19 nt, Homo sapiens
  misc_RNA (1)...(19): siRNA sense strand
ggaggaaauaugcucauca

SEQ ID NO: 1649897 - RNA, 19 nt, Homo sapiens
  misc_RNA (1)...(19): siRNA sense strand
caugggcacauucaucuuu

SEQ ID NO: 1649898 - RNA, 19 nt, Homo sapiens
  misc_RNA (1)...(19): siRNA sense strand
gcuucgcuguccaggcuua

SEQ ID NO: 1649899 - RNA, 19 nt, Homo sapiens
  misc_RNA (1)...(19): siRNA sense strand
ccugaggacugucaccaau

SEQ ID NO: 1649900 - RNA, 19 nt, Homo sapiens
  misc_RNA (1)...(19): siRNA sense strand
ggagcuggccauuagaauc

SEQ ID NO: 1649901 - RNA, 19 nt, Homo sapiens
  misc_RNA (1)...(19): siRNA sense strand
cuucugcucuuguucuuca

SEQ ID NO: 1649902 - RNA, 19 nt, Homo sapiens
  misc_RNA (1)...(19): siRNA sense strand
cguguacacugucgugcaa

SEQ ID NO: 1649903 - RNA, 19 nt, Homo sapiens
  misc_RNA (1)...(19): siRNA sense strand
gagcguuggaggaaauaug

SEQ ID NO: 1649904 - RNA, 19 nt, Homo sapiens
  misc_RNA (1)...(19): siRNA sense strand
ucauucacuugcugagcua

SEQ ID NO: 1649905 - RNA, 19 nt, Homo sapiens
  misc_RNA (1)...(19): siRNA sense strand
ugaggacugucaccaaugc

SEQ ID NO: 1649906 - RNA, 19 nt, Homo sapiens
  misc_RNA (1)...(19): siRNA sense strand
acuuagggcuucgcuuuga

SEQ ID NO: 1649907 - RNA, 19 nt, Homo sapiens
  misc_RNA (1)...(19): siRNA sense strand
ccaaucucaugggcacauu

SEQ ID NO: 1649908 - RNA, 19 nt, Homo sapiens
  misc_RNA (1)...(19): siRNA sense strand
gcgcguggugcgaauguug

SEQ ID NO: 1649909 - RNA, 19 nt, Homo sapiens
  misc_RNA (1)...(19): siRNA sense strand
gcuuugacggcgacaguga

SEQ ID NO: 1649910 - RNA, 19 nt, Homo sapiens
  misc_RNA (1)...(19): siRNA sense strand
cuucaugcaccgucgcuuu

SEQ ID NO: 1649911 - RNA, 19 nt, Homo sapiens
  misc_RNA (1)...(19): siRNA sense strand
ugaagagacuccaauguaa

SEQ ID NO: 1649912 - RNA, 19 nt, Homo sapiens
  misc_RNA (1)...(19): siRNA sense strand
gcucuacacuguccuguuu

SEQ ID NO: 1649913 - RNA, 19 nt, Homo sapiens
  misc_RNA (1)...(19): siRNA sense strand
ggucuagucuggcaugaaa

SEQ ID NO: 1649914 - RNA, 19 nt, Homo sapiens
  misc_RNA (1)...(19): siRNA sense strand
cuucagaaauuccuugaua

SEQ ID NO: 1649915 - RNA, 19 nt, Homo sapiens
  misc_RNA (1)...(19): siRNA sense strand
caaguuaccuccgucauau

SEQ ID NO: 1649916 - RNA, 19 nt, Homo sapiens
  misc_RNA (1)...(19): siRNA sense strand
gggcuaagauucucucugu

SEQ ID NO: 1649917 - RNA, 19 nt, Homo sapiens
  misc_RNA (1)...(19): siRNA sense strand
acaagaaugugaagaaaug

SEQ ID NO: 1649918 - RNA, 19 nt, Homo sapiens
  misc_RNA (1)...(19): siRNA sense strand
uuacaucugucaagucauu

SEQ ID NO: 1649919 - RNA, 19 nt, Homo sapiens
  misc_RNA (1)...(19): siRNA sense strand
gcucuuuccuuaaaucaga

SEQ ID NO: 1649920 - RNA, 19 nt, Homo sapiens
  misc_RNA (1)...(19): siRNA sense strand
gaucuucucaugauucuga

SEQ ID NO: 1649921 - RNA, 19 nt, Homo sapiens
  misc_RNA (1)...(19): siRNA sense strand
gcaaguccuucagaaauuc

SEQ ID NO: 1649922 - RNA, 19 nt, Homo sapiens
  misc_RNA (1)...(19): siRNA sense strand
gagacaagaaugugaagaa

SEQ ID NO: 1649923 - RNA, 19 nt, Homo sapiens
  misc_RNA (1)...(19): siRNA sense strand
gcuaagauucucucuguug

SEQ ID NO: 1649924 - RNA, 19 nt, Homo sapiens
  misc_RNA (1)...(19): siRNA sense strand
agacaagaaugugaagaaa

SEQ ID NO: 1649925 - RNA, 19 nt, Homo sapiens
  misc_RNA (1)...(19): siRNA sense strand
caaauggccuggcgaugag

SEQ ID NO: 1649926 - RNA, 19 nt, Homo sapiens
  misc_RNA (1)...(19): siRNA sense strand
caagucauuuucuggauua

SEQ ID NO: 1649927 - RNA, 19 nt, Homo sapiens
  misc_RNA (1)...(19): siRNA sense strand
ggaacaggaccacugagaa

SEQ ID NO: 1649928 - RNA, 19 nt, Homo sapiens
  misc_RNA (1)...(19): siRNA sense strand
ucaaguuaccuccgucaua

SEQ ID NO: 1649929 - RNA, 19 nt, Homo sapiens
  misc_RNA (1)...(19): siRNA sense strand
gaacaggaccacugagaac

SEQ ID NO: 1649930 - RNA, 19 nt, Homo sapiens
  misc_RNA (1)...(19): siRNA sense strand
agucuggcaugaaauagua

SEQ ID NO: 1649931 - RNA, 19 nt, Homo sapiens
  misc_RNA (1)...(19): siRNA sense strand
gaacacagucauuucugau

SEQ ID NO: 1649932 - RNA, 19 nt, Homo sapiens
  misc_RNA (1)...(19): siRNA sense strand
gcauucauguucuuacucu

SEQ ID NO: 1649933 - RNA, 19 nt, Homo sapiens
  misc_RNA (1)...(19): siRNA sense strand
gaagaccaccaggccauuu

SEQ ID NO: 1649934 - RNA, 19 nt, Homo sapiens
  misc_RNA (1)...(19): siRNA sense strand
caggaccacugagaacuuu

SEQ ID NO: 1649935 - RNA, 19 nt, Homo sapiens
  misc_RNA (1)...(19): siRNA sense strand
ugcaaguccuucagaaauu

SEQ ID NO: 1649936 - RNA, 19 nt, Homo sapiens
  misc_RNA (1)...(19): siRNA sense strand
uggauccguucaucuauuu

SEQ ID NO: 1649937 - RNA, 19 nt, Homo sapiens
  misc_RNA (1)...(19): siRNA sense strand
ugauaaguaugcugaagug

SEQ ID NO: 1649938 - RNA, 19 nt, Homo sapiens
  misc_RNA (1)...(19): siRNA sense strand
acaaauggccuggcgauga

SEQ ID NO: 1649939 - RNA, 19 nt, Homo sapiens
  misc_RNA (1)...(19): siRNA sense strand
ggaugguggugacccaaau

SEQ ID NO: 1649940 - RNA, 19 nt, Homo sapiens
  misc_RNA (1)...(19): siRNA sense strand
uaaaucagaguucggucua

SEQ ID NO: 1649941 - RNA, 19 nt, Homo sapiens
  misc_RNA (1)...(19): siRNA sense strand
caaaugaagagacuccaau

SEQ ID NO: 1649942 - RNA, 19 nt, Homo sapiens
  misc_RNA (1)...(19): siRNA sense strand
cauuaucauugcuguauuc

SEQ ID NO: 1649943 - RNA, 19 nt, Homo sapiens
  misc_RNA (1)...(19): siRNA sense strand
aauuacaucugucaaguca

SEQ ID NO: 1649944 - RNA, 19 nt, Homo sapiens
  misc_RNA (1)...(19): siRNA sense strand
uuucaaauccggaguaaau

SEQ ID NO: 1649945 - RNA, 19 nt, Homo sapiens
  misc_RNA (1)...(19): siRNA sense strand
gaaaauacucuguucuaug

SEQ ID NO: 1649946 - RNA, 19 nt, Homo sapiens
  misc_RNA (1)...(19): siRNA sense strand
cuaagauucucucuguugu

SEQ ID NO: 1649947 - RNA, 19 nt, Homo sapiens
  misc_RNA (1)...(19): siRNA sense strand
aauacucuguucuauguga

SEQ ID NO: 1649948 - RNA, 19 nt, Homo sapiens
  misc_RNA (1)...(19): siRNA sense strand
guaccggucauacguaaga

SEQ ID NO: 1649949 - RNA, 19 nt, Homo sapiens
  misc_RNA (1)...(19): siRNA sense strand
gauucucucuguugucauc

SEQ ID NO: 1649950 - RNA, 19 nt, Homo sapiens
  misc_RNA (1)...(19): siRNA sense strand
uuucugaucuucucaugau

SEQ ID NO: 1649951 - RNA, 19 nt, Homo sapiens
  misc_RNA (1)...(19): siRNA sense strand
caucugggcauucauguuc

SEQ ID NO: 1649952 - RNA, 19 nt, Homo sapiens
  misc_RNA (1)...(19): siRNA sense strand
augaagagacuccaaugua

SEQ ID NO: 1649953 - RNA, 19 nt, Homo sapiens
  misc_RNA (1)...(19): siRNA sense strand
aaggugaacgucaaaguuu

SEQ ID NO: 1649954 - RNA, 19 nt, Homo sapiens
  misc_RNA (1)...(19): siRNA sense strand
gacaagaaugugaagaaau

SEQ ID NO: 1649955 - RNA, 19 nt, Homo sapiens
  misc_RNA (1)...(19): siRNA sense strand
gggaacaggaccacugaga

SEQ ID NO: 1649956 - RNA, 19 nt, Homo sapiens
  misc_RNA (1)...(19): siRNA sense strand
ccaaacccgggaugucuuu

SEQ ID NO: 1649957 - RNA, 19 nt, Homo sapiens
  misc_RNA (1)...(19): siRNA sense strand
cuuaagaacacagucauuu

SEQ ID NO: 1649958 - RNA, 19 nt, Homo sapiens
  misc_RNA (1)...(19): siRNA sense strand
gaacgucaaaguuuucauu

SEQ ID NO: 1649959 - RNA, 19 nt, Homo sapiens
  misc_RNA (1)...(19): siRNA sense strand
aaaggugaacgucaaaguu

SEQ ID NO: 1649960 - RNA, 19 nt, Homo sapiens
  misc_RNA (1)...(19): siRNA sense strand
gaacgagggguguagguaa

SEQ ID NO: 1649961 - RNA, 19 nt, Homo sapiens
  misc_RNA (1)...(19): siRNA sense strand
aagauucucucuguuguca

SEQ ID NO: 1649962 - RNA, 19 nt, Homo sapiens
  misc_RNA (1)...(19): siRNA sense strand
ugacugcacugcugaaaau

SEQ ID NO: 1649963 - RNA, 19 nt, Homo sapiens
  misc_RNA (1)...(19): siRNA sense strand
cgagagacaagaaugugaa

SEQ ID NO: 1649964 - RNA, 19 nt, Homo sapiens
  misc_RNA (1)...(19): siRNA sense strand
caaauccggaguaaaucaa

SEQ ID NO: 1649965 - RNA, 19 nt, Homo sapiens
  misc_RNA (1)...(19): siRNA sense strand
acacagucauuucugaucu

SEQ ID NO: 1649966 - RNA, 19 nt, Homo sapiens
  misc_RNA (1)...(19): siRNA sense strand
ucuagucuggcaugaaaua

SEQ ID NO: 1649967 - RNA, 19 nt, Homo sapiens
  misc_RNA (1)...(19): siRNA sense strand
gggcauucauguucuuacu

SEQ ID NO: 1649968 - RNA, 19 nt, Homo sapiens
  misc_RNA (1)...(19): siRNA sense strand
cuaacaugauucugaccaa

SEQ ID NO: 1649969 - RNA, 19 nt, Homo sapiens
  misc_RNA (1)...(19): siRNA sense strand
ucaaauccggaguaaauca

SEQ ID NO: 1649970 - RNA, 19 nt, Homo sapiens
  misc_RNA (1)...(19): siRNA sense strand
uuaccuccgucauauuuua

SEQ ID NO: 1649971 - RNA, 19 nt, Homo sapiens
  misc_RNA (1)...(19): siRNA sense strand
gguaaaguccccaggaaaa

SEQ ID NO: 1649972 - RNA, 19 nt, Homo sapiens
  misc_RNA (1)...(19): siRNA sense strand
gaacuguaccggucauacg

SEQ ID NO: 1649973 - RNA, 19 nt, Homo sapiens
  misc_RNA (1)...(19): siRNA sense strand
ccaacaggcagccgagaga

SEQ ID NO: 1649974 - RNA, 19 nt, Homo sapiens
  misc_RNA (1)...(19): siRNA sense strand
aagaccaccaggccauuua

SEQ ID NO: 1649975 - RNA, 19 nt, Homo sapiens
  misc_RNA (1)...(19): siRNA sense strand
ucagaaauuccuugauaag

SEQ ID NO: 1649976 - RNA, 19 nt, Homo sapiens
  misc_RNA (1)...(19): siRNA sense strand
cuggauccguucaucuauu

SEQ ID NO: 1649977 - RNA, 19 nt, Homo sapiens
  misc_RNA (1)...(19): siRNA sense strand
guugucaucugggcauuca

SEQ ID NO: 1649978 - RNA, 19 nt, Homo sapiens
  misc_RNA (1)...(19): siRNA sense strand
gaccaccaggccauuuaaa

SEQ ID NO: 1649979 - RNA, 19 nt, Homo sapiens
  misc_RNA (1)...(19): siRNA sense strand
uuaagaacacagucauuuc

SEQ ID NO: 1649980 - RNA, 19 nt, Homo sapiens
  misc_RNA (1)...(19): siRNA sense strand
guggugacccaaaugaaga

SEQ ID NO: 1649981 - RNA, 19 nt, Homo sapiens
  misc_RNA (1)...(19): siRNA sense strand
gccuggauccguucaucua

SEQ ID NO: 1649982 - RNA, 19 nt, Homo sapiens
  misc_RNA (1)...(19): siRNA sense strand
cgucaaaguuuucauuauc

SEQ ID NO: 1649983 - RNA, 19 nt, Homo sapiens
  misc_RNA (1)...(19): siRNA sense strand
cacagucauuucugaucuu

SEQ ID NO: 1649984 - RNA, 19 nt, Homo sapiens
  misc_RNA (1)...(19): siRNA sense strand
cagaaauuccuugauaagu

SEQ ID NO: 1649985 - RNA, 19 nt, Homo sapiens
  misc_RNA (1)...(19): siRNA sense strand
uaaaacauccaaccccaaa

SEQ ID NO: 1649986 - RNA, 19 nt, Homo sapiens
  misc_RNA (1)...(19): siRNA sense strand
gaugaggauuuucuuucaa

SEQ ID NO: 1649987 - RNA, 19 nt, Homo sapiens
  misc_RNA (1)...(19): siRNA sense strand
ccaaaugaagagacuccaa

SEQ ID NO: 1649988 - RNA, 19 nt, Homo sapiens
  misc_RNA (1)...(19): siRNA sense strand
gguggugacccaaaugaag

SEQ ID NO: 1649989 - RNA, 19 nt, Homo sapiens
  misc_RNA (1)...(19): siRNA sense strand
cuguaccggucauacguaa

SEQ ID NO: 1649990 - RNA, 19 nt, Homo sapiens
  misc_RNA (1)...(19): siRNA sense strand
aaucagaguucggucuagu

SEQ ID NO: 1649991 - RNA, 19 nt, Homo sapiens
  misc_RNA (1)...(19): siRNA sense strand
ugacccaaaugaagagacu

SEQ ID NO: 1649992 - RNA, 19 nt, Homo sapiens
  misc_RNA (1)...(19): siRNA sense strand
aguuaccuccgucauauuu

SEQ ID NO: 1649993 - RNA, 19 nt, Homo sapiens
  misc_RNA (1)...(19): siRNA sense strand
uugcaaguccuucagaaau

SEQ ID NO: 1649994 - RNA, 19 nt, Homo sapiens
  misc_RNA (1)...(19): siRNA sense strand
gcacucugugguuaacuuc

SEQ ID NO: 1649995 - RNA, 19 nt, Homo sapiens
  misc_RNA (1)...(19): siRNA sense strand
ggccuggcgaugaggauuu

SEQ ID NO: 1649996 - RNA, 19 nt, Homo sapiens
  misc_RNA (1)...(19): siRNA sense strand
ucaccucugcgccugguaa

SEQ ID NO: 1649997 - RNA, 19 nt, Homo sapiens
  misc_RNA (1)...(19): siRNA sense strand
ucauguucuuacucucuuu

SEQ ID NO: 1649998 - RNA, 19 nt, Homo sapiens
  misc_RNA (1)...(19): siRNA sense strand
cgaugaggauuuucuuuca

SEQ ID NO: 1649999 - RNA, 19 nt, Homo sapiens
  misc_RNA (1)...(19): siRNA sense strand
aaaugaagagacuccaaug

SEQ ID NO: 1650000 - RNA, 19 nt, Homo sapiens
  misc_RNA (1)...(19): siRNA sense strand
ucccacugcucuacacugu

SEQ ID NO: 1650001 - RNA, 19 nt, Homo sapiens
  misc_RNA (1)...(19): siRNA sense strand
cauuucugaucuucucaug

SEQ ID NO: 1650002 - RNA, 19 nt, Homo sapiens
  misc_RNA (1)...(19): siRNA sense strand
uccugggacugauaacuau

SEQ ID NO: 1650003 - RNA, 19 nt, Homo sapiens
  misc_RNA (1)...(19): siRNA sense strand
gauucugacuuuuccauuc

SEQ ID NO: 1650004 - RNA, 19 nt, Homo sapiens
  misc_RNA (1)...(19): siRNA sense strand
aaagaacuguaccggucau

SEQ ID NO: 1650005 - RNA, 19 nt, Homo sapiens
  misc_RNA (1)...(19): siRNA sense strand
ggcuaagauucucucuguu

SEQ ID NO: 1650006 - RNA, 19 nt, Homo sapiens
  misc_RNA (1)...(19): siRNA sense strand
ugaagagacuccaauguaa

SEQ ID NO: 1650007 - RNA, 19 nt, Homo sapiens
  misc_RNA (1)...(19): siRNA sense strand
gcucuacacuguccuguuu

SEQ ID NO: 1650008 - RNA, 19 nt, Homo sapiens
  misc_RNA (1)...(19): siRNA sense strand
ggucuagucuggcaugaaa

SEQ ID NO: 1650009 - RNA, 19 nt, Homo sapiens
  misc_RNA (1)...(19): siRNA sense strand
cuucagaaauuccuugaua

SEQ ID NO: 1650010 - RNA, 19 nt, Homo sapiens
  misc_RNA (1)...(19): siRNA sense strand
caaguuaccuccgucauau

SEQ ID NO: 1650011 - RNA, 19 nt, Homo sapiens
  misc_RNA (1)...(19): siRNA sense strand
gggcuaagauucucucugu

SEQ ID NO: 1650012 - RNA, 19 nt, Homo sapiens
  misc_RNA (1)...(19): siRNA sense strand
acaagaaugugaagaaaug

SEQ ID NO: 1650013 - RNA, 19 nt, Homo sapiens
  misc_RNA (1)...(19): siRNA sense strand
uuacaucugucaagucauu

SEQ ID NO: 1650014 - RNA, 19 nt, Homo sapiens
  misc_RNA (1)...(19): siRNA sense strand
gcucuuuccuuaaaucaga

SEQ ID NO: 1650015 - RNA, 19 nt, Homo sapiens
  misc_RNA (1)...(19): siRNA sense strand
gaucuucucaugauucuga

SEQ ID NO: 1650016 - RNA, 19 nt, Homo sapiens
  misc_RNA (1)...(19): siRNA sense strand
gcaaguccuucagaaauuc

SEQ ID NO: 1650017 - RNA, 19 nt, Homo sapiens
  misc_RNA (1)...(19): siRNA sense strand
gagacaagaaugugaagaa

SEQ ID NO: 1650018 - RNA, 19 nt, Homo sapiens
  misc_RNA (1)...(19): siRNA sense strand
gcuaagauucucucuguug

SEQ ID NO: 1650019 - RNA, 19 nt, Homo sapiens
  misc_RNA (1)...(19): siRNA sense strand
agacaagaaugugaagaaa

SEQ ID NO: 1650020 - RNA, 19 nt, Homo sapiens
  misc_RNA (1)...(19): siRNA sense strand
caaauggccuggcgaugag

SEQ ID NO: 1650021 - RNA, 19 nt, Homo sapiens
  misc_RNA (1)...(19): siRNA sense strand
caagucauuuucuggauua

SEQ ID NO: 1650022 - RNA, 19 nt, Homo sapiens
  misc_RNA (1)...(19): siRNA sense strand
ggaacaggaccacugagaa

SEQ ID NO: 1650023 - RNA, 19 nt, Homo sapiens
  misc_RNA (1)...(19): siRNA sense strand
ucaaguuaccuccgucaua

SEQ ID NO: 1650024 - RNA, 19 nt, Homo sapiens
  misc_RNA (1)...(19): siRNA sense strand
gaacaggaccacugagaac

SEQ ID NO: 1650025 - RNA, 19 nt, Homo sapiens
  misc_RNA (1)...(19): siRNA sense strand
agucuggcaugaaauagua

SEQ ID NO: 1650026 - RNA, 19 nt, Homo sapiens
  misc_RNA (1)...(19): siRNA sense strand
gaacacagucauuucugau

SEQ ID NO: 1650027 - RNA, 19 nt, Homo sapiens
  misc_RNA (1)...(19): siRNA sense strand
gcauucauguucuuacucu

SEQ ID NO: 1650028 - RNA, 19 nt, Homo sapiens
  misc_RNA (1)...(19): siRNA sense strand
gaagaccaccaggccauuu

SEQ ID NO: 1650029 - RNA, 19 nt, Homo sapiens
  misc_RNA (1)...(19): siRNA sense strand
caggaccacugagaacuuu

SEQ ID NO: 1650030 - RNA, 19 nt, Homo sapiens
  misc_RNA (1)...(19): siRNA sense strand
ugcaaguccuucagaaauu

SEQ ID NO: 1650031 - RNA, 19 nt, Homo sapiens
  misc_RNA (1)...(19): siRNA sense strand
uggauccguucaucuauuu

SEQ ID NO: 1650032 - RNA, 19 nt, Homo sapiens
  misc_RNA (1)...(19): siRNA sense strand
ugauaaguaugcugaagug

SEQ ID NO: 1650033 - RNA, 19 nt, Homo sapiens
  misc_RNA (1)...(19): siRNA sense strand
acaaauggccuggcgauga

SEQ ID NO: 1650034 - RNA, 19 nt, Homo sapiens
  misc_RNA (1)...(19): siRNA sense strand
ggaugguggugacccaaau

SEQ ID NO: 1650035 - RNA, 19 nt, Homo sapiens
  misc_RNA (1)...(19): siRNA sense strand
uaaaucagaguucggucua

SEQ ID NO: 1650036 - RNA, 19 nt, Homo sapiens
  misc_RNA (1)...(19): siRNA sense strand
caaaugaagagacuccaau

SEQ ID NO: 1650037 - RNA, 19 nt, Homo sapiens
  misc_RNA (1)...(19): siRNA sense strand
cauuaucauugcuguauuc

SEQ ID NO: 1650038 - RNA, 19 nt, Homo sapiens
  misc_RNA (1)...(19): siRNA sense strand
aauuacaucugucaaguca

SEQ ID NO: 1650039 - RNA, 19 nt, Homo sapiens
  misc_RNA (1)...(19): siRNA sense strand
uuucaaauccggaguaaau

SEQ ID NO: 1650040 - RNA, 19 nt, Homo sapiens
  misc_RNA (1)...(19): siRNA sense strand
gaaaauacucuguucuaug

SEQ ID NO: 1650041 - RNA, 19 nt, Homo sapiens
  misc_RNA (1)...(19): siRNA sense strand
cuaagauucucucuguugu

SEQ ID NO: 1650042 - RNA, 19 nt, Homo sapiens
  misc_RNA (1)...(19): siRNA sense strand
aauacucuguucuauguga

SEQ ID NO: 1650043 - RNA, 19 nt, Homo sapiens
  misc_RNA (1)...(19): siRNA sense strand
guaccggucauacguaaga

SEQ ID NO: 1650044 - RNA, 19 nt, Homo sapiens
  misc_RNA (1)...(19): siRNA sense strand
gauucucucuguugucauc

SEQ ID NO: 1650045 - RNA, 19 nt, Homo sapiens
  misc_RNA (1)...(19): siRNA sense strand
uuucugaucuucucaugau

SEQ ID NO: 1650046 - RNA, 19 nt, Homo sapiens
  misc_RNA (1)...(19): siRNA sense strand
caucugggcauucauguuc

SEQ ID NO: 1650047 - RNA, 19 nt, Homo sapiens
  misc_RNA (1)...(19): siRNA sense strand
augaagagacuccaaugua

SEQ ID NO: 1650048 - RNA, 19 nt, Homo sapiens
  misc_RNA (1)...(19): siRNA sense strand
aaggugaacgucaaaguuu

SEQ ID NO: 1650049 - RNA, 19 nt, Homo sapiens
  misc_RNA (1)...(19): siRNA sense strand
gacaagaaugugaagaaau

SEQ ID NO: 1650050 - RNA, 19 nt, Homo sapiens
  misc_RNA (1)...(19): siRNA sense strand
gggaacaggaccacugaga

SEQ ID NO: 1650051 - RNA, 19 nt, Homo sapiens
  misc_RNA (1)...(19): siRNA sense strand
ccaaacccgggaugucuuu

SEQ ID NO: 1650052 - RNA, 19 nt, Homo sapiens
  misc_RNA (1)...(19): siRNA sense strand
cuuaagaacacagucauuu

SEQ ID NO: 1650053 - RNA, 19 nt, Homo sapiens
  misc_RNA (1)...(19): siRNA sense strand
gaacgucaaaguuuucauu

SEQ ID NO: 1650054 - RNA, 19 nt, Homo sapiens
  misc_RNA (1)...(19): siRNA sense strand
aaaggugaacgucaaaguu

SEQ ID NO: 1650055 - RNA, 19 nt, Homo sapiens
  misc_RNA (1)...(19): siRNA sense strand
gaacgagggguguagguaa

SEQ ID NO: 1650056 - RNA, 19 nt, Homo sapiens
  misc_RNA (1)...(19): siRNA sense strand
aagauucucucuguuguca

SEQ ID NO: 1650057 - RNA, 19 nt, Homo sapiens
  misc_RNA (1)...(19): siRNA sense strand
ugacugcacugcugaaaau

SEQ ID NO: 1650058 - RNA, 19 nt, Homo sapiens
  misc_RNA (1)...(19): siRNA sense strand
cgagagacaagaaugugaa

SEQ ID NO: 1650059 - RNA, 19 nt, Homo sapiens
  misc_RNA (1)...(19): siRNA sense strand
caaauccggaguaaaucaa

SEQ ID NO: 1650060 - RNA, 19 nt, Homo sapiens
  misc_RNA (1)...(19): siRNA sense strand
acacagucauuucugaucu

SEQ ID NO: 1650061 - RNA, 19 nt, Homo sapiens
  misc_RNA (1)...(19): siRNA sense strand
ucuagucuggcaugaaaua

SEQ ID NO: 1650062 - RNA, 19 nt, Homo sapiens
  misc_RNA (1)...(19): siRNA sense strand
gggcauucauguucuuacu

SEQ ID NO: 1650063 - RNA, 19 nt, Homo sapiens
  misc_RNA (1)...(19): siRNA sense strand
cuaacaugauucugaccaa

SEQ ID NO: 1650064 - RNA, 19 nt, Homo sapiens
  misc_RNA (1)...(19): siRNA sense strand
ucaaauccggaguaaauca

SEQ ID NO: 1650065 - RNA, 19 nt, Homo sapiens
  misc_RNA (1)...(19): siRNA sense strand
uuaccuccgucauauuuua

SEQ ID NO: 1650066 - RNA, 19 nt, Homo sapiens
  misc_RNA (1)...(19): siRNA sense strand
gguaaaguccccaggaaaa

SEQ ID NO: 1650067 - RNA, 19 nt, Homo sapiens
  misc_RNA (1)...(19): siRNA sense strand
gaacuguaccggucauacg

SEQ ID NO: 1650068 - RNA, 19 nt, Homo sapiens
  misc_RNA (1)...(19): siRNA sense strand
ccaacaggcagccgagaga

SEQ ID NO: 1650069 - RNA, 19 nt, Homo sapiens
  misc_RNA (1)...(19): siRNA sense strand
aagaccaccaggccauuua

SEQ ID NO: 1650070 - RNA, 19 nt, Homo sapiens
  misc_RNA (1)...(19): siRNA sense strand
ucagaaauuccuugauaag

SEQ ID NO: 1650071 - RNA, 19 nt, Homo sapiens
  misc_RNA (1)...(19): siRNA sense strand
cuggauccguucaucuauu

SEQ ID NO: 1650072 - RNA, 19 nt, Homo sapiens
  misc_RNA (1)...(19): siRNA sense strand
guugucaucugggcauuca

SEQ ID NO: 1650073 - RNA, 19 nt, Homo sapiens
  misc_RNA (1)...(19): siRNA sense strand
gaccaccaggccauuuaaa

SEQ ID NO: 1650074 - RNA, 19 nt, Homo sapiens
  misc_RNA (1)...(19): siRNA sense strand
uuaagaacacagucauuuc

SEQ ID NO: 1650075 - RNA, 19 nt, Homo sapiens
  misc_RNA (1)...(19): siRNA sense strand
guggugacccaaaugaaga

SEQ ID NO: 1650076 - RNA, 19 nt, Homo sapiens
  misc_RNA (1)...(19): siRNA sense strand
gccuggauccguucaucua

SEQ ID NO: 1650077 - RNA, 19 nt, Homo sapiens
  misc_RNA (1)...(19): siRNA sense strand
cgucaaaguuuucauuauc

SEQ ID NO: 1650078 - RNA, 19 nt, Homo sapiens
  misc_RNA (1)...(19): siRNA sense strand
cacagucauuucugaucuu

SEQ ID NO: 1650079 - RNA, 19 nt, Homo sapiens
  misc_RNA (1)...(19): siRNA sense strand
cagaaauuccuugauaagu

SEQ ID NO: 1650080 - RNA, 19 nt, Homo sapiens
  misc_RNA (1)...(19): siRNA sense strand
uaaaacauccaaccccaaa

SEQ ID NO: 1650081 - RNA, 19 nt, Homo sapiens
  misc_RNA (1)...(19): siRNA sense strand
gaugaggauuuucuuucaa

SEQ ID NO: 1650082 - RNA, 19 nt, Homo sapiens
  misc_RNA (1)...(19): siRNA sense strand
ccaaaugaagagacuccaa

SEQ ID NO: 1650083 - RNA, 19 nt, Homo sapiens
  misc_RNA (1)...(19): siRNA sense strand
gguggugacccaaaugaag

SEQ ID NO: 1650084 - RNA, 19 nt, Homo sapiens
  misc_RNA (1)...(19): siRNA sense strand
cuguaccggucauacguaa

SEQ ID NO: 1650085 - RNA, 19 nt, Homo sapiens
  misc_RNA (1)...(19): siRNA sense strand
aaucagaguucggucuagu

SEQ ID NO: 1650086 - RNA, 19 nt, Homo sapiens
  misc_RNA (1)...(19): siRNA sense strand
ugacccaaaugaagagacu

SEQ ID NO: 1650087 - RNA, 19 nt, Homo sapiens
  misc_RNA (1)...(19): siRNA sense strand
aguuaccuccgucauauuu

SEQ ID NO: 1650088 - RNA, 19 nt, Homo sapiens
  misc_RNA (1)...(19): siRNA sense strand
uugcaaguccuucagaaau

SEQ ID NO: 1650089 - RNA, 19 nt, Homo sapiens
  misc_RNA (1)...(19): siRNA sense strand
gcacucugugguuaacuuc

SEQ ID NO: 1650090 - RNA, 19 nt, Homo sapiens
  misc_RNA (1)...(19): siRNA sense strand
ggccuggcgaugaggauuu

SEQ ID NO: 1650091 - RNA, 19 nt, Homo sapiens
  misc_RNA (1)...(19): siRNA sense strand
ucaccucugcgccugguaa

SEQ ID NO: 1650092 - RNA, 19 nt, Homo sapiens
  misc_RNA (1)...(19): siRNA sense strand
ucauguucuuacucucuuu

SEQ ID NO: 1650093 - RNA, 19 nt, Homo sapiens
  misc_RNA (1)...(19): siRNA sense strand
cgaugaggauuuucuuuca

SEQ ID NO: 1650094 - RNA, 19 nt, Homo sapiens
  misc_RNA (1)...(19): siRNA sense strand
aaaugaagagacuccaaug

SEQ ID NO: 1650095 - RNA, 19 nt, Homo sapiens
  misc_RNA (1)...(19): siRNA sense strand
ucccacugcucuacacugu

SEQ ID NO: 1650096 - RNA, 19 nt, Homo sapiens
  misc_RNA (1)...(19): siRNA sense strand
cauuucugaucuucucaug

SEQ ID NO: 1650097 - RNA, 19 nt, Homo sapiens
  misc_RNA (1)...(19): siRNA sense strand
uccugggacugauaacuau

SEQ ID NO: 1650098 - RNA, 19 nt, Homo sapiens
  misc_RNA (1)...(19): siRNA sense strand
gauucugacuuuuccauuc

SEQ ID NO: 1650099 - RNA, 19 nt, Homo sapiens
  misc_RNA (1)...(19): siRNA sense strand
aaagaacuguaccggucau

SEQ ID NO: 1650100 - RNA, 19 nt, Homo sapiens
  misc_RNA (1)...(19): siRNA sense strand
ggcuaagauucucucuguu

SEQ ID NO: 1650101 - RNA, 19 nt, Homo sapiens
  misc_RNA (1)...(19): siRNA sense strand
cacaauaccugcaauauaa

SEQ ID NO: 1650102 - RNA, 19 nt, Homo sapiens
  misc_RNA (1)...(19): siRNA sense strand
gcaaugaugucgucaagaa

SEQ ID NO: 1650103 - RNA, 19 nt, Homo sapiens
  misc_RNA (1)...(19): siRNA sense strand
gaagguguauucagagauu

SEQ ID NO: 1650104 - RNA, 19 nt, Homo sapiens
  misc_RNA (1)...(19): siRNA sense strand
gaaauccuguaacaaauga

SEQ ID NO: 1650105 - RNA, 19 nt, Homo sapiens
  misc_RNA (1)...(19): siRNA sense strand
caggaaagguugucaauau

SEQ ID NO: 1650106 - RNA, 19 nt, Homo sapiens
  misc_RNA (1)...(19): siRNA sense strand
gaaagguugucaauauaga

SEQ ID NO: 1650107 - RNA, 19 nt, Homo sapiens
  misc_RNA (1)...(19): siRNA sense strand
caaggaggcuuucaucuuc

SEQ ID NO: 1650108 - RNA, 19 nt, Homo sapiens
  misc_RNA (1)...(19): siRNA sense strand
ucacugagauccuccauga

SEQ ID NO: 1650109 - RNA, 19 nt, Homo sapiens
  misc_RNA (1)...(19): siRNA sense strand
ggauaacucucccaauaug

SEQ ID NO: 1650110 - RNA, 19 nt, Homo sapiens
  misc_RNA (1)...(19): siRNA sense strand
gaacuaauucucuggguuu

SEQ ID NO: 1650111 - RNA, 19 nt, Homo sapiens
  misc_RNA (1)...(19): siRNA sense strand
gaaagacaccagcaguaua

SEQ ID NO: 1650112 - RNA, 19 nt, Homo sapiens
  misc_RNA (1)...(19): siRNA sense strand
gauauaauccgaaggugua

SEQ ID NO: 1650113 - RNA, 19 nt, Homo sapiens
  misc_RNA (1)...(19): siRNA sense strand
ugacagagcuuugggcauu

SEQ ID NO: 1650114 - RNA, 19 nt, Homo sapiens
  misc_RNA (1)...(19): siRNA sense strand
ccagagauaugaaacaaug

SEQ ID NO: 1650115 - RNA, 19 nt, Homo sapiens
  misc_RNA (1)...(19): siRNA sense strand
caaaauaggccucuucuua

SEQ ID NO: 1650116 - RNA, 19 nt, Homo sapiens
  misc_RNA (1)...(19): siRNA sense strand
agacagauacgucaaauaa

SEQ ID NO: 1650117 - RNA, 19 nt, Homo sapiens
  misc_RNA (1)...(19): siRNA sense strand
ggacggaaauguugucaag

SEQ ID NO: 1650118 - RNA, 19 nt, Homo sapiens
  misc_RNA (1)...(19): siRNA sense strand
gagaaagacccuaaaauua

SEQ ID NO: 1650119 - RNA, 19 nt, Homo sapiens
  misc_RNA (1)...(19): siRNA sense strand
ggaauucccuggaugaucu

SEQ ID NO: 1650120 - RNA, 19 nt, Homo sapiens
  misc_RNA (1)...(19): siRNA sense strand
agaauuggcugagcugaua

SEQ ID NO: 1650121 - RNA, 19 nt, Homo sapiens
  misc_RNA (1)...(19): siRNA sense strand
gaaaugcgccagagauaug

SEQ ID NO: 1650122 - RNA, 19 nt, Homo sapiens
  misc_RNA (1)...(19): siRNA sense strand
gcugauaucugccaaucuu

SEQ ID NO: 1650123 - RNA, 19 nt, Homo sapiens
  misc_RNA (1)...(19): siRNA sense strand
gaagaagacagaaaggauu

SEQ ID NO: 1650124 - RNA, 19 nt, Homo sapiens
  misc_RNA (1)...(19): siRNA sense strand
ccacaggccuggaagaaau

SEQ ID NO: 1650125 - RNA, 19 nt, Homo sapiens
  misc_RNA (1)...(19): siRNA sense strand
ggaguuuccuggacaaaug

SEQ ID NO: 1650126 - RNA, 19 nt, Homo sapiens
  misc_RNA (1)...(19): siRNA sense strand
gagcaggaaaguaaauaua

SEQ ID NO: 1650127 - RNA, 19 nt, Homo sapiens
  misc_RNA (1)...(19): siRNA sense strand
caagaaugauggauaguca

SEQ ID NO: 1650128 - RNA, 19 nt, Homo sapiens
  misc_RNA (1)...(19): siRNA sense strand
ggaaggaguggauaauaaa

SEQ ID NO: 1650129 - RNA, 19 nt, Homo sapiens
  misc_RNA (1)...(19): siRNA sense strand
cuaagaagaaggagaauaa

SEQ ID NO: 1650130 - RNA, 19 nt, Homo sapiens
  misc_RNA (1)...(19): siRNA sense strand
gacaggcacuugaauugaa

SEQ ID NO: 1650131 - RNA, 19 nt, Homo sapiens
  misc_RNA (1)...(19): siRNA sense strand
ggauagcccuguuucuguu

SEQ ID NO: 1650132 - RNA, 19 nt, Homo sapiens
  misc_RNA (1)...(19): siRNA sense strand
uggaaggaguggauaauaa

SEQ ID NO: 1650133 - RNA, 19 nt, Homo sapiens
  misc_RNA (1)...(19): siRNA sense strand
ggaaacaguaagacagaua

SEQ ID NO: 1650134 - RNA, 19 nt, Homo sapiens
  misc_RNA (1)...(19): siRNA sense strand
ccaagaagcagcaguaaug

SEQ ID NO: 1650135 - RNA, 19 nt, Homo sapiens
  misc_RNA (1)...(19): siRNA sense strand
ggaaagcaaaggucauaaa

SEQ ID NO: 1650136 - RNA, 19 nt, Homo sapiens
  misc_RNA (1)...(19): siRNA sense strand
gcaaggaggcuuucaucuu

SEQ ID NO: 1650137 - RNA, 19 nt, Homo sapiens
  misc_RNA (1)...(19): siRNA sense strand
gugaugcacucucuaaaga

SEQ ID NO: 1650138 - RNA, 19 nt, Homo sapiens
  misc_RNA (1)...(19): siRNA sense strand
ccagaaacgucacuaucaa

SEQ ID NO: 1650139 - RNA, 19 nt, Homo sapiens
  misc_RNA (1)...(19): siRNA sense strand
aaagcaaacucuuccgaaa

SEQ ID NO: 1650140 - RNA, 19 nt, Homo sapiens
  misc_RNA (1)...(19): siRNA sense strand
caacagaggguggcuauga

SEQ ID NO: 1650141 - RNA, 19 nt, Homo sapiens
  misc_RNA (1)...(19): siRNA sense strand
gggcagggaguuauugaua

SEQ ID NO: 1650142 - RNA, 19 nt, Homo sapiens
  misc_RNA (1)...(19): siRNA sense strand
caaacaggaugcuuuccaa

SEQ ID NO: 1650143 - RNA, 19 nt, Homo sapiens
  misc_RNA (1)...(19): siRNA sense strand
agagggaucuggagacuug

SEQ ID NO: 1650144 - RNA, 19 nt, Homo sapiens
  misc_RNA (1)...(19): siRNA sense strand
gaaggagaauaaugcacuu

SEQ ID NO: 1650145 - RNA, 19 nt, Homo sapiens
  misc_RNA (1)...(19): siRNA sense strand
aaagacaccagcaguauaa

SEQ ID NO: 1650146 - RNA, 19 nt, Homo sapiens
  misc_RNA (1)...(19): siRNA sense strand
ccaguaacauagcuucauu

SEQ ID NO: 1650147 - RNA, 19 nt, Homo sapiens
  misc_RNA (1)...(19): siRNA sense strand
cagaaaaugucacacaaua

SEQ ID NO: 1650148 - RNA, 19 nt, Homo sapiens
  misc_RNA (1)...(19): siRNA sense strand
gaaucgagacggaaacauu

SEQ ID NO: 1650149 - RNA, 19 nt, Homo sapiens
  misc_RNA (1)...(19): siRNA sense strand
caaaugagacccaaagaca

SEQ ID NO: 1650150 - RNA, 19 nt, Homo sapiens
  misc_RNA (1)...(19): siRNA sense strand
gaaaugugacugugacuca

SEQ ID NO: 1650151 - RNA, 19 nt, Homo sapiens
  misc_RNA (1)...(19): siRNA sense strand
ggaaagacaccagcaguau

SEQ ID NO: 1650152 - RNA, 19 nt, Homo sapiens
  misc_RNA (1)...(19): siRNA sense strand
aggaaagguugucaauaua

SEQ ID NO: 1650153 - RNA, 19 nt, Homo sapiens
  misc_RNA (1)...(19): siRNA sense strand
gaauaaugcacuucuuaga

SEQ ID NO: 1650154 - RNA, 19 nt, Homo sapiens
  misc_RNA (1)...(19): siRNA sense strand
caagagaagcaccggauuu

SEQ ID NO: 1650155 - RNA, 19 nt, Homo sapiens
  misc_RNA (1)...(19): siRNA sense strand
gaagauauaauccgaaggu

SEQ ID NO: 1650156 - RNA, 19 nt, Homo sapiens
  misc_RNA (1)...(19): siRNA sense strand
caaaugaggccuggugaaa

SEQ ID NO: 1650157 - RNA, 19 nt, Homo sapiens
  misc_RNA (1)...(19): siRNA sense strand
ggcauuggaugguuuccua

SEQ ID NO: 1650158 - RNA, 19 nt, Homo sapiens
  misc_RNA (1)...(19): siRNA sense strand
gacgggagcaggaaaguaa

SEQ ID NO: 1650159 - RNA, 19 nt, Homo sapiens
  misc_RNA (1)...(19): siRNA sense strand
ucagaaggcaggauuauau

SEQ ID NO: 1650160 - RNA, 19 nt, Homo sapiens
  misc_RNA (1)...(19): siRNA sense strand
uagcagagaucaccucagu

SEQ ID NO: 1650161 - RNA, 19 nt, Homo sapiens
  misc_RNA (1)...(19): siRNA sense strand
caaguaaaguaagcaauca

SEQ ID NO: 1650162 - RNA, 19 nt, Homo sapiens
  misc_RNA (1)...(19): siRNA sense strand
ccugagagcuuuauuacca

SEQ ID NO: 1650163 - RNA, 19 nt, Homo sapiens
  misc_RNA (1)...(19): siRNA sense strand
acacaauaccugcaauaua

SEQ ID NO: 1650164 - RNA, 19 nt, Homo sapiens
  misc_RNA (1)...(19): siRNA sense strand
cggaaacauuguauuugua

SEQ ID NO: 1650165 - RNA, 19 nt, Homo sapiens
  misc_RNA (1)...(19): siRNA sense strand
gaauucaccagcugaggua

SEQ ID NO: 1650166 - RNA, 19 nt, Homo sapiens
  misc_RNA (1)...(19): siRNA sense strand
gaaaacaccacaugauauu

SEQ ID NO: 1650167 - RNA, 19 nt, Homo sapiens
  misc_RNA (1)...(19): siRNA sense strand
gcaugaguaugucgccaaa

SEQ ID NO: 1650168 - RNA, 19 nt, Homo sapiens
  misc_RNA (1)...(19): siRNA sense strand
caugaggccuggcuuugaa

SEQ ID NO: 1650169 - RNA, 19 nt, Homo sapiens
  misc_RNA (1)...(19): siRNA sense strand
cacaugauauucuggaaga

SEQ ID NO: 1650170 - RNA, 19 nt, Homo sapiens
  misc_RNA (1)...(19): siRNA sense strand
gcucaaguccuccaguaaa

SEQ ID NO: 1650171 - RNA, 19 nt, Homo sapiens
  misc_RNA (1)...(19): siRNA sense strand
gcagcuaaguccuaagaag

SEQ ID NO: 1650172 - RNA, 19 nt, Homo sapiens
  misc_RNA (1)...(19): siRNA sense strand
cagaauggauauagaccaa

SEQ ID NO: 1650173 - RNA, 19 nt, Homo sapiens
  misc_RNA (1)...(19): siRNA sense strand
agagagaacagaauggaua

SEQ ID NO: 1650174 - RNA, 19 nt, Homo sapiens
  misc_RNA (1)...(19): siRNA sense strand
gaaacaaugcagugcuuug

SEQ ID NO: 1650175 - RNA, 19 nt, Homo sapiens
  misc_RNA (1)...(19): siRNA sense strand
agacggaaacauuguauuu

SEQ ID NO: 1650176 - RNA, 19 nt, Homo sapiens
  misc_RNA (1)...(19): siRNA sense strand
uaucaguccucagaaauga

SEQ ID NO: 1650177 - RNA, 19 nt, Homo sapiens
  misc_RNA (1)...(19): siRNA sense strand
ggaggagauuauaauacuu

SEQ ID NO: 1650178 - RNA, 19 nt, Homo sapiens
  misc_RNA (1)...(19): siRNA sense strand
gaagagggaucuggagacu

SEQ ID NO: 1650179 - RNA, 19 nt, Homo sapiens
  misc_RNA (1)...(19): siRNA sense strand
gggaaagacaccagcagua

SEQ ID NO: 1650180 - RNA, 19 nt, Homo sapiens
  misc_RNA (1)...(19): siRNA sense strand
ggaaagguugucaauauag

SEQ ID NO: 1650181 - RNA, 19 nt, Homo sapiens
  misc_RNA (1)...(19): siRNA sense strand
ggacaaaugagacccaaag

SEQ ID NO: 1650182 - RNA, 19 nt, Homo sapiens
  misc_RNA (1)...(19): siRNA sense strand
gcaacaguuuccauaucaa

SEQ ID NO: 1650183 - RNA, 19 nt, Homo sapiens
  misc_RNA (1)...(19): siRNA sense strand
uuacuuaccuguucuucug

SEQ ID NO: 1650184 - RNA, 19 nt, Homo sapiens
  misc_RNA (1)...(19): siRNA sense strand
aauauuacccaaccaagua

SEQ ID NO: 1650185 - RNA, 19 nt, Homo sapiens
  misc_RNA (1)...(19): siRNA sense strand
gaaacgucacuaucaagaa

SEQ ID NO: 1650186 - RNA, 19 nt, Homo sapiens
  misc_RNA (1)...(19): siRNA sense strand
gauacaaauucacugagau

SEQ ID NO: 1650187 - RNA, 19 nt, Homo sapiens
  misc_RNA (1)...(19): siRNA sense strand
uaccagacaugaucuuuca

SEQ ID NO: 1650188 - RNA, 19 nt, Homo sapiens
  misc_RNA (1)...(19): siRNA sense strand
gaacagaauggauauagac

SEQ ID NO: 1650189 - RNA, 19 nt, Homo sapiens
  misc_RNA (1)...(19): siRNA sense strand
ugacgaaagagcauuauug

SEQ ID NO: 1650190 - RNA, 19 nt, Homo sapiens
  misc_RNA (1)...(19): siRNA sense strand
gggccaaaccgaaauguga

SEQ ID NO: 1650191 - RNA, 19 nt, Homo sapiens
  misc_RNA (1)...(19): siRNA sense strand
gaucuggagacuuggauaa

SEQ ID NO: 1650192 - RNA, 19 nt, Homo sapiens
  misc_RNA (1)...(19): siRNA sense strand
gagcugauaucugccaauc

SEQ ID NO: 1650193 - RNA, 19 nt, Homo sapiens
  misc_RNA (1)...(19): siRNA sense strand
gcugagguagccaagauua

SEQ ID NO: 1650194 - RNA, 19 nt, Homo sapiens
  misc_RNA (1)...(19): siRNA sense strand
gauagccucacaucaguuu

SEQ ID NO: 1650195 - RNA, 19 nt, Homo sapiens
  misc_RNA (1)...(19): siRNA sense strand
gauauagaccaaacccaaa

SEQ ID NO: 1650196 - RNA, 19 nt, Homo sapiens
  misc_RNA (1)...(19): siRNA sense strand
gaauggauauagaccaaac

SEQ ID NO: 1650197 - RNA, 19 nt, Homo sapiens
  misc_RNA (1)...(19): siRNA sense strand
cagcagaauaucaugauuu

SEQ ID NO: 1650198 - RNA, 19 nt, Homo sapiens
  misc_RNA (1)...(19): siRNA sense strand
acaaccagauccagccuuu

SEQ ID NO: 1650199 - RNA, 19 nt, Homo sapiens
  misc_RNA (1)...(19): siRNA sense strand
gaaggcaggauuauaugga

SEQ ID NO: 1650200 - RNA, 19 nt, Homo sapiens
  misc_RNA (1)...(19): siRNA sense strand
ccaggaggagauuauaaua

SEQ ID NO: 1650201 - RNA, 19 nt, Homo sapiens
  misc_RNA (1)...(19): siRNA sense strand
cacaauaccugcaauauaa

SEQ ID NO: 1650202 - RNA, 19 nt, Homo sapiens
  misc_RNA (1)...(19): siRNA sense strand
gcaaugaugucgucaagaa

SEQ ID NO: 1650203 - RNA, 19 nt, Homo sapiens
  misc_RNA (1)...(19): siRNA sense strand
gaagguguauucagagauu

SEQ ID NO: 1650204 - RNA, 19 nt, Homo sapiens
  misc_RNA (1)...(19): siRNA sense strand
gaaauccuguaacaaauga

SEQ ID NO: 1650205 - RNA, 19 nt, Homo sapiens
  misc_RNA (1)...(19): siRNA sense strand
caggaaagguugucaauau

SEQ ID NO: 1650206 - RNA, 19 nt, Homo sapiens
  misc_RNA (1)...(19): siRNA sense strand
gaaagguugucaauauaga

SEQ ID NO: 1650207 - RNA, 19 nt, Homo sapiens
  misc_RNA (1)...(19): siRNA sense strand
caaggaggcuuucaucuuc

SEQ ID NO: 1650208 - RNA, 19 nt, Homo sapiens
  misc_RNA (1)...(19): siRNA sense strand
ucacugagauccuccauga

SEQ ID NO: 1650209 - RNA, 19 nt, Homo sapiens
  misc_RNA (1)...(19): siRNA sense strand
ggauaacucucccaauaug

SEQ ID NO: 1650210 - RNA, 19 nt, Homo sapiens
  misc_RNA (1)...(19): siRNA sense strand
gaacuaauucucuggguuu

SEQ ID NO: 1650211 - RNA, 19 nt, Homo sapiens
  misc_RNA (1)...(19): siRNA sense strand
gaaagacaccagcaguaua

SEQ ID NO: 1650212 - RNA, 19 nt, Homo sapiens
  misc_RNA (1)...(19): siRNA sense strand
gauauaauccgaaggugua

SEQ ID NO: 1650213 - RNA, 19 nt, Homo sapiens
  misc_RNA (1)...(19): siRNA sense strand
ugacagagcuuugggcauu

SEQ ID NO: 1650214 - RNA, 19 nt, Homo sapiens
  misc_RNA (1)...(19): siRNA sense strand
ccagagauaugaaacaaug

SEQ ID NO: 1650215 - RNA, 19 nt, Homo sapiens
  misc_RNA (1)...(19): siRNA sense strand
caaaauaggccucuucuua

SEQ ID NO: 1650216 - RNA, 19 nt, Homo sapiens
  misc_RNA (1)...(19): siRNA sense strand
agacagauacgucaaauaa

SEQ ID NO: 1650217 - RNA, 19 nt, Homo sapiens
  misc_RNA (1)...(19): siRNA sense strand
ggacggaaauguugucaag

SEQ ID NO: 1650218 - RNA, 19 nt, Homo sapiens
  misc_RNA (1)...(19): siRNA sense strand
gagaaagacccuaaaauua

SEQ ID NO: 1650219 - RNA, 19 nt, Homo sapiens
  misc_RNA (1)...(19): siRNA sense strand
ggaauucccuggaugaucu

SEQ ID NO: 1650220 - RNA, 19 nt, Homo sapiens
  misc_RNA (1)...(19): siRNA sense strand
agaauuggcugagcugaua

SEQ ID NO: 1650221 - RNA, 19 nt, Homo sapiens
  misc_RNA (1)...(19): siRNA sense strand
gaaaugcgccagagauaug

SEQ ID NO: 1650222 - RNA, 19 nt, Homo sapiens
  misc_RNA (1)...(19): siRNA sense strand
gcugauaucugccaaucuu

SEQ ID NO: 1650223 - RNA, 19 nt, Homo sapiens
  misc_RNA (1)...(19): siRNA sense strand
gaagaagacagaaaggauu

SEQ ID NO: 1650224 - RNA, 19 nt, Homo sapiens
  misc_RNA (1)...(19): siRNA sense strand
ccacaggccuggaagaaau

SEQ ID NO: 1650225 - RNA, 19 nt, Homo sapiens
  misc_RNA (1)...(19): siRNA sense strand
ggaguuuccuggacaaaug

SEQ ID NO: 1650226 - RNA, 19 nt, Homo sapiens
  misc_RNA (1)...(19): siRNA sense strand
gagcaggaaaguaaauaua

SEQ ID NO: 1650227 - RNA, 19 nt, Homo sapiens
  misc_RNA (1)...(19): siRNA sense strand
caagaaugauggauaguca

SEQ ID NO: 1650228 - RNA, 19 nt, Homo sapiens
  misc_RNA (1)...(19): siRNA sense strand
ggaaggaguggauaauaaa

SEQ ID NO: 1650229 - RNA, 19 nt, Homo sapiens
  misc_RNA (1)...(19): siRNA sense strand
cuaagaagaaggagaauaa

SEQ ID NO: 1650230 - RNA, 19 nt, Homo sapiens
  misc_RNA (1)...(19): siRNA sense strand
gacaggcacuugaauugaa

SEQ ID NO: 1650231 - RNA, 19 nt, Homo sapiens
  misc_RNA (1)...(19): siRNA sense strand
ggauagcccuguuucuguu

SEQ ID NO: 1650232 - RNA, 19 nt, Homo sapiens
  misc_RNA (1)...(19): siRNA sense strand
uggaaggaguggauaauaa

SEQ ID NO: 1650233 - RNA, 19 nt, Homo sapiens
  misc_RNA (1)...(19): siRNA sense strand
ggaaacaguaagacagaua

SEQ ID NO: 1650234 - RNA, 19 nt, Homo sapiens
  misc_RNA (1)...(19): siRNA sense strand
ccaagaagcagcaguaaug

SEQ ID NO: 1650235 - RNA, 19 nt, Homo sapiens
  misc_RNA (1)...(19): siRNA sense strand
ggaaagcaaaggucauaaa

SEQ ID NO: 1650236 - RNA, 19 nt, Homo sapiens
  misc_RNA (1)...(19): siRNA sense strand
gcaaggaggcuuucaucuu

SEQ ID NO: 1650237 - RNA, 19 nt, Homo sapiens
  misc_RNA (1)...(19): siRNA sense strand
gugaugcacucucuaaaga

SEQ ID NO: 1650238 - RNA, 19 nt, Homo sapiens
  misc_RNA (1)...(19): siRNA sense strand
ccagaaacgucacuaucaa

SEQ ID NO: 1650239 - RNA, 19 nt, Homo sapiens
  misc_RNA (1)...(19): siRNA sense strand
aaagcaaacucuuccgaaa

SEQ ID NO: 1650240 - RNA, 19 nt, Homo sapiens
  misc_RNA (1)...(19): siRNA sense strand
caacagaggguggcuauga

SEQ ID NO: 1650241 - RNA, 19 nt, Homo sapiens
  misc_RNA (1)...(19): siRNA sense strand
gggcagggaguuauugaua

SEQ ID NO: 1650242 - RNA, 19 nt, Homo sapiens
  misc_RNA (1)...(19): siRNA sense strand
caaacaggaugcuuuccaa

SEQ ID NO: 1650243 - RNA, 19 nt, Homo sapiens
  misc_RNA (1)...(19): siRNA sense strand
agagggaucuggagacuug

SEQ ID NO: 1650244 - RNA, 19 nt, Homo sapiens
  misc_RNA (1)...(19): siRNA sense strand
gaaggagaauaaugcacuu

SEQ ID NO: 1650245 - RNA, 19 nt, Homo sapiens
  misc_RNA (1)...(19): siRNA sense strand
aaagacaccagcaguauaa

SEQ ID NO: 1650246 - RNA, 19 nt, Homo sapiens
  misc_RNA (1)...(19): siRNA sense strand
ccaguaacauagcuucauu

SEQ ID NO: 1650247 - RNA, 19 nt, Homo sapiens
  misc_RNA (1)...(19): siRNA sense strand
cagaaaaugucacacaaua

SEQ ID NO: 1650248 - RNA, 19 nt, Homo sapiens
  misc_RNA (1)...(19): siRNA sense strand
gaaucgagacggaaacauu

SEQ ID NO: 1650249 - RNA, 19 nt, Homo sapiens
  misc_RNA (1)...(19): siRNA sense strand
caaaugagacccaaagaca

SEQ ID NO: 1650250 - RNA, 19 nt, Homo sapiens
  misc_RNA (1)...(19): siRNA sense strand
gaaaugugacugugacuca

SEQ ID NO: 1650251 - RNA, 19 nt, Homo sapiens
  misc_RNA (1)...(19): siRNA sense strand
ggaaagacaccagcaguau

SEQ ID NO: 1650252 - RNA, 19 nt, Homo sapiens
  misc_RNA (1)...(19): siRNA sense strand
aggaaagguugucaauaua

SEQ ID NO: 1650253 - RNA, 19 nt, Homo sapiens
  misc_RNA (1)...(19): siRNA sense strand
gaauaaugcacuucuuaga

SEQ ID NO: 1650254 - RNA, 19 nt, Homo sapiens
  misc_RNA (1)...(19): siRNA sense strand
caagagaagcaccggauuu

SEQ ID NO: 1650255 - RNA, 19 nt, Homo sapiens
  misc_RNA (1)...(19): siRNA sense strand
gaagauauaauccgaaggu

SEQ ID NO: 1650256 - RNA, 19 nt, Homo sapiens
  misc_RNA (1)...(19): siRNA sense strand
caaaugaggccuggugaaa

SEQ ID NO: 1650257 - RNA, 19 nt, Homo sapiens
  misc_RNA (1)...(19): siRNA sense strand
ggcauuggaugguuuccua

SEQ ID NO: 1650258 - RNA, 19 nt, Homo sapiens
  misc_RNA (1)...(19): siRNA sense strand
gacgggagcaggaaaguaa

SEQ ID NO: 1650259 - RNA, 19 nt, Homo sapiens
  misc_RNA (1)...(19): siRNA sense strand
ucagaaggcaggauuauau

SEQ ID NO: 1650260 - RNA, 19 nt, Homo sapiens
  misc_RNA (1)...(19): siRNA sense strand
uagcagagaucaccucagu

SEQ ID NO: 1650261 - RNA, 19 nt, Homo sapiens
  misc_RNA (1)...(19): siRNA sense strand
caaguaaaguaagcaauca

SEQ ID NO: 1650262 - RNA, 19 nt, Homo sapiens
  misc_RNA (1)...(19): siRNA sense strand
ccugagagcuuuauuacca

SEQ ID NO: 1650263 - RNA, 19 nt, Homo sapiens
  misc_RNA (1)...(19): siRNA sense strand
acacaauaccugcaauaua

SEQ ID NO: 1650264 - RNA, 19 nt, Homo sapiens
  misc_RNA (1)...(19): siRNA sense strand
cggaaacauuguauuugua

SEQ ID NO: 1650265 - RNA, 19 nt, Homo sapiens
  misc_RNA (1)...(19): siRNA sense strand
gaauucaccagcugaggua

SEQ ID NO: 1650266 - RNA, 19 nt, Homo sapiens
  misc_RNA (1)...(19): siRNA sense strand
gaaaacaccacaugauauu

SEQ ID NO: 1650267 - RNA, 19 nt, Homo sapiens
  misc_RNA (1)...(19): siRNA sense strand
gcaugaguaugucgccaaa

SEQ ID NO: 1650268 - RNA, 19 nt, Homo sapiens
  misc_RNA (1)...(19): siRNA sense strand
caugaggccuggcuuugaa

SEQ ID NO: 1650269 - RNA, 19 nt, Homo sapiens
  misc_RNA (1)...(19): siRNA sense strand
cacaugauauucuggaaga

SEQ ID NO: 1650270 - RNA, 19 nt, Homo sapiens
  misc_RNA (1)...(19): siRNA sense strand
gcucaaguccuccaguaaa

SEQ ID NO: 1650271 - RNA, 19 nt, Homo sapiens
  misc_RNA (1)...(19): siRNA sense strand
gcagcuaaguccuaagaag

SEQ ID NO: 1650272 - RNA, 19 nt, Homo sapiens
  misc_RNA (1)...(19): siRNA sense strand
cagaauggauauagaccaa

SEQ ID NO: 1650273 - RNA, 19 nt, Homo sapiens
  misc_RNA (1)...(19): siRNA sense strand
agagagaacagaauggaua

SEQ ID NO: 1650274 - RNA, 19 nt, Homo sapiens
  misc_RNA (1)...(19): siRNA sense strand
gaaacaaugcagugcuuug

SEQ ID NO: 1650275 - RNA, 19 nt, Homo sapiens
  misc_RNA (1)...(19): siRNA sense strand
agacggaaacauuguauuu

SEQ ID NO: 1650276 - RNA, 19 nt, Homo sapiens
  misc_RNA (1)...(19): siRNA sense strand
uaucaguccucagaaauga

SEQ ID NO: 1650277 - RNA, 19 nt, Homo sapiens
  misc_RNA (1)...(19): siRNA sense strand
ggaggagauuauaauacuu

SEQ ID NO: 1650278 - RNA, 19 nt, Homo sapiens
  misc_RNA (1)...(19): siRNA sense strand
gaagagggaucuggagacu

SEQ ID NO: 1650279 - RNA, 19 nt, Homo sapiens
  misc_RNA (1)...(19): siRNA sense strand
gggaaagacaccagcagua

SEQ ID NO: 1650280 - RNA, 19 nt, Homo sapiens
  misc_RNA (1)...(19): siRNA sense strand
ggaaagguugucaauauag

SEQ ID NO: 1650281 - RNA, 19 nt, Homo sapiens
  misc_RNA (1)...(19): siRNA sense strand
ggacaaaugagacccaaag

SEQ ID NO: 1650282 - RNA, 19 nt, Homo sapiens
  misc_RNA (1)...(19): siRNA sense strand
gcaacaguuuccauaucaa

SEQ ID NO: 1650283 - RNA, 19 nt, Homo sapiens
  misc_RNA (1)...(19): siRNA sense strand
uuacuuaccuguucuucug

SEQ ID NO: 1650284 - RNA, 19 nt, Homo sapiens
  misc_RNA (1)...(19): siRNA sense strand
aauauuacccaaccaagua

SEQ ID NO: 1650285 - RNA, 19 nt, Homo sapiens
  misc_RNA (1)...(19): siRNA sense strand
gaaacgucacuaucaagaa

SEQ ID NO: 1650286 - RNA, 19 nt, Homo sapiens
  misc_RNA (1)...(19): siRNA sense strand
gauacaaauucacugagau

SEQ ID NO: 1650287 - RNA, 19 nt, Homo sapiens
  misc_RNA (1)...(19): siRNA sense strand
uaccagacaugaucuuuca

SEQ ID NO: 1650288 - RNA, 19 nt, Homo sapiens
  misc_RNA (1)...(19): siRNA sense strand
gaacagaauggauauagac

SEQ ID NO: 1650289 - RNA, 19 nt, Homo sapiens
  misc_RNA (1)...(19): siRNA sense strand
ugacgaaagagcauuauug

SEQ ID NO: 1650290 - RNA, 19 nt, Homo sapiens
  misc_RNA (1)...(19): siRNA sense strand
gggccaaaccgaaauguga

SEQ ID NO: 1650291 - RNA, 19 nt, Homo sapiens
  misc_RNA (1)...(19): siRNA sense strand
gaucuggagacuuggauaa

SEQ ID NO: 1650292 - RNA, 19 nt, Homo sapiens
  misc_RNA (1)...(19): siRNA sense strand
gagcugauaucugccaauc

SEQ ID NO: 1650293 - RNA, 19 nt, Homo sapiens
  misc_RNA (1)...(19): siRNA sense strand
gcugagguagccaagauua

SEQ ID NO: 1650294 - RNA, 19 nt, Homo sapiens
  misc_RNA (1)...(19): siRNA sense strand
gauagccucacaucaguuu

SEQ ID NO: 1650295 - RNA, 19 nt, Homo sapiens
  misc_RNA (1)...(19): siRNA sense strand
gauauagaccaaacccaaa

SEQ ID NO: 1650296 - RNA, 19 nt, Homo sapiens
  misc_RNA (1)...(19): siRNA sense strand
gaauggauauagaccaaac

SEQ ID NO: 1650297 - RNA, 19 nt, Homo sapiens
  misc_RNA (1)...(19): siRNA sense strand
cagcagaauaucaugauuu

SEQ ID NO: 1650298 - RNA, 19 nt, Homo sapiens
  misc_RNA (1)...(19): siRNA sense strand
acaaccagauccagccuuu

SEQ ID NO: 1650299 - RNA, 19 nt, Homo sapiens
  misc_RNA (1)...(19): siRNA sense strand
gaaggcaggauuauaugga

SEQ ID NO: 1650300 - RNA, 19 nt, Homo sapiens
  misc_RNA (1)...(19): siRNA sense strand
ccaggaggagauuauaaua

SEQ ID NO: 1650301 - RNA, 19 nt, Homo sapiens
  misc_RNA (1)...(19): siRNA sense strand
cacaauaccugcaauauaa

SEQ ID NO: 1650302 - RNA, 19 nt, Homo sapiens
  misc_RNA (1)...(19): siRNA sense strand
gcaaugaugucgucaagaa

SEQ ID NO: 1650303 - RNA, 19 nt, Homo sapiens
  misc_RNA (1)...(19): siRNA sense strand
gaagguguauucagagauu

SEQ ID NO: 1650304 - RNA, 19 nt, Homo sapiens
  misc_RNA (1)...(19): siRNA sense strand
gaaauccuguaacaaauga

SEQ ID NO: 1650305 - RNA, 19 nt, Homo sapiens
  misc_RNA (1)...(19): siRNA sense strand
caggaaagguugucaauau

SEQ ID NO: 1650306 - RNA, 19 nt, Homo sapiens
  misc_RNA (1)...(19): siRNA sense strand
gaaagguugucaauauaga

SEQ ID NO: 1650307 - RNA, 19 nt, Homo sapiens
  misc_RNA (1)...(19): siRNA sense strand
caaggaggcuuucaucuuc

SEQ ID NO: 1650308 - RNA, 19 nt, Homo sapiens
  misc_RNA (1)...(19): siRNA sense strand
ucacugagauccuccauga

SEQ ID NO: 1650309 - RNA, 19 nt, Homo sapiens
  misc_RNA (1)...(19): siRNA sense strand
ggauaacucucccaauaug

SEQ ID NO: 1650310 - RNA, 19 nt, Homo sapiens
  misc_RNA (1)...(19): siRNA sense strand
gaacuaauucucuggguuu

SEQ ID NO: 1650311 - RNA, 19 nt, Homo sapiens
  misc_RNA (1)...(19): siRNA sense strand
gaaagacaccagcaguaua

SEQ ID NO: 1650312 - RNA, 19 nt, Homo sapiens
  misc_RNA (1)...(19): siRNA sense strand
gauauaauccgaaggugua

SEQ ID NO: 1650313 - RNA, 19 nt, Homo sapiens
  misc_RNA (1)...(19): siRNA sense strand
ugacagagcuuugggcauu

SEQ ID NO: 1650314 - RNA, 19 nt, Homo sapiens
  misc_RNA (1)...(19): siRNA sense strand
ccagagauaugaaacaaug

SEQ ID NO: 1650315 - RNA, 19 nt, Homo sapiens
  misc_RNA (1)...(19): siRNA sense strand
caaaauaggccucuucuua

SEQ ID NO: 1650316 - RNA, 19 nt, Homo sapiens
  misc_RNA (1)...(19): siRNA sense strand
agacagauacgucaaauaa

SEQ ID NO: 1650317 - RNA, 19 nt, Homo sapiens
  misc_RNA (1)...(19): siRNA sense strand
ggacggaaauguugucaag

SEQ ID NO: 1650318 - RNA, 19 nt, Homo sapiens
  misc_RNA (1)...(19): siRNA sense strand
gagaaagacccuaaaauua

SEQ ID NO: 1650319 - RNA, 19 nt, Homo sapiens
  misc_RNA (1)...(19): siRNA sense strand
ggaauucccuggaugaucu

SEQ ID NO: 1650320 - RNA, 19 nt, Homo sapiens
  misc_RNA (1)...(19): siRNA sense strand
agaauuggcugagcugaua

SEQ ID NO: 1650321 - RNA, 19 nt, Homo sapiens
  misc_RNA (1)...(19): siRNA sense strand
gaaaugcgccagagauaug

SEQ ID NO: 1650322 - RNA, 19 nt, Homo sapiens
  misc_RNA (1)...(19): siRNA sense strand
gcugauaucugccaaucuu

SEQ ID NO: 1650323 - RNA, 19 nt, Homo sapiens
  misc_RNA (1)...(19): siRNA sense strand
gaagaagacagaaaggauu

SEQ ID NO: 1650324 - RNA, 19 nt, Homo sapiens
  misc_RNA (1)...(19): siRNA sense strand
ccacaggccuggaagaaau

SEQ ID NO: 1650325 - RNA, 19 nt, Homo sapiens
  misc_RNA (1)...(19): siRNA sense strand
ggaguuuccuggacaaaug

SEQ ID NO: 1650326 - RNA, 19 nt, Homo sapiens
  misc_RNA (1)...(19): siRNA sense strand
gagcaggaaaguaaauaua

SEQ ID NO: 1650327 - RNA, 19 nt, Homo sapiens
  misc_RNA (1)...(19): siRNA sense strand
caagaaugauggauaguca

SEQ ID NO: 1650328 - RNA, 19 nt, Homo sapiens
  misc_RNA (1)...(19): siRNA sense strand
ggaaggaguggauaauaaa

SEQ ID NO: 1650329 - RNA, 19 nt, Homo sapiens
  misc_RNA (1)...(19): siRNA sense strand
cuaagaagaaggagaauaa

SEQ ID NO: 1650330 - RNA, 19 nt, Homo sapiens
  misc_RNA (1)...(19): siRNA sense strand
gacaggcacuugaauugaa

SEQ ID NO: 1650331 - RNA, 19 nt, Homo sapiens
  misc_RNA (1)...(19): siRNA sense strand
ggauagcccuguuucuguu

SEQ ID NO: 1650332 - RNA, 19 nt, Homo sapiens
  misc_RNA (1)...(19): siRNA sense strand
uggaaggaguggauaauaa

SEQ ID NO: 1650333 - RNA, 19 nt, Homo sapiens
  misc_RNA (1)...(19): siRNA sense strand
ggaaacaguaagacagaua

SEQ ID NO: 1650334 - RNA, 19 nt, Homo sapiens
  misc_RNA (1)...(19): siRNA sense strand
ccaagaagcagcaguaaug

SEQ ID NO: 1650335 - RNA, 19 nt, Homo sapiens
  misc_RNA (1)...(19): siRNA sense strand
ggaaagcaaaggucauaaa

SEQ ID NO: 1650336 - RNA, 19 nt, Homo sapiens
  misc_RNA (1)...(19): siRNA sense strand
gcaaggaggcuuucaucuu

SEQ ID NO: 1650337 - RNA, 19 nt, Homo sapiens
  misc_RNA (1)...(19): siRNA sense strand
gugaugcacucucuaaaga

SEQ ID NO: 1650338 - RNA, 19 nt, Homo sapiens
  misc_RNA (1)...(19): siRNA sense strand
ccagaaacgucacuaucaa

SEQ ID NO: 1650339 - RNA, 19 nt, Homo sapiens
  misc_RNA (1)...(19): siRNA sense strand
aaagcaaacucuuccgaaa

SEQ ID NO: 1650340 - RNA, 19 nt, Homo sapiens
  misc_RNA (1)...(19): siRNA sense strand
caacagaggguggcuauga

SEQ ID NO: 1650341 - RNA, 19 nt, Homo sapiens
  misc_RNA (1)...(19): siRNA sense strand
gggcagggaguuauugaua

SEQ ID NO: 1650342 - RNA, 19 nt, Homo sapiens
  misc_RNA (1)...(19): siRNA sense strand
caaacaggaugcuuuccaa

SEQ ID NO: 1650343 - RNA, 19 nt, Homo sapiens
  misc_RNA (1)...(19): siRNA sense strand
agagggaucuggagacuug

SEQ ID NO: 1650344 - RNA, 19 nt, Homo sapiens
  misc_RNA (1)...(19): siRNA sense strand
gaaggagaauaaugcacuu

SEQ ID NO: 1650345 - RNA, 19 nt, Homo sapiens
  misc_RNA (1)...(19): siRNA sense strand
aaagacaccagcaguauaa

SEQ ID NO: 1650346 - RNA, 19 nt, Homo sapiens
  misc_RNA (1)...(19): siRNA sense strand
ccaguaacauagcuucauu

SEQ ID NO: 1650347 - RNA, 19 nt, Homo sapiens
  misc_RNA (1)...(19): siRNA sense strand
cagaaaaugucacacaaua

SEQ ID NO: 1650348 - RNA, 19 nt, Homo sapiens
  misc_RNA (1)...(19): siRNA sense strand
gaaucgagacggaaacauu

SEQ ID NO: 1650349 - RNA, 19 nt, Homo sapiens
  misc_RNA (1)...(19): siRNA sense strand
caaaugagacccaaagaca

SEQ ID NO: 1650350 - RNA, 19 nt, Homo sapiens
  misc_RNA (1)...(19): siRNA sense strand
gaaaugugacugugacuca

SEQ ID NO: 1650351 - RNA, 19 nt, Homo sapiens
  misc_RNA (1)...(19): siRNA sense strand
ggaaagacaccagcaguau

SEQ ID NO: 1650352 - RNA, 19 nt, Homo sapiens
  misc_RNA (1)...(19): siRNA sense strand
aggaaagguugucaauaua

SEQ ID NO: 1650353 - RNA, 19 nt, Homo sapiens
  misc_RNA (1)...(19): siRNA sense strand
gaauaaugcacuucuuaga

SEQ ID NO: 1650354 - RNA, 19 nt, Homo sapiens
  misc_RNA (1)...(19): siRNA sense strand
caagagaagcaccggauuu

SEQ ID NO: 1650355 - RNA, 19 nt, Homo sapiens
  misc_RNA (1)...(19): siRNA sense strand
gaagauauaauccgaaggu

SEQ ID NO: 1650356 - RNA, 19 nt, Homo sapiens
  misc_RNA (1)...(19): siRNA sense strand
caaaugaggccuggugaaa

SEQ ID NO: 1650357 - RNA, 19 nt, Homo sapiens
  misc_RNA (1)...(19): siRNA sense strand
ggcauuggaugguuuccua

SEQ ID NO: 1650358 - RNA, 19 nt, Homo sapiens
  misc_RNA (1)...(19): siRNA sense strand
gacgggagcaggaaaguaa

SEQ ID NO: 1650359 - RNA, 19 nt, Homo sapiens
  misc_RNA (1)...(19): siRNA sense strand
ucagaaggcaggauuauau

SEQ ID NO: 1650360 - RNA, 19 nt, Homo sapiens
  misc_RNA (1)...(19): siRNA sense strand
uagcagagaucaccucagu

SEQ ID NO: 1650361 - RNA, 19 nt, Homo sapiens
  misc_RNA (1)...(19): siRNA sense strand
caaguaaaguaagcaauca

SEQ ID NO: 1650362 - RNA, 19 nt, Homo sapiens
  misc_RNA (1)...(19): siRNA sense strand
ccugagagcuuuauuacca

SEQ ID NO: 1650363 - RNA, 19 nt, Homo sapiens
  misc_RNA (1)...(19): siRNA sense strand
acacaauaccugcaauaua

SEQ ID NO: 1650364 - RNA, 19 nt, Homo sapiens
  misc_RNA (1)...(19): siRNA sense strand
cggaaacauuguauuugua

SEQ ID NO: 1650365 - RNA, 19 nt, Homo sapiens
  misc_RNA (1)...(19): siRNA sense strand
gaauucaccagcugaggua

SEQ ID NO: 1650366 - RNA, 19 nt, Homo sapiens
  misc_RNA (1)...(19): siRNA sense strand
gaaaacaccacaugauauu

SEQ ID NO: 1650367 - RNA, 19 nt, Homo sapiens
  misc_RNA (1)...(19): siRNA sense strand
gcaugaguaugucgccaaa

SEQ ID NO: 1650368 - RNA, 19 nt, Homo sapiens
  misc_RNA (1)...(19): siRNA sense strand
caugaggccuggcuuugaa

SEQ ID NO: 1650369 - RNA, 19 nt, Homo sapiens
  misc_RNA (1)...(19): siRNA sense strand
cacaugauauucuggaaga

SEQ ID NO: 1650370 - RNA, 19 nt, Homo sapiens
  misc_RNA (1)...(19): siRNA sense strand
gcucaaguccuccaguaaa

SEQ ID NO: 1650371 - RNA, 19 nt, Homo sapiens
  misc_RNA (1)...(19): siRNA sense strand
gcagcuaaguccuaagaag

SEQ ID NO: 1650372 - RNA, 19 nt, Homo sapiens
  misc_RNA (1)...(19): siRNA sense strand
cagaauggauauagaccaa

SEQ ID NO: 1650373 - RNA, 19 nt, Homo sapiens
  misc_RNA (1)...(19): siRNA sense strand
agagagaacagaauggaua

SEQ ID NO: 1650374 - RNA, 19 nt, Homo sapiens
  misc_RNA (1)...(19): siRNA sense strand
gaaacaaugcagugcuuug

SEQ ID NO: 1650375 - RNA, 19 nt, Homo sapiens
  misc_RNA (1)...(19): siRNA sense strand
agacggaaacauuguauuu

SEQ ID NO: 1650376 - RNA, 19 nt, Homo sapiens
  misc_RNA (1)...(19): siRNA sense strand
uaucaguccucagaaauga

SEQ ID NO: 1650377 - RNA, 19 nt, Homo sapiens
  misc_RNA (1)...(19): siRNA sense strand
ggaggagauuauaauacuu

SEQ ID NO: 1650378 - RNA, 19 nt, Homo sapiens
  misc_RNA (1)...(19): siRNA sense strand
gaagagggaucuggagacu

SEQ ID NO: 1650379 - RNA, 19 nt, Homo sapiens
  misc_RNA (1)...(19): siRNA sense strand
gggaaagacaccagcagua

SEQ ID NO: 1650380 - RNA, 19 nt, Homo sapiens
  misc_RNA (1)...(19): siRNA sense strand
ggaaagguugucaauauag

SEQ ID NO: 1650381 - RNA, 19 nt, Homo sapiens
  misc_RNA (1)...(19): siRNA sense strand
ggacaaaugagacccaaag

SEQ ID NO: 1650382 - RNA, 19 nt, Homo sapiens
  misc_RNA (1)...(19): siRNA sense strand
gcaacaguuuccauaucaa

SEQ ID NO: 1650383 - RNA, 19 nt, Homo sapiens
  misc_RNA (1)...(19): siRNA sense strand
uuacuuaccuguucuucug

SEQ ID NO: 1650384 - RNA, 19 nt, Homo sapiens
  misc_RNA (1)...(19): siRNA sense strand
aauauuacccaaccaagua

SEQ ID NO: 1650385 - RNA, 19 nt, Homo sapiens
  misc_RNA (1)...(19): siRNA sense strand
gaaacgucacuaucaagaa

SEQ ID NO: 1650386 - RNA, 19 nt, Homo sapiens
  misc_RNA (1)...(19): siRNA sense strand
gauacaaauucacugagau

SEQ ID NO: 1650387 - RNA, 19 nt, Homo sapiens
  misc_RNA (1)...(19): siRNA sense strand
uaccagacaugaucuuuca

SEQ ID NO: 1650388 - RNA, 19 nt, Homo sapiens
  misc_RNA (1)...(19): siRNA sense strand
gaacagaauggauauagac

SEQ ID NO: 1650389 - RNA, 19 nt, Homo sapiens
  misc_RNA (1)...(19): siRNA sense strand
ugacgaaagagcauuauug

SEQ ID NO: 1650390 - RNA, 19 nt, Homo sapiens
  misc_RNA (1)...(19): siRNA sense strand
gggccaaaccgaaauguga

SEQ ID NO: 1650391 - RNA, 19 nt, Homo sapiens
  misc_RNA (1)...(19): siRNA sense strand
gaucuggagacuuggauaa

SEQ ID NO: 1650392 - RNA, 19 nt, Homo sapiens
  misc_RNA (1)...(19): siRNA sense strand
gagcugauaucugccaauc

SEQ ID NO: 1650393 - RNA, 19 nt, Homo sapiens
  misc_RNA (1)...(19): siRNA sense strand
gcugagguagccaagauua

SEQ ID NO: 1650394 - RNA, 19 nt, Homo sapiens
  misc_RNA (1)...(19): siRNA sense strand
gauagccucacaucaguuu

SEQ ID NO: 1650395 - RNA, 19 nt, Homo sapiens
  misc_RNA (1)...(19): siRNA sense strand
gauauagaccaaacccaaa

SEQ ID NO: 1650396 - RNA, 19 nt, Homo sapiens
  misc_RNA (1)...(19): siRNA sense strand
gaauggauauagaccaaac

SEQ ID NO: 1650397 - RNA, 19 nt, Homo sapiens
  misc_RNA (1)...(19): siRNA sense strand
cagcagaauaucaugauuu

SEQ ID NO: 1650398 - RNA, 19 nt, Homo sapiens
  misc_RNA (1)...(19): siRNA sense strand
acaaccagauccagccuuu

SEQ ID NO: 1650399 - RNA, 19 nt, Homo sapiens
  misc_RNA (1)...(19): siRNA sense strand
gaaggcaggauuauaugga

SEQ ID NO: 1650400 - RNA, 19 nt, Homo sapiens
  misc_RNA (1)...(19): siRNA sense strand
ccaggaggagauuauaaua

SEQ ID NO: 1650401 - RNA, 19 nt, Homo sapiens
  misc_RNA (1)...(19): siRNA sense strand
cacaauaccugcaauauaa

SEQ ID NO: 1650402 - RNA, 19 nt, Homo sapiens
  misc_RNA (1)...(19): siRNA sense strand
gcaaugaugucgucaagaa

SEQ ID NO: 1650403 - RNA, 19 nt, Homo sapiens
  misc_RNA (1)...(19): siRNA sense strand
gaagguguauucagagauu

SEQ ID NO: 1650404 - RNA, 19 nt, Homo sapiens
  misc_RNA (1)...(19): siRNA sense strand
gaaauccuguaacaaauga

SEQ ID NO: 1650405 - RNA, 19 nt, Homo sapiens
  misc_RNA (1)...(19): siRNA sense strand
caggaaagguugucaauau

SEQ ID NO: 1650406 - RNA, 19 nt, Homo sapiens
  misc_RNA (1)...(19): siRNA sense strand
gaaagguugucaauauaga

SEQ ID NO: 1650407 - RNA, 19 nt, Homo sapiens
  misc_RNA (1)...(19): siRNA sense strand
caaggaggcuuucaucuuc

SEQ ID NO: 1650408 - RNA, 19 nt, Homo sapiens
  misc_RNA (1)...(19): siRNA sense strand
ucacugagauccuccauga

SEQ ID NO: 1650409 - RNA, 19 nt, Homo sapiens
  misc_RNA (1)...(19): siRNA sense strand
ggauaacucucccaauaug

SEQ ID NO: 1650410 - RNA, 19 nt, Homo sapiens
  misc_RNA (1)...(19): siRNA sense strand
gaacuaauucucuggguuu

SEQ ID NO: 1650411 - RNA, 19 nt, Homo sapiens
  misc_RNA (1)...(19): siRNA sense strand
gaaagacaccagcaguaua

SEQ ID NO: 1650412 - RNA, 19 nt, Homo sapiens
  misc_RNA (1)...(19): siRNA sense strand
gauauaauccgaaggugua

SEQ ID NO: 1650413 - RNA, 19 nt, Homo sapiens
  misc_RNA (1)...(19): siRNA sense strand
ugacagagcuuugggcauu

SEQ ID NO: 1650414 - RNA, 19 nt, Homo sapiens
  misc_RNA (1)...(19): siRNA sense strand
ccagagauaugaaacaaug

SEQ ID NO: 1650415 - RNA, 19 nt, Homo sapiens
  misc_RNA (1)...(19): siRNA sense strand
caaaauaggccucuucuua

SEQ ID NO: 1650416 - RNA, 19 nt, Homo sapiens
  misc_RNA (1)...(19): siRNA sense strand
agacagauacgucaaauaa

SEQ ID NO: 1650417 - RNA, 19 nt, Homo sapiens
  misc_RNA (1)...(19): siRNA sense strand
ggacggaaauguugucaag

SEQ ID NO: 1650418 - RNA, 19 nt, Homo sapiens
  misc_RNA (1)...(19): siRNA sense strand
gagaaagacccuaaaauua

SEQ ID NO: 1650419 - RNA, 19 nt, Homo sapiens
  misc_RNA (1)...(19): siRNA sense strand
ggaauucccuggaugaucu

SEQ ID NO: 1650420 - RNA, 19 nt, Homo sapiens
  misc_RNA (1)...(19): siRNA sense strand
agaauuggcugagcugaua

SEQ ID NO: 1650421 - RNA, 19 nt, Homo sapiens
  misc_RNA (1)...(19): siRNA sense strand
gaaaugcgccagagauaug

SEQ ID NO: 1650422 - RNA, 19 nt, Homo sapiens
  misc_RNA (1)...(19): siRNA sense strand
gcugauaucugccaaucuu

SEQ ID NO: 1650423 - RNA, 19 nt, Homo sapiens
  misc_RNA (1)...(19): siRNA sense strand
gaagaagacagaaaggauu

SEQ ID NO: 1650424 - RNA, 19 nt, Homo sapiens
  misc_RNA (1)...(19): siRNA sense strand
ccacaggccuggaagaaau

SEQ ID NO: 1650425 - RNA, 19 nt, Homo sapiens
  misc_RNA (1)...(19): siRNA sense strand
ggaguuuccuggacaaaug

SEQ ID NO: 1650426 - RNA, 19 nt, Homo sapiens
  misc_RNA (1)...(19): siRNA sense strand
gagcaggaaaguaaauaua

SEQ ID NO: 1650427 - RNA, 19 nt, Homo sapiens
  misc_RNA (1)...(19): siRNA sense strand
caagaaugauggauaguca

SEQ ID NO: 1650428 - RNA, 19 nt, Homo sapiens
  misc_RNA (1)...(19): siRNA sense strand
ggaaggaguggauaauaaa

SEQ ID NO: 1650429 - RNA, 19 nt, Homo sapiens
  misc_RNA (1)...(19): siRNA sense strand
cuaagaagaaggagaauaa

SEQ ID NO: 1650430 - RNA, 19 nt, Homo sapiens
  misc_RNA (1)...(19): siRNA sense strand
gacaggcacuugaauugaa

SEQ ID NO: 1650431 - RNA, 19 nt, Homo sapiens
  misc_RNA (1)...(19): siRNA sense strand
ggauagcccuguuucuguu

SEQ ID NO: 1650432 - RNA, 19 nt, Homo sapiens
  misc_RNA (1)...(19): siRNA sense strand
uggaaggaguggauaauaa

SEQ ID NO: 1650433 - RNA, 19 nt, Homo sapiens
  misc_RNA (1)...(19): siRNA sense strand
ggaaacaguaagacagaua

SEQ ID NO: 1650434 - RNA, 19 nt, Homo sapiens
  misc_RNA (1)...(19): siRNA sense strand
ccaagaagcagcaguaaug

SEQ ID NO: 1650435 - RNA, 19 nt, Homo sapiens
  misc_RNA (1)...(19): siRNA sense strand
ggaaagcaaaggucauaaa

SEQ ID NO: 1650436 - RNA, 19 nt, Homo sapiens
  misc_RNA (1)...(19): siRNA sense strand
gcaaggaggcuuucaucuu

SEQ ID NO: 1650437 - RNA, 19 nt, Homo sapiens
  misc_RNA (1)...(19): siRNA sense strand
gugaugcacucucuaaaga

SEQ ID NO: 1650438 - RNA, 19 nt, Homo sapiens
  misc_RNA (1)...(19): siRNA sense strand
ccagaaacgucacuaucaa

SEQ ID NO: 1650439 - RNA, 19 nt, Homo sapiens
  misc_RNA (1)...(19): siRNA sense strand
aaagcaaacucuuccgaaa

SEQ ID NO: 1650440 - RNA, 19 nt, Homo sapiens
  misc_RNA (1)...(19): siRNA sense strand
caacagaggguggcuauga

SEQ ID NO: 1650441 - RNA, 19 nt, Homo sapiens
  misc_RNA (1)...(19): siRNA sense strand
gggcagggaguuauugaua

SEQ ID NO: 1650442 - RNA, 19 nt, Homo sapiens
  misc_RNA (1)...(19): siRNA sense strand
caaacaggaugcuuuccaa

SEQ ID NO: 1650443 - RNA, 19 nt, Homo sapiens
  misc_RNA (1)...(19): siRNA sense strand
agagggaucuggagacuug

SEQ ID NO: 1650444 - RNA, 19 nt, Homo sapiens
  misc_RNA (1)...(19): siRNA sense strand
gaaggagaauaaugcacuu

SEQ ID NO: 1650445 - RNA, 19 nt, Homo sapiens
  misc_RNA (1)...(19): siRNA sense strand
aaagacaccagcaguauaa

SEQ ID NO: 1650446 - RNA, 19 nt, Homo sapiens
  misc_RNA (1)...(19): siRNA sense strand
ccaguaacauagcuucauu

SEQ ID NO: 1650447 - RNA, 19 nt, Homo sapiens
  misc_RNA (1)...(19): siRNA sense strand
cagaaaaugucacacaaua

SEQ ID NO: 1650448 - RNA, 19 nt, Homo sapiens
  misc_RNA (1)...(19): siRNA sense strand
gaaucgagacggaaacauu

SEQ ID NO: 1650449 - RNA, 19 nt, Homo sapiens
  misc_RNA (1)...(19): siRNA sense strand
caaaugagacccaaagaca

SEQ ID NO: 1650450 - RNA, 19 nt, Homo sapiens
  misc_RNA (1)...(19): siRNA sense strand
gaaaugugacugugacuca

SEQ ID NO: 1650451 - RNA, 19 nt, Homo sapiens
  misc_RNA (1)...(19): siRNA sense strand
ggaaagacaccagcaguau

SEQ ID NO: 1650452 - RNA, 19 nt, Homo sapiens
  misc_RNA (1)...(19): siRNA sense strand
aggaaagguugucaauaua

SEQ ID NO: 1650453 - RNA, 19 nt, Homo sapiens
  misc_RNA (1)...(19): siRNA sense strand
gaauaaugcacuucuuaga

SEQ ID NO: 1650454 - RNA, 19 nt, Homo sapiens
  misc_RNA (1)...(19): siRNA sense strand
caagagaagcaccggauuu

SEQ ID NO: 1650455 - RNA, 19 nt, Homo sapiens
  misc_RNA (1)...(19): siRNA sense strand
gaagauauaauccgaaggu

SEQ ID NO: 1650456 - RNA, 19 nt, Homo sapiens
  misc_RNA (1)...(19): siRNA sense strand
caaaugaggccuggugaaa

SEQ ID NO: 1650457 - RNA, 19 nt, Homo sapiens
  misc_RNA (1)...(19): siRNA sense strand
ggcauuggaugguuuccua

SEQ ID NO: 1650458 - RNA, 19 nt, Homo sapiens
  misc_RNA (1)...(19): siRNA sense strand
gacgggagcaggaaaguaa

SEQ ID NO: 1650459 - RNA, 19 nt, Homo sapiens
  misc_RNA (1)...(19): siRNA sense strand
ucagaaggcaggauuauau

SEQ ID NO: 1650460 - RNA, 19 nt, Homo sapiens
  misc_RNA (1)...(19): siRNA sense strand
uagcagagaucaccucagu

SEQ ID NO: 1650461 - RNA, 19 nt, Homo sapiens
  misc_RNA (1)...(19): siRNA sense strand
caaguaaaguaagcaauca

SEQ ID NO: 1650462 - RNA, 19 nt, Homo sapiens
  misc_RNA (1)...(19): siRNA sense strand
ccugagagcuuuauuacca

SEQ ID NO: 1650463 - RNA, 19 nt, Homo sapiens
  misc_RNA (1)...(19): siRNA sense strand
acacaauaccugcaauaua

SEQ ID NO: 1650464 - RNA, 19 nt, Homo sapiens
  misc_RNA (1)...(19): siRNA sense strand
cggaaacauuguauuugua

SEQ ID NO: 1650465 - RNA, 19 nt, Homo sapiens
  misc_RNA (1)...(19): siRNA sense strand
gaauucaccagcugaggua

SEQ ID NO: 1650466 - RNA, 19 nt, Homo sapiens
  misc_RNA (1)...(19): siRNA sense strand
gaaaacaccacaugauauu

SEQ ID NO: 1650467 - RNA, 19 nt, Homo sapiens
  misc_RNA (1)...(19): siRNA sense strand
gcaugaguaugucgccaaa

SEQ ID NO: 1650468 - RNA, 19 nt, Homo sapiens
  misc_RNA (1)...(19): siRNA sense strand
caugaggccuggcuuugaa

SEQ ID NO: 1650469 - RNA, 19 nt, Homo sapiens
  misc_RNA (1)...(19): siRNA sense strand
cacaugauauucuggaaga

SEQ ID NO: 1650470 - RNA, 19 nt, Homo sapiens
  misc_RNA (1)...(19): siRNA sense strand
gcucaaguccuccaguaaa

SEQ ID NO: 1650471 - RNA, 19 nt, Homo sapiens
  misc_RNA (1)...(19): siRNA sense strand
gcagcuaaguccuaagaag

SEQ ID NO: 1650472 - RNA, 19 nt, Homo sapiens
  misc_RNA (1)...(19): siRNA sense strand
cagaauggauauagaccaa

SEQ ID NO: 1650473 - RNA, 19 nt, Homo sapiens
  misc_RNA (1)...(19): siRNA sense strand
agagagaacagaauggaua

SEQ ID NO: 1650474 - RNA, 19 nt, Homo sapiens
  misc_RNA (1)...(19): siRNA sense strand
gaaacaaugcagugcuuug

SEQ ID NO: 1650475 - RNA, 19 nt, Homo sapiens
  misc_RNA (1)...(19): siRNA sense strand
agacggaaacauuguauuu

SEQ ID NO: 1650476 - RNA, 19 nt, Homo sapiens
  misc_RNA (1)...(19): siRNA sense strand
uaucaguccucagaaauga

SEQ ID NO: 1650477 - RNA, 19 nt, Homo sapiens
  misc_RNA (1)...(19): siRNA sense strand
ggaggagauuauaauacuu

SEQ ID NO: 1650478 - RNA, 19 nt, Homo sapiens
  misc_RNA (1)...(19): siRNA sense strand
gaagagggaucuggagacu

SEQ ID NO: 1650479 - RNA, 19 nt, Homo sapiens
  misc_RNA (1)...(19): siRNA sense strand
gggaaagacaccagcagua

SEQ ID NO: 1650480 - RNA, 19 nt, Homo sapiens
  misc_RNA (1)...(19): siRNA sense strand
ggaaagguugucaauauag

SEQ ID NO: 1650481 - RNA, 19 nt, Homo sapiens
  misc_RNA (1)...(19): siRNA sense strand
ggacaaaugagacccaaag

SEQ ID NO: 1650482 - RNA, 19 nt, Homo sapiens
  misc_RNA (1)...(19): siRNA sense strand
gcaacaguuuccauaucaa

SEQ ID NO: 1650483 - RNA, 19 nt, Homo sapiens
  misc_RNA (1)...(19): siRNA sense strand
uuacuuaccuguucuucug

SEQ ID NO: 1650484 - RNA, 19 nt, Homo sapiens
  misc_RNA (1)...(19): siRNA sense strand
aauauuacccaaccaagua

SEQ ID NO: 1650485 - RNA, 19 nt, Homo sapiens
  misc_RNA (1)...(19): siRNA sense strand
gaaacgucacuaucaagaa

SEQ ID NO: 1650486 - RNA, 19 nt, Homo sapiens
  misc_RNA (1)...(19): siRNA sense strand
gauacaaauucacugagau

SEQ ID NO: 1650487 - RNA, 19 nt, Homo sapiens
  misc_RNA (1)...(19): siRNA sense strand
uaccagacaugaucuuuca

SEQ ID NO: 1650488 - RNA, 19 nt, Homo sapiens
  misc_RNA (1)...(19): siRNA sense strand
gaacagaauggauauagac

SEQ ID NO: 1650489 - RNA, 19 nt, Homo sapiens
  misc_RNA (1)...(19): siRNA sense strand
ugacgaaagagcauuauug

SEQ ID NO: 1650490 - RNA, 19 nt, Homo sapiens
  misc_RNA (1)...(19): siRNA sense strand
gggccaaaccgaaauguga

SEQ ID NO: 1650491 - RNA, 19 nt, Homo sapiens
  misc_RNA (1)...(19): siRNA sense strand
gaucuggagacuuggauaa

SEQ ID NO: 1650492 - RNA, 19 nt, Homo sapiens
  misc_RNA (1)...(19): siRNA sense strand
gagcugauaucugccaauc

SEQ ID NO: 1650493 - RNA, 19 nt, Homo sapiens
  misc_RNA (1)...(19): siRNA sense strand
gcugagguagccaagauua

SEQ ID NO: 1650494 - RNA, 19 nt, Homo sapiens
  misc_RNA (1)...(19): siRNA sense strand
gauagccucacaucaguuu

SEQ ID NO: 1650495 - RNA, 19 nt, Homo sapiens
  misc_RNA (1)...(19): siRNA sense strand
gauauagaccaaacccaaa

SEQ ID NO: 1650496 - RNA, 19 nt, Homo sapiens
  misc_RNA (1)...(19): siRNA sense strand
gaauggauauagaccaaac

SEQ ID NO: 1650497 - RNA, 19 nt, Homo sapiens
  misc_RNA (1)...(19): siRNA sense strand
cagcagaauaucaugauuu

SEQ ID NO: 1650498 - RNA, 19 nt, Homo sapiens
  misc_RNA (1)...(19): siRNA sense strand
acaaccagauccagccuuu

SEQ ID NO: 1650499 - RNA, 19 nt, Homo sapiens
  misc_RNA (1)...(19): siRNA sense strand
gaaggcaggauuauaugga

SEQ ID NO: 1650500 - RNA, 19 nt, Homo sapiens
  misc_RNA (1)...(19): siRNA sense strand
ccaggaggagauuauaaua

SEQ ID NO: 1650501 - RNA, 19 nt, Homo sapiens
  misc_RNA (1)...(19): siRNA sense strand
gcaaguaccucauaagaaa

SEQ ID NO: 1650502 - RNA, 19 nt, Homo sapiens
  misc_RNA (1)...(19): siRNA sense strand
ggacccagcuuuaacuuua

SEQ ID NO: 1650503 - RNA, 19 nt, Homo sapiens
  misc_RNA (1)...(19): siRNA sense strand
acacaagguucauuacuua

SEQ ID NO: 1650504 - RNA, 19 nt, Homo sapiens
  misc_RNA (1)...(19): siRNA sense strand
gaagauaaccguccaggaa

SEQ ID NO: 1650505 - RNA, 19 nt, Homo sapiens
  misc_RNA (1)...(19): siRNA sense strand
cgaaaggccugcuauaguu

SEQ ID NO: 1650506 - RNA, 19 nt, Homo sapiens
  misc_RNA (1)...(19): siRNA sense strand
gaaagacucugggaugguu

SEQ ID NO: 1650507 - RNA, 19 nt, Homo sapiens
  misc_RNA (1)...(19): siRNA sense strand
gcaaaucucugaaaaguga

SEQ ID NO: 1650508 - RNA, 19 nt, Homo sapiens
  misc_RNA (1)...(19): siRNA sense strand
ggcaucagcucuauucaaa

SEQ ID NO: 1650509 - RNA, 19 nt, Homo sapiens
  misc_RNA (1)...(19): siRNA sense strand
ggaggcaaaucuacacauu

SEQ ID NO: 1650510 - RNA, 19 nt, Homo sapiens
  misc_RNA (1)...(19): siRNA sense strand
gaacagcaaaucucugaaa

SEQ ID NO: 1650511 - RNA, 19 nt, Homo sapiens
  misc_RNA (1)...(19): siRNA sense strand
aaagaaacauucaccuuga

SEQ ID NO: 1650512 - RNA, 19 nt, Homo sapiens
  misc_RNA (1)...(19): siRNA sense strand
caacacaacuauacagaag

SEQ ID NO: 1650513 - RNA, 19 nt, Homo sapiens
  misc_RNA (1)...(19): siRNA sense strand
gaagaaccauguccaaggu

SEQ ID NO: 1650514 - RNA, 19 nt, Homo sapiens
  misc_RNA (1)...(19): siRNA sense strand
ggacauccagucucgaaua

SEQ ID NO: 1650515 - RNA, 19 nt, Homo sapiens
  misc_RNA (1)...(19): siRNA sense strand
gagaaccaguggacaugua

SEQ ID NO: 1650516 - RNA, 19 nt, Homo sapiens
  misc_RNA (1)...(19): siRNA sense strand
guaaauuucuuuccugaca

SEQ ID NO: 1650517 - RNA, 19 nt, Homo sapiens
  misc_RNA (1)...(19): siRNA sense strand
gaaugaaauacacgucuua

SEQ ID NO: 1650518 - RNA, 19 nt, Homo sapiens
  misc_RNA (1)...(19): siRNA sense strand
cgaaauugguguuugauca

SEQ ID NO: 1650519 - RNA, 19 nt, Homo sapiens
  misc_RNA (1)...(19): siRNA sense strand
gaucacaccuaugcucaaa

SEQ ID NO: 1650520 - RNA, 19 nt, Homo sapiens
  misc_RNA (1)...(19): siRNA sense strand
gaacuuaguggcauugaug

SEQ ID NO: 1650521 - RNA, 19 nt, Homo sapiens
  misc_RNA (1)...(19): siRNA sense strand
cagcaugacuccuccuaaa

SEQ ID NO: 1650522 - RNA, 19 nt, Homo sapiens
  misc_RNA (1)...(19): siRNA sense strand
gauguucccuugucgauuc

SEQ ID NO: 1650523 - RNA, 19 nt, Homo sapiens
  misc_RNA (1)...(19): siRNA sense strand
ugucaaaccuggaaacuuc

SEQ ID NO: 1650524 - RNA, 19 nt, Homo sapiens
  misc_RNA (1)...(19): siRNA sense strand
guuaugauguggacucuga

SEQ ID NO: 1650525 - RNA, 19 nt, Homo sapiens
  misc_RNA (1)...(19): siRNA sense strand
gcuauucgccuuugccuaa

SEQ ID NO: 1650526 - RNA, 19 nt, Homo sapiens
  misc_RNA (1)...(19): siRNA sense strand
ccaccuaccuucccgagaa

SEQ ID NO: 1650527 - RNA, 19 nt, Homo sapiens
  misc_RNA (1)...(19): siRNA sense strand
uaaaauaguuccacucuug

SEQ ID NO: 1650528 - RNA, 19 nt, Homo sapiens
  misc_RNA (1)...(19): siRNA sense strand
caucagcucuauucaaauc

SEQ ID NO: 1650529 - RNA, 19 nt, Homo sapiens
  misc_RNA (1)...(19): siRNA sense strand
ggacaaaccaaaugaccaa

SEQ ID NO: 1650530 - RNA, 19 nt, Homo sapiens
  misc_RNA (1)...(19): siRNA sense strand
acacagagagcaacuauug

SEQ ID NO: 1650531 - RNA, 19 nt, Homo sapiens
  misc_RNA (1)...(19): siRNA sense strand
caucccauguuaacagaua

SEQ ID NO: 1650532 - RNA, 19 nt, Homo sapiens
  misc_RNA (1)...(19): siRNA sense strand
cagaauaucacauuuggaa

SEQ ID NO: 1650533 - RNA, 19 nt, Homo sapiens
  misc_RNA (1)...(19): siRNA sense strand
ucacaccuaugcucaaaga

SEQ ID NO: 1650534 - RNA, 19 nt, Homo sapiens
  misc_RNA (1)...(19): siRNA sense strand
gaagaagaaccauguccaa

SEQ ID NO: 1650535 - RNA, 19 nt, Homo sapiens
  misc_RNA (1)...(19): siRNA sense strand
gaauauaagccacgaugga

SEQ ID NO: 1650536 - RNA, 19 nt, Homo sapiens
  misc_RNA (1)...(19): siRNA sense strand
guauaucagucaacaggaa

SEQ ID NO: 1650537 - RNA, 19 nt, Homo sapiens
  misc_RNA (1)...(19): siRNA sense strand
caaguaccgugaacaggaa

SEQ ID NO: 1650538 - RNA, 19 nt, Homo sapiens
  misc_RNA (1)...(19): siRNA sense strand
ugaugauccugauauagua

SEQ ID NO: 1650539 - RNA, 19 nt, Homo sapiens
  misc_RNA (1)...(19): siRNA sense strand
gaaauacacgucuuaucug

SEQ ID NO: 1650540 - RNA, 19 nt, Homo sapiens
  misc_RNA (1)...(19): siRNA sense strand
caaaccaaaugaccaaucu

SEQ ID NO: 1650541 - RNA, 19 nt, Homo sapiens
  misc_RNA (1)...(19): siRNA sense strand
aauaggacacugcauguua

SEQ ID NO: 1650542 - RNA, 19 nt, Homo sapiens
  misc_RNA (1)...(19): siRNA sense strand
cagagacuguuuauuuguu

SEQ ID NO: 1650543 - RNA, 19 nt, Homo sapiens
  misc_RNA (1)...(19): siRNA sense strand
gcgaagaguugauugaaaa

SEQ ID NO: 1650544 - RNA, 19 nt, Homo sapiens
  misc_RNA (1)...(19): siRNA sense strand
ucagucaacaggaauauaa

SEQ ID NO: 1650545 - RNA, 19 nt, Homo sapiens
  misc_RNA (1)...(19): siRNA sense strand
aaugauggcuuguucaauc

SEQ ID NO: 1650546 - RNA, 19 nt, Homo sapiens
  misc_RNA (1)...(19): siRNA sense strand
ccaaagaugagauuagaug

SEQ ID NO: 1650547 - RNA, 19 nt, Homo sapiens
  misc_RNA (1)...(19): siRNA sense strand
caucugguauguugaacuu

SEQ ID NO: 1650548 - RNA, 19 nt, Homo sapiens
  misc_RNA (1)...(19): siRNA sense strand
ugaaauacacgucuuaucu

SEQ ID NO: 1650549 - RNA, 19 nt, Homo sapiens
  misc_RNA (1)...(19): siRNA sense strand
ggccgaaauugguguuuga

SEQ ID NO: 1650550 - RNA, 19 nt, Homo sapiens
  misc_RNA (1)...(19): siRNA sense strand
cauugaugauccugauaua

SEQ ID NO: 1650551 - RNA, 19 nt, Homo sapiens
  misc_RNA (1)...(19): siRNA sense strand
gauguggacucugaucaug

SEQ ID NO: 1650552 - RNA, 19 nt, Homo sapiens
  misc_RNA (1)...(19): siRNA sense strand
ggauacugcugcugaugga

SEQ ID NO: 1650553 - RNA, 19 nt, Homo sapiens
  misc_RNA (1)...(19): siRNA sense strand
aaccuugucucaacuggua

SEQ ID NO: 1650554 - RNA, 19 nt, Homo sapiens
  misc_RNA (1)...(19): siRNA sense strand
cauccagucucgaauagga

SEQ ID NO: 1650555 - RNA, 19 nt, Homo sapiens
  misc_RNA (1)...(19): siRNA sense strand
caacugguauagcaaguac

SEQ ID NO: 1650556 - RNA, 19 nt, Homo sapiens
  misc_RNA (1)...(19): siRNA sense strand
gaucaagcugcaaaggaua

SEQ ID NO: 1650557 - RNA, 19 nt, Homo sapiens
  misc_RNA (1)...(19): siRNA sense strand
uguggacucugaucaugua

SEQ ID NO: 1650558 - RNA, 19 nt, Homo sapiens
  misc_RNA (1)...(19): siRNA sense strand
ucagaugguuauugauguu

SEQ ID NO: 1650559 - RNA, 19 nt, Homo sapiens
  misc_RNA (1)...(19): siRNA sense strand
ccaguggcuuaaagaauga

SEQ ID NO: 1650560 - RNA, 19 nt, Homo sapiens
  misc_RNA (1)...(19): siRNA sense strand
gcauugcaaguaccucaua

SEQ ID NO: 1650561 - RNA, 19 nt, Homo sapiens
  misc_RNA (1)...(19): siRNA sense strand
uacacaagguucauuacuu

SEQ ID NO: 1650562 - RNA, 19 nt, Homo sapiens
  misc_RNA (1)...(19): siRNA sense strand
uaucuggacucagcaaaga

SEQ ID NO: 1650563 - RNA, 19 nt, Homo sapiens
  misc_RNA (1)...(19): siRNA sense strand
gacaggauuuacacagaga

SEQ ID NO: 1650564 - RNA, 19 nt, Homo sapiens
  misc_RNA (1)...(19): siRNA sense strand
gauauucaacggaggcaaa

SEQ ID NO: 1650565 - RNA, 19 nt, Homo sapiens
  misc_RNA (1)...(19): siRNA sense strand
ugaaaaggcuguaaaugau

SEQ ID NO: 1650566 - RNA, 19 nt, Homo sapiens
  misc_RNA (1)...(19): siRNA sense strand
ucacugaaguuguguagac

SEQ ID NO: 1650567 - RNA, 19 nt, Homo sapiens
  misc_RNA (1)...(19): siRNA sense strand
gauccagaacugaaugaaa

SEQ ID NO: 1650568 - RNA, 19 nt, Homo sapiens
  misc_RNA (1)...(19): siRNA sense strand
gcauguuauuccacucaaa

SEQ ID NO: 1650569 - RNA, 19 nt, Homo sapiens
  misc_RNA (1)...(19): siRNA sense strand
ugacauugauacaaacaca

SEQ ID NO: 1650570 - RNA, 19 nt, Homo sapiens
  misc_RNA (1)...(19): siRNA sense strand
ccaaaugaccaaucuucaa

SEQ ID NO: 1650571 - RNA, 19 nt, Homo sapiens
  misc_RNA (1)...(19): siRNA sense strand
uccaguggcuuaaagaaug

SEQ ID NO: 1650572 - RNA, 19 nt, Homo sapiens
  misc_RNA (1)...(19): siRNA sense strand
ugaucaagcugcaaaggau

SEQ ID NO: 1650573 - RNA, 19 nt, Homo sapiens
  misc_RNA (1)...(19): siRNA sense strand
ugaaugaaauacacgucuu

SEQ ID NO: 1650574 - RNA, 19 nt, Homo sapiens
  misc_RNA (1)...(19): siRNA sense strand
gacauccagucucgaauag

SEQ ID NO: 1650575 - RNA, 19 nt, Homo sapiens
  misc_RNA (1)...(19): siRNA sense strand
gcauugaugauccugauau

SEQ ID NO: 1650576 - RNA, 19 nt, Homo sapiens
  misc_RNA (1)...(19): siRNA sense strand
uuuagcaucugguauguug

SEQ ID NO: 1650577 - RNA, 19 nt, Homo sapiens
  misc_RNA (1)...(19): siRNA sense strand
gaaauugguguuugaucau

SEQ ID NO: 1650578 - RNA, 19 nt, Homo sapiens
  misc_RNA (1)...(19): siRNA sense strand
ucagcucuuugacaccuua

SEQ ID NO: 1650579 - RNA, 19 nt, Homo sapiens
  misc_RNA (1)...(19): siRNA sense strand
gcucgaaaggccugcuaua

SEQ ID NO: 1650580 - RNA, 19 nt, Homo sapiens
  misc_RNA (1)...(19): siRNA sense strand
caaaugaccaaucuucaag

SEQ ID NO: 1650581 - RNA, 19 nt, Homo sapiens
  misc_RNA (1)...(19): siRNA sense strand
gagagcaacuauugaucca

SEQ ID NO: 1650582 - RNA, 19 nt, Homo sapiens
  misc_RNA (1)...(19): siRNA sense strand
gguagaauuuugacuugua

SEQ ID NO: 1650583 - RNA, 19 nt, Homo sapiens
  misc_RNA (1)...(19): siRNA sense strand
gaaaggccugcuauaguuc

SEQ ID NO: 1650584 - RNA, 19 nt, Homo sapiens
  misc_RNA (1)...(19): siRNA sense strand
gcuguuguccaguggcuua

SEQ ID NO: 1650585 - RNA, 19 nt, Homo sapiens
  misc_RNA (1)...(19): siRNA sense strand
cccaucagcuuguauacga

SEQ ID NO: 1650586 - RNA, 19 nt, Homo sapiens
  misc_RNA (1)...(19): siRNA sense strand
ucaguggcuuguuugcuuu

SEQ ID NO: 1650587 - RNA, 19 nt, Homo sapiens
  misc_RNA (1)...(19): siRNA sense strand
cauaugaucuacacuuuug

SEQ ID NO: 1650588 - RNA, 19 nt, Homo sapiens
  misc_RNA (1)...(19): siRNA sense strand
uaaaugauggcuuguucaa

SEQ ID NO: 1650589 - RNA, 19 nt, Homo sapiens
  misc_RNA (1)...(19): siRNA sense strand
uguaaaugauggcuuguuc

SEQ ID NO: 1650590 - RNA, 19 nt, Homo sapiens
  misc_RNA (1)...(19): siRNA sense strand
gagacuguuuauuuguuug

SEQ ID NO: 1650591 - RNA, 19 nt, Homo sapiens
  misc_RNA (1)...(19): siRNA sense strand
gcucuuugacaccuuagua

SEQ ID NO: 1650592 - RNA, 19 nt, Homo sapiens
  misc_RNA (1)...(19): siRNA sense strand
caaagaugagauuagauga

SEQ ID NO: 1650593 - RNA, 19 nt, Homo sapiens
  misc_RNA (1)...(19): siRNA sense strand
gcaacuauccuccccagua

SEQ ID NO: 1650594 - RNA, 19 nt, Homo sapiens
  misc_RNA (1)...(19): siRNA sense strand
uaguuggucuugugucuau

SEQ ID NO: 1650595 - RNA, 19 nt, Homo sapiens
  misc_RNA (1)...(19): siRNA sense strand
guagacauaauaucagaug

SEQ ID NO: 1650596 - RNA, 19 nt, Homo sapiens
  misc_RNA (1)...(19): siRNA sense strand
ggacucugaucauguagac

SEQ ID NO: 1650597 - RNA, 19 nt, Homo sapiens
  misc_RNA (1)...(19): siRNA sense strand
gaggacauccagucucgaa

SEQ ID NO: 1650598 - RNA, 19 nt, Homo sapiens
  misc_RNA (1)...(19): siRNA sense strand
guaauggcagcguagauga

SEQ ID NO: 1650599 - RNA, 19 nt, Homo sapiens
  misc_RNA (1)...(19): siRNA sense strand
ggauggaacacaagaucuu

SEQ ID NO: 1650600 - RNA, 19 nt, Homo sapiens
  misc_RNA (1)...(19): siRNA sense strand
gcucugggcuuuucugaug

SEQ ID NO: 1650601 - RNA, 19 nt, Homo sapiens
  misc_RNA (1)...(19): siRNA sense strand
ggacaagcaugaagaacua

SEQ ID NO: 1650602 - RNA, 19 nt, Homo sapiens
  misc_RNA (1)...(19): siRNA sense strand
gaacaucggugucguugug

SEQ ID NO: 1650603 - RNA, 19 nt, Homo sapiens
  misc_RNA (1)...(19): siRNA sense strand
agaaggagcugauagacua

SEQ ID NO: 1650604 - RNA, 19 nt, Homo sapiens
  misc_RNA (1)...(19): siRNA sense strand
cuacaacuaucuuggauuu

SEQ ID NO: 1650605 - RNA, 19 nt, Homo sapiens
  misc_RNA (1)...(19): siRNA sense strand
gagaagcuauugaaagaug

SEQ ID NO: 1650606 - RNA, 19 nt, Homo sapiens
  misc_RNA (1)...(19): siRNA sense strand
uagagaagcuauugaaaga

SEQ ID NO: 1650607 - RNA, 19 nt, Homo sapiens
  misc_RNA (1)...(19): siRNA sense strand
ugaaagaugccauuguuua

SEQ ID NO: 1650608 - RNA, 19 nt, Homo sapiens
  misc_RNA (1)...(19): siRNA sense strand
gauuauaacugguccuuca

SEQ ID NO: 1650609 - RNA, 19 nt, Homo sapiens
  misc_RNA (1)...(19): siRNA sense strand
gaaagaugccauuguuuau

SEQ ID NO: 1650610 - RNA, 19 nt, Homo sapiens
  misc_RNA (1)...(19): siRNA sense strand
ggccagauccaucauguua

SEQ ID NO: 1650611 - RNA, 19 nt, Homo sapiens
  misc_RNA (1)...(19): siRNA sense strand
guacaacaguuagcugaaa

SEQ ID NO: 1650612 - RNA, 19 nt, Homo sapiens
  misc_RNA (1)...(19): siRNA sense strand
ggauguggauguuaugaug

SEQ ID NO: 1650613 - RNA, 19 nt, Homo sapiens
  misc_RNA (1)...(19): siRNA sense strand
uaaaggagauagaugaagu

SEQ ID NO: 1650614 - RNA, 19 nt, Homo sapiens
  misc_RNA (1)...(19): siRNA sense strand
caaggaaucuguacaugag

SEQ ID NO: 1650615 - RNA, 19 nt, Homo sapiens
  misc_RNA (1)...(19): siRNA sense strand
ccaaagaaauacuugauac

SEQ ID NO: 1650616 - RNA, 19 nt, Homo sapiens
  misc_RNA (1)...(19): siRNA sense strand
gacagucucaugauuauaa

SEQ ID NO: 1650617 - RNA, 19 nt, Homo sapiens
  misc_RNA (1)...(19): siRNA sense strand
gcaagaaggagcugauaga

SEQ ID NO: 1650618 - RNA, 19 nt, Homo sapiens
  misc_RNA (1)...(19): siRNA sense strand
cgagauuucuugagguauu

SEQ ID NO: 1650619 - RNA, 19 nt, Homo sapiens
  misc_RNA (1)...(19): siRNA sense strand
ugaagacucuccaguagug

SEQ ID NO: 1650620 - RNA, 19 nt, Homo sapiens
  misc_RNA (1)...(19): siRNA sense strand
ggagacgccugaaagagau

SEQ ID NO: 1650621 - RNA, 19 nt, Homo sapiens
  misc_RNA (1)...(19): siRNA sense strand
uaacugguccuucaaguau

SEQ ID NO: 1650622 - RNA, 19 nt, Homo sapiens
  misc_RNA (1)...(19): siRNA sense strand
gaacguucacaaagaguuu

SEQ ID NO: 1650623 - RNA, 19 nt, Homo sapiens
  misc_RNA (1)...(19): siRNA sense strand
ugaagaaacagaagacuga

SEQ ID NO: 1650624 - RNA, 19 nt, Homo sapiens
  misc_RNA (1)...(19): siRNA sense strand
gauaagagacaacuggaau

SEQ ID NO: 1650625 - RNA, 19 nt, Homo sapiens
  misc_RNA (1)...(19): siRNA sense strand
aaacauggguuccuacaac

SEQ ID NO: 1650626 - RNA, 19 nt, Homo sapiens
  misc_RNA (1)...(19): siRNA sense strand
gcaagguucuuaggaguag

SEQ ID NO: 1650627 - RNA, 19 nt, Homo sapiens
  misc_RNA (1)...(19): siRNA sense strand
uauugcagcugaaguauuc

SEQ ID NO: 1650628 - RNA, 19 nt, Homo sapiens
  misc_RNA (1)...(19): siRNA sense strand
gucagcagcucauaccaaa

SEQ ID NO: 1650629 - RNA, 19 nt, Homo sapiens
  misc_RNA (1)...(19): siRNA sense strand
gcgaacacauucucauagu

SEQ ID NO: 1650630 - RNA, 19 nt, Homo sapiens
  misc_RNA (1)...(19): siRNA sense strand
gagcaaccauuagaaucuu

SEQ ID NO: 1650631 - RNA, 19 nt, Homo sapiens
  misc_RNA (1)...(19): siRNA sense strand
ugauugcccucaagaagaa

SEQ ID NO: 1650632 - RNA, 19 nt, Homo sapiens
  misc_RNA (1)...(19): siRNA sense strand
ccagauccaucauguuaca

SEQ ID NO: 1650633 - RNA, 19 nt, Homo sapiens
  misc_RNA (1)...(19): siRNA sense strand
aaaugaagacucuccagua

SEQ ID NO: 1650634 - RNA, 19 nt, Homo sapiens
  misc_RNA (1)...(19): siRNA sense strand
ggagggaucuauuguucgu

SEQ ID NO: 1650635 - RNA, 19 nt, Homo sapiens
  misc_RNA (1)...(19): siRNA sense strand
caaaauggaggacuauaua

SEQ ID NO: 1650636 - RNA, 19 nt, Homo sapiens
  misc_RNA (1)...(19): siRNA sense strand
cuacaugccugccaaaauu

SEQ ID NO: 1650637 - RNA, 19 nt, Homo sapiens
  misc_RNA (1)...(19): siRNA sense strand
guaaagaguguguacaaca

SEQ ID NO: 1650638 - RNA, 19 nt, Homo sapiens
  misc_RNA (1)...(19): siRNA sense strand
ucaagaagcagccgccaaa

SEQ ID NO: 1650639 - RNA, 19 nt, Homo sapiens
  misc_RNA (1)...(19): siRNA sense strand
gagacgacguaugaagaaa

SEQ ID NO: 1650640 - RNA, 19 nt, Homo sapiens
  misc_RNA (1)...(19): siRNA sense strand
ggaaucggccaaucuguag

SEQ ID NO: 1650641 - RNA, 19 nt, Homo sapiens
  misc_RNA (1)...(19): siRNA sense strand
uaaagaguguguacaacag

SEQ ID NO: 1650642 - RNA, 19 nt, Homo sapiens
  misc_RNA (1)...(19): siRNA sense strand
gaagugauugcccucaaga

SEQ ID NO: 1650643 - RNA, 19 nt, Homo sapiens
  misc_RNA (1)...(19): siRNA sense strand
gagauuucuugagguauug

SEQ ID NO: 1650644 - RNA, 19 nt, Homo sapiens
  misc_RNA (1)...(19): siRNA sense strand
ccauuagaaucuucaaaca

SEQ ID NO: 1650645 - RNA, 19 nt, Homo sapiens
  misc_RNA (1)...(19): siRNA sense strand
gcaugggauuugcaacgaa

SEQ ID NO: 1650646 - RNA, 19 nt, Homo sapiens
  misc_RNA (1)...(19): siRNA sense strand
ugaacugaaucaugcauca

SEQ ID NO: 1650647 - RNA, 19 nt, Homo sapiens
  misc_RNA (1)...(19): siRNA sense strand
cagcagcucauaccaaaga

SEQ ID NO: 1650648 - RNA, 19 nt, Homo sapiens
  misc_RNA (1)...(19): siRNA sense strand
aaugaagacucuccaguag

SEQ ID NO: 1650649 - RNA, 19 nt, Homo sapiens
  misc_RNA (1)...(19): siRNA sense strand
ccgaggauguggauguuau

SEQ ID NO: 1650650 - RNA, 19 nt, Homo sapiens
  misc_RNA (1)...(19): siRNA sense strand
caacagaaagagaagaaca

SEQ ID NO: 1650651 - RNA, 19 nt, Homo sapiens
  misc_RNA (1)...(19): siRNA sense strand
ggagcaaccauuagaaucu

SEQ ID NO: 1650652 - RNA, 19 nt, Homo sapiens
  misc_RNA (1)...(19): siRNA sense strand
aaagguugccugauucuga

SEQ ID NO: 1650653 - RNA, 19 nt, Homo sapiens
  misc_RNA (1)...(19): siRNA sense strand
guacucacccucuuuggau

SEQ ID NO: 1650654 - RNA, 19 nt, Homo sapiens
  misc_RNA (1)...(19): siRNA sense strand
gacgacguaugaagaaaca

SEQ ID NO: 1650655 - RNA, 19 nt, Homo sapiens
  misc_RNA (1)...(19): siRNA sense strand
gaagaaauacaaggcauac

SEQ ID NO: 1650656 - RNA, 19 nt, Homo sapiens
  misc_RNA (1)...(19): siRNA sense strand
ggacuuugugucauuguau

SEQ ID NO: 1650657 - RNA, 19 nt, Homo sapiens
  misc_RNA (1)...(19): siRNA sense strand
ggaguacuuuggccuggau

SEQ ID NO: 1650658 - RNA, 19 nt, Homo sapiens
  misc_RNA (1)...(19): siRNA sense strand
agaaauacaaggcauacuu

SEQ ID NO: 1650659 - RNA, 19 nt, Homo sapiens
  misc_RNA (1)...(19): siRNA sense strand
cgaaggcccuggaagaaaa

SEQ ID NO: 1650660 - RNA, 19 nt, Homo sapiens
  misc_RNA (1)...(19): siRNA sense strand
auugaaagaugccauuguu

SEQ ID NO: 1650661 - RNA, 19 nt, Homo sapiens
  misc_RNA (1)...(19): siRNA sense strand
caacuggaaucggccaauc

SEQ ID NO: 1650662 - RNA, 19 nt, Homo sapiens
  misc_RNA (1)...(19): siRNA sense strand
cgaacacauucucauagug

SEQ ID NO: 1650663 - RNA, 19 nt, Homo sapiens
  misc_RNA (1)...(19): siRNA sense strand
gcaguacucggcaggaaau

SEQ ID NO: 1650664 - RNA, 19 nt, Homo sapiens
  misc_RNA (1)...(19): siRNA sense strand
ggagcuggagugugcagua

SEQ ID NO: 1650665 - RNA, 19 nt, Homo sapiens
  misc_RNA (1)...(19): siRNA sense strand
acaaggaaucuguacauga

SEQ ID NO: 1650666 - RNA, 19 nt, Homo sapiens
  misc_RNA (1)...(19): siRNA sense strand
gauccaucauguuacacaa

SEQ ID NO: 1650667 - RNA, 19 nt, Homo sapiens
  misc_RNA (1)...(19): siRNA sense strand
gaacuagaggagcuuguag

SEQ ID NO: 1650668 - RNA, 19 nt, Homo sapiens
  misc_RNA (1)...(19): siRNA sense strand
acacgaaggcccuggaaga

SEQ ID NO: 1650669 - RNA, 19 nt, Homo sapiens
  misc_RNA (1)...(19): siRNA sense strand
ggauaagagacaacuggaa

SEQ ID NO: 1650670 - RNA, 19 nt, Homo sapiens
  misc_RNA (1)...(19): siRNA sense strand
cgagacgacguaugaagaa

SEQ ID NO: 1650671 - RNA, 19 nt, Homo sapiens
  misc_RNA (1)...(19): siRNA sense strand
gaugggaacguucacaaag

SEQ ID NO: 1650672 - RNA, 19 nt, Homo sapiens
  misc_RNA (1)...(19): siRNA sense strand
uuauaaacauggguuccua

SEQ ID NO: 1650673 - RNA, 19 nt, Homo sapiens
  misc_RNA (1)...(19): siRNA sense strand
gagccaggguggacaucau

SEQ ID NO: 1650674 - RNA, 19 nt, Homo sapiens
  misc_RNA (1)...(19): siRNA sense strand
agaagaaauacaaggcaua

SEQ ID NO: 1650675 - RNA, 19 nt, Homo sapiens
  misc_RNA (1)...(19): siRNA sense strand
gaaaccuggacaagcauga

SEQ ID NO: 1650676 - RNA, 19 nt, Homo sapiens
  misc_RNA (1)...(19): siRNA sense strand
ggaauacuggaucauguca

SEQ ID NO: 1650677 - RNA, 19 nt, Homo sapiens
  misc_RNA (1)...(19): siRNA sense strand
gugauugcccucaagaaga

SEQ ID NO: 1650678 - RNA, 19 nt, Homo sapiens
  misc_RNA (1)...(19): siRNA sense strand
gaaauacuugauacugcuu

SEQ ID NO: 1650679 - RNA, 19 nt, Homo sapiens
  misc_RNA (1)...(19): siRNA sense strand
ggaacguucacaaagaguu

SEQ ID NO: 1650680 - RNA, 19 nt, Homo sapiens
  misc_RNA (1)...(19): siRNA sense strand
ucaaguauacagggaauau

SEQ ID NO: 1650681 - RNA, 19 nt, Homo sapiens
  misc_RNA (1)...(19): siRNA sense strand
ggacacgaaggcccuggaa

SEQ ID NO: 1650682 - RNA, 19 nt, Homo sapiens
  misc_RNA (1)...(19): siRNA sense strand
gaaucaugcaucacugguu

SEQ ID NO: 1650683 - RNA, 19 nt, Homo sapiens
  misc_RNA (1)...(19): siRNA sense strand
caacuaucuuggauuugca

SEQ ID NO: 1650684 - RNA, 19 nt, Homo sapiens
  misc_RNA (1)...(19): siRNA sense strand
uggaaucggccaaucugua

SEQ ID NO: 1650685 - RNA, 19 nt, Homo sapiens
  misc_RNA (1)...(19): siRNA sense strand
gguaaagaguguguacaac

SEQ ID NO: 1650686 - RNA, 19 nt, Homo sapiens
  misc_RNA (1)...(19): siRNA sense strand
uuggaaaccuggacaagca

SEQ ID NO: 1650687 - RNA, 19 nt, Homo sapiens
  misc_RNA (1)...(19): siRNA sense strand
caugggauuugcaacgaau

SEQ ID NO: 1650688 - RNA, 19 nt, Homo sapiens
  misc_RNA (1)...(19): siRNA sense strand
cgacguaugaagaaacaga

SEQ ID NO: 1650689 - RNA, 19 nt, Homo sapiens
  misc_RNA (1)...(19): siRNA sense strand
gcucauaccaaagaaauac

SEQ ID NO: 1650690 - RNA, 19 nt, Homo sapiens
  misc_RNA (1)...(19): siRNA sense strand
cuagagaagcuauugaaag

SEQ ID NO: 1650691 - RNA, 19 nt, Homo sapiens
  misc_RNA (1)...(19): siRNA sense strand
gcaaagccuagagaagcua

SEQ ID NO: 1650692 - RNA, 19 nt, Homo sapiens
  misc_RNA (1)...(19): siRNA sense strand
agaagcagccgccaaaguc

SEQ ID NO: 1650693 - RNA, 19 nt, Homo sapiens
  misc_RNA (1)...(19): siRNA sense strand
cuauggaaaugaagacucu

SEQ ID NO: 1650694 - RNA, 19 nt, Homo sapiens
  misc_RNA (1)...(19): siRNA sense strand
gcauggagggaucuauugu

SEQ ID NO: 1650695 - RNA, 19 nt, Homo sapiens
  misc_RNA (1)...(19): siRNA sense strand
uagcauggagggaucuauu

SEQ ID NO: 1650696 - RNA, 19 nt, Homo sapiens
  misc_RNA (1)...(19): siRNA sense strand
gcuauugaaagaugccauu

SEQ ID NO: 1650697 - RNA, 19 nt, Homo sapiens
  misc_RNA (1)...(19): siRNA sense strand
uugcugugcucacguaugu

SEQ ID NO: 1650698 - RNA, 19 nt, Homo sapiens
  misc_RNA (1)...(19): siRNA sense strand
gagcuggagugugcaguac

SEQ ID NO: 1650699 - RNA, 19 nt, Homo sapiens
  misc_RNA (1)...(19): siRNA sense strand
ucugagugaugaacugaau

SEQ ID NO: 1650700 - RNA, 19 nt, Homo sapiens
  misc_RNA (1)...(19): siRNA sense strand
ugaagugauugcccucaag

SEQ ID NO: 1650701 - RNA, 19 nt, Homo sapiens
  misc_RNA (1)...(19): siRNA sense strand
gaggaaagcuacaagaaag

SEQ ID NO: 1650702 - RNA, 19 nt, Homo sapiens
  misc_RNA (1)...(19): siRNA sense strand
ggaggaaagcuacaagaaa

SEQ ID NO: 1650703 - RNA, 19 nt, Homo sapiens
  misc_RNA (1)...(19): siRNA sense strand
gcacacgacuccguucuca

SEQ ID NO: 1650704 - RNA, 19 nt, Homo sapiens
  misc_RNA (1)...(19): siRNA sense strand
ccacgcaggucaagaucug

SEQ ID NO: 1650705 - RNA, 19 nt, Homo sapiens
  misc_RNA (1)...(19): siRNA sense strand
ccagaaccaccgcuacaaa

SEQ ID NO: 1650706 - RNA, 19 nt, Homo sapiens
  misc_RNA (1)...(19): siRNA sense strand
ggaaagcuacaagaaagug

SEQ ID NO: 1650707 - RNA, 19 nt, Homo sapiens
  misc_RNA (1)...(19): siRNA sense strand
gcaccuggccagcaugauc

SEQ ID NO: 1650708 - RNA, 19 nt, Homo sapiens
  misc_RNA (1)...(19): siRNA sense strand
acaagaaagugggcaugga

SEQ ID NO: 1650709 - RNA, 19 nt, Homo sapiens
  misc_RNA (1)...(19): siRNA sense strand
gagcaccuggccagcauga

SEQ ID NO: 1650710 - RNA, 19 nt, Homo sapiens
  misc_RNA (1)...(19): siRNA sense strand
gaaccaccgcuacaaaaug

SEQ ID NO: 1650711 - RNA, 19 nt, Homo sapiens
  misc_RNA (1)...(19): siRNA sense strand
ggacgugagcaagaacaug

SEQ ID NO: 1650712 - RNA, 19 nt, Homo sapiens
  misc_RNA (1)...(19): siRNA sense strand
uggaggaaagcuacaagaa

SEQ ID NO: 1650713 - RNA, 19 nt, Homo sapiens
  misc_RNA (1)...(19): siRNA sense strand
acacgacuccguucucagu

SEQ ID NO: 1650714 - RNA, 19 nt, Homo sapiens
  misc_RNA (1)...(19): siRNA sense strand
ugccgguccuggugaaaga

SEQ ID NO: 1650715 - RNA, 19 nt, Homo sapiens
  misc_RNA (1)...(19): siRNA sense strand
gaagcaagaucauuaguug

SEQ ID NO: 1650716 - RNA, 19 nt, Homo sapiens
  misc_RNA (1)...(19): siRNA sense strand
uaaauccacucaucaaugu

SEQ ID NO: 1650717 - RNA, 19 nt, Homo sapiens
  misc_RNA (1)...(19): siRNA sense strand
gguaucaucuucaccaaau

SEQ ID NO: 1650718 - RNA, 19 nt, Homo sapiens
  misc_RNA (1)...(19): siRNA sense strand
gaauuaccgccucuucuuu

SEQ ID NO: 1650719 - RNA, 19 nt, Homo sapiens
  misc_RNA (1)...(19): siRNA sense strand
agaggaagcaagaucauua

SEQ ID NO: 1650720 - RNA, 19 nt, Homo sapiens
  misc_RNA (1)...(19): siRNA sense strand
ggaagcaagaucauuaguu

SEQ ID NO: 1650721 - RNA, 19 nt, Homo sapiens
  misc_RNA (1)...(19): siRNA sense strand
guuauuaaauccacucauc

SEQ ID NO: 1650722 - RNA, 19 nt, Homo sapiens
  misc_RNA (1)...(19): siRNA sense strand
ggaagcuacucuuaauugg

SEQ ID NO: 1650723 - RNA, 19 nt, Homo sapiens
  misc_RNA (1)...(19): siRNA sense strand
aagcuacucuuaauugguu

SEQ ID NO: 1650724 - RNA, 19 nt, Homo sapiens
  misc_RNA (1)...(19): siRNA sense strand
gcaagaucauuaguugaau

SEQ ID NO: 1650725 - RNA, 19 nt, Homo sapiens
  misc_RNA (1)...(19): siRNA sense strand
ccuggaagcuacucuuaau

SEQ ID NO: 1650726 - RNA, 19 nt, Homo sapiens
  misc_RNA (1)...(19): siRNA sense strand
caagaucauuaguugaauc

SEQ ID NO: 1650727 - RNA, 19 nt, Homo sapiens
  misc_RNA (1)...(19): siRNA sense strand
guaucaucuucaccaaaua

SEQ ID NO: 1650728 - RNA, 19 nt, Homo sapiens
  misc_RNA (1)...(19): siRNA sense strand
aaacaaggcuuuugcucuu

SEQ ID NO: 1650729 - RNA, 19 nt, Homo sapiens
  misc_RNA (1)...(19): siRNA sense strand
gcuauaaauugcacaaacg

SEQ ID NO: 1650730 - RNA, 19 nt, Homo sapiens
  misc_RNA (1)...(19): siRNA sense strand
uaauggaggagcuauaaau

SEQ ID NO: 1650731 - RNA, 19 nt, Homo sapiens
  misc_RNA (1)...(19): siRNA sense strand
uggaagcuacucuuaauug

SEQ ID NO: 1650732 - RNA, 19 nt, Homo sapiens
  misc_RNA (1)...(19): siRNA sense strand
gcagaauuaccgccucuuc

SEQ ID NO: 1650733 - RNA, 19 nt, Homo sapiens
  misc_RNA (1)...(19): siRNA sense strand
aauuaccgccucuucuuua

SEQ ID NO: 1650734 - RNA, 19 nt, Homo sapiens
  misc_RNA (1)...(19): siRNA sense strand
uggaggagcuauaaauugc

SEQ ID NO: 1650735 - RNA, 19 nt, Homo sapiens
  misc_RNA (1)...(19): siRNA sense strand
uuaaauccacucaucaaug

SEQ ID NO: 1650736 - RNA, 19 nt, Homo sapiens
  misc_RNA (1)...(19): siRNA sense strand
guaauggaggagcuauaaa

SEQ ID NO: 1650737 - RNA, 19 nt, Homo sapiens
  misc_RNA (1)...(19): siRNA sense strand
uguaauggaggagcuauaa

SEQ ID NO: 1650738 - RNA, 19 nt, Homo sapiens
  misc_RNA (1)...(19): siRNA sense strand
uugaaucgguaucaucuuc

SEQ ID NO: 1650739 - RNA, 19 nt, Homo sapiens
  misc_RNA (1)...(19): siRNA sense strand
gaagcuacucuuaauuggu

SEQ ID NO: 1650740 - RNA, 19 nt, Homo sapiens
  misc_RNA (1)...(19): siRNA sense strand
gaggaagcaagaucauuag

SEQ ID NO: 1650741 - RNA, 19 nt, Homo sapiens
  misc_RNA (1)...(19): siRNA sense strand
ucaagaggaagcaagauca

SEQ ID NO: 1650742 - RNA, 19 nt, Homo sapiens
  misc_RNA (1)...(19): siRNA sense strand
caucaauguuggaaagcau

SEQ ID NO: 1650743 - RNA, 19 nt, Homo sapiens
  misc_RNA (1)...(19): siRNA sense strand
uaccuggaagcuacucuua

SEQ ID NO: 1650744 - RNA, 19 nt, Homo sapiens
  misc_RNA (1)...(19): siRNA sense strand
ccguugcacucaagaggaa

SEQ ID NO: 1650745 - RNA, 19 nt, Homo sapiens
  misc_RNA (1)...(19): siRNA sense strand
acucaucaauguuggaaag

SEQ ID NO: 1650746 - RNA, 19 nt, Homo sapiens
  misc_RNA (1)...(19): siRNA sense strand
aauggaggagcuauaaauu

SEQ ID NO: 1650747 - RNA, 19 nt, Homo sapiens
  misc_RNA (1)...(19): siRNA sense strand
ccaguuugcuuuuaaugga

SEQ ID NO: 1650748 - RNA, 19 nt, Homo sapiens
  misc_RNA (1)...(19): siRNA sense strand
uaagguaccagauggaaaa

SEQ ID NO: 1650749 - RNA, 19 nt, Homo sapiens
  misc_RNA (1)...(19): siRNA sense strand
agcaagaucauuaguugaa

SEQ ID NO: 1650750 - RNA, 19 nt, Homo sapiens
  misc_RNA (1)...(19): siRNA sense strand
ggagcuauaaauugcacaa

SEQ ID NO: 1650751 - RNA, 19 nt, Homo sapiens
  misc_RNA (1)...(19): siRNA sense strand
gauagcccuuuccguugca

SEQ ID NO: 1650752 - RNA, 19 nt, Homo sapiens
  misc_RNA (1)...(19): siRNA sense strand
auuaccgccucuucuuuaa

SEQ ID NO: 1650753 - RNA, 19 nt, Homo sapiens
  misc_RNA (1)...(19): siRNA sense strand
gagcuauaaauugcacaaa

SEQ ID NO: 1650754 - RNA, 19 nt, Homo sapiens
  misc_RNA (1)...(19): siRNA sense strand
gaaucgguaucaucuucac

SEQ ID NO: 1650755 - RNA, 19 nt, Homo sapiens
  misc_RNA (1)...(19): siRNA sense strand
caagaggaagcaagaucau

SEQ ID NO: 1650756 - RNA, 19 nt, Homo sapiens
  misc_RNA (1)...(19): siRNA sense strand
gcuacucuuaauugguuua

SEQ ID NO: 1650757 - RNA, 19 nt, Homo sapiens
  misc_RNA (1)...(19): siRNA sense strand
uauaagguaccagauggaa

SEQ ID NO: 1650758 - RNA, 19 nt, Homo sapiens
  misc_RNA (1)...(19): siRNA sense strand
uuauauaagguaccagaug

SEQ ID NO: 1650759 - RNA, 19 nt, Homo sapiens
  misc_RNA (1)...(19): siRNA sense strand
gaagcaagaucauuaguug

SEQ ID NO: 1650760 - RNA, 19 nt, Homo sapiens
  misc_RNA (1)...(19): siRNA sense strand
uaaauccacucaucaaugu

SEQ ID NO: 1650761 - RNA, 19 nt, Homo sapiens
  misc_RNA (1)...(19): siRNA sense strand
gguaucaucuucaccaaau

SEQ ID NO: 1650762 - RNA, 19 nt, Homo sapiens
  misc_RNA (1)...(19): siRNA sense strand
gaauuaccgccucuucuuu

SEQ ID NO: 1650763 - RNA, 19 nt, Homo sapiens
  misc_RNA (1)...(19): siRNA sense strand
agaggaagcaagaucauua

SEQ ID NO: 1650764 - RNA, 19 nt, Homo sapiens
  misc_RNA (1)...(19): siRNA sense strand
ggaagcaagaucauuaguu

SEQ ID NO: 1650765 - RNA, 19 nt, Homo sapiens
  misc_RNA (1)...(19): siRNA sense strand
guuauuaaauccacucauc

SEQ ID NO: 1650766 - RNA, 19 nt, Homo sapiens
  misc_RNA (1)...(19): siRNA sense strand
ggaagcuacucuuaauugg

SEQ ID NO: 1650767 - RNA, 19 nt, Homo sapiens
  misc_RNA (1)...(19): siRNA sense strand
aagcuacucuuaauugguu

SEQ ID NO: 1650768 - RNA, 19 nt, Homo sapiens
  misc_RNA (1)...(19): siRNA sense strand
gcaagaucauuaguugaau

SEQ ID NO: 1650769 - RNA, 19 nt, Homo sapiens
  misc_RNA (1)...(19): siRNA sense strand
ccuggaagcuacucuuaau

SEQ ID NO: 1650770 - RNA, 19 nt, Homo sapiens
  misc_RNA (1)...(19): siRNA sense strand
caagaucauuaguugaauc

SEQ ID NO: 1650771 - RNA, 19 nt, Homo sapiens
  misc_RNA (1)...(19): siRNA sense strand
guaucaucuucaccaaaua

SEQ ID NO: 1650772 - RNA, 19 nt, Homo sapiens
  misc_RNA (1)...(19): siRNA sense strand
aaacaaggcuuuugcucuu

SEQ ID NO: 1650773 - RNA, 19 nt, Homo sapiens
  misc_RNA (1)...(19): siRNA sense strand
gcuauaaauugcacaaacg

SEQ ID NO: 1650774 - RNA, 19 nt, Homo sapiens
  misc_RNA (1)...(19): siRNA sense strand
uaauggaggagcuauaaau

SEQ ID NO: 1650775 - RNA, 19 nt, Homo sapiens
  misc_RNA (1)...(19): siRNA sense strand
uggaagcuacucuuaauug

SEQ ID NO: 1650776 - RNA, 19 nt, Homo sapiens
  misc_RNA (1)...(19): siRNA sense strand
gcagaauuaccgccucuuc

SEQ ID NO: 1650777 - RNA, 19 nt, Homo sapiens
  misc_RNA (1)...(19): siRNA sense strand
aauuaccgccucuucuuua

SEQ ID NO: 1650778 - RNA, 19 nt, Homo sapiens
  misc_RNA (1)...(19): siRNA sense strand
uggaggagcuauaaauugc

SEQ ID NO: 1650779 - RNA, 19 nt, Homo sapiens
  misc_RNA (1)...(19): siRNA sense strand
uuaaauccacucaucaaug

SEQ ID NO: 1650780 - RNA, 19 nt, Homo sapiens
  misc_RNA (1)...(19): siRNA sense strand
guaauggaggagcuauaaa

SEQ ID NO: 1650781 - RNA, 19 nt, Homo sapiens
  misc_RNA (1)...(19): siRNA sense strand
uguaauggaggagcuauaa

SEQ ID NO: 1650782 - RNA, 19 nt, Homo sapiens
  misc_RNA (1)...(19): siRNA sense strand
uugaaucgguaucaucuuc

SEQ ID NO: 1650783 - RNA, 19 nt, Homo sapiens
  misc_RNA (1)...(19): siRNA sense strand
gaagcuacucuuaauuggu

SEQ ID NO: 1650784 - RNA, 19 nt, Homo sapiens
  misc_RNA (1)...(19): siRNA sense strand
gaggaagcaagaucauuag

SEQ ID NO: 1650785 - RNA, 19 nt, Homo sapiens
  misc_RNA (1)...(19): siRNA sense strand
ucaagaggaagcaagauca

SEQ ID NO: 1650786 - RNA, 19 nt, Homo sapiens
  misc_RNA (1)...(19): siRNA sense strand
caucaauguuggaaagcau

SEQ ID NO: 1650787 - RNA, 19 nt, Homo sapiens
  misc_RNA (1)...(19): siRNA sense strand
uaccuggaagcuacucuua

SEQ ID NO: 1650788 - RNA, 19 nt, Homo sapiens
  misc_RNA (1)...(19): siRNA sense strand
ccguugcacucaagaggaa

SEQ ID NO: 1650789 - RNA, 19 nt, Homo sapiens
  misc_RNA (1)...(19): siRNA sense strand
acucaucaauguuggaaag

SEQ ID NO: 1650790 - RNA, 19 nt, Homo sapiens
  misc_RNA (1)...(19): siRNA sense strand
aauggaggagcuauaaauu

SEQ ID NO: 1650791 - RNA, 19 nt, Homo sapiens
  misc_RNA (1)...(19): siRNA sense strand
ccaguuugcuuuuaaugga

SEQ ID NO: 1650792 - RNA, 19 nt, Homo sapiens
  misc_RNA (1)...(19): siRNA sense strand
uaagguaccagauggaaaa

SEQ ID NO: 1650793 - RNA, 19 nt, Homo sapiens
  misc_RNA (1)...(19): siRNA sense strand
agcaagaucauuaguugaa

SEQ ID NO: 1650794 - RNA, 19 nt, Homo sapiens
  misc_RNA (1)...(19): siRNA sense strand
ggagcuauaaauugcacaa

SEQ ID NO: 1650795 - RNA, 19 nt, Homo sapiens
  misc_RNA (1)...(19): siRNA sense strand
gauagcccuuuccguugca

SEQ ID NO: 1650796 - RNA, 19 nt, Homo sapiens
  misc_RNA (1)...(19): siRNA sense strand
auuaccgccucuucuuuaa

SEQ ID NO: 1650797 - RNA, 19 nt, Homo sapiens
  misc_RNA (1)...(19): siRNA sense strand
gagcuauaaauugcacaaa

SEQ ID NO: 1650798 - RNA, 19 nt, Homo sapiens
  misc_RNA (1)...(19): siRNA sense strand
gaaucgguaucaucuucac

SEQ ID NO: 1650799 - RNA, 19 nt, Homo sapiens
  misc_RNA (1)...(19): siRNA sense strand
caagaggaagcaagaucau

SEQ ID NO: 1650800 - RNA, 19 nt, Homo sapiens
  misc_RNA (1)...(19): siRNA sense strand
gcuacucuuaauugguuua

SEQ ID NO: 1650801 - RNA, 19 nt, Homo sapiens
  misc_RNA (1)...(19): siRNA sense strand
uauaagguaccagauggaa

SEQ ID NO: 1650802 - RNA, 19 nt, Homo sapiens
  misc_RNA (1)...(19): siRNA sense strand
uuauauaagguaccagaug

SEQ ID NO: 1650803 - RNA, 19 nt, Homo sapiens
  misc_RNA (1)...(19): siRNA sense strand
gaagcaagaucauuaguug

SEQ ID NO: 1650804 - RNA, 19 nt, Homo sapiens
  misc_RNA (1)...(19): siRNA sense strand
uaaauccacucaucaaugu

SEQ ID NO: 1650805 - RNA, 19 nt, Homo sapiens
  misc_RNA (1)...(19): siRNA sense strand
gguaucaucuucaccaaau

SEQ ID NO: 1650806 - RNA, 19 nt, Homo sapiens
  misc_RNA (1)...(19): siRNA sense strand
gaauuaccgccucuucuuu

SEQ ID NO: 1650807 - RNA, 19 nt, Homo sapiens
  misc_RNA (1)...(19): siRNA sense strand
agaggaagcaagaucauua

SEQ ID NO: 1650808 - RNA, 19 nt, Homo sapiens
  misc_RNA (1)...(19): siRNA sense strand
ggaagcaagaucauuaguu

SEQ ID NO: 1650809 - RNA, 19 nt, Homo sapiens
  misc_RNA (1)...(19): siRNA sense strand
guuauuaaauccacucauc

SEQ ID NO: 1650810 - RNA, 19 nt, Homo sapiens
  misc_RNA (1)...(19): siRNA sense strand
ggaagcuacucuuaauugg

SEQ ID NO: 1650811 - RNA, 19 nt, Homo sapiens
  misc_RNA (1)...(19): siRNA sense strand
aagcuacucuuaauugguu

SEQ ID NO: 1650812 - RNA, 19 nt, Homo sapiens
  misc_RNA (1)...(19): siRNA sense strand
gcaagaucauuaguugaau

SEQ ID NO: 1650813 - RNA, 19 nt, Homo sapiens
  misc_RNA (1)...(19): siRNA sense strand
ccuggaagcuacucuuaau

SEQ ID NO: 1650814 - RNA, 19 nt, Homo sapiens
  misc_RNA (1)...(19): siRNA sense strand
caagaucauuaguugaauc

SEQ ID NO: 1650815 - RNA, 19 nt, Homo sapiens
  misc_RNA (1)...(19): siRNA sense strand
guaucaucuucaccaaaua

SEQ ID NO: 1650816 - RNA, 19 nt, Homo sapiens
  misc_RNA (1)...(19): siRNA sense strand
aaacaaggcuuuugcucuu

SEQ ID NO: 1650817 - RNA, 19 nt, Homo sapiens
  misc_RNA (1)...(19): siRNA sense strand
gcuauaaauugcacaaacg

SEQ ID NO: 1650818 - RNA, 19 nt, Homo sapiens
  misc_RNA (1)...(19): siRNA sense strand
uaauggaggagcuauaaau

SEQ ID NO: 1650819 - RNA, 19 nt, Homo sapiens
  misc_RNA (1)...(19): siRNA sense strand
uggaagcuacucuuaauug

SEQ ID NO: 1650820 - RNA, 19 nt, Homo sapiens
  misc_RNA (1)...(19): siRNA sense strand
gcagaauuaccgccucuuc

SEQ ID NO: 1650821 - RNA, 19 nt, Homo sapiens
  misc_RNA (1)...(19): siRNA sense strand
aauuaccgccucuucuuua

SEQ ID NO: 1650822 - RNA, 19 nt, Homo sapiens
  misc_RNA (1)...(19): siRNA sense strand
uggaggagcuauaaauugc

SEQ ID NO: 1650823 - RNA, 19 nt, Homo sapiens
  misc_RNA (1)...(19): siRNA sense strand
uuaaauccacucaucaaug

SEQ ID NO: 1650824 - RNA, 19 nt, Homo sapiens
  misc_RNA (1)...(19): siRNA sense strand
guaauggaggagcuauaaa

SEQ ID NO: 1650825 - RNA, 19 nt, Homo sapiens
  misc_RNA (1)...(19): siRNA sense strand
uguaauggaggagcuauaa

SEQ ID NO: 1650826 - RNA, 19 nt, Homo sapiens
  misc_RNA (1)...(19): siRNA sense strand
uugaaucgguaucaucuuc

SEQ ID NO: 1650827 - RNA, 19 nt, Homo sapiens
  misc_RNA (1)...(19): siRNA sense strand
gaagcuacucuuaauuggu

SEQ ID NO: 1650828 - RNA, 19 nt, Homo sapiens
  misc_RNA (1)...(19): siRNA sense strand
gaggaagcaagaucauuag

SEQ ID NO: 1650829 - RNA, 19 nt, Homo sapiens
  misc_RNA (1)...(19): siRNA sense strand
ucaagaggaagcaagauca

SEQ ID NO: 1650830 - RNA, 19 nt, Homo sapiens
  misc_RNA (1)...(19): siRNA sense strand
caucaauguuggaaagcau

SEQ ID NO: 1650831 - RNA, 19 nt, Homo sapiens
  misc_RNA (1)...(19): siRNA sense strand
uaccuggaagcuacucuua

SEQ ID NO: 1650832 - RNA, 19 nt, Homo sapiens
  misc_RNA (1)...(19): siRNA sense strand
ccguugcacucaagaggaa

SEQ ID NO: 1650833 - RNA, 19 nt, Homo sapiens
  misc_RNA (1)...(19): siRNA sense strand
acucaucaauguuggaaag

SEQ ID NO: 1650834 - RNA, 19 nt, Homo sapiens
  misc_RNA (1)...(19): siRNA sense strand
aauggaggagcuauaaauu

SEQ ID NO: 1650835 - RNA, 19 nt, Homo sapiens
  misc_RNA (1)...(19): siRNA sense strand
ccaguuugcuuuuaaugga

SEQ ID NO: 1650836 - RNA, 19 nt, Homo sapiens
  misc_RNA (1)...(19): siRNA sense strand
uaagguaccagauggaaaa

SEQ ID NO: 1650837 - RNA, 19 nt, Homo sapiens
  misc_RNA (1)...(19): siRNA sense strand
agcaagaucauuaguugaa

SEQ ID NO: 1650838 - RNA, 19 nt, Homo sapiens
  misc_RNA (1)...(19): siRNA sense strand
ggagcuauaaauugcacaa

SEQ ID NO: 1650839 - RNA, 19 nt, Homo sapiens
  misc_RNA (1)...(19): siRNA sense strand
gauagcccuuuccguugca

SEQ ID NO: 1650840 - RNA, 19 nt, Homo sapiens
  misc_RNA (1)...(19): siRNA sense strand
auuaccgccucuucuuuaa

SEQ ID NO: 1650841 - RNA, 19 nt, Homo sapiens
  misc_RNA (1)...(19): siRNA sense strand
gagcuauaaauugcacaaa

SEQ ID NO: 1650842 - RNA, 19 nt, Homo sapiens
  misc_RNA (1)...(19): siRNA sense strand
gaaucgguaucaucuucac

SEQ ID NO: 1650843 - RNA, 19 nt, Homo sapiens
  misc_RNA (1)...(19): siRNA sense strand
caagaggaagcaagaucau

SEQ ID NO: 1650844 - RNA, 19 nt, Homo sapiens
  misc_RNA (1)...(19): siRNA sense strand
gcuacucuuaauugguuua

SEQ ID NO: 1650845 - RNA, 19 nt, Homo sapiens
  misc_RNA (1)...(19): siRNA sense strand
uauaagguaccagauggaa

SEQ ID NO: 1650846 - RNA, 19 nt, Homo sapiens
  misc_RNA (1)...(19): siRNA sense strand
uuauauaagguaccagaug

SEQ ID NO: 1650847 - RNA, 19 nt, Homo sapiens
  misc_RNA (1)...(19): siRNA sense strand
gaagcaagaucauuaguug

SEQ ID NO: 1650848 - RNA, 19 nt, Homo sapiens
  misc_RNA (1)...(19): siRNA sense strand
uaaauccacucaucaaugu

SEQ ID NO: 1650849 - RNA, 19 nt, Homo sapiens
  misc_RNA (1)...(19): siRNA sense strand
gguaucaucuucaccaaau

SEQ ID NO: 1650850 - RNA, 19 nt, Homo sapiens
  misc_RNA (1)...(19): siRNA sense strand
gaauuaccgccucuucuuu

SEQ ID NO: 1650851 - RNA, 19 nt, Homo sapiens
  misc_RNA (1)...(19): siRNA sense strand
agaggaagcaagaucauua

SEQ ID NO: 1650852 - RNA, 19 nt, Homo sapiens
  misc_RNA (1)...(19): siRNA sense strand
ggaagcaagaucauuaguu

SEQ ID NO: 1650853 - RNA, 19 nt, Homo sapiens
  misc_RNA (1)...(19): siRNA sense strand
guuauuaaauccacucauc

SEQ ID NO: 1650854 - RNA, 19 nt, Homo sapiens
  misc_RNA (1)...(19): siRNA sense strand
ggaagcuacucuuaauugg

SEQ ID NO: 1650855 - RNA, 19 nt, Homo sapiens
  misc_RNA (1)...(19): siRNA sense strand
aagcuacucuuaauugguu

SEQ ID NO: 1650856 - RNA, 19 nt, Homo sapiens
  misc_RNA (1)...(19): siRNA sense strand
gcaagaucauuaguugaau

SEQ ID NO: 1650857 - RNA, 19 nt, Homo sapiens
  misc_RNA (1)...(19): siRNA sense strand
ccuggaagcuacucuuaau

SEQ ID NO: 1650858 - RNA, 19 nt, Homo sapiens
  misc_RNA (1)...(19): siRNA sense strand
caagaucauuaguugaauc

SEQ ID NO: 1650859 - RNA, 19 nt, Homo sapiens
  misc_RNA (1)...(19): siRNA sense strand
guaucaucuucaccaaaua

SEQ ID NO: 1650860 - RNA, 19 nt, Homo sapiens
  misc_RNA (1)...(19): siRNA sense strand
aaacaaggcuuuugcucuu

SEQ ID NO: 1650861 - RNA, 19 nt, Homo sapiens
  misc_RNA (1)...(19): siRNA sense strand
gcuauaaauugcacaaacg

SEQ ID NO: 1650862 - RNA, 19 nt, Homo sapiens
  misc_RNA (1)...(19): siRNA sense strand
uaauggaggagcuauaaau

SEQ ID NO: 1650863 - RNA, 19 nt, Homo sapiens
  misc_RNA (1)...(19): siRNA sense strand
uggaagcuacucuuaauug

SEQ ID NO: 1650864 - RNA, 19 nt, Homo sapiens
  misc_RNA (1)...(19): siRNA sense strand
aauuaccgccucuucuuua

SEQ ID NO: 1650865 - RNA, 19 nt, Homo sapiens
  misc_RNA (1)...(19): siRNA sense strand
uggaggagcuauaaauugc

SEQ ID NO: 1650866 - RNA, 19 nt, Homo sapiens
  misc_RNA (1)...(19): siRNA sense strand
gcagaauuaccgccucuuc

SEQ ID NO: 1650867 - RNA, 19 nt, Homo sapiens
  misc_RNA (1)...(19): siRNA sense strand
uuaaauccacucaucaaug

SEQ ID NO: 1650868 - RNA, 19 nt, Homo sapiens
  misc_RNA (1)...(19): siRNA sense strand
guaauggaggagcuauaaa

SEQ ID NO: 1650869 - RNA, 19 nt, Homo sapiens
  misc_RNA (1)...(19): siRNA sense strand
uguaauggaggagcuauaa

SEQ ID NO: 1650870 - RNA, 19 nt, Homo sapiens
  misc_RNA (1)...(19): siRNA sense strand
uugaaucgguaucaucuuc

SEQ ID NO: 1650871 - RNA, 19 nt, Homo sapiens
  misc_RNA (1)...(19): siRNA sense strand
gaagcuacucuuaauuggu

SEQ ID NO: 1650872 - RNA, 19 nt, Homo sapiens
  misc_RNA (1)...(19): siRNA sense strand
gaggaagcaagaucauuag

SEQ ID NO: 1650873 - RNA, 19 nt, Homo sapiens
  misc_RNA (1)...(19): siRNA sense strand
ucaagaggaagcaagauca

SEQ ID NO: 1650874 - RNA, 19 nt, Homo sapiens
  misc_RNA (1)...(19): siRNA sense strand
caucaauguuggaaagcau

SEQ ID NO: 1650875 - RNA, 19 nt, Homo sapiens
  misc_RNA (1)...(19): siRNA sense strand
gccgugcuauggcccugua

SEQ ID NO: 1650876 - RNA, 19 nt, Homo sapiens
  misc_RNA (1)...(19): siRNA sense strand
uaccuggaagcuacucuua

SEQ ID NO: 1650877 - RNA, 19 nt, Homo sapiens
  misc_RNA (1)...(19): siRNA sense strand
ccguugcacucaagaggaa

SEQ ID NO: 1650878 - RNA, 19 nt, Homo sapiens
  misc_RNA (1)...(19): siRNA sense strand
acucaucaauguuggaaag

SEQ ID NO: 1650879 - RNA, 19 nt, Homo sapiens
  misc_RNA (1)...(19): siRNA sense strand
aauggaggagcuauaaauu

SEQ ID NO: 1650880 - RNA, 19 nt, Homo sapiens
  misc_RNA (1)...(19): siRNA sense strand
ccaguuugcuuuuaaugga

SEQ ID NO: 1650881 - RNA, 19 nt, Homo sapiens
  misc_RNA (1)...(19): siRNA sense strand
uaagguaccagauggaaaa

SEQ ID NO: 1650882 - RNA, 19 nt, Homo sapiens
  misc_RNA (1)...(19): siRNA sense strand
agcaagaucauuaguugaa

SEQ ID NO: 1650883 - RNA, 19 nt, Homo sapiens
  misc_RNA (1)...(19): siRNA sense strand
ggagcuauaaauugcacaa

SEQ ID NO: 1650884 - RNA, 19 nt, Homo sapiens
  misc_RNA (1)...(19): siRNA sense strand
gauagcccuuuccguugca

SEQ ID NO: 1650885 - RNA, 19 nt, Homo sapiens
  misc_RNA (1)...(19): siRNA sense strand
auuaccgccucuucuuuaa

SEQ ID NO: 1650886 - RNA, 19 nt, Homo sapiens
  misc_RNA (1)...(19): siRNA sense strand
gagcuauaaauugcacaaa

SEQ ID NO: 1650887 - RNA, 19 nt, Homo sapiens
  misc_RNA (1)...(19): siRNA sense strand
gaaucgguaucaucuucac

SEQ ID NO: 1650888 - RNA, 19 nt, Homo sapiens
  misc_RNA (1)...(19): siRNA sense strand
gcuacucuuaauugguuua

SEQ ID NO: 1650889 - RNA, 19 nt, Homo sapiens
  misc_RNA (1)...(19): siRNA sense strand
caagaggaagcaagaucau

SEQ ID NO: 1650890 - RNA, 19 nt, Homo sapiens
  misc_RNA (1)...(19): siRNA sense strand
uauaagguaccagauggaa

SEQ ID NO: 1650891 - RNA, 19 nt, Homo sapiens
  misc_RNA (1)...(19): siRNA sense strand
uuauauaagguaccagaug

SEQ ID NO: 1650892 - RNA, 19 nt, Homo sapiens
  misc_RNA (1)...(19): siRNA sense strand
gaugagaucggcuugauga

SEQ ID NO: 1650893 - RNA, 19 nt, Homo sapiens
  misc_RNA (1)...(19): siRNA sense strand
gagaucggcuugaugaaca

SEQ ID NO: 1650894 - RNA, 19 nt, Homo sapiens
  misc_RNA (1)...(19): siRNA sense strand
gaauucugccggagguuua

SEQ ID NO: 1650895 - RNA, 19 nt, Homo sapiens
  misc_RNA (1)...(19): siRNA sense strand
cgaggcaccuuucaagaau

SEQ ID NO: 1650896 - RNA, 19 nt, Homo sapiens
  misc_RNA (1)...(19): siRNA sense strand
uggagcagcuggccagauu

SEQ ID NO: 1650897 - RNA, 19 nt, Homo sapiens
  misc_RNA (1)...(19): siRNA sense strand
gagcaaguacuucgaguuc

SEQ ID NO: 1650898 - RNA, 19 nt, Homo sapiens
  misc_RNA (1)...(19): siRNA sense strand
ccucugaccuccacaaugg

SEQ ID NO: 1650899 - RNA, 19 nt, Homo sapiens
  misc_RNA (1)...(19): siRNA sense strand
gcaaguacuucgaguucca

SEQ ID NO: 1650900 - RNA, 19 nt, Homo sapiens
  misc_RNA (1)...(19): siRNA sense strand
acuccaaggucaucuauau

SEQ ID NO: 1650901 - RNA, 19 nt, Homo sapiens
  misc_RNA (1)...(19): siRNA sense strand
gccggagguuuaugaauga

SEQ ID NO: 1650902 - RNA, 19 nt, Homo sapiens
  misc_RNA (1)...(19): siRNA sense strand
gcgggaagauggaggagau

SEQ ID NO: 1650903 - RNA, 19 nt, Homo sapiens
  misc_RNA (1)...(19): siRNA sense strand
uggaggagaucgccaacuu

SEQ ID NO: 1650904 - RNA, 19 nt, Homo sapiens
  misc_RNA (1)...(19): siRNA sense strand
ucucaaguaugaagacaug

SEQ ID NO: 1650905 - RNA, 19 nt, Homo sapiens
  misc_RNA (1)...(19): siRNA sense strand
gaguugggcuguggaagga

SEQ ID NO: 1650906 - RNA, 19 nt, Homo sapiens
  misc_RNA (1)...(19): siRNA sense strand
gaggcaccuuucaagaauu

SEQ ID NO: 1650907 - RNA, 19 nt, Homo sapiens
  misc_RNA (1)...(19): siRNA sense strand
gaucugguggugucuuauu

SEQ ID NO: 1650908 - RNA, 19 nt, Homo sapiens
  misc_RNA (1)...(19): siRNA sense strand
gggcuacggcuccugguuu

SEQ ID NO: 1650909 - RNA, 19 nt, Homo sapiens
  misc_RNA (1)...(19): siRNA sense strand
ugccggagguuuaugaaug

SEQ ID NO: 1650910 - RNA, 19 nt, Homo sapiens
  misc_RNA (1)...(19): siRNA sense strand
ugacaaggcccagcuggaa

SEQ ID NO: 1650911 - RNA, 19 nt, Homo sapiens
  misc_RNA (1)...(19): siRNA sense strand
ugaccucacguuugacuuu

SEQ ID NO: 1650912 - RNA, 19 nt, Homo sapiens
  misc_RNA (1)...(19): siRNA sense strand
gaagaguugggcuguggaa

SEQ ID NO: 1650913 - RNA, 19 nt, Homo sapiens
  misc_RNA (1)...(19): siRNA sense strand
gcaggagguggucuacuug

SEQ ID NO: 1650914 - RNA, 19 nt, Homo sapiens
  misc_RNA (1)...(19): siRNA sense strand
aguuugacuugguguauaa

SEQ ID NO: 1650915 - RNA, 19 nt, Homo sapiens
  misc_RNA (1)...(19): siRNA sense strand
ugcaggagguggucuacuu

SEQ ID NO: 1650916 - RNA, 19 nt, Homo sapiens
  misc_RNA (1)...(19): siRNA sense strand
aggaucugguggugucuua

SEQ ID NO: 1650917 - RNA, 19 nt, Homo sapiens
  misc_RNA (1)...(19): siRNA sense strand
ccaccugcccuaccgcuuu

SEQ ID NO: 1650918 - RNA, 19 nt, Homo sapiens
  misc_RNA (1)...(19): siRNA sense strand
gguggugucuuauuaucag

SEQ ID NO: 1650919 - RNA, 19 nt, Homo sapiens
  misc_RNA (1)...(19): siRNA sense strand
gagcuaccgaggcaccuuu

SEQ ID NO: 1650920 - RNA, 19 nt, Homo sapiens
  misc_RNA (1)...(19): siRNA sense strand
ggcuacggcuccugguuug

SEQ ID NO: 1650921 - RNA, 19 nt, Homo sapiens
  misc_RNA (1)...(19): siRNA sense strand
ccgaggcaccuuucaagaa

SEQ ID NO: 1650922 - RNA, 19 nt, Homo sapiens
  misc_RNA (1)...(19): siRNA sense strand
gccuggacaucaucaagga

SEQ ID NO: 1650923 - RNA, 19 nt, Homo sapiens
  misc_RNA (1)...(19): siRNA sense strand
ccaugaaugagaaguuuga

SEQ ID NO: 1650924 - RNA, 19 nt, Homo sapiens
  misc_RNA (1)...(19): siRNA sense strand
auaaacagaagaugggaaa

SEQ ID NO: 1650925 - RNA, 19 nt, Homo sapiens
  misc_RNA (1)...(19): siRNA sense strand
aacagaagaugggaaagug

SEQ ID NO: 1650926 - RNA, 19 nt, Homo sapiens
  misc_RNA (1)...(19): siRNA sense strand
cuccaugaaugagaaguuu

SEQ ID NO: 1650927 - RNA, 19 nt, Homo sapiens
  misc_RNA (1)...(19): siRNA sense strand
gacuugguguauaaacaga

SEQ ID NO: 1650928 - RNA, 19 nt, Homo sapiens
  misc_RNA (1)...(19): siRNA sense strand
ggugucuuauuaucaguuc

SEQ ID NO: 1650929 - RNA, 19 nt, Homo sapiens
  misc_RNA (1)...(19): siRNA sense strand
aaacagaagaugggaaagu

SEQ ID NO: 1650930 - RNA, 19 nt, Homo sapiens
  misc_RNA (1)...(19): siRNA sense strand
ggaggagaucgccaacuuc

SEQ ID NO: 1650931 - RNA, 19 nt, Homo sapiens
  misc_RNA (1)...(19): siRNA sense strand
gagacuccaaggucaucua

SEQ ID NO: 1650932 - RNA, 19 nt, Homo sapiens
  misc_RNA (1)...(19): siRNA sense strand
aggcaccuuucaagaauuc

SEQ ID NO: 1650933 - RNA, 19 nt, Homo sapiens
  misc_RNA (1)...(19): siRNA sense strand
ggaguucgagagcaaguac

SEQ ID NO: 1650934 - RNA, 19 nt, Homo sapiens
  misc_RNA (1)...(19): siRNA sense strand
caccugcccuaccgcuuuc

SEQ ID NO: 1650935 - RNA, 19 nt, Homo sapiens
  misc_RNA (1)...(19): siRNA sense strand
gacaucaucaaggaacuga

SEQ ID NO: 1650936 - RNA, 19 nt, Homo sapiens
  misc_RNA (1)...(19): siRNA sense strand
ggacaucaucaaggaacug

SEQ ID NO: 1650937 - RNA, 19 nt, Homo sapiens
  misc_RNA (1)...(19): siRNA sense strand
gaugagaucggcuugauga

SEQ ID NO: 1650938 - RNA, 19 nt, Homo sapiens
  misc_RNA (1)...(19): siRNA sense strand
gagaucggcuugaugaaca

SEQ ID NO: 1650939 - RNA, 19 nt, Homo sapiens
  misc_RNA (1)...(19): siRNA sense strand
gaauucugccggagguuua

SEQ ID NO: 1650940 - RNA, 19 nt, Homo sapiens
  misc_RNA (1)...(19): siRNA sense strand
cgaggcaccuuucaagaau

SEQ ID NO: 1650941 - RNA, 19 nt, Homo sapiens
  misc_RNA (1)...(19): siRNA sense strand
uggagcagcuggccagauu

SEQ ID NO: 1650942 - RNA, 19 nt, Homo sapiens
  misc_RNA (1)...(19): siRNA sense strand
gagcaaguacuucgaguuc

SEQ ID NO: 1650943 - RNA, 19 nt, Homo sapiens
  misc_RNA (1)...(19): siRNA sense strand
ccucugaccuccacaaugg

SEQ ID NO: 1650944 - RNA, 19 nt, Homo sapiens
  misc_RNA (1)...(19): siRNA sense strand
gcaaguacuucgaguucca

SEQ ID NO: 1650945 - RNA, 19 nt, Homo sapiens
  misc_RNA (1)...(19): siRNA sense strand
acuccaaggucaucuauau

SEQ ID NO: 1650946 - RNA, 19 nt, Homo sapiens
  misc_RNA (1)...(19): siRNA sense strand
gccggagguuuaugaauga

SEQ ID NO: 1650947 - RNA, 19 nt, Homo sapiens
  misc_RNA (1)...(19): siRNA sense strand
gcgggaagauggaggagau

SEQ ID NO: 1650948 - RNA, 19 nt, Homo sapiens
  misc_RNA (1)...(19): siRNA sense strand
uggaggagaucgccaacuu

SEQ ID NO: 1650949 - RNA, 19 nt, Homo sapiens
  misc_RNA (1)...(19): siRNA sense strand
ucucaaguaugaagacaug

SEQ ID NO: 1650950 - RNA, 19 nt, Homo sapiens
  misc_RNA (1)...(19): siRNA sense strand
gaggcaccuuucaagaauu

SEQ ID NO: 1650951 - RNA, 19 nt, Homo sapiens
  misc_RNA (1)...(19): siRNA sense strand
gaucugguggugucuuauu

SEQ ID NO: 1650952 - RNA, 19 nt, Homo sapiens
  misc_RNA (1)...(19): siRNA sense strand
gggcuacggcuccugguuu

SEQ ID NO: 1650953 - RNA, 19 nt, Homo sapiens
  misc_RNA (1)...(19): siRNA sense strand
ugccggagguuuaugaaug

SEQ ID NO: 1650954 - RNA, 19 nt, Homo sapiens
  misc_RNA (1)...(19): siRNA sense strand
ugacaaggcccagcuggaa

SEQ ID NO: 1650955 - RNA, 19 nt, Homo sapiens
  misc_RNA (1)...(19): siRNA sense strand
gcaggagguggucuacuug

SEQ ID NO: 1650956 - RNA, 19 nt, Homo sapiens
  misc_RNA (1)...(19): siRNA sense strand
ugcaggagguggucuacuu

SEQ ID NO: 1650957 - RNA, 19 nt, Homo sapiens
  misc_RNA (1)...(19): siRNA sense strand
aggaucugguggugucuua

SEQ ID NO: 1650958 - RNA, 19 nt, Homo sapiens
  misc_RNA (1)...(19): siRNA sense strand
ccaccugcccuaccgcuuu

SEQ ID NO: 1650959 - RNA, 19 nt, Homo sapiens
  misc_RNA (1)...(19): siRNA sense strand
gguggugucuuauuaucag

SEQ ID NO: 1650960 - RNA, 19 nt, Homo sapiens
  misc_RNA (1)...(19): siRNA sense strand
gagcuaccgaggcaccuuu

SEQ ID NO: 1650961 - RNA, 19 nt, Homo sapiens
  misc_RNA (1)...(19): siRNA sense strand
ggcuacggcuccugguuug

SEQ ID NO: 1650962 - RNA, 19 nt, Homo sapiens
  misc_RNA (1)...(19): siRNA sense strand
ccgaggcaccuuucaagaa

SEQ ID NO: 1650963 - RNA, 19 nt, Homo sapiens
  misc_RNA (1)...(19): siRNA sense strand
gccuggacaucaucaagga

SEQ ID NO: 1650964 - RNA, 19 nt, Homo sapiens
  misc_RNA (1)...(19): siRNA sense strand
ggaggagaucgccaacuuc

SEQ ID NO: 1650965 - RNA, 19 nt, Homo sapiens
  misc_RNA (1)...(19): siRNA sense strand
ggugucuuauuaucaguuc

SEQ ID NO: 1650966 - RNA, 19 nt, Homo sapiens
  misc_RNA (1)...(19): siRNA sense strand
gagacuccaaggucaucua

SEQ ID NO: 1650967 - RNA, 19 nt, Homo sapiens
  misc_RNA (1)...(19): siRNA sense strand
aggcaccuuucaagaauuc

SEQ ID NO: 1650968 - RNA, 19 nt, Homo sapiens
  misc_RNA (1)...(19): siRNA sense strand
ggaguucgagagcaaguac

SEQ ID NO: 1650969 - RNA, 19 nt, Homo sapiens
  misc_RNA (1)...(19): siRNA sense strand
gacaucaucaaggaacuga

SEQ ID NO: 1650970 - RNA, 19 nt, Homo sapiens
  misc_RNA (1)...(19): siRNA sense strand
caccugcccuaccgcuuuc

SEQ ID NO: 1650971 - RNA, 19 nt, Homo sapiens
  misc_RNA (1)...(19): siRNA sense strand
ggacaucaucaaggaacug

SEQ ID NO: 1650972 - RNA, 19 nt, Homo sapiens
  misc_RNA (1)...(19): siRNA sense strand
uaaacaggcugaccuuuga

SEQ ID NO: 1650973 - RNA, 19 nt, Homo sapiens
  misc_RNA (1)...(19): siRNA sense strand
ccuccaagcucuuagguuu

SEQ ID NO: 1650974 - RNA, 19 nt, Homo sapiens
  misc_RNA (1)...(19): siRNA sense strand
acacaaacuuccuguucua

SEQ ID NO: 1650975 - RNA, 19 nt, Homo sapiens
  misc_RNA (1)...(19): siRNA sense strand
guaaacaggcugaccuuug

SEQ ID NO: 1650976 - RNA, 19 nt, Homo sapiens
  misc_RNA (1)...(19): siRNA sense strand
ccgcuuaccugcagcugua

SEQ ID NO: 1650977 - RNA, 19 nt, Homo sapiens
  misc_RNA (1)...(19): siRNA sense strand
gaacacaagaugcaacaca

SEQ ID NO: 1650978 - RNA, 19 nt, Homo sapiens
  misc_RNA (1)...(19): siRNA sense strand
ggagacggaccaccucauu

SEQ ID NO: 1650979 - RNA, 19 nt, Homo sapiens
  misc_RNA (1)...(19): siRNA sense strand
ugaaaccucuucccgaaag

SEQ ID NO: 1650980 - RNA, 19 nt, Homo sapiens
  misc_RNA (1)...(19): siRNA sense strand
ugucggauuucauuaagaa

SEQ ID NO: 1650981 - RNA, 19 nt, Homo sapiens
  misc_RNA (1)...(19): siRNA sense strand
ccacgaugcucaugcucuu

SEQ ID NO: 1650982 - RNA, 19 nt, Homo sapiens
  misc_RNA (1)...(19): siRNA sense strand
acagucagaugccaguaaa

SEQ ID NO: 1650983 - RNA, 19 nt, Homo sapiens
  misc_RNA (1)...(19): siRNA sense strand
caacuucagugucauucuc

SEQ ID NO: 1650984 - RNA, 19 nt, Homo sapiens
  misc_RNA (1)...(19): siRNA sense strand
caucagcuccgucauguuc

SEQ ID NO: 1650985 - RNA, 19 nt, Homo sapiens
  misc_RNA (1)...(19): siRNA sense strand
caagaugcaacacaaacuu

SEQ ID NO: 1650986 - RNA, 19 nt, Homo sapiens
  misc_RNA (1)...(19): siRNA sense strand
gccaucagcuccgucaugu

SEQ ID NO: 1650987 - RNA, 19 nt, Homo sapiens
  misc_RNA (1)...(19): siRNA sense strand
ugaccgagcugguguucac

SEQ ID NO: 1650988 - RNA, 19 nt, Homo sapiens
  misc_RNA (1)...(19): siRNA sense strand
caaacuuccuguucuacac

SEQ ID NO: 1650989 - RNA, 19 nt, Homo sapiens
  misc_RNA (1)...(19): siRNA sense strand
aacacaagaugcaacacaa

SEQ ID NO: 1650990 - RNA, 19 nt, Homo sapiens
  misc_RNA (1)...(19): siRNA sense strand
gccugcaacuucaguguca

SEQ ID NO: 1650991 - RNA, 19 nt, Homo sapiens
  misc_RNA (1)...(19): siRNA sense strand
ccucaucagcccaguggua

SEQ ID NO: 1650992 - RNA, 19 nt, Homo sapiens
  misc_RNA (1)...(19): siRNA sense strand
cgugcugccugucaucuau

SEQ ID NO: 1650993 - RNA, 19 nt, Homo sapiens
  misc_RNA (1)...(19): siRNA sense strand
ucauuaagaacacaagaug

SEQ ID NO: 1650994 - RNA, 19 nt, Homo sapiens
  misc_RNA (1)...(19): siRNA sense strand
ggcgaaagcccagccauca

SEQ ID NO: 1650995 - RNA, 19 nt, Homo sapiens
  misc_RNA (1)...(19): siRNA sense strand
gugcucgccugcaacuuca

SEQ ID NO: 1650996 - RNA, 19 nt, Homo sapiens
  misc_RNA (1)...(19): siRNA sense strand
cuccuugccuuucacgauu

SEQ ID NO: 1650997 - RNA, 19 nt, Homo sapiens
  misc_RNA (1)...(19): siRNA sense strand
acacaagaugcaacacaaa

SEQ ID NO: 1650998 - RNA, 19 nt, Homo sapiens
  misc_RNA (1)...(19): siRNA sense strand
guugucggauuucauuaag

SEQ ID NO: 1650999 - RNA, 19 nt, Homo sapiens
  misc_RNA (1)...(19): siRNA sense strand
ggugcucgccugcaacuuc

SEQ ID NO: 1651000 - RNA, 19 nt, Homo sapiens
  misc_RNA (1)...(19): siRNA sense strand
gagacggaccaccucauuc

SEQ ID NO: 1651001 - RNA, 19 nt, Homo sapiens
  misc_RNA (1)...(19): siRNA sense strand
gaaaccucuucccgaaagg

SEQ ID NO: 1651002 - RNA, 19 nt, Homo sapiens
  misc_RNA (1)...(19): siRNA sense strand
ucucggugcucgccugcaa

SEQ ID NO: 1651003 - RNA, 19 nt, Homo sapiens
  misc_RNA (1)...(19): siRNA sense strand
guccucuguugucggauuu

SEQ ID NO: 1651004 - RNA, 19 nt, Homo sapiens
  misc_RNA (1)...(19): siRNA sense strand
cacagucagaugccaguaa

SEQ ID NO: 1651005 - RNA, 19 nt, Homo sapiens
  misc_RNA (1)...(19): siRNA sense strand
ggauuucauuaagaacaca

SEQ ID NO: 1651006 - RNA, 19 nt, Homo sapiens
  misc_RNA (1)...(19): siRNA sense strand
cucgggaccugccucauca

SEQ ID NO: 1651007 - RNA, 19 nt, Homo sapiens
  misc_RNA (1)...(19): siRNA sense strand
agacggaccaccucauucu

SEQ ID NO: 1651008 - RNA, 19 nt, Homo sapiens
  misc_RNA (1)...(19): siRNA sense strand
ggacacagauuuaucaaga

SEQ ID NO: 1651009 - RNA, 19 nt, Homo sapiens
  misc_RNA (1)...(19): siRNA sense strand
gaaaugaaccuacaaauag

SEQ ID NO: 1651010 - RNA, 19 nt, Homo sapiens
  misc_RNA (1)...(19): siRNA sense strand
gggaagagacauuaaauua

SEQ ID NO: 1651011 - RNA, 19 nt, Homo sapiens
  misc_RNA (1)...(19): siRNA sense strand
ggaaauagacaaacugaaa

SEQ ID NO: 1651012 - RNA, 19 nt, Homo sapiens
  misc_RNA (1)...(19): siRNA sense strand
ggacgaaccugugaagaaa

SEQ ID NO: 1651013 - RNA, 19 nt, Homo sapiens
  misc_RNA (1)...(19): siRNA sense strand
acaggaagcuucaugauaa

SEQ ID NO: 1651014 - RNA, 19 nt, Homo sapiens
  misc_RNA (1)...(19): siRNA sense strand
gcuaagaaauccauacuug

SEQ ID NO: 1651015 - RNA, 19 nt, Homo sapiens
  misc_RNA (1)...(19): siRNA sense strand
gaagaagaccgugaacuua

SEQ ID NO: 1651016 - RNA, 19 nt, Homo sapiens
  misc_RNA (1)...(19): siRNA sense strand
caagugaacucauaucaga

SEQ ID NO: 1651017 - RNA, 19 nt, Homo sapiens
  misc_RNA (1)...(19): siRNA sense strand
ggaggaagaugaugauguu

SEQ ID NO: 1651018 - RNA, 19 nt, Homo sapiens
  misc_RNA (1)...(19): siRNA sense strand
gagauaugcugcuaagaaa

SEQ ID NO: 1651019 - RNA, 19 nt, Homo sapiens
  misc_RNA (1)...(19): siRNA sense strand
gaaagaaacuccguuccuu

SEQ ID NO: 1651020 - RNA, 19 nt, Homo sapiens
  misc_RNA (1)...(19): siRNA sense strand
gaaaggagagcucauagaa

SEQ ID NO: 1651021 - RNA, 19 nt, Homo sapiens
  misc_RNA (1)...(19): siRNA sense strand
gaacucauaucagaagaaa

SEQ ID NO: 1651022 - RNA, 19 nt, Homo sapiens
  misc_RNA (1)...(19): siRNA sense strand
gaaagugucugcacccaau

SEQ ID NO: 1651023 - RNA, 19 nt, Homo sapiens
  misc_RNA (1)...(19): siRNA sense strand
gcagaaagcagaagacuau

SEQ ID NO: 1651024 - RNA, 19 nt, Homo sapiens
  misc_RNA (1)...(19): siRNA sense strand
cagaagaaauggaacaauu

SEQ ID NO: 1651025 - RNA, 19 nt, Homo sapiens
  misc_RNA (1)...(19): siRNA sense strand
guagaugagucuuguguuu

SEQ ID NO: 1651026 - RNA, 19 nt, Homo sapiens
  misc_RNA (1)...(19): siRNA sense strand
ggacagaaauuggguuaau

SEQ ID NO: 1651027 - RNA, 19 nt, Homo sapiens
  misc_RNA (1)...(19): siRNA sense strand
ggaaagaagggaaaugaaa

SEQ ID NO: 1651028 - RNA, 19 nt, Homo sapiens
  misc_RNA (1)...(19): siRNA sense strand
ggaagcagauaaaccaguu

SEQ ID NO: 1651029 - RNA, 19 nt, Homo sapiens
  misc_RNA (1)...(19): siRNA sense strand
uaaaccaguugaagacaua

SEQ ID NO: 1651030 - RNA, 19 nt, Homo sapiens
  misc_RNA (1)...(19): siRNA sense strand
ggaauuucauccuuucuug

SEQ ID NO: 1651031 - RNA, 19 nt, Homo sapiens
  misc_RNA (1)...(19): siRNA sense strand
gaauuugaguggccuaaga

SEQ ID NO: 1651032 - RNA, 19 nt, Homo sapiens
  misc_RNA (1)...(19): siRNA sense strand
ucacagagccggagacauu

SEQ ID NO: 1651033 - RNA, 19 nt, Homo sapiens
  misc_RNA (1)...(19): siRNA sense strand
caagugcaaucaaagaauu

SEQ ID NO: 1651034 - RNA, 19 nt, Homo sapiens
  misc_RNA (1)...(19): siRNA sense strand
uuacaaugcugcuaagaaa

SEQ ID NO: 1651035 - RNA, 19 nt, Homo sapiens
  misc_RNA (1)...(19): siRNA sense strand
gagggucucugacaacauu

SEQ ID NO: 1651036 - RNA, 19 nt, Homo sapiens
  misc_RNA (1)...(19): siRNA sense strand
gaacugaugaggcagauga

SEQ ID NO: 1651037 - RNA, 19 nt, Homo sapiens
  misc_RNA (1)...(19): siRNA sense strand
ggaaugagaguaaacaaug

SEQ ID NO: 1651038 - RNA, 19 nt, Homo sapiens
  misc_RNA (1)...(19): siRNA sense strand
ugacagagccauucaggua

SEQ ID NO: 1651039 - RNA, 19 nt, Homo sapiens
  misc_RNA (1)...(19): siRNA sense strand
ggcagaugauguuaaauuu

SEQ ID NO: 1651040 - RNA, 19 nt, Homo sapiens
  misc_RNA (1)...(19): siRNA sense strand
uaaauuugcuguucgugaa

SEQ ID NO: 1651041 - RNA, 19 nt, Homo sapiens
  misc_RNA (1)...(19): siRNA sense strand
uggcagagaugaacuaaau

SEQ ID NO: 1651042 - RNA, 19 nt, Homo sapiens
  misc_RNA (1)...(19): siRNA sense strand
gaagauguacuacuguuug

SEQ ID NO: 1651043 - RNA, 19 nt, Homo sapiens
  misc_RNA (1)...(19): siRNA sense strand
agaaagcucugaagacgaa

SEQ ID NO: 1651044 - RNA, 19 nt, Homo sapiens
  misc_RNA (1)...(19): siRNA sense strand
gaaagcagaagacuauaug

SEQ ID NO: 1651045 - RNA, 19 nt, Homo sapiens
  misc_RNA (1)...(19): siRNA sense strand
gaaauuggcuucaaaagag

SEQ ID NO: 1651046 - RNA, 19 nt, Homo sapiens
  misc_RNA (1)...(19): siRNA sense strand
ccagauagauuggacagaa

SEQ ID NO: 1651047 - RNA, 19 nt, Homo sapiens
  misc_RNA (1)...(19): siRNA sense strand
aaggagagcucauagaaau

SEQ ID NO: 1651048 - RNA, 19 nt, Homo sapiens
  misc_RNA (1)...(19): siRNA sense strand
caagauagaaggccagaaa

SEQ ID NO: 1651049 - RNA, 19 nt, Homo sapiens
  misc_RNA (1)...(19): siRNA sense strand
gaucucagcuugucagcau

SEQ ID NO: 1651050 - RNA, 19 nt, Homo sapiens
  misc_RNA (1)...(19): siRNA sense strand
gggaagggauauaucauuc

SEQ ID NO: 1651051 - RNA, 19 nt, Homo sapiens
  misc_RNA (1)...(19): siRNA sense strand
gcagagaugaacuaaauga

SEQ ID NO: 1651052 - RNA, 19 nt, Homo sapiens
  misc_RNA (1)...(19): siRNA sense strand
ggaagaugaugauguugau

SEQ ID NO: 1651053 - RNA, 19 nt, Homo sapiens
  misc_RNA (1)...(19): siRNA sense strand
gaaugagaguaaacaaugu

SEQ ID NO: 1651054 - RNA, 19 nt, Homo sapiens
  misc_RNA (1)...(19): siRNA sense strand
ugaggcagaugauguuaaa

SEQ ID NO: 1651055 - RNA, 19 nt, Homo sapiens
  misc_RNA (1)...(19): siRNA sense strand
aaaccggacuuuaaagcua

SEQ ID NO: 1651056 - RNA, 19 nt, Homo sapiens
  misc_RNA (1)...(19): siRNA sense strand
gaccagcucucauugaaca

SEQ ID NO: 1651057 - RNA, 19 nt, Homo sapiens
  misc_RNA (1)...(19): siRNA sense strand
aagguugacugaaauagua

SEQ ID NO: 1651058 - RNA, 19 nt, Homo sapiens
  misc_RNA (1)...(19): siRNA sense strand
ggaaagguugacugaaaua

SEQ ID NO: 1651059 - RNA, 19 nt, Homo sapiens
  misc_RNA (1)...(19): siRNA sense strand
ccacggaccuugacugaag

SEQ ID NO: 1651060 - RNA, 19 nt, Homo sapiens
  misc_RNA (1)...(19): siRNA sense strand
aaacauuccuggcaaagug

SEQ ID NO: 1651061 - RNA, 19 nt, Homo sapiens
  misc_RNA (1)...(19): siRNA sense strand
aaagguccauccagaaauu

SEQ ID NO: 1651062 - RNA, 19 nt, Homo sapiens
  misc_RNA (1)...(19): siRNA sense strand
ggauaaagaagaacaugaa

SEQ ID NO: 1651063 - RNA, 19 nt, Homo sapiens
  misc_RNA (1)...(19): siRNA sense strand
gagcagugaugaggauaaa

SEQ ID NO: 1651064 - RNA, 19 nt, Homo sapiens
  misc_RNA (1)...(19): siRNA sense strand
ucagcaggcucaggaaaua

SEQ ID NO: 1651065 - RNA, 19 nt, Homo sapiens
  misc_RNA (1)...(19): siRNA sense strand
caaagaagcaacagcaaga

SEQ ID NO: 1651066 - RNA, 19 nt, Homo sapiens
  misc_RNA (1)...(19): siRNA sense strand
gacugaagcuggcacaaug

SEQ ID NO: 1651067 - RNA, 19 nt, Homo sapiens
  misc_RNA (1)...(19): siRNA sense strand
gagaucagcaacagaauga

SEQ ID NO: 1651068 - RNA, 19 nt, Homo sapiens
  misc_RNA (1)...(19): siRNA sense strand
caagagauaugcugcuaag

SEQ ID NO: 1651069 - RNA, 19 nt, Homo sapiens
  misc_RNA (1)...(19): siRNA sense strand
gaaauggaacaauuagaug

SEQ ID NO: 1651070 - RNA, 19 nt, Homo sapiens
  misc_RNA (1)...(19): siRNA sense strand
ccaagugacucaggagauu

SEQ ID NO: 1651071 - RNA, 19 nt, Homo sapiens
  misc_RNA (1)...(19): siRNA sense strand
ugacucagguugaccaaga

SEQ ID NO: 1651072 - RNA, 19 nt, Homo sapiens
  misc_RNA (1)...(19): siRNA sense strand
gauguuaaauuugcuguuc

SEQ ID NO: 1651073 - RNA, 19 nt, Homo sapiens
  misc_RNA (1)...(19): siRNA sense strand
gaggauaucacucuucaga

SEQ ID NO: 1651074 - RNA, 19 nt, Homo sapiens
  misc_RNA (1)...(19): siRNA sense strand
acaaggcgguggaugaauu

SEQ ID NO: 1651075 - RNA, 19 nt, Homo sapiens
  misc_RNA (1)...(19): siRNA sense strand
gcagaagacuauaugaaaa

SEQ ID NO: 1651076 - RNA, 19 nt, Homo sapiens
  misc_RNA (1)...(19): siRNA sense strand
gaagaaauggaacaauuag

SEQ ID NO: 1651077 - RNA, 19 nt, Homo sapiens
  misc_RNA (1)...(19): siRNA sense strand
ugacuugucucaccuucaa

SEQ ID NO: 1651078 - RNA, 19 nt, Homo sapiens
  misc_RNA (1)...(19): siRNA sense strand
gcagugaugaggauaaaga

SEQ ID NO: 1651079 - RNA, 19 nt, Homo sapiens
  misc_RNA (1)...(19): siRNA sense strand
acuguuaccucuauucaaa

SEQ ID NO: 1651080 - RNA, 19 nt, Homo sapiens
  misc_RNA (1)...(19): siRNA sense strand
gaagcaacagcaagagaaa

SEQ ID NO: 1651081 - RNA, 19 nt, Homo sapiens
  misc_RNA (1)...(19): siRNA sense strand
ggacaaaagaguaaaauga

SEQ ID NO: 1651082 - RNA, 19 nt, Homo sapiens
  misc_RNA (1)...(19): siRNA sense strand
gaagggauauaucauucag

SEQ ID NO: 1651083 - RNA, 19 nt, Homo sapiens
  misc_RNA (1)...(19): siRNA sense strand
ccaaagguccauccagaaa

SEQ ID NO: 1651084 - RNA, 19 nt, Homo sapiens
  misc_RNA (1)...(19): siRNA sense strand
gaaaagaucaggauucugu

SEQ ID NO: 1651085 - RNA, 19 nt, Homo sapiens
  misc_RNA (1)...(19): siRNA sense strand
gaucagcaacagaaugaaa

SEQ ID NO: 1651086 - RNA, 19 nt, Homo sapiens
  misc_RNA (1)...(19): siRNA sense strand
cgugaacgcuauccacuug

SEQ ID NO: 1651087 - RNA, 19 nt, Homo sapiens
  misc_RNA (1)...(19): siRNA sense strand
ugaaacuccuguggaagua

SEQ ID NO: 1651088 - RNA, 19 nt, Homo sapiens
  misc_RNA (1)...(19): siRNA sense strand
uuggaaagguugacugaaa

SEQ ID NO: 1651089 - RNA, 19 nt, Homo sapiens
  misc_RNA (1)...(19): siRNA sense strand
gaaauagacaaacugaaag

SEQ ID NO: 1651090 - RNA, 19 nt, Homo sapiens
  misc_RNA (1)...(19): siRNA sense strand
ccaaucuucugaacguaaa

SEQ ID NO: 1651091 - RNA, 19 nt, Homo sapiens
  misc_RNA (1)...(19): siRNA sense strand
ugaagaagaccgugaacuu

SEQ ID NO: 1651092 - RNA, 19 nt, Homo sapiens
  misc_RNA (1)...(19): siRNA sense strand
gcacaauggcacuuugcua

SEQ ID NO: 1651093 - RNA, 19 nt, Homo sapiens
  misc_RNA (1)...(19): siRNA sense strand
uaaaagaaguucagacugu

SEQ ID NO: 1651094 - RNA, 19 nt, Homo sapiens
  misc_RNA (1)...(19): siRNA sense strand
gcagaugauguuaaauuug

SEQ ID NO: 1651095 - RNA, 19 nt, Homo sapiens
  misc_RNA (1)...(19): siRNA sense strand
gcguaaaggacacagauuu

SEQ ID NO: 1651096 - RNA, 19 nt, Homo sapiens
  misc_RNA (1)...(19): siRNA sense strand
acaugaaacuccuguggaa

SEQ ID NO: 1651097 - RNA, 19 nt, Homo sapiens
  misc_RNA (1)...(19): siRNA sense strand
uaagguagaugagucuugu

SEQ ID NO: 1651098 - RNA, 19 nt, Homo sapiens
  misc_RNA (1)...(19): siRNA sense strand
cagauagauuggacagaaa

SEQ ID NO: 1651099 - RNA, 19 nt, Homo sapiens
  misc_RNA (1)...(19): siRNA sense strand
gcaagcauugaagaaauua

SEQ ID NO: 1651100 - RNA, 19 nt, Homo sapiens
  misc_RNA (1)...(19): siRNA sense strand
ggagauuagucagugcaaa

SEQ ID NO: 1651101 - RNA, 19 nt, Homo sapiens
  misc_RNA (1)...(19): siRNA sense strand
guacuacuguuugccauuc

SEQ ID NO: 1651102 - RNA, 19 nt, Homo sapiens
  misc_RNA (1)...(19): siRNA sense strand
aaguagaacucaugacuca

SEQ ID NO: 1651103 - RNA, 19 nt, Homo sapiens
  misc_RNA (1)...(19): siRNA sense strand
gcauucaagucagcagaaa

SEQ ID NO: 1651104 - RNA, 19 nt, Homo sapiens
  misc_RNA (1)...(19): siRNA sense strand
guauuaugaucacaagaga

SEQ ID NO: 1651105 - RNA, 19 nt, Homo sapiens
  misc_RNA (1)...(19): siRNA sense strand
uaucagaggaggaagauga

SEQ ID NO: 1651106 - RNA, 19 nt, Homo sapiens
  misc_RNA (1)...(19): siRNA sense strand
gaggaaaaccuauuugauu

SEQ ID NO: 1651107 - RNA, 19 nt, Homo sapiens
  misc_RNA (1)...(19): siRNA sense strand
gacacagauuuaucaagaa

SEQ ID NO: 1651108 - RNA, 19 nt, Homo sapiens
  misc_RNA (1)...(19): siRNA sense strand
cagaagagauucagccaaa

SEQ ID NO: 1651109 - RNA, 19 nt, Homo sapiens
  misc_RNA (1)...(19): siRNA sense strand
gugaccagguggauauuua

SEQ ID NO: 1651110 - RNA, 19 nt, Homo sapiens
  misc_RNA (1)...(19): siRNA sense strand
aaagacaguuuguacaaug

SEQ ID NO: 1651111 - RNA, 19 nt, Homo sapiens
  misc_RNA (1)...(19): siRNA sense strand
ccagaugccuugggagcua

SEQ ID NO: 1651112 - RNA, 19 nt, Homo sapiens
  misc_RNA (1)...(19): siRNA sense strand
agacugacgugugcuacua

SEQ ID NO: 1651113 - RNA, 19 nt, Homo sapiens
  misc_RNA (1)...(19): siRNA sense strand
acucagauaucccaaagug

SEQ ID NO: 1651114 - RNA, 19 nt, Homo sapiens
  misc_RNA (1)...(19): siRNA sense strand
ccacucagauaucccaaag

SEQ ID NO: 1651115 - RNA, 19 nt, Homo sapiens
  misc_RNA (1)...(19): siRNA sense strand
caagaaaucuccccagaag

SEQ ID NO: 1651116 - RNA, 19 nt, Homo sapiens
  misc_RNA (1)...(19): siRNA sense strand
ccaaagugguaccagaauc

SEQ ID NO: 1651117 - RNA, 19 nt, Homo sapiens
  misc_RNA (1)...(19): siRNA sense strand
gcaagacugacgugugcua

SEQ ID NO: 1651118 - RNA, 19 nt, Homo sapiens
  misc_RNA (1)...(19): siRNA sense strand
cauccaagcgcaagacuga

SEQ ID NO: 1651119 - RNA, 19 nt, Homo sapiens
  misc_RNA (1)...(19): siRNA sense strand
agaagaauuuggugaagca

SEQ ID NO: 1651120 - RNA, 19 nt, Homo sapiens
  misc_RNA (1)...(19): siRNA sense strand
ccucugggaugcuugguau

SEQ ID NO: 1651121 - RNA, 19 nt, Homo sapiens
  misc_RNA (1)...(19): siRNA sense strand
acaucuaccugcuuggaaa

SEQ ID NO: 1651122 - RNA, 19 nt, Homo sapiens
  misc_RNA (1)...(19): siRNA sense strand
gacgcaguccugagguuua

SEQ ID NO: 1651123 - RNA, 19 nt, Homo sapiens
  misc_RNA (1)...(19): siRNA sense strand
cagccaacuuccaacaaga

SEQ ID NO: 1651124 - RNA, 19 nt, Homo sapiens
  misc_RNA (1)...(19): siRNA sense strand
aagacaguuuguacaauga

SEQ ID NO: 1651125 - RNA, 19 nt, Homo sapiens
  misc_RNA (1)...(19): siRNA sense strand
ggacaucuaccugcuugga

SEQ ID NO: 1651126 - RNA, 19 nt, Homo sapiens
  misc_RNA (1)...(19): siRNA sense strand
agaauuuggugaagcaucu

SEQ ID NO: 1651127 - RNA, 19 nt, Homo sapiens
  misc_RNA (1)...(19): siRNA sense strand
ccagguggauauuuaugag

SEQ ID NO: 1651128 - RNA, 19 nt, Homo sapiens
  misc_RNA (1)...(19): siRNA sense strand
acuacaagacuuaucguaa

SEQ ID NO: 1651129 - RNA, 19 nt, Homo sapiens
  misc_RNA (1)...(19): siRNA sense strand
caacuuccaacaagaugug

SEQ ID NO: 1651130 - RNA, 19 nt, Homo sapiens
  misc_RNA (1)...(19): siRNA sense strand
gcaguccugagguuuaaug

SEQ ID NO: 1651131 - RNA, 19 nt, Homo sapiens
  misc_RNA (1)...(19): siRNA sense strand
ugagaagaauuuggugaag

SEQ ID NO: 1651132 - RNA, 19 nt, Homo sapiens
  misc_RNA (1)...(19): siRNA sense strand
acgcaguccugagguuuaa

SEQ ID NO: 1651133 - RNA, 19 nt, Homo sapiens
  misc_RNA (1)...(19): siRNA sense strand
cagauaucccaaaguggua

SEQ ID NO: 1651134 - RNA, 19 nt, Homo sapiens
  misc_RNA (1)...(19): siRNA sense strand
gguggauauuuaugaguuc

SEQ ID NO: 1651135 - RNA, 19 nt, Homo sapiens
  misc_RNA (1)...(19): siRNA sense strand
gcuaugggacauucuucaa

SEQ ID NO: 1651136 - RNA, 19 nt, Homo sapiens
  misc_RNA (1)...(19): siRNA sense strand
ggagcuaugggacauucuu

SEQ ID NO: 1651137 - RNA, 19 nt, Homo sapiens
  misc_RNA (1)...(19): siRNA sense strand
agguggauauuuaugaguu

SEQ ID NO: 1651138 - RNA, 19 nt, Homo sapiens
  misc_RNA (1)...(19): siRNA sense strand
acagccaacuuccaacaag

SEQ ID NO: 1651139 - RNA, 19 nt, Homo sapiens
  misc_RNA (1)...(19): siRNA sense strand
ucaaccagggcacagauga

SEQ ID NO: 1651140 - RNA, 19 nt, Homo sapiens
  misc_RNA (1)...(19): siRNA sense strand
gacaguuuguacaaugaag

SEQ ID NO: 1651141 - RNA, 19 nt, Homo sapiens
  misc_RNA (1)...(19): siRNA sense strand
ccacagccaacuuccaaca

SEQ ID NO: 1651142 - RNA, 19 nt, Homo sapiens
  misc_RNA (1)...(19): siRNA sense strand
gcuacuacuaccagaaguu

SEQ ID NO: 1651143 - RNA, 19 nt, Homo sapiens
  misc_RNA (1)...(19): siRNA sense strand
gaagagauucagccaaacc

SEQ ID NO: 1651144 - RNA, 19 nt, Homo sapiens
  misc_RNA (1)...(19): siRNA sense strand
gaccagguggauauuuaug

SEQ ID NO: 1651145 - RNA, 19 nt, Homo sapiens
  misc_RNA (1)...(19): siRNA sense strand
ccggaccauucacugcuaa

SEQ ID NO: 1651146 - RNA, 19 nt, Homo sapiens
  misc_RNA (1)...(19): siRNA sense strand
aaacuaccauucgccugau

SEQ ID NO: 1651147 - RNA, 19 nt, Homo sapiens
  misc_RNA (1)...(19): siRNA sense strand
ccgcugcucuaugagaaga

SEQ ID NO: 1651148 - RNA, 19 nt, Homo sapiens
  misc_RNA (1)...(19): siRNA sense strand
accacccgcugcucuauga

SEQ ID NO: 1651149 - RNA, 19 nt, Homo sapiens
  misc_RNA (1)...(19): siRNA sense strand
ccauucgccugaugaacuc

SEQ ID NO: 1651150 - RNA, 19 nt, Homo sapiens
  misc_RNA (1)...(19): siRNA sense strand
gacaucuaccugcuuggaa

SEQ ID NO: 1651151 - RNA, 19 nt, Homo sapiens
  misc_RNA (1)...(19): siRNA sense strand
guauaccacucagauaucc

SEQ ID NO: 1651152 - RNA, 19 nt, Homo sapiens
  misc_RNA (1)...(19): siRNA sense strand
gagcuaugggacauucuuc

SEQ ID NO: 1651153 - RNA, 19 nt, Homo sapiens
  misc_RNA (1)...(19): siRNA sense strand
ugacgcaguccugagguuu

SEQ ID NO: 1651154 - RNA, 19 nt, Homo sapiens
  misc_RNA (1)...(19): siRNA sense strand
gcugcucuaugagaagaau

SEQ ID NO: 1651155 - RNA, 19 nt, Homo sapiens
  misc_RNA (1)...(19): siRNA sense strand
ugacgugugcuacuacuac

SEQ ID NO: 1651156 - RNA, 19 nt, Homo sapiens
  misc_RNA (1)...(19): siRNA sense strand
ugaccagguggauauuuau

SEQ ID NO: 1651157 - RNA, 19 nt, Homo sapiens
  misc_RNA (1)...(19): siRNA sense strand
cagaagagauucagccaaa

SEQ ID NO: 1651158 - RNA, 19 nt, Homo sapiens
  misc_RNA (1)...(19): siRNA sense strand
gugaccagguggauauuua

SEQ ID NO: 1651159 - RNA, 19 nt, Homo sapiens
  misc_RNA (1)...(19): siRNA sense strand
aaagacaguuuguacaaug

SEQ ID NO: 1651160 - RNA, 19 nt, Homo sapiens
  misc_RNA (1)...(19): siRNA sense strand
ccagaugccuugggagcua

SEQ ID NO: 1651161 - RNA, 19 nt, Homo sapiens
  misc_RNA (1)...(19): siRNA sense strand
agacugacgugugcuacua

SEQ ID NO: 1651162 - RNA, 19 nt, Homo sapiens
  misc_RNA (1)...(19): siRNA sense strand
acucagauaucccaaagug

SEQ ID NO: 1651163 - RNA, 19 nt, Homo sapiens
  misc_RNA (1)...(19): siRNA sense strand
ccacucagauaucccaaag

SEQ ID NO: 1651164 - RNA, 19 nt, Homo sapiens
  misc_RNA (1)...(19): siRNA sense strand
caagaaaucuccccagaag

SEQ ID NO: 1651165 - RNA, 19 nt, Homo sapiens
  misc_RNA (1)...(19): siRNA sense strand
ccaaagugguaccagaauc

SEQ ID NO: 1651166 - RNA, 19 nt, Homo sapiens
  misc_RNA (1)...(19): siRNA sense strand
gcaagacugacgugugcua

SEQ ID NO: 1651167 - RNA, 19 nt, Homo sapiens
  misc_RNA (1)...(19): siRNA sense strand
cauccaagcgcaagacuga

SEQ ID NO: 1651168 - RNA, 19 nt, Homo sapiens
  misc_RNA (1)...(19): siRNA sense strand
agaagaauuuggugaagca

SEQ ID NO: 1651169 - RNA, 19 nt, Homo sapiens
  misc_RNA (1)...(19): siRNA sense strand
ccucugggaugcuugguau

SEQ ID NO: 1651170 - RNA, 19 nt, Homo sapiens
  misc_RNA (1)...(19): siRNA sense strand
acaucuaccugcuuggaaa

SEQ ID NO: 1651171 - RNA, 19 nt, Homo sapiens
  misc_RNA (1)...(19): siRNA sense strand
gacgcaguccugagguuua

SEQ ID NO: 1651172 - RNA, 19 nt, Homo sapiens
  misc_RNA (1)...(19): siRNA sense strand
cagccaacuuccaacaaga

SEQ ID NO: 1651173 - RNA, 19 nt, Homo sapiens
  misc_RNA (1)...(19): siRNA sense strand
aagacaguuuguacaauga

SEQ ID NO: 1651174 - RNA, 19 nt, Homo sapiens
  misc_RNA (1)...(19): siRNA sense strand
ggacaucuaccugcuugga

SEQ ID NO: 1651175 - RNA, 19 nt, Homo sapiens
  misc_RNA (1)...(19): siRNA sense strand
agaauuuggugaagcaucu

SEQ ID NO: 1651176 - RNA, 19 nt, Homo sapiens
  misc_RNA (1)...(19): siRNA sense strand
ccagguggauauuuaugag

SEQ ID NO: 1651177 - RNA, 19 nt, Homo sapiens
  misc_RNA (1)...(19): siRNA sense strand
acuacaagacuuaucguaa

SEQ ID NO: 1651178 - RNA, 19 nt, Homo sapiens
  misc_RNA (1)...(19): siRNA sense strand
caacuuccaacaagaugug

SEQ ID NO: 1651179 - RNA, 19 nt, Homo sapiens
  misc_RNA (1)...(19): siRNA sense strand
gcaguccugagguuuaaug

SEQ ID NO: 1651180 - RNA, 19 nt, Homo sapiens
  misc_RNA (1)...(19): siRNA sense strand
ugagaagaauuuggugaag

SEQ ID NO: 1651181 - RNA, 19 nt, Homo sapiens
  misc_RNA (1)...(19): siRNA sense strand
acgcaguccugagguuuaa

SEQ ID NO: 1651182 - RNA, 19 nt, Homo sapiens
  misc_RNA (1)...(19): siRNA sense strand
cagauaucccaaaguggua

SEQ ID NO: 1651183 - RNA, 19 nt, Homo sapiens
  misc_RNA (1)...(19): siRNA sense strand
gguggauauuuaugaguuc

SEQ ID NO: 1651184 - RNA, 19 nt, Homo sapiens
  misc_RNA (1)...(19): siRNA sense strand
gcuaugggacauucuucaa

SEQ ID NO: 1651185 - RNA, 19 nt, Homo sapiens
  misc_RNA (1)...(19): siRNA sense strand
ggagcuaugggacauucuu

SEQ ID NO: 1651186 - RNA, 19 nt, Homo sapiens
  misc_RNA (1)...(19): siRNA sense strand
agguggauauuuaugaguu

SEQ ID NO: 1651187 - RNA, 19 nt, Homo sapiens
  misc_RNA (1)...(19): siRNA sense strand
acagccaacuuccaacaag

SEQ ID NO: 1651188 - RNA, 19 nt, Homo sapiens
  misc_RNA (1)...(19): siRNA sense strand
ucaaccagggcacagauga

SEQ ID NO: 1651189 - RNA, 19 nt, Homo sapiens
  misc_RNA (1)...(19): siRNA sense strand
gacaguuuguacaaugaag

SEQ ID NO: 1651190 - RNA, 19 nt, Homo sapiens
  misc_RNA (1)...(19): siRNA sense strand
ccacagccaacuuccaaca

SEQ ID NO: 1651191 - RNA, 19 nt, Homo sapiens
  misc_RNA (1)...(19): siRNA sense strand
gcuacuacuaccagaaguu

SEQ ID NO: 1651192 - RNA, 19 nt, Homo sapiens
  misc_RNA (1)...(19): siRNA sense strand
gaagagauucagccaaacc

SEQ ID NO: 1651193 - RNA, 19 nt, Homo sapiens
  misc_RNA (1)...(19): siRNA sense strand
gaccagguggauauuuaug

SEQ ID NO: 1651194 - RNA, 19 nt, Homo sapiens
  misc_RNA (1)...(19): siRNA sense strand
ccggaccauucacugcuaa

SEQ ID NO: 1651195 - RNA, 19 nt, Homo sapiens
  misc_RNA (1)...(19): siRNA sense strand
aaacuaccauucgccugau

SEQ ID NO: 1651196 - RNA, 19 nt, Homo sapiens
  misc_RNA (1)...(19): siRNA sense strand
ccgcugcucuaugagaaga

SEQ ID NO: 1651197 - RNA, 19 nt, Homo sapiens
  misc_RNA (1)...(19): siRNA sense strand
accacccgcugcucuauga

SEQ ID NO: 1651198 - RNA, 19 nt, Homo sapiens
  misc_RNA (1)...(19): siRNA sense strand
ccauucgccugaugaacuc

SEQ ID NO: 1651199 - RNA, 19 nt, Homo sapiens
  misc_RNA (1)...(19): siRNA sense strand
gacaucuaccugcuuggaa

SEQ ID NO: 1651200 - RNA, 19 nt, Homo sapiens
  misc_RNA (1)...(19): siRNA sense strand
guauaccacucagauaucc

SEQ ID NO: 1651201 - RNA, 19 nt, Homo sapiens
  misc_RNA (1)...(19): siRNA sense strand
gagcuaugggacauucuuc

SEQ ID NO: 1651202 - RNA, 19 nt, Homo sapiens
  misc_RNA (1)...(19): siRNA sense strand
ugacgcaguccugagguuu

SEQ ID NO: 1651203 - RNA, 19 nt, Homo sapiens
  misc_RNA (1)...(19): siRNA sense strand
gcugcucuaugagaagaau

SEQ ID NO: 1651204 - RNA, 19 nt, Homo sapiens
  misc_RNA (1)...(19): siRNA sense strand
ugacgugugcuacuacuac

SEQ ID NO: 1651205 - RNA, 19 nt, Homo sapiens
  misc_RNA (1)...(19): siRNA sense strand
ugaccagguggauauuuau

SEQ ID NO: 1651206 - RNA, 19 nt, Homo sapiens
  misc_RNA (1)...(19): siRNA sense strand
cagaagagauucagccaaa

SEQ ID NO: 1651207 - RNA, 19 nt, Homo sapiens
  misc_RNA (1)...(19): siRNA sense strand
gugaccagguggauauuua

SEQ ID NO: 1651208 - RNA, 19 nt, Homo sapiens
  misc_RNA (1)...(19): siRNA sense strand
aaagacaguuuguacaaug

SEQ ID NO: 1651209 - RNA, 19 nt, Homo sapiens
  misc_RNA (1)...(19): siRNA sense strand
ccagaugccuugggagcua

SEQ ID NO: 1651210 - RNA, 19 nt, Homo sapiens
  misc_RNA (1)...(19): siRNA sense strand
agacugacgugugcuacua

SEQ ID NO: 1651211 - RNA, 19 nt, Homo sapiens
  misc_RNA (1)...(19): siRNA sense strand
acucagauaucccaaagug

SEQ ID NO: 1651212 - RNA, 19 nt, Homo sapiens
  misc_RNA (1)...(19): siRNA sense strand
ccacucagauaucccaaag

SEQ ID NO: 1651213 - RNA, 19 nt, Homo sapiens
  misc_RNA (1)...(19): siRNA sense strand
caagaaaucuccccagaag

SEQ ID NO: 1651214 - RNA, 19 nt, Homo sapiens
  misc_RNA (1)...(19): siRNA sense strand
ccaaagugguaccagaauc

SEQ ID NO: 1651215 - RNA, 19 nt, Homo sapiens
  misc_RNA (1)...(19): siRNA sense strand
gcaagacugacgugugcua

SEQ ID NO: 1651216 - RNA, 19 nt, Homo sapiens
  misc_RNA (1)...(19): siRNA sense strand
cauccaagcgcaagacuga

SEQ ID NO: 1651217 - RNA, 19 nt, Homo sapiens
  misc_RNA (1)...(19): siRNA sense strand
agaagaauuuggugaagca

SEQ ID NO: 1651218 - RNA, 19 nt, Homo sapiens
  misc_RNA (1)...(19): siRNA sense strand
ccucugggaugcuugguau

SEQ ID NO: 1651219 - RNA, 19 nt, Homo sapiens
  misc_RNA (1)...(19): siRNA sense strand
acaucuaccugcuuggaaa

SEQ ID NO: 1651220 - RNA, 19 nt, Homo sapiens
  misc_RNA (1)...(19): siRNA sense strand
aagacaguuuguacaauga

SEQ ID NO: 1651221 - RNA, 19 nt, Homo sapiens
  misc_RNA (1)...(19): siRNA sense strand
ggacaucuaccugcuugga

SEQ ID NO: 1651222 - RNA, 19 nt, Homo sapiens
  misc_RNA (1)...(19): siRNA sense strand
agaauuuggugaagcaucu

SEQ ID NO: 1651223 - RNA, 19 nt, Homo sapiens
  misc_RNA (1)...(19): siRNA sense strand
ccagguggauauuuaugag

SEQ ID NO: 1651224 - RNA, 19 nt, Homo sapiens
  misc_RNA (1)...(19): siRNA sense strand
acuacaagacuuaucguaa

SEQ ID NO: 1651225 - RNA, 19 nt, Homo sapiens
  misc_RNA (1)...(19): siRNA sense strand
ugagaagaauuuggugaag

SEQ ID NO: 1651226 - RNA, 19 nt, Homo sapiens
  misc_RNA (1)...(19): siRNA sense strand
cagauaucccaaaguggua

SEQ ID NO: 1651227 - RNA, 19 nt, Homo sapiens
  misc_RNA (1)...(19): siRNA sense strand
gguggauauuuaugaguuc

SEQ ID NO: 1651228 - RNA, 19 nt, Homo sapiens
  misc_RNA (1)...(19): siRNA sense strand
gcuaugggacauucuucaa

SEQ ID NO: 1651229 - RNA, 19 nt, Homo sapiens
  misc_RNA (1)...(19): siRNA sense strand
ggagcuaugggacauucuu

SEQ ID NO: 1651230 - RNA, 19 nt, Homo sapiens
  misc_RNA (1)...(19): siRNA sense strand
agguggauauuuaugaguu

SEQ ID NO: 1651231 - RNA, 19 nt, Homo sapiens
  misc_RNA (1)...(19): siRNA sense strand
ucaaccagggcacagauga

SEQ ID NO: 1651232 - RNA, 19 nt, Homo sapiens
  misc_RNA (1)...(19): siRNA sense strand
gaagagauucagccaaacc

SEQ ID NO: 1651233 - RNA, 19 nt, Homo sapiens
  misc_RNA (1)...(19): siRNA sense strand
gacaguuuguacaaugaag

SEQ ID NO: 1651234 - RNA, 19 nt, Homo sapiens
  misc_RNA (1)...(19): siRNA sense strand
gcuacuacuaccagaaguu

SEQ ID NO: 1651235 - RNA, 19 nt, Homo sapiens
  misc_RNA (1)...(19): siRNA sense strand
gaccagguggauauuuaug

SEQ ID NO: 1651236 - RNA, 19 nt, Homo sapiens
  misc_RNA (1)...(19): siRNA sense strand
ccggaccauucacugcuaa

SEQ ID NO: 1651237 - RNA, 19 nt, Homo sapiens
  misc_RNA (1)...(19): siRNA sense strand
accacccgcugcucuauga

SEQ ID NO: 1651238 - RNA, 19 nt, Homo sapiens
  misc_RNA (1)...(19): siRNA sense strand
ccgcugcucuaugagaaga

SEQ ID NO: 1651239 - RNA, 19 nt, Homo sapiens
  misc_RNA (1)...(19): siRNA sense strand
gacaucuaccugcuuggaa

SEQ ID NO: 1651240 - RNA, 19 nt, Homo sapiens
  misc_RNA (1)...(19): siRNA sense strand
gagcuaugggacauucuuc

SEQ ID NO: 1651241 - RNA, 19 nt, Homo sapiens
  misc_RNA (1)...(19): siRNA sense strand
guauaccacucagauaucc

SEQ ID NO: 1651242 - RNA, 19 nt, Homo sapiens
  misc_RNA (1)...(19): siRNA sense strand
ugaccagguggauauuuau

SEQ ID NO: 1651243 - RNA, 19 nt, Homo sapiens
  misc_RNA (1)...(19): siRNA sense strand
gcugcucuaugagaagaau

SEQ ID NO: 1651244 - RNA, 19 nt, Homo sapiens
  misc_RNA (1)...(19): siRNA sense strand
ugacgugugcuacuacuac

SEQ ID NO: 1651245 - RNA, 19 nt, Homo sapiens
  misc_RNA (1)...(19): siRNA sense strand
gaagcaagaucauuaguug

SEQ ID NO: 1651246 - RNA, 19 nt, Homo sapiens
  misc_RNA (1)...(19): siRNA sense strand
uaaauccacucaucaaugu

SEQ ID NO: 1651247 - RNA, 19 nt, Homo sapiens
  misc_RNA (1)...(19): siRNA sense strand
gguaucaucuucaccaaau

SEQ ID NO: 1651248 - RNA, 19 nt, Homo sapiens
  misc_RNA (1)...(19): siRNA sense strand
gaauuaccgccucuucuuu

SEQ ID NO: 1651249 - RNA, 19 nt, Homo sapiens
  misc_RNA (1)...(19): siRNA sense strand
agaggaagcaagaucauua

SEQ ID NO: 1651250 - RNA, 19 nt, Homo sapiens
  misc_RNA (1)...(19): siRNA sense strand
ggaagcaagaucauuaguu

SEQ ID NO: 1651251 - RNA, 19 nt, Homo sapiens
  misc_RNA (1)...(19): siRNA sense strand
guuauuaaauccacucauc

SEQ ID NO: 1651252 - RNA, 19 nt, Homo sapiens
  misc_RNA (1)...(19): siRNA sense strand
ggaagcuacucuuaauugg

SEQ ID NO: 1651253 - RNA, 19 nt, Homo sapiens
  misc_RNA (1)...(19): siRNA sense strand
aagcuacucuuaauugguu

SEQ ID NO: 1651254 - RNA, 19 nt, Homo sapiens
  misc_RNA (1)...(19): siRNA sense strand
gcaagaucauuaguugaau

SEQ ID NO: 1651255 - RNA, 19 nt, Homo sapiens
  misc_RNA (1)...(19): siRNA sense strand
ccuggaagcuacucuuaau

SEQ ID NO: 1651256 - RNA, 19 nt, Homo sapiens
  misc_RNA (1)...(19): siRNA sense strand
caagaucauuaguugaauc

SEQ ID NO: 1651257 - RNA, 19 nt, Homo sapiens
  misc_RNA (1)...(19): siRNA sense strand
guaucaucuucaccaaaua

SEQ ID NO: 1651258 - RNA, 19 nt, Homo sapiens
  misc_RNA (1)...(19): siRNA sense strand
aaacaaggcuuuugcucuu

SEQ ID NO: 1651259 - RNA, 19 nt, Homo sapiens
  misc_RNA (1)...(19): siRNA sense strand
gcuauaaauugcacaaacg

SEQ ID NO: 1651260 - RNA, 19 nt, Homo sapiens
  misc_RNA (1)...(19): siRNA sense strand
uaauggaggagcuauaaau

SEQ ID NO: 1651261 - RNA, 19 nt, Homo sapiens
  misc_RNA (1)...(19): siRNA sense strand
uggaagcuacucuuaauug

SEQ ID NO: 1651262 - RNA, 19 nt, Homo sapiens
  misc_RNA (1)...(19): siRNA sense strand
gcagaauuaccgccucuuc

SEQ ID NO: 1651263 - RNA, 19 nt, Homo sapiens
  misc_RNA (1)...(19): siRNA sense strand
aauuaccgccucuucuuua

SEQ ID NO: 1651264 - RNA, 19 nt, Homo sapiens
  misc_RNA (1)...(19): siRNA sense strand
uggaggagcuauaaauugc

SEQ ID NO: 1651265 - RNA, 19 nt, Homo sapiens
  misc_RNA (1)...(19): siRNA sense strand
uuaaauccacucaucaaug

SEQ ID NO: 1651266 - RNA, 19 nt, Homo sapiens
  misc_RNA (1)...(19): siRNA sense strand
guaauggaggagcuauaaa

SEQ ID NO: 1651267 - RNA, 19 nt, Homo sapiens
  misc_RNA (1)...(19): siRNA sense strand
uguaauggaggagcuauaa

SEQ ID NO: 1651268 - RNA, 19 nt, Homo sapiens
  misc_RNA (1)...(19): siRNA sense strand
uugaaucgguaucaucuuc

SEQ ID NO: 1651269 - RNA, 19 nt, Homo sapiens
  misc_RNA (1)...(19): siRNA sense strand
gaagcuacucuuaauuggu

SEQ ID NO: 1651270 - RNA, 19 nt, Homo sapiens
  misc_RNA (1)...(19): siRNA sense strand
gaggaagcaagaucauuag

SEQ ID NO: 1651271 - RNA, 19 nt, Homo sapiens
  misc_RNA (1)...(19): siRNA sense strand
ucaagaggaagcaagauca

SEQ ID NO: 1651272 - RNA, 19 nt, Homo sapiens
  misc_RNA (1)...(19): siRNA sense strand
caucaauguuggaaagcau

SEQ ID NO: 1651273 - RNA, 19 nt, Homo sapiens
  misc_RNA (1)...(19): siRNA sense strand
uaccuggaagcuacucuua

SEQ ID NO: 1651274 - RNA, 19 nt, Homo sapiens
  misc_RNA (1)...(19): siRNA sense strand
ccguugcacucaagaggaa

SEQ ID NO: 1651275 - RNA, 19 nt, Homo sapiens
  misc_RNA (1)...(19): siRNA sense strand
acucaucaauguuggaaag

SEQ ID NO: 1651276 - RNA, 19 nt, Homo sapiens
  misc_RNA (1)...(19): siRNA sense strand
aauggaggagcuauaaauu

SEQ ID NO: 1651277 - RNA, 19 nt, Homo sapiens
  misc_RNA (1)...(19): siRNA sense strand
ccaguuugcuuuuaaugga

SEQ ID NO: 1651278 - RNA, 19 nt, Homo sapiens
  misc_RNA (1)...(19): siRNA sense strand
uaagguaccagauggaaaa

SEQ ID NO: 1651279 - RNA, 19 nt, Homo sapiens
  misc_RNA (1)...(19): siRNA sense strand
agcaagaucauuaguugaa

SEQ ID NO: 1651280 - RNA, 19 nt, Homo sapiens
  misc_RNA (1)...(19): siRNA sense strand
ggagcuauaaauugcacaa

SEQ ID NO: 1651281 - RNA, 19 nt, Homo sapiens
  misc_RNA (1)...(19): siRNA sense strand
gauagcccuuuccguugca

SEQ ID NO: 1651282 - RNA, 19 nt, Homo sapiens
  misc_RNA (1)...(19): siRNA sense strand
auuaccgccucuucuuuaa

SEQ ID NO: 1651283 - RNA, 19 nt, Homo sapiens
  misc_RNA (1)...(19): siRNA sense strand
gagcuauaaauugcacaaa

SEQ ID NO: 1651284 - RNA, 19 nt, Homo sapiens
  misc_RNA (1)...(19): siRNA sense strand
gaaucgguaucaucuucac

SEQ ID NO: 1651285 - RNA, 19 nt, Homo sapiens
  misc_RNA (1)...(19): siRNA sense strand
caagaggaagcaagaucau

SEQ ID NO: 1651286 - RNA, 19 nt, Homo sapiens
  misc_RNA (1)...(19): siRNA sense strand
gcuacucuuaauugguuua

SEQ ID NO: 1651287 - RNA, 19 nt, Homo sapiens
  misc_RNA (1)...(19): siRNA sense strand
uauaagguaccagauggaa

SEQ ID NO: 1651288 - RNA, 19 nt, Homo sapiens
  misc_RNA (1)...(19): siRNA sense strand
uuauauaagguaccagaug

SEQ ID NO: 1651289 - RNA, 19 nt, Homo sapiens
  misc_RNA (1)...(19): siRNA sense strand
gaagcaagaucauuaguug

SEQ ID NO: 1651290 - RNA, 19 nt, Homo sapiens
  misc_RNA (1)...(19): siRNA sense strand
uaaauccacucaucaaugu

SEQ ID NO: 1651291 - RNA, 19 nt, Homo sapiens
  misc_RNA (1)...(19): siRNA sense strand
gguaucaucuucaccaaau

SEQ ID NO: 1651292 - RNA, 19 nt, Homo sapiens
  misc_RNA (1)...(19): siRNA sense strand
gaauuaccgccucuucuuu

SEQ ID NO: 1651293 - RNA, 19 nt, Homo sapiens
  misc_RNA (1)...(19): siRNA sense strand
agaggaagcaagaucauua

SEQ ID NO: 1651294 - RNA, 19 nt, Homo sapiens
  misc_RNA (1)...(19): siRNA sense strand
ggaagcaagaucauuaguu

SEQ ID NO: 1651295 - RNA, 19 nt, Homo sapiens
  misc_RNA (1)...(19): siRNA sense strand
guuauuaaauccacucauc

SEQ ID NO: 1651296 - RNA, 19 nt, Homo sapiens
  misc_RNA (1)...(19): siRNA sense strand
ggaagcuacucuuaauugg

SEQ ID NO: 1651297 - RNA, 19 nt, Homo sapiens
  misc_RNA (1)...(19): siRNA sense strand
aagcuacucuuaauugguu

SEQ ID NO: 1651298 - RNA, 19 nt, Homo sapiens
  misc_RNA (1)...(19): siRNA sense strand
gcaagaucauuaguugaau

SEQ ID NO: 1651299 - RNA, 19 nt, Homo sapiens
  misc_RNA (1)...(19): siRNA sense strand
ccuggaagcuacucuuaau

SEQ ID NO: 1651300 - RNA, 19 nt, Homo sapiens
  misc_RNA (1)...(19): siRNA sense strand
caagaucauuaguugaauc

SEQ ID NO: 1651301 - RNA, 19 nt, Homo sapiens
  misc_RNA (1)...(19): siRNA sense strand
guaucaucuucaccaaaua

SEQ ID NO: 1651302 - RNA, 19 nt, Homo sapiens
  misc_RNA (1)...(19): siRNA sense strand
aaacaaggcuuuugcucuu

SEQ ID NO: 1651303 - RNA, 19 nt, Homo sapiens
  misc_RNA (1)...(19): siRNA sense strand
gcuauaaauugcacaaacg

SEQ ID NO: 1651304 - RNA, 19 nt, Homo sapiens
  misc_RNA (1)...(19): siRNA sense strand
uaauggaggagcuauaaau

SEQ ID NO: 1651305 - RNA, 19 nt, Homo sapiens
  misc_RNA (1)...(19): siRNA sense strand
uggaagcuacucuuaauug

SEQ ID NO: 1651306 - RNA, 19 nt, Homo sapiens
  misc_RNA (1)...(19): siRNA sense strand
gcagaauuaccgccucuuc

SEQ ID NO: 1651307 - RNA, 19 nt, Homo sapiens
  misc_RNA (1)...(19): siRNA sense strand
aauuaccgccucuucuuua

SEQ ID NO: 1651308 - RNA, 19 nt, Homo sapiens
  misc_RNA (1)...(19): siRNA sense strand
uggaggagcuauaaauugc

SEQ ID NO: 1651309 - RNA, 19 nt, Homo sapiens
  misc_RNA (1)...(19): siRNA sense strand
uuaaauccacucaucaaug

SEQ ID NO: 1651310 - RNA, 19 nt, Homo sapiens
  misc_RNA (1)...(19): siRNA sense strand
guaauggaggagcuauaaa

SEQ ID NO: 1651311 - RNA, 19 nt, Homo sapiens
  misc_RNA (1)...(19): siRNA sense strand
uguaauggaggagcuauaa

SEQ ID NO: 1651312 - RNA, 19 nt, Homo sapiens
  misc_RNA (1)...(19): siRNA sense strand
uugaaucgguaucaucuuc

SEQ ID NO: 1651313 - RNA, 19 nt, Homo sapiens
  misc_RNA (1)...(19): siRNA sense strand
gaagcuacucuuaauuggu

SEQ ID NO: 1651314 - RNA, 19 nt, Homo sapiens
  misc_RNA (1)...(19): siRNA sense strand
gaggaagcaagaucauuag

SEQ ID NO: 1651315 - RNA, 19 nt, Homo sapiens
  misc_RNA (1)...(19): siRNA sense strand
ucaagaggaagcaagauca

SEQ ID NO: 1651316 - RNA, 19 nt, Homo sapiens
  misc_RNA (1)...(19): siRNA sense strand
caucaauguuggaaagcau

SEQ ID NO: 1651317 - RNA, 19 nt, Homo sapiens
  misc_RNA (1)...(19): siRNA sense strand
uaccuggaagcuacucuua

SEQ ID NO: 1651318 - RNA, 19 nt, Homo sapiens
  misc_RNA (1)...(19): siRNA sense strand
ccguugcacucaagaggaa

SEQ ID NO: 1651319 - RNA, 19 nt, Homo sapiens
  misc_RNA (1)...(19): siRNA sense strand
acucaucaauguuggaaag

SEQ ID NO: 1651320 - RNA, 19 nt, Homo sapiens
  misc_RNA (1)...(19): siRNA sense strand
aauggaggagcuauaaauu

SEQ ID NO: 1651321 - RNA, 19 nt, Homo sapiens
  misc_RNA (1)...(19): siRNA sense strand
ccaguuugcuuuuaaugga

SEQ ID NO: 1651322 - RNA, 19 nt, Homo sapiens
  misc_RNA (1)...(19): siRNA sense strand
uaagguaccagauggaaaa

SEQ ID NO: 1651323 - RNA, 19 nt, Homo sapiens
  misc_RNA (1)...(19): siRNA sense strand
agcaagaucauuaguugaa

SEQ ID NO: 1651324 - RNA, 19 nt, Homo sapiens
  misc_RNA (1)...(19): siRNA sense strand
ggagcuauaaauugcacaa

SEQ ID NO: 1651325 - RNA, 19 nt, Homo sapiens
  misc_RNA (1)...(19): siRNA sense strand
gauagcccuuuccguugca

SEQ ID NO: 1651326 - RNA, 19 nt, Homo sapiens
  misc_RNA (1)...(19): siRNA sense strand
auuaccgccucuucuuuaa

SEQ ID NO: 1651327 - RNA, 19 nt, Homo sapiens
  misc_RNA (1)...(19): siRNA sense strand
gagcuauaaauugcacaaa

SEQ ID NO: 1651328 - RNA, 19 nt, Homo sapiens
  misc_RNA (1)...(19): siRNA sense strand
gaaucgguaucaucuucac

SEQ ID NO: 1651329 - RNA, 19 nt, Homo sapiens
  misc_RNA (1)...(19): siRNA sense strand
caagaggaagcaagaucau

SEQ ID NO: 1651330 - RNA, 19 nt, Homo sapiens
  misc_RNA (1)...(19): siRNA sense strand
gcuacucuuaauugguuua

SEQ ID NO: 1651331 - RNA, 19 nt, Homo sapiens
  misc_RNA (1)...(19): siRNA sense strand
uauaagguaccagauggaa

SEQ ID NO: 1651332 - RNA, 19 nt, Homo sapiens
  misc_RNA (1)...(19): siRNA sense strand
uuauauaagguaccagaug

SEQ ID NO: 1651333 - RNA, 19 nt, Homo sapiens
  misc_RNA (1)...(19): siRNA sense strand
gaagcaagaucauuaguug

SEQ ID NO: 1651334 - RNA, 19 nt, Homo sapiens
  misc_RNA (1)...(19): siRNA sense strand
uaaauccacucaucaaugu

SEQ ID NO: 1651335 - RNA, 19 nt, Homo sapiens
  misc_RNA (1)...(19): siRNA sense strand
gguaucaucuucaccaaau

SEQ ID NO: 1651336 - RNA, 19 nt, Homo sapiens
  misc_RNA (1)...(19): siRNA sense strand
gaauuaccgccucuucuuu

SEQ ID NO: 1651337 - RNA, 19 nt, Homo sapiens
  misc_RNA (1)...(19): siRNA sense strand
agaggaagcaagaucauua

SEQ ID NO: 1651338 - RNA, 19 nt, Homo sapiens
  misc_RNA (1)...(19): siRNA sense strand
ggaagcaagaucauuaguu

SEQ ID NO: 1651339 - RNA, 19 nt, Homo sapiens
  misc_RNA (1)...(19): siRNA sense strand
guuauuaaauccacucauc

SEQ ID NO: 1651340 - RNA, 19 nt, Homo sapiens
  misc_RNA (1)...(19): siRNA sense strand
ggaagcuacucuuaauugg

SEQ ID NO: 1651341 - RNA, 19 nt, Homo sapiens
  misc_RNA (1)...(19): siRNA sense strand
aagcuacucuuaauugguu

SEQ ID NO: 1651342 - RNA, 19 nt, Homo sapiens
  misc_RNA (1)...(19): siRNA sense strand
gcaagaucauuaguugaau

SEQ ID NO: 1651343 - RNA, 19 nt, Homo sapiens
  misc_RNA (1)...(19): siRNA sense strand
ccuggaagcuacucuuaau

SEQ ID NO: 1651344 - RNA, 19 nt, Homo sapiens
  misc_RNA (1)...(19): siRNA sense strand
caagaucauuaguugaauc

SEQ ID NO: 1651345 - RNA, 19 nt, Homo sapiens
  misc_RNA (1)...(19): siRNA sense strand
guaucaucuucaccaaaua

SEQ ID NO: 1651346 - RNA, 19 nt, Homo sapiens
  misc_RNA (1)...(19): siRNA sense strand
aaacaaggcuuuugcucuu

SEQ ID NO: 1651347 - RNA, 19 nt, Homo sapiens
  misc_RNA (1)...(19): siRNA sense strand
gcuauaaauugcacaaacg

SEQ ID NO: 1651348 - RNA, 19 nt, Homo sapiens
  misc_RNA (1)...(19): siRNA sense strand
uaauggaggagcuauaaau

SEQ ID NO: 1651349 - RNA, 19 nt, Homo sapiens
  misc_RNA (1)...(19): siRNA sense strand
uggaagcuacucuuaauug

SEQ ID NO: 1651350 - RNA, 19 nt, Homo sapiens
  misc_RNA (1)...(19): siRNA sense strand
gcagaauuaccgccucuuc

SEQ ID NO: 1651351 - RNA, 19 nt, Homo sapiens
  misc_RNA (1)...(19): siRNA sense strand
aauuaccgccucuucuuua

SEQ ID NO: 1651352 - RNA, 19 nt, Homo sapiens
  misc_RNA (1)...(19): siRNA sense strand
uggaggagcuauaaauugc

SEQ ID NO: 1651353 - RNA, 19 nt, Homo sapiens
  misc_RNA (1)...(19): siRNA sense strand
uuaaauccacucaucaaug

SEQ ID NO: 1651354 - RNA, 19 nt, Homo sapiens
  misc_RNA (1)...(19): siRNA sense strand
guaauggaggagcuauaaa

SEQ ID NO: 1651355 - RNA, 19 nt, Homo sapiens
  misc_RNA (1)...(19): siRNA sense strand
uguaauggaggagcuauaa

SEQ ID NO: 1651356 - RNA, 19 nt, Homo sapiens
  misc_RNA (1)...(19): siRNA sense strand
uugaaucgguaucaucuuc

SEQ ID NO: 1651357 - RNA, 19 nt, Homo sapiens
  misc_RNA (1)...(19): siRNA sense strand
gaagcuacucuuaauuggu

SEQ ID NO: 1651358 - RNA, 19 nt, Homo sapiens
  misc_RNA (1)...(19): siRNA sense strand
gaggaagcaagaucauuag

SEQ ID NO: 1651359 - RNA, 19 nt, Homo sapiens
  misc_RNA (1)...(19): siRNA sense strand
ucaagaggaagcaagauca

SEQ ID NO: 1651360 - RNA, 19 nt, Homo sapiens
  misc_RNA (1)...(19): siRNA sense strand
caucaauguuggaaagcau

SEQ ID NO: 1651361 - RNA, 19 nt, Homo sapiens
  misc_RNA (1)...(19): siRNA sense strand
uaccuggaagcuacucuua

SEQ ID NO: 1651362 - RNA, 19 nt, Homo sapiens
  misc_RNA (1)...(19): siRNA sense strand
ccguugcacucaagaggaa

SEQ ID NO: 1651363 - RNA, 19 nt, Homo sapiens
  misc_RNA (1)...(19): siRNA sense strand
acucaucaauguuggaaag

SEQ ID NO: 1651364 - RNA, 19 nt, Homo sapiens
  misc_RNA (1)...(19): siRNA sense strand
aauggaggagcuauaaauu

SEQ ID NO: 1651365 - RNA, 19 nt, Homo sapiens
  misc_RNA (1)...(19): siRNA sense strand
ccaguuugcuuuuaaugga

SEQ ID NO: 1651366 - RNA, 19 nt, Homo sapiens
  misc_RNA (1)...(19): siRNA sense strand
uaagguaccagauggaaaa

SEQ ID NO: 1651367 - RNA, 19 nt, Homo sapiens
  misc_RNA (1)...(19): siRNA sense strand
agcaagaucauuaguugaa

SEQ ID NO: 1651368 - RNA, 19 nt, Homo sapiens
  misc_RNA (1)...(19): siRNA sense strand
ggagcuauaaauugcacaa

SEQ ID NO: 1651369 - RNA, 19 nt, Homo sapiens
  misc_RNA (1)...(19): siRNA sense strand
gauagcccuuuccguugca

SEQ ID NO: 1651370 - RNA, 19 nt, Homo sapiens
  misc_RNA (1)...(19): siRNA sense strand
auuaccgccucuucuuuaa

SEQ ID NO: 1651371 - RNA, 19 nt, Homo sapiens
  misc_RNA (1)...(19): siRNA sense strand
gagcuauaaauugcacaaa

SEQ ID NO: 1651372 - RNA, 19 nt, Homo sapiens
  misc_RNA (1)...(19): siRNA sense strand
gaaucgguaucaucuucac

SEQ ID NO: 1651373 - RNA, 19 nt, Homo sapiens
  misc_RNA (1)...(19): siRNA sense strand
caagaggaagcaagaucau

SEQ ID NO: 1651374 - RNA, 19 nt, Homo sapiens
  misc_RNA (1)...(19): siRNA sense strand
gcuacucuuaauugguuua

SEQ ID NO: 1651375 - RNA, 19 nt, Homo sapiens
  misc_RNA (1)...(19): siRNA sense strand
uauaagguaccagauggaa

SEQ ID NO: 1651376 - RNA, 19 nt, Homo sapiens
  misc_RNA (1)...(19): siRNA sense strand
uuauauaagguaccagaug

SEQ ID NO: 1651377 - RNA, 19 nt, Homo sapiens
  misc_RNA (1)...(19): siRNA sense strand
gaagcaagaucauuaguug

SEQ ID NO: 1651378 - RNA, 19 nt, Homo sapiens
  misc_RNA (1)...(19): siRNA sense strand
uaaauccacucaucaaugu

SEQ ID NO: 1651379 - RNA, 19 nt, Homo sapiens
  misc_RNA (1)...(19): siRNA sense strand
gguaucaucuucaccaaau

SEQ ID NO: 1651380 - RNA, 19 nt, Homo sapiens
  misc_RNA (1)...(19): siRNA sense strand
gaauuaccgccucuucuuu

SEQ ID NO: 1651381 - RNA, 19 nt, Homo sapiens
  misc_RNA (1)...(19): siRNA sense strand
agaggaagcaagaucauua

SEQ ID NO: 1651382 - RNA, 19 nt, Homo sapiens
  misc_RNA (1)...(19): siRNA sense strand
ggaagcaagaucauuaguu

SEQ ID NO: 1651383 - RNA, 19 nt, Homo sapiens
  misc_RNA (1)...(19): siRNA sense strand
guuauuaaauccacucauc

SEQ ID NO: 1651384 - RNA, 19 nt, Homo sapiens
  misc_RNA (1)...(19): siRNA sense strand
ggaagcuacucuuaauugg

SEQ ID NO: 1651385 - RNA, 19 nt, Homo sapiens
  misc_RNA (1)...(19): siRNA sense strand
aagcuacucuuaauugguu

SEQ ID NO: 1651386 - RNA, 19 nt, Homo sapiens
  misc_RNA (1)...(19): siRNA sense strand
gcaagaucauuaguugaau

SEQ ID NO: 1651387 - RNA, 19 nt, Homo sapiens
  misc_RNA (1)...(19): siRNA sense strand
ccuggaagcuacucuuaau

SEQ ID NO: 1651388 - RNA, 19 nt, Homo sapiens
  misc_RNA (1)...(19): siRNA sense strand
caagaucauuaguugaauc

SEQ ID NO: 1651389 - RNA, 19 nt, Homo sapiens
  misc_RNA (1)...(19): siRNA sense strand
guaucaucuucaccaaaua

SEQ ID NO: 1651390 - RNA, 19 nt, Homo sapiens
  misc_RNA (1)...(19): siRNA sense strand
aaacaaggcuuuugcucuu

SEQ ID NO: 1651391 - RNA, 19 nt, Homo sapiens
  misc_RNA (1)...(19): siRNA sense strand
gcuauaaauugcacaaacg

SEQ ID NO: 1651392 - RNA, 19 nt, Homo sapiens
  misc_RNA (1)...(19): siRNA sense strand
uaauggaggagcuauaaau

SEQ ID NO: 1651393 - RNA, 19 nt, Homo sapiens
  misc_RNA (1)...(19): siRNA sense strand
uggaagcuacucuuaauug

SEQ ID NO: 1651394 - RNA, 19 nt, Homo sapiens
  misc_RNA (1)...(19): siRNA sense strand
aauuaccgccucuucuuua

SEQ ID NO: 1651395 - RNA, 19 nt, Homo sapiens
  misc_RNA (1)...(19): siRNA sense strand
uggaggagcuauaaauugc

SEQ ID NO: 1651396 - RNA, 19 nt, Homo sapiens
  misc_RNA (1)...(19): siRNA sense strand
gcagaauuaccgccucuuc

SEQ ID NO: 1651397 - RNA, 19 nt, Homo sapiens
  misc_RNA (1)...(19): siRNA sense strand
uuaaauccacucaucaaug

SEQ ID NO: 1651398 - RNA, 19 nt, Homo sapiens
  misc_RNA (1)...(19): siRNA sense strand
guaauggaggagcuauaaa

SEQ ID NO: 1651399 - RNA, 19 nt, Homo sapiens
  misc_RNA (1)...(19): siRNA sense strand
uguaauggaggagcuauaa

SEQ ID NO: 1651400 - RNA, 19 nt, Homo sapiens
  misc_RNA (1)...(19): siRNA sense strand
uugaaucgguaucaucuuc

SEQ ID NO: 1651401 - RNA, 19 nt, Homo sapiens
  misc_RNA (1)...(19): siRNA sense strand
gaagcuacucuuaauuggu

SEQ ID NO: 1651402 - RNA, 19 nt, Homo sapiens
  misc_RNA (1)...(19): siRNA sense strand
gaggaagcaagaucauuag

SEQ ID NO: 1651403 - RNA, 19 nt, Homo sapiens
  misc_RNA (1)...(19): siRNA sense strand
ucaagaggaagcaagauca

SEQ ID NO: 1651404 - RNA, 19 nt, Homo sapiens
  misc_RNA (1)...(19): siRNA sense strand
caucaauguuggaaagcau

SEQ ID NO: 1651405 - RNA, 19 nt, Homo sapiens
  misc_RNA (1)...(19): siRNA sense strand
gccgugcuauggcccugua

SEQ ID NO: 1651406 - RNA, 19 nt, Homo sapiens
  misc_RNA (1)...(19): siRNA sense strand
uaccuggaagcuacucuua

SEQ ID NO: 1651407 - RNA, 19 nt, Homo sapiens
  misc_RNA (1)...(19): siRNA sense strand
ccguugcacucaagaggaa

SEQ ID NO: 1651408 - RNA, 19 nt, Homo sapiens
  misc_RNA (1)...(19): siRNA sense strand
acucaucaauguuggaaag

SEQ ID NO: 1651409 - RNA, 19 nt, Homo sapiens
  misc_RNA (1)...(19): siRNA sense strand
aauggaggagcuauaaauu

SEQ ID NO: 1651410 - RNA, 19 nt, Homo sapiens
  misc_RNA (1)...(19): siRNA sense strand
ccaguuugcuuuuaaugga

SEQ ID NO: 1651411 - RNA, 19 nt, Homo sapiens
  misc_RNA (1)...(19): siRNA sense strand
uaagguaccagauggaaaa

SEQ ID NO: 1651412 - RNA, 19 nt, Homo sapiens
  misc_RNA (1)...(19): siRNA sense strand
agcaagaucauuaguugaa

SEQ ID NO: 1651413 - RNA, 19 nt, Homo sapiens
  misc_RNA (1)...(19): siRNA sense strand
ggagcuauaaauugcacaa

SEQ ID NO: 1651414 - RNA, 19 nt, Homo sapiens
  misc_RNA (1)...(19): siRNA sense strand
gauagcccuuuccguugca

SEQ ID NO: 1651415 - RNA, 19 nt, Homo sapiens
  misc_RNA (1)...(19): siRNA sense strand
auuaccgccucuucuuuaa

SEQ ID NO: 1651416 - RNA, 19 nt, Homo sapiens
  misc_RNA (1)...(19): siRNA sense strand
gagcuauaaauugcacaaa

SEQ ID NO: 1651417 - RNA, 19 nt, Homo sapiens
  misc_RNA (1)...(19): siRNA sense strand
gaaucgguaucaucuucac

SEQ ID NO: 1651418 - RNA, 19 nt, Homo sapiens
  misc_RNA (1)...(19): siRNA sense strand
gcuacucuuaauugguuua

SEQ ID NO: 1651419 - RNA, 19 nt, Homo sapiens
  misc_RNA (1)...(19): siRNA sense strand
caagaggaagcaagaucau

SEQ ID NO: 1651420 - RNA, 19 nt, Homo sapiens
  misc_RNA (1)...(19): siRNA sense strand
uauaagguaccagauggaa

SEQ ID NO: 1651421 - RNA, 19 nt, Homo sapiens
  misc_RNA (1)...(19): siRNA sense strand
uuauauaagguaccagaug

SEQ ID NO: 1651422 - RNA, 19 nt, Homo sapiens
  misc_RNA (1)...(19): siRNA sense strand
gacauaaacuucugccuaa

SEQ ID NO: 1651423 - RNA, 19 nt, Homo sapiens
  misc_RNA (1)...(19): siRNA sense strand
ggagauguauuuggguuua

SEQ ID NO: 1651424 - RNA, 19 nt, Homo sapiens
  misc_RNA (1)...(19): siRNA sense strand
ggucguauguugucuacua

SEQ ID NO: 1651425 - RNA, 19 nt, Homo sapiens
  misc_RNA (1)...(19): siRNA sense strand
uuaauacccucguggauaa

SEQ ID NO: 1651426 - RNA, 19 nt, Homo sapiens
  misc_RNA (1)...(19): siRNA sense strand
ggaaccaccagucuucuua

SEQ ID NO: 1651427 - RNA, 19 nt, Homo sapiens
  misc_RNA (1)...(19): siRNA sense strand
uggcaaguaugucuauaua

SEQ ID NO: 1651428 - RNA, 19 nt, Homo sapiens
  misc_RNA (1)...(19): siRNA sense strand
gcaaguaugucuauauagc

SEQ ID NO: 1651429 - RNA, 19 nt, Homo sapiens
  misc_RNA (1)...(19): siRNA sense strand
caucagaggugcuucgaau

SEQ ID NO: 1651430 - RNA, 19 nt, Homo sapiens
  misc_RNA (1)...(19): siRNA sense strand
ggaccugaaugaagaagau

SEQ ID NO: 1651431 - RNA, 19 nt, Homo sapiens
  misc_RNA (1)...(19): siRNA sense strand
caguggaguuguuuaaauu

SEQ ID NO: 1651432 - RNA, 19 nt, Homo sapiens
  misc_RNA (1)...(19): siRNA sense strand
ugauggaccugaaugaaga

SEQ ID NO: 1651433 - RNA, 19 nt, Homo sapiens
  misc_RNA (1)...(19): siRNA sense strand
gaacuuccuaacuguaauu

SEQ ID NO: 1651434 - RNA, 19 nt, Homo sapiens
  misc_RNA (1)...(19): siRNA sense strand
guugcuggcucauaagauu

SEQ ID NO: 1651435 - RNA, 19 nt, Homo sapiens
  misc_RNA (1)...(19): siRNA sense strand
agaagaaccuaaagugaca

SEQ ID NO: 1651436 - RNA, 19 nt, Homo sapiens
  misc_RNA (1)...(19): siRNA sense strand
ccaccagucuucuuaccaa

SEQ ID NO: 1651437 - RNA, 19 nt, Homo sapiens
  misc_RNA (1)...(19): siRNA sense strand
caugcuaauuggacuuuaa

SEQ ID NO: 1651438 - RNA, 19 nt, Homo sapiens
  misc_RNA (1)...(19): siRNA sense strand
gaagaagauccaacagugu

SEQ ID NO: 1651439 - RNA, 19 nt, Homo sapiens
  misc_RNA (1)...(19): siRNA sense strand
aaucgaaacuggcucugaa

SEQ ID NO: 1651440 - RNA, 19 nt, Homo sapiens
  misc_RNA (1)...(19): siRNA sense strand
gaaugaagaagauccaaca

SEQ ID NO: 1651441 - RNA, 19 nt, Homo sapiens
  misc_RNA (1)...(19): siRNA sense strand
gcacaguguuucacaaagc

SEQ ID NO: 1651442 - RNA, 19 nt, Homo sapiens
  misc_RNA (1)...(19): siRNA sense strand
gacuuuaacuccauugaag

SEQ ID NO: 1651443 - RNA, 19 nt, Homo sapiens
  misc_RNA (1)...(19): siRNA sense strand
cauuagcucuggauuaaag

SEQ ID NO: 1651444 - RNA, 19 nt, Homo sapiens
  misc_RNA (1)...(19): siRNA sense strand
cucauaagauucaugugua

SEQ ID NO: 1651445 - RNA, 19 nt, Homo sapiens
  misc_RNA (1)...(19): siRNA sense strand
uucauuagcucuggauuaa

SEQ ID NO: 1651446 - RNA, 19 nt, Homo sapiens
  misc_RNA (1)...(19): siRNA sense strand
gcagaaggauuugauuuug

SEQ ID NO: 1651447 - RNA, 19 nt, Homo sapiens
  misc_RNA (1)...(19): siRNA sense strand
uggcacaaaugaucacuau

SEQ ID NO: 1651448 - RNA, 19 nt, Homo sapiens
  misc_RNA (1)...(19): siRNA sense strand
aaacuucugccuaauuuga

SEQ ID NO: 1651449 - RNA, 19 nt, Homo sapiens
  misc_RNA (1)...(19): siRNA sense strand
aaaguauccuggaauaaag

SEQ ID NO: 1651450 - RNA, 19 nt, Homo sapiens
  misc_RNA (1)...(19): siRNA sense strand
cauaaacuucugccuaauu

SEQ ID NO: 1651451 - RNA, 19 nt, Homo sapiens
  misc_RNA (1)...(19): siRNA sense strand
gaucacuggaaguaaauuu

SEQ ID NO: 1651452 - RNA, 19 nt, Homo sapiens
  misc_RNA (1)...(19): siRNA sense strand
ggacuuuaacuccauugaa

SEQ ID NO: 1651453 - RNA, 19 nt, Homo sapiens
  misc_RNA (1)...(19): siRNA sense strand
gcucauaagauucaugugu

SEQ ID NO: 1651454 - RNA, 19 nt, Homo sapiens
  misc_RNA (1)...(19): siRNA sense strand
acaguggaguuguuuaaau

SEQ ID NO: 1651455 - RNA, 19 nt, Homo sapiens
  misc_RNA (1)...(19): siRNA sense strand
gauggcaaguaugucuaua

SEQ ID NO: 1651456 - RNA, 19 nt, Homo sapiens
  misc_RNA (1)...(19): siRNA sense strand
gacacagguuuaugcagaa

SEQ ID NO: 1651457 - RNA, 19 nt, Homo sapiens
  misc_RNA (1)...(19): siRNA sense strand
gcaugaaaaucuucuucua

SEQ ID NO: 1651458 - RNA, 19 nt, Homo sapiens
  misc_RNA (1)...(19): siRNA sense strand
uaacauaucuguggauccu

SEQ ID NO: 1651459 - RNA, 19 nt, Homo sapiens
  misc_RNA (1)...(19): siRNA sense strand
cugccuaauuugaaugaua

SEQ ID NO: 1651460 - RNA, 19 nt, Homo sapiens
  misc_RNA (1)...(19): siRNA sense strand
aaagggaaacugcugauug

SEQ ID NO: 1651461 - RNA, 19 nt, Homo sapiens
  misc_RNA (1)...(19): siRNA sense strand
gguacaacccguagaacuu

SEQ ID NO: 1651462 - RNA, 19 nt, Homo sapiens
  misc_RNA (1)...(19): siRNA sense strand
ggaugggacuggcacucuu

SEQ ID NO: 1651463 - RNA, 19 nt, Homo sapiens
  misc_RNA (1)...(19): siRNA sense strand
ggacuggcuuucauuagcu

SEQ ID NO: 1651464 - RNA, 19 nt, Homo sapiens
  misc_RNA (1)...(19): siRNA sense strand
ccguagaacuuccuaacug

SEQ ID NO: 1651465 - RNA, 19 nt, Homo sapiens
  misc_RNA (1)...(19): siRNA sense strand
uaacagaagaaccuaaagu

SEQ ID NO: 1651466 - RNA, 19 nt, Homo sapiens
  misc_RNA (1)...(19): siRNA sense strand
gacuggcacucuucaggaa

SEQ ID NO: 1651467 - RNA, 19 nt, Homo sapiens
  misc_RNA (1)...(19): siRNA sense strand
guagaacuuccuaacugua

SEQ ID NO: 1651468 - RNA, 19 nt, Homo sapiens
  misc_RNA (1)...(19): siRNA sense strand
cuaauggacuggcuuucau

SEQ ID NO: 1651469 - RNA, 19 nt, Homo sapiens
  misc_RNA (1)...(19): siRNA sense strand
agagaauccuccugcauca

SEQ ID NO: 1651470 - RNA, 19 nt, Homo sapiens
  misc_RNA (1)...(19): siRNA sense strand
uaccaaacacgacuuaaug

SEQ ID NO: 1651471 - RNA, 19 nt, Homo sapiens
  misc_RNA (1)...(19): siRNA sense strand
gcaugcuaauuggacuuua

SEQ ID NO: 1651472 - RNA, 19 nt, Homo sapiens
  misc_RNA (1)...(19): siRNA sense strand
uagaacuuccuaacuguaa

SEQ ID NO: 1651473 - RNA, 19 nt, Homo sapiens
  misc_RNA (1)...(19): siRNA sense strand
ugugggaccugagcacuuu

SEQ ID NO: 1651474 - RNA, 19 nt, Homo sapiens
  misc_RNA (1)...(19): siRNA sense strand
ggagauacugccuaaugga

SEQ ID NO: 1651475 - RNA, 19 nt, Homo sapiens
  misc_RNA (1)...(19): siRNA sense strand
cguagaacuuccuaacugu

SEQ ID NO: 1651476 - RNA, 19 nt, Homo sapiens
  misc_RNA (1)...(19): siRNA sense strand
ucacuggaaguaaauuuga

SEQ ID NO: 1651477 - RNA, 19 nt, Homo sapiens
  misc_RNA (1)...(19): siRNA sense strand
acagaagaaccuaaaguga

SEQ ID NO: 1651478 - RNA, 19 nt, Homo sapiens
  misc_RNA (1)...(19): siRNA sense strand
guacaacccguagaacuuc

SEQ ID NO: 1651479 - RNA, 19 nt, Homo sapiens
  misc_RNA (1)...(19): siRNA sense strand
ccagucuucuuaccaaaca

SEQ ID NO: 1651480 - RNA, 19 nt, Homo sapiens
  misc_RNA (1)...(19): siRNA sense strand
guggaguuguuuaaauuuc

SEQ ID NO: 1651481 - RNA, 19 nt, Homo sapiens
  misc_RNA (1)...(19): siRNA sense strand
gaaucgaaacuggcucuga

SEQ ID NO: 1651482 - RNA, 19 nt, Homo sapiens
  misc_RNA (1)...(19): siRNA sense strand
aagggaaacugcugauugg

SEQ ID NO: 1651483 - RNA, 19 nt, Homo sapiens
  misc_RNA (1)...(19): siRNA sense strand
cguauguugucuacuauag

SEQ ID NO: 1651484 - RNA, 19 nt, Homo sapiens
  misc_RNA (1)...(19): siRNA sense strand
ggggaucacuggaaguaaa

SEQ ID NO: 1651485 - RNA, 19 nt, Homo sapiens
  misc_RNA (1)...(19): siRNA sense strand
gcugauuggcacaguguuu

SEQ ID NO: 1651486 - RNA, 19 nt, Homo sapiens
  misc_RNA (1)...(19): siRNA sense strand
uauguugucuacuauaguc

SEQ ID NO: 1651487 - RNA, 19 nt, Homo sapiens
  misc_RNA (1)...(19): siRNA sense strand
ugauugcgcucacccucuu

SEQ ID NO: 1651488 - RNA, 19 nt, Homo sapiens
  misc_RNA (1)...(19): siRNA sense strand
ugaagauaaugccauguac

SEQ ID NO: 1651489 - RNA, 19 nt, Homo sapiens
  misc_RNA (1)...(19): siRNA sense strand
uuuaauacccucguggaua

SEQ ID NO: 1651490 - RNA, 19 nt, Homo sapiens
  misc_RNA (1)...(19): siRNA sense strand
cuacuauaguccaagugaa

SEQ ID NO: 1651491 - RNA, 19 nt, Homo sapiens
  misc_RNA (1)...(19): siRNA sense strand
gauuaaaguauccuggaau

SEQ ID NO: 1651492 - RNA, 19 nt, Homo sapiens
  misc_RNA (1)...(19): siRNA sense strand
gcacuuuuauggcacaaau

SEQ ID NO: 1651493 - RNA, 19 nt, Homo sapiens
  misc_RNA (1)...(19): siRNA sense strand
caaagggaaacugcugauu

SEQ ID NO: 1651494 - RNA, 19 nt, Homo sapiens
  misc_RNA (1)...(19): siRNA sense strand
acacagguuuaugcagaaa

SEQ ID NO: 1651495 - RNA, 19 nt, Homo sapiens
  misc_RNA (1)...(19): siRNA sense strand
ucaggaaccaccagucuuc

SEQ ID NO: 1651496 - RNA, 19 nt, Homo sapiens
  misc_RNA (1)...(19): siRNA sense strand
uggcagaaggauuugauuu

SEQ ID NO: 1651497 - RNA, 19 nt, Homo sapiens
  misc_RNA (1)...(19): siRNA sense strand
uuucauuagcucuggauua

SEQ ID NO: 1651498 - RNA, 19 nt, Homo sapiens
  misc_RNA (1)...(19): siRNA sense strand
gauuagcacauucacagau

SEQ ID NO: 1651499 - RNA, 19 nt, Homo sapiens
  misc_RNA (1)...(19): siRNA sense strand
ucuaacagaagaaccuaaa

SEQ ID NO: 1651500 - RNA, 19 nt, Homo sapiens
  misc_RNA (1)...(19): siRNA sense strand
ggauuagcacauucacaga

SEQ ID NO: 1651501 - RNA, 19 nt, Homo sapiens
  misc_RNA (1)...(19): siRNA sense strand
ccuaaagugacacagguuu

SEQ ID NO: 1651502 - RNA, 19 nt, Homo sapiens
  misc_RNA (1)...(19): siRNA sense strand
gagauguauuuggguuuag

SEQ ID NO: 1651503 - RNA, 19 nt, Homo sapiens
  misc_RNA (1)...(19): siRNA sense strand
caccagucuucuuaccaaa

SEQ ID NO: 1651504 - RNA, 19 nt, Homo sapiens
  misc_RNA (1)...(19): siRNA sense strand
uugcaaggcaguacaguug

SEQ ID NO: 1651505 - RNA, 19 nt, Homo sapiens
  misc_RNA (1)...(19): siRNA sense strand
uggagauacugccuaaugg

SEQ ID NO: 1651506 - RNA, 19 nt, Homo sapiens
  misc_RNA (1)...(19): siRNA sense strand
agaauccuccugcaucaga

SEQ ID NO: 1651507 - RNA, 19 nt, Homo sapiens
  misc_RNA (1)...(19): siRNA sense strand
gaaccaccagucuucuuac

SEQ ID NO: 1651508 - RNA, 19 nt, Homo sapiens
  misc_RNA (1)...(19): siRNA sense strand
ggagaccuuuggguuggau

SEQ ID NO: 1651509 - RNA, 19 nt, Homo sapiens
  misc_RNA (1)...(19): siRNA sense strand
uuaccaaacacgacuuaau

SEQ ID NO: 1651510 - RNA, 19 nt, Homo sapiens
  misc_RNA (1)...(19): siRNA sense strand
gguuuagcguggucguaug

SEQ ID NO: 1651511 - RNA, 19 nt, Homo sapiens
  misc_RNA (1)...(19): siRNA sense strand
ucacagaugaagauaaugc

SEQ ID NO: 1651512 - RNA, 19 nt, Homo sapiens
  misc_RNA (1)...(19): siRNA sense strand
uuagcacauucacagauga

SEQ ID NO: 1651513 - RNA, 19 nt, Homo sapiens
  misc_RNA (1)...(19): siRNA sense strand
agagguacaacccguagaa

SEQ ID NO: 1651514 - RNA, 19 nt, Homo sapiens
  misc_RNA (1)...(19): siRNA sense strand
ccaauggcaugaaaaucuu

SEQ ID NO: 1651515 - RNA, 19 nt, Homo sapiens
  misc_RNA (1)...(19): siRNA sense strand
uuagcguggucguauguug

SEQ ID NO: 1651516 - RNA, 19 nt, Homo sapiens
  misc_RNA (1)...(19): siRNA sense strand
augaagauaaugccaugua

SEQ ID NO: 1651517 - RNA, 19 nt, Homo sapiens
  misc_RNA (1)...(19): siRNA sense strand
ggcacaguguuucacaaag

SEQ ID NO: 1651518 - RNA, 19 nt, Homo sapiens
  misc_RNA (1)...(19): siRNA sense strand
ugaaaagcaugcuaauugg

SEQ ID NO: 1651519 - RNA, 19 nt, Homo sapiens
  misc_RNA (1)...(19): siRNA sense strand
gaguugcuggcucauaaga

SEQ ID NO: 1651520 - RNA, 19 nt, Homo sapiens
  misc_RNA (1)...(19): siRNA sense strand
gggagauguauuuggguuu

SEQ ID NO: 1651521 - RNA, 19 nt, Homo sapiens
  misc_RNA (1)...(19): siRNA sense strand
uggcacaguguuucacaaa

SEQ ID NO: 1651522 - RNA, 19 nt, Homo sapiens
  misc_RNA (1)...(19): siRNA sense strand
ccacagagcuggacaguaa

SEQ ID NO: 1651523 - RNA, 19 nt, Homo sapiens
  misc_RNA (1)...(19): siRNA sense strand
caaauuagauucuguggua

SEQ ID NO: 1651524 - RNA, 19 nt, Homo sapiens
  misc_RNA (1)...(19): siRNA sense strand
ggaauaagcagcaguuuaa

SEQ ID NO: 1651525 - RNA, 19 nt, Homo sapiens
  misc_RNA (1)...(19): siRNA sense strand
ggaaauauggugcaguuua

SEQ ID NO: 1651526 - RNA, 19 nt, Homo sapiens
  misc_RNA (1)...(19): siRNA sense strand
ggagguaaaugcugccaua

SEQ ID NO: 1651527 - RNA, 19 nt, Homo sapiens
  misc_RNA (1)...(19): siRNA sense strand
gauaaagacuucaaaugga

SEQ ID NO: 1651528 - RNA, 19 nt, Homo sapiens
  misc_RNA (1)...(19): siRNA sense strand
caaauaaaccgaagaagaa

SEQ ID NO: 1651529 - RNA, 19 nt, Homo sapiens
  misc_RNA (1)...(19): siRNA sense strand
acacauaccucagaacaua

SEQ ID NO: 1651530 - RNA, 19 nt, Homo sapiens
  misc_RNA (1)...(19): siRNA sense strand
gcacagaaccuucagaaau

SEQ ID NO: 1651531 - RNA, 19 nt, Homo sapiens
  misc_RNA (1)...(19): siRNA sense strand
gcaaauaaaccgaagaaga

SEQ ID NO: 1651532 - RNA, 19 nt, Homo sapiens
  misc_RNA (1)...(19): siRNA sense strand
gcaagcaccuucaaaucuu

SEQ ID NO: 1651533 - RNA, 19 nt, Homo sapiens
  misc_RNA (1)...(19): siRNA sense strand
cccacaaacucacaaauua

SEQ ID NO: 1651534 - RNA, 19 nt, Homo sapiens
  misc_RNA (1)...(19): siRNA sense strand
ggaaguaacaccuccagua

SEQ ID NO: 1651535 - RNA, 19 nt, Homo sapiens
  misc_RNA (1)...(19): siRNA sense strand
caacagaacccaaugauag

SEQ ID NO: 1651536 - RNA, 19 nt, Homo sapiens
  misc_RNA (1)...(19): siRNA sense strand
ggaauuaacuuggauaacu

SEQ ID NO: 1651537 - RNA, 19 nt, Homo sapiens
  misc_RNA (1)...(19): siRNA sense strand
ggacagugauugccagaau

SEQ ID NO: 1651538 - RNA, 19 nt, Homo sapiens
  misc_RNA (1)...(19): siRNA sense strand
gaaauauggugcaguuuac

SEQ ID NO: 1651539 - RNA, 19 nt, Homo sapiens
  misc_RNA (1)...(19): siRNA sense strand
ggaugaccuuccaaacuua

SEQ ID NO: 1651540 - RNA, 19 nt, Homo sapiens
  misc_RNA (1)...(19): siRNA sense strand
caaaugaacccagcuaauu

SEQ ID NO: 1651541 - RNA, 19 nt, Homo sapiens
  misc_RNA (1)...(19): siRNA sense strand
gcaagguuaugguuucuga

SEQ ID NO: 1651542 - RNA, 19 nt, Homo sapiens
  misc_RNA (1)...(19): siRNA sense strand
caacaaggccuaaauccaa

SEQ ID NO: 1651543 - RNA, 19 nt, Homo sapiens
  misc_RNA (1)...(19): siRNA sense strand
gcccuaaacugccagaauu

SEQ ID NO: 1651544 - RNA, 19 nt, Homo sapiens
  misc_RNA (1)...(19): siRNA sense strand
caaauaacgaugucaguuu

SEQ ID NO: 1651545 - RNA, 19 nt, Homo sapiens
  misc_RNA (1)...(19): siRNA sense strand
ggaaagcagucuaauucug

SEQ ID NO: 1651546 - RNA, 19 nt, Homo sapiens
  misc_RNA (1)...(19): siRNA sense strand
guucacagcuccucagaug

SEQ ID NO: 1651547 - RNA, 19 nt, Homo sapiens
  misc_RNA (1)...(19): siRNA sense strand
cgaagaaacucccgaacug

SEQ ID NO: 1651548 - RNA, 19 nt, Homo sapiens
  misc_RNA (1)...(19): siRNA sense strand
caagcaccuucaaaucuua

SEQ ID NO: 1651549 - RNA, 19 nt, Homo sapiens
  misc_RNA (1)...(19): siRNA sense strand
caugggagcuggaaauuca

SEQ ID NO: 1651550 - RNA, 19 nt, Homo sapiens
  misc_RNA (1)...(19): siRNA sense strand
gaaggaacagguaaacauu

SEQ ID NO: 1651551 - RNA, 19 nt, Homo sapiens
  misc_RNA (1)...(19): siRNA sense strand
gaaauucaguuaggaugga

SEQ ID NO: 1651552 - RNA, 19 nt, Homo sapiens
  misc_RNA (1)...(19): siRNA sense strand
ccaugaauccuuccaauuu

SEQ ID NO: 1651553 - RNA, 19 nt, Homo sapiens
  misc_RNA (1)...(19): siRNA sense strand
gggaagcaauucaaggaaa

SEQ ID NO: 1651554 - RNA, 19 nt, Homo sapiens
  misc_RNA (1)...(19): siRNA sense strand
caaaugauggcgccacaua

SEQ ID NO: 1651555 - RNA, 19 nt, Homo sapiens
  misc_RNA (1)...(19): siRNA sense strand
gcaccaacaucguuaaguc

SEQ ID NO: 1651556 - RNA, 19 nt, Homo sapiens
  misc_RNA (1)...(19): siRNA sense strand
gcagcaggaucccaaauca

SEQ ID NO: 1651557 - RNA, 19 nt, Homo sapiens
  misc_RNA (1)...(19): siRNA sense strand
aaacgugcccaauuuguua

SEQ ID NO: 1651558 - RNA, 19 nt, Homo sapiens
  misc_RNA (1)...(19): siRNA sense strand
ugagugaggucaguucuaa

SEQ ID NO: 1651559 - RNA, 19 nt, Homo sapiens
  misc_RNA (1)...(19): siRNA sense strand
cagcagggcccacaaauga

SEQ ID NO: 1651560 - RNA, 19 nt, Homo sapiens
  misc_RNA (1)...(19): siRNA sense strand
ggcaagugguccaggaaua

SEQ ID NO: 1651561 - RNA, 19 nt, Homo sapiens
  misc_RNA (1)...(19): siRNA sense strand
gguaaaugcugccauaguc

SEQ ID NO: 1651562 - RNA, 19 nt, Homo sapiens
  misc_RNA (1)...(19): siRNA sense strand
gaauuuagucucaaaggaa

SEQ ID NO: 1651563 - RNA, 19 nt, Homo sapiens
  misc_RNA (1)...(19): siRNA sense strand
ggaagcaccaacaucguua

SEQ ID NO: 1651564 - RNA, 19 nt, Homo sapiens
  misc_RNA (1)...(19): siRNA sense strand
gcagaugccuccucaacuc

SEQ ID NO: 1651565 - RNA, 19 nt, Homo sapiens
  misc_RNA (1)...(19): siRNA sense strand
gggaauaagcagcaguuua

SEQ ID NO: 1651566 - RNA, 19 nt, Homo sapiens
  misc_RNA (1)...(19): siRNA sense strand
ggaccaaggccaccucaaa

SEQ ID NO: 1651567 - RNA, 19 nt, Homo sapiens
  misc_RNA (1)...(19): siRNA sense strand
gaccaaggcauguaagaaa

SEQ ID NO: 1651568 - RNA, 19 nt, Homo sapiens
  misc_RNA (1)...(19): siRNA sense strand
gcagugagcccaaagagau

SEQ ID NO: 1651569 - RNA, 19 nt, Homo sapiens
  misc_RNA (1)...(19): siRNA sense strand
gaaaugugccaccuaacuu

SEQ ID NO: 1651570 - RNA, 19 nt, Homo sapiens
  misc_RNA (1)...(19): siRNA sense strand
ggaucugucuucuucuaaa

SEQ ID NO: 1651571 - RNA, 19 nt, Homo sapiens
  misc_RNA (1)...(19): siRNA sense strand
gaugucaguuuaucucaga

SEQ ID NO: 1651572 - RNA, 19 nt, Homo sapiens
  misc_RNA (1)...(19): siRNA sense strand
ccaaugauagagcagauua

SEQ ID NO: 1651573 - RNA, 19 nt, Homo sapiens
  misc_RNA (1)...(19): siRNA sense strand
ccaaagagauaguugaaaa

SEQ ID NO: 1651574 - RNA, 19 nt, Homo sapiens
  misc_RNA (1)...(19): siRNA sense strand
acaccugucuuuaucaauu

SEQ ID NO: 1651575 - RNA, 19 nt, Homo sapiens
  misc_RNA (1)...(19): siRNA sense strand
ccaagcaucccuccaguaa

SEQ ID NO: 1651576 - RNA, 19 nt, Homo sapiens
  misc_RNA (1)...(19): siRNA sense strand
gaaguaacaccuccaguag

SEQ ID NO: 1651577 - RNA, 19 nt, Homo sapiens
  misc_RNA (1)...(19): siRNA sense strand
cacagaaccuucagaaauc

SEQ ID NO: 1651578 - RNA, 19 nt, Homo sapiens
  misc_RNA (1)...(19): siRNA sense strand
caaacaacaugccuucaca

SEQ ID NO: 1651579 - RNA, 19 nt, Homo sapiens
  misc_RNA (1)...(19): siRNA sense strand
gcaagugguccaggaauaa

SEQ ID NO: 1651580 - RNA, 19 nt, Homo sapiens
  misc_RNA (1)...(19): siRNA sense strand
gaacugaagagccaacugu

SEQ ID NO: 1651581 - RNA, 19 nt, Homo sapiens
  misc_RNA (1)...(19): siRNA sense strand
aagcaucccuccaguaaug

SEQ ID NO: 1651582 - RNA, 19 nt, Homo sapiens
  misc_RNA (1)...(19): siRNA sense strand
gcuuacagaucuggaagua

SEQ ID NO: 1651583 - RNA, 19 nt, Homo sapiens
  misc_RNA (1)...(19): siRNA sense strand
gcaugcagguggucaagga

SEQ ID NO: 1651584 - RNA, 19 nt, Homo sapiens
  misc_RNA (1)...(19): siRNA sense strand
gaacuucuacccagcauag

SEQ ID NO: 1651585 - RNA, 19 nt, Homo sapiens
  misc_RNA (1)...(19): siRNA sense strand
guagcaagguuaugguuuc

SEQ ID NO: 1651586 - RNA, 19 nt, Homo sapiens
  misc_RNA (1)...(19): siRNA sense strand
gaauuaacuuggauaacuc

SEQ ID NO: 1651587 - RNA, 19 nt, Homo sapiens
  misc_RNA (1)...(19): siRNA sense strand
ggaauccuaugguucaaca

SEQ ID NO: 1651588 - RNA, 19 nt, Homo sapiens
  misc_RNA (1)...(19): siRNA sense strand
cuaacaaacuucccagugu

SEQ ID NO: 1651589 - RNA, 19 nt, Homo sapiens
  misc_RNA (1)...(19): siRNA sense strand
ggaaggaacagguaaacau

SEQ ID NO: 1651590 - RNA, 19 nt, Homo sapiens
  misc_RNA (1)...(19): siRNA sense strand
guggaaaugugucaucuuc

SEQ ID NO: 1651591 - RNA, 19 nt, Homo sapiens
  misc_RNA (1)...(19): siRNA sense strand
gaagaaacucccgaacuga

SEQ ID NO: 1651592 - RNA, 19 nt, Homo sapiens
  misc_RNA (1)...(19): siRNA sense strand
ccugggagcuuuccuaaca

SEQ ID NO: 1651593 - RNA, 19 nt, Homo sapiens
  misc_RNA (1)...(19): siRNA sense strand
gcaaauaacgaugucaguu

SEQ ID NO: 1651594 - RNA, 19 nt, Homo sapiens
  misc_RNA (1)...(19): siRNA sense strand
ggaauaauaaggaugaaca

SEQ ID NO: 1651595 - RNA, 19 nt, Homo sapiens
  misc_RNA (1)...(19): siRNA sense strand
aguguacgcucgauaguaa

SEQ ID NO: 1651596 - RNA, 19 nt, Homo sapiens
  misc_RNA (1)...(19): siRNA sense strand
ggaccagcccagauaauga

SEQ ID NO: 1651597 - RNA, 19 nt, Homo sapiens
  misc_RNA (1)...(19): siRNA sense strand
aguaacaccuccaguaguu

SEQ ID NO: 1651598 - RNA, 19 nt, Homo sapiens
  misc_RNA (1)...(19): siRNA sense strand
cacaaugacugcaaaccaa

SEQ ID NO: 1651599 - RNA, 19 nt, Homo sapiens
  misc_RNA (1)...(19): siRNA sense strand
caggaucugucuucuucua

SEQ ID NO: 1651600 - RNA, 19 nt, Homo sapiens
  misc_RNA (1)...(19): siRNA sense strand
gacaaaugcagcccuauug

SEQ ID NO: 1651601 - RNA, 19 nt, Homo sapiens
  misc_RNA (1)...(19): siRNA sense strand
ggccaccacuucccaaaug

SEQ ID NO: 1651602 - RNA, 19 nt, Homo sapiens
  misc_RNA (1)...(19): siRNA sense strand
ggagcuggaaauucaguua

SEQ ID NO: 1651603 - RNA, 19 nt, Homo sapiens
  misc_RNA (1)...(19): siRNA sense strand
uaacacaucagcagcuuug

SEQ ID NO: 1651604 - RNA, 19 nt, Homo sapiens
  misc_RNA (1)...(19): siRNA sense strand
gacagugauugccagaauu

SEQ ID NO: 1651605 - RNA, 19 nt, Homo sapiens
  misc_RNA (1)...(19): siRNA sense strand
caugggaugucuuucaaug

SEQ ID NO: 1651606 - RNA, 19 nt, Homo sapiens
  misc_RNA (1)...(19): siRNA sense strand
gaaccaguccaaugucaug

SEQ ID NO: 1651607 - RNA, 19 nt, Homo sapiens
  misc_RNA (1)...(19): siRNA sense strand
cacacaaacuuuccucaga

SEQ ID NO: 1651608 - RNA, 19 nt, Homo sapiens
  misc_RNA (1)...(19): siRNA sense strand
gaaccgaagccaagaugug

SEQ ID NO: 1651609 - RNA, 19 nt, Homo sapiens
  misc_RNA (1)...(19): siRNA sense strand
cuaaugcccucuccaguag

SEQ ID NO: 1651610 - RNA, 19 nt, Homo sapiens
  misc_RNA (1)...(19): siRNA sense strand
guaaugucaagaccuguua

SEQ ID NO: 1651611 - RNA, 19 nt, Homo sapiens
  misc_RNA (1)...(19): siRNA sense strand
uaacaacagugggcugaau

SEQ ID NO: 1651612 - RNA, 19 nt, Homo sapiens
  misc_RNA (1)...(19): siRNA sense strand
cagaugaugccugauguua

SEQ ID NO: 1651613 - RNA, 19 nt, Homo sapiens
  misc_RNA (1)...(19): siRNA sense strand
caagugaaccucagcaaca

SEQ ID NO: 1651614 - RNA, 19 nt, Homo sapiens
  misc_RNA (1)...(19): siRNA sense strand
gccaagaugugagaaugaa

SEQ ID NO: 1651615 - RNA, 19 nt, Homo sapiens
  misc_RNA (1)...(19): siRNA sense strand
ucacagcuccucagaugaa

SEQ ID NO: 1651616 - RNA, 19 nt, Homo sapiens
  misc_RNA (1)...(19): siRNA sense strand
ucaaaagccccuaaacuua

SEQ ID NO: 1651617 - RNA, 19 nt, Homo sapiens
  misc_RNA (1)...(19): siRNA sense strand
aaggaaauauggugcaguu

SEQ ID NO: 1651618 - RNA, 19 nt, Homo sapiens
  misc_RNA (1)...(19): siRNA sense strand
caucuauacuuccuugugu

SEQ ID NO: 1651619 - RNA, 19 nt, Homo sapiens
  misc_RNA (1)...(19): siRNA sense strand
cagcucuacuaaagacaua

SEQ ID NO: 1651620 - RNA, 19 nt, Homo sapiens
  misc_RNA (1)...(19): siRNA sense strand
gaacacucuucccucuuca

SEQ ID NO: 1651621 - RNA, 19 nt, Homo sapiens
  misc_RNA (1)...(19): siRNA sense strand
gcaagugaaagaauugaau

SEQ ID NO: 1651622 - RNA, 19 nt, Homo sapiens
  misc_RNA (1)...(19): siRNA sense strand
gaacucagauggagaagua

SEQ ID NO: 1651623 - RNA, 19 nt, Homo sapiens
  misc_RNA (1)...(19): siRNA sense strand
gaacaaagcacaagaguga

SEQ ID NO: 1651624 - RNA, 19 nt, Homo sapiens
  misc_RNA (1)...(19): siRNA sense strand
ggaaaguacuuguguuauu

SEQ ID NO: 1651625 - RNA, 19 nt, Homo sapiens
  misc_RNA (1)...(19): siRNA sense strand
gaaggcugcucuccgaaua

SEQ ID NO: 1651626 - RNA, 19 nt, Homo sapiens
  misc_RNA (1)...(19): siRNA sense strand
gagcaagaguugagagaaa

SEQ ID NO: 1651627 - RNA, 19 nt, Homo sapiens
  misc_RNA (1)...(19): siRNA sense strand
gauggugacuucuaugaaa

SEQ ID NO: 1651628 - RNA, 19 nt, Homo sapiens
  misc_RNA (1)...(19): siRNA sense strand
gaacguguaugcagaugga

SEQ ID NO: 1651629 - RNA, 19 nt, Homo sapiens
  misc_RNA (1)...(19): siRNA sense strand
gaaauggcauggagcacaa

SEQ ID NO: 1651630 - RNA, 19 nt, Homo sapiens
  misc_RNA (1)...(19): siRNA sense strand
guucugaucuucacguuga

SEQ ID NO: 1651631 - RNA, 19 nt, Homo sapiens
  misc_RNA (1)...(19): siRNA sense strand
gagagaacaucccgacugu

SEQ ID NO: 1651632 - RNA, 19 nt, Homo sapiens
  misc_RNA (1)...(19): siRNA sense strand
guacuuguguuauuuccaa

SEQ ID NO: 1651633 - RNA, 19 nt, Homo sapiens
  misc_RNA (1)...(19): siRNA sense strand
ggagaaguauccaguaugc

SEQ ID NO: 1651634 - RNA, 19 nt, Homo sapiens
  misc_RNA (1)...(19): siRNA sense strand
ccaagauggugacuucuau

SEQ ID NO: 1651635 - RNA, 19 nt, Homo sapiens
  misc_RNA (1)...(19): siRNA sense strand
gaacaucccgacuguggaa

SEQ ID NO: 1651636 - RNA, 19 nt, Homo sapiens
  misc_RNA (1)...(19): siRNA sense strand
caaauacaguggagcaaca

SEQ ID NO: 1651637 - RNA, 19 nt, Homo sapiens
  misc_RNA (1)...(19): siRNA sense strand
gaaaagacagccagcauuu

SEQ ID NO: 1651638 - RNA, 19 nt, Homo sapiens
  misc_RNA (1)...(19): siRNA sense strand
guaugcagauggaaaggaa

SEQ ID NO: 1651639 - RNA, 19 nt, Homo sapiens
  misc_RNA (1)...(19): siRNA sense strand
gagcugaagugggugaguu

SEQ ID NO: 1651640 - RNA, 19 nt, Homo sapiens
  misc_RNA (1)...(19): siRNA sense strand
ggagcacaaugaagcaaga

SEQ ID NO: 1651641 - RNA, 19 nt, Homo sapiens
  misc_RNA (1)...(19): siRNA sense strand
gcacuggguucugaucuuc

SEQ ID NO: 1651642 - RNA, 19 nt, Homo sapiens
  misc_RNA (1)...(19): siRNA sense strand
guggaaaguacuuguguua

SEQ ID NO: 1651643 - RNA, 19 nt, Homo sapiens
  misc_RNA (1)...(19): siRNA sense strand
aaagagagagcaagaguug

SEQ ID NO: 1651644 - RNA, 19 nt, Homo sapiens
  misc_RNA (1)...(19): siRNA sense strand
agagagacauucagccuau

SEQ ID NO: 1651645 - RNA, 19 nt, Homo sapiens
  misc_RNA (1)...(19): siRNA sense strand
gagagacauucagccuaua

SEQ ID NO: 1651646 - RNA, 19 nt, Homo sapiens
  misc_RNA (1)...(19): siRNA sense strand
ggaagcaccugugguugca

SEQ ID NO: 1651647 - RNA, 19 nt, Homo sapiens
  misc_RNA (1)...(19): siRNA sense strand
gcaagaacaaagcacaaga

SEQ ID NO: 1651648 - RNA, 19 nt, Homo sapiens
  misc_RNA (1)...(19): siRNA sense strand
gaggaacucagauggagaa

SEQ ID NO: 1651649 - RNA, 19 nt, Homo sapiens
  misc_RNA (1)...(19): siRNA sense strand
gguguauccuguaccauca

SEQ ID NO: 1651650 - RNA, 19 nt, Homo sapiens
  misc_RNA (1)...(19): siRNA sense strand
gcacaaugaagcaagaaca

SEQ ID NO: 1651651 - RNA, 19 nt, Homo sapiens
  misc_RNA (1)...(19): siRNA sense strand
agacucaguucagaaagaa

SEQ ID NO: 1651652 - RNA, 19 nt, Homo sapiens
  misc_RNA (1)...(19): siRNA sense strand
gcaguagcagcaucuguga

SEQ ID NO: 1651653 - RNA, 19 nt, Homo sapiens
  misc_RNA (1)...(19): siRNA sense strand
acgcugaucugcccuguca

SEQ ID NO: 1651654 - RNA, 19 nt, Homo sapiens
  misc_RNA (1)...(19): siRNA sense strand
ugggugaguuccagccuaa

SEQ ID NO: 1651655 - RNA, 19 nt, Homo sapiens
  misc_RNA (1)...(19): siRNA sense strand
acguugaugugaaggguua

SEQ ID NO: 1651656 - RNA, 19 nt, Homo sapiens
  misc_RNA (1)...(19): siRNA sense strand
uuucgugucugccuccuuu

SEQ ID NO: 1651657 - RNA, 19 nt, Homo sapiens
  misc_RNA (1)...(19): siRNA sense strand
ggcagguggugaacgugua

SEQ ID NO: 1651658 - RNA, 19 nt, Homo sapiens
  misc_RNA (1)...(19): siRNA sense strand
uaaggcagguggugaacgu

SEQ ID NO: 1651659 - RNA, 19 nt, Homo sapiens
  misc_RNA (1)...(19): siRNA sense strand
cagagaccauggagcugaa

SEQ ID NO: 1651660 - RNA, 19 nt, Homo sapiens
  misc_RNA (1)...(19): siRNA sense strand
cagcaucugugaucaugag

SEQ ID NO: 1651661 - RNA, 19 nt, Homo sapiens
  misc_RNA (1)...(19): siRNA sense strand
cgagggagaacuucgauuc

SEQ ID NO: 1651662 - RNA, 19 nt, Homo sapiens
  misc_RNA (1)...(19): siRNA sense strand
aagacucaguucagaaaga

SEQ ID NO: 1651663 - RNA, 19 nt, Homo sapiens
  misc_RNA (1)...(19): siRNA sense strand
ggaaggcugcucuccgaau

SEQ ID NO: 1651664 - RNA, 19 nt, Homo sapiens
  misc_RNA (1)...(19): siRNA sense strand
gaggguguauccuguacca

SEQ ID NO: 1651665 - RNA, 19 nt, Homo sapiens
  misc_RNA (1)...(19): siRNA sense strand
gagagcaagaguugagaga

SEQ ID NO: 1651666 - RNA, 19 nt, Homo sapiens
  misc_RNA (1)...(19): siRNA sense strand
caaugaagcaagaacaaag

SEQ ID NO: 1651667 - RNA, 19 nt, Homo sapiens
  misc_RNA (1)...(19): siRNA sense strand
gcaagaguugagagaaaug

SEQ ID NO: 1651668 - RNA, 19 nt, Homo sapiens
  misc_RNA (1)...(19): siRNA sense strand
ugugaaggguuacaaggau

SEQ ID NO: 1651669 - RNA, 19 nt, Homo sapiens
  misc_RNA (1)...(19): siRNA sense strand
uuuccaagauggugacuuc

SEQ ID NO: 1651670 - RNA, 19 nt, Homo sapiens
  misc_RNA (1)...(19): siRNA sense strand
ggaaaagacagccagcauu

SEQ ID NO: 1651671 - RNA, 19 nt, Homo sapiens
  misc_RNA (1)...(19): siRNA sense strand
caacaagggagagaacauc

SEQ ID NO: 1651672 - RNA, 19 nt, Homo sapiens
  misc_RNA (1)...(19): siRNA sense strand
gcagguccacuggcuggua

SEQ ID NO: 1651673 - RNA, 19 nt, Homo sapiens
  misc_RNA (1)...(19): siRNA sense strand
agagacauucagccuauaa

SEQ ID NO: 1651674 - RNA, 19 nt, Homo sapiens
  misc_RNA (1)...(19): siRNA sense strand
ggaaaggaaguggaagaca

SEQ ID NO: 1651675 - RNA, 19 nt, Homo sapiens
  misc_RNA (1)...(19): siRNA sense strand
gcaacaacaagggagagaa

SEQ ID NO: 1651676 - RNA, 19 nt, Homo sapiens
  misc_RNA (1)...(19): siRNA sense strand
uugcagcacuggguucuga

SEQ ID NO: 1651677 - RNA, 19 nt, Homo sapiens
  misc_RNA (1)...(19): siRNA sense strand
gggccuguaugcaguagca

SEQ ID NO: 1651678 - RNA, 19 nt, Homo sapiens
  misc_RNA (1)...(19): siRNA sense strand
caagaacaaagcacaagag

SEQ ID NO: 1651679 - RNA, 19 nt, Homo sapiens
  misc_RNA (1)...(19): siRNA sense strand
caacaacaagggagagaac

SEQ ID NO: 1651680 - RNA, 19 nt, Homo sapiens
  misc_RNA (1)...(19): siRNA sense strand
guagcagcaucugugauca

SEQ ID NO: 1651681 - RNA, 19 nt, Homo sapiens
  misc_RNA (1)...(19): siRNA sense strand
gggaggguguauccuguac

SEQ ID NO: 1651682 - RNA, 19 nt, Homo sapiens
  misc_RNA (1)...(19): siRNA sense strand
gcagguggugaacguguau

SEQ ID NO: 1651683 - RNA, 19 nt, Homo sapiens
  misc_RNA (1)...(19): siRNA sense strand
acaaugaagcaagaacaaa

SEQ ID NO: 1651684 - RNA, 19 nt, Homo sapiens
  misc_RNA (1)...(19): siRNA sense strand
cugcucaacuuucgugucu

SEQ ID NO: 1651685 - RNA, 19 nt, Homo sapiens
  misc_RNA (1)...(19): siRNA sense strand
aagauggugacuucuauga

SEQ ID NO: 1651686 - RNA, 19 nt, Homo sapiens
  misc_RNA (1)...(19): siRNA sense strand
cagccuauaaugaauggaa

SEQ ID NO: 1651687 - RNA, 19 nt, Homo sapiens
  misc_RNA (1)...(19): siRNA sense strand
ccucugacaguggaaagua

SEQ ID NO: 1651688 - RNA, 19 nt, Homo sapiens
  misc_RNA (1)...(19): siRNA sense strand
agaaguauccaguaugcau

SEQ ID NO: 1651689 - RNA, 19 nt, Homo sapiens
  misc_RNA (1)...(19): siRNA sense strand
caagauggugacuucuaug

SEQ ID NO: 1651690 - RNA, 19 nt, Homo sapiens
  misc_RNA (1)...(19): siRNA sense strand
gagacauucagccuauaau

SEQ ID NO: 1651691 - RNA, 19 nt, Homo sapiens
  misc_RNA (1)...(19): siRNA sense strand
cacaaugaagcaagaacaa

SEQ ID NO: 1651692 - RNA, 19 nt, Homo sapiens
  misc_RNA (1)...(19): siRNA sense strand
agacggagugggccuguau

SEQ ID NO: 1651693 - RNA, 19 nt, Homo sapiens
  misc_RNA (1)...(19): siRNA sense strand
ggguucugaucuucacguu

SEQ ID NO: 1651694 - RNA, 19 nt, Homo sapiens
  misc_RNA (1)...(19): siRNA sense strand
uguggaagcaccugugguu

SEQ ID NO: 1651695 - RNA, 19 nt, Homo sapiens
  misc_RNA (1)...(19): siRNA sense strand
agcaagaguugagagaaau

SEQ ID NO: 1651696 - RNA, 19 nt, Homo sapiens
  misc_RNA (1)...(19): siRNA sense strand
uggcauggagcacaaugaa

SEQ ID NO: 1651697 - RNA, 19 nt, Homo sapiens
  misc_RNA (1)...(19): siRNA sense strand
aaaagacucaguucagaaa

SEQ ID NO: 1651698 - RNA, 19 nt, Homo sapiens
  misc_RNA (1)...(19): siRNA sense strand
gagagagcaagaguugaga

SEQ ID NO: 1651699 - RNA, 19 nt, Homo sapiens
  misc_RNA (1)...(19): siRNA sense strand
gaacucagauggagaagua

SEQ ID NO: 1651700 - RNA, 19 nt, Homo sapiens
  misc_RNA (1)...(19): siRNA sense strand
gaacaaagcacaagaguga

SEQ ID NO: 1651701 - RNA, 19 nt, Homo sapiens
  misc_RNA (1)...(19): siRNA sense strand
ggaaaguacuuguguuauu

SEQ ID NO: 1651702 - RNA, 19 nt, Homo sapiens
  misc_RNA (1)...(19): siRNA sense strand
gaaggcugcucuccgaaua

SEQ ID NO: 1651703 - RNA, 19 nt, Homo sapiens
  misc_RNA (1)...(19): siRNA sense strand
gagcaagaguugagagaaa

SEQ ID NO: 1651704 - RNA, 19 nt, Homo sapiens
  misc_RNA (1)...(19): siRNA sense strand
gauggugacuucuaugaaa

SEQ ID NO: 1651705 - RNA, 19 nt, Homo sapiens
  misc_RNA (1)...(19): siRNA sense strand
gaacguguaugcagaugga

SEQ ID NO: 1651706 - RNA, 19 nt, Homo sapiens
  misc_RNA (1)...(19): siRNA sense strand
gaaauggcauggagcacaa

SEQ ID NO: 1651707 - RNA, 19 nt, Homo sapiens
  misc_RNA (1)...(19): siRNA sense strand
guucugaucuucacguuga

SEQ ID NO: 1651708 - RNA, 19 nt, Homo sapiens
  misc_RNA (1)...(19): siRNA sense strand
gagagaacaucccgacugu

SEQ ID NO: 1651709 - RNA, 19 nt, Homo sapiens
  misc_RNA (1)...(19): siRNA sense strand
guacuuguguuauuuccaa

SEQ ID NO: 1651710 - RNA, 19 nt, Homo sapiens
  misc_RNA (1)...(19): siRNA sense strand
ggagaaguauccaguaugc

SEQ ID NO: 1651711 - RNA, 19 nt, Homo sapiens
  misc_RNA (1)...(19): siRNA sense strand
ccaagauggugacuucuau

SEQ ID NO: 1651712 - RNA, 19 nt, Homo sapiens
  misc_RNA (1)...(19): siRNA sense strand
gaacaucccgacuguggaa

SEQ ID NO: 1651713 - RNA, 19 nt, Homo sapiens
  misc_RNA (1)...(19): siRNA sense strand
caaauacaguggagcaaca

SEQ ID NO: 1651714 - RNA, 19 nt, Homo sapiens
  misc_RNA (1)...(19): siRNA sense strand
gaaaagacagccagcauuu

SEQ ID NO: 1651715 - RNA, 19 nt, Homo sapiens
  misc_RNA (1)...(19): siRNA sense strand
guaugcagauggaaaggaa

SEQ ID NO: 1651716 - RNA, 19 nt, Homo sapiens
  misc_RNA (1)...(19): siRNA sense strand
gagcugaagugggugaguu

SEQ ID NO: 1651717 - RNA, 19 nt, Homo sapiens
  misc_RNA (1)...(19): siRNA sense strand
ggagcacaaugaagcaaga

SEQ ID NO: 1651718 - RNA, 19 nt, Homo sapiens
  misc_RNA (1)...(19): siRNA sense strand
gcacuggguucugaucuuc

SEQ ID NO: 1651719 - RNA, 19 nt, Homo sapiens
  misc_RNA (1)...(19): siRNA sense strand
guggaaaguacuuguguua

SEQ ID NO: 1651720 - RNA, 19 nt, Homo sapiens
  misc_RNA (1)...(19): siRNA sense strand
aaagagagagcaagaguug

SEQ ID NO: 1651721 - RNA, 19 nt, Homo sapiens
  misc_RNA (1)...(19): siRNA sense strand
agagagacauucagccuau

SEQ ID NO: 1651722 - RNA, 19 nt, Homo sapiens
  misc_RNA (1)...(19): siRNA sense strand
gagagacauucagccuaua

SEQ ID NO: 1651723 - RNA, 19 nt, Homo sapiens
  misc_RNA (1)...(19): siRNA sense strand
ggaagcaccugugguugca

SEQ ID NO: 1651724 - RNA, 19 nt, Homo sapiens
  misc_RNA (1)...(19): siRNA sense strand
gcaagaacaaagcacaaga

SEQ ID NO: 1651725 - RNA, 19 nt, Homo sapiens
  misc_RNA (1)...(19): siRNA sense strand
gaggaacucagauggagaa

SEQ ID NO: 1651726 - RNA, 19 nt, Homo sapiens
  misc_RNA (1)...(19): siRNA sense strand
gguguauccuguaccauca

SEQ ID NO: 1651727 - RNA, 19 nt, Homo sapiens
  misc_RNA (1)...(19): siRNA sense strand
gcacaaugaagcaagaaca

SEQ ID NO: 1651728 - RNA, 19 nt, Homo sapiens
  misc_RNA (1)...(19): siRNA sense strand
agacucaguucagaaagaa

SEQ ID NO: 1651729 - RNA, 19 nt, Homo sapiens
  misc_RNA (1)...(19): siRNA sense strand
gcaguagcagcaucuguga

SEQ ID NO: 1651730 - RNA, 19 nt, Homo sapiens
  misc_RNA (1)...(19): siRNA sense strand
acgcugaucugcccuguca

SEQ ID NO: 1651731 - RNA, 19 nt, Homo sapiens
  misc_RNA (1)...(19): siRNA sense strand
ugggugaguuccagccuaa

SEQ ID NO: 1651732 - RNA, 19 nt, Homo sapiens
  misc_RNA (1)...(19): siRNA sense strand
acguugaugugaaggguua

SEQ ID NO: 1651733 - RNA, 19 nt, Homo sapiens
  misc_RNA (1)...(19): siRNA sense strand
uuucgugucugccuccuuu

SEQ ID NO: 1651734 - RNA, 19 nt, Homo sapiens
  misc_RNA (1)...(19): siRNA sense strand
ggcagguggugaacgugua

SEQ ID NO: 1651735 - RNA, 19 nt, Homo sapiens
  misc_RNA (1)...(19): siRNA sense strand
uaaggcagguggugaacgu

SEQ ID NO: 1651736 - RNA, 19 nt, Homo sapiens
  misc_RNA (1)...(19): siRNA sense strand
cagagaccauggagcugaa

SEQ ID NO: 1651737 - RNA, 19 nt, Homo sapiens
  misc_RNA (1)...(19): siRNA sense strand
cagcaucugugaucaugag

SEQ ID NO: 1651738 - RNA, 19 nt, Homo sapiens
  misc_RNA (1)...(19): siRNA sense strand
cgagggagaacuucgauuc

SEQ ID NO: 1651739 - RNA, 19 nt, Homo sapiens
  misc_RNA (1)...(19): siRNA sense strand
aagacucaguucagaaaga

SEQ ID NO: 1651740 - RNA, 19 nt, Homo sapiens
  misc_RNA (1)...(19): siRNA sense strand
ggaaggcugcucuccgaau

SEQ ID NO: 1651741 - RNA, 19 nt, Homo sapiens
  misc_RNA (1)...(19): siRNA sense strand
gaggguguauccuguacca

SEQ ID NO: 1651742 - RNA, 19 nt, Homo sapiens
  misc_RNA (1)...(19): siRNA sense strand
gagagcaagaguugagaga

SEQ ID NO: 1651743 - RNA, 19 nt, Homo sapiens
  misc_RNA (1)...(19): siRNA sense strand
caaugaagcaagaacaaag

SEQ ID NO: 1651744 - RNA, 19 nt, Homo sapiens
  misc_RNA (1)...(19): siRNA sense strand
gcaagaguugagagaaaug

SEQ ID NO: 1651745 - RNA, 19 nt, Homo sapiens
  misc_RNA (1)...(19): siRNA sense strand
ugugaaggguuacaaggau

SEQ ID NO: 1651746 - RNA, 19 nt, Homo sapiens
  misc_RNA (1)...(19): siRNA sense strand
uuuccaagauggugacuuc

SEQ ID NO: 1651747 - RNA, 19 nt, Homo sapiens
  misc_RNA (1)...(19): siRNA sense strand
ggaaaagacagccagcauu

SEQ ID NO: 1651748 - RNA, 19 nt, Homo sapiens
  misc_RNA (1)...(19): siRNA sense strand
caacaagggagagaacauc

SEQ ID NO: 1651749 - RNA, 19 nt, Homo sapiens
  misc_RNA (1)...(19): siRNA sense strand
gcagguccacuggcuggua

SEQ ID NO: 1651750 - RNA, 19 nt, Homo sapiens
  misc_RNA (1)...(19): siRNA sense strand
agagacauucagccuauaa

SEQ ID NO: 1651751 - RNA, 19 nt, Homo sapiens
  misc_RNA (1)...(19): siRNA sense strand
ggaaaggaaguggaagaca

SEQ ID NO: 1651752 - RNA, 19 nt, Homo sapiens
  misc_RNA (1)...(19): siRNA sense strand
gcaacaacaagggagagaa

SEQ ID NO: 1651753 - RNA, 19 nt, Homo sapiens
  misc_RNA (1)...(19): siRNA sense strand
uugcagcacuggguucuga

SEQ ID NO: 1651754 - RNA, 19 nt, Homo sapiens
  misc_RNA (1)...(19): siRNA sense strand
gggccuguaugcaguagca

SEQ ID NO: 1651755 - RNA, 19 nt, Homo sapiens
  misc_RNA (1)...(19): siRNA sense strand
caagaacaaagcacaagag

SEQ ID NO: 1651756 - RNA, 19 nt, Homo sapiens
  misc_RNA (1)...(19): siRNA sense strand
caacaacaagggagagaac

SEQ ID NO: 1651757 - RNA, 19 nt, Homo sapiens
  misc_RNA (1)...(19): siRNA sense strand
guagcagcaucugugauca

SEQ ID NO: 1651758 - RNA, 19 nt, Homo sapiens
  misc_RNA (1)...(19): siRNA sense strand
gggaggguguauccuguac

SEQ ID NO: 1651759 - RNA, 19 nt, Homo sapiens
  misc_RNA (1)...(19): siRNA sense strand
gcagguggugaacguguau

SEQ ID NO: 1651760 - RNA, 19 nt, Homo sapiens
  misc_RNA (1)...(19): siRNA sense strand
acaaugaagcaagaacaaa

SEQ ID NO: 1651761 - RNA, 19 nt, Homo sapiens
  misc_RNA (1)...(19): siRNA sense strand
cugcucaacuuucgugucu

SEQ ID NO: 1651762 - RNA, 19 nt, Homo sapiens
  misc_RNA (1)...(19): siRNA sense strand
aagauggugacuucuauga

SEQ ID NO: 1651763 - RNA, 19 nt, Homo sapiens
  misc_RNA (1)...(19): siRNA sense strand
cagccuauaaugaauggaa

SEQ ID NO: 1651764 - RNA, 19 nt, Homo sapiens
  misc_RNA (1)...(19): siRNA sense strand
ccucugacaguggaaagua

SEQ ID NO: 1651765 - RNA, 19 nt, Homo sapiens
  misc_RNA (1)...(19): siRNA sense strand
agaaguauccaguaugcau

SEQ ID NO: 1651766 - RNA, 19 nt, Homo sapiens
  misc_RNA (1)...(19): siRNA sense strand
caagauggugacuucuaug

SEQ ID NO: 1651767 - RNA, 19 nt, Homo sapiens
  misc_RNA (1)...(19): siRNA sense strand
gagacauucagccuauaau

SEQ ID NO: 1651768 - RNA, 19 nt, Homo sapiens
  misc_RNA (1)...(19): siRNA sense strand
cacaaugaagcaagaacaa

SEQ ID NO: 1651769 - RNA, 19 nt, Homo sapiens
  misc_RNA (1)...(19): siRNA sense strand
agacggagugggccuguau

SEQ ID NO: 1651770 - RNA, 19 nt, Homo sapiens
  misc_RNA (1)...(19): siRNA sense strand
ggguucugaucuucacguu

SEQ ID NO: 1651771 - RNA, 19 nt, Homo sapiens
  misc_RNA (1)...(19): siRNA sense strand
uguggaagcaccugugguu

SEQ ID NO: 1651772 - RNA, 19 nt, Homo sapiens
  misc_RNA (1)...(19): siRNA sense strand
agcaagaguugagagaaau

SEQ ID NO: 1651773 - RNA, 19 nt, Homo sapiens
  misc_RNA (1)...(19): siRNA sense strand
uggcauggagcacaaugaa

SEQ ID NO: 1651774 - RNA, 19 nt, Homo sapiens
  misc_RNA (1)...(19): siRNA sense strand
aaaagacucaguucagaaa

SEQ ID NO: 1651775 - RNA, 19 nt, Homo sapiens
  misc_RNA (1)...(19): siRNA sense strand
gagagagcaagaguugaga

SEQ ID NO: 1651776 - RNA, 19 nt, Homo sapiens
  misc_RNA (1)...(19): siRNA sense strand
gcaaacaggugcaguguaa

SEQ ID NO: 1651777 - RNA, 19 nt, Homo sapiens
  misc_RNA (1)...(19): siRNA sense strand
gaccuugucuguucuguua

SEQ ID NO: 1651778 - RNA, 19 nt, Homo sapiens
  misc_RNA (1)...(19): siRNA sense strand
gaaacaauccugaggcaua

SEQ ID NO: 1651779 - RNA, 19 nt, Homo sapiens
  misc_RNA (1)...(19): siRNA sense strand
gaacaugccacuuuagaaa

SEQ ID NO: 1651780 - RNA, 19 nt, Homo sapiens
  misc_RNA (1)...(19): siRNA sense strand
agaaagagcuggacaaaca

SEQ ID NO: 1651781 - RNA, 19 nt, Homo sapiens
  misc_RNA (1)...(19): siRNA sense strand
gaccaaggauucaaagaaa

SEQ ID NO: 1651782 - RNA, 19 nt, Homo sapiens
  misc_RNA (1)...(19): siRNA sense strand
gcacaccuuucacaacaua

SEQ ID NO: 1651783 - RNA, 19 nt, Homo sapiens
  misc_RNA (1)...(19): siRNA sense strand
gauaugaaguuccaugaau

SEQ ID NO: 1651784 - RNA, 19 nt, Homo sapiens
  misc_RNA (1)...(19): siRNA sense strand
gagcagcaguucugugauu

SEQ ID NO: 1651785 - RNA, 19 nt, Homo sapiens
  misc_RNA (1)...(19): siRNA sense strand
aaagagaggucauggagaa

SEQ ID NO: 1651786 - RNA, 19 nt, Homo sapiens
  misc_RNA (1)...(19): siRNA sense strand
guacugugaugcuguguuu

SEQ ID NO: 1651787 - RNA, 19 nt, Homo sapiens
  misc_RNA (1)...(19): siRNA sense strand
ccaccacccugacguauuu

SEQ ID NO: 1651788 - RNA, 19 nt, Homo sapiens
  misc_RNA (1)...(19): siRNA sense strand
cuagaaauguguucagaaa

SEQ ID NO: 1651789 - RNA, 19 nt, Homo sapiens
  misc_RNA (1)...(19): siRNA sense strand
uaacacagcugagaccuau

SEQ ID NO: 1651790 - RNA, 19 nt, Homo sapiens
  misc_RNA (1)...(19): siRNA sense strand
ggaagcagcccauucaguu

SEQ ID NO: 1651791 - RNA, 19 nt, Homo sapiens
  misc_RNA (1)...(19): siRNA sense strand
gaaauuaaagguccacaga

SEQ ID NO: 1651792 - RNA, 19 nt, Homo sapiens
  misc_RNA (1)...(19): siRNA sense strand
caacauagaagauccuuau

SEQ ID NO: 1651793 - RNA, 19 nt, Homo sapiens
  misc_RNA (1)...(19): siRNA sense strand
cagagcaggugaucacuuu

SEQ ID NO: 1651794 - RNA, 19 nt, Homo sapiens
  misc_RNA (1)...(19): siRNA sense strand
ugacagagcacuucgauga

SEQ ID NO: 1651795 - RNA, 19 nt, Homo sapiens
  misc_RNA (1)...(19): siRNA sense strand
gauaucagcaguucuagaa

SEQ ID NO: 1651796 - RNA, 19 nt, Homo sapiens
  misc_RNA (1)...(19): siRNA sense strand
gaaccaggaugugaaagga

SEQ ID NO: 1651797 - RNA, 19 nt, Homo sapiens
  misc_RNA (1)...(19): siRNA sense strand
ggaacagaaugaucaagga

SEQ ID NO: 1651798 - RNA, 19 nt, Homo sapiens
  misc_RNA (1)...(19): siRNA sense strand
ugaaagagauucugagcau

SEQ ID NO: 1651799 - RNA, 19 nt, Homo sapiens
  misc_RNA (1)...(19): siRNA sense strand
agagaagccucaaguagaa

SEQ ID NO: 1651800 - RNA, 19 nt, Homo sapiens
  misc_RNA (1)...(19): siRNA sense strand
gcacaagaaacacaucaaa

SEQ ID NO: 1651801 - RNA, 19 nt, Homo sapiens
  misc_RNA (1)...(19): siRNA sense strand
ccaccgaucuuccaaguuc

SEQ ID NO: 1651802 - RNA, 19 nt, Homo sapiens
  misc_RNA (1)...(19): siRNA sense strand
caacaaggccuaccagcaa

SEQ ID NO: 1651803 - RNA, 19 nt, Homo sapiens
  misc_RNA (1)...(19): siRNA sense strand
aaacaauccugaggcauaa

SEQ ID NO: 1651804 - RNA, 19 nt, Homo sapiens
  misc_RNA (1)...(19): siRNA sense strand
gcagaaaucagccacuuug

SEQ ID NO: 1651805 - RNA, 19 nt, Homo sapiens
  misc_RNA (1)...(19): siRNA sense strand
acacaaagaggaccugaua

SEQ ID NO: 1651806 - RNA, 19 nt, Homo sapiens
  misc_RNA (1)...(19): siRNA sense strand
gaagacgacuuucccaaac

SEQ ID NO: 1651807 - RNA, 19 nt, Homo sapiens
  misc_RNA (1)...(19): siRNA sense strand
agaaggagaugauagugaa

SEQ ID NO: 1651808 - RNA, 19 nt, Homo sapiens
  misc_RNA (1)...(19): siRNA sense strand
ggaaggugaguaauaaauu

SEQ ID NO: 1651809 - RNA, 19 nt, Homo sapiens
  misc_RNA (1)...(19): siRNA sense strand
gaaagagauucugagcauu

SEQ ID NO: 1651810 - RNA, 19 nt, Homo sapiens
  misc_RNA (1)...(19): siRNA sense strand
acaaagaccuguccauugg

SEQ ID NO: 1651811 - RNA, 19 nt, Homo sapiens
  misc_RNA (1)...(19): siRNA sense strand
uaaggaagauggagagaag

SEQ ID NO: 1651812 - RNA, 19 nt, Homo sapiens
  misc_RNA (1)...(19): siRNA sense strand
guacugugcugcuacuuuc

SEQ ID NO: 1651813 - RNA, 19 nt, Homo sapiens
  misc_RNA (1)...(19): siRNA sense strand
gcagugagaccaaggauuc

SEQ ID NO: 1651814 - RNA, 19 nt, Homo sapiens
  misc_RNA (1)...(19): siRNA sense strand
cagaaugacugaagagaag

SEQ ID NO: 1651815 - RNA, 19 nt, Homo sapiens
  misc_RNA (1)...(19): siRNA sense strand
cguggaaggugaguaauaa

SEQ ID NO: 1651816 - RNA, 19 nt, Homo sapiens
  misc_RNA (1)...(19): siRNA sense strand
ucucacacaugacaaguuu

SEQ ID NO: 1651817 - RNA, 19 nt, Homo sapiens
  misc_RNA (1)...(19): siRNA sense strand
cuagagaaguugcagaaau

SEQ ID NO: 1651818 - RNA, 19 nt, Homo sapiens
  misc_RNA (1)...(19): siRNA sense strand
caaccaagcccugaugauu

SEQ ID NO: 1651819 - RNA, 19 nt, Homo sapiens
  misc_RNA (1)...(19): siRNA sense strand
gaagcagcccauucaguuu

SEQ ID NO: 1651820 - RNA, 19 nt, Homo sapiens
  misc_RNA (1)...(19): siRNA sense strand
acacagcugagaccuauua

SEQ ID NO: 1651821 - RNA, 19 nt, Homo sapiens
  misc_RNA (1)...(19): siRNA sense strand
gaggaaagccuggauguuc

SEQ ID NO: 1651822 - RNA, 19 nt, Homo sapiens
  misc_RNA (1)...(19): siRNA sense strand
gaagauggagagaaggaaa

SEQ ID NO: 1651823 - RNA, 19 nt, Homo sapiens
  misc_RNA (1)...(19): siRNA sense strand
cccagaacaugccacuuua

SEQ ID NO: 1651824 - RNA, 19 nt, Homo sapiens
  misc_RNA (1)...(19): siRNA sense strand
ucaaaacccugcuggauaa

SEQ ID NO: 1651825 - RNA, 19 nt, Homo sapiens
  misc_RNA (1)...(19): siRNA sense strand
gaaaauuuguugcacagaa

SEQ ID NO: 1651826 - RNA, 19 nt, Homo sapiens
  misc_RNA (1)...(19): siRNA sense strand
gccagaagauguagacaca

SEQ ID NO: 1651827 - RNA, 19 nt, Homo sapiens
  misc_RNA (1)...(19): siRNA sense strand
acagucaccuggaaucuga

SEQ ID NO: 1651828 - RNA, 19 nt, Homo sapiens
  misc_RNA (1)...(19): siRNA sense strand
uagagaaguugcagaaauc

SEQ ID NO: 1651829 - RNA, 19 nt, Homo sapiens
  misc_RNA (1)...(19): siRNA sense strand
ggaaacagccaaggaggaa

SEQ ID NO: 1651830 - RNA, 19 nt, Homo sapiens
  misc_RNA (1)...(19): siRNA sense strand
gagaauccuggguaaagua

SEQ ID NO: 1651831 - RNA, 19 nt, Homo sapiens
  misc_RNA (1)...(19): siRNA sense strand
gcaaggagcagcaguucug

SEQ ID NO: 1651832 - RNA, 19 nt, Homo sapiens
  misc_RNA (1)...(19): siRNA sense strand
caacaacaaagaagaugaa

SEQ ID NO: 1651833 - RNA, 19 nt, Homo sapiens
  misc_RNA (1)...(19): siRNA sense strand
uguugaggcuguaccaaua

SEQ ID NO: 1651834 - RNA, 19 nt, Homo sapiens
  misc_RNA (1)...(19): siRNA sense strand
ucagagacauucagaaagg

SEQ ID NO: 1651835 - RNA, 19 nt, Homo sapiens
  misc_RNA (1)...(19): siRNA sense strand
gccuaaaggugcacaugaa

SEQ ID NO: 1651836 - RNA, 19 nt, Homo sapiens
  misc_RNA (1)...(19): siRNA sense strand
gacaaaagcuuccauuucu

SEQ ID NO: 1651837 - RNA, 19 nt, Homo sapiens
  misc_RNA (1)...(19): siRNA sense strand
gagaugauagugaaauguu

SEQ ID NO: 1651838 - RNA, 19 nt, Homo sapiens
  misc_RNA (1)...(19): siRNA sense strand
cagagaagccucaaguaga

SEQ ID NO: 1651839 - RNA, 19 nt, Homo sapiens
  misc_RNA (1)...(19): siRNA sense strand
ucagaugcacucaugguua

SEQ ID NO: 1651840 - RNA, 19 nt, Homo sapiens
  misc_RNA (1)...(19): siRNA sense strand
aaccaagcccugaugauua

SEQ ID NO: 1651841 - RNA, 19 nt, Homo sapiens
  misc_RNA (1)...(19): siRNA sense strand
gcaguguccacaaaucuuu

SEQ ID NO: 1651842 - RNA, 19 nt, Homo sapiens
  misc_RNA (1)...(19): siRNA sense strand
gauguuugauguagcuguu

SEQ ID NO: 1651843 - RNA, 19 nt, Homo sapiens
  misc_RNA (1)...(19): siRNA sense strand
aaacguggaaggugaguaa

SEQ ID NO: 1651844 - RNA, 19 nt, Homo sapiens
  misc_RNA (1)...(19): siRNA sense strand
ggaguuugcgcucuuguug

SEQ ID NO: 1651845 - RNA, 19 nt, Homo sapiens
  misc_RNA (1)...(19): siRNA sense strand
ccaagaagaagcacucaga

SEQ ID NO: 1651846 - RNA, 19 nt, Homo sapiens
  misc_RNA (1)...(19): siRNA sense strand
gauguacacgggcaaacua

SEQ ID NO: 1651847 - RNA, 19 nt, Homo sapiens
  misc_RNA (1)...(19): siRNA sense strand
cagaagauguagacacagu

SEQ ID NO: 1651848 - RNA, 19 nt, Homo sapiens
  misc_RNA (1)...(19): siRNA sense strand
ccucagagacauucagaaa

SEQ ID NO: 1651849 - RNA, 19 nt, Homo sapiens
  misc_RNA (1)...(19): siRNA sense strand
gaacaugcagauaugaagu

SEQ ID NO: 1651850 - RNA, 19 nt, Homo sapiens
  misc_RNA (1)...(19): siRNA sense strand
gugcagcuccugugacaaa

SEQ ID NO: 1651851 - RNA, 19 nt, Homo sapiens
  misc_RNA (1)...(19): siRNA sense strand
gcagagacugugaaagaga

SEQ ID NO: 1651852 - RNA, 19 nt, Homo sapiens
  misc_RNA (1)...(19): siRNA sense strand
uggcagagacugugaaaga

SEQ ID NO: 1651853 - RNA, 19 nt, Homo sapiens
  misc_RNA (1)...(19): siRNA sense strand
gaugugaaaggaaacacua

SEQ ID NO: 1651854 - RNA, 19 nt, Homo sapiens
  misc_RNA (1)...(19): siRNA sense strand
cuucagggcucacaagcuu

SEQ ID NO: 1651855 - RNA, 19 nt, Homo sapiens
  misc_RNA (1)...(19): siRNA sense strand
ccaugaaugugaccagugu

SEQ ID NO: 1651856 - RNA, 19 nt, Homo sapiens
  misc_RNA (1)...(19): siRNA sense strand
gaagcacucagaagggaaa

SEQ ID NO: 1651857 - RNA, 19 nt, Homo sapiens
  misc_RNA (1)...(19): siRNA sense strand
ugcaagcacugccucauga

SEQ ID NO: 1651858 - RNA, 19 nt, Homo sapiens
  misc_RNA (1)...(19): siRNA sense strand
acauugguguccuuacuaa

SEQ ID NO: 1651859 - RNA, 19 nt, Homo sapiens
  misc_RNA (1)...(19): siRNA sense strand
gaacacccaaggagacaau

SEQ ID NO: 1651860 - RNA, 19 nt, Homo sapiens
  misc_RNA (1)...(19): siRNA sense strand
caagagaugagugugaauu

SEQ ID NO: 1651861 - RNA, 19 nt, Homo sapiens
  misc_RNA (1)...(19): siRNA sense strand
ccacggagcacuucaagca

SEQ ID NO: 1651862 - RNA, 19 nt, Homo sapiens
  misc_RNA (1)...(19): siRNA sense strand
caucaaagcagaacaugca

SEQ ID NO: 1651863 - RNA, 19 nt, Homo sapiens
  misc_RNA (1)...(19): siRNA sense strand
ccaauuccacccugaagaa

SEQ ID NO: 1651864 - RNA, 19 nt, Homo sapiens
  misc_RNA (1)...(19): siRNA sense strand
caaagaagacaagcacaga

SEQ ID NO: 1651865 - RNA, 19 nt, Homo sapiens
  misc_RNA (1)...(19): siRNA sense strand
ugaccagccuuguaaacug

SEQ ID NO: 1651866 - RNA, 19 nt, Homo sapiens
  misc_RNA (1)...(19): siRNA sense strand
gagcauugcagcaccaugu

SEQ ID NO: 1651867 - RNA, 19 nt, Homo sapiens
  misc_RNA (1)...(19): siRNA sense strand
aagcagaacaugcagauau

SEQ ID NO: 1651868 - RNA, 19 nt, Homo sapiens
  misc_RNA (1)...(19): siRNA sense strand
caagaaacacaucaaagca

SEQ ID NO: 1651869 - RNA, 19 nt, Homo sapiens
  misc_RNA (1)...(19): siRNA sense strand
caaagaaagagcuggacaa

SEQ ID NO: 1651870 - RNA, 19 nt, Homo sapiens
  misc_RNA (1)...(19): siRNA sense strand
gagagaaggaaacguggaa

SEQ ID NO: 1651871 - RNA, 19 nt, Homo sapiens
  misc_RNA (1)...(19): siRNA sense strand
uugagacgcuaucaugaaa

SEQ ID NO: 1651872 - RNA, 19 nt, Homo sapiens
  misc_RNA (1)...(19): siRNA sense strand
ugaagacgacuuucccaaa

SEQ ID NO: 1651873 - RNA, 19 nt, Homo sapiens
  misc_RNA (1)...(19): siRNA sense strand
cagcugagaccuauuaugg

SEQ ID NO: 1651874 - RNA, 19 nt, Homo sapiens
  misc_RNA (1)...(19): siRNA sense strand
gacaaaaccuuccccaaca

SEQ ID NO: 1651875 - RNA, 19 nt, Homo sapiens
  misc_RNA (1)...(19): siRNA sense strand
gaucuguggugaggccaaa

SEQ ID NO: 1651876 - RNA, 19 nt, Homo sapiens
  misc_RNA (1)...(19): siRNA sense strand
cagaagagauucagccaaa

SEQ ID NO: 1651877 - RNA, 19 nt, Homo sapiens
  misc_RNA (1)...(19): siRNA sense strand
gugaccagguggauauuua

SEQ ID NO: 1651878 - RNA, 19 nt, Homo sapiens
  misc_RNA (1)...(19): siRNA sense strand
aaagacaguuuguacaaug

SEQ ID NO: 1651879 - RNA, 19 nt, Homo sapiens
  misc_RNA (1)...(19): siRNA sense strand
ccagaugccuugggagcua

SEQ ID NO: 1651880 - RNA, 19 nt, Homo sapiens
  misc_RNA (1)...(19): siRNA sense strand
agacugacgugugcuacua

SEQ ID NO: 1651881 - RNA, 19 nt, Homo sapiens
  misc_RNA (1)...(19): siRNA sense strand
acucagauaucccaaagug

SEQ ID NO: 1651882 - RNA, 19 nt, Homo sapiens
  misc_RNA (1)...(19): siRNA sense strand
ccacucagauaucccaaag

SEQ ID NO: 1651883 - RNA, 19 nt, Homo sapiens
  misc_RNA (1)...(19): siRNA sense strand
caagaaaucuccccagaag

SEQ ID NO: 1651884 - RNA, 19 nt, Homo sapiens
  misc_RNA (1)...(19): siRNA sense strand
ccaaagugguaccagaauc

SEQ ID NO: 1651885 - RNA, 19 nt, Homo sapiens
  misc_RNA (1)...(19): siRNA sense strand
gcaagacugacgugugcua

SEQ ID NO: 1651886 - RNA, 19 nt, Homo sapiens
  misc_RNA (1)...(19): siRNA sense strand
cauccaagcgcaagacuga

SEQ ID NO: 1651887 - RNA, 19 nt, Homo sapiens
  misc_RNA (1)...(19): siRNA sense strand
agaagaauuuggugaagca

SEQ ID NO: 1651888 - RNA, 19 nt, Homo sapiens
  misc_RNA (1)...(19): siRNA sense strand
ccucugggaugcuugguau

SEQ ID NO: 1651889 - RNA, 19 nt, Homo sapiens
  misc_RNA (1)...(19): siRNA sense strand
acaucuaccugcuuggaaa

SEQ ID NO: 1651890 - RNA, 19 nt, Homo sapiens
  misc_RNA (1)...(19): siRNA sense strand
gacgcaguccugagguuua

SEQ ID NO: 1651891 - RNA, 19 nt, Homo sapiens
  misc_RNA (1)...(19): siRNA sense strand
cagccaacuuccaacaaga

SEQ ID NO: 1651892 - RNA, 19 nt, Homo sapiens
  misc_RNA (1)...(19): siRNA sense strand
aagacaguuuguacaauga

SEQ ID NO: 1651893 - RNA, 19 nt, Homo sapiens
  misc_RNA (1)...(19): siRNA sense strand
ggacaucuaccugcuugga

SEQ ID NO: 1651894 - RNA, 19 nt, Homo sapiens
  misc_RNA (1)...(19): siRNA sense strand
agaauuuggugaagcaucu

SEQ ID NO: 1651895 - RNA, 19 nt, Homo sapiens
  misc_RNA (1)...(19): siRNA sense strand
ccagguggauauuuaugag

SEQ ID NO: 1651896 - RNA, 19 nt, Homo sapiens
  misc_RNA (1)...(19): siRNA sense strand
acuacaagacuuaucguaa

SEQ ID NO: 1651897 - RNA, 19 nt, Homo sapiens
  misc_RNA (1)...(19): siRNA sense strand
caacuuccaacaagaugug

SEQ ID NO: 1651898 - RNA, 19 nt, Homo sapiens
  misc_RNA (1)...(19): siRNA sense strand
gcaguccugagguuuaaug

SEQ ID NO: 1651899 - RNA, 19 nt, Homo sapiens
  misc_RNA (1)...(19): siRNA sense strand
ugagaagaauuuggugaag

SEQ ID NO: 1651900 - RNA, 19 nt, Homo sapiens
  misc_RNA (1)...(19): siRNA sense strand
acgcaguccugagguuuaa

SEQ ID NO: 1651901 - RNA, 19 nt, Homo sapiens
  misc_RNA (1)...(19): siRNA sense strand
cagauaucccaaaguggua

SEQ ID NO: 1651902 - RNA, 19 nt, Homo sapiens
  misc_RNA (1)...(19): siRNA sense strand
gguggauauuuaugaguuc

SEQ ID NO: 1651903 - RNA, 19 nt, Homo sapiens
  misc_RNA (1)...(19): siRNA sense strand
gcuaugggacauucuucaa

SEQ ID NO: 1651904 - RNA, 19 nt, Homo sapiens
  misc_RNA (1)...(19): siRNA sense strand
ggagcuaugggacauucuu

SEQ ID NO: 1651905 - RNA, 19 nt, Homo sapiens
  misc_RNA (1)...(19): siRNA sense strand
agguggauauuuaugaguu

SEQ ID NO: 1651906 - RNA, 19 nt, Homo sapiens
  misc_RNA (1)...(19): siRNA sense strand
acagccaacuuccaacaag

SEQ ID NO: 1651907 - RNA, 19 nt, Homo sapiens
  misc_RNA (1)...(19): siRNA sense strand
ucaaccagggcacagauga

SEQ ID NO: 1651908 - RNA, 19 nt, Homo sapiens
  misc_RNA (1)...(19): siRNA sense strand
gacaguuuguacaaugaag

SEQ ID NO: 1651909 - RNA, 19 nt, Homo sapiens
  misc_RNA (1)...(19): siRNA sense strand
ccacagccaacuuccaaca

SEQ ID NO: 1651910 - RNA, 19 nt, Homo sapiens
  misc_RNA (1)...(19): siRNA sense strand
gcuacuacuaccagaaguu

SEQ ID NO: 1651911 - RNA, 19 nt, Homo sapiens
  misc_RNA (1)...(19): siRNA sense strand
gaagagauucagccaaacc

SEQ ID NO: 1651912 - RNA, 19 nt, Homo sapiens
  misc_RNA (1)...(19): siRNA sense strand
gaccagguggauauuuaug

SEQ ID NO: 1651913 - RNA, 19 nt, Homo sapiens
  misc_RNA (1)...(19): siRNA sense strand
ccggaccauucacugcuaa

SEQ ID NO: 1651914 - RNA, 19 nt, Homo sapiens
  misc_RNA (1)...(19): siRNA sense strand
aaacuaccauucgccugau

SEQ ID NO: 1651915 - RNA, 19 nt, Homo sapiens
  misc_RNA (1)...(19): siRNA sense strand
ccgcugcucuaugagaaga

SEQ ID NO: 1651916 - RNA, 19 nt, Homo sapiens
  misc_RNA (1)...(19): siRNA sense strand
accacccgcugcucuauga

SEQ ID NO: 1651917 - RNA, 19 nt, Homo sapiens
  misc_RNA (1)...(19): siRNA sense strand
ccauucgccugaugaacuc

SEQ ID NO: 1651918 - RNA, 19 nt, Homo sapiens
  misc_RNA (1)...(19): siRNA sense strand
gacaucuaccugcuuggaa

SEQ ID NO: 1651919 - RNA, 19 nt, Homo sapiens
  misc_RNA (1)...(19): siRNA sense strand
guauaccacucagauaucc

SEQ ID NO: 1651920 - RNA, 19 nt, Homo sapiens
  misc_RNA (1)...(19): siRNA sense strand
gagcuaugggacauucuuc

SEQ ID NO: 1651921 - RNA, 19 nt, Homo sapiens
  misc_RNA (1)...(19): siRNA sense strand
ugacgcaguccugagguuu

SEQ ID NO: 1651922 - RNA, 19 nt, Homo sapiens
  misc_RNA (1)...(19): siRNA sense strand
gcugcucuaugagaagaau

SEQ ID NO: 1651923 - RNA, 19 nt, Homo sapiens
  misc_RNA (1)...(19): siRNA sense strand
ugacgugugcuacuacuac

SEQ ID NO: 1651924 - RNA, 19 nt, Homo sapiens
  misc_RNA (1)...(19): siRNA sense strand
ugaccagguggauauuuau

SEQ ID NO: 1651925 - RNA, 19 nt, Homo sapiens
  misc_RNA (1)...(19): siRNA sense strand
cagaagagauucagccaaa

SEQ ID NO: 1651926 - RNA, 19 nt, Homo sapiens
  misc_RNA (1)...(19): siRNA sense strand
gugaccagguggauauuua

SEQ ID NO: 1651927 - RNA, 19 nt, Homo sapiens
  misc_RNA (1)...(19): siRNA sense strand
aaagacaguuuguacaaug

SEQ ID NO: 1651928 - RNA, 19 nt, Homo sapiens
  misc_RNA (1)...(19): siRNA sense strand
ccagaugccuugggagcua

SEQ ID NO: 1651929 - RNA, 19 nt, Homo sapiens
  misc_RNA (1)...(19): siRNA sense strand
agacugacgugugcuacua

SEQ ID NO: 1651930 - RNA, 19 nt, Homo sapiens
  misc_RNA (1)...(19): siRNA sense strand
acucagauaucccaaagug

SEQ ID NO: 1651931 - RNA, 19 nt, Homo sapiens
  misc_RNA (1)...(19): siRNA sense strand
ccacucagauaucccaaag

SEQ ID NO: 1651932 - RNA, 19 nt, Homo sapiens
  misc_RNA (1)...(19): siRNA sense strand
caagaaaucuccccagaag

SEQ ID NO: 1651933 - RNA, 19 nt, Homo sapiens
  misc_RNA (1)...(19): siRNA sense strand
ccaaagugguaccagaauc

SEQ ID NO: 1651934 - RNA, 19 nt, Homo sapiens
  misc_RNA (1)...(19): siRNA sense strand
gcaagacugacgugugcua

SEQ ID NO: 1651935 - RNA, 19 nt, Homo sapiens
  misc_RNA (1)...(19): siRNA sense strand
cauccaagcgcaagacuga

SEQ ID NO: 1651936 - RNA, 19 nt, Homo sapiens
  misc_RNA (1)...(19): siRNA sense strand
agaagaauuuggugaagca

SEQ ID NO: 1651937 - RNA, 19 nt, Homo sapiens
  misc_RNA (1)...(19): siRNA sense strand
ccucugggaugcuugguau

SEQ ID NO: 1651938 - RNA, 19 nt, Homo sapiens
  misc_RNA (1)...(19): siRNA sense strand
acaucuaccugcuuggaaa

SEQ ID NO: 1651939 - RNA, 19 nt, Homo sapiens
  misc_RNA (1)...(19): siRNA sense strand
gacgcaguccugagguuua

SEQ ID NO: 1651940 - RNA, 19 nt, Homo sapiens
  misc_RNA (1)...(19): siRNA sense strand
cagccaacuuccaacaaga

SEQ ID NO: 1651941 - RNA, 19 nt, Homo sapiens
  misc_RNA (1)...(19): siRNA sense strand
aagacaguuuguacaauga

SEQ ID NO: 1651942 - RNA, 19 nt, Homo sapiens
  misc_RNA (1)...(19): siRNA sense strand
ggacaucuaccugcuugga

SEQ ID NO: 1651943 - RNA, 19 nt, Homo sapiens
  misc_RNA (1)...(19): siRNA sense strand
agaauuuggugaagcaucu

SEQ ID NO: 1651944 - RNA, 19 nt, Homo sapiens
  misc_RNA (1)...(19): siRNA sense strand
ccagguggauauuuaugag

SEQ ID NO: 1651945 - RNA, 19 nt, Homo sapiens
  misc_RNA (1)...(19): siRNA sense strand
acuacaagacuuaucguaa

SEQ ID NO: 1651946 - RNA, 19 nt, Homo sapiens
  misc_RNA (1)...(19): siRNA sense strand
caacuuccaacaagaugug

SEQ ID NO: 1651947 - RNA, 19 nt, Homo sapiens
  misc_RNA (1)...(19): siRNA sense strand
gcaguccugagguuuaaug

SEQ ID NO: 1651948 - RNA, 19 nt, Homo sapiens
  misc_RNA (1)...(19): siRNA sense strand
ugagaagaauuuggugaag

SEQ ID NO: 1651949 - RNA, 19 nt, Homo sapiens
  misc_RNA (1)...(19): siRNA sense strand
acgcaguccugagguuuaa

SEQ ID NO: 1651950 - RNA, 19 nt, Homo sapiens
  misc_RNA (1)...(19): siRNA sense strand
cagauaucccaaaguggua

SEQ ID NO: 1651951 - RNA, 19 nt, Homo sapiens
  misc_RNA (1)...(19): siRNA sense strand
gguggauauuuaugaguuc

SEQ ID NO: 1651952 - RNA, 19 nt, Homo sapiens
  misc_RNA (1)...(19): siRNA sense strand
gcuaugggacauucuucaa

SEQ ID NO: 1651953 - RNA, 19 nt, Homo sapiens
  misc_RNA (1)...(19): siRNA sense strand
ggagcuaugggacauucuu

SEQ ID NO: 1651954 - RNA, 19 nt, Homo sapiens
  misc_RNA (1)...(19): siRNA sense strand
agguggauauuuaugaguu

SEQ ID NO: 1651955 - RNA, 19 nt, Homo sapiens
  misc_RNA (1)...(19): siRNA sense strand
acagccaacuuccaacaag

SEQ ID NO: 1651956 - RNA, 19 nt, Homo sapiens
  misc_RNA (1)...(19): siRNA sense strand
ucaaccagggcacagauga

SEQ ID NO: 1651957 - RNA, 19 nt, Homo sapiens
  misc_RNA (1)...(19): siRNA sense strand
gacaguuuguacaaugaag

SEQ ID NO: 1651958 - RNA, 19 nt, Homo sapiens
  misc_RNA (1)...(19): siRNA sense strand
ccacagccaacuuccaaca

SEQ ID NO: 1651959 - RNA, 19 nt, Homo sapiens
  misc_RNA (1)...(19): siRNA sense strand
gcuacuacuaccagaaguu

SEQ ID NO: 1651960 - RNA, 19 nt, Homo sapiens
  misc_RNA (1)...(19): siRNA sense strand
gaagagauucagccaaacc

SEQ ID NO: 1651961 - RNA, 19 nt, Homo sapiens
  misc_RNA (1)...(19): siRNA sense strand
gaccagguggauauuuaug

SEQ ID NO: 1651962 - RNA, 19 nt, Homo sapiens
  misc_RNA (1)...(19): siRNA sense strand
ccggaccauucacugcuaa

SEQ ID NO: 1651963 - RNA, 19 nt, Homo sapiens
  misc_RNA (1)...(19): siRNA sense strand
aaacuaccauucgccugau

SEQ ID NO: 1651964 - RNA, 19 nt, Homo sapiens
  misc_RNA (1)...(19): siRNA sense strand
ccgcugcucuaugagaaga

SEQ ID NO: 1651965 - RNA, 19 nt, Homo sapiens
  misc_RNA (1)...(19): siRNA sense strand
accacccgcugcucuauga

SEQ ID NO: 1651966 - RNA, 19 nt, Homo sapiens
  misc_RNA (1)...(19): siRNA sense strand
ccauucgccugaugaacuc

SEQ ID NO: 1651967 - RNA, 19 nt, Homo sapiens
  misc_RNA (1)...(19): siRNA sense strand
gacaucuaccugcuuggaa

SEQ ID NO: 1651968 - RNA, 19 nt, Homo sapiens
  misc_RNA (1)...(19): siRNA sense strand
guauaccacucagauaucc

SEQ ID NO: 1651969 - RNA, 19 nt, Homo sapiens
  misc_RNA (1)...(19): siRNA sense strand
gagcuaugggacauucuuc

SEQ ID NO: 1651970 - RNA, 19 nt, Homo sapiens
  misc_RNA (1)...(19): siRNA sense strand
ugacgcaguccugagguuu

SEQ ID NO: 1651971 - RNA, 19 nt, Homo sapiens
  misc_RNA (1)...(19): siRNA sense strand
gcugcucuaugagaagaau

SEQ ID NO: 1651972 - RNA, 19 nt, Homo sapiens
  misc_RNA (1)...(19): siRNA sense strand
ugacgugugcuacuacuac

SEQ ID NO: 1651973 - RNA, 19 nt, Homo sapiens
  misc_RNA (1)...(19): siRNA sense strand
ugaccagguggauauuuau

SEQ ID NO: 1651974 - RNA, 19 nt, Homo sapiens
  misc_RNA (1)...(19): siRNA sense strand
cagaagagauucagccaaa

SEQ ID NO: 1651975 - RNA, 19 nt, Homo sapiens
  misc_RNA (1)...(19): siRNA sense strand
gugaccagguggauauuua

SEQ ID NO: 1651976 - RNA, 19 nt, Homo sapiens
  misc_RNA (1)...(19): siRNA sense strand
aaagacaguuuguacaaug

SEQ ID NO: 1651977 - RNA, 19 nt, Homo sapiens
  misc_RNA (1)...(19): siRNA sense strand
ccagaugccuugggagcua

SEQ ID NO: 1651978 - RNA, 19 nt, Homo sapiens
  misc_RNA (1)...(19): siRNA sense strand
agacugacgugugcuacua

SEQ ID NO: 1651979 - RNA, 19 nt, Homo sapiens
  misc_RNA (1)...(19): siRNA sense strand
acucagauaucccaaagug

SEQ ID NO: 1651980 - RNA, 19 nt, Homo sapiens
  misc_RNA (1)...(19): siRNA sense strand
ccacucagauaucccaaag

SEQ ID NO: 1651981 - RNA, 19 nt, Homo sapiens
  misc_RNA (1)...(19): siRNA sense strand
caagaaaucuccccagaag

SEQ ID NO: 1651982 - RNA, 19 nt, Homo sapiens
  misc_RNA (1)...(19): siRNA sense strand
ccaaagugguaccagaauc

SEQ ID NO: 1651983 - RNA, 19 nt, Homo sapiens
  misc_RNA (1)...(19): siRNA sense strand
gcaagacugacgugugcua

SEQ ID NO: 1651984 - RNA, 19 nt, Homo sapiens
  misc_RNA (1)...(19): siRNA sense strand
cauccaagcgcaagacuga

SEQ ID NO: 1651985 - RNA, 19 nt, Homo sapiens
  misc_RNA (1)...(19): siRNA sense strand
agaagaauuuggugaagca

SEQ ID NO: 1651986 - RNA, 19 nt, Homo sapiens
  misc_RNA (1)...(19): siRNA sense strand
ccucugggaugcuugguau

SEQ ID NO: 1651987 - RNA, 19 nt, Homo sapiens
  misc_RNA (1)...(19): siRNA sense strand
acaucuaccugcuuggaaa

SEQ ID NO: 1651988 - RNA, 19 nt, Homo sapiens
  misc_RNA (1)...(19): siRNA sense strand
aagacaguuuguacaauga

SEQ ID NO: 1651989 - RNA, 19 nt, Homo sapiens
  misc_RNA (1)...(19): siRNA sense strand
ggacaucuaccugcuugga

SEQ ID NO: 1651990 - RNA, 19 nt, Homo sapiens
  misc_RNA (1)...(19): siRNA sense strand
agaauuuggugaagcaucu

SEQ ID NO: 1651991 - RNA, 19 nt, Homo sapiens
  misc_RNA (1)...(19): siRNA sense strand
ccagguggauauuuaugag

SEQ ID NO: 1651992 - RNA, 19 nt, Homo sapiens
  misc_RNA (1)...(19): siRNA sense strand
acuacaagacuuaucguaa

SEQ ID NO: 1651993 - RNA, 19 nt, Homo sapiens
  misc_RNA (1)...(19): siRNA sense strand
ugagaagaauuuggugaag

SEQ ID NO: 1651994 - RNA, 19 nt, Homo sapiens
  misc_RNA (1)...(19): siRNA sense strand
cagauaucccaaaguggua

SEQ ID NO: 1651995 - RNA, 19 nt, Homo sapiens
  misc_RNA (1)...(19): siRNA sense strand
gguggauauuuaugaguuc

SEQ ID NO: 1651996 - RNA, 19 nt, Homo sapiens
  misc_RNA (1)...(19): siRNA sense strand
gcuaugggacauucuucaa

SEQ ID NO: 1651997 - RNA, 19 nt, Homo sapiens
  misc_RNA (1)...(19): siRNA sense strand
ggagcuaugggacauucuu

SEQ ID NO: 1651998 - RNA, 19 nt, Homo sapiens
  misc_RNA (1)...(19): siRNA sense strand
agguggauauuuaugaguu

SEQ ID NO: 1651999 - RNA, 19 nt, Homo sapiens
  misc_RNA (1)...(19): siRNA sense strand
ucaaccagggcacagauga

SEQ ID NO: 1652000 - RNA, 19 nt, Homo sapiens
  misc_RNA (1)...(19): siRNA sense strand
gaagagauucagccaaacc

SEQ ID NO: 1652001 - RNA, 19 nt, Homo sapiens
  misc_RNA (1)...(19): siRNA sense strand
gacaguuuguacaaugaag

SEQ ID NO: 1652002 - RNA, 19 nt, Homo sapiens
  misc_RNA (1)...(19): siRNA sense strand
gcuacuacuaccagaaguu

SEQ ID NO: 1652003 - RNA, 19 nt, Homo sapiens
  misc_RNA (1)...(19): siRNA sense strand
gaccagguggauauuuaug

SEQ ID NO: 1652004 - RNA, 19 nt, Homo sapiens
  misc_RNA (1)...(19): siRNA sense strand
ccggaccauucacugcuaa

SEQ ID NO: 1652005 - RNA, 19 nt, Homo sapiens
  misc_RNA (1)...(19): siRNA sense strand
accacccgcugcucuauga

SEQ ID NO: 1652006 - RNA, 19 nt, Homo sapiens
  misc_RNA (1)...(19): siRNA sense strand
ccgcugcucuaugagaaga

SEQ ID NO: 1652007 - RNA, 19 nt, Homo sapiens
  misc_RNA (1)...(19): siRNA sense strand
gacaucuaccugcuuggaa

SEQ ID NO: 1652008 - RNA, 19 nt, Homo sapiens
  misc_RNA (1)...(19): siRNA sense strand
gagcuaugggacauucuuc

SEQ ID NO: 1652009 - RNA, 19 nt, Homo sapiens
  misc_RNA (1)...(19): siRNA sense strand
guauaccacucagauaucc

SEQ ID NO: 1652010 - RNA, 19 nt, Homo sapiens
  misc_RNA (1)...(19): siRNA sense strand
ugaccagguggauauuuau

SEQ ID NO: 1652011 - RNA, 19 nt, Homo sapiens
  misc_RNA (1)...(19): siRNA sense strand
gcugcucuaugagaagaau

SEQ ID NO: 1652012 - RNA, 19 nt, Homo sapiens
  misc_RNA (1)...(19): siRNA sense strand
ugacgugugcuacuacuac

SEQ ID NO: 1652013 - RNA, 19 nt, Homo sapiens
  misc_RNA (1)...(19): siRNA sense strand
cagaagagauucagccaaa

SEQ ID NO: 1652014 - RNA, 19 nt, Homo sapiens
  misc_RNA (1)...(19): siRNA sense strand
gugaccagguggauauuua

SEQ ID NO: 1652015 - RNA, 19 nt, Homo sapiens
  misc_RNA (1)...(19): siRNA sense strand
aaagacaguuuguacaaug

SEQ ID NO: 1652016 - RNA, 19 nt, Homo sapiens
  misc_RNA (1)...(19): siRNA sense strand
ccagaugccuugggagcua

SEQ ID NO: 1652017 - RNA, 19 nt, Homo sapiens
  misc_RNA (1)...(19): siRNA sense strand
agacugacgugugcuacua

SEQ ID NO: 1652018 - RNA, 19 nt, Homo sapiens
  misc_RNA (1)...(19): siRNA sense strand
acucagauaucccaaagug

SEQ ID NO: 1652019 - RNA, 19 nt, Homo sapiens
  misc_RNA (1)...(19): siRNA sense strand
ccacucagauaucccaaag

SEQ ID NO: 1652020 - RNA, 19 nt, Homo sapiens
  misc_RNA (1)...(19): siRNA sense strand
caagaaaucuccccagaag

SEQ ID NO: 1652021 - RNA, 19 nt, Homo sapiens
  misc_RNA (1)...(19): siRNA sense strand
ccaaagugguaccagaauc

SEQ ID NO: 1652022 - RNA, 19 nt, Homo sapiens
  misc_RNA (1)...(19): siRNA sense strand
gcaagacugacgugugcua

SEQ ID NO: 1652023 - RNA, 19 nt, Homo sapiens
  misc_RNA (1)...(19): siRNA sense strand
cauccaagcgcaagacuga

SEQ ID NO: 1652024 - RNA, 19 nt, Homo sapiens
  misc_RNA (1)...(19): siRNA sense strand
agaagaauuuggugaagca

SEQ ID NO: 1652025 - RNA, 19 nt, Homo sapiens
  misc_RNA (1)...(19): siRNA sense strand
ccucugggaugcuugguau

SEQ ID NO: 1652026 - RNA, 19 nt, Homo sapiens
  misc_RNA (1)...(19): siRNA sense strand
acaucuaccugcuuggaaa

SEQ ID NO: 1652027 - RNA, 19 nt, Homo sapiens
  misc_RNA (1)...(19): siRNA sense strand
gacgcaguccugagguuua

SEQ ID NO: 1652028 - RNA, 19 nt, Homo sapiens
  misc_RNA (1)...(19): siRNA sense strand
cagccaacuuccaacaaga

SEQ ID NO: 1652029 - RNA, 19 nt, Homo sapiens
  misc_RNA (1)...(19): siRNA sense strand
aagacaguuuguacaauga

SEQ ID NO: 1652030 - RNA, 19 nt, Homo sapiens
  misc_RNA (1)...(19): siRNA sense strand
ggacaucuaccugcuugga

SEQ ID NO: 1652031 - RNA, 19 nt, Homo sapiens
  misc_RNA (1)...(19): siRNA sense strand
agaauuuggugaagcaucu

SEQ ID NO: 1652032 - RNA, 19 nt, Homo sapiens
  misc_RNA (1)...(19): siRNA sense strand
ccagguggauauuuaugag

SEQ ID NO: 1652033 - RNA, 19 nt, Homo sapiens
  misc_RNA (1)...(19): siRNA sense strand
acuacaagacuuaucguaa

SEQ ID NO: 1652034 - RNA, 19 nt, Homo sapiens
  misc_RNA (1)...(19): siRNA sense strand
caacuuccaacaagaugug

SEQ ID NO: 1652035 - RNA, 19 nt, Homo sapiens
  misc_RNA (1)...(19): siRNA sense strand
gcaguccugagguuuaaug

SEQ ID NO: 1652036 - RNA, 19 nt, Homo sapiens
  misc_RNA (1)...(19): siRNA sense strand
ugagaagaauuuggugaag

SEQ ID NO: 1652037 - RNA, 19 nt, Homo sapiens
  misc_RNA (1)...(19): siRNA sense strand
acgcaguccugagguuuaa

SEQ ID NO: 1652038 - RNA, 19 nt, Homo sapiens
  misc_RNA (1)...(19): siRNA sense strand
cagauaucccaaaguggua

SEQ ID NO: 1652039 - RNA, 19 nt, Homo sapiens
  misc_RNA (1)...(19): siRNA sense strand
gguggauauuuaugaguuc

SEQ ID NO: 1652040 - RNA, 19 nt, Homo sapiens
  misc_RNA (1)...(19): siRNA sense strand
gcuaugggacauucuucaa

SEQ ID NO: 1652041 - RNA, 19 nt, Homo sapiens
  misc_RNA (1)...(19): siRNA sense strand
ggagcuaugggacauucuu

SEQ ID NO: 1652042 - RNA, 19 nt, Homo sapiens
  misc_RNA (1)...(19): siRNA sense strand
agguggauauuuaugaguu

SEQ ID NO: 1652043 - RNA, 19 nt, Homo sapiens
  misc_RNA (1)...(19): siRNA sense strand
acagccaacuuccaacaag

SEQ ID NO: 1652044 - RNA, 19 nt, Homo sapiens
  misc_RNA (1)...(19): siRNA sense strand
ucaaccagggcacagauga

SEQ ID NO: 1652045 - RNA, 19 nt, Homo sapiens
  misc_RNA (1)...(19): siRNA sense strand
gacaguuuguacaaugaag

SEQ ID NO: 1652046 - RNA, 19 nt, Homo sapiens
  misc_RNA (1)...(19): siRNA sense strand
ccacagccaacuuccaaca

SEQ ID NO: 1652047 - RNA, 19 nt, Homo sapiens
  misc_RNA (1)...(19): siRNA sense strand
gcuacuacuaccagaaguu

SEQ ID NO: 1652048 - RNA, 19 nt, Homo sapiens
  misc_RNA (1)...(19): siRNA sense strand
gaagagauucagccaaacc

SEQ ID NO: 1652049 - RNA, 19 nt, Homo sapiens
  misc_RNA (1)...(19): siRNA sense strand
gaccagguggauauuuaug

SEQ ID NO: 1652050 - RNA, 19 nt, Homo sapiens
  misc_RNA (1)...(19): siRNA sense strand
ccggaccauucacugcuaa

SEQ ID NO: 1652051 - RNA, 19 nt, Homo sapiens
  misc_RNA (1)...(19): siRNA sense strand
aaacuaccauucgccugau

SEQ ID NO: 1652052 - RNA, 19 nt, Homo sapiens
  misc_RNA (1)...(19): siRNA sense strand
ccgcugcucuaugagaaga

SEQ ID NO: 1652053 - RNA, 19 nt, Homo sapiens
  misc_RNA (1)...(19): siRNA sense strand
accacccgcugcucuauga

SEQ ID NO: 1652054 - RNA, 19 nt, Homo sapiens
  misc_RNA (1)...(19): siRNA sense strand
ccauucgccugaugaacuc

SEQ ID NO: 1652055 - RNA, 19 nt, Homo sapiens
  misc_RNA (1)...(19): siRNA sense strand
gacaucuaccugcuuggaa

SEQ ID NO: 1652056 - RNA, 19 nt, Homo sapiens
  misc_RNA (1)...(19): siRNA sense strand
guauaccacucagauaucc

SEQ ID NO: 1652057 - RNA, 19 nt, Homo sapiens
  misc_RNA (1)...(19): siRNA sense strand
gagcuaugggacauucuuc

SEQ ID NO: 1652058 - RNA, 19 nt, Homo sapiens
  misc_RNA (1)...(19): siRNA sense strand
ugacgcaguccugagguuu

SEQ ID NO: 1652059 - RNA, 19 nt, Homo sapiens
  misc_RNA (1)...(19): siRNA sense strand
gcugcucuaugagaagaau

SEQ ID NO: 1652060 - RNA, 19 nt, Homo sapiens
  misc_RNA (1)...(19): siRNA sense strand
ugacgugugcuacuacuac

SEQ ID NO: 1652061 - RNA, 19 nt, Homo sapiens
  misc_RNA (1)...(19): siRNA sense strand
ugaccagguggauauuuau

SEQ ID NO: 1652062 - RNA, 19 nt, Homo sapiens
  misc_RNA (1)...(19): siRNA sense strand
cagaagagauucagccaaa

SEQ ID NO: 1652063 - RNA, 19 nt, Homo sapiens
  misc_RNA (1)...(19): siRNA sense strand
gugaccagguggauauuua

SEQ ID NO: 1652064 - RNA, 19 nt, Homo sapiens
  misc_RNA (1)...(19): siRNA sense strand
aaagacaguuuguacaaug

SEQ ID NO: 1652065 - RNA, 19 nt, Homo sapiens
  misc_RNA (1)...(19): siRNA sense strand
ccagaugccuugggagcua

SEQ ID NO: 1652066 - RNA, 19 nt, Homo sapiens
  misc_RNA (1)...(19): siRNA sense strand
agacugacgugugcuacua

SEQ ID NO: 1652067 - RNA, 19 nt, Homo sapiens
  misc_RNA (1)...(19): siRNA sense strand
acucagauaucccaaagug

SEQ ID NO: 1652068 - RNA, 19 nt, Homo sapiens
  misc_RNA (1)...(19): siRNA sense strand
ccacucagauaucccaaag

SEQ ID NO: 1652069 - RNA, 19 nt, Homo sapiens
  misc_RNA (1)...(19): siRNA sense strand
caagaaaucuccccagaag

SEQ ID NO: 1652070 - RNA, 19 nt, Homo sapiens
  misc_RNA (1)...(19): siRNA sense strand
ccaaagugguaccagaauc

SEQ ID NO: 1652071 - RNA, 19 nt, Homo sapiens
  misc_RNA (1)...(19): siRNA sense strand
gcaagacugacgugugcua

SEQ ID NO: 1652072 - RNA, 19 nt, Homo sapiens
  misc_RNA (1)...(19): siRNA sense strand
cauccaagcgcaagacuga

SEQ ID NO: 1652073 - RNA, 19 nt, Homo sapiens
  misc_RNA (1)...(19): siRNA sense strand
agaagaauuuggugaagca

SEQ ID NO: 1652074 - RNA, 19 nt, Homo sapiens
  misc_RNA (1)...(19): siRNA sense strand
ccucugggaugcuugguau

SEQ ID NO: 1652075 - RNA, 19 nt, Homo sapiens
  misc_RNA (1)...(19): siRNA sense strand
acaucuaccugcuuggaaa

SEQ ID NO: 1652076 - RNA, 19 nt, Homo sapiens
  misc_RNA (1)...(19): siRNA sense strand
gacgcaguccugagguuua

SEQ ID NO: 1652077 - RNA, 19 nt, Homo sapiens
  misc_RNA (1)...(19): siRNA sense strand
cagccaacuuccaacaaga

SEQ ID NO: 1652078 - RNA, 19 nt, Homo sapiens
  misc_RNA (1)...(19): siRNA sense strand
aagacaguuuguacaauga

SEQ ID NO: 1652079 - RNA, 19 nt, Homo sapiens
  misc_RNA (1)...(19): siRNA sense strand
ggacaucuaccugcuugga

SEQ ID NO: 1652080 - RNA, 19 nt, Homo sapiens
  misc_RNA (1)...(19): siRNA sense strand
agaauuuggugaagcaucu

SEQ ID NO: 1652081 - RNA, 19 nt, Homo sapiens
  misc_RNA (1)...(19): siRNA sense strand
ccagguggauauuuaugag

SEQ ID NO: 1652082 - RNA, 19 nt, Homo sapiens
  misc_RNA (1)...(19): siRNA sense strand
acuacaagacuuaucguaa

SEQ ID NO: 1652083 - RNA, 19 nt, Homo sapiens
  misc_RNA (1)...(19): siRNA sense strand
caacuuccaacaagaugug

SEQ ID NO: 1652084 - RNA, 19 nt, Homo sapiens
  misc_RNA (1)...(19): siRNA sense strand
gcaguccugagguuuaaug

SEQ ID NO: 1652085 - RNA, 19 nt, Homo sapiens
  misc_RNA (1)...(19): siRNA sense strand
ugagaagaauuuggugaag

SEQ ID NO: 1652086 - RNA, 19 nt, Homo sapiens
  misc_RNA (1)...(19): siRNA sense strand
acgcaguccugagguuuaa

SEQ ID NO: 1652087 - RNA, 19 nt, Homo sapiens
  misc_RNA (1)...(19): siRNA sense strand
cagauaucccaaaguggua

SEQ ID NO: 1652088 - RNA, 19 nt, Homo sapiens
  misc_RNA (1)...(19): siRNA sense strand
gguggauauuuaugaguuc

SEQ ID NO: 1652089 - RNA, 19 nt, Homo sapiens
  misc_RNA (1)...(19): siRNA sense strand
gcuaugggacauucuucaa

SEQ ID NO: 1652090 - RNA, 19 nt, Homo sapiens
  misc_RNA (1)...(19): siRNA sense strand
ggagcuaugggacauucuu

SEQ ID NO: 1652091 - RNA, 19 nt, Homo sapiens
  misc_RNA (1)...(19): siRNA sense strand
agguggauauuuaugaguu

SEQ ID NO: 1652092 - RNA, 19 nt, Homo sapiens
  misc_RNA (1)...(19): siRNA sense strand
acagccaacuuccaacaag

SEQ ID NO: 1652093 - RNA, 19 nt, Homo sapiens
  misc_RNA (1)...(19): siRNA sense strand
ucaaccagggcacagauga

SEQ ID NO: 1652094 - RNA, 19 nt, Homo sapiens
  misc_RNA (1)...(19): siRNA sense strand
gacaguuuguacaaugaag

SEQ ID NO: 1652095 - RNA, 19 nt, Homo sapiens
  misc_RNA (1)...(19): siRNA sense strand
ccacagccaacuuccaaca

SEQ ID NO: 1652096 - RNA, 19 nt, Homo sapiens
  misc_RNA (1)...(19): siRNA sense strand
gcuacuacuaccagaaguu

SEQ ID NO: 1652097 - RNA, 19 nt, Homo sapiens
  misc_RNA (1)...(19): siRNA sense strand
gaagagauucagccaaacc

SEQ ID NO: 1652098 - RNA, 19 nt, Homo sapiens
  misc_RNA (1)...(19): siRNA sense strand
gaccagguggauauuuaug

SEQ ID NO: 1652099 - RNA, 19 nt, Homo sapiens
  misc_RNA (1)...(19): siRNA sense strand
ccggaccauucacugcuaa

SEQ ID NO: 1652100 - RNA, 19 nt, Homo sapiens
  misc_RNA (1)...(19): siRNA sense strand
aaacuaccauucgccugau

SEQ ID NO: 1652101 - RNA, 19 nt, Homo sapiens
  misc_RNA (1)...(19): siRNA sense strand
ccgcugcucuaugagaaga

SEQ ID NO: 1652102 - RNA, 19 nt, Homo sapiens
  misc_RNA (1)...(19): siRNA sense strand
accacccgcugcucuauga

SEQ ID NO: 1652103 - RNA, 19 nt, Homo sapiens
  misc_RNA (1)...(19): siRNA sense strand
ccauucgccugaugaacuc

SEQ ID NO: 1652104 - RNA, 19 nt, Homo sapiens
  misc_RNA (1)...(19): siRNA sense strand
gacaucuaccugcuuggaa

SEQ ID NO: 1652105 - RNA, 19 nt, Homo sapiens
  misc_RNA (1)...(19): siRNA sense strand
guauaccacucagauaucc

SEQ ID NO: 1652106 - RNA, 19 nt, Homo sapiens
  misc_RNA (1)...(19): siRNA sense strand
gagcuaugggacauucuuc

SEQ ID NO: 1652107 - RNA, 19 nt, Homo sapiens
  misc_RNA (1)...(19): siRNA sense strand
ugacgcaguccugagguuu

SEQ ID NO: 1652108 - RNA, 19 nt, Homo sapiens
  misc_RNA (1)...(19): siRNA sense strand
gcugcucuaugagaagaau

SEQ ID NO: 1652109 - RNA, 19 nt, Homo sapiens
  misc_RNA (1)...(19): siRNA sense strand
ugacgugugcuacuacuac

SEQ ID NO: 1652110 - RNA, 19 nt, Homo sapiens
  misc_RNA (1)...(19): siRNA sense strand
ugaccagguggauauuuau

SEQ ID NO: 1652111 - RNA, 19 nt, Homo sapiens
  misc_RNA (1)...(19): siRNA sense strand
cagaagagauucagccaaa

SEQ ID NO: 1652112 - RNA, 19 nt, Homo sapiens
  misc_RNA (1)...(19): siRNA sense strand
gugaccagguggauauuua

SEQ ID NO: 1652113 - RNA, 19 nt, Homo sapiens
  misc_RNA (1)...(19): siRNA sense strand
aaagacaguuuguacaaug

SEQ ID NO: 1652114 - RNA, 19 nt, Homo sapiens
  misc_RNA (1)...(19): siRNA sense strand
ccagaugccuugggagcua

SEQ ID NO: 1652115 - RNA, 19 nt, Homo sapiens
  misc_RNA (1)...(19): siRNA sense strand
agacugacgugugcuacua

SEQ ID NO: 1652116 - RNA, 19 nt, Homo sapiens
  misc_RNA (1)...(19): siRNA sense strand
acucagauaucccaaagug

SEQ ID NO: 1652117 - RNA, 19 nt, Homo sapiens
  misc_RNA (1)...(19): siRNA sense strand
ccacucagauaucccaaag

SEQ ID NO: 1652118 - RNA, 19 nt, Homo sapiens
  misc_RNA (1)...(19): siRNA sense strand
caagaaaucuccccagaag

SEQ ID NO: 1652119 - RNA, 19 nt, Homo sapiens
  misc_RNA (1)...(19): siRNA sense strand
ccaaagugguaccagaauc

SEQ ID NO: 1652120 - RNA, 19 nt, Homo sapiens
  misc_RNA (1)...(19): siRNA sense strand
gcaagacugacgugugcua

SEQ ID NO: 1652121 - RNA, 19 nt, Homo sapiens
  misc_RNA (1)...(19): siRNA sense strand
cauccaagcgcaagacuga

SEQ ID NO: 1652122 - RNA, 19 nt, Homo sapiens
  misc_RNA (1)...(19): siRNA sense strand
agaagaauuuggugaagca

SEQ ID NO: 1652123 - RNA, 19 nt, Homo sapiens
  misc_RNA (1)...(19): siRNA sense strand
ccucugggaugcuugguau

SEQ ID NO: 1652124 - RNA, 19 nt, Homo sapiens
  misc_RNA (1)...(19): siRNA sense strand
acaucuaccugcuuggaaa

SEQ ID NO: 1652125 - RNA, 19 nt, Homo sapiens
  misc_RNA (1)...(19): siRNA sense strand
aagacaguuuguacaauga

SEQ ID NO: 1652126 - RNA, 19 nt, Homo sapiens
  misc_RNA (1)...(19): siRNA sense strand
ggacaucuaccugcuugga

SEQ ID NO: 1652127 - RNA, 19 nt, Homo sapiens
  misc_RNA (1)...(19): siRNA sense strand
agaauuuggugaagcaucu

SEQ ID NO: 1652128 - RNA, 19 nt, Homo sapiens
  misc_RNA (1)...(19): siRNA sense strand
ccagguggauauuuaugag

SEQ ID NO: 1652129 - RNA, 19 nt, Homo sapiens
  misc_RNA (1)...(19): siRNA sense strand
acuacaagacuuaucguaa

SEQ ID NO: 1652130 - RNA, 19 nt, Homo sapiens
  misc_RNA (1)...(19): siRNA sense strand
ugagaagaauuuggugaag

SEQ ID NO: 1652131 - RNA, 19 nt, Homo sapiens
  misc_RNA (1)...(19): siRNA sense strand
cagauaucccaaaguggua

SEQ ID NO: 1652132 - RNA, 19 nt, Homo sapiens
  misc_RNA (1)...(19): siRNA sense strand
gguggauauuuaugaguuc

SEQ ID NO: 1652133 - RNA, 19 nt, Homo sapiens
  misc_RNA (1)...(19): siRNA sense strand
gcuaugggacauucuucaa

SEQ ID NO: 1652134 - RNA, 19 nt, Homo sapiens
  misc_RNA (1)...(19): siRNA sense strand
ggagcuaugggacauucuu

SEQ ID NO: 1652135 - RNA, 19 nt, Homo sapiens
  misc_RNA (1)...(19): siRNA sense strand
agguggauauuuaugaguu

SEQ ID NO: 1652136 - RNA, 19 nt, Homo sapiens
  misc_RNA (1)...(19): siRNA sense strand
ucaaccagggcacagauga

SEQ ID NO: 1652137 - RNA, 19 nt, Homo sapiens
  misc_RNA (1)...(19): siRNA sense strand
gaagagauucagccaaacc

SEQ ID NO: 1652138 - RNA, 19 nt, Homo sapiens
  misc_RNA (1)...(19): siRNA sense strand
gacaguuuguacaaugaag

SEQ ID NO: 1652139 - RNA, 19 nt, Homo sapiens
  misc_RNA (1)...(19): siRNA sense strand
gcuacuacuaccagaaguu

SEQ ID NO: 1652140 - RNA, 19 nt, Homo sapiens
  misc_RNA (1)...(19): siRNA sense strand
gaccagguggauauuuaug

SEQ ID NO: 1652141 - RNA, 19 nt, Homo sapiens
  misc_RNA (1)...(19): siRNA sense strand
ccggaccauucacugcuaa

SEQ ID NO: 1652142 - RNA, 19 nt, Homo sapiens
  misc_RNA (1)...(19): siRNA sense strand
accacccgcugcucuauga

SEQ ID NO: 1652143 - RNA, 19 nt, Homo sapiens
  misc_RNA (1)...(19): siRNA sense strand
ccgcugcucuaugagaaga

SEQ ID NO: 1652144 - RNA, 19 nt, Homo sapiens
  misc_RNA (1)...(19): siRNA sense strand
gacaucuaccugcuuggaa

SEQ ID NO: 1652145 - RNA, 19 nt, Homo sapiens
  misc_RNA (1)...(19): siRNA sense strand
gagcuaugggacauucuuc

SEQ ID NO: 1652146 - RNA, 19 nt, Homo sapiens
  misc_RNA (1)...(19): siRNA sense strand
guauaccacucagauaucc

SEQ ID NO: 1652147 - RNA, 19 nt, Homo sapiens
  misc_RNA (1)...(19): siRNA sense strand
ugaccagguggauauuuau

SEQ ID NO: 1652148 - RNA, 19 nt, Homo sapiens
  misc_RNA (1)...(19): siRNA sense strand
gcugcucuaugagaagaau

SEQ ID NO: 1652149 - RNA, 19 nt, Homo sapiens
  misc_RNA (1)...(19): siRNA sense strand
ugacgugugcuacuacuac

SEQ ID NO: 1652150 - RNA, 19 nt, Homo sapiens
  misc_RNA (1)...(19): siRNA sense strand
ccaaggugcugcagaaaua

SEQ ID NO: 1652151 - RNA, 19 nt, Homo sapiens
  misc_RNA (1)...(19): siRNA sense strand
gagcugcccugucaucuuu

SEQ ID NO: 1652152 - RNA, 19 nt, Homo sapiens
  misc_RNA (1)...(19): siRNA sense strand
ggagaacugugccgacauc

SEQ ID NO: 1652153 - RNA, 19 nt, Homo sapiens
  misc_RNA (1)...(19): siRNA sense strand
ggaagcagguccaguuugc

SEQ ID NO: 1652154 - RNA, 19 nt, Homo sapiens
  misc_RNA (1)...(19): siRNA sense strand
aaggagagcugcccuguca

SEQ ID NO: 1652155 - RNA, 19 nt, Homo sapiens
  misc_RNA (1)...(19): siRNA sense strand
ugagaaggauggagcugaa

SEQ ID NO: 1652156 - RNA, 19 nt, Homo sapiens
  misc_RNA (1)...(19): siRNA sense strand
ugaggcagauccuuguuga

SEQ ID NO: 1652157 - RNA, 19 nt, Homo sapiens
  misc_RNA (1)...(19): siRNA sense strand
ggccuguggucaagaauga

SEQ ID NO: 1652158 - RNA, 19 nt, Homo sapiens
  misc_RNA (1)...(19): siRNA sense strand
ggcacgagcuggcguuugu

SEQ ID NO: 1652159 - RNA, 19 nt, Homo sapiens
  misc_RNA (1)...(19): siRNA sense strand
gcacuacccgcucauguuc

SEQ ID NO: 1652160 - RNA, 19 nt, Homo sapiens
  misc_RNA (1)...(19): siRNA sense strand
gcccuggccugaauguuga

SEQ ID NO: 1652161 - RNA, 19 nt, Homo sapiens
  misc_RNA (1)...(19): siRNA sense strand
gaguacaugauucaguuua

SEQ ID NO: 1652162 - RNA, 19 nt, Homo sapiens
  misc_RNA (1)...(19): siRNA sense strand
ucacugauguggccagcuu

SEQ ID NO: 1652163 - RNA, 19 nt, Homo sapiens
  misc_RNA (1)...(19): siRNA sense strand
gagacgcagugaaggaaga

SEQ ID NO: 1652164 - RNA, 19 nt, Homo sapiens
  misc_RNA (1)...(19): siRNA sense strand
gaacugugccgacaucaac

SEQ ID NO: 1652165 - RNA, 19 nt, Homo sapiens
  misc_RNA (1)...(19): siRNA sense strand
gcgcaggccucugagauca

SEQ ID NO: 1652166 - RNA, 19 nt, Homo sapiens
  misc_RNA (1)...(19): siRNA sense strand
uggagaagguuccggaaga

SEQ ID NO: 1652167 - RNA, 19 nt, Homo sapiens
  misc_RNA (1)...(19): siRNA sense strand
ccacaucguauucugguuu

SEQ ID NO: 1652168 - RNA, 19 nt, Homo sapiens
  misc_RNA (1)...(19): siRNA sense strand
gcagcacggcuuccuggua

SEQ ID NO: 1652169 - RNA, 19 nt, Homo sapiens
  misc_RNA (1)...(19): siRNA sense strand
ggugaaggaguacaugauu

SEQ ID NO: 1652170 - RNA, 19 nt, Homo sapiens
  misc_RNA (1)...(19): siRNA sense strand
ucaaggcccugugugagaa

SEQ ID NO: 1652171 - RNA, 19 nt, Homo sapiens
  misc_RNA (1)...(19): siRNA sense strand
gugaaggaguacaugauuc

SEQ ID NO: 1652172 - RNA, 19 nt, Homo sapiens
  misc_RNA (1)...(19): siRNA sense strand
cacauaugcuggacacuca

SEQ ID NO: 1652173 - RNA, 19 nt, Homo sapiens
  misc_RNA (1)...(19): siRNA sense strand
aggaguacaugauucaguu

SEQ ID NO: 1652174 - RNA, 19 nt, Homo sapiens
  misc_RNA (1)...(19): siRNA sense strand
uggcugaggugguccguau

SEQ ID NO: 1652175 - RNA, 19 nt, Homo sapiens
  misc_RNA (1)...(19): siRNA sense strand
ggagaagguuccggaagag

SEQ ID NO: 1652176 - RNA, 19 nt, Homo sapiens
  misc_RNA (1)...(19): siRNA sense strand
cugaagagccugcgcuuug

SEQ ID NO: 1652177 - RNA, 19 nt, Homo sapiens
  misc_RNA (1)...(19): siRNA sense strand
ggaagcugcucaggaagag

SEQ ID NO: 1652178 - RNA, 19 nt, Homo sapiens
  misc_RNA (1)...(19): siRNA sense strand
ccacgaggacgcacauaug

SEQ ID NO: 1652179 - RNA, 19 nt, Homo sapiens
  misc_RNA (1)...(19): siRNA sense strand
gcucuucuggguccaaauu

SEQ ID NO: 1652180 - RNA, 19 nt, Homo sapiens
  misc_RNA (1)...(19): siRNA sense strand
cgagguggcugugcacauc

SEQ ID NO: 1652181 - RNA, 19 nt, Homo sapiens
  misc_RNA (1)...(19): siRNA sense strand
ggaguacaugauucaguuu

SEQ ID NO: 1652182 - RNA, 19 nt, Homo sapiens
  misc_RNA (1)...(19): siRNA sense strand
ggagagcugcccugucauc

SEQ ID NO: 1652183 - RNA, 19 nt, Homo sapiens
  misc_RNA (1)...(19): siRNA sense strand
ucagggaggcucuggagaa

SEQ ID NO: 1652184 - RNA, 19 nt, Homo sapiens
  misc_RNA (1)...(19): siRNA sense strand
acgaacagaugguggacuu

SEQ ID NO: 1652185 - RNA, 19 nt, Homo sapiens
  misc_RNA (1)...(19): siRNA sense strand
gcacccuguucaccguuga

SEQ ID NO: 1652186 - RNA, 19 nt, Homo sapiens
  misc_RNA (1)...(19): siRNA sense strand
gcacuugcccagagcuauc

SEQ ID NO: 1652187 - RNA, 19 nt, Homo sapiens
  misc_RNA (1)...(19): siRNA sense strand
ggacgaagggaaugagaac

SEQ ID NO: 1652188 - RNA, 19 nt, Homo sapiens
  misc_RNA (1)...(19): siRNA sense strand
uacaagagcaagcugaaga

SEQ ID NO: 1652189 - RNA, 19 nt, Homo sapiens
  misc_RNA (1)...(19): siRNA sense strand
cggacgacaugcacccauu

SEQ ID NO: 1652190 - RNA, 19 nt, Homo sapiens
  misc_RNA (1)...(19): siRNA sense strand
ccagacgggugcaccucuu

SEQ ID NO: 1652191 - RNA, 19 nt, Homo sapiens
  misc_RNA (1)...(19): siRNA sense strand
ccaacaagucgguggaugu

SEQ ID NO: 1652192 - RNA, 19 nt, Homo sapiens
  misc_RNA (1)...(19): siRNA sense strand
gugggaggcucggaaguuc

SEQ ID NO: 1652193 - RNA, 19 nt, Homo sapiens
  misc_RNA (1)...(19): siRNA sense strand
ggcguagccuccuggacuu

SEQ ID NO: 1652194 - RNA, 19 nt, Homo sapiens
  misc_RNA (1)...(19): siRNA sense strand
aggcagagccgggagauga

SEQ ID NO: 1652195 - RNA, 19 nt, Homo sapiens
  misc_RNA (1)...(19): siRNA sense strand
ggaagccgugcguggacua

SEQ ID NO: 1652196 - RNA, 19 nt, Homo sapiens
  misc_RNA (1)...(19): siRNA sense strand
ggacgacaugcacccauuc

SEQ ID NO: 1652197 - RNA, 19 nt, Homo sapiens
  misc_RNA (1)...(19): siRNA sense strand
gaaauaccacacggagcuu

SEQ ID NO: 1652198 - RNA, 19 nt, Homo sapiens
  misc_RNA (1)...(19): siRNA sense strand
ggaugcagaggcugacuuc

SEQ ID NO: 1652199 - RNA, 19 nt, Homo sapiens
  misc_RNA (1)...(19): siRNA sense strand
ggcacuacccgcucauguu

SEQ ID NO: 1652200 - RNA, 19 nt, Homo sapiens
  misc_RNA (1)...(19): siRNA sense strand
auucagggcccaccaggua

SEQ ID NO: 1652201 - RNA, 19 nt, Homo sapiens
  misc_RNA (1)...(19): siRNA sense strand
gcuaccagcaggagacuca

SEQ ID NO: 1652202 - RNA, 19 nt, Homo sapiens
  misc_RNA (1)...(19): siRNA sense strand
gcacccaggacuacgaaca

SEQ ID NO: 1652203 - RNA, 19 nt, Homo sapiens
  misc_RNA (1)...(19): siRNA sense strand
gguccgacugcuucuauga

SEQ ID NO: 1652204 - RNA, 19 nt, Homo sapiens
  misc_RNA (1)...(19): siRNA sense strand
ggccuggaguacagcuuga

SEQ ID NO: 1652205 - RNA, 19 nt, Homo sapiens
  misc_RNA (1)...(19): siRNA sense strand
gugcugggcgugcugaaga

SEQ ID NO: 1652206 - RNA, 19 nt, Homo sapiens
  misc_RNA (1)...(19): siRNA sense strand
gcgcgguugccgagaauga

SEQ ID NO: 1652207 - RNA, 19 nt, Homo sapiens
  misc_RNA (1)...(19): siRNA sense strand
guaccuggacgugguguug

SEQ ID NO: 1652208 - RNA, 19 nt, Homo sapiens
  misc_RNA (1)...(19): siRNA sense strand
acaucauggugaaggagua

SEQ ID NO: 1652209 - RNA, 19 nt, Homo sapiens
  misc_RNA (1)...(19): siRNA sense strand
cguauucugguuucauaaa

SEQ ID NO: 1652210 - RNA, 19 nt, Homo sapiens
  misc_RNA (1)...(19): siRNA sense strand
ggucaccacggacgacaug

SEQ ID NO: 1652211 - RNA, 19 nt, Homo sapiens
  misc_RNA (1)...(19): siRNA sense strand
ccaggacuacgaacagaug

SEQ ID NO: 1652212 - RNA, 19 nt, Homo sapiens
  misc_RNA (1)...(19): siRNA sense strand
cagggaggcucuggagaag

SEQ ID NO: 1652213 - RNA, 19 nt, Homo sapiens
  misc_RNA (1)...(19): siRNA sense strand
gcugaggugguccguauca

SEQ ID NO: 1652214 - RNA, 19 nt, Homo sapiens
  misc_RNA (1)...(19): siRNA sense strand
caacaagucgguggauguc

SEQ ID NO: 1652215 - RNA, 19 nt, Homo sapiens
  misc_RNA (1)...(19): siRNA sense strand
uugcgcaggucgucgagaa

SEQ ID NO: 1652216 - RNA, 19 nt, Homo sapiens
  misc_RNA (1)...(19): siRNA sense strand
acaacgcgcaggccucuga

SEQ ID NO: 1652217 - RNA, 19 nt, Homo sapiens
  misc_RNA (1)...(19): siRNA sense strand
ucuguggcguucuacaaga

SEQ ID NO: 1652218 - RNA, 19 nt, Homo sapiens
  misc_RNA (1)...(19): siRNA sense strand
ccuccgugguccagucuga

SEQ ID NO: 1652219 - RNA, 19 nt, Homo sapiens
  misc_RNA (1)...(19): siRNA sense strand
ugaagagccugcgcuuugc

SEQ ID NO: 1652220 - RNA, 19 nt, Homo sapiens
  misc_RNA (1)...(19): siRNA sense strand
agaaugagcggcugcaaaa

SEQ ID NO: 1652221 - RNA, 19 nt, Homo sapiens
  misc_RNA (1)...(19): siRNA sense strand
aagaaugagcggcugcaaa

SEQ ID NO: 1652222 - RNA, 19 nt, Homo sapiens
  misc_RNA (1)...(19): siRNA sense strand
agacggcccuguggaagca

SEQ ID NO: 1652223 - RNA, 19 nt, Homo sapiens
  misc_RNA (1)...(19): siRNA sense strand
ucacgcugcaguacuguug

SEQ ID NO: 1652224 - RNA, 19 nt, Homo sapiens
  misc_RNA (1)...(19): siRNA sense strand
gaggugcaucugugucguu

SEQ ID NO: 1652225 - RNA, 19 nt, Homo sapiens
  misc_RNA (1)...(19): siRNA sense strand
ccacggacgaagggaauga

SEQ ID NO: 1652226 - RNA, 19 nt, Homo sapiens
  misc_RNA (1)...(19): siRNA sense strand
cacaucguauucugguuuc

SEQ ID NO: 1652227 - RNA, 19 nt, Homo sapiens
  misc_RNA (1)...(19): siRNA sense strand
guacagggaagacgaucgu

SEQ ID NO: 1652228 - RNA, 19 nt, Homo sapiens
  misc_RNA (1)...(19): siRNA sense strand
gcgguccgacugcuucuau

SEQ ID NO: 1652229 - RNA, 19 nt, Homo sapiens
  misc_RNA (1)...(19): siRNA sense strand
gaagagccugcgcuuugca

SEQ ID NO: 1652230 - RNA, 19 nt, Homo sapiens
  misc_RNA (1)...(19): siRNA sense strand
acaucuacauccgggagua

SEQ ID NO: 1652231 - RNA, 19 nt, Homo sapiens
  misc_RNA (1)...(19): siRNA sense strand
caucgcagguccccaucua

SEQ ID NO: 1652232 - RNA, 19 nt, Homo sapiens
  misc_RNA (1)...(19): siRNA sense strand
caggagacgcagugaagga

SEQ ID NO: 1652233 - RNA, 19 nt, Homo sapiens
  misc_RNA (1)...(19): siRNA sense strand
gcugaagagccugcgcuuu

SEQ ID NO: 1652234 - RNA, 19 nt, Homo sapiens
  misc_RNA (1)...(19): siRNA sense strand
caacccagaccgggacaug

SEQ ID NO: 1652235 - RNA, 19 nt, Homo sapiens
  misc_RNA (1)...(19): siRNA sense strand
aucguauucugguuucaua

SEQ ID NO: 1652236 - RNA, 19 nt, Homo sapiens
  misc_RNA (1)...(19): siRNA sense strand
gugcaucugugucguuucc

SEQ ID NO: 1652237 - RNA, 19 nt, Homo sapiens
  misc_RNA (1)...(19): siRNA sense strand
cgcugcagguggacuggua

SEQ ID NO: 1652238 - RNA, 19 nt, Homo sapiens
  misc_RNA (1)...(19): siRNA sense strand
gaaggcagagccgggagau

SEQ ID NO: 1652239 - RNA, 19 nt, Homo sapiens
  misc_RNA (1)...(19): siRNA sense strand
ccacuccucuccgugugau

SEQ ID NO: 1652240 - RNA, 19 nt, Homo sapiens
  misc_RNA (1)...(19): siRNA sense strand
gaaguggacuccucagaua

SEQ ID NO: 1652241 - RNA, 19 nt, Homo sapiens
  misc_RNA (1)...(19): siRNA sense strand
ugaaacaucuguacaagaa

SEQ ID NO: 1652242 - RNA, 19 nt, Homo sapiens
  misc_RNA (1)...(19): siRNA sense strand
gaaaugccaucaaggauca

SEQ ID NO: 1652243 - RNA, 19 nt, Homo sapiens
  misc_RNA (1)...(19): siRNA sense strand
caaacuccaugacagauuu

SEQ ID NO: 1652244 - RNA, 19 nt, Homo sapiens
  misc_RNA (1)...(19): siRNA sense strand
acagaugucuucuugagua

SEQ ID NO: 1652245 - RNA, 19 nt, Homo sapiens
  misc_RNA (1)...(19): siRNA sense strand
gaaacucucaucaauggua

SEQ ID NO: 1652246 - RNA, 19 nt, Homo sapiens
  misc_RNA (1)...(19): siRNA sense strand
ugaaaggacuccagagaga

SEQ ID NO: 1652247 - RNA, 19 nt, Homo sapiens
  misc_RNA (1)...(19): siRNA sense strand
gaggguggcuuaguggaua

SEQ ID NO: 1652248 - RNA, 19 nt, Homo sapiens
  misc_RNA (1)...(19): siRNA sense strand
ggaauuugucucccuguua

SEQ ID NO: 1652249 - RNA, 19 nt, Homo sapiens
  misc_RNA (1)...(19): siRNA sense strand
cagaaacucucaucaaugg

SEQ ID NO: 1652250 - RNA, 19 nt, Homo sapiens
  misc_RNA (1)...(19): siRNA sense strand
gaauuugucucccuguuag

SEQ ID NO: 1652251 - RNA, 19 nt, Homo sapiens
  misc_RNA (1)...(19): siRNA sense strand
gcagaaauuguuaacgaua

SEQ ID NO: 1652252 - RNA, 19 nt, Homo sapiens
  misc_RNA (1)...(19): siRNA sense strand
ggaaggaaggccagacuaa

SEQ ID NO: 1652253 - RNA, 19 nt, Homo sapiens
  misc_RNA (1)...(19): siRNA sense strand
gcacagagaagaccagugu

SEQ ID NO: 1652254 - RNA, 19 nt, Homo sapiens
  misc_RNA (1)...(19): siRNA sense strand
gaaucggugucccggcuua

SEQ ID NO: 1652255 - RNA, 19 nt, Homo sapiens
  misc_RNA (1)...(19): siRNA sense strand
caggucagcuccuccagua

SEQ ID NO: 1652256 - RNA, 19 nt, Homo sapiens
  misc_RNA (1)...(19): siRNA sense strand
ggacaaaugccaaaugagu

SEQ ID NO: 1652257 - RNA, 19 nt, Homo sapiens
  misc_RNA (1)...(19): siRNA sense strand
cacagaaacucucaucaau

SEQ ID NO: 1652258 - RNA, 19 nt, Homo sapiens
  misc_RNA (1)...(19): siRNA sense strand
aaacaucuguacaagaaga

SEQ ID NO: 1652259 - RNA, 19 nt, Homo sapiens
  misc_RNA (1)...(19): siRNA sense strand
caggguaacuucccaacaa

SEQ ID NO: 1652260 - RNA, 19 nt, Homo sapiens
  misc_RNA (1)...(19): siRNA sense strand
gaucucaauuccuguaauc

SEQ ID NO: 1652261 - RNA, 19 nt, Homo sapiens
  misc_RNA (1)...(19): siRNA sense strand
aaucugaccuagaggcuaa

SEQ ID NO: 1652262 - RNA, 19 nt, Homo sapiens
  misc_RNA (1)...(19): siRNA sense strand
aaggacaaaugccaaauga

SEQ ID NO: 1652263 - RNA, 19 nt, Homo sapiens
  misc_RNA (1)...(19): siRNA sense strand
gaaggacaaaugccaaaug

SEQ ID NO: 1652264 - RNA, 19 nt, Homo sapiens
  misc_RNA (1)...(19): siRNA sense strand
caauagacaaagacagaua

SEQ ID NO: 1652265 - RNA, 19 nt, Homo sapiens
  misc_RNA (1)...(19): siRNA sense strand
ccacagaaacucucaucaa

SEQ ID NO: 1652266 - RNA, 19 nt, Homo sapiens
  misc_RNA (1)...(19): siRNA sense strand
gauacaggcuccgagucua

SEQ ID NO: 1652267 - RNA, 19 nt, Homo sapiens
  misc_RNA (1)...(19): siRNA sense strand
gcagaucucaauuccugua

SEQ ID NO: 1652268 - RNA, 19 nt, Homo sapiens
  misc_RNA (1)...(19): siRNA sense strand
cgaaggcaauggaagugaa

SEQ ID NO: 1652269 - RNA, 19 nt, Homo sapiens
  misc_RNA (1)...(19): siRNA sense strand
ccucuaccaucaaauaaug

SEQ ID NO: 1652270 - RNA, 19 nt, Homo sapiens
  misc_RNA (1)...(19): siRNA sense strand
cagcugagcagaaugaaga

SEQ ID NO: 1652271 - RNA, 19 nt, Homo sapiens
  misc_RNA (1)...(19): siRNA sense strand
ggaaguggacuccucagau

SEQ ID NO: 1652272 - RNA, 19 nt, Homo sapiens
  misc_RNA (1)...(19): siRNA sense strand
gcagcugcccucaauguga

SEQ ID NO: 1652273 - RNA, 19 nt, Homo sapiens
  misc_RNA (1)...(19): siRNA sense strand
caucaaggaucacaguucu

SEQ ID NO: 1652274 - RNA, 19 nt, Homo sapiens
  misc_RNA (1)...(19): siRNA sense strand
gagaagaccaguguaaagu

SEQ ID NO: 1652275 - RNA, 19 nt, Homo sapiens
  misc_RNA (1)...(19): siRNA sense strand
gauagugagguagcuguua

SEQ ID NO: 1652276 - RNA, 19 nt, Homo sapiens
  misc_RNA (1)...(19): siRNA sense strand
ucucaucaaugguaaagga

SEQ ID NO: 1652277 - RNA, 19 nt, Homo sapiens
  misc_RNA (1)...(19): siRNA sense strand
gcacucagccugccaagac

SEQ ID NO: 1652278 - RNA, 19 nt, Homo sapiens
  misc_RNA (1)...(19): siRNA sense strand
aaacucucaucaaugguaa

SEQ ID NO: 1652279 - RNA, 19 nt, Homo sapiens
  misc_RNA (1)...(19): siRNA sense strand
gaaggcaauggaagugaaa

SEQ ID NO: 1652280 - RNA, 19 nt, Homo sapiens
  misc_RNA (1)...(19): siRNA sense strand
ggcaauagacaaagacaga

SEQ ID NO: 1652281 - RNA, 19 nt, Homo sapiens
  misc_RNA (1)...(19): siRNA sense strand
cugcagaaauuguuaacga

SEQ ID NO: 1652282 - RNA, 19 nt, Homo sapiens
  misc_RNA (1)...(19): siRNA sense strand
cagaugucuucuugaguaa

SEQ ID NO: 1652283 - RNA, 19 nt, Homo sapiens
  misc_RNA (1)...(19): siRNA sense strand
ggaucacaguucuucauca

SEQ ID NO: 1652284 - RNA, 19 nt, Homo sapiens
  misc_RNA (1)...(19): siRNA sense strand
cauuaauacuuccaagaug

SEQ ID NO: 1652285 - RNA, 19 nt, Homo sapiens
  misc_RNA (1)...(19): siRNA sense strand
ggaaauuagauccuguuau

SEQ ID NO: 1652286 - RNA, 19 nt, Homo sapiens
  misc_RNA (1)...(19): siRNA sense strand
caaagucaagaccauacua

SEQ ID NO: 1652287 - RNA, 19 nt, Homo sapiens
  misc_RNA (1)...(19): siRNA sense strand
cagccucuaccaucaaaua

SEQ ID NO: 1652288 - RNA, 19 nt, Homo sapiens
  misc_RNA (1)...(19): siRNA sense strand
guaacuucccaacaagaua

SEQ ID NO: 1652289 - RNA, 19 nt, Homo sapiens
  misc_RNA (1)...(19): siRNA sense strand
acagagaagaccaguguaa

SEQ ID NO: 1652290 - RNA, 19 nt, Homo sapiens
  misc_RNA (1)...(19): siRNA sense strand
gggaaauuagauccuguua

SEQ ID NO: 1652291 - RNA, 19 nt, Homo sapiens
  misc_RNA (1)...(19): siRNA sense strand
gggaacggguacaaagcaa

SEQ ID NO: 1652292 - RNA, 19 nt, Homo sapiens
  misc_RNA (1)...(19): siRNA sense strand
ucagugcccuucagcaaca

SEQ ID NO: 1652293 - RNA, 19 nt, Homo sapiens
  misc_RNA (1)...(19): siRNA sense strand
uaccacaacuucugagagu

SEQ ID NO: 1652294 - RNA, 19 nt, Homo sapiens
  misc_RNA (1)...(19): siRNA sense strand
ucagggcaauagacaaaga

SEQ ID NO: 1652295 - RNA, 19 nt, Homo sapiens
  misc_RNA (1)...(19): siRNA sense strand
cagaaauuguuaacgauac

SEQ ID NO: 1652296 - RNA, 19 nt, Homo sapiens
  misc_RNA (1)...(19): siRNA sense strand
gaucacaguucuucaucac

SEQ ID NO: 1652297 - RNA, 19 nt, Homo sapiens
  misc_RNA (1)...(19): siRNA sense strand
gcuguuacucucaucgaua

SEQ ID NO: 1652298 - RNA, 19 nt, Homo sapiens
  misc_RNA (1)...(19): siRNA sense strand
gaacggguacaaagcaagu

SEQ ID NO: 1652299 - RNA, 19 nt, Homo sapiens
  misc_RNA (1)...(19): siRNA sense strand
cuaugcaugucuucauuga

SEQ ID NO: 1652300 - RNA, 19 nt, Homo sapiens
  misc_RNA (1)...(19): siRNA sense strand
gagucuacaugagcccaua

SEQ ID NO: 1652301 - RNA, 19 nt, Homo sapiens
  misc_RNA (1)...(19): siRNA sense strand
ggaaaccacgaccaaguca

SEQ ID NO: 1652302 - RNA, 19 nt, Homo sapiens
  misc_RNA (1)...(19): siRNA sense strand
augcaugucuucauugaug

SEQ ID NO: 1652303 - RNA, 19 nt, Homo sapiens
  misc_RNA (1)...(19): siRNA sense strand
aaacaaugccaacuuccaa

SEQ ID NO: 1652304 - RNA, 19 nt, Homo sapiens
  misc_RNA (1)...(19): siRNA sense strand
caucaaugguaaaggaaag

SEQ ID NO: 1652305 - RNA, 19 nt, Homo sapiens
  misc_RNA (1)...(19): siRNA sense strand
aaccagauuugcaaaguca

SEQ ID NO: 1652306 - RNA, 19 nt, Homo sapiens
  misc_RNA (1)...(19): siRNA sense strand
uguuaacgauacagagaaa

SEQ ID NO: 1652307 - RNA, 19 nt, Homo sapiens
  misc_RNA (1)...(19): siRNA sense strand
agauaucuguggaugcuau

SEQ ID NO: 1652308 - RNA, 19 nt, Homo sapiens
  misc_RNA (1)...(19): siRNA sense strand
cagagaagaccaguguaaa

SEQ ID NO: 1652309 - RNA, 19 nt, Homo sapiens
  misc_RNA (1)...(19): siRNA sense strand
ccacaacuucugagaguca

SEQ ID NO: 1652310 - RNA, 19 nt, Homo sapiens
  misc_RNA (1)...(19): siRNA sense strand
ccaaacuccaugacagauu

SEQ ID NO: 1652311 - RNA, 19 nt, Homo sapiens
  misc_RNA (1)...(19): siRNA sense strand
ccauuaauacuuccaagau

SEQ ID NO: 1652312 - RNA, 19 nt, Homo sapiens
  misc_RNA (1)...(19): siRNA sense strand
gaugucuucuugaguaaaa

SEQ ID NO: 1652313 - RNA, 19 nt, Homo sapiens
  misc_RNA (1)...(19): siRNA sense strand
uaagggaacggguacaaag

SEQ ID NO: 1652314 - RNA, 19 nt, Homo sapiens
  misc_RNA (1)...(19): siRNA sense strand
caucaaauaaugacugucu

SEQ ID NO: 1652315 - RNA, 19 nt, Homo sapiens
  misc_RNA (1)...(19): siRNA sense strand
uaacuucccaacaagauag

SEQ ID NO: 1652316 - RNA, 19 nt, Homo sapiens
  misc_RNA (1)...(19): siRNA sense strand
ugagcagaaugaagaaagu

SEQ ID NO: 1652317 - RNA, 19 nt, Homo sapiens
  misc_RNA (1)...(19): siRNA sense strand
agacgaggguauccaccaa

SEQ ID NO: 1652318 - RNA, 19 nt, Homo sapiens
  misc_RNA (1)...(19): siRNA sense strand
uccagaaccugucaguugu

SEQ ID NO: 1652319 - RNA, 19 nt, Homo sapiens
  misc_RNA (1)...(19): siRNA sense strand
agauaguucugucuugcaa

SEQ ID NO: 1652320 - RNA, 19 nt, Homo sapiens
  misc_RNA (1)...(19): siRNA sense strand
gcaaggaaaaccagauuug

SEQ ID NO: 1652321 - RNA, 19 nt, Homo sapiens
  misc_RNA (1)...(19): siRNA sense strand
ccuagaggcuaaggaagga

SEQ ID NO: 1652322 - RNA, 19 nt, Homo sapiens
  misc_RNA (1)...(19): siRNA sense strand
ugaccuagaggcuaaggaa

SEQ ID NO: 1652323 - RNA, 19 nt, Homo sapiens
  misc_RNA (1)...(19): siRNA sense strand
uuccaaaucugaccuagag

SEQ ID NO: 1652324 - RNA, 19 nt, Homo sapiens
  misc_RNA (1)...(19): siRNA sense strand
gggaaggaaggccagacua

SEQ ID NO: 1652325 - RNA, 19 nt, Homo sapiens
  misc_RNA (1)...(19): siRNA sense strand
ucucaucgauacuucucaa

SEQ ID NO: 1652326 - RNA, 19 nt, Homo sapiens
  misc_RNA (1)...(19): siRNA sense strand
gaacauggggaaauuagau

SEQ ID NO: 1652327 - RNA, 19 nt, Homo sapiens
  misc_RNA (1)...(19): siRNA sense strand
aaaccagauuugcaaaguc

SEQ ID NO: 1652328 - RNA, 19 nt, Homo sapiens
  misc_RNA (1)...(19): siRNA sense strand
ccaguggacacaguucuaa

SEQ ID NO: 1652329 - RNA, 19 nt, Homo sapiens
  misc_RNA (1)...(19): siRNA sense strand
acagaaacucucaucaaug

SEQ ID NO: 1652330 - RNA, 19 nt, Homo sapiens
  misc_RNA (1)...(19): siRNA sense strand
ucaaggaucacaguucuuc

SEQ ID NO: 1652331 - RNA, 19 nt, Homo sapiens
  misc_RNA (1)...(19): siRNA sense strand
gggaaaugccaucaaggau

SEQ ID NO: 1652332 - RNA, 19 nt, Homo sapiens
  misc_RNA (1)...(19): siRNA sense strand
cagauccgaggguggcuua

SEQ ID NO: 1652333 - RNA, 19 nt, Homo sapiens
  misc_RNA (1)...(19): siRNA sense strand
uacagccucuaccaucaaa

SEQ ID NO: 1652334 - RNA, 19 nt, Homo sapiens
  misc_RNA (1)...(19): siRNA sense strand
gguaacuucccaacaagau

SEQ ID NO: 1652335 - RNA, 19 nt, Homo sapiens
  misc_RNA (1)...(19): siRNA sense strand
acacaguucuaagcaagga

SEQ ID NO: 1652336 - RNA, 19 nt, Homo sapiens
  misc_RNA (1)...(19): siRNA sense strand
gaaggaaggccagacuaac

SEQ ID NO: 1652337 - RNA, 19 nt, Homo sapiens
  misc_RNA (1)...(19): siRNA sense strand
ggaggagccagcagacaca

SEQ ID NO: 1652338 - RNA, 19 nt, Homo sapiens
  misc_RNA (1)...(19): siRNA sense strand
caacaagauaguucugucu

SEQ ID NO: 1652339 - RNA, 19 nt, Homo sapiens
  misc_RNA (1)...(19): siRNA sense strand
uaaaaccaguugccacaga

SEQ ID NO: 1652340 - RNA, 19 nt, Homo sapiens
  misc_RNA (1)...(19): siRNA sense strand
gaaguggacuccucagaua

SEQ ID NO: 1652341 - RNA, 19 nt, Homo sapiens
  misc_RNA (1)...(19): siRNA sense strand
ugaaacaucuguacaagaa

SEQ ID NO: 1652342 - RNA, 19 nt, Homo sapiens
  misc_RNA (1)...(19): siRNA sense strand
gaaaugccaucaaggauca

SEQ ID NO: 1652343 - RNA, 19 nt, Homo sapiens
  misc_RNA (1)...(19): siRNA sense strand
caaacuccaugacagauuu

SEQ ID NO: 1652344 - RNA, 19 nt, Homo sapiens
  misc_RNA (1)...(19): siRNA sense strand
acagaugucuucuugagua

SEQ ID NO: 1652345 - RNA, 19 nt, Homo sapiens
  misc_RNA (1)...(19): siRNA sense strand
gaaacucucaucaauggua

SEQ ID NO: 1652346 - RNA, 19 nt, Homo sapiens
  misc_RNA (1)...(19): siRNA sense strand
ugaaaggacuccagagaga

SEQ ID NO: 1652347 - RNA, 19 nt, Homo sapiens
  misc_RNA (1)...(19): siRNA sense strand
gaggguggcuuaguggaua

SEQ ID NO: 1652348 - RNA, 19 nt, Homo sapiens
  misc_RNA (1)...(19): siRNA sense strand
ggaauuugucucccuguua

SEQ ID NO: 1652349 - RNA, 19 nt, Homo sapiens
  misc_RNA (1)...(19): siRNA sense strand
cagaaacucucaucaaugg

SEQ ID NO: 1652350 - RNA, 19 nt, Homo sapiens
  misc_RNA (1)...(19): siRNA sense strand
gaauuugucucccuguuag

SEQ ID NO: 1652351 - RNA, 19 nt, Homo sapiens
  misc_RNA (1)...(19): siRNA sense strand
gcagaaauuguuaacgaua

SEQ ID NO: 1652352 - RNA, 19 nt, Homo sapiens
  misc_RNA (1)...(19): siRNA sense strand
ggaaggaaggccagacuaa

SEQ ID NO: 1652353 - RNA, 19 nt, Homo sapiens
  misc_RNA (1)...(19): siRNA sense strand
gcacagagaagaccagugu

SEQ ID NO: 1652354 - RNA, 19 nt, Homo sapiens
  misc_RNA (1)...(19): siRNA sense strand
gaaucggugucccggcuua

SEQ ID NO: 1652355 - RNA, 19 nt, Homo sapiens
  misc_RNA (1)...(19): siRNA sense strand
caggucagcuccuccagua

SEQ ID NO: 1652356 - RNA, 19 nt, Homo sapiens
  misc_RNA (1)...(19): siRNA sense strand
ggacaaaugccaaaugagu

SEQ ID NO: 1652357 - RNA, 19 nt, Homo sapiens
  misc_RNA (1)...(19): siRNA sense strand
cacagaaacucucaucaau

SEQ ID NO: 1652358 - RNA, 19 nt, Homo sapiens
  misc_RNA (1)...(19): siRNA sense strand
aaacaucuguacaagaaga

SEQ ID NO: 1652359 - RNA, 19 nt, Homo sapiens
  misc_RNA (1)...(19): siRNA sense strand
caggguaacuucccaacaa

SEQ ID NO: 1652360 - RNA, 19 nt, Homo sapiens
  misc_RNA (1)...(19): siRNA sense strand
gaucucaauuccuguaauc

SEQ ID NO: 1652361 - RNA, 19 nt, Homo sapiens
  misc_RNA (1)...(19): siRNA sense strand
aaucugaccuagaggcuaa

SEQ ID NO: 1652362 - RNA, 19 nt, Homo sapiens
  misc_RNA (1)...(19): siRNA sense strand
aaggacaaaugccaaauga

SEQ ID NO: 1652363 - RNA, 19 nt, Homo sapiens
  misc_RNA (1)...(19): siRNA sense strand
gaaggacaaaugccaaaug

SEQ ID NO: 1652364 - RNA, 19 nt, Homo sapiens
  misc_RNA (1)...(19): siRNA sense strand
caauagacaaagacagaua

SEQ ID NO: 1652365 - RNA, 19 nt, Homo sapiens
  misc_RNA (1)...(19): siRNA sense strand
ccacagaaacucucaucaa

SEQ ID NO: 1652366 - RNA, 19 nt, Homo sapiens
  misc_RNA (1)...(19): siRNA sense strand
gauacaggcuccgagucua

SEQ ID NO: 1652367 - RNA, 19 nt, Homo sapiens
  misc_RNA (1)...(19): siRNA sense strand
gcagaucucaauuccugua

SEQ ID NO: 1652368 - RNA, 19 nt, Homo sapiens
  misc_RNA (1)...(19): siRNA sense strand
cgaaggcaauggaagugaa

SEQ ID NO: 1652369 - RNA, 19 nt, Homo sapiens
  misc_RNA (1)...(19): siRNA sense strand
ccucuaccaucaaauaaug

SEQ ID NO: 1652370 - RNA, 19 nt, Homo sapiens
  misc_RNA (1)...(19): siRNA sense strand
cagcugagcagaaugaaga

SEQ ID NO: 1652371 - RNA, 19 nt, Homo sapiens
  misc_RNA (1)...(19): siRNA sense strand
ggaaguggacuccucagau

SEQ ID NO: 1652372 - RNA, 19 nt, Homo sapiens
  misc_RNA (1)...(19): siRNA sense strand
gcagcugcccucaauguga

SEQ ID NO: 1652373 - RNA, 19 nt, Homo sapiens
  misc_RNA (1)...(19): siRNA sense strand
caucaaggaucacaguucu

SEQ ID NO: 1652374 - RNA, 19 nt, Homo sapiens
  misc_RNA (1)...(19): siRNA sense strand
gagaagaccaguguaaagu

SEQ ID NO: 1652375 - RNA, 19 nt, Homo sapiens
  misc_RNA (1)...(19): siRNA sense strand
gauagugagguagcuguua

SEQ ID NO: 1652376 - RNA, 19 nt, Homo sapiens
  misc_RNA (1)...(19): siRNA sense strand
ucucaucaaugguaaagga

SEQ ID NO: 1652377 - RNA, 19 nt, Homo sapiens
  misc_RNA (1)...(19): siRNA sense strand
gcacucagccugccaagac

SEQ ID NO: 1652378 - RNA, 19 nt, Homo sapiens
  misc_RNA (1)...(19): siRNA sense strand
aaacucucaucaaugguaa

SEQ ID NO: 1652379 - RNA, 19 nt, Homo sapiens
  misc_RNA (1)...(19): siRNA sense strand
gaaggcaauggaagugaaa

SEQ ID NO: 1652380 - RNA, 19 nt, Homo sapiens
  misc_RNA (1)...(19): siRNA sense strand
ggcaauagacaaagacaga

SEQ ID NO: 1652381 - RNA, 19 nt, Homo sapiens
  misc_RNA (1)...(19): siRNA sense strand
cugcagaaauuguuaacga

SEQ ID NO: 1652382 - RNA, 19 nt, Homo sapiens
  misc_RNA (1)...(19): siRNA sense strand
cagaugucuucuugaguaa

SEQ ID NO: 1652383 - RNA, 19 nt, Homo sapiens
  misc_RNA (1)...(19): siRNA sense strand
ggaucacaguucuucauca

SEQ ID NO: 1652384 - RNA, 19 nt, Homo sapiens
  misc_RNA (1)...(19): siRNA sense strand
cauuaauacuuccaagaug

SEQ ID NO: 1652385 - RNA, 19 nt, Homo sapiens
  misc_RNA (1)...(19): siRNA sense strand
ggaaauuagauccuguuau

SEQ ID NO: 1652386 - RNA, 19 nt, Homo sapiens
  misc_RNA (1)...(19): siRNA sense strand
caaagucaagaccauacua

SEQ ID NO: 1652387 - RNA, 19 nt, Homo sapiens
  misc_RNA (1)...(19): siRNA sense strand
cagccucuaccaucaaaua

SEQ ID NO: 1652388 - RNA, 19 nt, Homo sapiens
  misc_RNA (1)...(19): siRNA sense strand
guaacuucccaacaagaua

SEQ ID NO: 1652389 - RNA, 19 nt, Homo sapiens
  misc_RNA (1)...(19): siRNA sense strand
acagagaagaccaguguaa

SEQ ID NO: 1652390 - RNA, 19 nt, Homo sapiens
  misc_RNA (1)...(19): siRNA sense strand
gggaaauuagauccuguua

SEQ ID NO: 1652391 - RNA, 19 nt, Homo sapiens
  misc_RNA (1)...(19): siRNA sense strand
gggaacggguacaaagcaa

SEQ ID NO: 1652392 - RNA, 19 nt, Homo sapiens
  misc_RNA (1)...(19): siRNA sense strand
ucagugcccuucagcaaca

SEQ ID NO: 1652393 - RNA, 19 nt, Homo sapiens
  misc_RNA (1)...(19): siRNA sense strand
uaccacaacuucugagagu

SEQ ID NO: 1652394 - RNA, 19 nt, Homo sapiens
  misc_RNA (1)...(19): siRNA sense strand
ucagggcaauagacaaaga

SEQ ID NO: 1652395 - RNA, 19 nt, Homo sapiens
  misc_RNA (1)...(19): siRNA sense strand
cagaaauuguuaacgauac

SEQ ID NO: 1652396 - RNA, 19 nt, Homo sapiens
  misc_RNA (1)...(19): siRNA sense strand
gaucacaguucuucaucac

SEQ ID NO: 1652397 - RNA, 19 nt, Homo sapiens
  misc_RNA (1)...(19): siRNA sense strand
gcuguuacucucaucgaua

SEQ ID NO: 1652398 - RNA, 19 nt, Homo sapiens
  misc_RNA (1)...(19): siRNA sense strand
gaacggguacaaagcaagu

SEQ ID NO: 1652399 - RNA, 19 nt, Homo sapiens
  misc_RNA (1)...(19): siRNA sense strand
cuaugcaugucuucauuga

SEQ ID NO: 1652400 - RNA, 19 nt, Homo sapiens
  misc_RNA (1)...(19): siRNA sense strand
gagucuacaugagcccaua

SEQ ID NO: 1652401 - RNA, 19 nt, Homo sapiens
  misc_RNA (1)...(19): siRNA sense strand
ggaaaccacgaccaaguca

SEQ ID NO: 1652402 - RNA, 19 nt, Homo sapiens
  misc_RNA (1)...(19): siRNA sense strand
augcaugucuucauugaug

SEQ ID NO: 1652403 - RNA, 19 nt, Homo sapiens
  misc_RNA (1)...(19): siRNA sense strand
aaacaaugccaacuuccaa

SEQ ID NO: 1652404 - RNA, 19 nt, Homo sapiens
  misc_RNA (1)...(19): siRNA sense strand
caucaaugguaaaggaaag

SEQ ID NO: 1652405 - RNA, 19 nt, Homo sapiens
  misc_RNA (1)...(19): siRNA sense strand
aaccagauuugcaaaguca

SEQ ID NO: 1652406 - RNA, 19 nt, Homo sapiens
  misc_RNA (1)...(19): siRNA sense strand
uguuaacgauacagagaaa

SEQ ID NO: 1652407 - RNA, 19 nt, Homo sapiens
  misc_RNA (1)...(19): siRNA sense strand
agauaucuguggaugcuau

SEQ ID NO: 1652408 - RNA, 19 nt, Homo sapiens
  misc_RNA (1)...(19): siRNA sense strand
cagagaagaccaguguaaa

SEQ ID NO: 1652409 - RNA, 19 nt, Homo sapiens
  misc_RNA (1)...(19): siRNA sense strand
ccacaacuucugagaguca

SEQ ID NO: 1652410 - RNA, 19 nt, Homo sapiens
  misc_RNA (1)...(19): siRNA sense strand
ccaaacuccaugacagauu

SEQ ID NO: 1652411 - RNA, 19 nt, Homo sapiens
  misc_RNA (1)...(19): siRNA sense strand
ccauuaauacuuccaagau

SEQ ID NO: 1652412 - RNA, 19 nt, Homo sapiens
  misc_RNA (1)...(19): siRNA sense strand
gaugucuucuugaguaaaa

SEQ ID NO: 1652413 - RNA, 19 nt, Homo sapiens
  misc_RNA (1)...(19): siRNA sense strand
uaagggaacggguacaaag

SEQ ID NO: 1652414 - RNA, 19 nt, Homo sapiens
  misc_RNA (1)...(19): siRNA sense strand
caucaaauaaugacugucu

SEQ ID NO: 1652415 - RNA, 19 nt, Homo sapiens
  misc_RNA (1)...(19): siRNA sense strand
uaacuucccaacaagauag

SEQ ID NO: 1652416 - RNA, 19 nt, Homo sapiens
  misc_RNA (1)...(19): siRNA sense strand
ugagcagaaugaagaaagu

SEQ ID NO: 1652417 - RNA, 19 nt, Homo sapiens
  misc_RNA (1)...(19): siRNA sense strand
agacgaggguauccaccaa

SEQ ID NO: 1652418 - RNA, 19 nt, Homo sapiens
  misc_RNA (1)...(19): siRNA sense strand
uccagaaccugucaguugu

SEQ ID NO: 1652419 - RNA, 19 nt, Homo sapiens
  misc_RNA (1)...(19): siRNA sense strand
agauaguucugucuugcaa

SEQ ID NO: 1652420 - RNA, 19 nt, Homo sapiens
  misc_RNA (1)...(19): siRNA sense strand
gcaaggaaaaccagauuug

SEQ ID NO: 1652421 - RNA, 19 nt, Homo sapiens
  misc_RNA (1)...(19): siRNA sense strand
ccuagaggcuaaggaagga

SEQ ID NO: 1652422 - RNA, 19 nt, Homo sapiens
  misc_RNA (1)...(19): siRNA sense strand
ugaccuagaggcuaaggaa

SEQ ID NO: 1652423 - RNA, 19 nt, Homo sapiens
  misc_RNA (1)...(19): siRNA sense strand
uuccaaaucugaccuagag

SEQ ID NO: 1652424 - RNA, 19 nt, Homo sapiens
  misc_RNA (1)...(19): siRNA sense strand
gggaaggaaggccagacua

SEQ ID NO: 1652425 - RNA, 19 nt, Homo sapiens
  misc_RNA (1)...(19): siRNA sense strand
ucucaucgauacuucucaa

SEQ ID NO: 1652426 - RNA, 19 nt, Homo sapiens
  misc_RNA (1)...(19): siRNA sense strand
gaacauggggaaauuagau

SEQ ID NO: 1652427 - RNA, 19 nt, Homo sapiens
  misc_RNA (1)...(19): siRNA sense strand
aaaccagauuugcaaaguc

SEQ ID NO: 1652428 - RNA, 19 nt, Homo sapiens
  misc_RNA (1)...(19): siRNA sense strand
ccaguggacacaguucuaa

SEQ ID NO: 1652429 - RNA, 19 nt, Homo sapiens
  misc_RNA (1)...(19): siRNA sense strand
acagaaacucucaucaaug

SEQ ID NO: 1652430 - RNA, 19 nt, Homo sapiens
  misc_RNA (1)...(19): siRNA sense strand
ucaaggaucacaguucuuc

SEQ ID NO: 1652431 - RNA, 19 nt, Homo sapiens
  misc_RNA (1)...(19): siRNA sense strand
gggaaaugccaucaaggau

SEQ ID NO: 1652432 - RNA, 19 nt, Homo sapiens
  misc_RNA (1)...(19): siRNA sense strand
cagauccgaggguggcuua

SEQ ID NO: 1652433 - RNA, 19 nt, Homo sapiens
  misc_RNA (1)...(19): siRNA sense strand
uacagccucuaccaucaaa

SEQ ID NO: 1652434 - RNA, 19 nt, Homo sapiens
  misc_RNA (1)...(19): siRNA sense strand
gguaacuucccaacaagau

SEQ ID NO: 1652435 - RNA, 19 nt, Homo sapiens
  misc_RNA (1)...(19): siRNA sense strand
acacaguucuaagcaagga

SEQ ID NO: 1652436 - RNA, 19 nt, Homo sapiens
  misc_RNA (1)...(19): siRNA sense strand
gaaggaaggccagacuaac

SEQ ID NO: 1652437 - RNA, 19 nt, Homo sapiens
  misc_RNA (1)...(19): siRNA sense strand
ggaggagccagcagacaca

SEQ ID NO: 1652438 - RNA, 19 nt, Homo sapiens
  misc_RNA (1)...(19): siRNA sense strand
caacaagauaguucugucu

SEQ ID NO: 1652439 - RNA, 19 nt, Homo sapiens
  misc_RNA (1)...(19): siRNA sense strand
uaaaaccaguugccacaga

SEQ ID NO: 1652440 - RNA, 19 nt, Homo sapiens
  misc_RNA (1)...(19): siRNA sense strand
gaagucaucuguaacuaaa

SEQ ID NO: 1652441 - RNA, 19 nt, Homo sapiens
  misc_RNA (1)...(19): siRNA sense strand
gaacagcaauauauacaga

SEQ ID NO: 1652442 - RNA, 19 nt, Homo sapiens
  misc_RNA (1)...(19): siRNA sense strand
gcagauaaauccagcauca

SEQ ID NO: 1652443 - RNA, 19 nt, Homo sapiens
  misc_RNA (1)...(19): siRNA sense strand
gcagagaaauacuguuuau

SEQ ID NO: 1652444 - RNA, 19 nt, Homo sapiens
  misc_RNA (1)...(19): siRNA sense strand
ggagagaccacaaccuuua

SEQ ID NO: 1652445 - RNA, 19 nt, Homo sapiens
  misc_RNA (1)...(19): siRNA sense strand
gaccaaagcuuuccuugau

SEQ ID NO: 1652446 - RNA, 19 nt, Homo sapiens
  misc_RNA (1)...(19): siRNA sense strand
gaauguggcuuagaaaugu

SEQ ID NO: 1652447 - RNA, 19 nt, Homo sapiens
  misc_RNA (1)...(19): siRNA sense strand
ggugaugccuuacaugaaa

SEQ ID NO: 1652448 - RNA, 19 nt, Homo sapiens
  misc_RNA (1)...(19): siRNA sense strand
gaacaacaacauucaaaga

SEQ ID NO: 1652449 - RNA, 19 nt, Homo sapiens
  misc_RNA (1)...(19): siRNA sense strand
gagaagaaggacuugauua

SEQ ID NO: 1652450 - RNA, 19 nt, Homo sapiens
  misc_RNA (1)...(19): siRNA sense strand
ugaagaauguggcuuagaa

SEQ ID NO: 1652451 - RNA, 19 nt, Homo sapiens
  misc_RNA (1)...(19): siRNA sense strand
uccaagaacucaaggcuua

SEQ ID NO: 1652452 - RNA, 19 nt, Homo sapiens
  misc_RNA (1)...(19): siRNA sense strand
gaaguaagaaugcgacuau

SEQ ID NO: 1652453 - RNA, 19 nt, Homo sapiens
  misc_RNA (1)...(19): siRNA sense strand
gaucauaacacaagaacaa

SEQ ID NO: 1652454 - RNA, 19 nt, Homo sapiens
  misc_RNA (1)...(19): siRNA sense strand
gcagaugcuuuauuaggaa

SEQ ID NO: 1652455 - RNA, 19 nt, Homo sapiens
  misc_RNA (1)...(19): siRNA sense strand
cagcucaucuccaaccaua

SEQ ID NO: 1652456 - RNA, 19 nt, Homo sapiens
  misc_RNA (1)...(19): siRNA sense strand
gaaagagacagacaaugaa

SEQ ID NO: 1652457 - RNA, 19 nt, Homo sapiens
  misc_RNA (1)...(19): siRNA sense strand
cauggaaaguuuaucgaua

SEQ ID NO: 1652458 - RNA, 19 nt, Homo sapiens
  misc_RNA (1)...(19): siRNA sense strand
gaucauaacaccagaacaa

SEQ ID NO: 1652459 - RNA, 19 nt, Homo sapiens
  misc_RNA (1)...(19): siRNA sense strand
ggagaaucauccucauuug

SEQ ID NO: 1652460 - RNA, 19 nt, Homo sapiens
  misc_RNA (1)...(19): siRNA sense strand
ggaaaauggugaugccuua

SEQ ID NO: 1652461 - RNA, 19 nt, Homo sapiens
  misc_RNA (1)...(19): siRNA sense strand
ugaaagagacagacaauga

SEQ ID NO: 1652462 - RNA, 19 nt, Homo sapiens
  misc_RNA (1)...(19): siRNA sense strand
cuauucggcuucaauguua

SEQ ID NO: 1652463 - RNA, 19 nt, Homo sapiens
  misc_RNA (1)...(19): siRNA sense strand
ccaauauucuggugacuga

SEQ ID NO: 1652464 - RNA, 19 nt, Homo sapiens
  misc_RNA (1)...(19): siRNA sense strand
caagaagccauacauguuu

SEQ ID NO: 1652465 - RNA, 19 nt, Homo sapiens
  misc_RNA (1)...(19): siRNA sense strand
gaaaaugccuugucuccaa

SEQ ID NO: 1652466 - RNA, 19 nt, Homo sapiens
  misc_RNA (1)...(19): siRNA sense strand
gcagauuggcagagaaaua

SEQ ID NO: 1652467 - RNA, 19 nt, Homo sapiens
  misc_RNA (1)...(19): siRNA sense strand
gguggaagcuugcucacuu

SEQ ID NO: 1652468 - RNA, 19 nt, Homo sapiens
  misc_RNA (1)...(19): siRNA sense strand
gcacgaauggaauagauaa

SEQ ID NO: 1652469 - RNA, 19 nt, Homo sapiens
  misc_RNA (1)...(19): siRNA sense strand
gacagacaaugaaguaaga

SEQ ID NO: 1652470 - RNA, 19 nt, Homo sapiens
  misc_RNA (1)...(19): siRNA sense strand
gagaaauacuguuuaucga

SEQ ID NO: 1652471 - RNA, 19 nt, Homo sapiens
  misc_RNA (1)...(19): siRNA sense strand
gguguaagguacuuuguug

SEQ ID NO: 1652472 - RNA, 19 nt, Homo sapiens
  misc_RNA (1)...(19): siRNA sense strand
ggaagucaucuguaacuaa

SEQ ID NO: 1652473 - RNA, 19 nt, Homo sapiens
  misc_RNA (1)...(19): siRNA sense strand
aggaggcgcuuauauguaa

SEQ ID NO: 1652474 - RNA, 19 nt, Homo sapiens
  misc_RNA (1)...(19): siRNA sense strand
caacuauugucugcagaua

SEQ ID NO: 1652475 - RNA, 19 nt, Homo sapiens
  misc_RNA (1)...(19): siRNA sense strand
ggagaacaaagaugaauau

SEQ ID NO: 1652476 - RNA, 19 nt, Homo sapiens
  misc_RNA (1)...(19): siRNA sense strand
gaaaagcaacgauagauuu

SEQ ID NO: 1652477 - RNA, 19 nt, Homo sapiens
  misc_RNA (1)...(19): siRNA sense strand
gaagaaggacuugauuaug

SEQ ID NO: 1652478 - RNA, 19 nt, Homo sapiens
  misc_RNA (1)...(19): siRNA sense strand
guccacaaauugcuuauga

SEQ ID NO: 1652479 - RNA, 19 nt, Homo sapiens
  misc_RNA (1)...(19): siRNA sense strand
ccaaauugcacuaguacua

SEQ ID NO: 1652480 - RNA, 19 nt, Homo sapiens
  misc_RNA (1)...(19): siRNA sense strand
cgaauggaauagauaauca

SEQ ID NO: 1652481 - RNA, 19 nt, Homo sapiens
  misc_RNA (1)...(19): siRNA sense strand
ggucugauacuaguaauaa

SEQ ID NO: 1652482 - RNA, 19 nt, Homo sapiens
  misc_RNA (1)...(19): siRNA sense strand
ccaagaagccauacauguu

SEQ ID NO: 1652483 - RNA, 19 nt, Homo sapiens
  misc_RNA (1)...(19): siRNA sense strand
ggaaagagugaaagaacaa

SEQ ID NO: 1652484 - RNA, 19 nt, Homo sapiens
  misc_RNA (1)...(19): siRNA sense strand
uaagguacuuuguugauca

SEQ ID NO: 1652485 - RNA, 19 nt, Homo sapiens
  misc_RNA (1)...(19): siRNA sense strand
cauggaaucuguccgaaau

SEQ ID NO: 1652486 - RNA, 19 nt, Homo sapiens
  misc_RNA (1)...(19): siRNA sense strand
aaacaagaauggcauagca

SEQ ID NO: 1652487 - RNA, 19 nt, Homo sapiens
  misc_RNA (1)...(19): siRNA sense strand
gcuuggaucuaccaccaua

SEQ ID NO: 1652488 - RNA, 19 nt, Homo sapiens
  misc_RNA (1)...(19): siRNA sense strand
ucaccaaggucugauacua

SEQ ID NO: 1652489 - RNA, 19 nt, Homo sapiens
  misc_RNA (1)...(19): siRNA sense strand
caacagacaggguuuacuu

SEQ ID NO: 1652490 - RNA, 19 nt, Homo sapiens
  misc_RNA (1)...(19): siRNA sense strand
gaagcuagaaguauauuag

SEQ ID NO: 1652491 - RNA, 19 nt, Homo sapiens
  misc_RNA (1)...(19): siRNA sense strand
gaauuggaaucugaagcua

SEQ ID NO: 1652492 - RNA, 19 nt, Homo sapiens
  misc_RNA (1)...(19): siRNA sense strand
ggaaagaagaguugaugau

SEQ ID NO: 1652493 - RNA, 19 nt, Homo sapiens
  misc_RNA (1)...(19): siRNA sense strand
gagguugacuuggcagauu

SEQ ID NO: 1652494 - RNA, 19 nt, Homo sapiens
  misc_RNA (1)...(19): siRNA sense strand
uggaaucuauugauacuga

SEQ ID NO: 1652495 - RNA, 19 nt, Homo sapiens
  misc_RNA (1)...(19): siRNA sense strand
cgauacugguuucucuuua

SEQ ID NO: 1652496 - RNA, 19 nt, Homo sapiens
  misc_RNA (1)...(19): siRNA sense strand
acucaaggcuuacagaaug

SEQ ID NO: 1652497 - RNA, 19 nt, Homo sapiens
  misc_RNA (1)...(19): siRNA sense strand
gaacucaaggcuuacagaa

SEQ ID NO: 1652498 - RNA, 19 nt, Homo sapiens
  misc_RNA (1)...(19): siRNA sense strand
gaaagaagaguugaugauc

SEQ ID NO: 1652499 - RNA, 19 nt, Homo sapiens
  misc_RNA (1)...(19): siRNA sense strand
ccugacaccucuaauucua

SEQ ID NO: 1652500 - RNA, 19 nt, Homo sapiens
  misc_RNA (1)...(19): siRNA sense strand
gaucuaccaccauauaaga

SEQ ID NO: 1652501 - RNA, 19 nt, Homo sapiens
  misc_RNA (1)...(19): siRNA sense strand
gaaugcgacuauugcaguu

SEQ ID NO: 1652502 - RNA, 19 nt, Homo sapiens
  misc_RNA (1)...(19): siRNA sense strand
aagaaggacuugauuaugg

SEQ ID NO: 1652503 - RNA, 19 nt, Homo sapiens
  misc_RNA (1)...(19): siRNA sense strand
aaugggaagucaucuguaa

SEQ ID NO: 1652504 - RNA, 19 nt, Homo sapiens
  misc_RNA (1)...(19): siRNA sense strand
ggagcuaugcaacaguuua

SEQ ID NO: 1652505 - RNA, 19 nt, Homo sapiens
  misc_RNA (1)...(19): siRNA sense strand
gguacuuuguugaucauaa

SEQ ID NO: 1652506 - RNA, 19 nt, Homo sapiens
  misc_RNA (1)...(19): siRNA sense strand
gcucguauguaguuaaugg

SEQ ID NO: 1652507 - RNA, 19 nt, Homo sapiens
  misc_RNA (1)...(19): siRNA sense strand
gaagaauguggcuuagaaa

SEQ ID NO: 1652508 - RNA, 19 nt, Homo sapiens
  misc_RNA (1)...(19): siRNA sense strand
gagauaacaacauugaaga

SEQ ID NO: 1652509 - RNA, 19 nt, Homo sapiens
  misc_RNA (1)...(19): siRNA sense strand
aauccagcaucaaccauua

SEQ ID NO: 1652510 - RNA, 19 nt, Homo sapiens
  misc_RNA (1)...(19): siRNA sense strand
ggagaagaaggacuugauu

SEQ ID NO: 1652511 - RNA, 19 nt, Homo sapiens
  misc_RNA (1)...(19): siRNA sense strand
caacagauuauggcauuaa

SEQ ID NO: 1652512 - RNA, 19 nt, Homo sapiens
  misc_RNA (1)...(19): siRNA sense strand
agaaguaguuguagaugga

SEQ ID NO: 1652513 - RNA, 19 nt, Homo sapiens
  misc_RNA (1)...(19): siRNA sense strand
gaugaucguagaagaguuu

SEQ ID NO: 1652514 - RNA, 19 nt, Homo sapiens
  misc_RNA (1)...(19): siRNA sense strand
ggaaguaaugggccucaaa

SEQ ID NO: 1652515 - RNA, 19 nt, Homo sapiens
  misc_RNA (1)...(19): siRNA sense strand
cagaccaucuuucauacuu

SEQ ID NO: 1652516 - RNA, 19 nt, Homo sapiens
  misc_RNA (1)...(19): siRNA sense strand
gaggaggcgcuuauaugua

SEQ ID NO: 1652517 - RNA, 19 nt, Homo sapiens
  misc_RNA (1)...(19): siRNA sense strand
gaucguagaagaguuuauu

SEQ ID NO: 1652518 - RNA, 19 nt, Homo sapiens
  misc_RNA (1)...(19): siRNA sense strand
caaaaccacucgcaucuga

SEQ ID NO: 1652519 - RNA, 19 nt, Homo sapiens
  misc_RNA (1)...(19): siRNA sense strand
agaauuagagguuauguug

SEQ ID NO: 1652520 - RNA, 19 nt, Homo sapiens
  misc_RNA (1)...(19): siRNA sense strand
cuacaguacuucgaugaaa

SEQ ID NO: 1652521 - RNA, 19 nt, Homo sapiens
  misc_RNA (1)...(19): siRNA sense strand
acuauugucugcagauaaa

SEQ ID NO: 1652522 - RNA, 19 nt, Homo sapiens
  misc_RNA (1)...(19): siRNA sense strand
uggaaucuguccgaaauuu

SEQ ID NO: 1652523 - RNA, 19 nt, Homo sapiens
  misc_RNA (1)...(19): siRNA sense strand
uggcaaagacacuugguua

SEQ ID NO: 1652524 - RNA, 19 nt, Homo sapiens
  misc_RNA (1)...(19): siRNA sense strand
ugacugaggagaacaaaga

SEQ ID NO: 1652525 - RNA, 19 nt, Homo sapiens
  misc_RNA (1)...(19): siRNA sense strand
gagcuaugcaacaguuuaa

SEQ ID NO: 1652526 - RNA, 19 nt, Homo sapiens
  misc_RNA (1)...(19): siRNA sense strand
aagcaacgauagauuugaa

SEQ ID NO: 1652527 - RNA, 19 nt, Homo sapiens
  misc_RNA (1)...(19): siRNA sense strand
caagaaacagcaagcaaau

SEQ ID NO: 1652528 - RNA, 19 nt, Homo sapiens
  misc_RNA (1)...(19): siRNA sense strand
gcaaugggaagucaucugu

SEQ ID NO: 1652529 - RNA, 19 nt, Homo sapiens
  misc_RNA (1)...(19): siRNA sense strand
gcacaaacuggugaauuga

SEQ ID NO: 1652530 - RNA, 19 nt, Homo sapiens
  misc_RNA (1)...(19): siRNA sense strand
gggaagucaucuguaacua

SEQ ID NO: 1652531 - RNA, 19 nt, Homo sapiens
  misc_RNA (1)...(19): siRNA sense strand
caaggucugauacuaguaa

SEQ ID NO: 1652532 - RNA, 19 nt, Homo sapiens
  misc_RNA (1)...(19): siRNA sense strand
agacauuguuugaagauuc

SEQ ID NO: 1652533 - RNA, 19 nt, Homo sapiens
  misc_RNA (1)...(19): siRNA sense strand
gaaucugaagcuagaagua

SEQ ID NO: 1652534 - RNA, 19 nt, Homo sapiens
  misc_RNA (1)...(19): siRNA sense strand
aguuguagauggagaaauu

SEQ ID NO: 1652535 - RNA, 19 nt, Homo sapiens
  misc_RNA (1)...(19): siRNA sense strand
aaacagcaagcaaaucauu

SEQ ID NO: 1652536 - RNA, 19 nt, Homo sapiens
  misc_RNA (1)...(19): siRNA sense strand
ggguuuacuuugugaauca

SEQ ID NO: 1652537 - RNA, 19 nt, Homo sapiens
  misc_RNA (1)...(19): siRNA sense strand
agacaggguuuacuuugug

SEQ ID NO: 1652538 - RNA, 19 nt, Homo sapiens
  misc_RNA (1)...(19): siRNA sense strand
gaaccuauuauguggauca

SEQ ID NO: 1652539 - RNA, 19 nt, Homo sapiens
  misc_RNA (1)...(19): siRNA sense strand
agagggauuuggacaagaa

SEQ ID NO: 1652540 - RNA, 19 nt, Homo sapiens
  misc_RNA (1)...(19): siRNA sense strand
aaagagagcuggcuaauaa

SEQ ID NO: 1652541 - RNA, 19 nt, Homo sapiens
  misc_RNA (1)...(19): siRNA sense strand
ggagaaauauggaaugaaa

SEQ ID NO: 1652542 - RNA, 19 nt, Homo sapiens
  misc_RNA (1)...(19): siRNA sense strand
caacguaauugugaucuua

SEQ ID NO: 1652543 - RNA, 19 nt, Homo sapiens
  misc_RNA (1)...(19): siRNA sense strand
ggacuuaagcuuucuaauu

SEQ ID NO: 1652544 - RNA, 19 nt, Homo sapiens
  misc_RNA (1)...(19): siRNA sense strand
gacuuaagcuuucuaauuc

SEQ ID NO: 1652545 - RNA, 19 nt, Homo sapiens
  misc_RNA (1)...(19): siRNA sense strand
guacagcuauuaauugaug

SEQ ID NO: 1652546 - RNA, 19 nt, Homo sapiens
  misc_RNA (1)...(19): siRNA sense strand
ccagaugcguuacaguuua

SEQ ID NO: 1652547 - RNA, 19 nt, Homo sapiens
  misc_RNA (1)...(19): siRNA sense strand
ggaaauccagucugauaua

SEQ ID NO: 1652548 - RNA, 19 nt, Homo sapiens
  misc_RNA (1)...(19): siRNA sense strand
gaaauccagucugauauau

SEQ ID NO: 1652549 - RNA, 19 nt, Homo sapiens
  misc_RNA (1)...(19): siRNA sense strand
gaaagaugguugcuucucu

SEQ ID NO: 1652550 - RNA, 19 nt, Homo sapiens
  misc_RNA (1)...(19): siRNA sense strand
gaaguuacagaguggcuua

SEQ ID NO: 1652551 - RNA, 19 nt, Homo sapiens
  misc_RNA (1)...(19): siRNA sense strand
gcuauuaauugauggcaaa

SEQ ID NO: 1652552 - RNA, 19 nt, Homo sapiens
  misc_RNA (1)...(19): siRNA sense strand
gcaaaugauaggaaucuuu

SEQ ID NO: 1652553 - RNA, 19 nt, Homo sapiens
  misc_RNA (1)...(19): siRNA sense strand
caacaaguuugcccagaug

SEQ ID NO: 1652554 - RNA, 19 nt, Homo sapiens
  misc_RNA (1)...(19): siRNA sense strand
cagaguggcuuaggcuaua

SEQ ID NO: 1652555 - RNA, 19 nt, Homo sapiens
  misc_RNA (1)...(19): siRNA sense strand
gaacugaaggaguagauau

SEQ ID NO: 1652556 - RNA, 19 nt, Homo sapiens
  misc_RNA (1)...(19): siRNA sense strand
aucaguggcuccuuuauua

SEQ ID NO: 1652557 - RNA, 19 nt, Homo sapiens
  misc_RNA (1)...(19): siRNA sense strand
guagauaucguucuucaug

SEQ ID NO: 1652558 - RNA, 19 nt, Homo sapiens
  misc_RNA (1)...(19): siRNA sense strand
gggaaaugcucgaguccuu

SEQ ID NO: 1652559 - RNA, 19 nt, Homo sapiens
  misc_RNA (1)...(19): siRNA sense strand
gaguagauaucguucuuca

SEQ ID NO: 1652560 - RNA, 19 nt, Homo sapiens
  misc_RNA (1)...(19): siRNA sense strand
auacggauauugcucuuaa

SEQ ID NO: 1652561 - RNA, 19 nt, Homo sapiens
  misc_RNA (1)...(19): siRNA sense strand
caaagagagcuggcuaaua

SEQ ID NO: 1652562 - RNA, 19 nt, Homo sapiens
  misc_RNA (1)...(19): siRNA sense strand
gaacaauucagcaaaugau

SEQ ID NO: 1652563 - RNA, 19 nt, Homo sapiens
  misc_RNA (1)...(19): siRNA sense strand
ccaaggauuugauacuguu

SEQ ID NO: 1652564 - RNA, 19 nt, Homo sapiens
  misc_RNA (1)...(19): siRNA sense strand
cagcacagcaugaagaauu

SEQ ID NO: 1652565 - RNA, 19 nt, Homo sapiens
  misc_RNA (1)...(19): siRNA sense strand
uuucggaacugaaggagua

SEQ ID NO: 1652566 - RNA, 19 nt, Homo sapiens
  misc_RNA (1)...(19): siRNA sense strand
cagaugcguuacaguuuaa

SEQ ID NO: 1652567 - RNA, 19 nt, Homo sapiens
  misc_RNA (1)...(19): siRNA sense strand
aaauuuaccuggccuaucu

SEQ ID NO: 1652568 - RNA, 19 nt, Homo sapiens
  misc_RNA (1)...(19): siRNA sense strand
ggaacaauucagcaaauga

SEQ ID NO: 1652569 - RNA, 19 nt, Homo sapiens
  misc_RNA (1)...(19): siRNA sense strand
gcuaacugcccaucuauug

SEQ ID NO: 1652570 - RNA, 19 nt, Homo sapiens
  misc_RNA (1)...(19): siRNA sense strand
agaugagacuguaaacaaa

SEQ ID NO: 1652571 - RNA, 19 nt, Homo sapiens
  misc_RNA (1)...(19): siRNA sense strand
gauacuguuugccaccuuu

SEQ ID NO: 1652572 - RNA, 19 nt, Homo sapiens
  misc_RNA (1)...(19): siRNA sense strand
uaagaagccugagaagcaa

SEQ ID NO: 1652573 - RNA, 19 nt, Homo sapiens
  misc_RNA (1)...(19): siRNA sense strand
aagcacuccugcccgauua

SEQ ID NO: 1652574 - RNA, 19 nt, Homo sapiens
  misc_RNA (1)...(19): siRNA sense strand
uaagaccagucacuacaga

SEQ ID NO: 1652575 - RNA, 19 nt, Homo sapiens
  misc_RNA (1)...(19): siRNA sense strand
ggaagaagccauuguuuug

SEQ ID NO: 1652576 - RNA, 19 nt, Homo sapiens
  misc_RNA (1)...(19): siRNA sense strand
uauccuaucuggccuuugu

SEQ ID NO: 1652577 - RNA, 19 nt, Homo sapiens
  misc_RNA (1)...(19): siRNA sense strand
gguaacaguuuucauggua

SEQ ID NO: 1652578 - RNA, 19 nt, Homo sapiens
  misc_RNA (1)...(19): siRNA sense strand
gccaagacaugcaaaauga

SEQ ID NO: 1652579 - RNA, 19 nt, Homo sapiens
  misc_RNA (1)...(19): siRNA sense strand
gggaacaauucagcaaaug

SEQ ID NO: 1652580 - RNA, 19 nt, Homo sapiens
  misc_RNA (1)...(19): siRNA sense strand
aaagaguauuccuacguaa

SEQ ID NO: 1652581 - RNA, 19 nt, Homo sapiens
  misc_RNA (1)...(19): siRNA sense strand
gcccaucuauugcgguuau

SEQ ID NO: 1652582 - RNA, 19 nt, Homo sapiens
  misc_RNA (1)...(19): siRNA sense strand
uggcuuaggcuauaaugua

SEQ ID NO: 1652583 - RNA, 19 nt, Homo sapiens
  misc_RNA (1)...(19): siRNA sense strand
ugucaucaguggcuccuuu

SEQ ID NO: 1652584 - RNA, 19 nt, Homo sapiens
  misc_RNA (1)...(19): siRNA sense strand
ggugaaagcaguuaaaauu

SEQ ID NO: 1652585 - RNA, 19 nt, Homo sapiens
  misc_RNA (1)...(19): siRNA sense strand
cuauagaagccuccagaua

SEQ ID NO: 1652586 - RNA, 19 nt, Homo sapiens
  misc_RNA (1)...(19): siRNA sense strand
agagcuggcuaauaaauca

SEQ ID NO: 1652587 - RNA, 19 nt, Homo sapiens
  misc_RNA (1)...(19): siRNA sense strand
gcaaagagagcuggcuaau

SEQ ID NO: 1652588 - RNA, 19 nt, Homo sapiens
  misc_RNA (1)...(19): siRNA sense strand
gagccauggucuaccuuga

SEQ ID NO: 1652589 - RNA, 19 nt, Homo sapiens
  misc_RNA (1)...(19): siRNA sense strand
gaccagucacuacagauaa

SEQ ID NO: 1652590 - RNA, 19 nt, Homo sapiens
  misc_RNA (1)...(19): siRNA sense strand
uuaagaagccugagaagca

SEQ ID NO: 1652591 - RNA, 19 nt, Homo sapiens
  misc_RNA (1)...(19): siRNA sense strand
gcaugcaauugccacuuug

SEQ ID NO: 1652592 - RNA, 19 nt, Homo sapiens
  misc_RNA (1)...(19): siRNA sense strand
cuguacagcuauuaauuga

SEQ ID NO: 1652593 - RNA, 19 nt, Homo sapiens
  misc_RNA (1)...(19): siRNA sense strand
uauagaagccuccagauac

SEQ ID NO: 1652594 - RNA, 19 nt, Homo sapiens
  misc_RNA (1)...(19): siRNA sense strand
ugucacccuuuguaucaua

SEQ ID NO: 1652595 - RNA, 19 nt, Homo sapiens
  misc_RNA (1)...(19): siRNA sense strand
gcaugaagaauuacaacug

SEQ ID NO: 1652596 - RNA, 19 nt, Homo sapiens
  misc_RNA (1)...(19): siRNA sense strand
gaauuacaacugcaugcaa

SEQ ID NO: 1652597 - RNA, 19 nt, Homo sapiens
  misc_RNA (1)...(19): siRNA sense strand
uaauaagcaagccuaauga

SEQ ID NO: 1652598 - RNA, 19 nt, Homo sapiens
  misc_RNA (1)...(19): siRNA sense strand
aagaugagacuguaaacaa

SEQ ID NO: 1652599 - RNA, 19 nt, Homo sapiens
  misc_RNA (1)...(19): siRNA sense strand
agcacagcaugaagaauua

SEQ ID NO: 1652600 - RNA, 19 nt, Homo sapiens
  misc_RNA (1)...(19): siRNA sense strand
aaaagaguauuccuacgua

SEQ ID NO: 1652601 - RNA, 19 nt, Homo sapiens
  misc_RNA (1)...(19): siRNA sense strand
gaaagcaguuaaaauugug

SEQ ID NO: 1652602 - RNA, 19 nt, Homo sapiens
  misc_RNA (1)...(19): siRNA sense strand
gcccucugguggaguagua

SEQ ID NO: 1652603 - RNA, 19 nt, Homo sapiens
  misc_RNA (1)...(19): siRNA sense strand
uaccauaaacgaccacaaa

SEQ ID NO: 1652604 - RNA, 19 nt, Homo sapiens
  misc_RNA (1)...(19): siRNA sense strand
ccugcuaacugcccaucua

SEQ ID NO: 1652605 - RNA, 19 nt, Homo sapiens
  misc_RNA (1)...(19): siRNA sense strand
gaagaugagacuguaaaca

SEQ ID NO: 1652606 - RNA, 19 nt, Homo sapiens
  misc_RNA (1)...(19): siRNA sense strand
caucaguggcuccuuuauu

SEQ ID NO: 1652607 - RNA, 19 nt, Homo sapiens
  misc_RNA (1)...(19): siRNA sense strand
gcuaaaacguuaaagaaag

SEQ ID NO: 1652608 - RNA, 19 nt, Homo sapiens
  misc_RNA (1)...(19): siRNA sense strand
ggaacugaaggaguagaua

SEQ ID NO: 1652609 - RNA, 19 nt, Homo sapiens
  misc_RNA (1)...(19): siRNA sense strand
uaucuggccuuugugagaa

SEQ ID NO: 1652610 - RNA, 19 nt, Homo sapiens
  misc_RNA (1)...(19): siRNA sense strand
gcccagaugcguuacaguu

SEQ ID NO: 1652611 - RNA, 19 nt, Homo sapiens
  misc_RNA (1)...(19): siRNA sense strand
uuacuagcuuucaagaaga

SEQ ID NO: 1652612 - RNA, 19 nt, Homo sapiens
  misc_RNA (1)...(19): siRNA sense strand
uuuacuagcuuucaagaag

SEQ ID NO: 1652613 - RNA, 19 nt, Homo sapiens
  misc_RNA (1)...(19): siRNA sense strand
aaaggaagaagccauuguu

SEQ ID NO: 1652614 - RNA, 19 nt, Homo sapiens
  misc_RNA (1)...(19): siRNA sense strand
auaauaagcaagccuaaug

SEQ ID NO: 1652615 - RNA, 19 nt, Homo sapiens
  misc_RNA (1)...(19): siRNA sense strand
aguggcuccuuuauuaaua

SEQ ID NO: 1652616 - RNA, 19 nt, Homo sapiens
  misc_RNA (1)...(19): siRNA sense strand
ggugcccucugguggagua

SEQ ID NO: 1652617 - RNA, 19 nt, Homo sapiens
  misc_RNA (1)...(19): siRNA sense strand
ugcaugcaauugccacuuu

SEQ ID NO: 1652618 - RNA, 19 nt, Homo sapiens
  misc_RNA (1)...(19): siRNA sense strand
ugcaauauuucaccaaaca

SEQ ID NO: 1652619 - RNA, 19 nt, Homo sapiens
  misc_RNA (1)...(19): siRNA sense strand
gauaucguucuucauguga

SEQ ID NO: 1652620 - RNA, 19 nt, Homo sapiens
  misc_RNA (1)...(19): siRNA sense strand
ugaaggaguagauaucguu

SEQ ID NO: 1652621 - RNA, 19 nt, Homo sapiens
  misc_RNA (1)...(19): siRNA sense strand
uaagcaagccuaaugaaaa

SEQ ID NO: 1652622 - RNA, 19 nt, Homo sapiens
  misc_RNA (1)...(19): siRNA sense strand
agaccagucacuacagaua

SEQ ID NO: 1652623 - RNA, 19 nt, Homo sapiens
  misc_RNA (1)...(19): siRNA sense strand
cuauugcgguuauggaugu

SEQ ID NO: 1652624 - RNA, 19 nt, Homo sapiens
  misc_RNA (1)...(19): siRNA sense strand
uggucuaccuugaagauga

SEQ ID NO: 1652625 - RNA, 19 nt, Homo sapiens
  misc_RNA (1)...(19): siRNA sense strand
gcugcuagucuuuuaauua

SEQ ID NO: 1652626 - RNA, 19 nt, Homo sapiens
  misc_RNA (1)...(19): siRNA sense strand
gacagcugcuagucuuuua

SEQ ID NO: 1652627 - RNA, 19 nt, Homo sapiens
  misc_RNA (1)...(19): siRNA sense strand
guccuugcauuucuagaau

SEQ ID NO: 1652628 - RNA, 19 nt, Homo sapiens
  misc_RNA (1)...(19): siRNA sense strand
gagggugaaagcaguuaaa

SEQ ID NO: 1652629 - RNA, 19 nt, Homo sapiens
  misc_RNA (1)...(19): siRNA sense strand
aauuacaacugcaugcaau

SEQ ID NO: 1652630 - RNA, 19 nt, Homo sapiens
  misc_RNA (1)...(19): siRNA sense strand
gaagccuccagauaccaua

SEQ ID NO: 1652631 - RNA, 19 nt, Homo sapiens
  misc_RNA (1)...(19): siRNA sense strand
uuuggaagcuauuacaaca

SEQ ID NO: 1652632 - RNA, 19 nt, Homo sapiens
  misc_RNA (1)...(19): siRNA sense strand
cugagaauauuagagcaaa

SEQ ID NO: 1652633 - RNA, 19 nt, Homo sapiens
  misc_RNA (1)...(19): siRNA sense strand
uagauaucguucuucaugu

SEQ ID NO: 1652634 - RNA, 19 nt, Homo sapiens
  misc_RNA (1)...(19): siRNA sense strand
ccagucugauauauuacuu

SEQ ID NO: 1652635 - RNA, 19 nt, Homo sapiens
  misc_RNA (1)...(19): siRNA sense strand
ucagucaugguaacaguuu

SEQ ID NO: 1652636 - RNA, 19 nt, Homo sapiens
  misc_RNA (1)...(19): siRNA sense strand
gcaauugccacuuugucau

SEQ ID NO: 1652637 - RNA, 19 nt, Homo sapiens
  misc_RNA (1)...(19): siRNA sense strand
guacauuggacagcauuug

SEQ ID NO: 1652638 - RNA, 19 nt, Homo sapiens
  misc_RNA (1)...(19): siRNA sense strand
aaauuaagaccagucacua

SEQ ID NO: 1652639 - RNA, 19 nt, Homo sapiens
  misc_RNA (1)...(19): siRNA sense strand
ggaguaaaacgugauaaaa

SEQ ID NO: 1652640 - RNA, 19 nt, Homo sapiens
  misc_RNA (1)...(19): siRNA sense strand
ggaaacaguugcagagcua

SEQ ID NO: 1652641 - RNA, 19 nt, Homo sapiens
  misc_RNA (1)...(19): siRNA sense strand
ugacagagauugaugagaa

SEQ ID NO: 1652642 - RNA, 19 nt, Homo sapiens
  misc_RNA (1)...(19): siRNA sense strand
gcuaagaacuguugagagu

SEQ ID NO: 1652643 - RNA, 19 nt, Homo sapiens
  misc_RNA (1)...(19): siRNA sense strand
gaaccaagguguuugugau

SEQ ID NO: 1652644 - RNA, 19 nt, Homo sapiens
  misc_RNA (1)...(19): siRNA sense strand
gaccagauuucuagauauu

SEQ ID NO: 1652645 - RNA, 19 nt, Homo sapiens
  misc_RNA (1)...(19): siRNA sense strand
gagugaagcugcaucuuau

SEQ ID NO: 1652646 - RNA, 19 nt, Homo sapiens
  misc_RNA (1)...(19): siRNA sense strand
uaagaacuguugagaguga

SEQ ID NO: 1652647 - RNA, 19 nt, Homo sapiens
  misc_RNA (1)...(19): siRNA sense strand
gauagaagauggaaacaac

SEQ ID NO: 1652648 - RNA, 19 nt, Homo sapiens
  misc_RNA (1)...(19): siRNA sense strand
gaaucaauaugucacucua

SEQ ID NO: 1652649 - RNA, 19 nt, Homo sapiens
  misc_RNA (1)...(19): siRNA sense strand
ccaaagaaguuauuagaac

SEQ ID NO: 1652650 - RNA, 19 nt, Homo sapiens
  misc_RNA (1)...(19): siRNA sense strand
gaagguggaucaggaagug

SEQ ID NO: 1652651 - RNA, 19 nt, Homo sapiens
  misc_RNA (1)...(19): siRNA sense strand
gauccacucugacaugaau

SEQ ID NO: 1652652 - RNA, 19 nt, Homo sapiens
  misc_RNA (1)...(19): siRNA sense strand
ggaccagauuucuagauau

SEQ ID NO: 1652653 - RNA, 19 nt, Homo sapiens
  misc_RNA (1)...(19): siRNA sense strand
cagaagacuugguggcaaa

SEQ ID NO: 1652654 - RNA, 19 nt, Homo sapiens
  misc_RNA (1)...(19): siRNA sense strand
gaagauggaaacaacuuug

SEQ ID NO: 1652655 - RNA, 19 nt, Homo sapiens
  misc_RNA (1)...(19): siRNA sense strand
ugaaggaaccaaucuuaaa

SEQ ID NO: 1652656 - RNA, 19 nt, Homo sapiens
  misc_RNA (1)...(19): siRNA sense strand
gacagagauugaugagaaa

SEQ ID NO: 1652657 - RNA, 19 nt, Homo sapiens
  misc_RNA (1)...(19): siRNA sense strand
agagugaagcugcaucuua

SEQ ID NO: 1652658 - RNA, 19 nt, Homo sapiens
  misc_RNA (1)...(19): siRNA sense strand
uggaccagauuucuagaua

SEQ ID NO: 1652659 - RNA, 19 nt, Homo sapiens
  misc_RNA (1)...(19): siRNA sense strand
aaacauccaugaccuaacu

SEQ ID NO: 1652660 - RNA, 19 nt, Homo sapiens
  misc_RNA (1)...(19): siRNA sense strand
ggacauuauugagaaagug

SEQ ID NO: 1652661 - RNA, 19 nt, Homo sapiens
  misc_RNA (1)...(19): siRNA sense strand
gcagagcuaagaacuguug

SEQ ID NO: 1652662 - RNA, 19 nt, Homo sapiens
  misc_RNA (1)...(19): siRNA sense strand
gaaggaaccaaucuuaaac

SEQ ID NO: 1652663 - RNA, 19 nt, Homo sapiens
  misc_RNA (1)...(19): siRNA sense strand
gaagguuggaugaguguga

SEQ ID NO: 1652664 - RNA, 19 nt, Homo sapiens
  misc_RNA (1)...(19): siRNA sense strand
ccaaggaaccaagguguuu

SEQ ID NO: 1652665 - RNA, 19 nt, Homo sapiens
  misc_RNA (1)...(19): siRNA sense strand
gagcagcaaugcagagacu

SEQ ID NO: 1652666 - RNA, 19 nt, Homo sapiens
  misc_RNA (1)...(19): siRNA sense strand
gaaagugaaaccugagauc

SEQ ID NO: 1652667 - RNA, 19 nt, Homo sapiens
  misc_RNA (1)...(19): siRNA sense strand
uggauggucccacuuauaa

SEQ ID NO: 1652668 - RNA, 19 nt, Homo sapiens
  misc_RNA (1)...(19): siRNA sense strand
gauggucccacuuauaaga

SEQ ID NO: 1652669 - RNA, 19 nt, Homo sapiens
  misc_RNA (1)...(19): siRNA sense strand
aagacuugguggcaaauuu

SEQ ID NO: 1652670 - RNA, 19 nt, Homo sapiens
  misc_RNA (1)...(19): siRNA sense strand
gagauccggcuguugauug

SEQ ID NO: 1652671 - RNA, 19 nt, Homo sapiens
  misc_RNA (1)...(19): siRNA sense strand
ggaagugaagcucaagguu

SEQ ID NO: 1652672 - RNA, 19 nt, Homo sapiens
  misc_RNA (1)...(19): siRNA sense strand
gagcugaggaaucaauaug

SEQ ID NO: 1652673 - RNA, 19 nt, Homo sapiens
  misc_RNA (1)...(19): siRNA sense strand
ucugaaggaaccaaucuua

SEQ ID NO: 1652674 - RNA, 19 nt, Homo sapiens
  misc_RNA (1)...(19): siRNA sense strand
gcugaggaaucaauauguc

SEQ ID NO: 1652675 - RNA, 19 nt, Homo sapiens
  misc_RNA (1)...(19): siRNA sense strand
agagauugaugagaaagaa

SEQ ID NO: 1652676 - RNA, 19 nt, Homo sapiens
  misc_RNA (1)...(19): siRNA sense strand
gagcuaagaacuguugaga

SEQ ID NO: 1652677 - RNA, 19 nt, Homo sapiens
  misc_RNA (1)...(19): siRNA sense strand
ggaaccaagguguuuguga

SEQ ID NO: 1652678 - RNA, 19 nt, Homo sapiens
  misc_RNA (1)...(19): siRNA sense strand
gguggacauuauugagaaa

SEQ ID NO: 1652679 - RNA, 19 nt, Homo sapiens
  misc_RNA (1)...(19): siRNA sense strand
gacuggauggucccacuua

SEQ ID NO: 1652680 - RNA, 19 nt, Homo sapiens
  misc_RNA (1)...(19): siRNA sense strand
gagaaagugaaaccugaga

SEQ ID NO: 1652681 - RNA, 19 nt, Homo sapiens
  misc_RNA (1)...(19): siRNA sense strand
ggauagaagauggaaacaa

SEQ ID NO: 1652682 - RNA, 19 nt, Homo sapiens
  misc_RNA (1)...(19): siRNA sense strand
ccugagauccggcuguuga

SEQ ID NO: 1652683 - RNA, 19 nt, Homo sapiens
  misc_RNA (1)...(19): siRNA sense strand
uugcagagcuaagaacugu

SEQ ID NO: 1652684 - RNA, 19 nt, Homo sapiens
  misc_RNA (1)...(19): siRNA sense strand
ccauucuucucaccaauag

SEQ ID NO: 1652685 - RNA, 19 nt, Homo sapiens
  misc_RNA (1)...(19): siRNA sense strand
gcaccgugacagagauuga

SEQ ID NO: 1652686 - RNA, 19 nt, Homo sapiens
  misc_RNA (1)...(19): siRNA sense strand
gacauuauugagaaaguga

SEQ ID NO: 1652687 - RNA, 19 nt, Homo sapiens
  misc_RNA (1)...(19): siRNA sense strand
agauccggcuguugauuga

SEQ ID NO: 1652688 - RNA, 19 nt, Homo sapiens
  misc_RNA (1)...(19): siRNA sense strand
ggaaccaaucuuaaacauc

SEQ ID NO: 1652689 - RNA, 19 nt, Homo sapiens
  misc_RNA (1)...(19): siRNA sense strand
ccaaugggaugcugaaaag

SEQ ID NO: 1652690 - RNA, 19 nt, Homo sapiens
  misc_RNA (1)...(19): siRNA sense strand
gaagacuugguggcaaauu

SEQ ID NO: 1652691 - RNA, 19 nt, Homo sapiens
  misc_RNA (1)...(19): siRNA sense strand
ggguacagcuccugauucc

SEQ ID NO: 1652692 - RNA, 19 nt, Homo sapiens
  misc_RNA (1)...(19): siRNA sense strand
gcuguugauugagaaaugu

SEQ ID NO: 1652693 - RNA, 19 nt, Homo sapiens
  misc_RNA (1)...(19): siRNA sense strand
ggcuguugauugagaaaug

SEQ ID NO: 1652694 - RNA, 19 nt, Homo sapiens
  misc_RNA (1)...(19): siRNA sense strand
uuaaacauccaugaccuaa

SEQ ID NO: 1652695 - RNA, 19 nt, Homo sapiens
  misc_RNA (1)...(19): siRNA sense strand
gcagcugguggacauuauu

SEQ ID NO: 1652696 - RNA, 19 nt, Homo sapiens
  misc_RNA (1)...(19): siRNA sense strand
ugguggacauuauugagaa

SEQ ID NO: 1652697 - RNA, 19 nt, Homo sapiens
  misc_RNA (1)...(19): siRNA sense strand
gaaacaguugcagagcuaa

SEQ ID NO: 1652698 - RNA, 19 nt, Homo sapiens
  misc_RNA (1)...(19): siRNA sense strand
ucccaaagaaguuauuaga

SEQ ID NO: 1652699 - RNA, 19 nt, Homo sapiens
  misc_RNA (1)...(19): siRNA sense strand
cugaaggaaccaaucuuaa

SEQ ID NO: 1652700 - RNA, 19 nt, Homo sapiens
  misc_RNA (1)...(19): siRNA sense strand
aagcgaagguuggaugagu

SEQ ID NO: 1652701 - RNA, 19 nt, Homo sapiens
  misc_RNA (1)...(19): siRNA sense strand
ggaaucaauaugucacucu

SEQ ID NO: 1652702 - RNA, 19 nt, Homo sapiens
  misc_RNA (1)...(19): siRNA sense strand
ucagggagcggaucacaag

SEQ ID NO: 1652703 - RNA, 19 nt, Homo sapiens
  misc_RNA (1)...(19): siRNA sense strand
uagaagauggaaacaacuu

SEQ ID NO: 1652704 - RNA, 19 nt, Homo sapiens
  misc_RNA (1)...(19): siRNA sense strand
cagagcugaggaaucaaua

SEQ ID NO: 1652705 - RNA, 19 nt, Homo sapiens
  misc_RNA (1)...(19): siRNA sense strand
caaggaaccaagguguuug

SEQ ID NO: 1652706 - RNA, 19 nt, Homo sapiens
  misc_RNA (1)...(19): siRNA sense strand
cccaaagaaguuauuagaa

SEQ ID NO: 1652707 - RNA, 19 nt, Homo sapiens
  misc_RNA (1)...(19): siRNA sense strand
uccaugaccuaacucagau

SEQ ID NO: 1652708 - RNA, 19 nt, Homo sapiens
  misc_RNA (1)...(19): siRNA sense strand
cuggauggucccacuuaua

SEQ ID NO: 1652709 - RNA, 19 nt, Homo sapiens
  misc_RNA (1)...(19): siRNA sense strand
gccuucggcucaucauauc

SEQ ID NO: 1652710 - RNA, 19 nt, Homo sapiens
  misc_RNA (1)...(19): siRNA sense strand
agaagauggaaacaacuuu

SEQ ID NO: 1652711 - RNA, 19 nt, Homo sapiens
  misc_RNA (1)...(19): siRNA sense strand
caggauagaagauggaaac

SEQ ID NO: 1652712 - RNA, 19 nt, Homo sapiens
  misc_RNA (1)...(19): siRNA sense strand
uauuacaagagccaaauug

SEQ ID NO: 1652713 - RNA, 19 nt, Homo sapiens
  misc_RNA (1)...(19): siRNA sense strand
cagcugguggacauuauug

SEQ ID NO: 1652714 - RNA, 19 nt, Homo sapiens
  misc_RNA (1)...(19): siRNA sense strand
aggaaccaaucuuaaacau

SEQ ID NO: 1652715 - RNA, 19 nt, Homo sapiens
  misc_RNA (1)...(19): siRNA sense strand
cccauucuucucaccaaua

SEQ ID NO: 1652716 - RNA, 19 nt, Homo sapiens
  misc_RNA (1)...(19): siRNA sense strand
gagauugaugagaaagaau

SEQ ID NO: 1652717 - RNA, 19 nt, Homo sapiens
  misc_RNA (1)...(19): siRNA sense strand
guggguacagcuccugauu

SEQ ID NO: 1652718 - RNA, 19 nt, Homo sapiens
  misc_RNA (1)...(19): siRNA sense strand
ggaaacaguugcagagcua

SEQ ID NO: 1652719 - RNA, 19 nt, Homo sapiens
  misc_RNA (1)...(19): siRNA sense strand
ugacagagauugaugagaa

SEQ ID NO: 1652720 - RNA, 19 nt, Homo sapiens
  misc_RNA (1)...(19): siRNA sense strand
gcuaagaacuguugagagu

SEQ ID NO: 1652721 - RNA, 19 nt, Homo sapiens
  misc_RNA (1)...(19): siRNA sense strand
gaaccaagguguuugugau

SEQ ID NO: 1652722 - RNA, 19 nt, Homo sapiens
  misc_RNA (1)...(19): siRNA sense strand
gaccagauuucuagauauu

SEQ ID NO: 1652723 - RNA, 19 nt, Homo sapiens
  misc_RNA (1)...(19): siRNA sense strand
gagugaagcugcaucuuau

SEQ ID NO: 1652724 - RNA, 19 nt, Homo sapiens
  misc_RNA (1)...(19): siRNA sense strand
uaagaacuguugagaguga

SEQ ID NO: 1652725 - RNA, 19 nt, Homo sapiens
  misc_RNA (1)...(19): siRNA sense strand
gauagaagauggaaacaac

SEQ ID NO: 1652726 - RNA, 19 nt, Homo sapiens
  misc_RNA (1)...(19): siRNA sense strand
gaaucaauaugucacucua

SEQ ID NO: 1652727 - RNA, 19 nt, Homo sapiens
  misc_RNA (1)...(19): siRNA sense strand
ccaaagaaguuauuagaac

SEQ ID NO: 1652728 - RNA, 19 nt, Homo sapiens
  misc_RNA (1)...(19): siRNA sense strand
gaagguggaucaggaagug

SEQ ID NO: 1652729 - RNA, 19 nt, Homo sapiens
  misc_RNA (1)...(19): siRNA sense strand
gauccacucugacaugaau

SEQ ID NO: 1652730 - RNA, 19 nt, Homo sapiens
  misc_RNA (1)...(19): siRNA sense strand
ggaccagauuucuagauau

SEQ ID NO: 1652731 - RNA, 19 nt, Homo sapiens
  misc_RNA (1)...(19): siRNA sense strand
cagaagacuugguggcaaa

SEQ ID NO: 1652732 - RNA, 19 nt, Homo sapiens
  misc_RNA (1)...(19): siRNA sense strand
gaagauggaaacaacuuug

SEQ ID NO: 1652733 - RNA, 19 nt, Homo sapiens
  misc_RNA (1)...(19): siRNA sense strand
ugaaggaaccaaucuuaaa

SEQ ID NO: 1652734 - RNA, 19 nt, Homo sapiens
  misc_RNA (1)...(19): siRNA sense strand
gacagagauugaugagaaa

SEQ ID NO: 1652735 - RNA, 19 nt, Homo sapiens
  misc_RNA (1)...(19): siRNA sense strand
agagugaagcugcaucuua

SEQ ID NO: 1652736 - RNA, 19 nt, Homo sapiens
  misc_RNA (1)...(19): siRNA sense strand
uggaccagauuucuagaua

SEQ ID NO: 1652737 - RNA, 19 nt, Homo sapiens
  misc_RNA (1)...(19): siRNA sense strand
aaacauccaugaccuaacu

SEQ ID NO: 1652738 - RNA, 19 nt, Homo sapiens
  misc_RNA (1)...(19): siRNA sense strand
ggacauuauugagaaagug

SEQ ID NO: 1652739 - RNA, 19 nt, Homo sapiens
  misc_RNA (1)...(19): siRNA sense strand
gcagagcuaagaacuguug

SEQ ID NO: 1652740 - RNA, 19 nt, Homo sapiens
  misc_RNA (1)...(19): siRNA sense strand
gaaggaaccaaucuuaaac

SEQ ID NO: 1652741 - RNA, 19 nt, Homo sapiens
  misc_RNA (1)...(19): siRNA sense strand
gaagguuggaugaguguga

SEQ ID NO: 1652742 - RNA, 19 nt, Homo sapiens
  misc_RNA (1)...(19): siRNA sense strand
ccaaggaaccaagguguuu

SEQ ID NO: 1652743 - RNA, 19 nt, Homo sapiens
  misc_RNA (1)...(19): siRNA sense strand
gagcagcaaugcagagacu

SEQ ID NO: 1652744 - RNA, 19 nt, Homo sapiens
  misc_RNA (1)...(19): siRNA sense strand
gaaagugaaaccugagauc

SEQ ID NO: 1652745 - RNA, 19 nt, Homo sapiens
  misc_RNA (1)...(19): siRNA sense strand
uggauggucccacuuauaa

SEQ ID NO: 1652746 - RNA, 19 nt, Homo sapiens
  misc_RNA (1)...(19): siRNA sense strand
gauggucccacuuauaaga

SEQ ID NO: 1652747 - RNA, 19 nt, Homo sapiens
  misc_RNA (1)...(19): siRNA sense strand
aagacuugguggcaaauuu

SEQ ID NO: 1652748 - RNA, 19 nt, Homo sapiens
  misc_RNA (1)...(19): siRNA sense strand
gagauccggcuguugauug

SEQ ID NO: 1652749 - RNA, 19 nt, Homo sapiens
  misc_RNA (1)...(19): siRNA sense strand
ggaagugaagcucaagguu

SEQ ID NO: 1652750 - RNA, 19 nt, Homo sapiens
  misc_RNA (1)...(19): siRNA sense strand
gagcugaggaaucaauaug

SEQ ID NO: 1652751 - RNA, 19 nt, Homo sapiens
  misc_RNA (1)...(19): siRNA sense strand
ucugaaggaaccaaucuua

SEQ ID NO: 1652752 - RNA, 19 nt, Homo sapiens
  misc_RNA (1)...(19): siRNA sense strand
gcugaggaaucaauauguc

SEQ ID NO: 1652753 - RNA, 19 nt, Homo sapiens
  misc_RNA (1)...(19): siRNA sense strand
agagauugaugagaaagaa

SEQ ID NO: 1652754 - RNA, 19 nt, Homo sapiens
  misc_RNA (1)...(19): siRNA sense strand
gagcuaagaacuguugaga

SEQ ID NO: 1652755 - RNA, 19 nt, Homo sapiens
  misc_RNA (1)...(19): siRNA sense strand
ggaaccaagguguuuguga

SEQ ID NO: 1652756 - RNA, 19 nt, Homo sapiens
  misc_RNA (1)...(19): siRNA sense strand
gguggacauuauugagaaa

SEQ ID NO: 1652757 - RNA, 19 nt, Homo sapiens
  misc_RNA (1)...(19): siRNA sense strand
gacuggauggucccacuua

SEQ ID NO: 1652758 - RNA, 19 nt, Homo sapiens
  misc_RNA (1)...(19): siRNA sense strand
gagaaagugaaaccugaga

SEQ ID NO: 1652759 - RNA, 19 nt, Homo sapiens
  misc_RNA (1)...(19): siRNA sense strand
ggauagaagauggaaacaa

SEQ ID NO: 1652760 - RNA, 19 nt, Homo sapiens
  misc_RNA (1)...(19): siRNA sense strand
ccugagauccggcuguuga

SEQ ID NO: 1652761 - RNA, 19 nt, Homo sapiens
  misc_RNA (1)...(19): siRNA sense strand
uugcagagcuaagaacugu

SEQ ID NO: 1652762 - RNA, 19 nt, Homo sapiens
  misc_RNA (1)...(19): siRNA sense strand
ccauucuucucaccaauag

SEQ ID NO: 1652763 - RNA, 19 nt, Homo sapiens
  misc_RNA (1)...(19): siRNA sense strand
gcaccgugacagagauuga

SEQ ID NO: 1652764 - RNA, 19 nt, Homo sapiens
  misc_RNA (1)...(19): siRNA sense strand
gacauuauugagaaaguga

SEQ ID NO: 1652765 - RNA, 19 nt, Homo sapiens
  misc_RNA (1)...(19): siRNA sense strand
agauccggcuguugauuga

SEQ ID NO: 1652766 - RNA, 19 nt, Homo sapiens
  misc_RNA (1)...(19): siRNA sense strand
ggaaccaaucuuaaacauc

SEQ ID NO: 1652767 - RNA, 19 nt, Homo sapiens
  misc_RNA (1)...(19): siRNA sense strand
ccaaugggaugcugaaaag

SEQ ID NO: 1652768 - RNA, 19 nt, Homo sapiens
  misc_RNA (1)...(19): siRNA sense strand
gaagacuugguggcaaauu

SEQ ID NO: 1652769 - RNA, 19 nt, Homo sapiens
  misc_RNA (1)...(19): siRNA sense strand
ggguacagcuccugauucc

SEQ ID NO: 1652770 - RNA, 19 nt, Homo sapiens
  misc_RNA (1)...(19): siRNA sense strand
gcuguugauugagaaaugu

SEQ ID NO: 1652771 - RNA, 19 nt, Homo sapiens
  misc_RNA (1)...(19): siRNA sense strand
ggcuguugauugagaaaug

SEQ ID NO: 1652772 - RNA, 19 nt, Homo sapiens
  misc_RNA (1)...(19): siRNA sense strand
uuaaacauccaugaccuaa

SEQ ID NO: 1652773 - RNA, 19 nt, Homo sapiens
  misc_RNA (1)...(19): siRNA sense strand
gcagcugguggacauuauu

SEQ ID NO: 1652774 - RNA, 19 nt, Homo sapiens
  misc_RNA (1)...(19): siRNA sense strand
ugguggacauuauugagaa

SEQ ID NO: 1652775 - RNA, 19 nt, Homo sapiens
  misc_RNA (1)...(19): siRNA sense strand
gaaacaguugcagagcuaa

SEQ ID NO: 1652776 - RNA, 19 nt, Homo sapiens
  misc_RNA (1)...(19): siRNA sense strand
ucccaaagaaguuauuaga

SEQ ID NO: 1652777 - RNA, 19 nt, Homo sapiens
  misc_RNA (1)...(19): siRNA sense strand
cugaaggaaccaaucuuaa

SEQ ID NO: 1652778 - RNA, 19 nt, Homo sapiens
  misc_RNA (1)...(19): siRNA sense strand
aagcgaagguuggaugagu

SEQ ID NO: 1652779 - RNA, 19 nt, Homo sapiens
  misc_RNA (1)...(19): siRNA sense strand
ggaaucaauaugucacucu

SEQ ID NO: 1652780 - RNA, 19 nt, Homo sapiens
  misc_RNA (1)...(19): siRNA sense strand
ucagggagcggaucacaag

SEQ ID NO: 1652781 - RNA, 19 nt, Homo sapiens
  misc_RNA (1)...(19): siRNA sense strand
uagaagauggaaacaacuu

SEQ ID NO: 1652782 - RNA, 19 nt, Homo sapiens
  misc_RNA (1)...(19): siRNA sense strand
cagagcugaggaaucaaua

SEQ ID NO: 1652783 - RNA, 19 nt, Homo sapiens
  misc_RNA (1)...(19): siRNA sense strand
caaggaaccaagguguuug

SEQ ID NO: 1652784 - RNA, 19 nt, Homo sapiens
  misc_RNA (1)...(19): siRNA sense strand
cccaaagaaguuauuagaa

SEQ ID NO: 1652785 - RNA, 19 nt, Homo sapiens
  misc_RNA (1)...(19): siRNA sense strand
uccaugaccuaacucagau

SEQ ID NO: 1652786 - RNA, 19 nt, Homo sapiens
  misc_RNA (1)...(19): siRNA sense strand
cuggauggucccacuuaua

SEQ ID NO: 1652787 - RNA, 19 nt, Homo sapiens
  misc_RNA (1)...(19): siRNA sense strand
gccuucggcucaucauauc

SEQ ID NO: 1652788 - RNA, 19 nt, Homo sapiens
  misc_RNA (1)...(19): siRNA sense strand
agaagauggaaacaacuuu

SEQ ID NO: 1652789 - RNA, 19 nt, Homo sapiens
  misc_RNA (1)...(19): siRNA sense strand
caggauagaagauggaaac

SEQ ID NO: 1652790 - RNA, 19 nt, Homo sapiens
  misc_RNA (1)...(19): siRNA sense strand
uauuacaagagccaaauug

SEQ ID NO: 1652791 - RNA, 19 nt, Homo sapiens
  misc_RNA (1)...(19): siRNA sense strand
cagcugguggacauuauug

SEQ ID NO: 1652792 - RNA, 19 nt, Homo sapiens
  misc_RNA (1)...(19): siRNA sense strand
aggaaccaaucuuaaacau

SEQ ID NO: 1652793 - RNA, 19 nt, Homo sapiens
  misc_RNA (1)...(19): siRNA sense strand
cccauucuucucaccaaua

SEQ ID NO: 1652794 - RNA, 19 nt, Homo sapiens
  misc_RNA (1)...(19): siRNA sense strand
gagauugaugagaaagaau

SEQ ID NO: 1652795 - RNA, 19 nt, Homo sapiens
  misc_RNA (1)...(19): siRNA sense strand
guggguacagcuccugauu

SEQ ID NO: 1652796 - RNA, 19 nt, Homo sapiens
  misc_RNA (1)...(19): siRNA sense strand
gaagcaagaucauuaguug

SEQ ID NO: 1652797 - RNA, 19 nt, Homo sapiens
  misc_RNA (1)...(19): siRNA sense strand
uaaauccacucaucaaugu

SEQ ID NO: 1652798 - RNA, 19 nt, Homo sapiens
  misc_RNA (1)...(19): siRNA sense strand
gguaucaucuucaccaaau

SEQ ID NO: 1652799 - RNA, 19 nt, Homo sapiens
  misc_RNA (1)...(19): siRNA sense strand
gaauuaccgccucuucuuu

SEQ ID NO: 1652800 - RNA, 19 nt, Homo sapiens
  misc_RNA (1)...(19): siRNA sense strand
agaggaagcaagaucauua

SEQ ID NO: 1652801 - RNA, 19 nt, Homo sapiens
  misc_RNA (1)...(19): siRNA sense strand
ggaagcaagaucauuaguu

SEQ ID NO: 1652802 - RNA, 19 nt, Homo sapiens
  misc_RNA (1)...(19): siRNA sense strand
guuauuaaauccacucauc

SEQ ID NO: 1652803 - RNA, 19 nt, Homo sapiens
  misc_RNA (1)...(19): siRNA sense strand
ggaagcuacucuuaauugg

SEQ ID NO: 1652804 - RNA, 19 nt, Homo sapiens
  misc_RNA (1)...(19): siRNA sense strand
aagcuacucuuaauugguu

SEQ ID NO: 1652805 - RNA, 19 nt, Homo sapiens
  misc_RNA (1)...(19): siRNA sense strand
gcaagaucauuaguugaau

SEQ ID NO: 1652806 - RNA, 19 nt, Homo sapiens
  misc_RNA (1)...(19): siRNA sense strand
ccuggaagcuacucuuaau

SEQ ID NO: 1652807 - RNA, 19 nt, Homo sapiens
  misc_RNA (1)...(19): siRNA sense strand
caagaucauuaguugaauc

SEQ ID NO: 1652808 - RNA, 19 nt, Homo sapiens
  misc_RNA (1)...(19): siRNA sense strand
guaucaucuucaccaaaua

SEQ ID NO: 1652809 - RNA, 19 nt, Homo sapiens
  misc_RNA (1)...(19): siRNA sense strand
aaacaaggcuuuugcucuu

SEQ ID NO: 1652810 - RNA, 19 nt, Homo sapiens
  misc_RNA (1)...(19): siRNA sense strand
gcuauaaauugcacaaacg

SEQ ID NO: 1652811 - RNA, 19 nt, Homo sapiens
  misc_RNA (1)...(19): siRNA sense strand
uaauggaggagcuauaaau

SEQ ID NO: 1652812 - RNA, 19 nt, Homo sapiens
  misc_RNA (1)...(19): siRNA sense strand
uggaagcuacucuuaauug

SEQ ID NO: 1652813 - RNA, 19 nt, Homo sapiens
  misc_RNA (1)...(19): siRNA sense strand
gcagaauuaccgccucuuc

SEQ ID NO: 1652814 - RNA, 19 nt, Homo sapiens
  misc_RNA (1)...(19): siRNA sense strand
aauuaccgccucuucuuua

SEQ ID NO: 1652815 - RNA, 19 nt, Homo sapiens
  misc_RNA (1)...(19): siRNA sense strand
uggaggagcuauaaauugc

SEQ ID NO: 1652816 - RNA, 19 nt, Homo sapiens
  misc_RNA (1)...(19): siRNA sense strand
uuaaauccacucaucaaug

SEQ ID NO: 1652817 - RNA, 19 nt, Homo sapiens
  misc_RNA (1)...(19): siRNA sense strand
guaauggaggagcuauaaa

SEQ ID NO: 1652818 - RNA, 19 nt, Homo sapiens
  misc_RNA (1)...(19): siRNA sense strand
uguaauggaggagcuauaa

SEQ ID NO: 1652819 - RNA, 19 nt, Homo sapiens
  misc_RNA (1)...(19): siRNA sense strand
uugaaucgguaucaucuuc

SEQ ID NO: 1652820 - RNA, 19 nt, Homo sapiens
  misc_RNA (1)...(19): siRNA sense strand
gaagcuacucuuaauuggu

SEQ ID NO: 1652821 - RNA, 19 nt, Homo sapiens
  misc_RNA (1)...(19): siRNA sense strand
gaggaagcaagaucauuag

SEQ ID NO: 1652822 - RNA, 19 nt, Homo sapiens
  misc_RNA (1)...(19): siRNA sense strand
ucaagaggaagcaagauca

SEQ ID NO: 1652823 - RNA, 19 nt, Homo sapiens
  misc_RNA (1)...(19): siRNA sense strand
caucaauguuggaaagcau

SEQ ID NO: 1652824 - RNA, 19 nt, Homo sapiens
  misc_RNA (1)...(19): siRNA sense strand
uaccuggaagcuacucuua

SEQ ID NO: 1652825 - RNA, 19 nt, Homo sapiens
  misc_RNA (1)...(19): siRNA sense strand
ccguugcacucaagaggaa

SEQ ID NO: 1652826 - RNA, 19 nt, Homo sapiens
  misc_RNA (1)...(19): siRNA sense strand
acucaucaauguuggaaag

SEQ ID NO: 1652827 - RNA, 19 nt, Homo sapiens
  misc_RNA (1)...(19): siRNA sense strand
aauggaggagcuauaaauu

SEQ ID NO: 1652828 - RNA, 19 nt, Homo sapiens
  misc_RNA (1)...(19): siRNA sense strand
ccaguuugcuuuuaaugga

SEQ ID NO: 1652829 - RNA, 19 nt, Homo sapiens
  misc_RNA (1)...(19): siRNA sense strand
uaagguaccagauggaaaa

SEQ ID NO: 1652830 - RNA, 19 nt, Homo sapiens
  misc_RNA (1)...(19): siRNA sense strand
agcaagaucauuaguugaa

SEQ ID NO: 1652831 - RNA, 19 nt, Homo sapiens
  misc_RNA (1)...(19): siRNA sense strand
ggagcuauaaauugcacaa

SEQ ID NO: 1652832 - RNA, 19 nt, Homo sapiens
  misc_RNA (1)...(19): siRNA sense strand
gauagcccuuuccguugca

SEQ ID NO: 1652833 - RNA, 19 nt, Homo sapiens
  misc_RNA (1)...(19): siRNA sense strand
auuaccgccucuucuuuaa

SEQ ID NO: 1652834 - RNA, 19 nt, Homo sapiens
  misc_RNA (1)...(19): siRNA sense strand
gagcuauaaauugcacaaa

SEQ ID NO: 1652835 - RNA, 19 nt, Homo sapiens
  misc_RNA (1)...(19): siRNA sense strand
gaaucgguaucaucuucac

SEQ ID NO: 1652836 - RNA, 19 nt, Homo sapiens
  misc_RNA (1)...(19): siRNA sense strand
caagaggaagcaagaucau

SEQ ID NO: 1652837 - RNA, 19 nt, Homo sapiens
  misc_RNA (1)...(19): siRNA sense strand
gcuacucuuaauugguuua

SEQ ID NO: 1652838 - RNA, 19 nt, Homo sapiens
  misc_RNA (1)...(19): siRNA sense strand
uauaagguaccagauggaa

SEQ ID NO: 1652839 - RNA, 19 nt, Homo sapiens
  misc_RNA (1)...(19): siRNA sense strand
uuauauaagguaccagaug

SEQ ID NO: 1652840 - RNA, 19 nt, Homo sapiens
  misc_RNA (1)...(19): siRNA sense strand
gaagcaagaucauuaguug

SEQ ID NO: 1652841 - RNA, 19 nt, Homo sapiens
  misc_RNA (1)...(19): siRNA sense strand
uaaauccacucaucaaugu

SEQ ID NO: 1652842 - RNA, 19 nt, Homo sapiens
  misc_RNA (1)...(19): siRNA sense strand
gguaucaucuucaccaaau

SEQ ID NO: 1652843 - RNA, 19 nt, Homo sapiens
  misc_RNA (1)...(19): siRNA sense strand
gaauuaccgccucuucuuu

SEQ ID NO: 1652844 - RNA, 19 nt, Homo sapiens
  misc_RNA (1)...(19): siRNA sense strand
agaggaagcaagaucauua

SEQ ID NO: 1652845 - RNA, 19 nt, Homo sapiens
  misc_RNA (1)...(19): siRNA sense strand
ggaagcaagaucauuaguu

SEQ ID NO: 1652846 - RNA, 19 nt, Homo sapiens
  misc_RNA (1)...(19): siRNA sense strand
guuauuaaauccacucauc

SEQ ID NO: 1652847 - RNA, 19 nt, Homo sapiens
  misc_RNA (1)...(19): siRNA sense strand
ggaagcuacucuuaauugg

SEQ ID NO: 1652848 - RNA, 19 nt, Homo sapiens
  misc_RNA (1)...(19): siRNA sense strand
aagcuacucuuaauugguu

SEQ ID NO: 1652849 - RNA, 19 nt, Homo sapiens
  misc_RNA (1)...(19): siRNA sense strand
gcaagaucauuaguugaau

SEQ ID NO: 1652850 - RNA, 19 nt, Homo sapiens
  misc_RNA (1)...(19): siRNA sense strand
ccuggaagcuacucuuaau

SEQ ID NO: 1652851 - RNA, 19 nt, Homo sapiens
  misc_RNA (1)...(19): siRNA sense strand
caagaucauuaguugaauc

SEQ ID NO: 1652852 - RNA, 19 nt, Homo sapiens
  misc_RNA (1)...(19): siRNA sense strand
guaucaucuucaccaaaua

SEQ ID NO: 1652853 - RNA, 19 nt, Homo sapiens
  misc_RNA (1)...(19): siRNA sense strand
aaacaaggcuuuugcucuu

SEQ ID NO: 1652854 - RNA, 19 nt, Homo sapiens
  misc_RNA (1)...(19): siRNA sense strand
gcuauaaauugcacaaacg

SEQ ID NO: 1652855 - RNA, 19 nt, Homo sapiens
  misc_RNA (1)...(19): siRNA sense strand
uaauggaggagcuauaaau

SEQ ID NO: 1652856 - RNA, 19 nt, Homo sapiens
  misc_RNA (1)...(19): siRNA sense strand
uggaagcuacucuuaauug

SEQ ID NO: 1652857 - RNA, 19 nt, Homo sapiens
  misc_RNA (1)...(19): siRNA sense strand
gcagaauuaccgccucuuc

SEQ ID NO: 1652858 - RNA, 19 nt, Homo sapiens
  misc_RNA (1)...(19): siRNA sense strand
aauuaccgccucuucuuua

SEQ ID NO: 1652859 - RNA, 19 nt, Homo sapiens
  misc_RNA (1)...(19): siRNA sense strand
uggaggagcuauaaauugc

SEQ ID NO: 1652860 - RNA, 19 nt, Homo sapiens
  misc_RNA (1)...(19): siRNA sense strand
uuaaauccacucaucaaug

SEQ ID NO: 1652861 - RNA, 19 nt, Homo sapiens
  misc_RNA (1)...(19): siRNA sense strand
guaauggaggagcuauaaa

SEQ ID NO: 1652862 - RNA, 19 nt, Homo sapiens
  misc_RNA (1)...(19): siRNA sense strand
uguaauggaggagcuauaa

SEQ ID NO: 1652863 - RNA, 19 nt, Homo sapiens
  misc_RNA (1)...(19): siRNA sense strand
uugaaucgguaucaucuuc

SEQ ID NO: 1652864 - RNA, 19 nt, Homo sapiens
  misc_RNA (1)...(19): siRNA sense strand
gaagcuacucuuaauuggu

SEQ ID NO: 1652865 - RNA, 19 nt, Homo sapiens
  misc_RNA (1)...(19): siRNA sense strand
gaggaagcaagaucauuag

SEQ ID NO: 1652866 - RNA, 19 nt, Homo sapiens
  misc_RNA (1)...(19): siRNA sense strand
ucaagaggaagcaagauca

SEQ ID NO: 1652867 - RNA, 19 nt, Homo sapiens
  misc_RNA (1)...(19): siRNA sense strand
caucaauguuggaaagcau

SEQ ID NO: 1652868 - RNA, 19 nt, Homo sapiens
  misc_RNA (1)...(19): siRNA sense strand
uaccuggaagcuacucuua

SEQ ID NO: 1652869 - RNA, 19 nt, Homo sapiens
  misc_RNA (1)...(19): siRNA sense strand
ccguugcacucaagaggaa

SEQ ID NO: 1652870 - RNA, 19 nt, Homo sapiens
  misc_RNA (1)...(19): siRNA sense strand
acucaucaauguuggaaag

SEQ ID NO: 1652871 - RNA, 19 nt, Homo sapiens
  misc_RNA (1)...(19): siRNA sense strand
aauggaggagcuauaaauu

SEQ ID NO: 1652872 - RNA, 19 nt, Homo sapiens
  misc_RNA (1)...(19): siRNA sense strand
ccaguuugcuuuuaaugga

SEQ ID NO: 1652873 - RNA, 19 nt, Homo sapiens
  misc_RNA (1)...(19): siRNA sense strand
uaagguaccagauggaaaa

SEQ ID NO: 1652874 - RNA, 19 nt, Homo sapiens
  misc_RNA (1)...(19): siRNA sense strand
agcaagaucauuaguugaa

SEQ ID NO: 1652875 - RNA, 19 nt, Homo sapiens
  misc_RNA (1)...(19): siRNA sense strand
ggagcuauaaauugcacaa

SEQ ID NO: 1652876 - RNA, 19 nt, Homo sapiens
  misc_RNA (1)...(19): siRNA sense strand
gauagcccuuuccguugca

SEQ ID NO: 1652877 - RNA, 19 nt, Homo sapiens
  misc_RNA (1)...(19): siRNA sense strand
auuaccgccucuucuuuaa

SEQ ID NO: 1652878 - RNA, 19 nt, Homo sapiens
  misc_RNA (1)...(19): siRNA sense strand
gagcuauaaauugcacaaa

SEQ ID NO: 1652879 - RNA, 19 nt, Homo sapiens
  misc_RNA (1)...(19): siRNA sense strand
gaaucgguaucaucuucac

SEQ ID NO: 1652880 - RNA, 19 nt, Homo sapiens
  misc_RNA (1)...(19): siRNA sense strand
caagaggaagcaagaucau

SEQ ID NO: 1652881 - RNA, 19 nt, Homo sapiens
  misc_RNA (1)...(19): siRNA sense strand
gcuacucuuaauugguuua

SEQ ID NO: 1652882 - RNA, 19 nt, Homo sapiens
  misc_RNA (1)...(19): siRNA sense strand
uauaagguaccagauggaa

SEQ ID NO: 1652883 - RNA, 19 nt, Homo sapiens
  misc_RNA (1)...(19): siRNA sense strand
uuauauaagguaccagaug

SEQ ID NO: 1652884 - RNA, 19 nt, Homo sapiens
  misc_RNA (1)...(19): siRNA sense strand
gaagcaagaucauuaguug

SEQ ID NO: 1652885 - RNA, 19 nt, Homo sapiens
  misc_RNA (1)...(19): siRNA sense strand
uaaauccacucaucaaugu

SEQ ID NO: 1652886 - RNA, 19 nt, Homo sapiens
  misc_RNA (1)...(19): siRNA sense strand
gguaucaucuucaccaaau

SEQ ID NO: 1652887 - RNA, 19 nt, Homo sapiens
  misc_RNA (1)...(19): siRNA sense strand
gaauuaccgccucuucuuu

SEQ ID NO: 1652888 - RNA, 19 nt, Homo sapiens
  misc_RNA (1)...(19): siRNA sense strand
agaggaagcaagaucauua

SEQ ID NO: 1652889 - RNA, 19 nt, Homo sapiens
  misc_RNA (1)...(19): siRNA sense strand
ggaagcaagaucauuaguu

SEQ ID NO: 1652890 - RNA, 19 nt, Homo sapiens
  misc_RNA (1)...(19): siRNA sense strand
guuauuaaauccacucauc

SEQ ID NO: 1652891 - RNA, 19 nt, Homo sapiens
  misc_RNA (1)...(19): siRNA sense strand
ggaagcuacucuuaauugg

SEQ ID NO: 1652892 - RNA, 19 nt, Homo sapiens
  misc_RNA (1)...(19): siRNA sense strand
aagcuacucuuaauugguu

SEQ ID NO: 1652893 - RNA, 19 nt, Homo sapiens
  misc_RNA (1)...(19): siRNA sense strand
gcaagaucauuaguugaau

SEQ ID NO: 1652894 - RNA, 19 nt, Homo sapiens
  misc_RNA (1)...(19): siRNA sense strand
ccuggaagcuacucuuaau

SEQ ID NO: 1652895 - RNA, 19 nt, Homo sapiens
  misc_RNA (1)...(19): siRNA sense strand
caagaucauuaguugaauc

SEQ ID NO: 1652896 - RNA, 19 nt, Homo sapiens
  misc_RNA (1)...(19): siRNA sense strand
guaucaucuucaccaaaua

SEQ ID NO: 1652897 - RNA, 19 nt, Homo sapiens
  misc_RNA (1)...(19): siRNA sense strand
aaacaaggcuuuugcucuu

SEQ ID NO: 1652898 - RNA, 19 nt, Homo sapiens
  misc_RNA (1)...(19): siRNA sense strand
gcuauaaauugcacaaacg

SEQ ID NO: 1652899 - RNA, 19 nt, Homo sapiens
  misc_RNA (1)...(19): siRNA sense strand
uaauggaggagcuauaaau

SEQ ID NO: 1652900 - RNA, 19 nt, Homo sapiens
  misc_RNA (1)...(19): siRNA sense strand
uggaagcuacucuuaauug

SEQ ID NO: 1652901 - RNA, 19 nt, Homo sapiens
  misc_RNA (1)...(19): siRNA sense strand
gcagaauuaccgccucuuc

SEQ ID NO: 1652902 - RNA, 19 nt, Homo sapiens
  misc_RNA (1)...(19): siRNA sense strand
aauuaccgccucuucuuua

SEQ ID NO: 1652903 - RNA, 19 nt, Homo sapiens
  misc_RNA (1)...(19): siRNA sense strand
uggaggagcuauaaauugc

SEQ ID NO: 1652904 - RNA, 19 nt, Homo sapiens
  misc_RNA (1)...(19): siRNA sense strand
uuaaauccacucaucaaug

SEQ ID NO: 1652905 - RNA, 19 nt, Homo sapiens
  misc_RNA (1)...(19): siRNA sense strand
guaauggaggagcuauaaa

SEQ ID NO: 1652906 - RNA, 19 nt, Homo sapiens
  misc_RNA (1)...(19): siRNA sense strand
uguaauggaggagcuauaa

SEQ ID NO: 1652907 - RNA, 19 nt, Homo sapiens
  misc_RNA (1)...(19): siRNA sense strand
uugaaucgguaucaucuuc

SEQ ID NO: 1652908 - RNA, 19 nt, Homo sapiens
  misc_RNA (1)...(19): siRNA sense strand
gaagcuacucuuaauuggu

SEQ ID NO: 1652909 - RNA, 19 nt, Homo sapiens
  misc_RNA (1)...(19): siRNA sense strand
gaggaagcaagaucauuag

SEQ ID NO: 1652910 - RNA, 19 nt, Homo sapiens
  misc_RNA (1)...(19): siRNA sense strand
ucaagaggaagcaagauca

SEQ ID NO: 1652911 - RNA, 19 nt, Homo sapiens
  misc_RNA (1)...(19): siRNA sense strand
caucaauguuggaaagcau

SEQ ID NO: 1652912 - RNA, 19 nt, Homo sapiens
  misc_RNA (1)...(19): siRNA sense strand
uaccuggaagcuacucuua

SEQ ID NO: 1652913 - RNA, 19 nt, Homo sapiens
  misc_RNA (1)...(19): siRNA sense strand
ccguugcacucaagaggaa

SEQ ID NO: 1652914 - RNA, 19 nt, Homo sapiens
  misc_RNA (1)...(19): siRNA sense strand
acucaucaauguuggaaag

SEQ ID NO: 1652915 - RNA, 19 nt, Homo sapiens
  misc_RNA (1)...(19): siRNA sense strand
aauggaggagcuauaaauu

SEQ ID NO: 1652916 - RNA, 19 nt, Homo sapiens
  misc_RNA (1)...(19): siRNA sense strand
ccaguuugcuuuuaaugga

SEQ ID NO: 1652917 - RNA, 19 nt, Homo sapiens
  misc_RNA (1)...(19): siRNA sense strand
uaagguaccagauggaaaa

SEQ ID NO: 1652918 - RNA, 19 nt, Homo sapiens
  misc_RNA (1)...(19): siRNA sense strand
agcaagaucauuaguugaa

SEQ ID NO: 1652919 - RNA, 19 nt, Homo sapiens
  misc_RNA (1)...(19): siRNA sense strand
ggagcuauaaauugcacaa

SEQ ID NO: 1652920 - RNA, 19 nt, Homo sapiens
  misc_RNA (1)...(19): siRNA sense strand
gauagcccuuuccguugca

SEQ ID NO: 1652921 - RNA, 19 nt, Homo sapiens
  misc_RNA (1)...(19): siRNA sense strand
auuaccgccucuucuuuaa

SEQ ID NO: 1652922 - RNA, 19 nt, Homo sapiens
  misc_RNA (1)...(19): siRNA sense strand
gagcuauaaauugcacaaa

SEQ ID NO: 1652923 - RNA, 19 nt, Homo sapiens
  misc_RNA (1)...(19): siRNA sense strand
gaaucgguaucaucuucac

SEQ ID NO: 1652924 - RNA, 19 nt, Homo sapiens
  misc_RNA (1)...(19): siRNA sense strand
caagaggaagcaagaucau

SEQ ID NO: 1652925 - RNA, 19 nt, Homo sapiens
  misc_RNA (1)...(19): siRNA sense strand
gcuacucuuaauugguuua

SEQ ID NO: 1652926 - RNA, 19 nt, Homo sapiens
  misc_RNA (1)...(19): siRNA sense strand
uauaagguaccagauggaa

SEQ ID NO: 1652927 - RNA, 19 nt, Homo sapiens
  misc_RNA (1)...(19): siRNA sense strand
uuauauaagguaccagaug

SEQ ID NO: 1652928 - RNA, 19 nt, Homo sapiens
  misc_RNA (1)...(19): siRNA sense strand
gaagcaagaucauuaguug

SEQ ID NO: 1652929 - RNA, 19 nt, Homo sapiens
  misc_RNA (1)...(19): siRNA sense strand
uaaauccacucaucaaugu

SEQ ID NO: 1652930 - RNA, 19 nt, Homo sapiens
  misc_RNA (1)...(19): siRNA sense strand
gguaucaucuucaccaaau

SEQ ID NO: 1652931 - RNA, 19 nt, Homo sapiens
  misc_RNA (1)...(19): siRNA sense strand
gaauuaccgccucuucuuu

SEQ ID NO: 1652932 - RNA, 19 nt, Homo sapiens
  misc_RNA (1)...(19): siRNA sense strand
agaggaagcaagaucauua

SEQ ID NO: 1652933 - RNA, 19 nt, Homo sapiens
  misc_RNA (1)...(19): siRNA sense strand
ggaagcaagaucauuaguu

SEQ ID NO: 1652934 - RNA, 19 nt, Homo sapiens
  misc_RNA (1)...(19): siRNA sense strand
guuauuaaauccacucauc

SEQ ID NO: 1652935 - RNA, 19 nt, Homo sapiens
  misc_RNA (1)...(19): siRNA sense strand
ggaagcuacucuuaauugg

SEQ ID NO: 1652936 - RNA, 19 nt, Homo sapiens
  misc_RNA (1)...(19): siRNA sense strand
aagcuacucuuaauugguu

SEQ ID NO: 1652937 - RNA, 19 nt, Homo sapiens
  misc_RNA (1)...(19): siRNA sense strand
gcaagaucauuaguugaau

SEQ ID NO: 1652938 - RNA, 19 nt, Homo sapiens
  misc_RNA (1)...(19): siRNA sense strand
ccuggaagcuacucuuaau

SEQ ID NO: 1652939 - RNA, 19 nt, Homo sapiens
  misc_RNA (1)...(19): siRNA sense strand
caagaucauuaguugaauc

SEQ ID NO: 1652940 - RNA, 19 nt, Homo sapiens
  misc_RNA (1)...(19): siRNA sense strand
guaucaucuucaccaaaua

SEQ ID NO: 1652941 - RNA, 19 nt, Homo sapiens
  misc_RNA (1)...(19): siRNA sense strand
aaacaaggcuuuugcucuu

SEQ ID NO: 1652942 - RNA, 19 nt, Homo sapiens
  misc_RNA (1)...(19): siRNA sense strand
gcuauaaauugcacaaacg

SEQ ID NO: 1652943 - RNA, 19 nt, Homo sapiens
  misc_RNA (1)...(19): siRNA sense strand
uaauggaggagcuauaaau

SEQ ID NO: 1652944 - RNA, 19 nt, Homo sapiens
  misc_RNA (1)...(19): siRNA sense strand
uggaagcuacucuuaauug

SEQ ID NO: 1652945 - RNA, 19 nt, Homo sapiens
  misc_RNA (1)...(19): siRNA sense strand
aauuaccgccucuucuuua

SEQ ID NO: 1652946 - RNA, 19 nt, Homo sapiens
  misc_RNA (1)...(19): siRNA sense strand
uggaggagcuauaaauugc

SEQ ID NO: 1652947 - RNA, 19 nt, Homo sapiens
  misc_RNA (1)...(19): siRNA sense strand
gcagaauuaccgccucuuc

SEQ ID NO: 1652948 - RNA, 19 nt, Homo sapiens
  misc_RNA (1)...(19): siRNA sense strand
uuaaauccacucaucaaug

SEQ ID NO: 1652949 - RNA, 19 nt, Homo sapiens
  misc_RNA (1)...(19): siRNA sense strand
guaauggaggagcuauaaa

SEQ ID NO: 1652950 - RNA, 19 nt, Homo sapiens
  misc_RNA (1)...(19): siRNA sense strand
uguaauggaggagcuauaa

SEQ ID NO: 1652951 - RNA, 19 nt, Homo sapiens
  misc_RNA (1)...(19): siRNA sense strand
uugaaucgguaucaucuuc

SEQ ID NO: 1652952 - RNA, 19 nt, Homo sapiens
  misc_RNA (1)...(19): siRNA sense strand
gaagcuacucuuaauuggu

SEQ ID NO: 1652953 - RNA, 19 nt, Homo sapiens
  misc_RNA (1)...(19): siRNA sense strand
gaggaagcaagaucauuag

SEQ ID NO: 1652954 - RNA, 19 nt, Homo sapiens
  misc_RNA (1)...(19): siRNA sense strand
ucaagaggaagcaagauca

SEQ ID NO: 1652955 - RNA, 19 nt, Homo sapiens
  misc_RNA (1)...(19): siRNA sense strand
caucaauguuggaaagcau

SEQ ID NO: 1652956 - RNA, 19 nt, Homo sapiens
  misc_RNA (1)...(19): siRNA sense strand
gccgugcuauggcccugua

SEQ ID NO: 1652957 - RNA, 19 nt, Homo sapiens
  misc_RNA (1)...(19): siRNA sense strand
uaccuggaagcuacucuua

SEQ ID NO: 1652958 - RNA, 19 nt, Homo sapiens
  misc_RNA (1)...(19): siRNA sense strand
ccguugcacucaagaggaa

SEQ ID NO: 1652959 - RNA, 19 nt, Homo sapiens
  misc_RNA (1)...(19): siRNA sense strand
acucaucaauguuggaaag

SEQ ID NO: 1652960 - RNA, 19 nt, Homo sapiens
  misc_RNA (1)...(19): siRNA sense strand
aauggaggagcuauaaauu

SEQ ID NO: 1652961 - RNA, 19 nt, Homo sapiens
  misc_RNA (1)...(19): siRNA sense strand
ccaguuugcuuuuaaugga

SEQ ID NO: 1652962 - RNA, 19 nt, Homo sapiens
  misc_RNA (1)...(19): siRNA sense strand
uaagguaccagauggaaaa

SEQ ID NO: 1652963 - RNA, 19 nt, Homo sapiens
  misc_RNA (1)...(19): siRNA sense strand
agcaagaucauuaguugaa

SEQ ID NO: 1652964 - RNA, 19 nt, Homo sapiens
  misc_RNA (1)...(19): siRNA sense strand
ggagcuauaaauugcacaa

SEQ ID NO: 1652965 - RNA, 19 nt, Homo sapiens
  misc_RNA (1)...(19): siRNA sense strand
gauagcccuuuccguugca

SEQ ID NO: 1652966 - RNA, 19 nt, Homo sapiens
  misc_RNA (1)...(19): siRNA sense strand
auuaccgccucuucuuuaa

SEQ ID NO: 1652967 - RNA, 19 nt, Homo sapiens
  misc_RNA (1)...(19): siRNA sense strand
gagcuauaaauugcacaaa

SEQ ID NO: 1652968 - RNA, 19 nt, Homo sapiens
  misc_RNA (1)...(19): siRNA sense strand
gaaucgguaucaucuucac

SEQ ID NO: 1652969 - RNA, 19 nt, Homo sapiens
  misc_RNA (1)...(19): siRNA sense strand
gcuacucuuaauugguuua

SEQ ID NO: 1652970 - RNA, 19 nt, Homo sapiens
  misc_RNA (1)...(19): siRNA sense strand
caagaggaagcaagaucau

SEQ ID NO: 1652971 - RNA, 19 nt, Homo sapiens
  misc_RNA (1)...(19): siRNA sense strand
uauaagguaccagauggaa

SEQ ID NO: 1652972 - RNA, 19 nt, Homo sapiens
  misc_RNA (1)...(19): siRNA sense strand
uuauauaagguaccagaug

SEQ ID NO: 1652973 - RNA, 19 nt, Homo sapiens
  misc_RNA (1)...(19): siRNA sense strand
ucaaaccacuucuaaauga

SEQ ID NO: 1652974 - RNA, 19 nt, Homo sapiens
  misc_RNA (1)...(19): siRNA sense strand
gaucaaaccacuucuaaau

SEQ ID NO: 1652975 - RNA, 19 nt, Homo sapiens
  misc_RNA (1)...(19): siRNA sense strand
gcagagaccuggagaucga

SEQ ID NO: 1652976 - RNA, 19 nt, Homo sapiens
  misc_RNA (1)...(19): siRNA sense strand
aaacagaccaguuauacua

SEQ ID NO: 1652977 - RNA, 19 nt, Homo sapiens
  misc_RNA (1)...(19): siRNA sense strand
aaaggaaacagaccaguua

SEQ ID NO: 1652978 - RNA, 19 nt, Homo sapiens
  misc_RNA (1)...(19): siRNA sense strand
gaaugcauauugcccaaga

SEQ ID NO: 1652979 - RNA, 19 nt, Homo sapiens
  misc_RNA (1)...(19): siRNA sense strand
gacauuggccucaaccaua

SEQ ID NO: 1652980 - RNA, 19 nt, Homo sapiens
  misc_RNA (1)...(19): siRNA sense strand
gagaucaaaccacuucuaa

SEQ ID NO: 1652981 - RNA, 19 nt, Homo sapiens
  misc_RNA (1)...(19): siRNA sense strand
gcuaaaggcuggauugacu

SEQ ID NO: 1652982 - RNA, 19 nt, Homo sapiens
  misc_RNA (1)...(19): siRNA sense strand
cauaaauccuguuucaaug

SEQ ID NO: 1652983 - RNA, 19 nt, Homo sapiens
  misc_RNA (1)...(19): siRNA sense strand
uaacauaucaugacauugg

SEQ ID NO: 1652984 - RNA, 19 nt, Homo sapiens
  misc_RNA (1)...(19): siRNA sense strand
gaaaugcugccuccuguuc

SEQ ID NO: 1652985 - RNA, 19 nt, Homo sapiens
  misc_RNA (1)...(19): siRNA sense strand
uggaugagcuggcugaaau

SEQ ID NO: 1652986 - RNA, 19 nt, Homo sapiens
  misc_RNA (1)...(19): siRNA sense strand
gauccaaaccuacagaaug

SEQ ID NO: 1652987 - RNA, 19 nt, Homo sapiens
  misc_RNA (1)...(19): siRNA sense strand
cgccugaacccuauaaaua

SEQ ID NO: 1652988 - RNA, 19 nt, Homo sapiens
  misc_RNA (1)...(19): siRNA sense strand
ggaacaugauauagaaaca

SEQ ID NO: 1652989 - RNA, 19 nt, Homo sapiens
  misc_RNA (1)...(19): siRNA sense strand
ccauggagguguccugcua

SEQ ID NO: 1652990 - RNA, 19 nt, Homo sapiens
  misc_RNA (1)...(19): siRNA sense strand
cugcagcucuucuugaauu

SEQ ID NO: 1652991 - RNA, 19 nt, Homo sapiens
  misc_RNA (1)...(19): siRNA sense strand
gcacuuugcugucugucau

SEQ ID NO: 1652992 - RNA, 19 nt, Homo sapiens
  misc_RNA (1)...(19): siRNA sense strand
ggaaacagaccaguuauac

SEQ ID NO: 1652993 - RNA, 19 nt, Homo sapiens
  misc_RNA (1)...(19): siRNA sense strand
caaacucucuggccugaca

SEQ ID NO: 1652994 - RNA, 19 nt, Homo sapiens
  misc_RNA (1)...(19): siRNA sense strand
acauuggccucaaccauaa

SEQ ID NO: 1652995 - RNA, 19 nt, Homo sapiens
  misc_RNA (1)...(19): siRNA sense strand
ucaccgaggccuucaagua

SEQ ID NO: 1652996 - RNA, 19 nt, Homo sapiens
  misc_RNA (1)...(19): siRNA sense strand
ggagaucgaaagacccaua

SEQ ID NO: 1652997 - RNA, 19 nt, Homo sapiens
  misc_RNA (1)...(19): siRNA sense strand
ccauaaauccuguuucaau

SEQ ID NO: 1652998 - RNA, 19 nt, Homo sapiens
  misc_RNA (1)...(19): siRNA sense strand
gaacucaagaauccuguga

SEQ ID NO: 1652999 - RNA, 19 nt, Homo sapiens
  misc_RNA (1)...(19): siRNA sense strand
ggaaggccuugugcucauu

SEQ ID NO: 1653000 - RNA, 19 nt, Homo sapiens
  misc_RNA (1)...(19): siRNA sense strand
gcagggaaugggcuacaua

SEQ ID NO: 1653001 - RNA, 19 nt, Homo sapiens
  misc_RNA (1)...(19): siRNA sense strand
gaaggccuugugcucauua

SEQ ID NO: 1653002 - RNA, 19 nt, Homo sapiens
  misc_RNA (1)...(19): siRNA sense strand
caaaggaaacagaccaguu

SEQ ID NO: 1653003 - RNA, 19 nt, Homo sapiens
  misc_RNA (1)...(19): siRNA sense strand
ggacaauucgccugcaguu

SEQ ID NO: 1653004 - RNA, 19 nt, Homo sapiens
  misc_RNA (1)...(19): siRNA sense strand
aaccauaaauccuguuuca

SEQ ID NO: 1653005 - RNA, 19 nt, Homo sapiens
  misc_RNA (1)...(19): siRNA sense strand
cccaagacaucaaccaaga

SEQ ID NO: 1653006 - RNA, 19 nt, Homo sapiens
  misc_RNA (1)...(19): siRNA sense strand
acaauucgccugcaguuga

SEQ ID NO: 1653007 - RNA, 19 nt, Homo sapiens
  misc_RNA (1)...(19): siRNA sense strand
caaaccacuucuaaaugau

SEQ ID NO: 1653008 - RNA, 19 nt, Homo sapiens
  misc_RNA (1)...(19): siRNA sense strand
gcauauugcccaagacauc

SEQ ID NO: 1653009 - RNA, 19 nt, Homo sapiens
  misc_RNA (1)...(19): siRNA sense strand
gauauagaaacaacucaug

SEQ ID NO: 1653010 - RNA, 19 nt, Homo sapiens
  misc_RNA (1)...(19): siRNA sense strand
uaaauccuguuucaaugca

SEQ ID NO: 1653011 - RNA, 19 nt, Homo sapiens
  misc_RNA (1)...(19): siRNA sense strand
gagaucacccagcacuuug

SEQ ID NO: 1653012 - RNA, 19 nt, Homo sapiens
  misc_RNA (1)...(19): siRNA sense strand
ucagucagauggaacucaa

SEQ ID NO: 1653013 - RNA, 19 nt, Homo sapiens
  misc_RNA (1)...(19): siRNA sense strand
gccuugugcucauuaaugu

SEQ ID NO: 1653014 - RNA, 19 nt, Homo sapiens
  misc_RNA (1)...(19): siRNA sense strand
ccucggcucuggagaaagu

SEQ ID NO: 1653015 - RNA, 19 nt, Homo sapiens
  misc_RNA (1)...(19): siRNA sense strand
ugacugggcagcuuccaaa

SEQ ID NO: 1653016 - RNA, 19 nt, Homo sapiens
  misc_RNA (1)...(19): siRNA sense strand
ggaaggugcacccucuuuc

SEQ ID NO: 1653017 - RNA, 19 nt, Homo sapiens
  misc_RNA (1)...(19): siRNA sense strand
cagcagauuugcacucaac

SEQ ID NO: 1653018 - RNA, 19 nt, Homo sapiens
  misc_RNA (1)...(19): siRNA sense strand
gaaacagaccaguuauacu

SEQ ID NO: 1653019 - RNA, 19 nt, Homo sapiens
  misc_RNA (1)...(19): siRNA sense strand
gaucgaaagacccauacug

SEQ ID NO: 1653020 - RNA, 19 nt, Homo sapiens
  misc_RNA (1)...(19): siRNA sense strand
ccugaacccuauaaauaca

SEQ ID NO: 1653021 - RNA, 19 nt, Homo sapiens
  misc_RNA (1)...(19): siRNA sense strand
gggccaaaaugauaacaaa

SEQ ID NO: 1653022 - RNA, 19 nt, Homo sapiens
  misc_RNA (1)...(19): siRNA sense strand
gauguucagcucacagaga

SEQ ID NO: 1653023 - RNA, 19 nt, Homo sapiens
  misc_RNA (1)...(19): siRNA sense strand
agagaucacccagcacuuu

SEQ ID NO: 1653024 - RNA, 19 nt, Homo sapiens
  misc_RNA (1)...(19): siRNA sense strand
gaaaagcaucauuggaauu

SEQ ID NO: 1653025 - RNA, 19 nt, Homo sapiens
  misc_RNA (1)...(19): siRNA sense strand
ucucuggccugacaaccaa

SEQ ID NO: 1653026 - RNA, 19 nt, Homo sapiens
  misc_RNA (1)...(19): siRNA sense strand
gggaaugggcuacauacca

SEQ ID NO: 1653027 - RNA, 19 nt, Homo sapiens
  misc_RNA (1)...(19): siRNA sense strand
uauuuuggcucaucacuuu

SEQ ID NO: 1653028 - RNA, 19 nt, Homo sapiens
  misc_RNA (1)...(19): siRNA sense strand
aagcaucauuggaauugga

SEQ ID NO: 1653029 - RNA, 19 nt, Homo sapiens
  misc_RNA (1)...(19): siRNA sense strand
ucagauggaacucaagaau

SEQ ID NO: 1653030 - RNA, 19 nt, Homo sapiens
  misc_RNA (1)...(19): siRNA sense strand
cuucuugaauuccuacaau

SEQ ID NO: 1653031 - RNA, 19 nt, Homo sapiens
  misc_RNA (1)...(19): siRNA sense strand
caagacaucaaccaagaca

SEQ ID NO: 1653032 - RNA, 19 nt, Homo sapiens
  misc_RNA (1)...(19): siRNA sense strand
caaaccuacagaaugcaua

SEQ ID NO: 1653033 - RNA, 19 nt, Homo sapiens
  misc_RNA (1)...(19): siRNA sense strand
cuguuucaaugcauucuuu

SEQ ID NO: 1653034 - RNA, 19 nt, Homo sapiens
  misc_RNA (1)...(19): siRNA sense strand
caaccugcagcucuucuug

SEQ ID NO: 1653035 - RNA, 19 nt, Homo sapiens
  misc_RNA (1)...(19): siRNA sense strand
uaacuuugaggauaugcaa

SEQ ID NO: 1653036 - RNA, 19 nt, Homo sapiens
  misc_RNA (1)...(19): siRNA sense strand
agauggaacucaagaaucc

SEQ ID NO: 1653037 - RNA, 19 nt, Homo sapiens
  misc_RNA (1)...(19): siRNA sense strand
ggccuugugcucauuaaug

SEQ ID NO: 1653038 - RNA, 19 nt, Homo sapiens
  misc_RNA (1)...(19): siRNA sense strand
gaggauaugcaagagauca

SEQ ID NO: 1653039 - RNA, 19 nt, Homo sapiens
  misc_RNA (1)...(19): siRNA sense strand
acagagaucaaaccacuuc

SEQ ID NO: 1653040 - RNA, 19 nt, Homo sapiens
  misc_RNA (1)...(19): siRNA sense strand
gaccugauccaaaccuaca

SEQ ID NO: 1653041 - RNA, 19 nt, Homo sapiens
  misc_RNA (1)...(19): siRNA sense strand
uuacauccucagcagauuu

SEQ ID NO: 1653042 - RNA, 19 nt, Homo sapiens
  misc_RNA (1)...(19): siRNA sense strand
aggaaacagaccaguuaua

SEQ ID NO: 1653043 - RNA, 19 nt, Homo sapiens
  misc_RNA (1)...(19): siRNA sense strand
cccuauaaauacaacuuug

SEQ ID NO: 1653044 - RNA, 19 nt, Homo sapiens
  misc_RNA (1)...(19): siRNA sense strand
caauucgccugcaguugag

SEQ ID NO: 1653045 - RNA, 19 nt, Homo sapiens
  misc_RNA (1)...(19): siRNA sense strand
uugaggauaugcaagagau

SEQ ID NO: 1653046 - RNA, 19 nt, Homo sapiens
  misc_RNA (1)...(19): siRNA sense strand
gccugaacccuauaaauac

SEQ ID NO: 1653047 - RNA, 19 nt, Homo sapiens
  misc_RNA (1)...(19): siRNA sense strand
aaaccuacagaaugcauau

SEQ ID NO: 1653048 - RNA, 19 nt, Homo sapiens
  misc_RNA (1)...(19): siRNA sense strand
gcgcuaaaggcuggauuga

SEQ ID NO: 1653049 - RNA, 19 nt, Homo sapiens
  misc_RNA (1)...(19): siRNA sense strand
acucaaccauccagagcuu

SEQ ID NO: 1653050 - RNA, 19 nt, Homo sapiens
  misc_RNA (1)...(19): siRNA sense strand
cauuggaauuggaguugga

SEQ ID NO: 1653051 - RNA, 19 nt, Homo sapiens
  misc_RNA (1)...(19): siRNA sense strand
ugaaaagcaucauuggaau

SEQ ID NO: 1653052 - RNA, 19 nt, Homo sapiens
  misc_RNA (1)...(19): siRNA sense strand
gcuuacauccucagcagau

SEQ ID NO: 1653053 - RNA, 19 nt, Homo sapiens
  misc_RNA (1)...(19): siRNA sense strand
ccgaggccuucaaguacuu

SEQ ID NO: 1653054 - RNA, 19 nt, Homo sapiens
  misc_RNA (1)...(19): siRNA sense strand
gcuguggucgaaugcaauu

SEQ ID NO: 1653055 - RNA, 19 nt, Homo sapiens
  misc_RNA (1)...(19): siRNA sense strand
uguugacccuugcgcuaaa

SEQ ID NO: 1653056 - RNA, 19 nt, Homo sapiens
  misc_RNA (1)...(19): siRNA sense strand
gaggcuuacccaaaggaaa

SEQ ID NO: 1653057 - RNA, 19 nt, Homo sapiens
  misc_RNA (1)...(19): siRNA sense strand
agagaucaaaccacuucua

SEQ ID NO: 1653058 - RNA, 19 nt, Homo sapiens
  misc_RNA (1)...(19): siRNA sense strand
ucaaccauaaauccuguuu

SEQ ID NO: 1653059 - RNA, 19 nt, Homo sapiens
  misc_RNA (1)...(19): siRNA sense strand
cagauggaacucaagaauc

SEQ ID NO: 1653060 - RNA, 19 nt, Homo sapiens
  misc_RNA (1)...(19): siRNA sense strand
aauccuguuucaaugcauu

SEQ ID NO: 1653061 - RNA, 19 nt, Homo sapiens
  misc_RNA (1)...(19): siRNA sense strand
uggaaggccuugugcucau

SEQ ID NO: 1653062 - RNA, 19 nt, Homo sapiens
  misc_RNA (1)...(19): siRNA sense strand
gguccacgucacuauaaga

SEQ ID NO: 1653063 - RNA, 19 nt, Homo sapiens
  misc_RNA (1)...(19): siRNA sense strand
caccgaggccuucaaguac

SEQ ID NO: 1653064 - RNA, 19 nt, Homo sapiens
  misc_RNA (1)...(19): siRNA sense strand
gaaggugcacccucuuucc

SEQ ID NO: 1653065 - RNA, 19 nt, Homo sapiens
  misc_RNA (1)...(19): siRNA sense strand
caccagcaaucagucagau

SEQ ID NO: 1653066 - RNA, 19 nt, Homo sapiens
  misc_RNA (1)...(19): siRNA sense strand
gccggucugucaccagcaa

SEQ ID NO: 1653067 - RNA, 19 nt, Homo sapiens
  misc_RNA (1)...(19): siRNA sense strand
gaucacgaacccacucaac

SEQ ID NO: 1653068 - RNA, 19 nt, Homo sapiens
  misc_RNA (1)...(19): siRNA sense strand
ggaugagcuggcugaaaug

SEQ ID NO: 1653069 - RNA, 19 nt, Homo sapiens
  misc_RNA (1)...(19): siRNA sense strand
ucaaaccacuucuaaauga

SEQ ID NO: 1653070 - RNA, 19 nt, Homo sapiens
  misc_RNA (1)...(19): siRNA sense strand
gaucaaaccacuucuaaau

SEQ ID NO: 1653071 - RNA, 19 nt, Homo sapiens
  misc_RNA (1)...(19): siRNA sense strand
gcagagaccuggagaucga

SEQ ID NO: 1653072 - RNA, 19 nt, Homo sapiens
  misc_RNA (1)...(19): siRNA sense strand
aaacagaccaguuauacua

SEQ ID NO: 1653073 - RNA, 19 nt, Homo sapiens
  misc_RNA (1)...(19): siRNA sense strand
aaaggaaacagaccaguua

SEQ ID NO: 1653074 - RNA, 19 nt, Homo sapiens
  misc_RNA (1)...(19): siRNA sense strand
gaaugcauauugcccaaga

SEQ ID NO: 1653075 - RNA, 19 nt, Homo sapiens
  misc_RNA (1)...(19): siRNA sense strand
gacauuggccucaaccaua

SEQ ID NO: 1653076 - RNA, 19 nt, Homo sapiens
  misc_RNA (1)...(19): siRNA sense strand
gagaucaaaccacuucuaa

SEQ ID NO: 1653077 - RNA, 19 nt, Homo sapiens
  misc_RNA (1)...(19): siRNA sense strand
gcuaaaggcuggauugacu

SEQ ID NO: 1653078 - RNA, 19 nt, Homo sapiens
  misc_RNA (1)...(19): siRNA sense strand
cauaaauccuguuucaaug

SEQ ID NO: 1653079 - RNA, 19 nt, Homo sapiens
  misc_RNA (1)...(19): siRNA sense strand
uaacauaucaugacauugg

SEQ ID NO: 1653080 - RNA, 19 nt, Homo sapiens
  misc_RNA (1)...(19): siRNA sense strand
gaaaugcugccuccuguuc

SEQ ID NO: 1653081 - RNA, 19 nt, Homo sapiens
  misc_RNA (1)...(19): siRNA sense strand
uggaugagcuggcugaaau

SEQ ID NO: 1653082 - RNA, 19 nt, Homo sapiens
  misc_RNA (1)...(19): siRNA sense strand
gauccaaaccuacagaaug

SEQ ID NO: 1653083 - RNA, 19 nt, Homo sapiens
  misc_RNA (1)...(19): siRNA sense strand
cgccugaacccuauaaaua

SEQ ID NO: 1653084 - RNA, 19 nt, Homo sapiens
  misc_RNA (1)...(19): siRNA sense strand
ggaacaugauauagaaaca

SEQ ID NO: 1653085 - RNA, 19 nt, Homo sapiens
  misc_RNA (1)...(19): siRNA sense strand
ccauggagguguccugcua

SEQ ID NO: 1653086 - RNA, 19 nt, Homo sapiens
  misc_RNA (1)...(19): siRNA sense strand
cugcagcucuucuugaauu

SEQ ID NO: 1653087 - RNA, 19 nt, Homo sapiens
  misc_RNA (1)...(19): siRNA sense strand
gcacuuugcugucugucau

SEQ ID NO: 1653088 - RNA, 19 nt, Homo sapiens
  misc_RNA (1)...(19): siRNA sense strand
ggaaacagaccaguuauac

SEQ ID NO: 1653089 - RNA, 19 nt, Homo sapiens
  misc_RNA (1)...(19): siRNA sense strand
caaacucucuggccugaca

SEQ ID NO: 1653090 - RNA, 19 nt, Homo sapiens
  misc_RNA (1)...(19): siRNA sense strand
acauuggccucaaccauaa

SEQ ID NO: 1653091 - RNA, 19 nt, Homo sapiens
  misc_RNA (1)...(19): siRNA sense strand
ucaccgaggccuucaagua

SEQ ID NO: 1653092 - RNA, 19 nt, Homo sapiens
  misc_RNA (1)...(19): siRNA sense strand
ggagaucgaaagacccaua

SEQ ID NO: 1653093 - RNA, 19 nt, Homo sapiens
  misc_RNA (1)...(19): siRNA sense strand
ccauaaauccuguuucaau

SEQ ID NO: 1653094 - RNA, 19 nt, Homo sapiens
  misc_RNA (1)...(19): siRNA sense strand
gaacucaagaauccuguga

SEQ ID NO: 1653095 - RNA, 19 nt, Homo sapiens
  misc_RNA (1)...(19): siRNA sense strand
ggaaggccuugugcucauu

SEQ ID NO: 1653096 - RNA, 19 nt, Homo sapiens
  misc_RNA (1)...(19): siRNA sense strand
gcagggaaugggcuacaua

SEQ ID NO: 1653097 - RNA, 19 nt, Homo sapiens
  misc_RNA (1)...(19): siRNA sense strand
gaaggccuugugcucauua

SEQ ID NO: 1653098 - RNA, 19 nt, Homo sapiens
  misc_RNA (1)...(19): siRNA sense strand
caaaggaaacagaccaguu

SEQ ID NO: 1653099 - RNA, 19 nt, Homo sapiens
  misc_RNA (1)...(19): siRNA sense strand
ggacaauucgccugcaguu

SEQ ID NO: 1653100 - RNA, 19 nt, Homo sapiens
  misc_RNA (1)...(19): siRNA sense strand
aaccauaaauccuguuuca

SEQ ID NO: 1653101 - RNA, 19 nt, Homo sapiens
  misc_RNA (1)...(19): siRNA sense strand
cccaagacaucaaccaaga

SEQ ID NO: 1653102 - RNA, 19 nt, Homo sapiens
  misc_RNA (1)...(19): siRNA sense strand
acaauucgccugcaguuga

SEQ ID NO: 1653103 - RNA, 19 nt, Homo sapiens
  misc_RNA (1)...(19): siRNA sense strand
caaaccacuucuaaaugau

SEQ ID NO: 1653104 - RNA, 19 nt, Homo sapiens
  misc_RNA (1)...(19): siRNA sense strand
gcauauugcccaagacauc

SEQ ID NO: 1653105 - RNA, 19 nt, Homo sapiens
  misc_RNA (1)...(19): siRNA sense strand
gauauagaaacaacucaug

SEQ ID NO: 1653106 - RNA, 19 nt, Homo sapiens
  misc_RNA (1)...(19): siRNA sense strand
uaaauccuguuucaaugca

SEQ ID NO: 1653107 - RNA, 19 nt, Homo sapiens
  misc_RNA (1)...(19): siRNA sense strand
gagaucacccagcacuuug

SEQ ID NO: 1653108 - RNA, 19 nt, Homo sapiens
  misc_RNA (1)...(19): siRNA sense strand
ucagucagauggaacucaa

SEQ ID NO: 1653109 - RNA, 19 nt, Homo sapiens
  misc_RNA (1)...(19): siRNA sense strand
gccuugugcucauuaaugu

SEQ ID NO: 1653110 - RNA, 19 nt, Homo sapiens
  misc_RNA (1)...(19): siRNA sense strand
ccucggcucuggagaaagu

SEQ ID NO: 1653111 - RNA, 19 nt, Homo sapiens
  misc_RNA (1)...(19): siRNA sense strand
ugacugggcagcuuccaaa

SEQ ID NO: 1653112 - RNA, 19 nt, Homo sapiens
  misc_RNA (1)...(19): siRNA sense strand
ggaaggugcacccucuuuc

SEQ ID NO: 1653113 - RNA, 19 nt, Homo sapiens
  misc_RNA (1)...(19): siRNA sense strand
cagcagauuugcacucaac

SEQ ID NO: 1653114 - RNA, 19 nt, Homo sapiens
  misc_RNA (1)...(19): siRNA sense strand
gaaacagaccaguuauacu

SEQ ID NO: 1653115 - RNA, 19 nt, Homo sapiens
  misc_RNA (1)...(19): siRNA sense strand
gaucgaaagacccauacug

SEQ ID NO: 1653116 - RNA, 19 nt, Homo sapiens
  misc_RNA (1)...(19): siRNA sense strand
ccugaacccuauaaauaca

SEQ ID NO: 1653117 - RNA, 19 nt, Homo sapiens
  misc_RNA (1)...(19): siRNA sense strand
gggccaaaaugauaacaaa

SEQ ID NO: 1653118 - RNA, 19 nt, Homo sapiens
  misc_RNA (1)...(19): siRNA sense strand
gauguucagcucacagaga

SEQ ID NO: 1653119 - RNA, 19 nt, Homo sapiens
  misc_RNA (1)...(19): siRNA sense strand
agagaucacccagcacuuu

SEQ ID NO: 1653120 - RNA, 19 nt, Homo sapiens
  misc_RNA (1)...(19): siRNA sense strand
gaaaagcaucauuggaauu

SEQ ID NO: 1653121 - RNA, 19 nt, Homo sapiens
  misc_RNA (1)...(19): siRNA sense strand
ucucuggccugacaaccaa

SEQ ID NO: 1653122 - RNA, 19 nt, Homo sapiens
  misc_RNA (1)...(19): siRNA sense strand
gggaaugggcuacauacca

SEQ ID NO: 1653123 - RNA, 19 nt, Homo sapiens
  misc_RNA (1)...(19): siRNA sense strand
uauuuuggcucaucacuuu

SEQ ID NO: 1653124 - RNA, 19 nt, Homo sapiens
  misc_RNA (1)...(19): siRNA sense strand
aagcaucauuggaauugga

SEQ ID NO: 1653125 - RNA, 19 nt, Homo sapiens
  misc_RNA (1)...(19): siRNA sense strand
ucagauggaacucaagaau

SEQ ID NO: 1653126 - RNA, 19 nt, Homo sapiens
  misc_RNA (1)...(19): siRNA sense strand
cuucuugaauuccuacaau

SEQ ID NO: 1653127 - RNA, 19 nt, Homo sapiens
  misc_RNA (1)...(19): siRNA sense strand
caagacaucaaccaagaca

SEQ ID NO: 1653128 - RNA, 19 nt, Homo sapiens
  misc_RNA (1)...(19): siRNA sense strand
caaaccuacagaaugcaua

SEQ ID NO: 1653129 - RNA, 19 nt, Homo sapiens
  misc_RNA (1)...(19): siRNA sense strand
cuguuucaaugcauucuuu

SEQ ID NO: 1653130 - RNA, 19 nt, Homo sapiens
  misc_RNA (1)...(19): siRNA sense strand
caaccugcagcucuucuug

SEQ ID NO: 1653131 - RNA, 19 nt, Homo sapiens
  misc_RNA (1)...(19): siRNA sense strand
uaacuuugaggauaugcaa

SEQ ID NO: 1653132 - RNA, 19 nt, Homo sapiens
  misc_RNA (1)...(19): siRNA sense strand
agauggaacucaagaaucc

SEQ ID NO: 1653133 - RNA, 19 nt, Homo sapiens
  misc_RNA (1)...(19): siRNA sense strand
ggccuugugcucauuaaug

SEQ ID NO: 1653134 - RNA, 19 nt, Homo sapiens
  misc_RNA (1)...(19): siRNA sense strand
gaggauaugcaagagauca

SEQ ID NO: 1653135 - RNA, 19 nt, Homo sapiens
  misc_RNA (1)...(19): siRNA sense strand
acagagaucaaaccacuuc

SEQ ID NO: 1653136 - RNA, 19 nt, Homo sapiens
  misc_RNA (1)...(19): siRNA sense strand
gaccugauccaaaccuaca

SEQ ID NO: 1653137 - RNA, 19 nt, Homo sapiens
  misc_RNA (1)...(19): siRNA sense strand
uuacauccucagcagauuu

SEQ ID NO: 1653138 - RNA, 19 nt, Homo sapiens
  misc_RNA (1)...(19): siRNA sense strand
aggaaacagaccaguuaua

SEQ ID NO: 1653139 - RNA, 19 nt, Homo sapiens
  misc_RNA (1)...(19): siRNA sense strand
cccuauaaauacaacuuug

SEQ ID NO: 1653140 - RNA, 19 nt, Homo sapiens
  misc_RNA (1)...(19): siRNA sense strand
caauucgccugcaguugag

SEQ ID NO: 1653141 - RNA, 19 nt, Homo sapiens
  misc_RNA (1)...(19): siRNA sense strand
uugaggauaugcaagagau

SEQ ID NO: 1653142 - RNA, 19 nt, Homo sapiens
  misc_RNA (1)...(19): siRNA sense strand
gccugaacccuauaaauac

SEQ ID NO: 1653143 - RNA, 19 nt, Homo sapiens
  misc_RNA (1)...(19): siRNA sense strand
aaaccuacagaaugcauau

SEQ ID NO: 1653144 - RNA, 19 nt, Homo sapiens
  misc_RNA (1)...(19): siRNA sense strand
gcgcuaaaggcuggauuga

SEQ ID NO: 1653145 - RNA, 19 nt, Homo sapiens
  misc_RNA (1)...(19): siRNA sense strand
acucaaccauccagagcuu

SEQ ID NO: 1653146 - RNA, 19 nt, Homo sapiens
  misc_RNA (1)...(19): siRNA sense strand
cauuggaauuggaguugga

SEQ ID NO: 1653147 - RNA, 19 nt, Homo sapiens
  misc_RNA (1)...(19): siRNA sense strand
ugaaaagcaucauuggaau

SEQ ID NO: 1653148 - RNA, 19 nt, Homo sapiens
  misc_RNA (1)...(19): siRNA sense strand
gcuuacauccucagcagau

SEQ ID NO: 1653149 - RNA, 19 nt, Homo sapiens
  misc_RNA (1)...(19): siRNA sense strand
ccgaggccuucaaguacuu

SEQ ID NO: 1653150 - RNA, 19 nt, Homo sapiens
  misc_RNA (1)...(19): siRNA sense strand
gcuguggucgaaugcaauu

SEQ ID NO: 1653151 - RNA, 19 nt, Homo sapiens
  misc_RNA (1)...(19): siRNA sense strand
uguugacccuugcgcuaaa

SEQ ID NO: 1653152 - RNA, 19 nt, Homo sapiens
  misc_RNA (1)...(19): siRNA sense strand
gaggcuuacccaaaggaaa

SEQ ID NO: 1653153 - RNA, 19 nt, Homo sapiens
  misc_RNA (1)...(19): siRNA sense strand
agagaucaaaccacuucua

SEQ ID NO: 1653154 - RNA, 19 nt, Homo sapiens
  misc_RNA (1)...(19): siRNA sense strand
ucaaccauaaauccuguuu

SEQ ID NO: 1653155 - RNA, 19 nt, Homo sapiens
  misc_RNA (1)...(19): siRNA sense strand
cagauggaacucaagaauc

SEQ ID NO: 1653156 - RNA, 19 nt, Homo sapiens
  misc_RNA (1)...(19): siRNA sense strand
aauccuguuucaaugcauu

SEQ ID NO: 1653157 - RNA, 19 nt, Homo sapiens
  misc_RNA (1)...(19): siRNA sense strand
uggaaggccuugugcucau

SEQ ID NO: 1653158 - RNA, 19 nt, Homo sapiens
  misc_RNA (1)...(19): siRNA sense strand
gguccacgucacuauaaga

SEQ ID NO: 1653159 - RNA, 19 nt, Homo sapiens
  misc_RNA (1)...(19): siRNA sense strand
caccgaggccuucaaguac

SEQ ID NO: 1653160 - RNA, 19 nt, Homo sapiens
  misc_RNA (1)...(19): siRNA sense strand
gaaggugcacccucuuucc

SEQ ID NO: 1653161 - RNA, 19 nt, Homo sapiens
  misc_RNA (1)...(19): siRNA sense strand
caccagcaaucagucagau

SEQ ID NO: 1653162 - RNA, 19 nt, Homo sapiens
  misc_RNA (1)...(19): siRNA sense strand
gccggucugucaccagcaa

SEQ ID NO: 1653163 - RNA, 19 nt, Homo sapiens
  misc_RNA (1)...(19): siRNA sense strand
gaucacgaacccacucaac

SEQ ID NO: 1653164 - RNA, 19 nt, Homo sapiens
  misc_RNA (1)...(19): siRNA sense strand
ggaugagcuggcugaaaug

SEQ ID NO: 1653165 - RNA, 19 nt, Homo sapiens
  misc_RNA (1)...(19): siRNA sense strand
gaaaccagcuaaucaagua

SEQ ID NO: 1653166 - RNA, 19 nt, Homo sapiens
  misc_RNA (1)...(19): siRNA sense strand
gggaguagguugcaucuuu

SEQ ID NO: 1653167 - RNA, 19 nt, Homo sapiens
  misc_RNA (1)...(19): siRNA sense strand
ggaaggaucuuaugcuaca

SEQ ID NO: 1653168 - RNA, 19 nt, Homo sapiens
  misc_RNA (1)...(19): siRNA sense strand
uaaagagggugcauucuga

SEQ ID NO: 1653169 - RNA, 19 nt, Homo sapiens
  misc_RNA (1)...(19): siRNA sense strand
gccaacaagucccaaauuu

SEQ ID NO: 1653170 - RNA, 19 nt, Homo sapiens
  misc_RNA (1)...(19): siRNA sense strand
guacagaccuccagauguc

SEQ ID NO: 1653171 - RNA, 19 nt, Homo sapiens
  misc_RNA (1)...(19): siRNA sense strand
gaucuuaugcuacaguaua

SEQ ID NO: 1653172 - RNA, 19 nt, Homo sapiens
  misc_RNA (1)...(19): siRNA sense strand
ggaauggacucagugauca

SEQ ID NO: 1653173 - RNA, 19 nt, Homo sapiens
  misc_RNA (1)...(19): siRNA sense strand
gaaaugauccaaggaguug

SEQ ID NO: 1653174 - RNA, 19 nt, Homo sapiens
  misc_RNA (1)...(19): siRNA sense strand
cagggaagcuucucuuuua

SEQ ID NO: 1653175 - RNA, 19 nt, Homo sapiens
  misc_RNA (1)...(19): siRNA sense strand
aguuaaagcuggcagauuu

SEQ ID NO: 1653176 - RNA, 19 nt, Homo sapiens
  misc_RNA (1)...(19): siRNA sense strand
cagauaaugugaaguuguu

SEQ ID NO: 1653177 - RNA, 19 nt, Homo sapiens
  misc_RNA (1)...(19): siRNA sense strand
ggaguagguugcaucuuug

SEQ ID NO: 1653178 - RNA, 19 nt, Homo sapiens
  misc_RNA (1)...(19): siRNA sense strand
caagguaaaugggaaguug

SEQ ID NO: 1653179 - RNA, 19 nt, Homo sapiens
  misc_RNA (1)...(19): siRNA sense strand
aaagcugacucauaugaaa

SEQ ID NO: 1653180 - RNA, 19 nt, Homo sapiens
  misc_RNA (1)...(19): siRNA sense strand
gcaaagagucaccuaaagu

SEQ ID NO: 1653181 - RNA, 19 nt, Homo sapiens
  misc_RNA (1)...(19): siRNA sense strand
caaagagucaccuaaaguu

SEQ ID NO: 1653182 - RNA, 19 nt, Homo sapiens
  misc_RNA (1)...(19): siRNA sense strand
ggacaccuuucacagcuau

SEQ ID NO: 1653183 - RNA, 19 nt, Homo sapiens
  misc_RNA (1)...(19): siRNA sense strand
ggccuggaguucauucuuu

SEQ ID NO: 1653184 - RNA, 19 nt, Homo sapiens
  misc_RNA (1)...(19): siRNA sense strand
gaaagacauucaggaucaa

SEQ ID NO: 1653185 - RNA, 19 nt, Homo sapiens
  misc_RNA (1)...(19): siRNA sense strand
ucaccgacaugucuucuau

SEQ ID NO: 1653186 - RNA, 19 nt, Homo sapiens
  misc_RNA (1)...(19): siRNA sense strand
ccuccaagcuccuacaaug

SEQ ID NO: 1653187 - RNA, 19 nt, Homo sapiens
  misc_RNA (1)...(19): siRNA sense strand
gccuggaguucauucuuua

SEQ ID NO: 1653188 - RNA, 19 nt, Homo sapiens
  misc_RNA (1)...(19): siRNA sense strand
aaagagucaccuaaaguua

SEQ ID NO: 1653189 - RNA, 19 nt, Homo sapiens
  misc_RNA (1)...(19): siRNA sense strand
caacuugaacgaauauuuc

SEQ ID NO: 1653190 - RNA, 19 nt, Homo sapiens
  misc_RNA (1)...(19): siRNA sense strand
ggaaguugguagcucugaa

SEQ ID NO: 1653191 - RNA, 19 nt, Homo sapiens
  misc_RNA (1)...(19): siRNA sense strand
gaauaugugcacacugauu

SEQ ID NO: 1653192 - RNA, 19 nt, Homo sapiens
  misc_RNA (1)...(19): siRNA sense strand
uugaauaugugcacacuga

SEQ ID NO: 1653193 - RNA, 19 nt, Homo sapiens
  misc_RNA (1)...(19): siRNA sense strand
ggaagcuucucuuuuaaaa

SEQ ID NO: 1653194 - RNA, 19 nt, Homo sapiens
  misc_RNA (1)...(19): siRNA sense strand
gaaaagcugacucauauga

SEQ ID NO: 1653195 - RNA, 19 nt, Homo sapiens
  misc_RNA (1)...(19): siRNA sense strand
ccaacgaagugguuaccuu

SEQ ID NO: 1653196 - RNA, 19 nt, Homo sapiens
  misc_RNA (1)...(19): siRNA sense strand
uggaaaagcugacucauau

SEQ ID NO: 1653197 - RNA, 19 nt, Homo sapiens
  misc_RNA (1)...(19): siRNA sense strand
ggcaaagagucaccuaaag

SEQ ID NO: 1653198 - RNA, 19 nt, Homo sapiens
  misc_RNA (1)...(19): siRNA sense strand
gcacagagaccugaaacca

SEQ ID NO: 1653199 - RNA, 19 nt, Homo sapiens
  misc_RNA (1)...(19): siRNA sense strand
guaaagagggugcauucug

SEQ ID NO: 1653200 - RNA, 19 nt, Homo sapiens
  misc_RNA (1)...(19): siRNA sense strand
ggacacauggccuggaguu

SEQ ID NO: 1653201 - RNA, 19 nt, Homo sapiens
  misc_RNA (1)...(19): siRNA sense strand
ccacacauacuccaacgaa

SEQ ID NO: 1653202 - RNA, 19 nt, Homo sapiens
  misc_RNA (1)...(19): siRNA sense strand
ccaacaagucccaaauuug

SEQ ID NO: 1653203 - RNA, 19 nt, Homo sapiens
  misc_RNA (1)...(19): siRNA sense strand
acauagugcuacuucauga

SEQ ID NO: 1653204 - RNA, 19 nt, Homo sapiens
  misc_RNA (1)...(19): siRNA sense strand
gguugcaucuuuguugaaa

SEQ ID NO: 1653205 - RNA, 19 nt, Homo sapiens
  misc_RNA (1)...(19): siRNA sense strand
ccaccugccuugacaugug

SEQ ID NO: 1653206 - RNA, 19 nt, Homo sapiens
  misc_RNA (1)...(19): siRNA sense strand
guucauucuuuaccacauu

SEQ ID NO: 1653207 - RNA, 19 nt, Homo sapiens
  misc_RNA (1)...(19): siRNA sense strand
guagguugcaucuuuguug

SEQ ID NO: 1653208 - RNA, 19 nt, Homo sapiens
  misc_RNA (1)...(19): siRNA sense strand
ccaaggaguugcugcuuuu

SEQ ID NO: 1653209 - RNA, 19 nt, Homo sapiens
  misc_RNA (1)...(19): siRNA sense strand
ugagaaaccagcuaaucaa

SEQ ID NO: 1653210 - RNA, 19 nt, Homo sapiens
  misc_RNA (1)...(19): siRNA sense strand
gggaauggacucagugauc

SEQ ID NO: 1653211 - RNA, 19 nt, Homo sapiens
  misc_RNA (1)...(19): siRNA sense strand
accgacaugucuucuauuu

SEQ ID NO: 1653212 - RNA, 19 nt, Homo sapiens
  misc_RNA (1)...(19): siRNA sense strand
ugaucaggcugcaggaaga

SEQ ID NO: 1653213 - RNA, 19 nt, Homo sapiens
  misc_RNA (1)...(19): siRNA sense strand
gcaaaagucuaucaaacag

SEQ ID NO: 1653214 - RNA, 19 nt, Homo sapiens
  misc_RNA (1)...(19): siRNA sense strand
gaacucaccgacaugucuu

SEQ ID NO: 1653215 - RNA, 19 nt, Homo sapiens
  misc_RNA (1)...(19): siRNA sense strand
cagaacgcuuuacccugua

SEQ ID NO: 1653216 - RNA, 19 nt, Homo sapiens
  misc_RNA (1)...(19): siRNA sense strand
uaacauagugcuacuucau

SEQ ID NO: 1653217 - RNA, 19 nt, Homo sapiens
  misc_RNA (1)...(19): siRNA sense strand
ggacacagagcacuuuuga

SEQ ID NO: 1653218 - RNA, 19 nt, Homo sapiens
  misc_RNA (1)...(19): siRNA sense strand
ggaacucaccgacaugucu

SEQ ID NO: 1653219 - RNA, 19 nt, Homo sapiens
  misc_RNA (1)...(19): siRNA sense strand
uagguugcaucuuuguuga

SEQ ID NO: 1653220 - RNA, 19 nt, Homo sapiens
  misc_RNA (1)...(19): siRNA sense strand
gcuaacauagugcuacuuc

SEQ ID NO: 1653221 - RNA, 19 nt, Homo sapiens
  misc_RNA (1)...(19): siRNA sense strand
agacaagcauggaauaagc

SEQ ID NO: 1653222 - RNA, 19 nt, Homo sapiens
  misc_RNA (1)...(19): siRNA sense strand
gcagauuucggucuugcaa

SEQ ID NO: 1653223 - RNA, 19 nt, Homo sapiens
  misc_RNA (1)...(19): siRNA sense strand
gcuggcagauuucggucuu

SEQ ID NO: 1653224 - RNA, 19 nt, Homo sapiens
  misc_RNA (1)...(19): siRNA sense strand
ggggaaggaucuuaugcua

SEQ ID NO: 1653225 - RNA, 19 nt, Homo sapiens
  misc_RNA (1)...(19): siRNA sense strand
uccaaggaguugcugcuuu

SEQ ID NO: 1653226 - RNA, 19 nt, Homo sapiens
  misc_RNA (1)...(19): siRNA sense strand
caucuuuguugaaaugauc

SEQ ID NO: 1653227 - RNA, 19 nt, Homo sapiens
  misc_RNA (1)...(19): siRNA sense strand
gggacaccuuucacagcua

SEQ ID NO: 1653228 - RNA, 19 nt, Homo sapiens
  misc_RNA (1)...(19): siRNA sense strand
uaugggaacucaccgacau

SEQ ID NO: 1653229 - RNA, 19 nt, Homo sapiens
  misc_RNA (1)...(19): siRNA sense strand
ccacggcuaugggaacuca

SEQ ID NO: 1653230 - RNA, 19 nt, Homo sapiens
  misc_RNA (1)...(19): siRNA sense strand
ccaagcuccuacaauguuc

SEQ ID NO: 1653231 - RNA, 19 nt, Homo sapiens
  misc_RNA (1)...(19): siRNA sense strand
gagaaaccagcuaaucaag

SEQ ID NO: 1653232 - RNA, 19 nt, Homo sapiens
  misc_RNA (1)...(19): siRNA sense strand
ugaaaugauccaaggaguu

SEQ ID NO: 1653233 - RNA, 19 nt, Homo sapiens
  misc_RNA (1)...(19): siRNA sense strand
gcauccagauaaugugaag

SEQ ID NO: 1653234 - RNA, 19 nt, Homo sapiens
  misc_RNA (1)...(19): siRNA sense strand
aauaugugcacacugauuu

SEQ ID NO: 1653235 - RNA, 19 nt, Homo sapiens
  misc_RNA (1)...(19): siRNA sense strand
uggcaaagagucaccuaaa

SEQ ID NO: 1653236 - RNA, 19 nt, Homo sapiens
  misc_RNA (1)...(19): siRNA sense strand
uugcaucuuuguugaaaug

SEQ ID NO: 1653237 - RNA, 19 nt, Homo sapiens
  misc_RNA (1)...(19): siRNA sense strand
gucaguacauggacaagca

SEQ ID NO: 1653238 - RNA, 19 nt, Homo sapiens
  misc_RNA (1)...(19): siRNA sense strand
gaaguugguagcucugaag

SEQ ID NO: 1653239 - RNA, 19 nt, Homo sapiens
  misc_RNA (1)...(19): siRNA sense strand
ugugcacacugauuuaugu

SEQ ID NO: 1653240 - RNA, 19 nt, Homo sapiens
  misc_RNA (1)...(19): siRNA sense strand
aggagacgcugacacuugu

SEQ ID NO: 1653241 - RNA, 19 nt, Homo sapiens
  misc_RNA (1)...(19): siRNA sense strand
ccaaggagacgcugacacu

SEQ ID NO: 1653242 - RNA, 19 nt, Homo sapiens
  misc_RNA (1)...(19): siRNA sense strand
gcucagcuaugugaaccau

SEQ ID NO: 1653243 - RNA, 19 nt, Homo sapiens
  misc_RNA (1)...(19): siRNA sense strand
gaauggacucagugaucaa

SEQ ID NO: 1653244 - RNA, 19 nt, Homo sapiens
  misc_RNA (1)...(19): siRNA sense strand
gcaucuuuguugaaaugau

SEQ ID NO: 1653245 - RNA, 19 nt, Homo sapiens
  misc_RNA (1)...(19): siRNA sense strand
gguacagaccuccagaugu

SEQ ID NO: 1653246 - RNA, 19 nt, Homo sapiens
  misc_RNA (1)...(19): siRNA sense strand
gaguuaaagcuggcagauu

SEQ ID NO: 1653247 - RNA, 19 nt, Homo sapiens
  misc_RNA (1)...(19): siRNA sense strand
aaggagacgcugacacuug

SEQ ID NO: 1653248 - RNA, 19 nt, Homo sapiens
  misc_RNA (1)...(19): siRNA sense strand
caaguaaagagggugcauu

SEQ ID NO: 1653249 - RNA, 19 nt, Homo sapiens
  misc_RNA (1)...(19): siRNA sense strand
acacauggccuggaguuca

SEQ ID NO: 1653250 - RNA, 19 nt, Homo sapiens
  misc_RNA (1)...(19): siRNA sense strand
gccagggaauggacucagu

SEQ ID NO: 1653251 - RNA, 19 nt, Homo sapiens
  misc_RNA (1)...(19): siRNA sense strand
gcaagguaaaugggaaguu

SEQ ID NO: 1653252 - RNA, 19 nt, Homo sapiens
  misc_RNA (1)...(19): siRNA sense strand
cacauggccuggaguucau

SEQ ID NO: 1653253 - RNA, 19 nt, Homo sapiens
  misc_RNA (1)...(19): siRNA sense strand
caccaaaugaggacacaug

SEQ ID NO: 1653254 - RNA, 19 nt, Homo sapiens
  misc_RNA (1)...(19): siRNA sense strand
acacauacuccaacgaagu

SEQ ID NO: 1653255 - RNA, 19 nt, Homo sapiens
  misc_RNA (1)...(19): siRNA sense strand
ccagauaaugugaaguugu

SEQ ID NO: 1653256 - RNA, 19 nt, Homo sapiens
  misc_RNA (1)...(19): siRNA sense strand
cagcuaaucaaguaaagag

SEQ ID NO: 1653257 - RNA, 19 nt, Homo sapiens
  misc_RNA (1)...(19): siRNA sense strand
ccaccagcguuauauuuug

SEQ ID NO: 1653258 - RNA, 19 nt, Homo sapiens
  misc_RNA (1)...(19): siRNA sense strand
gacauucaggaucaacuug

SEQ ID NO: 1653259 - RNA, 19 nt, Homo sapiens
  misc_RNA (1)...(19): siRNA sense strand
gagcacuuuugacccauuu

SEQ ID NO: 1653260 - RNA, 19 nt, Homo sapiens
  misc_RNA (1)...(19): siRNA sense strand
uuagacaagcauggaauaa

SEQ ID NO: 1653261 - RNA, 19 nt, Homo sapiens
  misc_RNA (1)...(19): siRNA sense strand
ucaaaccccuggacacaau

SEQ ID NO: 1653262 - RNA, 19 nt, Homo sapiens
  misc_RNA (1)...(19): siRNA sense strand
cuuagacaagcauggaaua

SEQ ID NO: 1653263 - RNA, 19 nt, Homo sapiens
  misc_RNA (1)...(19): siRNA sense strand
uugagaaaccagcuaauca

SEQ ID NO: 1653264 - RNA, 19 nt, Homo sapiens
  misc_RNA (1)...(19): siRNA sense strand
uccaagcuccuacaauguu

SEQ ID NO: 1653265 - RNA, 19 nt, Homo sapiens
  misc_RNA (1)...(19): siRNA sense strand
gagagaaguuugcuuuauu

SEQ ID NO: 1653266 - RNA, 19 nt, Homo sapiens
  misc_RNA (1)...(19): siRNA sense strand
ccaaagacguggagagaga

SEQ ID NO: 1653267 - RNA, 19 nt, Homo sapiens
  misc_RNA (1)...(19): siRNA sense strand
ggagagagaaguuugcuuu

SEQ ID NO: 1653268 - RNA, 19 nt, Homo sapiens
  misc_RNA (1)...(19): siRNA sense strand
ggcaugcacucuucagaua

SEQ ID NO: 1653269 - RNA, 19 nt, Homo sapiens
  misc_RNA (1)...(19): siRNA sense strand
ggacagcuguacaugauca

SEQ ID NO: 1653270 - RNA, 19 nt, Homo sapiens
  misc_RNA (1)...(19): siRNA sense strand
gauauugccugcgaugaaa

SEQ ID NO: 1653271 - RNA, 19 nt, Homo sapiens
  misc_RNA (1)...(19): siRNA sense strand
ccgaaauucuccauucaua

SEQ ID NO: 1653272 - RNA, 19 nt, Homo sapiens
  misc_RNA (1)...(19): siRNA sense strand
gaauacacauguuccuuuc

SEQ ID NO: 1653273 - RNA, 19 nt, Homo sapiens
  misc_RNA (1)...(19): siRNA sense strand
ggaugaaguccgagaauuu

SEQ ID NO: 1653274 - RNA, 19 nt, Homo sapiens
  misc_RNA (1)...(19): siRNA sense strand
gaacuauuaucccuacaca

SEQ ID NO: 1653275 - RNA, 19 nt, Homo sapiens
  misc_RNA (1)...(19): siRNA sense strand
gaccagaguggaacaauuu

SEQ ID NO: 1653276 - RNA, 19 nt, Homo sapiens
  misc_RNA (1)...(19): siRNA sense strand
gagaaggcuuggaacuauu

SEQ ID NO: 1653277 - RNA, 19 nt, Homo sapiens
  misc_RNA (1)...(19): siRNA sense strand
agggaaggcuggagagaua

SEQ ID NO: 1653278 - RNA, 19 nt, Homo sapiens
  misc_RNA (1)...(19): siRNA sense strand
gagagagaaguuugcuuua

SEQ ID NO: 1653279 - RNA, 19 nt, Homo sapiens
  misc_RNA (1)...(19): siRNA sense strand
agagaaguuugcuuuauug

SEQ ID NO: 1653280 - RNA, 19 nt, Homo sapiens
  misc_RNA (1)...(19): siRNA sense strand
agagaaggcuuggaacuau

SEQ ID NO: 1653281 - RNA, 19 nt, Homo sapiens
  misc_RNA (1)...(19): siRNA sense strand
gcuggugacugugaaguuu

SEQ ID NO: 1653282 - RNA, 19 nt, Homo sapiens
  misc_RNA (1)...(19): siRNA sense strand
ccuacacaauuacagaaua

SEQ ID NO: 1653283 - RNA, 19 nt, Homo sapiens
  misc_RNA (1)...(19): siRNA sense strand
ccagagcgcuacuacaaag

SEQ ID NO: 1653284 - RNA, 19 nt, Homo sapiens
  misc_RNA (1)...(19): siRNA sense strand
ccuacaagcuggugacugu

SEQ ID NO: 1653285 - RNA, 19 nt, Homo sapiens
  misc_RNA (1)...(19): siRNA sense strand
ggguguaucucaacagcaa

SEQ ID NO: 1653286 - RNA, 19 nt, Homo sapiens
  misc_RNA (1)...(19): siRNA sense strand
ggaagccaccaacaagaaa

SEQ ID NO: 1653287 - RNA, 19 nt, Homo sapiens
  misc_RNA (1)...(19): siRNA sense strand
agagagaaguuugcuuuau

SEQ ID NO: 1653288 - RNA, 19 nt, Homo sapiens
  misc_RNA (1)...(19): siRNA sense strand
ugacagagaaggcuuggaa

SEQ ID NO: 1653289 - RNA, 19 nt, Homo sapiens
  misc_RNA (1)...(19): siRNA sense strand
gaugaaguccgagaauuug

SEQ ID NO: 1653290 - RNA, 19 nt, Homo sapiens
  misc_RNA (1)...(19): siRNA sense strand
gcaugccgcucaccguaga

SEQ ID NO: 1653291 - RNA, 19 nt, Homo sapiens
  misc_RNA (1)...(19): siRNA sense strand
ccacagacgcacccgaauu

SEQ ID NO: 1653292 - RNA, 19 nt, Homo sapiens
  misc_RNA (1)...(19): siRNA sense strand
gcaaacacagccaugaaca

SEQ ID NO: 1653293 - RNA, 19 nt, Homo sapiens
  misc_RNA (1)...(19): siRNA sense strand
cacagacgcacccgaauuu

SEQ ID NO: 1653294 - RNA, 19 nt, Homo sapiens
  misc_RNA (1)...(19): siRNA sense strand
ggacaacaaaggaagcaau

SEQ ID NO: 1653295 - RNA, 19 nt, Homo sapiens
  misc_RNA (1)...(19): siRNA sense strand
agaaggcuuggaacuauua

SEQ ID NO: 1653296 - RNA, 19 nt, Homo sapiens
  misc_RNA (1)...(19): siRNA sense strand
cagagaaggcuuggaacua

SEQ ID NO: 1653297 - RNA, 19 nt, Homo sapiens
  misc_RNA (1)...(19): siRNA sense strand
gcaugcacucuucagauaa

SEQ ID NO: 1653298 - RNA, 19 nt, Homo sapiens
  misc_RNA (1)...(19): siRNA sense strand
cccagaaacucucacacuu

SEQ ID NO: 1653299 - RNA, 19 nt, Homo sapiens
  misc_RNA (1)...(19): siRNA sense strand
agaccagaguggaacaauu

SEQ ID NO: 1653300 - RNA, 19 nt, Homo sapiens
  misc_RNA (1)...(19): siRNA sense strand
agaauacacauguuccuuu

SEQ ID NO: 1653301 - RNA, 19 nt, Homo sapiens
  misc_RNA (1)...(19): siRNA sense strand
ccaaguaugaggacaacaa

SEQ ID NO: 1653302 - RNA, 19 nt, Homo sapiens
  misc_RNA (1)...(19): siRNA sense strand
caaagaaucugaggauccu

SEQ ID NO: 1653303 - RNA, 19 nt, Homo sapiens
  misc_RNA (1)...(19): siRNA sense strand
acacagccaugaacagagu

SEQ ID NO: 1653304 - RNA, 19 nt, Homo sapiens
  misc_RNA (1)...(19): siRNA sense strand
aaacacagccaugaacaga

SEQ ID NO: 1653305 - RNA, 19 nt, Homo sapiens
  misc_RNA (1)...(19): siRNA sense strand
gagacauucugcugauugg

SEQ ID NO: 1653306 - RNA, 19 nt, Homo sapiens
  misc_RNA (1)...(19): siRNA sense strand
caaggugguccgagacauu

SEQ ID NO: 1653307 - RNA, 19 nt, Homo sapiens
  misc_RNA (1)...(19): siRNA sense strand
cuacaaagaaucugaggau

SEQ ID NO: 1653308 - RNA, 19 nt, Homo sapiens
  misc_RNA (1)...(19): siRNA sense strand
cuacacaauuacagaauac

SEQ ID NO: 1653309 - RNA, 19 nt, Homo sapiens
  misc_RNA (1)...(19): siRNA sense strand
gagcgcuacuacaaagaau

SEQ ID NO: 1653310 - RNA, 19 nt, Homo sapiens
  misc_RNA (1)...(19): siRNA sense strand
caaguaugaggacaacaaa

SEQ ID NO: 1653311 - RNA, 19 nt, Homo sapiens
  misc_RNA (1)...(19): siRNA sense strand
ugaacgagccacucaggaa

SEQ ID NO: 1653312 - RNA, 19 nt, Homo sapiens
  misc_RNA (1)...(19): siRNA sense strand
ccagaaacucucacacuuc

SEQ ID NO: 1653313 - RNA, 19 nt, Homo sapiens
  misc_RNA (1)...(19): siRNA sense strand
gagaaguuugcuuuauuga

SEQ ID NO: 1653314 - RNA, 19 nt, Homo sapiens
  misc_RNA (1)...(19): siRNA sense strand
cgaaauucuccauucauau

SEQ ID NO: 1653315 - RNA, 19 nt, Homo sapiens
  misc_RNA (1)...(19): siRNA sense strand
uggaugaaguccgagaauu

SEQ ID NO: 1653316 - RNA, 19 nt, Homo sapiens
  misc_RNA (1)...(19): siRNA sense strand
gacaacaaaggaagcaaug

SEQ ID NO: 1653317 - RNA, 19 nt, Homo sapiens
  misc_RNA (1)...(19): siRNA sense strand
cagcaaacacagccaugaa

SEQ ID NO: 1653318 - RNA, 19 nt, Homo sapiens
  misc_RNA (1)...(19): siRNA sense strand
caauuucuaucuccagcau

SEQ ID NO: 1653319 - RNA, 19 nt, Homo sapiens
  misc_RNA (1)...(19): siRNA sense strand
cgagacauucugcugauug

SEQ ID NO: 1653320 - RNA, 19 nt, Homo sapiens
  misc_RNA (1)...(19): siRNA sense strand
caugucggcccaaaucuga

SEQ ID NO: 1653321 - RNA, 19 nt, Homo sapiens
  misc_RNA (1)...(19): siRNA sense strand
acuauuaucccuacacaau

SEQ ID NO: 1653322 - RNA, 19 nt, Homo sapiens
  misc_RNA (1)...(19): siRNA sense strand
caacaaaggaagcaaugac

SEQ ID NO: 1653323 - RNA, 19 nt, Homo sapiens
  misc_RNA (1)...(19): siRNA sense strand
auacacauguuccuuucug

SEQ ID NO: 1653324 - RNA, 19 nt, Homo sapiens
  misc_RNA (1)...(19): siRNA sense strand
uuggacagcuguacaugau

SEQ ID NO: 1653325 - RNA, 19 nt, Homo sapiens
  misc_RNA (1)...(19): siRNA sense strand
ccauucauauagaaaccaa

SEQ ID NO: 1653326 - RNA, 19 nt, Homo sapiens
  misc_RNA (1)...(19): siRNA sense strand
caugcacucuucagauaag

SEQ ID NO: 1653327 - RNA, 19 nt, Homo sapiens
  misc_RNA (1)...(19): siRNA sense strand
ggacauagacaggcuuuug

SEQ ID NO: 1653328 - RNA, 19 nt, Homo sapiens
  misc_RNA (1)...(19): siRNA sense strand
ugauauugccugcgaugaa

SEQ ID NO: 1653329 - RNA, 19 nt, Homo sapiens
  misc_RNA (1)...(19): siRNA sense strand
caccguagacgaguacaaa

SEQ ID NO: 1653330 - RNA, 19 nt, Homo sapiens
  misc_RNA (1)...(19): siRNA sense strand
ccgagaagcggguguaucu

SEQ ID NO: 1653331 - RNA, 19 nt, Homo sapiens
  misc_RNA (1)...(19): siRNA sense strand
ucaggaagccaccaacaag

SEQ ID NO: 1653332 - RNA, 19 nt, Homo sapiens
  misc_RNA (1)...(19): siRNA sense strand
agaagcggguguaucucaa

SEQ ID NO: 1653333 - RNA, 19 nt, Homo sapiens
  misc_RNA (1)...(19): siRNA sense strand
gcuacuacaaagaaucuga

SEQ ID NO: 1653334 - RNA, 19 nt, Homo sapiens
  misc_RNA (1)...(19): siRNA sense strand
guagacgaguacaaaauug

SEQ ID NO: 1653335 - RNA, 19 nt, Homo sapiens
  misc_RNA (1)...(19): siRNA sense strand
uuacagaauacacauguuc

SEQ ID NO: 1653336 - RNA, 19 nt, Homo sapiens
  misc_RNA (1)...(19): siRNA sense strand
cugccgaaauucuccauuc

SEQ ID NO: 1653337 - RNA, 19 nt, Homo sapiens
  misc_RNA (1)...(19): siRNA sense strand
caggaagccaccaacaaga

SEQ ID NO: 1653338 - RNA, 19 nt, Homo sapiens
  misc_RNA (1)...(19): siRNA sense strand
ugaaguccgagaauuugaa

SEQ ID NO: 1653339 - RNA, 19 nt, Homo sapiens
  misc_RNA (1)...(19): siRNA sense strand
aagaaucugaggauccuaa

SEQ ID NO: 1653340 - RNA, 19 nt, Homo sapiens
  misc_RNA (1)...(19): siRNA sense strand
uuucgacaaugaagccaaa

SEQ ID NO: 1653341 - RNA, 19 nt, Homo sapiens
  misc_RNA (1)...(19): siRNA sense strand
guaugaggacaacaaagga

SEQ ID NO: 1653342 - RNA, 19 nt, Homo sapiens
  misc_RNA (1)...(19): siRNA sense strand
gucaucagccuaucaugug

SEQ ID NO: 1653343 - RNA, 19 nt, Homo sapiens
  misc_RNA (1)...(19): siRNA sense strand
uaguugggcuagagcuguu

SEQ ID NO: 1653344 - RNA, 19 nt, Homo sapiens
  misc_RNA (1)...(19): siRNA sense strand
acaagcuggugacugugaa

SEQ ID NO: 1653345 - RNA, 19 nt, Homo sapiens
  misc_RNA (1)...(19): siRNA sense strand
caaagacguggagagagaa

SEQ ID NO: 1653346 - RNA, 19 nt, Homo sapiens
  misc_RNA (1)...(19): siRNA sense strand
ugccgaaauucuccauuca

SEQ ID NO: 1653347 - RNA, 19 nt, Homo sapiens
  misc_RNA (1)...(19): siRNA sense strand
uaagccaugucggcccaaa

SEQ ID NO: 1653348 - RNA, 19 nt, Homo sapiens
  misc_RNA (1)...(19): siRNA sense strand
uggugacugugaaguuuga

SEQ ID NO: 1653349 - RNA, 19 nt, Homo sapiens
  misc_RNA (1)...(19): siRNA sense strand
ccuaucaugugcuccuaca

SEQ ID NO: 1653350 - RNA, 19 nt, Homo sapiens
  misc_RNA (1)...(19): siRNA sense strand
gagggaaggcuggagagau

SEQ ID NO: 1653351 - RNA, 19 nt, Homo sapiens
  misc_RNA (1)...(19): siRNA sense strand
aaaccaaguaugaggacaa

SEQ ID NO: 1653352 - RNA, 19 nt, Homo sapiens
  misc_RNA (1)...(19): siRNA sense strand
cuauuaucccuacacaauu

SEQ ID NO: 1653353 - RNA, 19 nt, Homo sapiens
  misc_RNA (1)...(19): siRNA sense strand
cugaggauccuaagcacuu

SEQ ID NO: 1653354 - RNA, 19 nt, Homo sapiens
  misc_RNA (1)...(19): siRNA sense strand
agacguggagagagaaguu

SEQ ID NO: 1653355 - RNA, 19 nt, Homo sapiens
  misc_RNA (1)...(19): siRNA sense strand
aggaagccaccaacaagaa

SEQ ID NO: 1653356 - RNA, 19 nt, Homo sapiens
  misc_RNA (1)...(19): siRNA sense strand
acaugacaauggaugaagu

SEQ ID NO: 1653357 - RNA, 19 nt, Homo sapiens
  misc_RNA (1)...(19): siRNA sense strand
ccgagacauucugcugauu

SEQ ID NO: 1653358 - RNA, 19 nt, Homo sapiens
  misc_RNA (1)...(19): siRNA sense strand
uaucaugugcuccuacaag

SEQ ID NO: 1653359 - RNA, 19 nt, Homo sapiens
  misc_RNA (1)...(19): siRNA sense strand
gagcuguuguccccaaaau

SEQ ID NO: 1653360 - RNA, 19 nt, Homo sapiens
  misc_RNA (1)...(19): siRNA sense strand
gcgcuacuacaaagaaucu

SEQ ID NO: 1653361 - RNA, 19 nt, Homo sapiens
  misc_RNA (1)...(19): siRNA sense strand
uuccagagcgcuacuacaa

SEQ ID NO: 1653362 - RNA, 19 nt, Homo sapiens
  misc_RNA (1)...(19): siRNA sense strand
ggaaggcuggagagauagu

SEQ ID NO: 1653363 - RNA, 19 nt, Homo sapiens
  misc_RNA (1)...(19): siRNA sense strand
uacaugaucagcaaacaca

SEQ ID NO: 1653364 - RNA, 19 nt, Homo sapiens
  misc_RNA (1)...(19): siRNA sense strand
gaaggcuuggaacuauuau

SEQ ID NO: 1653365 - RNA, 19 nt, Homo sapiens
  misc_RNA (1)...(19): siRNA sense strand
gagagaaguuugcuuuauu

SEQ ID NO: 1653366 - RNA, 19 nt, Homo sapiens
  misc_RNA (1)...(19): siRNA sense strand
ccaaagacguggagagaga

SEQ ID NO: 1653367 - RNA, 19 nt, Homo sapiens
  misc_RNA (1)...(19): siRNA sense strand
ggagagagaaguuugcuuu

SEQ ID NO: 1653368 - RNA, 19 nt, Homo sapiens
  misc_RNA (1)...(19): siRNA sense strand
ggacagcuguacaugauca

SEQ ID NO: 1653369 - RNA, 19 nt, Homo sapiens
  misc_RNA (1)...(19): siRNA sense strand
gauauugccugcgaugaaa

SEQ ID NO: 1653370 - RNA, 19 nt, Homo sapiens
  misc_RNA (1)...(19): siRNA sense strand
ccgaaauucuccauucaua

SEQ ID NO: 1653371 - RNA, 19 nt, Homo sapiens
  misc_RNA (1)...(19): siRNA sense strand
gaauacacauguuccuuuc

SEQ ID NO: 1653372 - RNA, 19 nt, Homo sapiens
  misc_RNA (1)...(19): siRNA sense strand
gaacuauuaucccuacaca

SEQ ID NO: 1653373 - RNA, 19 nt, Homo sapiens
  misc_RNA (1)...(19): siRNA sense strand
gaccagaguggaacaauuu

SEQ ID NO: 1653374 - RNA, 19 nt, Homo sapiens
  misc_RNA (1)...(19): siRNA sense strand
gagaaggcuuggaacuauu

SEQ ID NO: 1653375 - RNA, 19 nt, Homo sapiens
  misc_RNA (1)...(19): siRNA sense strand
agggaaggcuggagagaua

SEQ ID NO: 1653376 - RNA, 19 nt, Homo sapiens
  misc_RNA (1)...(19): siRNA sense strand
gagagagaaguuugcuuua

SEQ ID NO: 1653377 - RNA, 19 nt, Homo sapiens
  misc_RNA (1)...(19): siRNA sense strand
agagaaguuugcuuuauug

SEQ ID NO: 1653378 - RNA, 19 nt, Homo sapiens
  misc_RNA (1)...(19): siRNA sense strand
agagaaggcuuggaacuau

SEQ ID NO: 1653379 - RNA, 19 nt, Homo sapiens
  misc_RNA (1)...(19): siRNA sense strand
gcuggugacugugaaguuu

SEQ ID NO: 1653380 - RNA, 19 nt, Homo sapiens
  misc_RNA (1)...(19): siRNA sense strand
ccuacacaauuacagaaua

SEQ ID NO: 1653381 - RNA, 19 nt, Homo sapiens
  misc_RNA (1)...(19): siRNA sense strand
ccagagcgcuacuacaaag

SEQ ID NO: 1653382 - RNA, 19 nt, Homo sapiens
  misc_RNA (1)...(19): siRNA sense strand
ccuacaagcuggugacugu

SEQ ID NO: 1653383 - RNA, 19 nt, Homo sapiens
  misc_RNA (1)...(19): siRNA sense strand
ggguguaucucaacagcaa

SEQ ID NO: 1653384 - RNA, 19 nt, Homo sapiens
  misc_RNA (1)...(19): siRNA sense strand
agagagaaguuugcuuuau

SEQ ID NO: 1653385 - RNA, 19 nt, Homo sapiens
  misc_RNA (1)...(19): siRNA sense strand
ugacagagaaggcuuggaa

SEQ ID NO: 1653386 - RNA, 19 nt, Homo sapiens
  misc_RNA (1)...(19): siRNA sense strand
gcaugccgcucaccguaga

SEQ ID NO: 1653387 - RNA, 19 nt, Homo sapiens
  misc_RNA (1)...(19): siRNA sense strand
gcaaacacagccaugaaca

SEQ ID NO: 1653388 - RNA, 19 nt, Homo sapiens
  misc_RNA (1)...(19): siRNA sense strand
ggacaacaaaggaagcaau

SEQ ID NO: 1653389 - RNA, 19 nt, Homo sapiens
  misc_RNA (1)...(19): siRNA sense strand
agaaggcuuggaacuauua

SEQ ID NO: 1653390 - RNA, 19 nt, Homo sapiens
  misc_RNA (1)...(19): siRNA sense strand
cagagaaggcuuggaacua

SEQ ID NO: 1653391 - RNA, 19 nt, Homo sapiens
  misc_RNA (1)...(19): siRNA sense strand
agaccagaguggaacaauu

SEQ ID NO: 1653392 - RNA, 19 nt, Homo sapiens
  misc_RNA (1)...(19): siRNA sense strand
agaauacacauguuccuuu

SEQ ID NO: 1653393 - RNA, 19 nt, Homo sapiens
  misc_RNA (1)...(19): siRNA sense strand
acacagccaugaacagagu

SEQ ID NO: 1653394 - RNA, 19 nt, Homo sapiens
  misc_RNA (1)...(19): siRNA sense strand
caaagaaucugaggauccu

SEQ ID NO: 1653395 - RNA, 19 nt, Homo sapiens
  misc_RNA (1)...(19): siRNA sense strand
ccaaguaugaggacaacaa

SEQ ID NO: 1653396 - RNA, 19 nt, Homo sapiens
  misc_RNA (1)...(19): siRNA sense strand
aaacacagccaugaacaga

SEQ ID NO: 1653397 - RNA, 19 nt, Homo sapiens
  misc_RNA (1)...(19): siRNA sense strand
gagacauucugcugauugg

SEQ ID NO: 1653398 - RNA, 19 nt, Homo sapiens
  misc_RNA (1)...(19): siRNA sense strand
caaggugguccgagacauu

SEQ ID NO: 1653399 - RNA, 19 nt, Homo sapiens
  misc_RNA (1)...(19): siRNA sense strand
cuacaaagaaucugaggau

SEQ ID NO: 1653400 - RNA, 19 nt, Homo sapiens
  misc_RNA (1)...(19): siRNA sense strand
cuacacaauuacagaauac

SEQ ID NO: 1653401 - RNA, 19 nt, Homo sapiens
  misc_RNA (1)...(19): siRNA sense strand
gagcgcuacuacaaagaau

SEQ ID NO: 1653402 - RNA, 19 nt, Homo sapiens
  misc_RNA (1)...(19): siRNA sense strand
caaguaugaggacaacaaa

SEQ ID NO: 1653403 - RNA, 19 nt, Homo sapiens
  misc_RNA (1)...(19): siRNA sense strand
gagaaguuugcuuuauuga

SEQ ID NO: 1653404 - RNA, 19 nt, Homo sapiens
  misc_RNA (1)...(19): siRNA sense strand
cgaaauucuccauucauau

SEQ ID NO: 1653405 - RNA, 19 nt, Homo sapiens
  misc_RNA (1)...(19): siRNA sense strand
gacaacaaaggaagcaaug

SEQ ID NO: 1653406 - RNA, 19 nt, Homo sapiens
  misc_RNA (1)...(19): siRNA sense strand
cagcaaacacagccaugaa

SEQ ID NO: 1653407 - RNA, 19 nt, Homo sapiens
  misc_RNA (1)...(19): siRNA sense strand
cgagacauucugcugauug

SEQ ID NO: 1653408 - RNA, 19 nt, Homo sapiens
  misc_RNA (1)...(19): siRNA sense strand
acuauuaucccuacacaau

SEQ ID NO: 1653409 - RNA, 19 nt, Homo sapiens
  misc_RNA (1)...(19): siRNA sense strand
caacaaaggaagcaaugac

SEQ ID NO: 1653410 - RNA, 19 nt, Homo sapiens
  misc_RNA (1)...(19): siRNA sense strand
uuggacagcuguacaugau

SEQ ID NO: 1653411 - RNA, 19 nt, Homo sapiens
  misc_RNA (1)...(19): siRNA sense strand
auacacauguuccuuucug

SEQ ID NO: 1653412 - RNA, 19 nt, Homo sapiens
  misc_RNA (1)...(19): siRNA sense strand
ccauucauauagaaaccaa

SEQ ID NO: 1653413 - RNA, 19 nt, Homo sapiens
  misc_RNA (1)...(19): siRNA sense strand
ggacauagacaggcuuuug

SEQ ID NO: 1653414 - RNA, 19 nt, Homo sapiens
  misc_RNA (1)...(19): siRNA sense strand
ugauauugccugcgaugaa

SEQ ID NO: 1653415 - RNA, 19 nt, Homo sapiens
  misc_RNA (1)...(19): siRNA sense strand
agaagcggguguaucucaa

SEQ ID NO: 1653416 - RNA, 19 nt, Homo sapiens
  misc_RNA (1)...(19): siRNA sense strand
guagacgaguacaaaauug

SEQ ID NO: 1653417 - RNA, 19 nt, Homo sapiens
  misc_RNA (1)...(19): siRNA sense strand
gcuacuacaaagaaucuga

SEQ ID NO: 1653418 - RNA, 19 nt, Homo sapiens
  misc_RNA (1)...(19): siRNA sense strand
caccguagacgaguacaaa

SEQ ID NO: 1653419 - RNA, 19 nt, Homo sapiens
  misc_RNA (1)...(19): siRNA sense strand
ccgagaagcggguguaucu

SEQ ID NO: 1653420 - RNA, 19 nt, Homo sapiens
  misc_RNA (1)...(19): siRNA sense strand
uuacagaauacacauguuc

SEQ ID NO: 1653421 - RNA, 19 nt, Homo sapiens
  misc_RNA (1)...(19): siRNA sense strand
cugccgaaauucuccauuc

SEQ ID NO: 1653422 - RNA, 19 nt, Homo sapiens
  misc_RNA (1)...(19): siRNA sense strand
aagaaucugaggauccuaa

SEQ ID NO: 1653423 - RNA, 19 nt, Homo sapiens
  misc_RNA (1)...(19): siRNA sense strand
uuucgacaaugaagccaaa

SEQ ID NO: 1653424 - RNA, 19 nt, Homo sapiens
  misc_RNA (1)...(19): siRNA sense strand
guaugaggacaacaaagga

SEQ ID NO: 1653425 - RNA, 19 nt, Homo sapiens
  misc_RNA (1)...(19): siRNA sense strand
gucaucagccuaucaugug

SEQ ID NO: 1653426 - RNA, 19 nt, Homo sapiens
  misc_RNA (1)...(19): siRNA sense strand
uaguugggcuagagcuguu

SEQ ID NO: 1653427 - RNA, 19 nt, Homo sapiens
  misc_RNA (1)...(19): siRNA sense strand
acaagcuggugacugugaa

SEQ ID NO: 1653428 - RNA, 19 nt, Homo sapiens
  misc_RNA (1)...(19): siRNA sense strand
caaagacguggagagagaa

SEQ ID NO: 1653429 - RNA, 19 nt, Homo sapiens
  misc_RNA (1)...(19): siRNA sense strand
ugccgaaauucuccauuca

SEQ ID NO: 1653430 - RNA, 19 nt, Homo sapiens
  misc_RNA (1)...(19): siRNA sense strand
uggugacugugaaguuuga

SEQ ID NO: 1653431 - RNA, 19 nt, Homo sapiens
  misc_RNA (1)...(19): siRNA sense strand
ccuaucaugugcuccuaca

SEQ ID NO: 1653432 - RNA, 19 nt, Homo sapiens
  misc_RNA (1)...(19): siRNA sense strand
gagggaaggcuggagagau

SEQ ID NO: 1653433 - RNA, 19 nt, Homo sapiens
  misc_RNA (1)...(19): siRNA sense strand
aaaccaaguaugaggacaa

SEQ ID NO: 1653434 - RNA, 19 nt, Homo sapiens
  misc_RNA (1)...(19): siRNA sense strand
cuauuaucccuacacaauu

SEQ ID NO: 1653435 - RNA, 19 nt, Homo sapiens
  misc_RNA (1)...(19): siRNA sense strand
cugaggauccuaagcacuu

SEQ ID NO: 1653436 - RNA, 19 nt, Homo sapiens
  misc_RNA (1)...(19): siRNA sense strand
agacguggagagagaaguu

SEQ ID NO: 1653437 - RNA, 19 nt, Homo sapiens
  misc_RNA (1)...(19): siRNA sense strand
ccgagacauucugcugauu

SEQ ID NO: 1653438 - RNA, 19 nt, Homo sapiens
  misc_RNA (1)...(19): siRNA sense strand
uaucaugugcuccuacaag

SEQ ID NO: 1653439 - RNA, 19 nt, Homo sapiens
  misc_RNA (1)...(19): siRNA sense strand
gagcuguuguccccaaaau

SEQ ID NO: 1653440 - RNA, 19 nt, Homo sapiens
  misc_RNA (1)...(19): siRNA sense strand
gcgcuacuacaaagaaucu

SEQ ID NO: 1653441 - RNA, 19 nt, Homo sapiens
  misc_RNA (1)...(19): siRNA sense strand
uuccagagcgcuacuacaa

SEQ ID NO: 1653442 - RNA, 19 nt, Homo sapiens
  misc_RNA (1)...(19): siRNA sense strand
gaaggcuuggaacuauuau

SEQ ID NO: 1653443 - RNA, 19 nt, Homo sapiens
  misc_RNA (1)...(19): siRNA sense strand
ggaaggcuggagagauagu

SEQ ID NO: 1653444 - RNA, 19 nt, Homo sapiens
  misc_RNA (1)...(19): siRNA sense strand
uacaugaucagcaaacaca

SEQ ID NO: 1653445 - RNA, 19 nt, Homo sapiens
  misc_RNA (1)...(19): siRNA sense strand
cagaauacacauguuccuu

SEQ ID NO: 1653446 - RNA, 19 nt, Homo sapiens
  misc_RNA (1)...(19): siRNA sense strand
ggacagaucugcucacuuu

SEQ ID NO: 1653447 - RNA, 19 nt, Homo sapiens
  misc_RNA (1)...(19): siRNA sense strand
ggcagaagcuuauucgaau

SEQ ID NO: 1653448 - RNA, 19 nt, Homo sapiens
  misc_RNA (1)...(19): siRNA sense strand
gcagaagcuuauucgaauu

SEQ ID NO: 1653449 - RNA, 19 nt, Homo sapiens
  misc_RNA (1)...(19): siRNA sense strand
cgacaugcauugcgucuca

SEQ ID NO: 1653450 - RNA, 19 nt, Homo sapiens
  misc_RNA (1)...(19): siRNA sense strand
ucucaaaccugauuucauc

SEQ ID NO: 1653451 - RNA, 19 nt, Homo sapiens
  misc_RNA (1)...(19): siRNA sense strand
gacaagagccagacaauac

SEQ ID NO: 1653452 - RNA, 19 nt, Homo sapiens
  misc_RNA (1)...(19): siRNA sense strand
gggaauguguacaaggaaa

SEQ ID NO: 1653453 - RNA, 19 nt, Homo sapiens
  misc_RNA (1)...(19): siRNA sense strand
aggaggcaauugagcauua

SEQ ID NO: 1653454 - RNA, 19 nt, Homo sapiens
  misc_RNA (1)...(19): siRNA sense strand
uuagcacucuggcaauuaa

SEQ ID NO: 1653455 - RNA, 19 nt, Homo sapiens
  misc_RNA (1)...(19): siRNA sense strand
agacaauacuggugugcuu

SEQ ID NO: 1653456 - RNA, 19 nt, Homo sapiens
  misc_RNA (1)...(19): siRNA sense strand
guuggcacaucgagaauau

SEQ ID NO: 1653457 - RNA, 19 nt, Homo sapiens
  misc_RNA (1)...(19): siRNA sense strand
gcaugcagcucuggagaca

SEQ ID NO: 1653458 - RNA, 19 nt, Homo sapiens
  misc_RNA (1)...(19): siRNA sense strand
ucucugcucuucaguacaa

SEQ ID NO: 1653459 - RNA, 19 nt, Homo sapiens
  misc_RNA (1)...(19): siRNA sense strand
ggaggcaauugagcauuau

SEQ ID NO: 1653460 - RNA, 19 nt, Homo sapiens
  misc_RNA (1)...(19): siRNA sense strand
cagaagcuuauucgaauuu

SEQ ID NO: 1653461 - RNA, 19 nt, Homo sapiens
  misc_RNA (1)...(19): siRNA sense strand
gagacaagagccagacaau

SEQ ID NO: 1653462 - RNA, 19 nt, Homo sapiens
  misc_RNA (1)...(19): siRNA sense strand
cugauuucaucgaugguua

SEQ ID NO: 1653463 - RNA, 19 nt, Homo sapiens
  misc_RNA (1)...(19): siRNA sense strand
gucgaaggcuggacagauc

SEQ ID NO: 1653464 - RNA, 19 nt, Homo sapiens
  misc_RNA (1)...(19): siRNA sense strand
agacaagagccagacaaua

SEQ ID NO: 1653465 - RNA, 19 nt, Homo sapiens
  misc_RNA (1)...(19): siRNA sense strand
gaauaucaggcaggagauu

SEQ ID NO: 1653466 - RNA, 19 nt, Homo sapiens
  misc_RNA (1)...(19): siRNA sense strand
gguagcagcgggugacaug

SEQ ID NO: 1653467 - RNA, 19 nt, Homo sapiens
  misc_RNA (1)...(19): siRNA sense strand
caaaccugauuucaucgau

SEQ ID NO: 1653468 - RNA, 19 nt, Homo sapiens
  misc_RNA (1)...(19): siRNA sense strand
gaagcuuauucgaauuugg

SEQ ID NO: 1653469 - RNA, 19 nt, Homo sapiens
  misc_RNA (1)...(19): siRNA sense strand
aguacaagcuuacgucucu

SEQ ID NO: 1653470 - RNA, 19 nt, Homo sapiens
  misc_RNA (1)...(19): siRNA sense strand
ggagacaagagccagacaa

SEQ ID NO: 1653471 - RNA, 19 nt, Homo sapiens
  misc_RNA (1)...(19): siRNA sense strand
ugaguuggcacaucgagaa

SEQ ID NO: 1653472 - RNA, 19 nt, Homo sapiens
  misc_RNA (1)...(19): siRNA sense strand
uggcagaagcuuauucgaa

SEQ ID NO: 1653473 - RNA, 19 nt, Homo sapiens
  misc_RNA (1)...(19): siRNA sense strand
gaauguguacaaggaaaga

SEQ ID NO: 1653474 - RNA, 19 nt, Homo sapiens
  misc_RNA (1)...(19): siRNA sense strand
gcacucuggcaauuaaaca

SEQ ID NO: 1653475 - RNA, 19 nt, Homo sapiens
  misc_RNA (1)...(19): siRNA sense strand
gacaauacuggugugcuuu

SEQ ID NO: 1653476 - RNA, 19 nt, Homo sapiens
  misc_RNA (1)...(19): siRNA sense strand
ggugugcuuuuauuacuuu

SEQ ID NO: 1653477 - RNA, 19 nt, Homo sapiens
  misc_RNA (1)...(19): siRNA sense strand
gauuucaucgaugguuaua

SEQ ID NO: 1653478 - RNA, 19 nt, Homo sapiens
  misc_RNA (1)...(19): siRNA sense strand
caaggaaagagggcaguug

SEQ ID NO: 1653479 - RNA, 19 nt, Homo sapiens
  misc_RNA (1)...(19): siRNA sense strand
gcuuacgucucugcucuuc

SEQ ID NO: 1653480 - RNA, 19 nt, Homo sapiens
  misc_RNA (1)...(19): siRNA sense strand
caauacuggugugcuuuua

SEQ ID NO: 1653481 - RNA, 19 nt, Homo sapiens
  misc_RNA (1)...(19): siRNA sense strand
gcaggaggcaauugagcau

SEQ ID NO: 1653482 - RNA, 19 nt, Homo sapiens
  misc_RNA (1)...(19): siRNA sense strand
uuacgucucugcucuucag

SEQ ID NO: 1653483 - RNA, 19 nt, Homo sapiens
  misc_RNA (1)...(19): siRNA sense strand
ggaauguguacaaggaaag

SEQ ID NO: 1653484 - RNA, 19 nt, Homo sapiens
  misc_RNA (1)...(19): siRNA sense strand
gacagaucugcucacuuua

SEQ ID NO: 1653485 - RNA, 19 nt, Homo sapiens
  misc_RNA (1)...(19): siRNA sense strand
cgucucugcucuucaguac

SEQ ID NO: 1653486 - RNA, 19 nt, Homo sapiens
  misc_RNA (1)...(19): siRNA sense strand
cuuuagcacucuggcaauu

SEQ ID NO: 1653487 - RNA, 19 nt, Homo sapiens
  misc_RNA (1)...(19): siRNA sense strand
acagaucugcucacuuuag

SEQ ID NO: 1653488 - RNA, 19 nt, Homo sapiens
  misc_RNA (1)...(19): siRNA sense strand
agaagcuuauucgaauuug

SEQ ID NO: 1653489 - RNA, 19 nt, Homo sapiens
  misc_RNA (1)...(19): siRNA sense strand
uggcacaucgagaauauca

SEQ ID NO: 1653490 - RNA, 19 nt, Homo sapiens
  misc_RNA (1)...(19): siRNA sense strand
cagaucugcucacuuuagc

SEQ ID NO: 1653491 - RNA, 19 nt, Homo sapiens
  misc_RNA (1)...(19): siRNA sense strand
caagagccagacaauacug

SEQ ID NO: 1653492 - RNA, 19 nt, Homo sapiens
  misc_RNA (1)...(19): siRNA sense strand
augcagcucuggagacaag

SEQ ID NO: 1653493 - RNA, 19 nt, Homo sapiens
  misc_RNA (1)...(19): siRNA sense strand
ggacagaucugcucacuuu

SEQ ID NO: 1653494 - RNA, 19 nt, Homo sapiens
  misc_RNA (1)...(19): siRNA sense strand
gcacaauccugauaaauuu

SEQ ID NO: 1653495 - RNA, 19 nt, Homo sapiens
  misc_RNA (1)...(19): siRNA sense strand
gcaguucgcuuguaucgua

SEQ ID NO: 1653496 - RNA, 19 nt, Homo sapiens
  misc_RNA (1)...(19): siRNA sense strand
uaacacagcucuuaauaug

SEQ ID NO: 1653497 - RNA, 19 nt, Homo sapiens
  misc_RNA (1)...(19): siRNA sense strand
caacaaaccugaccacaug

SEQ ID NO: 1653498 - RNA, 19 nt, Homo sapiens
  misc_RNA (1)...(19): siRNA sense strand
gcacggcucugaaacuuaa

SEQ ID NO: 1653499 - RNA, 19 nt, Homo sapiens
  misc_RNA (1)...(19): siRNA sense strand
cuacucagaucaacaauaa

SEQ ID NO: 1653500 - RNA, 19 nt, Homo sapiens
  misc_RNA (1)...(19): siRNA sense strand
gcugaugccuacucuaaua

SEQ ID NO: 1653501 - RNA, 19 nt, Homo sapiens
  misc_RNA (1)...(19): siRNA sense strand
ugaauaaccuagccaauau

SEQ ID NO: 1653502 - RNA, 19 nt, Homo sapiens
  misc_RNA (1)...(19): siRNA sense strand
caaacuuucuggaugcuua

SEQ ID NO: 1653503 - RNA, 19 nt, Homo sapiens
  misc_RNA (1)...(19): siRNA sense strand
uaaaggagaugcaggaugu

SEQ ID NO: 1653504 - RNA, 19 nt, Homo sapiens
  misc_RNA (1)...(19): siRNA sense strand
gcugggaacugaucuagaa

SEQ ID NO: 1653505 - RNA, 19 nt, Homo sapiens
  misc_RNA (1)...(19): siRNA sense strand
aggaagcucugaugcauua

SEQ ID NO: 1653506 - RNA, 19 nt, Homo sapiens
  misc_RNA (1)...(19): siRNA sense strand
gaacugaucuagaauaccu

SEQ ID NO: 1653507 - RNA, 19 nt, Homo sapiens
  misc_RNA (1)...(19): siRNA sense strand
gcaauggacuggcaacuac

SEQ ID NO: 1653508 - RNA, 19 nt, Homo sapiens
  misc_RNA (1)...(19): siRNA sense strand
ugaagaaguuggucaguau

SEQ ID NO: 1653509 - RNA, 19 nt, Homo sapiens
  misc_RNA (1)...(19): siRNA sense strand
uauuguggcugaccaguua

SEQ ID NO: 1653510 - RNA, 19 nt, Homo sapiens
  misc_RNA (1)...(19): siRNA sense strand
ggaguaaucuuggcugugu

SEQ ID NO: 1653511 - RNA, 19 nt, Homo sapiens
  misc_RNA (1)...(19): siRNA sense strand
aauuugagguguucuguua

SEQ ID NO: 1653512 - RNA, 19 nt, Homo sapiens
  misc_RNA (1)...(19): siRNA sense strand
ggcagaagcuuauucgaau

SEQ ID NO: 1653513 - RNA, 19 nt, Homo sapiens
  misc_RNA (1)...(19): siRNA sense strand
gaaacacucuaaaggagau

SEQ ID NO: 1653514 - RNA, 19 nt, Homo sapiens
  misc_RNA (1)...(19): siRNA sense strand
ggaaucauccuacuucuca

SEQ ID NO: 1653515 - RNA, 19 nt, Homo sapiens
  misc_RNA (1)...(19): siRNA sense strand
gcagaagcuuauucgaauu

SEQ ID NO: 1653516 - RNA, 19 nt, Homo sapiens
  misc_RNA (1)...(19): siRNA sense strand
gcaucgaccucaaagcauu

SEQ ID NO: 1653517 - RNA, 19 nt, Homo sapiens
  misc_RNA (1)...(19): siRNA sense strand
uaaccuagccaauaucaaa

SEQ ID NO: 1653518 - RNA, 19 nt, Homo sapiens
  misc_RNA (1)...(19): siRNA sense strand
ggcaaagucuggaagcaaa

SEQ ID NO: 1653519 - RNA, 19 nt, Homo sapiens
  misc_RNA (1)...(19): siRNA sense strand
cgacaugcauugcgucuca

SEQ ID NO: 1653520 - RNA, 19 nt, Homo sapiens
  misc_RNA (1)...(19): siRNA sense strand
ggacagauucaaauaacaa

SEQ ID NO: 1653521 - RNA, 19 nt, Homo sapiens
  misc_RNA (1)...(19): siRNA sense strand
gcacaaacuuccgagugaa

SEQ ID NO: 1653522 - RNA, 19 nt, Homo sapiens
  misc_RNA (1)...(19): siRNA sense strand
ucucaaaccugauuucauc

SEQ ID NO: 1653523 - RNA, 19 nt, Homo sapiens
  misc_RNA (1)...(19): siRNA sense strand
caucguauacuguaacuuu

SEQ ID NO: 1653524 - RNA, 19 nt, Homo sapiens
  misc_RNA (1)...(19): siRNA sense strand
cagaagcaguuauugaaau

SEQ ID NO: 1653525 - RNA, 19 nt, Homo sapiens
  misc_RNA (1)...(19): siRNA sense strand
ggcacaaacuuccgaguga

SEQ ID NO: 1653526 - RNA, 19 nt, Homo sapiens
  misc_RNA (1)...(19): siRNA sense strand
gcaggaagcucugaugcau

SEQ ID NO: 1653527 - RNA, 19 nt, Homo sapiens
  misc_RNA (1)...(19): siRNA sense strand
caaccgaacuuugcaguag

SEQ ID NO: 1653528 - RNA, 19 nt, Homo sapiens
  misc_RNA (1)...(19): siRNA sense strand
gauuaagccuguugaaguc

SEQ ID NO: 1653529 - RNA, 19 nt, Homo sapiens
  misc_RNA (1)...(19): siRNA sense strand
gaucuagaauaccugaaga

SEQ ID NO: 1653530 - RNA, 19 nt, Homo sapiens
  misc_RNA (1)...(19): siRNA sense strand
gucuugagcuuauugcuaa

SEQ ID NO: 1653531 - RNA, 19 nt, Homo sapiens
  misc_RNA (1)...(19): siRNA sense strand
gaggacagauucaaauaac

SEQ ID NO: 1653532 - RNA, 19 nt, Homo sapiens
  misc_RNA (1)...(19): siRNA sense strand
cauccuacuucucaccuua

SEQ ID NO: 1653533 - RNA, 19 nt, Homo sapiens
  misc_RNA (1)...(19): siRNA sense strand
ggcaaccugugcuuagaua

SEQ ID NO: 1653534 - RNA, 19 nt, Homo sapiens
  misc_RNA (1)...(19): siRNA sense strand
gaauauuccagaagccaua

SEQ ID NO: 1653535 - RNA, 19 nt, Homo sapiens
  misc_RNA (1)...(19): siRNA sense strand
aaauugacccuucuacuuu

SEQ ID NO: 1653536 - RNA, 19 nt, Homo sapiens
  misc_RNA (1)...(19): siRNA sense strand
gcagaagcaguuauugaaa

SEQ ID NO: 1653537 - RNA, 19 nt, Homo sapiens
  misc_RNA (1)...(19): siRNA sense strand
ggaauucauauccuuguaa

SEQ ID NO: 1653538 - RNA, 19 nt, Homo sapiens
  misc_RNA (1)...(19): siRNA sense strand
gacaagagccagacaauac

SEQ ID NO: 1653539 - RNA, 19 nt, Homo sapiens
  misc_RNA (1)...(19): siRNA sense strand
gcucuuaauaugccuguua

SEQ ID NO: 1653540 - RNA, 19 nt, Homo sapiens
  misc_RNA (1)...(19): siRNA sense strand
gggaauguguacaaggaaa

SEQ ID NO: 1653541 - RNA, 19 nt, Homo sapiens
  misc_RNA (1)...(19): siRNA sense strand
gaugaaguguccugaugga

SEQ ID NO: 1653542 - RNA, 19 nt, Homo sapiens
  misc_RNA (1)...(19): siRNA sense strand
uaaggaggcuauucgaauc

SEQ ID NO: 1653543 - RNA, 19 nt, Homo sapiens
  misc_RNA (1)...(19): siRNA sense strand
gaagcucugaugcauuaua

SEQ ID NO: 1653544 - RNA, 19 nt, Homo sapiens
  misc_RNA (1)...(19): siRNA sense strand
gcucauugccugcagauug

SEQ ID NO: 1653545 - RNA, 19 nt, Homo sapiens
  misc_RNA (1)...(19): siRNA sense strand
gcaguaacacagcucuuaa

SEQ ID NO: 1653546 - RNA, 19 nt, Homo sapiens
  misc_RNA (1)...(19): siRNA sense strand
ccgagaaauuggcuuauau

SEQ ID NO: 1653547 - RNA, 19 nt, Homo sapiens
  misc_RNA (1)...(19): siRNA sense strand
gcaguagcuuggaguaauc

SEQ ID NO: 1653548 - RNA, 19 nt, Homo sapiens
  misc_RNA (1)...(19): siRNA sense strand
aaaccugaccacaugauua

SEQ ID NO: 1653549 - RNA, 19 nt, Homo sapiens
  misc_RNA (1)...(19): siRNA sense strand
caacuacucagaucaacaa

SEQ ID NO: 1653550 - RNA, 19 nt, Homo sapiens
  misc_RNA (1)...(19): siRNA sense strand
caaagcauuucuugauagu

SEQ ID NO: 1653551 - RNA, 19 nt, Homo sapiens
  misc_RNA (1)...(19): siRNA sense strand
aggaggcaauugagcauua

SEQ ID NO: 1653552 - RNA, 19 nt, Homo sapiens
  misc_RNA (1)...(19): siRNA sense strand
gagaacagggaaacauuga

SEQ ID NO: 1653553 - RNA, 19 nt, Homo sapiens
  misc_RNA (1)...(19): siRNA sense strand
gaacagggaaacauugaag

SEQ ID NO: 1653554 - RNA, 19 nt, Homo sapiens
  misc_RNA (1)...(19): siRNA sense strand
uuagcacucuggcaauuaa

SEQ ID NO: 1653555 - RNA, 19 nt, Homo sapiens
  misc_RNA (1)...(19): siRNA sense strand
uuaugcagcuggcaacaaa

SEQ ID NO: 1653556 - RNA, 19 nt, Homo sapiens
  misc_RNA (1)...(19): siRNA sense strand
gaagcagaagauuguuaua

SEQ ID NO: 1653557 - RNA, 19 nt, Homo sapiens
  misc_RNA (1)...(19): siRNA sense strand
cuacagaugugggagcauu

SEQ ID NO: 1653558 - RNA, 19 nt, Homo sapiens
  misc_RNA (1)...(19): siRNA sense strand
guaacacagcucuuaauau

SEQ ID NO: 1653559 - RNA, 19 nt, Homo sapiens
  misc_RNA (1)...(19): siRNA sense strand
uaagggcgcucgaaaugag

SEQ ID NO: 1653560 - RNA, 19 nt, Homo sapiens
  misc_RNA (1)...(19): siRNA sense strand
ucgaaucaguccuaccuuu

SEQ ID NO: 1653561 - RNA, 19 nt, Homo sapiens
  misc_RNA (1)...(19): siRNA sense strand
aagcucugaugcauuauaa

SEQ ID NO: 1653562 - RNA, 19 nt, Homo sapiens
  misc_RNA (1)...(19): siRNA sense strand
gaagaaguuggucaguauu

SEQ ID NO: 1653563 - RNA, 19 nt, Homo sapiens
  misc_RNA (1)...(19): siRNA sense strand
agaagcaguuauugaaaug

SEQ ID NO: 1653564 - RNA, 19 nt, Homo sapiens
  misc_RNA (1)...(19): siRNA sense strand
agaagccaaucauuucauu

SEQ ID NO: 1653565 - RNA, 19 nt, Homo sapiens
  misc_RNA (1)...(19): siRNA sense strand
aaucuggcuuccauucaua

SEQ ID NO: 1653566 - RNA, 19 nt, Homo sapiens
  misc_RNA (1)...(19): siRNA sense strand
gggaacugaucuagaauac

SEQ ID NO: 1653567 - RNA, 19 nt, Homo sapiens
  misc_RNA (1)...(19): siRNA sense strand
cugaauaaccuagccaaua

SEQ ID NO: 1653568 - RNA, 19 nt, Homo sapiens
  misc_RNA (1)...(19): siRNA sense strand
gcaacaaaccugaccacau

SEQ ID NO: 1653569 - RNA, 19 nt, Homo sapiens
  misc_RNA (1)...(19): siRNA sense strand
agacaauacuggugugcuu

SEQ ID NO: 1653570 - RNA, 19 nt, Homo sapiens
  misc_RNA (1)...(19): siRNA sense strand
caucccagcucacuugcuu

SEQ ID NO: 1653571 - RNA, 19 nt, Homo sapiens
  misc_RNA (1)...(19): siRNA sense strand
cgaggacagauucaaauaa

SEQ ID NO: 1653572 - RNA, 19 nt, Homo sapiens
  misc_RNA (1)...(19): siRNA sense strand
aagaugaaguguccugaug

SEQ ID NO: 1653573 - RNA, 19 nt, Homo sapiens
  misc_RNA (1)...(19): siRNA sense strand
guuggcacaucgagaauau

SEQ ID NO: 1653574 - RNA, 19 nt, Homo sapiens
  misc_RNA (1)...(19): siRNA sense strand
ggaggcaauugagcauuau

SEQ ID NO: 1653575 - RNA, 19 nt, Homo sapiens
  misc_RNA (1)...(19): siRNA sense strand
caaacaauacacaauggaa

SEQ ID NO: 1653576 - RNA, 19 nt, Homo sapiens
  misc_RNA (1)...(19): siRNA sense strand
gcaugcagcucuggagaca

SEQ ID NO: 1653577 - RNA, 19 nt, Homo sapiens
  misc_RNA (1)...(19): siRNA sense strand
gcaguauuccgagaaauug

SEQ ID NO: 1653578 - RNA, 19 nt, Homo sapiens
  misc_RNA (1)...(19): siRNA sense strand
ucacugaucaggaaacuuc

SEQ ID NO: 1653579 - RNA, 19 nt, Homo sapiens
  misc_RNA (1)...(19): siRNA sense strand
cagaagcuuauucgaauuu

SEQ ID NO: 1653580 - RNA, 19 nt, Homo sapiens
  misc_RNA (1)...(19): siRNA sense strand
gcagaagccaaucauuuca

SEQ ID NO: 1653581 - RNA, 19 nt, Homo sapiens
  misc_RNA (1)...(19): siRNA sense strand
gcuugcaauucaucacuuu

SEQ ID NO: 1653582 - RNA, 19 nt, Homo sapiens
  misc_RNA (1)...(19): siRNA sense strand
ucucugcucuucaguacaa

SEQ ID NO: 1653583 - RNA, 19 nt, Homo sapiens
  misc_RNA (1)...(19): siRNA sense strand
guaaagcauuagaagucuu

SEQ ID NO: 1653584 - RNA, 19 nt, Homo sapiens
  misc_RNA (1)...(19): siRNA sense strand
uagguugucuugagcuuau

SEQ ID NO: 1653585 - RNA, 19 nt, Homo sapiens
  misc_RNA (1)...(19): siRNA sense strand
uauuguaacuuggcucauu

SEQ ID NO: 1653586 - RNA, 19 nt, Homo sapiens
  misc_RNA (1)...(19): siRNA sense strand
ggcagaagccaaucauuuc

SEQ ID NO: 1653587 - RNA, 19 nt, Homo sapiens
  misc_RNA (1)...(19): siRNA sense strand
gcaugcacaauccugauaa

SEQ ID NO: 1653588 - RNA, 19 nt, Homo sapiens
  misc_RNA (1)...(19): siRNA sense strand
ugaagcguguucccaauag

SEQ ID NO: 1653589 - RNA, 19 nt, Homo sapiens
  misc_RNA (1)...(19): siRNA sense strand
uaaccacccguucucagua

SEQ ID NO: 1653590 - RNA, 19 nt, Homo sapiens
  misc_RNA (1)...(19): siRNA sense strand
ugagcaguauuccgagaaa

SEQ ID NO: 1653591 - RNA, 19 nt, Homo sapiens
  misc_RNA (1)...(19): siRNA sense strand
gaaccuaauauucaacagu

SEQ ID NO: 1653592 - RNA, 19 nt, Homo sapiens
  misc_RNA (1)...(19): siRNA sense strand
ggacuggcaacuacucaga

SEQ ID NO: 1653593 - RNA, 19 nt, Homo sapiens
  misc_RNA (1)...(19): siRNA sense strand
ggacagaucugcucacuuu

SEQ ID NO: 1653594 - RNA, 19 nt, Homo sapiens
  misc_RNA (1)...(19): siRNA sense strand
gcacaauccugauaaauuu

SEQ ID NO: 1653595 - RNA, 19 nt, Homo sapiens
  misc_RNA (1)...(19): siRNA sense strand
gcaguucgcuuguaucgua

SEQ ID NO: 1653596 - RNA, 19 nt, Homo sapiens
  misc_RNA (1)...(19): siRNA sense strand
uaacacagcucuuaauaug

SEQ ID NO: 1653597 - RNA, 19 nt, Homo sapiens
  misc_RNA (1)...(19): siRNA sense strand
caacaaaccugaccacaug

SEQ ID NO: 1653598 - RNA, 19 nt, Homo sapiens
  misc_RNA (1)...(19): siRNA sense strand
gcacggcucugaaacuuaa

SEQ ID NO: 1653599 - RNA, 19 nt, Homo sapiens
  misc_RNA (1)...(19): siRNA sense strand
cuacucagaucaacaauaa

SEQ ID NO: 1653600 - RNA, 19 nt, Homo sapiens
  misc_RNA (1)...(19): siRNA sense strand
gcugaugccuacucuaaua

SEQ ID NO: 1653601 - RNA, 19 nt, Homo sapiens
  misc_RNA (1)...(19): siRNA sense strand
ugaauaaccuagccaauau

SEQ ID NO: 1653602 - RNA, 19 nt, Homo sapiens
  misc_RNA (1)...(19): siRNA sense strand
caaacuuucuggaugcuua

SEQ ID NO: 1653603 - RNA, 19 nt, Homo sapiens
  misc_RNA (1)...(19): siRNA sense strand
uaaaggagaugcaggaugu

SEQ ID NO: 1653604 - RNA, 19 nt, Homo sapiens
  misc_RNA (1)...(19): siRNA sense strand
gcugggaacugaucuagaa

SEQ ID NO: 1653605 - RNA, 19 nt, Homo sapiens
  misc_RNA (1)...(19): siRNA sense strand
aggaagcucugaugcauua

SEQ ID NO: 1653606 - RNA, 19 nt, Homo sapiens
  misc_RNA (1)...(19): siRNA sense strand
gaacugaucuagaauaccu

SEQ ID NO: 1653607 - RNA, 19 nt, Homo sapiens
  misc_RNA (1)...(19): siRNA sense strand
gcaauggacuggcaacuac

SEQ ID NO: 1653608 - RNA, 19 nt, Homo sapiens
  misc_RNA (1)...(19): siRNA sense strand
ugaagaaguuggucaguau

SEQ ID NO: 1653609 - RNA, 19 nt, Homo sapiens
  misc_RNA (1)...(19): siRNA sense strand
uauuguggcugaccaguua

SEQ ID NO: 1653610 - RNA, 19 nt, Homo sapiens
  misc_RNA (1)...(19): siRNA sense strand
ggaguaaucuuggcugugu

SEQ ID NO: 1653611 - RNA, 19 nt, Homo sapiens
  misc_RNA (1)...(19): siRNA sense strand
aauuugagguguucuguua

SEQ ID NO: 1653612 - RNA, 19 nt, Homo sapiens
  misc_RNA (1)...(19): siRNA sense strand
ggcagaagcuuauucgaau

SEQ ID NO: 1653613 - RNA, 19 nt, Homo sapiens
  misc_RNA (1)...(19): siRNA sense strand
gaaacacucuaaaggagau

SEQ ID NO: 1653614 - RNA, 19 nt, Homo sapiens
  misc_RNA (1)...(19): siRNA sense strand
ggaaucauccuacuucuca

SEQ ID NO: 1653615 - RNA, 19 nt, Homo sapiens
  misc_RNA (1)...(19): siRNA sense strand
gcagaagcuuauucgaauu

SEQ ID NO: 1653616 - RNA, 19 nt, Homo sapiens
  misc_RNA (1)...(19): siRNA sense strand
gcaucgaccucaaagcauu

SEQ ID NO: 1653617 - RNA, 19 nt, Homo sapiens
  misc_RNA (1)...(19): siRNA sense strand
uaaccuagccaauaucaaa

SEQ ID NO: 1653618 - RNA, 19 nt, Homo sapiens
  misc_RNA (1)...(19): siRNA sense strand
ggcaaagucuggaagcaaa

SEQ ID NO: 1653619 - RNA, 19 nt, Homo sapiens
  misc_RNA (1)...(19): siRNA sense strand
cgacaugcauugcgucuca

SEQ ID NO: 1653620 - RNA, 19 nt, Homo sapiens
  misc_RNA (1)...(19): siRNA sense strand
ggacagauucaaauaacaa

SEQ ID NO: 1653621 - RNA, 19 nt, Homo sapiens
  misc_RNA (1)...(19): siRNA sense strand
gcacaaacuuccgagugaa

SEQ ID NO: 1653622 - RNA, 19 nt, Homo sapiens
  misc_RNA (1)...(19): siRNA sense strand
ucucaaaccugauuucauc

SEQ ID NO: 1653623 - RNA, 19 nt, Homo sapiens
  misc_RNA (1)...(19): siRNA sense strand
caucguauacuguaacuuu

SEQ ID NO: 1653624 - RNA, 19 nt, Homo sapiens
  misc_RNA (1)...(19): siRNA sense strand
cagaagcaguuauugaaau

SEQ ID NO: 1653625 - RNA, 19 nt, Homo sapiens
  misc_RNA (1)...(19): siRNA sense strand
ggcacaaacuuccgaguga

SEQ ID NO: 1653626 - RNA, 19 nt, Homo sapiens
  misc_RNA (1)...(19): siRNA sense strand
gcaggaagcucugaugcau

SEQ ID NO: 1653627 - RNA, 19 nt, Homo sapiens
  misc_RNA (1)...(19): siRNA sense strand
caaccgaacuuugcaguag

SEQ ID NO: 1653628 - RNA, 19 nt, Homo sapiens
  misc_RNA (1)...(19): siRNA sense strand
gauuaagccuguugaaguc

SEQ ID NO: 1653629 - RNA, 19 nt, Homo sapiens
  misc_RNA (1)...(19): siRNA sense strand
gaucuagaauaccugaaga

SEQ ID NO: 1653630 - RNA, 19 nt, Homo sapiens
  misc_RNA (1)...(19): siRNA sense strand
gucuugagcuuauugcuaa

SEQ ID NO: 1653631 - RNA, 19 nt, Homo sapiens
  misc_RNA (1)...(19): siRNA sense strand
gaggacagauucaaauaac

SEQ ID NO: 1653632 - RNA, 19 nt, Homo sapiens
  misc_RNA (1)...(19): siRNA sense strand
cauccuacuucucaccuua

SEQ ID NO: 1653633 - RNA, 19 nt, Homo sapiens
  misc_RNA (1)...(19): siRNA sense strand
ggcaaccugugcuuagaua

SEQ ID NO: 1653634 - RNA, 19 nt, Homo sapiens
  misc_RNA (1)...(19): siRNA sense strand
gaauauuccagaagccaua

SEQ ID NO: 1653635 - RNA, 19 nt, Homo sapiens
  misc_RNA (1)...(19): siRNA sense strand
aaauugacccuucuacuuu

SEQ ID NO: 1653636 - RNA, 19 nt, Homo sapiens
  misc_RNA (1)...(19): siRNA sense strand
gcagaagcaguuauugaaa

SEQ ID NO: 1653637 - RNA, 19 nt, Homo sapiens
  misc_RNA (1)...(19): siRNA sense strand
ggaauucauauccuuguaa

SEQ ID NO: 1653638 - RNA, 19 nt, Homo sapiens
  misc_RNA (1)...(19): siRNA sense strand
gacaagagccagacaauac

SEQ ID NO: 1653639 - RNA, 19 nt, Homo sapiens
  misc_RNA (1)...(19): siRNA sense strand
gcucuuaauaugccuguua

SEQ ID NO: 1653640 - RNA, 19 nt, Homo sapiens
  misc_RNA (1)...(19): siRNA sense strand
gggaauguguacaaggaaa

SEQ ID NO: 1653641 - RNA, 19 nt, Homo sapiens
  misc_RNA (1)...(19): siRNA sense strand
gaugaaguguccugaugga

SEQ ID NO: 1653642 - RNA, 19 nt, Homo sapiens
  misc_RNA (1)...(19): siRNA sense strand
uaaggaggcuauucgaauc

SEQ ID NO: 1653643 - RNA, 19 nt, Homo sapiens
  misc_RNA (1)...(19): siRNA sense strand
gaagcucugaugcauuaua

SEQ ID NO: 1653644 - RNA, 19 nt, Homo sapiens
  misc_RNA (1)...(19): siRNA sense strand
gcucauugccugcagauug

SEQ ID NO: 1653645 - RNA, 19 nt, Homo sapiens
  misc_RNA (1)...(19): siRNA sense strand
gcaguaacacagcucuuaa

SEQ ID NO: 1653646 - RNA, 19 nt, Homo sapiens
  misc_RNA (1)...(19): siRNA sense strand
ccgagaaauuggcuuauau

SEQ ID NO: 1653647 - RNA, 19 nt, Homo sapiens
  misc_RNA (1)...(19): siRNA sense strand
gcaguagcuuggaguaauc

SEQ ID NO: 1653648 - RNA, 19 nt, Homo sapiens
  misc_RNA (1)...(19): siRNA sense strand
aaaccugaccacaugauua

SEQ ID NO: 1653649 - RNA, 19 nt, Homo sapiens
  misc_RNA (1)...(19): siRNA sense strand
caacuacucagaucaacaa

SEQ ID NO: 1653650 - RNA, 19 nt, Homo sapiens
  misc_RNA (1)...(19): siRNA sense strand
caaagcauuucuugauagu

SEQ ID NO: 1653651 - RNA, 19 nt, Homo sapiens
  misc_RNA (1)...(19): siRNA sense strand
aggaggcaauugagcauua

SEQ ID NO: 1653652 - RNA, 19 nt, Homo sapiens
  misc_RNA (1)...(19): siRNA sense strand
gagaacagggaaacauuga

SEQ ID NO: 1653653 - RNA, 19 nt, Homo sapiens
  misc_RNA (1)...(19): siRNA sense strand
gaacagggaaacauugaag

SEQ ID NO: 1653654 - RNA, 19 nt, Homo sapiens
  misc_RNA (1)...(19): siRNA sense strand
uuagcacucuggcaauuaa

SEQ ID NO: 1653655 - RNA, 19 nt, Homo sapiens
  misc_RNA (1)...(19): siRNA sense strand
uuaugcagcuggcaacaaa

SEQ ID NO: 1653656 - RNA, 19 nt, Homo sapiens
  misc_RNA (1)...(19): siRNA sense strand
gaagcagaagauuguuaua

SEQ ID NO: 1653657 - RNA, 19 nt, Homo sapiens
  misc_RNA (1)...(19): siRNA sense strand
cuacagaugugggagcauu

SEQ ID NO: 1653658 - RNA, 19 nt, Homo sapiens
  misc_RNA (1)...(19): siRNA sense strand
guaacacagcucuuaauau

SEQ ID NO: 1653659 - RNA, 19 nt, Homo sapiens
  misc_RNA (1)...(19): siRNA sense strand
uaagggcgcucgaaaugag

SEQ ID NO: 1653660 - RNA, 19 nt, Homo sapiens
  misc_RNA (1)...(19): siRNA sense strand
ucgaaucaguccuaccuuu

SEQ ID NO: 1653661 - RNA, 19 nt, Homo sapiens
  misc_RNA (1)...(19): siRNA sense strand
aagcucugaugcauuauaa

SEQ ID NO: 1653662 - RNA, 19 nt, Homo sapiens
  misc_RNA (1)...(19): siRNA sense strand
gaagaaguuggucaguauu

SEQ ID NO: 1653663 - RNA, 19 nt, Homo sapiens
  misc_RNA (1)...(19): siRNA sense strand
agaagcaguuauugaaaug

SEQ ID NO: 1653664 - RNA, 19 nt, Homo sapiens
  misc_RNA (1)...(19): siRNA sense strand
agaagccaaucauuucauu

SEQ ID NO: 1653665 - RNA, 19 nt, Homo sapiens
  misc_RNA (1)...(19): siRNA sense strand
aaucuggcuuccauucaua

SEQ ID NO: 1653666 - RNA, 19 nt, Homo sapiens
  misc_RNA (1)...(19): siRNA sense strand
gggaacugaucuagaauac

SEQ ID NO: 1653667 - RNA, 19 nt, Homo sapiens
  misc_RNA (1)...(19): siRNA sense strand
cugaauaaccuagccaaua

SEQ ID NO: 1653668 - RNA, 19 nt, Homo sapiens
  misc_RNA (1)...(19): siRNA sense strand
gcaacaaaccugaccacau

SEQ ID NO: 1653669 - RNA, 19 nt, Homo sapiens
  misc_RNA (1)...(19): siRNA sense strand
agacaauacuggugugcuu

SEQ ID NO: 1653670 - RNA, 19 nt, Homo sapiens
  misc_RNA (1)...(19): siRNA sense strand
caucccagcucacuugcuu

SEQ ID NO: 1653671 - RNA, 19 nt, Homo sapiens
  misc_RNA (1)...(19): siRNA sense strand
cgaggacagauucaaauaa

SEQ ID NO: 1653672 - RNA, 19 nt, Homo sapiens
  misc_RNA (1)...(19): siRNA sense strand
aagaugaaguguccugaug

SEQ ID NO: 1653673 - RNA, 19 nt, Homo sapiens
  misc_RNA (1)...(19): siRNA sense strand
guuggcacaucgagaauau

SEQ ID NO: 1653674 - RNA, 19 nt, Homo sapiens
  misc_RNA (1)...(19): siRNA sense strand
ggaggcaauugagcauuau

SEQ ID NO: 1653675 - RNA, 19 nt, Homo sapiens
  misc_RNA (1)...(19): siRNA sense strand
caaacaauacacaauggaa

SEQ ID NO: 1653676 - RNA, 19 nt, Homo sapiens
  misc_RNA (1)...(19): siRNA sense strand
gcaugcagcucuggagaca

SEQ ID NO: 1653677 - RNA, 19 nt, Homo sapiens
  misc_RNA (1)...(19): siRNA sense strand
gcaguauuccgagaaauug

SEQ ID NO: 1653678 - RNA, 19 nt, Homo sapiens
  misc_RNA (1)...(19): siRNA sense strand
ucacugaucaggaaacuuc

SEQ ID NO: 1653679 - RNA, 19 nt, Homo sapiens
  misc_RNA (1)...(19): siRNA sense strand
cagaagcuuauucgaauuu

SEQ ID NO: 1653680 - RNA, 19 nt, Homo sapiens
  misc_RNA (1)...(19): siRNA sense strand
gcagaagccaaucauuuca

SEQ ID NO: 1653681 - RNA, 19 nt, Homo sapiens
  misc_RNA (1)...(19): siRNA sense strand
gcuugcaauucaucacuuu

SEQ ID NO: 1653682 - RNA, 19 nt, Homo sapiens
  misc_RNA (1)...(19): siRNA sense strand
ucucugcucuucaguacaa

SEQ ID NO: 1653683 - RNA, 19 nt, Homo sapiens
  misc_RNA (1)...(19): siRNA sense strand
guaaagcauuagaagucuu

SEQ ID NO: 1653684 - RNA, 19 nt, Homo sapiens
  misc_RNA (1)...(19): siRNA sense strand
uagguugucuugagcuuau

SEQ ID NO: 1653685 - RNA, 19 nt, Homo sapiens
  misc_RNA (1)...(19): siRNA sense strand
uauuguaacuuggcucauu

SEQ ID NO: 1653686 - RNA, 19 nt, Homo sapiens
  misc_RNA (1)...(19): siRNA sense strand
ggcagaagccaaucauuuc

SEQ ID NO: 1653687 - RNA, 19 nt, Homo sapiens
  misc_RNA (1)...(19): siRNA sense strand
gcaugcacaauccugauaa

SEQ ID NO: 1653688 - RNA, 19 nt, Homo sapiens
  misc_RNA (1)...(19): siRNA sense strand
ugaagcguguucccaauag

SEQ ID NO: 1653689 - RNA, 19 nt, Homo sapiens
  misc_RNA (1)...(19): siRNA sense strand
uaaccacccguucucagua

SEQ ID NO: 1653690 - RNA, 19 nt, Homo sapiens
  misc_RNA (1)...(19): siRNA sense strand
ugagcaguauuccgagaaa

SEQ ID NO: 1653691 - RNA, 19 nt, Homo sapiens
  misc_RNA (1)...(19): siRNA sense strand
gaaccuaauauucaacagu

SEQ ID NO: 1653692 - RNA, 19 nt, Homo sapiens
  misc_RNA (1)...(19): siRNA sense strand
ggacuggcaacuacucaga

SEQ ID NO: 1653693 - RNA, 19 nt, Homo sapiens
  misc_RNA (1)...(19): siRNA sense strand
gcaagugccugaccuacag

SEQ ID NO: 1653694 - RNA, 19 nt, Homo sapiens
  misc_RNA (1)...(19): siRNA sense strand
gaagauuggcauugcuauu

SEQ ID NO: 1653695 - RNA, 19 nt, Homo sapiens
  misc_RNA (1)...(19): siRNA sense strand
gcauugcuauugcgaccuu

SEQ ID NO: 1653696 - RNA, 19 nt, Homo sapiens
  misc_RNA (1)...(19): siRNA sense strand
ugacagcucucuggaugug

SEQ ID NO: 1653697 - RNA, 19 nt, Homo sapiens
  misc_RNA (1)...(19): siRNA sense strand
gacagucgcuggccuucuc

SEQ ID NO: 1653698 - RNA, 19 nt, Homo sapiens
  misc_RNA (1)...(19): siRNA sense strand
cgaccuuccucaucugcuu

SEQ ID NO: 1653699 - RNA, 19 nt, Homo sapiens
  misc_RNA (1)...(19): siRNA sense strand
gcucguggcuuggcuacag

SEQ ID NO: 1653700 - RNA, 19 nt, Homo sapiens
  misc_RNA (1)...(19): siRNA sense strand
ccaggaagauuggcauugc

SEQ ID NO: 1653701 - RNA, 19 nt, Homo sapiens
  misc_RNA (1)...(19): siRNA sense strand
ggaagauuggcauugcuau

SEQ ID NO: 1653702 - RNA, 19 nt, Homo sapiens
  misc_RNA (1)...(19): siRNA sense strand
cacuggugcugcuuuguug

SEQ ID NO: 1653703 - RNA, 19 nt, Homo sapiens
  misc_RNA (1)...(19): siRNA sense strand
aagauuggcauugcuauug

SEQ ID NO: 1653704 - RNA, 19 nt, Homo sapiens
  misc_RNA (1)...(19): siRNA sense strand
ccguggcgcugcuauccaa

SEQ ID NO: 1653705 - RNA, 19 nt, Homo sapiens
  misc_RNA (1)...(19): siRNA sense strand
uggccgacccguucacgua

SEQ ID NO: 1653706 - RNA, 19 nt, Homo sapiens
  misc_RNA (1)...(19): siRNA sense strand
ggacaccgucaccaugaag

SEQ ID NO: 1653707 - RNA, 19 nt, Homo sapiens
  misc_RNA (1)...(19): siRNA sense strand
gugcaccggcugcugaaga

SEQ ID NO: 1653708 - RNA, 19 nt, Homo sapiens
  misc_RNA (1)...(19): siRNA sense strand
gcccagcauccacccauga

SEQ ID NO: 1653709 - RNA, 19 nt, Homo sapiens
  misc_RNA (1)...(19): siRNA sense strand
acaccuuccuggcguccaa

SEQ ID NO: 1653710 - RNA, 19 nt, Homo sapiens
  misc_RNA (1)...(19): siRNA sense strand
gaccuuccucaucugcuuu

SEQ ID NO: 1653711 - RNA, 19 nt, Homo sapiens
  misc_RNA (1)...(19): siRNA sense strand
caaaggaguuuacuguuua

SEQ ID NO: 1653712 - RNA, 19 nt, Homo sapiens
  misc_RNA (1)...(19): siRNA sense strand
gcaaaggaguuuacuguuu

SEQ ID NO: 1653713 - RNA, 19 nt, Homo sapiens
  misc_RNA (1)...(19): siRNA sense strand
ugacaacacuaucagauua

SEQ ID NO: 1653714 - RNA, 19 nt, Homo sapiens
  misc_RNA (1)...(19): siRNA sense strand
cacauaaacucguaucuua

SEQ ID NO: 1653715 - RNA, 19 nt, Homo sapiens
  misc_RNA (1)...(19): siRNA sense strand
gcagagagauuucauaacu

SEQ ID NO: 1653716 - RNA, 19 nt, Homo sapiens
  misc_RNA (1)...(19): siRNA sense strand
gcacugcuaugaagacuga

SEQ ID NO: 1653717 - RNA, 19 nt, Homo sapiens
  misc_RNA (1)...(19): siRNA sense strand
gaccuuaaauggacacaaa

SEQ ID NO: 1653718 - RNA, 19 nt, Homo sapiens
  misc_RNA (1)...(19): siRNA sense strand
gcacuugcguuucaauaau

SEQ ID NO: 1653719 - RNA, 19 nt, Homo sapiens
  misc_RNA (1)...(19): siRNA sense strand
agacauaguuuacagagaa

SEQ ID NO: 1653720 - RNA, 19 nt, Homo sapiens
  misc_RNA (1)...(19): siRNA sense strand
gagaaggcacucaaguuua

SEQ ID NO: 1653721 - RNA, 19 nt, Homo sapiens
  misc_RNA (1)...(19): siRNA sense strand
agagaagacuguaauaaug

SEQ ID NO: 1653722 - RNA, 19 nt, Homo sapiens
  misc_RNA (1)...(19): siRNA sense strand
caucuuauaucccaaaugu

SEQ ID NO: 1653723 - RNA, 19 nt, Homo sapiens
  misc_RNA (1)...(19): siRNA sense strand
gagagaagacuguaauaau

SEQ ID NO: 1653724 - RNA, 19 nt, Homo sapiens
  misc_RNA (1)...(19): siRNA sense strand
gaagaagcuuaucgagaga

SEQ ID NO: 1653725 - RNA, 19 nt, Homo sapiens
  misc_RNA (1)...(19): siRNA sense strand
aaauacaggugaaaugcua

SEQ ID NO: 1653726 - RNA, 19 nt, Homo sapiens
  misc_RNA (1)...(19): siRNA sense strand
agaauguggugcauguuua

SEQ ID NO: 1653727 - RNA, 19 nt, Homo sapiens
  misc_RNA (1)...(19): siRNA sense strand
agaaggcacucaaguuuau

SEQ ID NO: 1653728 - RNA, 19 nt, Homo sapiens
  misc_RNA (1)...(19): siRNA sense strand
caaucaagaucugggauaa

SEQ ID NO: 1653729 - RNA, 19 nt, Homo sapiens
  misc_RNA (1)...(19): siRNA sense strand
ggaacugugugucaaauac

SEQ ID NO: 1653730 - RNA, 19 nt, Homo sapiens
  misc_RNA (1)...(19): siRNA sense strand
gaacauacaccuacaucuc

SEQ ID NO: 1653731 - RNA, 19 nt, Homo sapiens
  misc_RNA (1)...(19): siRNA sense strand
auagagcacuuuauccuaa

SEQ ID NO: 1653732 - RNA, 19 nt, Homo sapiens
  misc_RNA (1)...(19): siRNA sense strand
gaacaucuuauaucccaaa

SEQ ID NO: 1653733 - RNA, 19 nt, Homo sapiens
  misc_RNA (1)...(19): siRNA sense strand
gagaagaauucacuuagac

SEQ ID NO: 1653734 - RNA, 19 nt, Homo sapiens
  misc_RNA (1)...(19): siRNA sense strand
gggacaguauuuauucaaa

SEQ ID NO: 1653735 - RNA, 19 nt, Homo sapiens
  misc_RNA (1)...(19): siRNA sense strand
ccagagaagaauucacuua

SEQ ID NO: 1653736 - RNA, 19 nt, Homo sapiens
  misc_RNA (1)...(19): siRNA sense strand
gaauuuguggaacaucuua

SEQ ID NO: 1653737 - RNA, 19 nt, Homo sapiens
  misc_RNA (1)...(19): siRNA sense strand
ggaagauaauaccagagaa

SEQ ID NO: 1653738 - RNA, 19 nt, Homo sapiens
  misc_RNA (1)...(19): siRNA sense strand
gacuacaguuugaugaauu

SEQ ID NO: 1653739 - RNA, 19 nt, Homo sapiens
  misc_RNA (1)...(19): siRNA sense strand
cauagaauguggugcaugu

SEQ ID NO: 1653740 - RNA, 19 nt, Homo sapiens
  misc_RNA (1)...(19): siRNA sense strand
acaccgagcugcugucaau

SEQ ID NO: 1653741 - RNA, 19 nt, Homo sapiens
  misc_RNA (1)...(19): siRNA sense strand
gcacauaaacucguaucuu

SEQ ID NO: 1653742 - RNA, 19 nt, Homo sapiens
  misc_RNA (1)...(19): siRNA sense strand
gagcauuccggaagaguuu

SEQ ID NO: 1653743 - RNA, 19 nt, Homo sapiens
  misc_RNA (1)...(19): siRNA sense strand
gugaaaugcuaaacacguu

SEQ ID NO: 1653744 - RNA, 19 nt, Homo sapiens
  misc_RNA (1)...(19): siRNA sense strand
aaacaaaacuugccaaugg

SEQ ID NO: 1653745 - RNA, 19 nt, Homo sapiens
  misc_RNA (1)...(19): siRNA sense strand
gagagagaagacuguaaua

SEQ ID NO: 1653746 - RNA, 19 nt, Homo sapiens
  misc_RNA (1)...(19): siRNA sense strand
gauaauaccagagaagaau

SEQ ID NO: 1653747 - RNA, 19 nt, Homo sapiens
  misc_RNA (1)...(19): siRNA sense strand
agagaagaauucacuuaga

SEQ ID NO: 1653748 - RNA, 19 nt, Homo sapiens
  misc_RNA (1)...(19): siRNA sense strand
acucguaucuuaaaccuau

SEQ ID NO: 1653749 - RNA, 19 nt, Homo sapiens
  misc_RNA (1)...(19): siRNA sense strand
gaaacucucagcaagcuau

SEQ ID NO: 1653750 - RNA, 19 nt, Homo sapiens
  misc_RNA (1)...(19): siRNA sense strand
agagaaggcacucaaguuu

SEQ ID NO: 1653751 - RNA, 19 nt, Homo sapiens
  misc_RNA (1)...(19): siRNA sense strand
gagcugcugucaauguugu

SEQ ID NO: 1653752 - RNA, 19 nt, Homo sapiens
  misc_RNA (1)...(19): siRNA sense strand
guucugcacuugcguuuca

SEQ ID NO: 1653753 - RNA, 19 nt, Homo sapiens
  misc_RNA (1)...(19): siRNA sense strand
caauggcacuuccaguaug

SEQ ID NO: 1653754 - RNA, 19 nt, Homo sapiens
  misc_RNA (1)...(19): siRNA sense strand
ggacacaaacgaggcauug

SEQ ID NO: 1653755 - RNA, 19 nt, Homo sapiens
  misc_RNA (1)...(19): siRNA sense strand
guacauuguuucugcaucu

SEQ ID NO: 1653756 - RNA, 19 nt, Homo sapiens
  misc_RNA (1)...(19): siRNA sense strand
acacguugauucaccauug

SEQ ID NO: 1653757 - RNA, 19 nt, Homo sapiens
  misc_RNA (1)...(19): siRNA sense strand
caacggaaacucucagcaa

SEQ ID NO: 1653758 - RNA, 19 nt, Homo sapiens
  misc_RNA (1)...(19): siRNA sense strand
gaacuauaaagguauggaa

SEQ ID NO: 1653759 - RNA, 19 nt, Homo sapiens
  misc_RNA (1)...(19): siRNA sense strand
ugucaauguuguagacuuu

SEQ ID NO: 1653760 - RNA, 19 nt, Homo sapiens
  misc_RNA (1)...(19): siRNA sense strand
agagucagaucaaguggaa

SEQ ID NO: 1653761 - RNA, 19 nt, Homo sapiens
  misc_RNA (1)...(19): siRNA sense strand
gaagauaauaccagagaag

SEQ ID NO: 1653762 - RNA, 19 nt, Homo sapiens
  misc_RNA (1)...(19): siRNA sense strand
gaaaugcuaaacacguuga

SEQ ID NO: 1653763 - RNA, 19 nt, Homo sapiens
  misc_RNA (1)...(19): siRNA sense strand
cagaucaaguggaauuugu

SEQ ID NO: 1653764 - RNA, 19 nt, Homo sapiens
  misc_RNA (1)...(19): siRNA sense strand
cuccaaagaucguuccauu

SEQ ID NO: 1653765 - RNA, 19 nt, Homo sapiens
  misc_RNA (1)...(19): siRNA sense strand
cuaugaagacugagaauug

SEQ ID NO: 1653766 - RNA, 19 nt, Homo sapiens
  misc_RNA (1)...(19): siRNA sense strand
gauaacaagaggauaguca

SEQ ID NO: 1653767 - RNA, 19 nt, Homo sapiens
  misc_RNA (1)...(19): siRNA sense strand
ggaauuggugcguuguauu

SEQ ID NO: 1653768 - RNA, 19 nt, Homo sapiens
  misc_RNA (1)...(19): siRNA sense strand
gagaagacuguaauaaugg

SEQ ID NO: 1653769 - RNA, 19 nt, Homo sapiens
  misc_RNA (1)...(19): siRNA sense strand
gucaguaguucacaugaug

SEQ ID NO: 1653770 - RNA, 19 nt, Homo sapiens
  misc_RNA (1)...(19): siRNA sense strand
uuaccaacaugggcacaua

SEQ ID NO: 1653771 - RNA, 19 nt, Homo sapiens
  misc_RNA (1)...(19): siRNA sense strand
cgacuacaguuugaugaau

SEQ ID NO: 1653772 - RNA, 19 nt, Homo sapiens
  misc_RNA (1)...(19): siRNA sense strand
gcacuuccaguaugauugu

SEQ ID NO: 1653773 - RNA, 19 nt, Homo sapiens
  misc_RNA (1)...(19): siRNA sense strand
guuagaaggccaugaggaa

SEQ ID NO: 1653774 - RNA, 19 nt, Homo sapiens
  misc_RNA (1)...(19): siRNA sense strand
auaaagguauggaacacaa

SEQ ID NO: 1653775 - RNA, 19 nt, Homo sapiens
  misc_RNA (1)...(19): siRNA sense strand
gauggugaccugcuccaaa

SEQ ID NO: 1653776 - RNA, 19 nt, Homo sapiens
  misc_RNA (1)...(19): siRNA sense strand
cgagacaacacaaucaaga

SEQ ID NO: 1653777 - RNA, 19 nt, Homo sapiens
  misc_RNA (1)...(19): siRNA sense strand
ggaaugcuccucccaacuc

SEQ ID NO: 1653778 - RNA, 19 nt, Homo sapiens
  misc_RNA (1)...(19): siRNA sense strand
caacaugggcacauaaacu

SEQ ID NO: 1653779 - RNA, 19 nt, Homo sapiens
  misc_RNA (1)...(19): siRNA sense strand
agaaggccaugaggaauug

SEQ ID NO: 1653780 - RNA, 19 nt, Homo sapiens
  misc_RNA (1)...(19): siRNA sense strand
cugcugaacuugugugcaa

SEQ ID NO: 1653781 - RNA, 19 nt, Homo sapiens
  misc_RNA (1)...(19): siRNA sense strand
uaugaagacugagaauugu

SEQ ID NO: 1653782 - RNA, 19 nt, Homo sapiens
  misc_RNA (1)...(19): siRNA sense strand
ucugggacuuccuaaauga

SEQ ID NO: 1653783 - RNA, 19 nt, Homo sapiens
  misc_RNA (1)...(19): siRNA sense strand
caucugggacuuccuaaau

SEQ ID NO: 1653784 - RNA, 19 nt, Homo sapiens
  misc_RNA (1)...(19): siRNA sense strand
ccaaagaucguuccauugc

SEQ ID NO: 1653785 - RNA, 19 nt, Homo sapiens
  misc_RNA (1)...(19): siRNA sense strand
ggaagacauaguuuacaga

SEQ ID NO: 1653786 - RNA, 19 nt, Homo sapiens
  misc_RNA (1)...(19): siRNA sense strand
ccaauggcacuuccaguau

SEQ ID NO: 1653787 - RNA, 19 nt, Homo sapiens
  misc_RNA (1)...(19): siRNA sense strand
guauggaacacaaguacuu

SEQ ID NO: 1653788 - RNA, 19 nt, Homo sapiens
  misc_RNA (1)...(19): siRNA sense strand
agagagaagacuguaauaa

SEQ ID NO: 1653789 - RNA, 19 nt, Homo sapiens
  misc_RNA (1)...(19): siRNA sense strand
gaaaaggaacuguguguca

SEQ ID NO: 1653790 - RNA, 19 nt, Homo sapiens
  misc_RNA (1)...(19): siRNA sense strand
gaauucacuuagacagaca

SEQ ID NO: 1653791 - RNA, 19 nt, Homo sapiens
  misc_RNA (1)...(19): siRNA sense strand
auaccuggaugccaaauca

SEQ ID NO: 1653792 - RNA, 19 nt, Homo sapiens
  misc_RNA (1)...(19): siRNA sense strand
uagaaggccaugaggaauu

SEQ ID NO: 1653793 - RNA, 19 nt, Homo sapiens
  misc_RNA (1)...(19): siRNA sense strand
uagaauguggugcauguuu

SEQ ID NO: 1653794 - RNA, 19 nt, Homo sapiens
  misc_RNA (1)...(19): siRNA sense strand
gcucaucugacaacacuau

SEQ ID NO: 1653795 - RNA, 19 nt, Homo sapiens
  misc_RNA (1)...(19): siRNA sense strand
guacagggacaggcuggua

SEQ ID NO: 1653796 - RNA, 19 nt, Homo sapiens
  misc_RNA (1)...(19): siRNA sense strand
gaugccaaaucacuaugug

SEQ ID NO: 1653797 - RNA, 19 nt, Homo sapiens
  misc_RNA (1)...(19): siRNA sense strand
ucaaguggaauuuguggaa

SEQ ID NO: 1653798 - RNA, 19 nt, Homo sapiens
  misc_RNA (1)...(19): siRNA sense strand
caagagaaggcacucaagu

SEQ ID NO: 1653799 - RNA, 19 nt, Homo sapiens
  misc_RNA (1)...(19): siRNA sense strand
ggucagagugugggaugua

SEQ ID NO: 1653800 - RNA, 19 nt, Homo sapiens
  misc_RNA (1)...(19): siRNA sense strand
auaacaggaucaucggauu

SEQ ID NO: 1653801 - RNA, 19 nt, Homo sapiens
  misc_RNA (1)...(19): siRNA sense strand
guaagcggccuucgagaca

SEQ ID NO: 1653802 - RNA, 19 nt, Homo sapiens
  misc_RNA (1)...(19): siRNA sense strand
gacauaguuuacagagaau

SEQ ID NO: 1653803 - RNA, 19 nt, Homo sapiens
  misc_RNA (1)...(19): siRNA sense strand
cagagagauuucauaacug

SEQ ID NO: 1653804 - RNA, 19 nt, Homo sapiens
  misc_RNA (1)...(19): siRNA sense strand
gaugaauuccagauuguca

SEQ ID NO: 1653805 - RNA, 19 nt, Homo sapiens
  misc_RNA (1)...(19): siRNA sense strand
uuugaugaauuccagauug

SEQ ID NO: 1653806 - RNA, 19 nt, Homo sapiens
  misc_RNA (1)...(19): siRNA sense strand
ucacuuagacagacauaca

SEQ ID NO: 1653807 - RNA, 19 nt, Homo sapiens
  misc_RNA (1)...(19): siRNA sense strand
cgaauucucacaggccaua

SEQ ID NO: 1653808 - RNA, 19 nt, Homo sapiens
  misc_RNA (1)...(19): siRNA sense strand
gaaugcuccucccaacucu

SEQ ID NO: 1653809 - RNA, 19 nt, Homo sapiens
  misc_RNA (1)...(19): siRNA sense strand
gggaucuuguggcugcuuu

SEQ ID NO: 1653810 - RNA, 19 nt, Homo sapiens
  misc_RNA (1)...(19): siRNA sense strand
aagcaaaggaguuuacugu

SEQ ID NO: 1653811 - RNA, 19 nt, Homo sapiens
  misc_RNA (1)...(19): siRNA sense strand
caaaggaguuuacuguuua

SEQ ID NO: 1653812 - RNA, 19 nt, Homo sapiens
  misc_RNA (1)...(19): siRNA sense strand
gcaaaggaguuuacuguuu

SEQ ID NO: 1653813 - RNA, 19 nt, Homo sapiens
  misc_RNA (1)...(19): siRNA sense strand
ugacaacacuaucagauua

SEQ ID NO: 1653814 - RNA, 19 nt, Homo sapiens
  misc_RNA (1)...(19): siRNA sense strand
cacauaaacucguaucuua

SEQ ID NO: 1653815 - RNA, 19 nt, Homo sapiens
  misc_RNA (1)...(19): siRNA sense strand
gcagagagauuucauaacu

SEQ ID NO: 1653816 - RNA, 19 nt, Homo sapiens
  misc_RNA (1)...(19): siRNA sense strand
gcacugcuaugaagacuga

SEQ ID NO: 1653817 - RNA, 19 nt, Homo sapiens
  misc_RNA (1)...(19): siRNA sense strand
gaccuuaaauggacacaaa

SEQ ID NO: 1653818 - RNA, 19 nt, Homo sapiens
  misc_RNA (1)...(19): siRNA sense strand
gcacuugcguuucaauaau

SEQ ID NO: 1653819 - RNA, 19 nt, Homo sapiens
  misc_RNA (1)...(19): siRNA sense strand
agacauaguuuacagagaa

SEQ ID NO: 1653820 - RNA, 19 nt, Homo sapiens
  misc_RNA (1)...(19): siRNA sense strand
gagaaggcacucaaguuua

SEQ ID NO: 1653821 - RNA, 19 nt, Homo sapiens
  misc_RNA (1)...(19): siRNA sense strand
agagaagacuguaauaaug

SEQ ID NO: 1653822 - RNA, 19 nt, Homo sapiens
  misc_RNA (1)...(19): siRNA sense strand
caucuuauaucccaaaugu

SEQ ID NO: 1653823 - RNA, 19 nt, Homo sapiens
  misc_RNA (1)...(19): siRNA sense strand
gagagaagacuguaauaau

SEQ ID NO: 1653824 - RNA, 19 nt, Homo sapiens
  misc_RNA (1)...(19): siRNA sense strand
gaagaagcuuaucgagaga

SEQ ID NO: 1653825 - RNA, 19 nt, Homo sapiens
  misc_RNA (1)...(19): siRNA sense strand
aaauacaggugaaaugcua

SEQ ID NO: 1653826 - RNA, 19 nt, Homo sapiens
  misc_RNA (1)...(19): siRNA sense strand
agaauguggugcauguuua

SEQ ID NO: 1653827 - RNA, 19 nt, Homo sapiens
  misc_RNA (1)...(19): siRNA sense strand
agaaggcacucaaguuuau

SEQ ID NO: 1653828 - RNA, 19 nt, Homo sapiens
  misc_RNA (1)...(19): siRNA sense strand
caaucaagaucugggauaa

SEQ ID NO: 1653829 - RNA, 19 nt, Homo sapiens
  misc_RNA (1)...(19): siRNA sense strand
ggaacugugugucaaauac

SEQ ID NO: 1653830 - RNA, 19 nt, Homo sapiens
  misc_RNA (1)...(19): siRNA sense strand
gaacauacaccuacaucuc

SEQ ID NO: 1653831 - RNA, 19 nt, Homo sapiens
  misc_RNA (1)...(19): siRNA sense strand
auagagcacuuuauccuaa

SEQ ID NO: 1653832 - RNA, 19 nt, Homo sapiens
  misc_RNA (1)...(19): siRNA sense strand
gaacaucuuauaucccaaa

SEQ ID NO: 1653833 - RNA, 19 nt, Homo sapiens
  misc_RNA (1)...(19): siRNA sense strand
gagaagaauucacuuagac

SEQ ID NO: 1653834 - RNA, 19 nt, Homo sapiens
  misc_RNA (1)...(19): siRNA sense strand
gggacaguauuuauucaaa

SEQ ID NO: 1653835 - RNA, 19 nt, Homo sapiens
  misc_RNA (1)...(19): siRNA sense strand
ccagagaagaauucacuua

SEQ ID NO: 1653836 - RNA, 19 nt, Homo sapiens
  misc_RNA (1)...(19): siRNA sense strand
gaauuuguggaacaucuua

SEQ ID NO: 1653837 - RNA, 19 nt, Homo sapiens
  misc_RNA (1)...(19): siRNA sense strand
ggaagauaauaccagagaa

SEQ ID NO: 1653838 - RNA, 19 nt, Homo sapiens
  misc_RNA (1)...(19): siRNA sense strand
gacuacaguuugaugaauu

SEQ ID NO: 1653839 - RNA, 19 nt, Homo sapiens
  misc_RNA (1)...(19): siRNA sense strand
cauagaauguggugcaugu

SEQ ID NO: 1653840 - RNA, 19 nt, Homo sapiens
  misc_RNA (1)...(19): siRNA sense strand
acaccgagcugcugucaau

SEQ ID NO: 1653841 - RNA, 19 nt, Homo sapiens
  misc_RNA (1)...(19): siRNA sense strand
gcacauaaacucguaucuu

SEQ ID NO: 1653842 - RNA, 19 nt, Homo sapiens
  misc_RNA (1)...(19): siRNA sense strand
gagcauuccggaagaguuu

SEQ ID NO: 1653843 - RNA, 19 nt, Homo sapiens
  misc_RNA (1)...(19): siRNA sense strand
gugaaaugcuaaacacguu

SEQ ID NO: 1653844 - RNA, 19 nt, Homo sapiens
  misc_RNA (1)...(19): siRNA sense strand
aaacaaaacuugccaaugg

SEQ ID NO: 1653845 - RNA, 19 nt, Homo sapiens
  misc_RNA (1)...(19): siRNA sense strand
gagagagaagacuguaaua

SEQ ID NO: 1653846 - RNA, 19 nt, Homo sapiens
  misc_RNA (1)...(19): siRNA sense strand
gauaauaccagagaagaau

SEQ ID NO: 1653847 - RNA, 19 nt, Homo sapiens
  misc_RNA (1)...(19): siRNA sense strand
agagaagaauucacuuaga

SEQ ID NO: 1653848 - RNA, 19 nt, Homo sapiens
  misc_RNA (1)...(19): siRNA sense strand
acucguaucuuaaaccuau

SEQ ID NO: 1653849 - RNA, 19 nt, Homo sapiens
  misc_RNA (1)...(19): siRNA sense strand
gaaacucucagcaagcuau

SEQ ID NO: 1653850 - RNA, 19 nt, Homo sapiens
  misc_RNA (1)...(19): siRNA sense strand
agagaaggcacucaaguuu

SEQ ID NO: 1653851 - RNA, 19 nt, Homo sapiens
  misc_RNA (1)...(19): siRNA sense strand
gagcugcugucaauguugu

SEQ ID NO: 1653852 - RNA, 19 nt, Homo sapiens
  misc_RNA (1)...(19): siRNA sense strand
guucugcacuugcguuuca

SEQ ID NO: 1653853 - RNA, 19 nt, Homo sapiens
  misc_RNA (1)...(19): siRNA sense strand
caauggcacuuccaguaug

SEQ ID NO: 1653854 - RNA, 19 nt, Homo sapiens
  misc_RNA (1)...(19): siRNA sense strand
ggacacaaacgaggcauug

SEQ ID NO: 1653855 - RNA, 19 nt, Homo sapiens
  misc_RNA (1)...(19): siRNA sense strand
guacauuguuucugcaucu

SEQ ID NO: 1653856 - RNA, 19 nt, Homo sapiens
  misc_RNA (1)...(19): siRNA sense strand
acacguugauucaccauug

SEQ ID NO: 1653857 - RNA, 19 nt, Homo sapiens
  misc_RNA (1)...(19): siRNA sense strand
caacggaaacucucagcaa

SEQ ID NO: 1653858 - RNA, 19 nt, Homo sapiens
  misc_RNA (1)...(19): siRNA sense strand
gaacuauaaagguauggaa

SEQ ID NO: 1653859 - RNA, 19 nt, Homo sapiens
  misc_RNA (1)...(19): siRNA sense strand
ugucaauguuguagacuuu

SEQ ID NO: 1653860 - RNA, 19 nt, Homo sapiens
  misc_RNA (1)...(19): siRNA sense strand
agagucagaucaaguggaa

SEQ ID NO: 1653861 - RNA, 19 nt, Homo sapiens
  misc_RNA (1)...(19): siRNA sense strand
gaagauaauaccagagaag

SEQ ID NO: 1653862 - RNA, 19 nt, Homo sapiens
  misc_RNA (1)...(19): siRNA sense strand
gaaaugcuaaacacguuga

SEQ ID NO: 1653863 - RNA, 19 nt, Homo sapiens
  misc_RNA (1)...(19): siRNA sense strand
cagaucaaguggaauuugu

SEQ ID NO: 1653864 - RNA, 19 nt, Homo sapiens
  misc_RNA (1)...(19): siRNA sense strand
cuccaaagaucguuccauu

SEQ ID NO: 1653865 - RNA, 19 nt, Homo sapiens
  misc_RNA (1)...(19): siRNA sense strand
cuaugaagacugagaauug

SEQ ID NO: 1653866 - RNA, 19 nt, Homo sapiens
  misc_RNA (1)...(19): siRNA sense strand
gauaacaagaggauaguca

SEQ ID NO: 1653867 - RNA, 19 nt, Homo sapiens
  misc_RNA (1)...(19): siRNA sense strand
ggaauuggugcguuguauu

SEQ ID NO: 1653868 - RNA, 19 nt, Homo sapiens
  misc_RNA (1)...(19): siRNA sense strand
gagaagacuguaauaaugg

SEQ ID NO: 1653869 - RNA, 19 nt, Homo sapiens
  misc_RNA (1)...(19): siRNA sense strand
gucaguaguucacaugaug

SEQ ID NO: 1653870 - RNA, 19 nt, Homo sapiens
  misc_RNA (1)...(19): siRNA sense strand
uuaccaacaugggcacaua

SEQ ID NO: 1653871 - RNA, 19 nt, Homo sapiens
  misc_RNA (1)...(19): siRNA sense strand
cgacuacaguuugaugaau

SEQ ID NO: 1653872 - RNA, 19 nt, Homo sapiens
  misc_RNA (1)...(19): siRNA sense strand
gcacuuccaguaugauugu

SEQ ID NO: 1653873 - RNA, 19 nt, Homo sapiens
  misc_RNA (1)...(19): siRNA sense strand
guuagaaggccaugaggaa

SEQ ID NO: 1653874 - RNA, 19 nt, Homo sapiens
  misc_RNA (1)...(19): siRNA sense strand
auaaagguauggaacacaa

SEQ ID NO: 1653875 - RNA, 19 nt, Homo sapiens
  misc_RNA (1)...(19): siRNA sense strand
gauggugaccugcuccaaa

SEQ ID NO: 1653876 - RNA, 19 nt, Homo sapiens
  misc_RNA (1)...(19): siRNA sense strand
cgagacaacacaaucaaga

SEQ ID NO: 1653877 - RNA, 19 nt, Homo sapiens
  misc_RNA (1)...(19): siRNA sense strand
ggaaugcuccucccaacuc

SEQ ID NO: 1653878 - RNA, 19 nt, Homo sapiens
  misc_RNA (1)...(19): siRNA sense strand
caacaugggcacauaaacu

SEQ ID NO: 1653879 - RNA, 19 nt, Homo sapiens
  misc_RNA (1)...(19): siRNA sense strand
agaaggccaugaggaauug

SEQ ID NO: 1653880 - RNA, 19 nt, Homo sapiens
  misc_RNA (1)...(19): siRNA sense strand
cugcugaacuugugugcaa

SEQ ID NO: 1653881 - RNA, 19 nt, Homo sapiens
  misc_RNA (1)...(19): siRNA sense strand
uaugaagacugagaauugu

SEQ ID NO: 1653882 - RNA, 19 nt, Homo sapiens
  misc_RNA (1)...(19): siRNA sense strand
ucugggacuuccuaaauga

SEQ ID NO: 1653883 - RNA, 19 nt, Homo sapiens
  misc_RNA (1)...(19): siRNA sense strand
caucugggacuuccuaaau

SEQ ID NO: 1653884 - RNA, 19 nt, Homo sapiens
  misc_RNA (1)...(19): siRNA sense strand
ccaaagaucguuccauugc

SEQ ID NO: 1653885 - RNA, 19 nt, Homo sapiens
  misc_RNA (1)...(19): siRNA sense strand
ggaagacauaguuuacaga

SEQ ID NO: 1653886 - RNA, 19 nt, Homo sapiens
  misc_RNA (1)...(19): siRNA sense strand
ccaauggcacuuccaguau

SEQ ID NO: 1653887 - RNA, 19 nt, Homo sapiens
  misc_RNA (1)...(19): siRNA sense strand
guauggaacacaaguacuu

SEQ ID NO: 1653888 - RNA, 19 nt, Homo sapiens
  misc_RNA (1)...(19): siRNA sense strand
agagagaagacuguaauaa

SEQ ID NO: 1653889 - RNA, 19 nt, Homo sapiens
  misc_RNA (1)...(19): siRNA sense strand
gaaaaggaacuguguguca

SEQ ID NO: 1653890 - RNA, 19 nt, Homo sapiens
  misc_RNA (1)...(19): siRNA sense strand
gaauucacuuagacagaca

SEQ ID NO: 1653891 - RNA, 19 nt, Homo sapiens
  misc_RNA (1)...(19): siRNA sense strand
auaccuggaugccaaauca

SEQ ID NO: 1653892 - RNA, 19 nt, Homo sapiens
  misc_RNA (1)...(19): siRNA sense strand
uagaaggccaugaggaauu

SEQ ID NO: 1653893 - RNA, 19 nt, Homo sapiens
  misc_RNA (1)...(19): siRNA sense strand
uagaauguggugcauguuu

SEQ ID NO: 1653894 - RNA, 19 nt, Homo sapiens
  misc_RNA (1)...(19): siRNA sense strand
gcucaucugacaacacuau

SEQ ID NO: 1653895 - RNA, 19 nt, Homo sapiens
  misc_RNA (1)...(19): siRNA sense strand
guacagggacaggcuggua

SEQ ID NO: 1653896 - RNA, 19 nt, Homo sapiens
  misc_RNA (1)...(19): siRNA sense strand
gaugccaaaucacuaugug

SEQ ID NO: 1653897 - RNA, 19 nt, Homo sapiens
  misc_RNA (1)...(19): siRNA sense strand
ucaaguggaauuuguggaa

SEQ ID NO: 1653898 - RNA, 19 nt, Homo sapiens
  misc_RNA (1)...(19): siRNA sense strand
caagagaaggcacucaagu

SEQ ID NO: 1653899 - RNA, 19 nt, Homo sapiens
  misc_RNA (1)...(19): siRNA sense strand
ggucagagugugggaugua

SEQ ID NO: 1653900 - RNA, 19 nt, Homo sapiens
  misc_RNA (1)...(19): siRNA sense strand
auaacaggaucaucggauu

SEQ ID NO: 1653901 - RNA, 19 nt, Homo sapiens
  misc_RNA (1)...(19): siRNA sense strand
guaagcggccuucgagaca

SEQ ID NO: 1653902 - RNA, 19 nt, Homo sapiens
  misc_RNA (1)...(19): siRNA sense strand
gacauaguuuacagagaau

SEQ ID NO: 1653903 - RNA, 19 nt, Homo sapiens
  misc_RNA (1)...(19): siRNA sense strand
cagagagauuucauaacug

SEQ ID NO: 1653904 - RNA, 19 nt, Homo sapiens
  misc_RNA (1)...(19): siRNA sense strand
gaugaauuccagauuguca

SEQ ID NO: 1653905 - RNA, 19 nt, Homo sapiens
  misc_RNA (1)...(19): siRNA sense strand
uuugaugaauuccagauug

SEQ ID NO: 1653906 - RNA, 19 nt, Homo sapiens
  misc_RNA (1)...(19): siRNA sense strand
ucacuuagacagacauaca

SEQ ID NO: 1653907 - RNA, 19 nt, Homo sapiens
  misc_RNA (1)...(19): siRNA sense strand
cgaauucucacaggccaua

SEQ ID NO: 1653908 - RNA, 19 nt, Homo sapiens
  misc_RNA (1)...(19): siRNA sense strand
gaaugcuccucccaacucu

SEQ ID NO: 1653909 - RNA, 19 nt, Homo sapiens
  misc_RNA (1)...(19): siRNA sense strand
gggaucuuguggcugcuuu

SEQ ID NO: 1653910 - RNA, 19 nt, Homo sapiens
  misc_RNA (1)...(19): siRNA sense strand
aagcaaaggaguuuacugu

SEQ ID NO: 1653911 - RNA, 19 nt, Homo sapiens
  misc_RNA (1)...(19): siRNA sense strand
gaacaacggugacacuuca

SEQ ID NO: 1653912 - RNA, 19 nt, Homo sapiens
  misc_RNA (1)...(19): siRNA sense strand
agacaaagauggagcaaga

SEQ ID NO: 1653913 - RNA, 19 nt, Homo sapiens
  misc_RNA (1)...(19): siRNA sense strand
cugaugagcuccaacauaa

SEQ ID NO: 1653914 - RNA, 19 nt, Homo sapiens
  misc_RNA (1)...(19): siRNA sense strand
caacauaacagaagaacuu

SEQ ID NO: 1653915 - RNA, 19 nt, Homo sapiens
  misc_RNA (1)...(19): siRNA sense strand
ugagauaacucgggcauuu

SEQ ID NO: 1653916 - RNA, 19 nt, Homo sapiens
  misc_RNA (1)...(19): siRNA sense strand
caaccuaagugaaucuuug

SEQ ID NO: 1653917 - RNA, 19 nt, Homo sapiens
  misc_RNA (1)...(19): siRNA sense strand
acacacacgucacauuuaa

SEQ ID NO: 1653918 - RNA, 19 nt, Homo sapiens
  misc_RNA (1)...(19): siRNA sense strand
gaagacaccuaccgauugg

SEQ ID NO: 1653919 - RNA, 19 nt, Homo sapiens
  misc_RNA (1)...(19): siRNA sense strand
uugcaaagguuucuucaaa

SEQ ID NO: 1653920 - RNA, 19 nt, Homo sapiens
  misc_RNA (1)...(19): siRNA sense strand
gcacugggcucggucaauc

SEQ ID NO: 1653921 - RNA, 19 nt, Homo sapiens
  misc_RNA (1)...(19): siRNA sense strand
aagagaagauugucacaga

SEQ ID NO: 1653922 - RNA, 19 nt, Homo sapiens
  misc_RNA (1)...(19): siRNA sense strand
caagacugcaucaucaaua

SEQ ID NO: 1653923 - RNA, 19 nt, Homo sapiens
  misc_RNA (1)...(19): siRNA sense strand
gaaaaucuauauccggaaa

SEQ ID NO: 1653924 - RNA, 19 nt, Homo sapiens
  misc_RNA (1)...(19): siRNA sense strand
acaaacaggucuucuugau

SEQ ID NO: 1653925 - RNA, 19 nt, Homo sapiens
  misc_RNA (1)...(19): siRNA sense strand
ggagaaaccaagcaauugu

SEQ ID NO: 1653926 - RNA, 19 nt, Homo sapiens
  misc_RNA (1)...(19): siRNA sense strand
aagacugcaucaucaauaa

SEQ ID NO: 1653927 - RNA, 19 nt, Homo sapiens
  misc_RNA (1)...(19): siRNA sense strand
gacacacacgucacauuua

SEQ ID NO: 1653928 - RNA, 19 nt, Homo sapiens
  misc_RNA (1)...(19): siRNA sense strand
gcugaugagcuccaacaua

SEQ ID NO: 1653929 - RNA, 19 nt, Homo sapiens
  misc_RNA (1)...(19): siRNA sense strand
ccaggaagauaaacuuucu

SEQ ID NO: 1653930 - RNA, 19 nt, Homo sapiens
  misc_RNA (1)...(19): siRNA sense strand
ucuggaagcugcaggaguu

SEQ ID NO: 1653931 - RNA, 19 nt, Homo sapiens
  misc_RNA (1)...(19): siRNA sense strand
ggauaaagcaagucaugga

SEQ ID NO: 1653932 - RNA, 19 nt, Homo sapiens
  misc_RNA (1)...(19): siRNA sense strand
augcauaccuuaaagcuau

SEQ ID NO: 1653933 - RNA, 19 nt, Homo sapiens
  misc_RNA (1)...(19): siRNA sense strand
gcuuagagaugggcaugaa

SEQ ID NO: 1653934 - RNA, 19 nt, Homo sapiens
  misc_RNA (1)...(19): siRNA sense strand
agacacacacgucacauuu

SEQ ID NO: 1653935 - RNA, 19 nt, Homo sapiens
  misc_RNA (1)...(19): siRNA sense strand
uaccuuagcuaaagcacuu

SEQ ID NO: 1653936 - RNA, 19 nt, Homo sapiens
  misc_RNA (1)...(19): siRNA sense strand
caaccaagacugcaucauc

SEQ ID NO: 1653937 - RNA, 19 nt, Homo sapiens
  misc_RNA (1)...(19): siRNA sense strand
ggagacagcagaguauaau

SEQ ID NO: 1653938 - RNA, 19 nt, Homo sapiens
  misc_RNA (1)...(19): siRNA sense strand
gcuccaacauaacagaaga

SEQ ID NO: 1653939 - RNA, 19 nt, Homo sapiens
  misc_RNA (1)...(19): siRNA sense strand
aaagauggagcaagacaaa

SEQ ID NO: 1653940 - RNA, 19 nt, Homo sapiens
  misc_RNA (1)...(19): siRNA sense strand
ccaguccaaugccagagua

SEQ ID NO: 1653941 - RNA, 19 nt, Homo sapiens
  misc_RNA (1)...(19): siRNA sense strand
cuaagugaaucuuugaaca

SEQ ID NO: 1653942 - RNA, 19 nt, Homo sapiens
  misc_RNA (1)...(19): siRNA sense strand
cagaagacaccuaccgauu

SEQ ID NO: 1653943 - RNA, 19 nt, Homo sapiens
  misc_RNA (1)...(19): siRNA sense strand
aaccaagacugcaucauca

SEQ ID NO: 1653944 - RNA, 19 nt, Homo sapiens
  misc_RNA (1)...(19): siRNA sense strand
gaugagcuccaacauaaca

SEQ ID NO: 1653945 - RNA, 19 nt, Homo sapiens
  misc_RNA (1)...(19): siRNA sense strand
gggagaaaccaagcaauug

SEQ ID NO: 1653946 - RNA, 19 nt, Homo sapiens
  misc_RNA (1)...(19): siRNA sense strand
gaacauccagcagccuuug

SEQ ID NO: 1653947 - RNA, 19 nt, Homo sapiens
  misc_RNA (1)...(19): siRNA sense strand
gcaaagguuucuucaaaag

SEQ ID NO: 1653948 - RNA, 19 nt, Homo sapiens
  misc_RNA (1)...(19): siRNA sense strand
agaagacaccuaccgauug

SEQ ID NO: 1653949 - RNA, 19 nt, Homo sapiens
  misc_RNA (1)...(19): siRNA sense strand
gcacaagccagauugaaaa

SEQ ID NO: 1653950 - RNA, 19 nt, Homo sapiens
  misc_RNA (1)...(19): siRNA sense strand
caacgugcacuacaucugu

SEQ ID NO: 1653951 - RNA, 19 nt, Homo sapiens
  misc_RNA (1)...(19): siRNA sense strand
cacgucacauuuaagcuaa

SEQ ID NO: 1653952 - RNA, 19 nt, Homo sapiens
  misc_RNA (1)...(19): siRNA sense strand
ccacagacagcuccucuuc

SEQ ID NO: 1653953 - RNA, 19 nt, Homo sapiens
  misc_RNA (1)...(19): siRNA sense strand
gaacagcauccaggaagau

SEQ ID NO: 1653954 - RNA, 19 nt, Homo sapiens
  misc_RNA (1)...(19): siRNA sense strand
gcgccaagcaacucauauu

SEQ ID NO: 1653955 - RNA, 19 nt, Homo sapiens
  misc_RNA (1)...(19): siRNA sense strand
gcagaacagcauccaggaa

SEQ ID NO: 1653956 - RNA, 19 nt, Homo sapiens
  misc_RNA (1)...(19): siRNA sense strand
ccaagcaacucauauucac

SEQ ID NO: 1653957 - RNA, 19 nt, Homo sapiens
  misc_RNA (1)...(19): siRNA sense strand
gauggagacagcagaguau

SEQ ID NO: 1653958 - RNA, 19 nt, Homo sapiens
  misc_RNA (1)...(19): siRNA sense strand
gauaaucuccaccgacucu

SEQ ID NO: 1653959 - RNA, 19 nt, Homo sapiens
  misc_RNA (1)...(19): siRNA sense strand
acagacagcuccucuucuc

SEQ ID NO: 1653960 - RNA, 19 nt, Homo sapiens
  misc_RNA (1)...(19): siRNA sense strand
gcacuuaauaccacagaca

SEQ ID NO: 1653961 - RNA, 19 nt, Homo sapiens
  misc_RNA (1)...(19): siRNA sense strand
caauugugcugcuucaacu

SEQ ID NO: 1653962 - RNA, 19 nt, Homo sapiens
  misc_RNA (1)...(19): siRNA sense strand
gagaaaccaagcaauugug

SEQ ID NO: 1653963 - RNA, 19 nt, Homo sapiens
  misc_RNA (1)...(19): siRNA sense strand
ggcaauguuucgauagaca

SEQ ID NO: 1653964 - RNA, 19 nt, Homo sapiens
  misc_RNA (1)...(19): siRNA sense strand
gcaugaaaauggaaucugu

SEQ ID NO: 1653965 - RNA, 19 nt, Homo sapiens
  misc_RNA (1)...(19): siRNA sense strand
cagcauccaggaagauaaa

SEQ ID NO: 1653966 - RNA, 19 nt, Homo sapiens
  misc_RNA (1)...(19): siRNA sense strand
acacgucacauuuaagcua

SEQ ID NO: 1653967 - RNA, 19 nt, Homo sapiens
  misc_RNA (1)...(19): siRNA sense strand
aagcuuggcagaugggaua

SEQ ID NO: 1653968 - RNA, 19 nt, Homo sapiens
  misc_RNA (1)...(19): siRNA sense strand
cauuugauaccuuagcuaa

SEQ ID NO: 1653969 - RNA, 19 nt, Homo sapiens
  misc_RNA (1)...(19): siRNA sense strand
gacaaacaggucuucuuga

SEQ ID NO: 1653970 - RNA, 19 nt, Homo sapiens
  misc_RNA (1)...(19): siRNA sense strand
cgggagaaaccaagcaauu

SEQ ID NO: 1653971 - RNA, 19 nt, Homo sapiens
  misc_RNA (1)...(19): siRNA sense strand
gaccagcacaagccagauu

SEQ ID NO: 1653972 - RNA, 19 nt, Homo sapiens
  misc_RNA (1)...(19): siRNA sense strand
ucgggcauuugauaccuua

SEQ ID NO: 1653973 - RNA, 19 nt, Homo sapiens
  misc_RNA (1)...(19): siRNA sense strand
gagauaacucgggcauuug

SEQ ID NO: 1653974 - RNA, 19 nt, Homo sapiens
  misc_RNA (1)...(19): siRNA sense strand
cagggaugcuugugaacau

SEQ ID NO: 1653975 - RNA, 19 nt, Homo sapiens
  misc_RNA (1)...(19): siRNA sense strand
aaaucuauauccggaaaga

SEQ ID NO: 1653976 - RNA, 19 nt, Homo sapiens
  misc_RNA (1)...(19): siRNA sense strand
gcaauugugcugcuucaac

SEQ ID NO: 1653977 - RNA, 19 nt, Homo sapiens
  misc_RNA (1)...(19): siRNA sense strand
ugugaagguugcaaagguu

SEQ ID NO: 1653978 - RNA, 19 nt, Homo sapiens
  misc_RNA (1)...(19): siRNA sense strand
ucauggagcacaucuggaa

SEQ ID NO: 1653979 - RNA, 19 nt, Homo sapiens
  misc_RNA (1)...(19): siRNA sense strand
agaacagcauccaggaaga

SEQ ID NO: 1653980 - RNA, 19 nt, Homo sapiens
  misc_RNA (1)...(19): siRNA sense strand
caacggugacacuucagaa

SEQ ID NO: 1653981 - RNA, 19 nt, Homo sapiens
  misc_RNA (1)...(19): siRNA sense strand
ccuuaaagcuauaguucuc

SEQ ID NO: 1653982 - RNA, 19 nt, Homo sapiens
  misc_RNA (1)...(19): siRNA sense strand
cugcaggaguucuguaaca

SEQ ID NO: 1653983 - RNA, 19 nt, Homo sapiens
  misc_RNA (1)...(19): siRNA sense strand
gccaagcaacucauauuca

SEQ ID NO: 1653984 - RNA, 19 nt, Homo sapiens
  misc_RNA (1)...(19): siRNA sense strand
uaacaaugcccaguccaau

SEQ ID NO: 1653985 - RNA, 19 nt, Homo sapiens
  misc_RNA (1)...(19): siRNA sense strand
gcuaaagcacuuaauacca

SEQ ID NO: 1653986 - RNA, 19 nt, Homo sapiens
  misc_RNA (1)...(19): siRNA sense strand
caaaaggagugugaggaaa

SEQ ID NO: 1653987 - RNA, 19 nt, Homo sapiens
  misc_RNA (1)...(19): siRNA sense strand
uuugauaccuuagcuaaag

SEQ ID NO: 1653988 - RNA, 19 nt, Homo sapiens
  misc_RNA (1)...(19): siRNA sense strand
gggcacacuggcaaaugua

SEQ ID NO: 1653989 - RNA, 19 nt, Homo sapiens
  misc_RNA (1)...(19): siRNA sense strand
ccugagaaguccccugaua

SEQ ID NO: 1653990 - RNA, 19 nt, Homo sapiens
  misc_RNA (1)...(19): siRNA sense strand
gcugucaguugugaagguu

SEQ ID NO: 1653991 - RNA, 19 nt, Homo sapiens
  misc_RNA (1)...(19): siRNA sense strand
ggacagaaaauccagauag

SEQ ID NO: 1653992 - RNA, 19 nt, Homo sapiens
  misc_RNA (1)...(19): siRNA sense strand
gcacuacaucugugagucu

SEQ ID NO: 1653993 - RNA, 19 nt, Homo sapiens
  misc_RNA (1)...(19): siRNA sense strand
gacagcuccucuucuccaa

SEQ ID NO: 1653994 - RNA, 19 nt, Homo sapiens
  misc_RNA (1)...(19): siRNA sense strand
gaggaccagucugcaagug

SEQ ID NO: 1653995 - RNA, 19 nt, Homo sapiens
  misc_RNA (1)...(19): siRNA sense strand
caaacaggucuucuugauc

SEQ ID NO: 1653996 - RNA, 19 nt, Homo sapiens
  misc_RNA (1)...(19): siRNA sense strand
ggcaggauccagauuguca

SEQ ID NO: 1653997 - RNA, 19 nt, Homo sapiens
  misc_RNA (1)...(19): siRNA sense strand
caaagauggagcaagacaa

SEQ ID NO: 1653998 - RNA, 19 nt, Homo sapiens
  misc_RNA (1)...(19): siRNA sense strand
ucaaccaccugcagaacag

SEQ ID NO: 1653999 - RNA, 19 nt, Homo sapiens
  misc_RNA (1)...(19): siRNA sense strand
cggugacacuucagaaauc

SEQ ID NO: 1654000 - RNA, 19 nt, Homo sapiens
  misc_RNA (1)...(19): siRNA sense strand
gaccucccuugccaaccua

SEQ ID NO: 1654001 - RNA, 19 nt, Homo sapiens
  misc_RNA (1)...(19): siRNA sense strand
cggaaccgcugucaguuuu

SEQ ID NO: 1654002 - RNA, 19 nt, Homo sapiens
  misc_RNA (1)...(19): siRNA sense strand
cggaaagaccugagaaguc

SEQ ID NO: 1654003 - RNA, 19 nt, Homo sapiens
  misc_RNA (1)...(19): siRNA sense strand
cagaaaaccuacucagaag

SEQ ID NO: 1654004 - RNA, 19 nt, Homo sapiens
  misc_RNA (1)...(19): siRNA sense strand
ucagaaaaccuacucagaa

SEQ ID NO: 1654005 - RNA, 19 nt, Homo sapiens
  misc_RNA (1)...(19): siRNA sense strand
uguggucuguggcgacaaa

SEQ ID NO: 1654006 - RNA, 19 nt, Homo sapiens
  misc_RNA (1)...(19): siRNA sense strand
gaguauaauggccagauca

SEQ ID NO: 1654007 - RNA, 19 nt, Homo sapiens
  misc_RNA (1)...(19): siRNA sense strand
auaacucgggcauuugaua

SEQ ID NO: 1654008 - RNA, 19 nt, Homo sapiens
  misc_RNA (1)...(19): siRNA sense strand
agauaacucgggcauuuga

SEQ ID NO: 1654009 - RNA, 19 nt, Homo sapiens
  misc_RNA (1)...(19): siRNA sense strand
gagcuccaacauaacagaa

SEQ ID NO: 1654010 - RNA, 19 nt, Homo sapiens
  misc_RNA (1)...(19): siRNA sense strand
agauggagacagcagagua

SEQ ID NO: 1654011 - RNA, 19 nt, Homo sapiens
  misc_RNA (1)...(19): siRNA sense strand
gcacaaagccauccgugua

SEQ ID NO: 1654012 - RNA, 19 nt, Homo sapiens
  misc_RNA (1)...(19): siRNA sense strand
ucacagaaguccuggcuuu

SEQ ID NO: 1654013 - RNA, 19 nt, Homo sapiens
  misc_RNA (1)...(19): siRNA sense strand
gguggaagcugcugauguu

SEQ ID NO: 1654014 - RNA, 19 nt, Homo sapiens
  misc_RNA (1)...(19): siRNA sense strand
gacauccucuuuguucuua

SEQ ID NO: 1654015 - RNA, 19 nt, Homo sapiens
  misc_RNA (1)...(19): siRNA sense strand
gcagacauccucuuuguuc

SEQ ID NO: 1654016 - RNA, 19 nt, Homo sapiens
  misc_RNA (1)...(19): siRNA sense strand
ccagugagaccgcagauaa

SEQ ID NO: 1654017 - RNA, 19 nt, Homo sapiens
  misc_RNA (1)...(19): siRNA sense strand
ggaauauucugguggugau

SEQ ID NO: 1654018 - RNA, 19 nt, Homo sapiens
  misc_RNA (1)...(19): siRNA sense strand
ugacagacgucuaucucuu

SEQ ID NO: 1654019 - RNA, 19 nt, Homo sapiens
  misc_RNA (1)...(19): siRNA sense strand
ucagauuccucauaacaug

SEQ ID NO: 1654020 - RNA, 19 nt, Homo sapiens
  misc_RNA (1)...(19): siRNA sense strand
ucuaugccaucaacuuuaa

SEQ ID NO: 1654021 - RNA, 19 nt, Homo sapiens
  misc_RNA (1)...(19): siRNA sense strand
aaucauagcuguggugcuu

SEQ ID NO: 1654022 - RNA, 19 nt, Homo sapiens
  misc_RNA (1)...(19): siRNA sense strand
gcuacucuuugguuucuuu

SEQ ID NO: 1654023 - RNA, 19 nt, Homo sapiens
  misc_RNA (1)...(19): siRNA sense strand
ggaugcugcuccugacuug

SEQ ID NO: 1654024 - RNA, 19 nt, Homo sapiens
  misc_RNA (1)...(19): siRNA sense strand
cgacuccagugaagauuau

SEQ ID NO: 1654025 - RNA, 19 nt, Homo sapiens
  misc_RNA (1)...(19): siRNA sense strand
gcaguucuccaggcuauuu

SEQ ID NO: 1654026 - RNA, 19 nt, Homo sapiens
  misc_RNA (1)...(19): siRNA sense strand
ugaaggaccuguggugugu

SEQ ID NO: 1654027 - RNA, 19 nt, Homo sapiens
  misc_RNA (1)...(19): siRNA sense strand
gagcuacucuuugguuucu

SEQ ID NO: 1654028 - RNA, 19 nt, Homo sapiens
  misc_RNA (1)...(19): siRNA sense strand
gacaaugcgucguccuuca

SEQ ID NO: 1654029 - RNA, 19 nt, Homo sapiens
  misc_RNA (1)...(19): siRNA sense strand
cuugucagauuccucauaa

SEQ ID NO: 1654030 - RNA, 19 nt, Homo sapiens
  misc_RNA (1)...(19): siRNA sense strand
ugugacggcugcaaauuug

SEQ ID NO: 1654031 - RNA, 19 nt, Homo sapiens
  misc_RNA (1)...(19): siRNA sense strand
gcuaauuggcuauacgaaa

SEQ ID NO: 1654032 - RNA, 19 nt, Homo sapiens
  misc_RNA (1)...(19): siRNA sense strand
gaccgcagauaacgacaau

SEQ ID NO: 1654033 - RNA, 19 nt, Homo sapiens
  misc_RNA (1)...(19): siRNA sense strand
aaaaucaucugccuuguug

SEQ ID NO: 1654034 - RNA, 19 nt, Homo sapiens
  misc_RNA (1)...(19): siRNA sense strand
gccgggagguacucagaaa

SEQ ID NO: 1654035 - RNA, 19 nt, Homo sapiens
  misc_RNA (1)...(19): siRNA sense strand
caucuaugccaucaacuuu

SEQ ID NO: 1654036 - RNA, 19 nt, Homo sapiens
  misc_RNA (1)...(19): siRNA sense strand
agccauccguguaaucaua

SEQ ID NO: 1654037 - RNA, 19 nt, Homo sapiens
  misc_RNA (1)...(19): siRNA sense strand
ccuuugauguucaugauau

SEQ ID NO: 1654038 - RNA, 19 nt, Homo sapiens
  misc_RNA (1)...(19): siRNA sense strand
gcaaugccacgugcaaguu

SEQ ID NO: 1654039 - RNA, 19 nt, Homo sapiens
  misc_RNA (1)...(19): siRNA sense strand
cuaauuggcuauacgaaaa

SEQ ID NO: 1654040 - RNA, 19 nt, Homo sapiens
  misc_RNA (1)...(19): siRNA sense strand
cacaaagccauccguguaa

SEQ ID NO: 1654041 - RNA, 19 nt, Homo sapiens
  misc_RNA (1)...(19): siRNA sense strand
gacagacgucuaucucuug

SEQ ID NO: 1654042 - RNA, 19 nt, Homo sapiens
  misc_RNA (1)...(19): siRNA sense strand
aagaaggccaggucuauga

SEQ ID NO: 1654043 - RNA, 19 nt, Homo sapiens
  misc_RNA (1)...(19): siRNA sense strand
ggugcaagcucagaauucu

SEQ ID NO: 1654044 - RNA, 19 nt, Homo sapiens
  misc_RNA (1)...(19): siRNA sense strand
acagacgucuaucucuuga

SEQ ID NO: 1654045 - RNA, 19 nt, Homo sapiens
  misc_RNA (1)...(19): siRNA sense strand
ccgauugccuacuccuuga

SEQ ID NO: 1654046 - RNA, 19 nt, Homo sapiens
  misc_RNA (1)...(19): siRNA sense strand
uugcagacauccucuuugu

SEQ ID NO: 1654047 - RNA, 19 nt, Homo sapiens
  misc_RNA (1)...(19): siRNA sense strand
gcuccgauccagaacacua

SEQ ID NO: 1654048 - RNA, 19 nt, Homo sapiens
  misc_RNA (1)...(19): siRNA sense strand
gucagucaauacuucauau

SEQ ID NO: 1654049 - RNA, 19 nt, Homo sapiens
  misc_RNA (1)...(19): siRNA sense strand
gaaaagcuaauuggcuaua

SEQ ID NO: 1654050 - RNA, 19 nt, Homo sapiens
  misc_RNA (1)...(19): siRNA sense strand
aggcagcgaugucugugaa

SEQ ID NO: 1654051 - RNA, 19 nt, Homo sapiens
  misc_RNA (1)...(19): siRNA sense strand
caggcuauuuguaccgauu

SEQ ID NO: 1654052 - RNA, 19 nt, Homo sapiens
  misc_RNA (1)...(19): siRNA sense strand
gaccuguggugugugagaa

SEQ ID NO: 1654053 - RNA, 19 nt, Homo sapiens
  misc_RNA (1)...(19): siRNA sense strand
ugcaagcucagaauucuaa

SEQ ID NO: 1654054 - RNA, 19 nt, Homo sapiens
  misc_RNA (1)...(19): siRNA sense strand
ggcuugagcuacucuuugg

SEQ ID NO: 1654055 - RNA, 19 nt, Homo sapiens
  misc_RNA (1)...(19): siRNA sense strand
ugacuugcauuagcaugga

SEQ ID NO: 1654056 - RNA, 19 nt, Homo sapiens
  misc_RNA (1)...(19): siRNA sense strand
gaacacuaccgcgcagcaa

SEQ ID NO: 1654057 - RNA, 19 nt, Homo sapiens
  misc_RNA (1)...(19): siRNA sense strand
gggcuugagcuacucuuug

SEQ ID NO: 1654058 - RNA, 19 nt, Homo sapiens
  misc_RNA (1)...(19): siRNA sense strand
uauaagaaggccaggucua

SEQ ID NO: 1654059 - RNA, 19 nt, Homo sapiens
  misc_RNA (1)...(19): siRNA sense strand
aaacuacuuucugaagauc

SEQ ID NO: 1654060 - RNA, 19 nt, Homo sapiens
  misc_RNA (1)...(19): siRNA sense strand
cagcucaacuuuugucuuc

SEQ ID NO: 1654061 - RNA, 19 nt, Homo sapiens
  misc_RNA (1)...(19): siRNA sense strand
gucaucaucuccagcucaa

SEQ ID NO: 1654062 - RNA, 19 nt, Homo sapiens
  misc_RNA (1)...(19): siRNA sense strand
agacgucuaucucuugaac

SEQ ID NO: 1654063 - RNA, 19 nt, Homo sapiens
  misc_RNA (1)...(19): siRNA sense strand
ggaccuguggugugugaga

SEQ ID NO: 1654064 - RNA, 19 nt, Homo sapiens
  misc_RNA (1)...(19): siRNA sense strand
uagcuguggugcuuguguu

SEQ ID NO: 1654065 - RNA, 19 nt, Homo sapiens
  misc_RNA (1)...(19): siRNA sense strand
ucauagcuguggugcuugu

SEQ ID NO: 1654066 - RNA, 19 nt, Homo sapiens
  misc_RNA (1)...(19): siRNA sense strand
acaaagccauccguguaau

SEQ ID NO: 1654067 - RNA, 19 nt, Homo sapiens
  misc_RNA (1)...(19): siRNA sense strand
ccaaggcagcgaugucugu

SEQ ID NO: 1654068 - RNA, 19 nt, Homo sapiens
  misc_RNA (1)...(19): siRNA sense strand
aaggaccugugguguguga

SEQ ID NO: 1654069 - RNA, 19 nt, Homo sapiens
  misc_RNA (1)...(19): siRNA sense strand
uaagaaggccaggucuaug

SEQ ID NO: 1654070 - RNA, 19 nt, Homo sapiens
  misc_RNA (1)...(19): siRNA sense strand
acccugugcucuacgcuuu

SEQ ID NO: 1654071 - RNA, 19 nt, Homo sapiens
  misc_RNA (1)...(19): siRNA sense strand
gcuugucagauuccucaua

SEQ ID NO: 1654072 - RNA, 19 nt, Homo sapiens
  misc_RNA (1)...(19): siRNA sense strand
gcuccugacuugcauuagc

SEQ ID NO: 1654073 - RNA, 19 nt, Homo sapiens
  misc_RNA (1)...(19): siRNA sense strand
cauauuacucaguugauuc

SEQ ID NO: 1654074 - RNA, 19 nt, Homo sapiens
  misc_RNA (1)...(19): siRNA sense strand
ggaccgguacaucgccauu

SEQ ID NO: 1654075 - RNA, 19 nt, Homo sapiens
  misc_RNA (1)...(19): siRNA sense strand
ugagaaggaaguacaaguc

SEQ ID NO: 1654076 - RNA, 19 nt, Homo sapiens
  misc_RNA (1)...(19): siRNA sense strand
uguuacacguucauuguca

SEQ ID NO: 1654077 - RNA, 19 nt, Homo sapiens
  misc_RNA (1)...(19): siRNA sense strand
aggcaguucuccaggcuau

SEQ ID NO: 1654078 - RNA, 19 nt, Homo sapiens
  misc_RNA (1)...(19): siRNA sense strand
guuacacguucauugucaa

SEQ ID NO: 1654079 - RNA, 19 nt, Homo sapiens
  misc_RNA (1)...(19): siRNA sense strand
uaacaugguccugcuugug

SEQ ID NO: 1654080 - RNA, 19 nt, Homo sapiens
  misc_RNA (1)...(19): siRNA sense strand
ugucagauuccucauaaca

SEQ ID NO: 1654081 - RNA, 19 nt, Homo sapiens
  misc_RNA (1)...(19): siRNA sense strand
aguugauucugagauguua

SEQ ID NO: 1654082 - RNA, 19 nt, Homo sapiens
  misc_RNA (1)...(19): siRNA sense strand
caaagccauccguguaauc

SEQ ID NO: 1654083 - RNA, 19 nt, Homo sapiens
  misc_RNA (1)...(19): siRNA sense strand
ugucagucaauacuucaua

SEQ ID NO: 1654084 - RNA, 19 nt, Homo sapiens
  misc_RNA (1)...(19): siRNA sense strand
auaagaaggccaggucuau

SEQ ID NO: 1654085 - RNA, 19 nt, Homo sapiens
  misc_RNA (1)...(19): siRNA sense strand
gcgucguccuucacuaugu

SEQ ID NO: 1654086 - RNA, 19 nt, Homo sapiens
  misc_RNA (1)...(19): siRNA sense strand
caaugccacgugcaaguug

SEQ ID NO: 1654087 - RNA, 19 nt, Homo sapiens
  misc_RNA (1)...(19): siRNA sense strand
cauugcagacauccucuuu

SEQ ID NO: 1654088 - RNA, 19 nt, Homo sapiens
  misc_RNA (1)...(19): siRNA sense strand
gaaggccaggucuaugaca

SEQ ID NO: 1654089 - RNA, 19 nt, Homo sapiens
  misc_RNA (1)...(19): siRNA sense strand
aacaugguccugcuuguga

SEQ ID NO: 1654090 - RNA, 19 nt, Homo sapiens
  misc_RNA (1)...(19): siRNA sense strand
acucuuugguuucuuuauc

SEQ ID NO: 1654091 - RNA, 19 nt, Homo sapiens
  misc_RNA (1)...(19): siRNA sense strand
ccauuguacaggcgacuaa

SEQ ID NO: 1654092 - RNA, 19 nt, Homo sapiens
  misc_RNA (1)...(19): siRNA sense strand
uugagcuacucuuugguuu

SEQ ID NO: 1654093 - RNA, 19 nt, Homo sapiens
  misc_RNA (1)...(19): siRNA sense strand
agacauccucuuuguucuu

SEQ ID NO: 1654094 - RNA, 19 nt, Homo sapiens
  misc_RNA (1)...(19): siRNA sense strand
ucgacuccagugaagauua

SEQ ID NO: 1654095 - RNA, 19 nt, Homo sapiens
  misc_RNA (1)...(19): siRNA sense strand
gcucaacuuuugucuucaa

SEQ ID NO: 1654096 - RNA, 19 nt, Homo sapiens
  misc_RNA (1)...(19): siRNA sense strand
gggaugcugcuccugacuu

SEQ ID NO: 1654097 - RNA, 19 nt, Homo sapiens
  misc_RNA (1)...(19): siRNA sense strand
ugcaggaggucaggcaguu

SEQ ID NO: 1654098 - RNA, 19 nt, Homo sapiens
  misc_RNA (1)...(19): siRNA sense strand
cuuuaucccuuugauguuc

SEQ ID NO: 1654099 - RNA, 19 nt, Homo sapiens
  misc_RNA (1)...(19): siRNA sense strand
gcacaaagccauccgugua

SEQ ID NO: 1654100 - RNA, 19 nt, Homo sapiens
  misc_RNA (1)...(19): siRNA sense strand
ucacagaaguccuggcuuu

SEQ ID NO: 1654101 - RNA, 19 nt, Homo sapiens
  misc_RNA (1)...(19): siRNA sense strand
gguggaagcugcugauguu

SEQ ID NO: 1654102 - RNA, 19 nt, Homo sapiens
  misc_RNA (1)...(19): siRNA sense strand
gacauccucuuuguucuua

SEQ ID NO: 1654103 - RNA, 19 nt, Homo sapiens
  misc_RNA (1)...(19): siRNA sense strand
gcagacauccucuuuguuc

SEQ ID NO: 1654104 - RNA, 19 nt, Homo sapiens
  misc_RNA (1)...(19): siRNA sense strand
ccagugagaccgcagauaa

SEQ ID NO: 1654105 - RNA, 19 nt, Homo sapiens
  misc_RNA (1)...(19): siRNA sense strand
ggaauauucugguggugau

SEQ ID NO: 1654106 - RNA, 19 nt, Homo sapiens
  misc_RNA (1)...(19): siRNA sense strand
ugacagacgucuaucucuu

SEQ ID NO: 1654107 - RNA, 19 nt, Homo sapiens
  misc_RNA (1)...(19): siRNA sense strand
ucagauuccucauaacaug

SEQ ID NO: 1654108 - RNA, 19 nt, Homo sapiens
  misc_RNA (1)...(19): siRNA sense strand
ucuaugccaucaacuuuaa

SEQ ID NO: 1654109 - RNA, 19 nt, Homo sapiens
  misc_RNA (1)...(19): siRNA sense strand
aaucauagcuguggugcuu

SEQ ID NO: 1654110 - RNA, 19 nt, Homo sapiens
  misc_RNA (1)...(19): siRNA sense strand
gcuacucuuugguuucuuu

SEQ ID NO: 1654111 - RNA, 19 nt, Homo sapiens
  misc_RNA (1)...(19): siRNA sense strand
ggaugcugcuccugacuug

SEQ ID NO: 1654112 - RNA, 19 nt, Homo sapiens
  misc_RNA (1)...(19): siRNA sense strand
cgacuccagugaagauuau

SEQ ID NO: 1654113 - RNA, 19 nt, Homo sapiens
  misc_RNA (1)...(19): siRNA sense strand
gcaguucuccaggcuauuu

SEQ ID NO: 1654114 - RNA, 19 nt, Homo sapiens
  misc_RNA (1)...(19): siRNA sense strand
ugaaggaccuguggugugu

SEQ ID NO: 1654115 - RNA, 19 nt, Homo sapiens
  misc_RNA (1)...(19): siRNA sense strand
gagcuacucuuugguuucu

SEQ ID NO: 1654116 - RNA, 19 nt, Homo sapiens
  misc_RNA (1)...(19): siRNA sense strand
gacaaugcgucguccuuca

SEQ ID NO: 1654117 - RNA, 19 nt, Homo sapiens
  misc_RNA (1)...(19): siRNA sense strand
cuugucagauuccucauaa

SEQ ID NO: 1654118 - RNA, 19 nt, Homo sapiens
  misc_RNA (1)...(19): siRNA sense strand
ugugacggcugcaaauuug

SEQ ID NO: 1654119 - RNA, 19 nt, Homo sapiens
  misc_RNA (1)...(19): siRNA sense strand
gcuaauuggcuauacgaaa

SEQ ID NO: 1654120 - RNA, 19 nt, Homo sapiens
  misc_RNA (1)...(19): siRNA sense strand
gaccgcagauaacgacaau

SEQ ID NO: 1654121 - RNA, 19 nt, Homo sapiens
  misc_RNA (1)...(19): siRNA sense strand
aaaaucaucugccuuguug

SEQ ID NO: 1654122 - RNA, 19 nt, Homo sapiens
  misc_RNA (1)...(19): siRNA sense strand
gccgggagguacucagaaa

SEQ ID NO: 1654123 - RNA, 19 nt, Homo sapiens
  misc_RNA (1)...(19): siRNA sense strand
caucuaugccaucaacuuu

SEQ ID NO: 1654124 - RNA, 19 nt, Homo sapiens
  misc_RNA (1)...(19): siRNA sense strand
agccauccguguaaucaua

SEQ ID NO: 1654125 - RNA, 19 nt, Homo sapiens
  misc_RNA (1)...(19): siRNA sense strand
ccuuugauguucaugauau

SEQ ID NO: 1654126 - RNA, 19 nt, Homo sapiens
  misc_RNA (1)...(19): siRNA sense strand
gcaaugccacgugcaaguu

SEQ ID NO: 1654127 - RNA, 19 nt, Homo sapiens
  misc_RNA (1)...(19): siRNA sense strand
cuaauuggcuauacgaaaa

SEQ ID NO: 1654128 - RNA, 19 nt, Homo sapiens
  misc_RNA (1)...(19): siRNA sense strand
cacaaagccauccguguaa

SEQ ID NO: 1654129 - RNA, 19 nt, Homo sapiens
  misc_RNA (1)...(19): siRNA sense strand
gacagacgucuaucucuug

SEQ ID NO: 1654130 - RNA, 19 nt, Homo sapiens
  misc_RNA (1)...(19): siRNA sense strand
aagaaggccaggucuauga

SEQ ID NO: 1654131 - RNA, 19 nt, Homo sapiens
  misc_RNA (1)...(19): siRNA sense strand
ggugcaagcucagaauucu

SEQ ID NO: 1654132 - RNA, 19 nt, Homo sapiens
  misc_RNA (1)...(19): siRNA sense strand
acagacgucuaucucuuga

SEQ ID NO: 1654133 - RNA, 19 nt, Homo sapiens
  misc_RNA (1)...(19): siRNA sense strand
ccgauugccuacuccuuga

SEQ ID NO: 1654134 - RNA, 19 nt, Homo sapiens
  misc_RNA (1)...(19): siRNA sense strand
uugcagacauccucuuugu

SEQ ID NO: 1654135 - RNA, 19 nt, Homo sapiens
  misc_RNA (1)...(19): siRNA sense strand
gcuccgauccagaacacua

SEQ ID NO: 1654136 - RNA, 19 nt, Homo sapiens
  misc_RNA (1)...(19): siRNA sense strand
gucagucaauacuucauau

SEQ ID NO: 1654137 - RNA, 19 nt, Homo sapiens
  misc_RNA (1)...(19): siRNA sense strand
gaaaagcuaauuggcuaua

SEQ ID NO: 1654138 - RNA, 19 nt, Homo sapiens
  misc_RNA (1)...(19): siRNA sense strand
aggcagcgaugucugugaa

SEQ ID NO: 1654139 - RNA, 19 nt, Homo sapiens
  misc_RNA (1)...(19): siRNA sense strand
caggcuauuuguaccgauu

SEQ ID NO: 1654140 - RNA, 19 nt, Homo sapiens
  misc_RNA (1)...(19): siRNA sense strand
gaccuguggugugugagaa

SEQ ID NO: 1654141 - RNA, 19 nt, Homo sapiens
  misc_RNA (1)...(19): siRNA sense strand
ugcaagcucagaauucuaa

SEQ ID NO: 1654142 - RNA, 19 nt, Homo sapiens
  misc_RNA (1)...(19): siRNA sense strand
ggcuugagcuacucuuugg

SEQ ID NO: 1654143 - RNA, 19 nt, Homo sapiens
  misc_RNA (1)...(19): siRNA sense strand
ugacuugcauuagcaugga

SEQ ID NO: 1654144 - RNA, 19 nt, Homo sapiens
  misc_RNA (1)...(19): siRNA sense strand
gaacacuaccgcgcagcaa

SEQ ID NO: 1654145 - RNA, 19 nt, Homo sapiens
  misc_RNA (1)...(19): siRNA sense strand
gggcuugagcuacucuuug

SEQ ID NO: 1654146 - RNA, 19 nt, Homo sapiens
  misc_RNA (1)...(19): siRNA sense strand
uauaagaaggccaggucua

SEQ ID NO: 1654147 - RNA, 19 nt, Homo sapiens
  misc_RNA (1)...(19): siRNA sense strand
aaacuacuuucugaagauc

SEQ ID NO: 1654148 - RNA, 19 nt, Homo sapiens
  misc_RNA (1)...(19): siRNA sense strand
cagcucaacuuuugucuuc

SEQ ID NO: 1654149 - RNA, 19 nt, Homo sapiens
  misc_RNA (1)...(19): siRNA sense strand
gucaucaucuccagcucaa

SEQ ID NO: 1654150 - RNA, 19 nt, Homo sapiens
  misc_RNA (1)...(19): siRNA sense strand
agacgucuaucucuugaac

SEQ ID NO: 1654151 - RNA, 19 nt, Homo sapiens
  misc_RNA (1)...(19): siRNA sense strand
ggaccuguggugugugaga

SEQ ID NO: 1654152 - RNA, 19 nt, Homo sapiens
  misc_RNA (1)...(19): siRNA sense strand
uagcuguggugcuuguguu

SEQ ID NO: 1654153 - RNA, 19 nt, Homo sapiens
  misc_RNA (1)...(19): siRNA sense strand
ucauagcuguggugcuugu

SEQ ID NO: 1654154 - RNA, 19 nt, Homo sapiens
  misc_RNA (1)...(19): siRNA sense strand
acaaagccauccguguaau

SEQ ID NO: 1654155 - RNA, 19 nt, Homo sapiens
  misc_RNA (1)...(19): siRNA sense strand
ccaaggcagcgaugucugu

SEQ ID NO: 1654156 - RNA, 19 nt, Homo sapiens
  misc_RNA (1)...(19): siRNA sense strand
aaggaccugugguguguga

SEQ ID NO: 1654157 - RNA, 19 nt, Homo sapiens
  misc_RNA (1)...(19): siRNA sense strand
uaagaaggccaggucuaug

SEQ ID NO: 1654158 - RNA, 19 nt, Homo sapiens
  misc_RNA (1)...(19): siRNA sense strand
acccugugcucuacgcuuu

SEQ ID NO: 1654159 - RNA, 19 nt, Homo sapiens
  misc_RNA (1)...(19): siRNA sense strand
gcuugucagauuccucaua

SEQ ID NO: 1654160 - RNA, 19 nt, Homo sapiens
  misc_RNA (1)...(19): siRNA sense strand
gcuccugacuugcauuagc

SEQ ID NO: 1654161 - RNA, 19 nt, Homo sapiens
  misc_RNA (1)...(19): siRNA sense strand
cauauuacucaguugauuc

SEQ ID NO: 1654162 - RNA, 19 nt, Homo sapiens
  misc_RNA (1)...(19): siRNA sense strand
ggaccgguacaucgccauu

SEQ ID NO: 1654163 - RNA, 19 nt, Homo sapiens
  misc_RNA (1)...(19): siRNA sense strand
ugagaaggaaguacaaguc

SEQ ID NO: 1654164 - RNA, 19 nt, Homo sapiens
  misc_RNA (1)...(19): siRNA sense strand
uguuacacguucauuguca

SEQ ID NO: 1654165 - RNA, 19 nt, Homo sapiens
  misc_RNA (1)...(19): siRNA sense strand
aggcaguucuccaggcuau

SEQ ID NO: 1654166 - RNA, 19 nt, Homo sapiens
  misc_RNA (1)...(19): siRNA sense strand
guuacacguucauugucaa

SEQ ID NO: 1654167 - RNA, 19 nt, Homo sapiens
  misc_RNA (1)...(19): siRNA sense strand
uaacaugguccugcuugug

SEQ ID NO: 1654168 - RNA, 19 nt, Homo sapiens
  misc_RNA (1)...(19): siRNA sense strand
ugucagauuccucauaaca

SEQ ID NO: 1654169 - RNA, 19 nt, Homo sapiens
  misc_RNA (1)...(19): siRNA sense strand
aguugauucugagauguua

SEQ ID NO: 1654170 - RNA, 19 nt, Homo sapiens
  misc_RNA (1)...(19): siRNA sense strand
caaagccauccguguaauc

SEQ ID NO: 1654171 - RNA, 19 nt, Homo sapiens
  misc_RNA (1)...(19): siRNA sense strand
ugucagucaauacuucaua

SEQ ID NO: 1654172 - RNA, 19 nt, Homo sapiens
  misc_RNA (1)...(19): siRNA sense strand
auaagaaggccaggucuau

SEQ ID NO: 1654173 - RNA, 19 nt, Homo sapiens
  misc_RNA (1)...(19): siRNA sense strand
gcgucguccuucacuaugu

SEQ ID NO: 1654174 - RNA, 19 nt, Homo sapiens
  misc_RNA (1)...(19): siRNA sense strand
caaugccacgugcaaguug

SEQ ID NO: 1654175 - RNA, 19 nt, Homo sapiens
  misc_RNA (1)...(19): siRNA sense strand
cauugcagacauccucuuu

SEQ ID NO: 1654176 - RNA, 19 nt, Homo sapiens
  misc_RNA (1)...(19): siRNA sense strand
gaaggccaggucuaugaca

SEQ ID NO: 1654177 - RNA, 19 nt, Homo sapiens
  misc_RNA (1)...(19): siRNA sense strand
aacaugguccugcuuguga

SEQ ID NO: 1654178 - RNA, 19 nt, Homo sapiens
  misc_RNA (1)...(19): siRNA sense strand
acucuuugguuucuuuauc

SEQ ID NO: 1654179 - RNA, 19 nt, Homo sapiens
  misc_RNA (1)...(19): siRNA sense strand
ccauuguacaggcgacuaa

SEQ ID NO: 1654180 - RNA, 19 nt, Homo sapiens
  misc_RNA (1)...(19): siRNA sense strand
uugagcuacucuuugguuu

SEQ ID NO: 1654181 - RNA, 19 nt, Homo sapiens
  misc_RNA (1)...(19): siRNA sense strand
agacauccucuuuguucuu

SEQ ID NO: 1654182 - RNA, 19 nt, Homo sapiens
  misc_RNA (1)...(19): siRNA sense strand
ucgacuccagugaagauua

SEQ ID NO: 1654183 - RNA, 19 nt, Homo sapiens
  misc_RNA (1)...(19): siRNA sense strand
gcucaacuuuugucuucaa

SEQ ID NO: 1654184 - RNA, 19 nt, Homo sapiens
  misc_RNA (1)...(19): siRNA sense strand
gggaugcugcuccugacuu

SEQ ID NO: 1654185 - RNA, 19 nt, Homo sapiens
  misc_RNA (1)...(19): siRNA sense strand
ugcaggaggucaggcaguu

SEQ ID NO: 1654186 - RNA, 19 nt, Homo sapiens
  misc_RNA (1)...(19): siRNA sense strand
cuuuaucccuuugauguuc

SEQ ID NO: 1654187 - RNA, 19 nt, Homo sapiens
  misc_RNA (1)...(19): siRNA sense strand
gcacaaagccauccgugua

SEQ ID NO: 1654188 - RNA, 19 nt, Homo sapiens
  misc_RNA (1)...(19): siRNA sense strand
ucacagaaguccuggcuuu

SEQ ID NO: 1654189 - RNA, 19 nt, Homo sapiens
  misc_RNA (1)...(19): siRNA sense strand
gguggaagcugcugauguu

SEQ ID NO: 1654190 - RNA, 19 nt, Homo sapiens
  misc_RNA (1)...(19): siRNA sense strand
gacauccucuuuguucuua

SEQ ID NO: 1654191 - RNA, 19 nt, Homo sapiens
  misc_RNA (1)...(19): siRNA sense strand
gcagacauccucuuuguuc

SEQ ID NO: 1654192 - RNA, 19 nt, Homo sapiens
  misc_RNA (1)...(19): siRNA sense strand
ccagugagaccgcagauaa

SEQ ID NO: 1654193 - RNA, 19 nt, Homo sapiens
  misc_RNA (1)...(19): siRNA sense strand
ggaauauucugguggugau

SEQ ID NO: 1654194 - RNA, 19 nt, Homo sapiens
  misc_RNA (1)...(19): siRNA sense strand
ugacagacgucuaucucuu

SEQ ID NO: 1654195 - RNA, 19 nt, Homo sapiens
  misc_RNA (1)...(19): siRNA sense strand
ucagauuccucauaacaug

SEQ ID NO: 1654196 - RNA, 19 nt, Homo sapiens
  misc_RNA (1)...(19): siRNA sense strand
ucuaugccaucaacuuuaa

SEQ ID NO: 1654197 - RNA, 19 nt, Homo sapiens
  misc_RNA (1)...(19): siRNA sense strand
aaucauagcuguggugcuu

SEQ ID NO: 1654198 - RNA, 19 nt, Homo sapiens
  misc_RNA (1)...(19): siRNA sense strand
gcuacucuuugguuucuuu

SEQ ID NO: 1654199 - RNA, 19 nt, Homo sapiens
  misc_RNA (1)...(19): siRNA sense strand
ggaugcugcuccugacuug

SEQ ID NO: 1654200 - RNA, 19 nt, Homo sapiens
  misc_RNA (1)...(19): siRNA sense strand
cgacuccagugaagauuau

SEQ ID NO: 1654201 - RNA, 19 nt, Homo sapiens
  misc_RNA (1)...(19): siRNA sense strand
gcaguucuccaggcuauuu

SEQ ID NO: 1654202 - RNA, 19 nt, Homo sapiens
  misc_RNA (1)...(19): siRNA sense strand
ugaaggaccuguggugugu

SEQ ID NO: 1654203 - RNA, 19 nt, Homo sapiens
  misc_RNA (1)...(19): siRNA sense strand
gagcuacucuuugguuucu

SEQ ID NO: 1654204 - RNA, 19 nt, Homo sapiens
  misc_RNA (1)...(19): siRNA sense strand
gacaaugcgucguccuuca

SEQ ID NO: 1654205 - RNA, 19 nt, Homo sapiens
  misc_RNA (1)...(19): siRNA sense strand
cuugucagauuccucauaa

SEQ ID NO: 1654206 - RNA, 19 nt, Homo sapiens
  misc_RNA (1)...(19): siRNA sense strand
ugugacggcugcaaauuug

SEQ ID NO: 1654207 - RNA, 19 nt, Homo sapiens
  misc_RNA (1)...(19): siRNA sense strand
gcuaauuggcuauacgaaa

SEQ ID NO: 1654208 - RNA, 19 nt, Homo sapiens
  misc_RNA (1)...(19): siRNA sense strand
gaccgcagauaacgacaau

SEQ ID NO: 1654209 - RNA, 19 nt, Homo sapiens
  misc_RNA (1)...(19): siRNA sense strand
aaaaucaucugccuuguug

SEQ ID NO: 1654210 - RNA, 19 nt, Homo sapiens
  misc_RNA (1)...(19): siRNA sense strand
gccgggagguacucagaaa

SEQ ID NO: 1654211 - RNA, 19 nt, Homo sapiens
  misc_RNA (1)...(19): siRNA sense strand
caucuaugccaucaacuuu

SEQ ID NO: 1654212 - RNA, 19 nt, Homo sapiens
  misc_RNA (1)...(19): siRNA sense strand
agccauccguguaaucaua

SEQ ID NO: 1654213 - RNA, 19 nt, Homo sapiens
  misc_RNA (1)...(19): siRNA sense strand
ccuuugauguucaugauau

SEQ ID NO: 1654214 - RNA, 19 nt, Homo sapiens
  misc_RNA (1)...(19): siRNA sense strand
gcaaugccacgugcaaguu

SEQ ID NO: 1654215 - RNA, 19 nt, Homo sapiens
  misc_RNA (1)...(19): siRNA sense strand
cuaauuggcuauacgaaaa

SEQ ID NO: 1654216 - RNA, 19 nt, Homo sapiens
  misc_RNA (1)...(19): siRNA sense strand
cacaaagccauccguguaa

SEQ ID NO: 1654217 - RNA, 19 nt, Homo sapiens
  misc_RNA (1)...(19): siRNA sense strand
gacagacgucuaucucuug

SEQ ID NO: 1654218 - RNA, 19 nt, Homo sapiens
  misc_RNA (1)...(19): siRNA sense strand
aagaaggccaggucuauga

SEQ ID NO: 1654219 - RNA, 19 nt, Homo sapiens
  misc_RNA (1)...(19): siRNA sense strand
ggugcaagcucagaauucu

SEQ ID NO: 1654220 - RNA, 19 nt, Homo sapiens
  misc_RNA (1)...(19): siRNA sense strand
acagacgucuaucucuuga

SEQ ID NO: 1654221 - RNA, 19 nt, Homo sapiens
  misc_RNA (1)...(19): siRNA sense strand
ccgauugccuacuccuuga

SEQ ID NO: 1654222 - RNA, 19 nt, Homo sapiens
  misc_RNA (1)...(19): siRNA sense strand
uugcagacauccucuuugu

SEQ ID NO: 1654223 - RNA, 19 nt, Homo sapiens
  misc_RNA (1)...(19): siRNA sense strand
gcuccgauccagaacacua

SEQ ID NO: 1654224 - RNA, 19 nt, Homo sapiens
  misc_RNA (1)...(19): siRNA sense strand
gucagucaauacuucauau

SEQ ID NO: 1654225 - RNA, 19 nt, Homo sapiens
  misc_RNA (1)...(19): siRNA sense strand
gaaaagcuaauuggcuaua

SEQ ID NO: 1654226 - RNA, 19 nt, Homo sapiens
  misc_RNA (1)...(19): siRNA sense strand
aggcagcgaugucugugaa

SEQ ID NO: 1654227 - RNA, 19 nt, Homo sapiens
  misc_RNA (1)...(19): siRNA sense strand
caggcuauuuguaccgauu

SEQ ID NO: 1654228 - RNA, 19 nt, Homo sapiens
  misc_RNA (1)...(19): siRNA sense strand
gaccuguggugugugagaa

SEQ ID NO: 1654229 - RNA, 19 nt, Homo sapiens
  misc_RNA (1)...(19): siRNA sense strand
ugcaagcucagaauucuaa

SEQ ID NO: 1654230 - RNA, 19 nt, Homo sapiens
  misc_RNA (1)...(19): siRNA sense strand
ggcuugagcuacucuuugg

SEQ ID NO: 1654231 - RNA, 19 nt, Homo sapiens
  misc_RNA (1)...(19): siRNA sense strand
ugacuugcauuagcaugga

SEQ ID NO: 1654232 - RNA, 19 nt, Homo sapiens
  misc_RNA (1)...(19): siRNA sense strand
gaacacuaccgcgcagcaa

SEQ ID NO: 1654233 - RNA, 19 nt, Homo sapiens
  misc_RNA (1)...(19): siRNA sense strand
gggcuugagcuacucuuug

SEQ ID NO: 1654234 - RNA, 19 nt, Homo sapiens
  misc_RNA (1)...(19): siRNA sense strand
uauaagaaggccaggucua

SEQ ID NO: 1654235 - RNA, 19 nt, Homo sapiens
  misc_RNA (1)...(19): siRNA sense strand
aaacuacuuucugaagauc

SEQ ID NO: 1654236 - RNA, 19 nt, Homo sapiens
  misc_RNA (1)...(19): siRNA sense strand
cagcucaacuuuugucuuc

SEQ ID NO: 1654237 - RNA, 19 nt, Homo sapiens
  misc_RNA (1)...(19): siRNA sense strand
gucaucaucuccagcucaa

SEQ ID NO: 1654238 - RNA, 19 nt, Homo sapiens
  misc_RNA (1)...(19): siRNA sense strand
agacgucuaucucuugaac

SEQ ID NO: 1654239 - RNA, 19 nt, Homo sapiens
  misc_RNA (1)...(19): siRNA sense strand
ggaccuguggugugugaga

SEQ ID NO: 1654240 - RNA, 19 nt, Homo sapiens
  misc_RNA (1)...(19): siRNA sense strand
uagcuguggugcuuguguu

SEQ ID NO: 1654241 - RNA, 19 nt, Homo sapiens
  misc_RNA (1)...(19): siRNA sense strand
ucauagcuguggugcuugu

SEQ ID NO: 1654242 - RNA, 19 nt, Homo sapiens
  misc_RNA (1)...(19): siRNA sense strand
acaaagccauccguguaau

SEQ ID NO: 1654243 - RNA, 19 nt, Homo sapiens
  misc_RNA (1)...(19): siRNA sense strand
ccaaggcagcgaugucugu

SEQ ID NO: 1654244 - RNA, 19 nt, Homo sapiens
  misc_RNA (1)...(19): siRNA sense strand
aaggaccugugguguguga

SEQ ID NO: 1654245 - RNA, 19 nt, Homo sapiens
  misc_RNA (1)...(19): siRNA sense strand
uaagaaggccaggucuaug

SEQ ID NO: 1654246 - RNA, 19 nt, Homo sapiens
  misc_RNA (1)...(19): siRNA sense strand
acccugugcucuacgcuuu

SEQ ID NO: 1654247 - RNA, 19 nt, Homo sapiens
  misc_RNA (1)...(19): siRNA sense strand
gcuugucagauuccucaua

SEQ ID NO: 1654248 - RNA, 19 nt, Homo sapiens
  misc_RNA (1)...(19): siRNA sense strand
gcuccugacuugcauuagc

SEQ ID NO: 1654249 - RNA, 19 nt, Homo sapiens
  misc_RNA (1)...(19): siRNA sense strand
cauauuacucaguugauuc

SEQ ID NO: 1654250 - RNA, 19 nt, Homo sapiens
  misc_RNA (1)...(19): siRNA sense strand
ggaccgguacaucgccauu

SEQ ID NO: 1654251 - RNA, 19 nt, Homo sapiens
  misc_RNA (1)...(19): siRNA sense strand
ugagaaggaaguacaaguc

SEQ ID NO: 1654252 - RNA, 19 nt, Homo sapiens
  misc_RNA (1)...(19): siRNA sense strand
uguuacacguucauuguca

SEQ ID NO: 1654253 - RNA, 19 nt, Homo sapiens
  misc_RNA (1)...(19): siRNA sense strand
aggcaguucuccaggcuau

SEQ ID NO: 1654254 - RNA, 19 nt, Homo sapiens
  misc_RNA (1)...(19): siRNA sense strand
guuacacguucauugucaa

SEQ ID NO: 1654255 - RNA, 19 nt, Homo sapiens
  misc_RNA (1)...(19): siRNA sense strand
uaacaugguccugcuugug

SEQ ID NO: 1654256 - RNA, 19 nt, Homo sapiens
  misc_RNA (1)...(19): siRNA sense strand
ugucagauuccucauaaca

SEQ ID NO: 1654257 - RNA, 19 nt, Homo sapiens
  misc_RNA (1)...(19): siRNA sense strand
aguugauucugagauguua

SEQ ID NO: 1654258 - RNA, 19 nt, Homo sapiens
  misc_RNA (1)...(19): siRNA sense strand
caaagccauccguguaauc

SEQ ID NO: 1654259 - RNA, 19 nt, Homo sapiens
  misc_RNA (1)...(19): siRNA sense strand
ugucagucaauacuucaua

SEQ ID NO: 1654260 - RNA, 19 nt, Homo sapiens
  misc_RNA (1)...(19): siRNA sense strand
auaagaaggccaggucuau

SEQ ID NO: 1654261 - RNA, 19 nt, Homo sapiens
  misc_RNA (1)...(19): siRNA sense strand
gcgucguccuucacuaugu

SEQ ID NO: 1654262 - RNA, 19 nt, Homo sapiens
  misc_RNA (1)...(19): siRNA sense strand
caaugccacgugcaaguug

SEQ ID NO: 1654263 - RNA, 19 nt, Homo sapiens
  misc_RNA (1)...(19): siRNA sense strand
cauugcagacauccucuuu

SEQ ID NO: 1654264 - RNA, 19 nt, Homo sapiens
  misc_RNA (1)...(19): siRNA sense strand
gaaggccaggucuaugaca

SEQ ID NO: 1654265 - RNA, 19 nt, Homo sapiens
  misc_RNA (1)...(19): siRNA sense strand
aacaugguccugcuuguga

SEQ ID NO: 1654266 - RNA, 19 nt, Homo sapiens
  misc_RNA (1)...(19): siRNA sense strand
acucuuugguuucuuuauc

SEQ ID NO: 1654267 - RNA, 19 nt, Homo sapiens
  misc_RNA (1)...(19): siRNA sense strand
ccauuguacaggcgacuaa

SEQ ID NO: 1654268 - RNA, 19 nt, Homo sapiens
  misc_RNA (1)...(19): siRNA sense strand
uugagcuacucuuugguuu

SEQ ID NO: 1654269 - RNA, 19 nt, Homo sapiens
  misc_RNA (1)...(19): siRNA sense strand
agacauccucuuuguucuu

SEQ ID NO: 1654270 - RNA, 19 nt, Homo sapiens
  misc_RNA (1)...(19): siRNA sense strand
ucgacuccagugaagauua

SEQ ID NO: 1654271 - RNA, 19 nt, Homo sapiens
  misc_RNA (1)...(19): siRNA sense strand
gcucaacuuuugucuucaa

SEQ ID NO: 1654272 - RNA, 19 nt, Homo sapiens
  misc_RNA (1)...(19): siRNA sense strand
gggaugcugcuccugacuu

SEQ ID NO: 1654273 - RNA, 19 nt, Homo sapiens
  misc_RNA (1)...(19): siRNA sense strand
ugcaggaggucaggcaguu

SEQ ID NO: 1654274 - RNA, 19 nt, Homo sapiens
  misc_RNA (1)...(19): siRNA sense strand
cuuuaucccuuugauguuc

SEQ ID NO: 1654275 - RNA, 19 nt, Homo sapiens
  misc_RNA (1)...(19): siRNA sense strand
gcacaaagccauccgugua

SEQ ID NO: 1654276 - RNA, 19 nt, Homo sapiens
  misc_RNA (1)...(19): siRNA sense strand
ucacagaaguccuggcuuu

SEQ ID NO: 1654277 - RNA, 19 nt, Homo sapiens
  misc_RNA (1)...(19): siRNA sense strand
gguggaagcugcugauguu

SEQ ID NO: 1654278 - RNA, 19 nt, Homo sapiens
  misc_RNA (1)...(19): siRNA sense strand
gacauccucuuuguucuua

SEQ ID NO: 1654279 - RNA, 19 nt, Homo sapiens
  misc_RNA (1)...(19): siRNA sense strand
gcagacauccucuuuguuc

SEQ ID NO: 1654280 - RNA, 19 nt, Homo sapiens
  misc_RNA (1)...(19): siRNA sense strand
ccagugagaccgcagauaa

SEQ ID NO: 1654281 - RNA, 19 nt, Homo sapiens
  misc_RNA (1)...(19): siRNA sense strand
ggaauauucugguggugau

SEQ ID NO: 1654282 - RNA, 19 nt, Homo sapiens
  misc_RNA (1)...(19): siRNA sense strand
ugacagacgucuaucucuu

SEQ ID NO: 1654283 - RNA, 19 nt, Homo sapiens
  misc_RNA (1)...(19): siRNA sense strand
ucagauuccucauaacaug

SEQ ID NO: 1654284 - RNA, 19 nt, Homo sapiens
  misc_RNA (1)...(19): siRNA sense strand
ucuaugccaucaacuuuaa

SEQ ID NO: 1654285 - RNA, 19 nt, Homo sapiens
  misc_RNA (1)...(19): siRNA sense strand
aaucauagcuguggugcuu

SEQ ID NO: 1654286 - RNA, 19 nt, Homo sapiens
  misc_RNA (1)...(19): siRNA sense strand
gcuacucuuugguuucuuu

SEQ ID NO: 1654287 - RNA, 19 nt, Homo sapiens
  misc_RNA (1)...(19): siRNA sense strand
ggaugcugcuccugacuug

SEQ ID NO: 1654288 - RNA, 19 nt, Homo sapiens
  misc_RNA (1)...(19): siRNA sense strand
cgacuccagugaagauuau

SEQ ID NO: 1654289 - RNA, 19 nt, Homo sapiens
  misc_RNA (1)...(19): siRNA sense strand
gcaguucuccaggcuauuu

SEQ ID NO: 1654290 - RNA, 19 nt, Homo sapiens
  misc_RNA (1)...(19): siRNA sense strand
ugaaggaccuguggugugu

SEQ ID NO: 1654291 - RNA, 19 nt, Homo sapiens
  misc_RNA (1)...(19): siRNA sense strand
gagcuacucuuugguuucu

SEQ ID NO: 1654292 - RNA, 19 nt, Homo sapiens
  misc_RNA (1)...(19): siRNA sense strand
gacaaugcgucguccuuca

SEQ ID NO: 1654293 - RNA, 19 nt, Homo sapiens
  misc_RNA (1)...(19): siRNA sense strand
cuugucagauuccucauaa

SEQ ID NO: 1654294 - RNA, 19 nt, Homo sapiens
  misc_RNA (1)...(19): siRNA sense strand
ugugacggcugcaaauuug

SEQ ID NO: 1654295 - RNA, 19 nt, Homo sapiens
  misc_RNA (1)...(19): siRNA sense strand
gcuaauuggcuauacgaaa

SEQ ID NO: 1654296 - RNA, 19 nt, Homo sapiens
  misc_RNA (1)...(19): siRNA sense strand
gaccgcagauaacgacaau

SEQ ID NO: 1654297 - RNA, 19 nt, Homo sapiens
  misc_RNA (1)...(19): siRNA sense strand
aaaaucaucugccuuguug

SEQ ID NO: 1654298 - RNA, 19 nt, Homo sapiens
  misc_RNA (1)...(19): siRNA sense strand
gccgggagguacucagaaa

SEQ ID NO: 1654299 - RNA, 19 nt, Homo sapiens
  misc_RNA (1)...(19): siRNA sense strand
caucuaugccaucaacuuu

SEQ ID NO: 1654300 - RNA, 19 nt, Homo sapiens
  misc_RNA (1)...(19): siRNA sense strand
agccauccguguaaucaua

SEQ ID NO: 1654301 - RNA, 19 nt, Homo sapiens
  misc_RNA (1)...(19): siRNA sense strand
ccuuugauguucaugauau

SEQ ID NO: 1654302 - RNA, 19 nt, Homo sapiens
  misc_RNA (1)...(19): siRNA sense strand
gcaaugccacgugcaaguu

SEQ ID NO: 1654303 - RNA, 19 nt, Homo sapiens
  misc_RNA (1)...(19): siRNA sense strand
cuaauuggcuauacgaaaa

SEQ ID NO: 1654304 - RNA, 19 nt, Homo sapiens
  misc_RNA (1)...(19): siRNA sense strand
cacaaagccauccguguaa

SEQ ID NO: 1654305 - RNA, 19 nt, Homo sapiens
  misc_RNA (1)...(19): siRNA sense strand
gacagacgucuaucucuug

SEQ ID NO: 1654306 - RNA, 19 nt, Homo sapiens
  misc_RNA (1)...(19): siRNA sense strand
aagaaggccaggucuauga

SEQ ID NO: 1654307 - RNA, 19 nt, Homo sapiens
  misc_RNA (1)...(19): siRNA sense strand
ggugcaagcucagaauucu

SEQ ID NO: 1654308 - RNA, 19 nt, Homo sapiens
  misc_RNA (1)...(19): siRNA sense strand
acagacgucuaucucuuga

SEQ ID NO: 1654309 - RNA, 19 nt, Homo sapiens
  misc_RNA (1)...(19): siRNA sense strand
ccgauugccuacuccuuga

SEQ ID NO: 1654310 - RNA, 19 nt, Homo sapiens
  misc_RNA (1)...(19): siRNA sense strand
uugcagacauccucuuugu

SEQ ID NO: 1654311 - RNA, 19 nt, Homo sapiens
  misc_RNA (1)...(19): siRNA sense strand
gcuccgauccagaacacua

SEQ ID NO: 1654312 - RNA, 19 nt, Homo sapiens
  misc_RNA (1)...(19): siRNA sense strand
gucagucaauacuucauau

SEQ ID NO: 1654313 - RNA, 19 nt, Homo sapiens
  misc_RNA (1)...(19): siRNA sense strand
gaaaagcuaauuggcuaua

SEQ ID NO: 1654314 - RNA, 19 nt, Homo sapiens
  misc_RNA (1)...(19): siRNA sense strand
aggcagcgaugucugugaa

SEQ ID NO: 1654315 - RNA, 19 nt, Homo sapiens
  misc_RNA (1)...(19): siRNA sense strand
caggcuauuuguaccgauu

SEQ ID NO: 1654316 - RNA, 19 nt, Homo sapiens
  misc_RNA (1)...(19): siRNA sense strand
gaccuguggugugugagaa

SEQ ID NO: 1654317 - RNA, 19 nt, Homo sapiens
  misc_RNA (1)...(19): siRNA sense strand
ugcaagcucagaauucuaa

SEQ ID NO: 1654318 - RNA, 19 nt, Homo sapiens
  misc_RNA (1)...(19): siRNA sense strand
ggcuugagcuacucuuugg

SEQ ID NO: 1654319 - RNA, 19 nt, Homo sapiens
  misc_RNA (1)...(19): siRNA sense strand
ugacuugcauuagcaugga

SEQ ID NO: 1654320 - RNA, 19 nt, Homo sapiens
  misc_RNA (1)...(19): siRNA sense strand
gaacacuaccgcgcagcaa

SEQ ID NO: 1654321 - RNA, 19 nt, Homo sapiens
  misc_RNA (1)...(19): siRNA sense strand
gggcuugagcuacucuuug

SEQ ID NO: 1654322 - RNA, 19 nt, Homo sapiens
  misc_RNA (1)...(19): siRNA sense strand
uauaagaaggccaggucua

SEQ ID NO: 1654323 - RNA, 19 nt, Homo sapiens
  misc_RNA (1)...(19): siRNA sense strand
aaacuacuuucugaagauc

SEQ ID NO: 1654324 - RNA, 19 nt, Homo sapiens
  misc_RNA (1)...(19): siRNA sense strand
cagcucaacuuuugucuuc

SEQ ID NO: 1654325 - RNA, 19 nt, Homo sapiens
  misc_RNA (1)...(19): siRNA sense strand
gucaucaucuccagcucaa

SEQ ID NO: 1654326 - RNA, 19 nt, Homo sapiens
  misc_RNA (1)...(19): siRNA sense strand
agacgucuaucucuugaac

SEQ ID NO: 1654327 - RNA, 19 nt, Homo sapiens
  misc_RNA (1)...(19): siRNA sense strand
ggaccuguggugugugaga

SEQ ID NO: 1654328 - RNA, 19 nt, Homo sapiens
  misc_RNA (1)...(19): siRNA sense strand
uagcuguggugcuuguguu

SEQ ID NO: 1654329 - RNA, 19 nt, Homo sapiens
  misc_RNA (1)...(19): siRNA sense strand
ucauagcuguggugcuugu

SEQ ID NO: 1654330 - RNA, 19 nt, Homo sapiens
  misc_RNA (1)...(19): siRNA sense strand
acaaagccauccguguaau

SEQ ID NO: 1654331 - RNA, 19 nt, Homo sapiens
  misc_RNA (1)...(19): siRNA sense strand
ccaaggcagcgaugucugu

SEQ ID NO: 1654332 - RNA, 19 nt, Homo sapiens
  misc_RNA (1)...(19): siRNA sense strand
aaggaccugugguguguga

SEQ ID NO: 1654333 - RNA, 19 nt, Homo sapiens
  misc_RNA (1)...(19): siRNA sense strand
uaagaaggccaggucuaug

SEQ ID NO: 1654334 - RNA, 19 nt, Homo sapiens
  misc_RNA (1)...(19): siRNA sense strand
acccugugcucuacgcuuu

SEQ ID NO: 1654335 - RNA, 19 nt, Homo sapiens
  misc_RNA (1)...(19): siRNA sense strand
gcuugucagauuccucaua

SEQ ID NO: 1654336 - RNA, 19 nt, Homo sapiens
  misc_RNA (1)...(19): siRNA sense strand
gcuccugacuugcauuagc

SEQ ID NO: 1654337 - RNA, 19 nt, Homo sapiens
  misc_RNA (1)...(19): siRNA sense strand
cauauuacucaguugauuc

SEQ ID NO: 1654338 - RNA, 19 nt, Homo sapiens
  misc_RNA (1)...(19): siRNA sense strand
ggaccgguacaucgccauu

SEQ ID NO: 1654339 - RNA, 19 nt, Homo sapiens
  misc_RNA (1)...(19): siRNA sense strand
ugagaaggaaguacaaguc

SEQ ID NO: 1654340 - RNA, 19 nt, Homo sapiens
  misc_RNA (1)...(19): siRNA sense strand
uguuacacguucauuguca

SEQ ID NO: 1654341 - RNA, 19 nt, Homo sapiens
  misc_RNA (1)...(19): siRNA sense strand
aggcaguucuccaggcuau

SEQ ID NO: 1654342 - RNA, 19 nt, Homo sapiens
  misc_RNA (1)...(19): siRNA sense strand
guuacacguucauugucaa

SEQ ID NO: 1654343 - RNA, 19 nt, Homo sapiens
  misc_RNA (1)...(19): siRNA sense strand
uaacaugguccugcuugug

SEQ ID NO: 1654344 - RNA, 19 nt, Homo sapiens
  misc_RNA (1)...(19): siRNA sense strand
ugucagauuccucauaaca

SEQ ID NO: 1654345 - RNA, 19 nt, Homo sapiens
  misc_RNA (1)...(19): siRNA sense strand
aguugauucugagauguua

SEQ ID NO: 1654346 - RNA, 19 nt, Homo sapiens
  misc_RNA (1)...(19): siRNA sense strand
caaagccauccguguaauc

SEQ ID NO: 1654347 - RNA, 19 nt, Homo sapiens
  misc_RNA (1)...(19): siRNA sense strand
ugucagucaauacuucaua

SEQ ID NO: 1654348 - RNA, 19 nt, Homo sapiens
  misc_RNA (1)...(19): siRNA sense strand
auaagaaggccaggucuau

SEQ ID NO: 1654349 - RNA, 19 nt, Homo sapiens
  misc_RNA (1)...(19): siRNA sense strand
gcgucguccuucacuaugu

SEQ ID NO: 1654350 - RNA, 19 nt, Homo sapiens
  misc_RNA (1)...(19): siRNA sense strand
caaugccacgugcaaguug

SEQ ID NO: 1654351 - RNA, 19 nt, Homo sapiens
  misc_RNA (1)...(19): siRNA sense strand
cauugcagacauccucuuu

SEQ ID NO: 1654352 - RNA, 19 nt, Homo sapiens
  misc_RNA (1)...(19): siRNA sense strand
gaaggccaggucuaugaca

SEQ ID NO: 1654353 - RNA, 19 nt, Homo sapiens
  misc_RNA (1)...(19): siRNA sense strand
aacaugguccugcuuguga

SEQ ID NO: 1654354 - RNA, 19 nt, Homo sapiens
  misc_RNA (1)...(19): siRNA sense strand
acucuuugguuucuuuauc

SEQ ID NO: 1654355 - RNA, 19 nt, Homo sapiens
  misc_RNA (1)...(19): siRNA sense strand
ccauuguacaggcgacuaa

SEQ ID NO: 1654356 - RNA, 19 nt, Homo sapiens
  misc_RNA (1)...(19): siRNA sense strand
uugagcuacucuuugguuu

SEQ ID NO: 1654357 - RNA, 19 nt, Homo sapiens
  misc_RNA (1)...(19): siRNA sense strand
agacauccucuuuguucuu

SEQ ID NO: 1654358 - RNA, 19 nt, Homo sapiens
  misc_RNA (1)...(19): siRNA sense strand
ucgacuccagugaagauua

SEQ ID NO: 1654359 - RNA, 19 nt, Homo sapiens
  misc_RNA (1)...(19): siRNA sense strand
gcucaacuuuugucuucaa

SEQ ID NO: 1654360 - RNA, 19 nt, Homo sapiens
  misc_RNA (1)...(19): siRNA sense strand
gggaugcugcuccugacuu

SEQ ID NO: 1654361 - RNA, 19 nt, Homo sapiens
  misc_RNA (1)...(19): siRNA sense strand
ugcaggaggucaggcaguu

SEQ ID NO: 1654362 - RNA, 19 nt, Homo sapiens
  misc_RNA (1)...(19): siRNA sense strand
cuuuaucccuuugauguuc

SEQ ID NO: 1654363 - RNA, 19 nt, Homo sapiens
  misc_RNA (1)...(19): siRNA sense strand
aaacggagcugccggaaga

SEQ ID NO: 1654364 - RNA, 19 nt, Homo sapiens
  misc_RNA (1)...(19): siRNA sense strand
cgacacaggacaaucuuua

SEQ ID NO: 1654365 - RNA, 19 nt, Homo sapiens
  misc_RNA (1)...(19): siRNA sense strand
ggacaaucuuuaccuccua

SEQ ID NO: 1654366 - RNA, 19 nt, Homo sapiens
  misc_RNA (1)...(19): siRNA sense strand
ggagaaggcauucaacgaa

SEQ ID NO: 1654367 - RNA, 19 nt, Homo sapiens
  misc_RNA (1)...(19): siRNA sense strand
ggaggaagcgggagaagug

SEQ ID NO: 1654368 - RNA, 19 nt, Homo sapiens
  misc_RNA (1)...(19): siRNA sense strand
guccaaaucugcuuuaaac

SEQ ID NO: 1654369 - RNA, 19 nt, Homo sapiens
  misc_RNA (1)...(19): siRNA sense strand
gcagugucauggcggagua

SEQ ID NO: 1654370 - RNA, 19 nt, Homo sapiens
  misc_RNA (1)...(19): siRNA sense strand
gggagaugcuggccaugaa

SEQ ID NO: 1654371 - RNA, 19 nt, Homo sapiens
  misc_RNA (1)...(19): siRNA sense strand
cagcucggauucugaagau

SEQ ID NO: 1654372 - RNA, 19 nt, Homo sapiens
  misc_RNA (1)...(19): siRNA sense strand
ccacuacccagacgucuau

SEQ ID NO: 1654373 - RNA, 19 nt, Homo sapiens
  misc_RNA (1)...(19): siRNA sense strand
ggagaugcuggccaugaaa

SEQ ID NO: 1654374 - RNA, 19 nt, Homo sapiens
  misc_RNA (1)...(19): siRNA sense strand
ccaaaucugcuuuaaacca

SEQ ID NO: 1654375 - RNA, 19 nt, Homo sapiens
  misc_RNA (1)...(19): siRNA sense strand
gcgcugagcaagcccaaau

SEQ ID NO: 1654376 - RNA, 19 nt, Homo sapiens
  misc_RNA (1)...(19): siRNA sense strand
ugcccaagcucgacaagau

SEQ ID NO: 1654377 - RNA, 19 nt, Homo sapiens
  misc_RNA (1)...(19): siRNA sense strand
ggaggaggccauggaugaa

SEQ ID NO: 1654378 - RNA, 19 nt, Homo sapiens
  misc_RNA (1)...(19): siRNA sense strand
gcucggauucugaagaugu

SEQ ID NO: 1654379 - RNA, 19 nt, Homo sapiens
  misc_RNA (1)...(19): siRNA sense strand
gagacaguggccaagagua

SEQ ID NO: 1654380 - RNA, 19 nt, Homo sapiens
  misc_RNA (1)...(19): siRNA sense strand
gcuuuaaaccagaccaaga

SEQ ID NO: 1654381 - RNA, 19 nt, Homo sapiens
  misc_RNA (1)...(19): siRNA sense strand
ggauacaggucugguucca

SEQ ID NO: 1654382 - RNA, 19 nt, Homo sapiens
  misc_RNA (1)...(19): siRNA sense strand
aggaggaacugagggagaa

SEQ ID NO: 1654383 - RNA, 19 nt, Homo sapiens
  misc_RNA (1)...(19): siRNA sense strand
caccgcagcuggaggacau

SEQ ID NO: 1654384 - RNA, 19 nt, Homo sapiens
  misc_RNA (1)...(19): siRNA sense strand
aggaggaggccauggauga

SEQ ID NO: 1654385 - RNA, 19 nt, Homo sapiens
  misc_RNA (1)...(19): siRNA sense strand
ggaggaggaggccauggau

SEQ ID NO: 1654386 - RNA, 19 nt, Homo sapiens
  misc_RNA (1)...(19): siRNA sense strand
gcacuggguucggcaucca

SEQ ID NO: 1654387 - RNA, 19 nt, Homo sapiens
  misc_RNA (1)...(19): siRNA sense strand
ccgaguccauccucaaguc

SEQ ID NO: 1654388 - RNA, 19 nt, Homo sapiens
  misc_RNA (1)...(19): siRNA sense strand
ggccagcucggauucugaa

SEQ ID NO: 1654389 - RNA, 19 nt, Homo sapiens
  misc_RNA (1)...(19): siRNA sense strand
aggaggccauggaugaaga

SEQ ID NO: 1654390 - RNA, 19 nt, Homo sapiens
  misc_RNA (1)...(19): siRNA sense strand
cuuuaaaccagaccaagaa

SEQ ID NO: 1654391 - RNA, 19 nt, Homo sapiens
  misc_RNA (1)...(19): siRNA sense strand
uaaaccagaccaagaaacg

SEQ ID NO: 1654392 - RNA, 19 nt, Homo sapiens
  misc_RNA (1)...(19): siRNA sense strand
cggaagaagcggcgacaca

SEQ ID NO: 1654393 - RNA, 19 nt, Homo sapiens
  misc_RNA (1)...(19): siRNA sense strand
aaacggagcugccggaaga

SEQ ID NO: 1654394 - RNA, 19 nt, Homo sapiens
  misc_RNA (1)...(19): siRNA sense strand
cgacacaggacaaucuuua

SEQ ID NO: 1654395 - RNA, 19 nt, Homo sapiens
  misc_RNA (1)...(19): siRNA sense strand
ggacaaucuuuaccuccua

SEQ ID NO: 1654396 - RNA, 19 nt, Homo sapiens
  misc_RNA (1)...(19): siRNA sense strand
ggagaaggcauucaacgaa

SEQ ID NO: 1654397 - RNA, 19 nt, Homo sapiens
  misc_RNA (1)...(19): siRNA sense strand
ggaggaagcgggagaagug

SEQ ID NO: 1654398 - RNA, 19 nt, Homo sapiens
  misc_RNA (1)...(19): siRNA sense strand
guccaaaucugcuuuaaac

SEQ ID NO: 1654399 - RNA, 19 nt, Homo sapiens
  misc_RNA (1)...(19): siRNA sense strand
gcagugucauggcggagua

SEQ ID NO: 1654400 - RNA, 19 nt, Homo sapiens
  misc_RNA (1)...(19): siRNA sense strand
gggagaugcuggccaugaa

SEQ ID NO: 1654401 - RNA, 19 nt, Homo sapiens
  misc_RNA (1)...(19): siRNA sense strand
cagcucggauucugaagau

SEQ ID NO: 1654402 - RNA, 19 nt, Homo sapiens
  misc_RNA (1)...(19): siRNA sense strand
ccacuacccagacgucuau

SEQ ID NO: 1654403 - RNA, 19 nt, Homo sapiens
  misc_RNA (1)...(19): siRNA sense strand
ggagaugcuggccaugaaa

SEQ ID NO: 1654404 - RNA, 19 nt, Homo sapiens
  misc_RNA (1)...(19): siRNA sense strand
ccaaaucugcuuuaaacca

SEQ ID NO: 1654405 - RNA, 19 nt, Homo sapiens
  misc_RNA (1)...(19): siRNA sense strand
gcgcugagcaagcccaaau

SEQ ID NO: 1654406 - RNA, 19 nt, Homo sapiens
  misc_RNA (1)...(19): siRNA sense strand
ugcccaagcucgacaagau

SEQ ID NO: 1654407 - RNA, 19 nt, Homo sapiens
  misc_RNA (1)...(19): siRNA sense strand
ggaggaggccauggaugaa

SEQ ID NO: 1654408 - RNA, 19 nt, Homo sapiens
  misc_RNA (1)...(19): siRNA sense strand
gcucggauucugaagaugu

SEQ ID NO: 1654409 - RNA, 19 nt, Homo sapiens
  misc_RNA (1)...(19): siRNA sense strand
gagacaguggccaagagua

SEQ ID NO: 1654410 - RNA, 19 nt, Homo sapiens
  misc_RNA (1)...(19): siRNA sense strand
gcuuuaaaccagaccaaga

SEQ ID NO: 1654411 - RNA, 19 nt, Homo sapiens
  misc_RNA (1)...(19): siRNA sense strand
ggauacaggucugguucca

SEQ ID NO: 1654412 - RNA, 19 nt, Homo sapiens
  misc_RNA (1)...(19): siRNA sense strand
aggaggaacugagggagaa

SEQ ID NO: 1654413 - RNA, 19 nt, Homo sapiens
  misc_RNA (1)...(19): siRNA sense strand
caccgcagcuggaggacau

SEQ ID NO: 1654414 - RNA, 19 nt, Homo sapiens
  misc_RNA (1)...(19): siRNA sense strand
aggaggaggccauggauga

SEQ ID NO: 1654415 - RNA, 19 nt, Homo sapiens
  misc_RNA (1)...(19): siRNA sense strand
gcacuggguucggcaucca

SEQ ID NO: 1654416 - RNA, 19 nt, Homo sapiens
  misc_RNA (1)...(19): siRNA sense strand
ggaggaggaggccauggau

SEQ ID NO: 1654417 - RNA, 19 nt, Homo sapiens
  misc_RNA (1)...(19): siRNA sense strand
ccgaguccauccucaaguc

SEQ ID NO: 1654418 - RNA, 19 nt, Homo sapiens
  misc_RNA (1)...(19): siRNA sense strand
ggccagcucggauucugaa

SEQ ID NO: 1654419 - RNA, 19 nt, Homo sapiens
  misc_RNA (1)...(19): siRNA sense strand
aggaggccauggaugaaga

SEQ ID NO: 1654420 - RNA, 19 nt, Homo sapiens
  misc_RNA (1)...(19): siRNA sense strand
cuuuaaaccagaccaagaa

SEQ ID NO: 1654421 - RNA, 19 nt, Homo sapiens
  misc_RNA (1)...(19): siRNA sense strand
uaaaccagaccaagaaacg

SEQ ID NO: 1654422 - RNA, 19 nt, Homo sapiens
  misc_RNA (1)...(19): siRNA sense strand
cggaagaagcggcgacaca

SEQ ID NO: 1654423 - RNA, 19 nt, Homo sapiens
  misc_RNA (1)...(19): siRNA sense strand
gcacagaacguacguguau

SEQ ID NO: 1654424 - RNA, 19 nt, Homo sapiens
  misc_RNA (1)...(19): siRNA sense strand
ccgaauaucuggagaaacu

SEQ ID NO: 1654425 - RNA, 19 nt, Homo sapiens
  misc_RNA (1)...(19): siRNA sense strand
gaauaucuggagaaacuaa

SEQ ID NO: 1654426 - RNA, 19 nt, Homo sapiens
  misc_RNA (1)...(19): siRNA sense strand
gaagauucgguuagcauug

SEQ ID NO: 1654427 - RNA, 19 nt, Homo sapiens
  misc_RNA (1)...(19): siRNA sense strand
ggaggaagcgagagugguu

SEQ ID NO: 1654428 - RNA, 19 nt, Homo sapiens
  misc_RNA (1)...(19): siRNA sense strand
gacgagguccuguuaguga

SEQ ID NO: 1654429 - RNA, 19 nt, Homo sapiens
  misc_RNA (1)...(19): siRNA sense strand
ggaagauucgguuagcauu

SEQ ID NO: 1654430 - RNA, 19 nt, Homo sapiens
  misc_RNA (1)...(19): siRNA sense strand
gaagcgagagugguucaaa

SEQ ID NO: 1654431 - RNA, 19 nt, Homo sapiens
  misc_RNA (1)...(19): siRNA sense strand
cgaagaagcgggagucaag

SEQ ID NO: 1654432 - RNA, 19 nt, Homo sapiens
  misc_RNA (1)...(19): siRNA sense strand
gagguccuguuagugagua

SEQ ID NO: 1654433 - RNA, 19 nt, Homo sapiens
  misc_RNA (1)...(19): siRNA sense strand
uccgagagguguacgaaga

SEQ ID NO: 1654434 - RNA, 19 nt, Homo sapiens
  misc_RNA (1)...(19): siRNA sense strand
cggagcugcuggaggauug

SEQ ID NO: 1654435 - RNA, 19 nt, Homo sapiens
  misc_RNA (1)...(19): siRNA sense strand
gcuggaggauugggaagau

SEQ ID NO: 1654436 - RNA, 19 nt, Homo sapiens
  misc_RNA (1)...(19): siRNA sense strand
cgccgaauaucuggagaaa

SEQ ID NO: 1654437 - RNA, 19 nt, Homo sapiens
  misc_RNA (1)...(19): siRNA sense strand
gauugggaagauucgguua

SEQ ID NO: 1654438 - RNA, 19 nt, Homo sapiens
  misc_RNA (1)...(19): siRNA sense strand
caggaucgcaagcacagaa

SEQ ID NO: 1654439 - RNA, 19 nt, Homo sapiens
  misc_RNA (1)...(19): siRNA sense strand
gggaagauucgguuagcau

SEQ ID NO: 1654440 - RNA, 19 nt, Homo sapiens
  misc_RNA (1)...(19): siRNA sense strand
gcuccugggcgucuucgaa

SEQ ID NO: 1654441 - RNA, 19 nt, Homo sapiens
  misc_RNA (1)...(19): siRNA sense strand
cagaacguacguguaugua

SEQ ID NO: 1654442 - RNA, 19 nt, Homo sapiens
  misc_RNA (1)...(19): siRNA sense strand
gcccgugcacgccgaauau

SEQ ID NO: 1654443 - RNA, 19 nt, Homo sapiens
  misc_RNA (1)...(19): siRNA sense strand
aagcgagagugguucaaag

SEQ ID NO: 1654444 - RNA, 19 nt, Homo sapiens
  misc_RNA (1)...(19): siRNA sense strand
acagaacguacguguaugu

SEQ ID NO: 1654445 - RNA, 19 nt, Homo sapiens
  misc_RNA (1)...(19): siRNA sense strand
aagauucgguuagcauugg

SEQ ID NO: 1654446 - RNA, 19 nt, Homo sapiens
  misc_RNA (1)...(19): siRNA sense strand
ggugaagaaugcucagaug

SEQ ID NO: 1654447 - RNA, 19 nt, Homo sapiens
  misc_RNA (1)...(19): siRNA sense strand
gcugguggccugugagaaa

SEQ ID NO: 1654448 - RNA, 19 nt, Homo sapiens
  misc_RNA (1)...(19): siRNA sense strand
ugacugcggugaagaaugc

SEQ ID NO: 1654449 - RNA, 19 nt, Homo sapiens
  misc_RNA (1)...(19): siRNA sense strand
ggugugcgguucaucuuca

SEQ ID NO: 1654450 - RNA, 19 nt, Homo sapiens
  misc_RNA (1)...(19): siRNA sense strand
gcuggucggugggcacauu

SEQ ID NO: 1654451 - RNA, 19 nt, Homo sapiens
  misc_RNA (1)...(19): siRNA sense strand
gcuccaggcuguugaucag

SEQ ID NO: 1654452 - RNA, 19 nt, Homo sapiens
  misc_RNA (1)...(19): siRNA sense strand
ugaggucacggccgucuuu

SEQ ID NO: 1654453 - RNA, 19 nt, Homo sapiens
  misc_RNA (1)...(19): siRNA sense strand
guugaucagcugucccuuu

SEQ ID NO: 1654454 - RNA, 19 nt, Homo sapiens
  misc_RNA (1)...(19): siRNA sense strand
guggucaacauccucauug

SEQ ID NO: 1654455 - RNA, 19 nt, Homo sapiens
  misc_RNA (1)...(19): siRNA sense strand
ggugaagaaugcucagaug

SEQ ID NO: 1654456 - RNA, 19 nt, Homo sapiens
  misc_RNA (1)...(19): siRNA sense strand
gcugguggccugugagaaa

SEQ ID NO: 1654457 - RNA, 19 nt, Homo sapiens
  misc_RNA (1)...(19): siRNA sense strand
ugacugcggugaagaaugc

SEQ ID NO: 1654458 - RNA, 19 nt, Homo sapiens
  misc_RNA (1)...(19): siRNA sense strand
gguuuggagucucaucauu

SEQ ID NO: 1654459 - RNA, 19 nt, Homo sapiens
  misc_RNA (1)...(19): siRNA sense strand
ggugugcgguucaucuuca

SEQ ID NO: 1654460 - RNA, 19 nt, Homo sapiens
  misc_RNA (1)...(19): siRNA sense strand
gcuggucggugggcacauu

SEQ ID NO: 1654461 - RNA, 19 nt, Homo sapiens
  misc_RNA (1)...(19): siRNA sense strand
gcuccaggcuguugaucag

SEQ ID NO: 1654462 - RNA, 19 nt, Homo sapiens
  misc_RNA (1)...(19): siRNA sense strand
cagcugguuuggagucuca

SEQ ID NO: 1654463 - RNA, 19 nt, Homo sapiens
  misc_RNA (1)...(19): siRNA sense strand
ugaggucacggccgucuuu

SEQ ID NO: 1654464 - RNA, 19 nt, Homo sapiens
  misc_RNA (1)...(19): siRNA sense strand
guugaucagcugucccuuu

SEQ ID NO: 1654465 - RNA, 19 nt, Homo sapiens
  misc_RNA (1)...(19): siRNA sense strand
guuuggagucucaucauug

SEQ ID NO: 1654466 - RNA, 19 nt, Homo sapiens
  misc_RNA (1)...(19): siRNA sense strand
guggucaacauccucauug

SEQ ID NO: 1654467 - RNA, 19 nt, Homo sapiens
  misc_RNA (1)...(19): siRNA sense strand
ggaaacguuugccuucaua

SEQ ID NO: 1654468 - RNA, 19 nt, Homo sapiens
  misc_RNA (1)...(19): siRNA sense strand
gaaagaagaacaaauguca

SEQ ID NO: 1654469 - RNA, 19 nt, Homo sapiens
  misc_RNA (1)...(19): siRNA sense strand
acccaaagcuuaugaaaga

SEQ ID NO: 1654470 - RNA, 19 nt, Homo sapiens
  misc_RNA (1)...(19): siRNA sense strand
aaggaugguuugcuuauuu

SEQ ID NO: 1654471 - RNA, 19 nt, Homo sapiens
  misc_RNA (1)...(19): siRNA sense strand
ggaaggaccaccuggauuc

SEQ ID NO: 1654472 - RNA, 19 nt, Homo sapiens
  misc_RNA (1)...(19): siRNA sense strand
gcccagcucuucaccagaa

SEQ ID NO: 1654473 - RNA, 19 nt, Homo sapiens
  misc_RNA (1)...(19): siRNA sense strand
ccaccuggauucauucaug

SEQ ID NO: 1654474 - RNA, 19 nt, Homo sapiens
  misc_RNA (1)...(19): siRNA sense strand
caaagcuuaugaaagaaga

SEQ ID NO: 1654475 - RNA, 19 nt, Homo sapiens
  misc_RNA (1)...(19): siRNA sense strand
gaggcgacaagcuuauuua

SEQ ID NO: 1654476 - RNA, 19 nt, Homo sapiens
  misc_RNA (1)...(19): siRNA sense strand
cugaggaagucauucuuaa

SEQ ID NO: 1654477 - RNA, 19 nt, Homo sapiens
  misc_RNA (1)...(19): siRNA sense strand
uugaauacgugauguucua

SEQ ID NO: 1654478 - RNA, 19 nt, Homo sapiens
  misc_RNA (1)...(19): siRNA sense strand
agaagacccuauacucaga

SEQ ID NO: 1654479 - RNA, 19 nt, Homo sapiens
  misc_RNA (1)...(19): siRNA sense strand
guugguaugugugcaauga

SEQ ID NO: 1654480 - RNA, 19 nt, Homo sapiens
  misc_RNA (1)...(19): siRNA sense strand
ggcgacaagcuuauuuaua

SEQ ID NO: 1654481 - RNA, 19 nt, Homo sapiens
  misc_RNA (1)...(19): siRNA sense strand
aaacguuugccuucauaua

SEQ ID NO: 1654482 - RNA, 19 nt, Homo sapiens
  misc_RNA (1)...(19): siRNA sense strand
ccaaucucaacaucaauua

SEQ ID NO: 1654483 - RNA, 19 nt, Homo sapiens
  misc_RNA (1)...(19): siRNA sense strand
gagcugaggucauuuucuu

SEQ ID NO: 1654484 - RNA, 19 nt, Homo sapiens
  misc_RNA (1)...(19): siRNA sense strand
gaaaaggaugguuugcuua

SEQ ID NO: 1654485 - RNA, 19 nt, Homo sapiens
  misc_RNA (1)...(19): siRNA sense strand
aaacguacaccuacugaau

SEQ ID NO: 1654486 - RNA, 19 nt, Homo sapiens
  misc_RNA (1)...(19): siRNA sense strand
ucauauaaacguacaccua

SEQ ID NO: 1654487 - RNA, 19 nt, Homo sapiens
  misc_RNA (1)...(19): siRNA sense strand
gaugauggccugggcuuug

SEQ ID NO: 1654488 - RNA, 19 nt, Homo sapiens
  misc_RNA (1)...(19): siRNA sense strand
caugauugaugcuacuguu

SEQ ID NO: 1654489 - RNA, 19 nt, Homo sapiens
  misc_RNA (1)...(19): siRNA sense strand
aaaggaugguuugcuuauu

SEQ ID NO: 1654490 - RNA, 19 nt, Homo sapiens
  misc_RNA (1)...(19): siRNA sense strand
ccuguaauguucagagugu

SEQ ID NO: 1654491 - RNA, 19 nt, Homo sapiens
  misc_RNA (1)...(19): siRNA sense strand
aaagcugaauccugcuaaa

SEQ ID NO: 1654492 - RNA, 19 nt, Homo sapiens
  misc_RNA (1)...(19): siRNA sense strand
uacgugauguucuacaaug

SEQ ID NO: 1654493 - RNA, 19 nt, Homo sapiens
  misc_RNA (1)...(19): siRNA sense strand
agaccuaucccucuuuguu

SEQ ID NO: 1654494 - RNA, 19 nt, Homo sapiens
  misc_RNA (1)...(19): siRNA sense strand
gaggaagucauucuuaagg

SEQ ID NO: 1654495 - RNA, 19 nt, Homo sapiens
  misc_RNA (1)...(19): siRNA sense strand
gccaaucucaacaucaauu

SEQ ID NO: 1654496 - RNA, 19 nt, Homo sapiens
  misc_RNA (1)...(19): siRNA sense strand
uaaaguugaaggaaggaaa

SEQ ID NO: 1654497 - RNA, 19 nt, Homo sapiens
  misc_RNA (1)...(19): siRNA sense strand
gauaaauagccaacuugau

SEQ ID NO: 1654498 - RNA, 19 nt, Homo sapiens
  misc_RNA (1)...(19): siRNA sense strand
accagaagcuuugaugaug

SEQ ID NO: 1654499 - RNA, 19 nt, Homo sapiens
  misc_RNA (1)...(19): siRNA sense strand
ucugaggaagucauucuua

SEQ ID NO: 1654500 - RNA, 19 nt, Homo sapiens
  misc_RNA (1)...(19): siRNA sense strand
cugccaaucucaacaucaa

SEQ ID NO: 1654501 - RNA, 19 nt, Homo sapiens
  misc_RNA (1)...(19): siRNA sense strand
aacguuugccuucauauaa

SEQ ID NO: 1654502 - RNA, 19 nt, Homo sapiens
  misc_RNA (1)...(19): siRNA sense strand
ggaacaaggaccuaagacu

SEQ ID NO: 1654503 - RNA, 19 nt, Homo sapiens
  misc_RNA (1)...(19): siRNA sense strand
cgucaugacugccaaucuc

SEQ ID NO: 1654504 - RNA, 19 nt, Homo sapiens
  misc_RNA (1)...(19): siRNA sense strand
gaggugccauugcaaccau

SEQ ID NO: 1654505 - RNA, 19 nt, Homo sapiens
  misc_RNA (1)...(19): siRNA sense strand
gaaggaccaccuggauuca

SEQ ID NO: 1654506 - RNA, 19 nt, Homo sapiens
  misc_RNA (1)...(19): siRNA sense strand
acguuugccuucauauaaa

SEQ ID NO: 1654507 - RNA, 19 nt, Homo sapiens
  misc_RNA (1)...(19): siRNA sense strand
guacaccuacugaauggau

SEQ ID NO: 1654508 - RNA, 19 nt, Homo sapiens
  misc_RNA (1)...(19): siRNA sense strand
ugauaaauagccaacuuga

SEQ ID NO: 1654509 - RNA, 19 nt, Homo sapiens
  misc_RNA (1)...(19): siRNA sense strand
aggaccaccuggauucauu

SEQ ID NO: 1654510 - RNA, 19 nt, Homo sapiens
  misc_RNA (1)...(19): siRNA sense strand
aggaggcccuuaccuggaa

SEQ ID NO: 1654511 - RNA, 19 nt, Homo sapiens
  misc_RNA (1)...(19): siRNA sense strand
gaaacguuugccuucauau

SEQ ID NO: 1654512 - RNA, 19 nt, Homo sapiens
  misc_RNA (1)...(19): siRNA sense strand
uaaagcugaauccugcuaa

SEQ ID NO: 1654513 - RNA, 19 nt, Homo sapiens
  misc_RNA (1)...(19): siRNA sense strand
ucagaguguugaugagaag

SEQ ID NO: 1654514 - RNA, 19 nt, Homo sapiens
  misc_RNA (1)...(19): siRNA sense strand
aauacgugauguucuacaa

SEQ ID NO: 1654515 - RNA, 19 nt, Homo sapiens
  misc_RNA (1)...(19): siRNA sense strand
ccauugcaaccaugauuga

SEQ ID NO: 1654516 - RNA, 19 nt, Homo sapiens
  misc_RNA (1)...(19): siRNA sense strand
agaaaaggaugguuugcuu

SEQ ID NO: 1654517 - RNA, 19 nt, Homo sapiens
  misc_RNA (1)...(19): siRNA sense strand
gugauguucuacaaugaca

SEQ ID NO: 1654518 - RNA, 19 nt, Homo sapiens
  misc_RNA (1)...(19): siRNA sense strand
aggaagucauucuuaagga

SEQ ID NO: 1654519 - RNA, 19 nt, Homo sapiens
  misc_RNA (1)...(19): siRNA sense strand
caccagaagcuuugaugau

SEQ ID NO: 1654520 - RNA, 19 nt, Homo sapiens
  misc_RNA (1)...(19): siRNA sense strand
uugaugagaagacccuaua

SEQ ID NO: 1654521 - RNA, 19 nt, Homo sapiens
  misc_RNA (1)...(19): siRNA sense strand
gauugaugcuacuguuggu

SEQ ID NO: 1654522 - RNA, 19 nt, Homo sapiens
  misc_RNA (1)...(19): siRNA sense strand
uugaccaguuuaugaagaa

SEQ ID NO: 1654523 - RNA, 19 nt, Homo sapiens
  misc_RNA (1)...(19): siRNA sense strand
gaugagaagacccuauacu

SEQ ID NO: 1654524 - RNA, 19 nt, Homo sapiens
  misc_RNA (1)...(19): siRNA sense strand
gcaaccaugauugaugcua

SEQ ID NO: 1654525 - RNA, 19 nt, Homo sapiens
  misc_RNA (1)...(19): siRNA sense strand
gacccaaagcuuaugaaag

SEQ ID NO: 1654526 - RNA, 19 nt, Homo sapiens
  misc_RNA (1)...(19): siRNA sense strand
ucacaggcccagcucuuca

SEQ ID NO: 1654527 - RNA, 19 nt, Homo sapiens
  misc_RNA (1)...(19): siRNA sense strand
aagaagaacaaaugucaca

SEQ ID NO: 1654528 - RNA, 19 nt, Homo sapiens
  misc_RNA (1)...(19): siRNA sense strand
gcuuaugaaagaagaacaa

SEQ ID NO: 1654529 - RNA, 19 nt, Homo sapiens
  misc_RNA (1)...(19): siRNA sense strand
guaauguucagaguguuga

SEQ ID NO: 1654530 - RNA, 19 nt, Homo sapiens
  misc_RNA (1)...(19): siRNA sense strand
ugguaugugugcaaugaug

SEQ ID NO: 1654531 - RNA, 19 nt, Homo sapiens
  misc_RNA (1)...(19): siRNA sense strand
uggaaacguuugccuucau

SEQ ID NO: 1654532 - RNA, 19 nt, Homo sapiens
  misc_RNA (1)...(19): siRNA sense strand
gaugguuugcuuauuucaa

SEQ ID NO: 1654533 - RNA, 19 nt, Homo sapiens
  misc_RNA (1)...(19): siRNA sense strand
ugaaagaagaacaaauguc

SEQ ID NO: 1654534 - RNA, 19 nt, Homo sapiens
  misc_RNA (1)...(19): siRNA sense strand
ccaaagcuuaugaaagaag

SEQ ID NO: 1654535 - RNA, 19 nt, Homo sapiens
  misc_RNA (1)...(19): siRNA sense strand
acucagaggcgacaagcuu

SEQ ID NO: 1654536 - RNA, 19 nt, Homo sapiens
  misc_RNA (1)...(19): siRNA sense strand
guucagaguguugaugaga

SEQ ID NO: 1654537 - RNA, 19 nt, Homo sapiens
  misc_RNA (1)...(19): siRNA sense strand
ucaccagaagcuuugauga

SEQ ID NO: 1654538 - RNA, 19 nt, Homo sapiens
  misc_RNA (1)...(19): siRNA sense strand
gggcuuugaauacgugaug

SEQ ID NO: 1654539 - RNA, 19 nt, Homo sapiens
  misc_RNA (1)...(19): siRNA sense strand
ugaccaguuuaugaagaaa

SEQ ID NO: 1654540 - RNA, 19 nt, Homo sapiens
  misc_RNA (1)...(19): siRNA sense strand
gccauugcaaccaugauug

SEQ ID NO: 1654541 - RNA, 19 nt, Homo sapiens
  misc_RNA (1)...(19): siRNA sense strand
ggaccaccuggauucauuc

SEQ ID NO: 1654542 - RNA, 19 nt, Homo sapiens
  misc_RNA (1)...(19): siRNA sense strand
gaauacgugauguucuaca

SEQ ID NO: 1654543 - RNA, 19 nt, Homo sapiens
  misc_RNA (1)...(19): siRNA sense strand
aggaugguuugcuuauuuc

SEQ ID NO: 1654544 - RNA, 19 nt, Homo sapiens
  misc_RNA (1)...(19): siRNA sense strand
gcugaauccugcuaaaagu

SEQ ID NO: 1654545 - RNA, 19 nt, Homo sapiens
  misc_RNA (1)...(19): siRNA sense strand
aaaguugaaggaaggaaau

SEQ ID NO: 1654546 - RNA, 19 nt, Homo sapiens
  misc_RNA (1)...(19): siRNA sense strand
uuuguuuccuguaauguuc

SEQ ID NO: 1654547 - RNA, 19 nt, Homo sapiens
  misc_RNA (1)...(19): siRNA sense strand
agaggcgacaagcuuauuu

SEQ ID NO: 1654548 - RNA, 19 nt, Homo sapiens
  misc_RNA (1)...(19): siRNA sense strand
uuugaccaguuuaugaaga

SEQ ID NO: 1654549 - RNA, 19 nt, Homo sapiens
  misc_RNA (1)...(19): siRNA sense strand
ggaaacguuugccuucaua

SEQ ID NO: 1654550 - RNA, 19 nt, Homo sapiens
  misc_RNA (1)...(19): siRNA sense strand
cugaggaagucauucuuaa

SEQ ID NO: 1654551 - RNA, 19 nt, Homo sapiens
  misc_RNA (1)...(19): siRNA sense strand
gagcugaggucauuuucuu

SEQ ID NO: 1654552 - RNA, 19 nt, Homo sapiens
  misc_RNA (1)...(19): siRNA sense strand
aaacguuugccuucauaua

SEQ ID NO: 1654553 - RNA, 19 nt, Homo sapiens
  misc_RNA (1)...(19): siRNA sense strand
aaacguacaccuacugaau

SEQ ID NO: 1654554 - RNA, 19 nt, Homo sapiens
  misc_RNA (1)...(19): siRNA sense strand
ucauauaaacguacaccua

SEQ ID NO: 1654555 - RNA, 19 nt, Homo sapiens
  misc_RNA (1)...(19): siRNA sense strand
gaggaagucauucuuaagg

SEQ ID NO: 1654556 - RNA, 19 nt, Homo sapiens
  misc_RNA (1)...(19): siRNA sense strand
ucugaggaagucauucuua

SEQ ID NO: 1654557 - RNA, 19 nt, Homo sapiens
  misc_RNA (1)...(19): siRNA sense strand
ggaacaaggaccuaagacu

SEQ ID NO: 1654558 - RNA, 19 nt, Homo sapiens
  misc_RNA (1)...(19): siRNA sense strand
acguuugccuucauauaaa

SEQ ID NO: 1654559 - RNA, 19 nt, Homo sapiens
  misc_RNA (1)...(19): siRNA sense strand
aacguuugccuucauauaa

SEQ ID NO: 1654560 - RNA, 19 nt, Homo sapiens
  misc_RNA (1)...(19): siRNA sense strand
guacaccuacugaauggau

SEQ ID NO: 1654561 - RNA, 19 nt, Homo sapiens
  misc_RNA (1)...(19): siRNA sense strand
gaaacguuugccuucauau

SEQ ID NO: 1654562 - RNA, 19 nt, Homo sapiens
  misc_RNA (1)...(19): siRNA sense strand
aggaagucauucuuaagga

SEQ ID NO: 1654563 - RNA, 19 nt, Homo sapiens
  misc_RNA (1)...(19): siRNA sense strand
uugaccaguuuaugaagaa

SEQ ID NO: 1654564 - RNA, 19 nt, Homo sapiens
  misc_RNA (1)...(19): siRNA sense strand
uggaaacguuugccuucau

SEQ ID NO: 1654565 - RNA, 19 nt, Homo sapiens
  misc_RNA (1)...(19): siRNA sense strand
ugaccaguuuaugaagaaa

SEQ ID NO: 1654566 - RNA, 19 nt, Homo sapiens
  misc_RNA (1)...(19): siRNA sense strand
uuugaccaguuuaugaaga

SEQ ID NO: 1654567 - RNA, 19 nt, Homo sapiens
  misc_RNA (1)...(19): siRNA sense strand
ggacagaucugcucacuuu

SEQ ID NO: 1654568 - RNA, 19 nt, Homo sapiens
  misc_RNA (1)...(19): siRNA sense strand
ggcagaagcuuauucgaau

SEQ ID NO: 1654569 - RNA, 19 nt, Homo sapiens
  misc_RNA (1)...(19): siRNA sense strand
gcagaagcuuauucgaauu

SEQ ID NO: 1654570 - RNA, 19 nt, Homo sapiens
  misc_RNA (1)...(19): siRNA sense strand
cgacaugcauugcgucuca

SEQ ID NO: 1654571 - RNA, 19 nt, Homo sapiens
  misc_RNA (1)...(19): siRNA sense strand
ucucaaaccugauuucauc

SEQ ID NO: 1654572 - RNA, 19 nt, Homo sapiens
  misc_RNA (1)...(19): siRNA sense strand
gacaagagccagacaauac

SEQ ID NO: 1654573 - RNA, 19 nt, Homo sapiens
  misc_RNA (1)...(19): siRNA sense strand
gggaauguguacaaggaaa

SEQ ID NO: 1654574 - RNA, 19 nt, Homo sapiens
  misc_RNA (1)...(19): siRNA sense strand
aggaggcaauugagcauua

SEQ ID NO: 1654575 - RNA, 19 nt, Homo sapiens
  misc_RNA (1)...(19): siRNA sense strand
uuagcacucuggcaauuaa

SEQ ID NO: 1654576 - RNA, 19 nt, Homo sapiens
  misc_RNA (1)...(19): siRNA sense strand
agacaauacuggugugcuu

SEQ ID NO: 1654577 - RNA, 19 nt, Homo sapiens
  misc_RNA (1)...(19): siRNA sense strand
guuggcacaucgagaauau

SEQ ID NO: 1654578 - RNA, 19 nt, Homo sapiens
  misc_RNA (1)...(19): siRNA sense strand
gcaugcagcucuggagaca

SEQ ID NO: 1654579 - RNA, 19 nt, Homo sapiens
  misc_RNA (1)...(19): siRNA sense strand
ucucugcucuucaguacaa

SEQ ID NO: 1654580 - RNA, 19 nt, Homo sapiens
  misc_RNA (1)...(19): siRNA sense strand
ggaggcaauugagcauuau

SEQ ID NO: 1654581 - RNA, 19 nt, Homo sapiens
  misc_RNA (1)...(19): siRNA sense strand
cagaagcuuauucgaauuu

SEQ ID NO: 1654582 - RNA, 19 nt, Homo sapiens
  misc_RNA (1)...(19): siRNA sense strand
gagacaagagccagacaau

SEQ ID NO: 1654583 - RNA, 19 nt, Homo sapiens
  misc_RNA (1)...(19): siRNA sense strand
cugauuucaucgaugguua

SEQ ID NO: 1654584 - RNA, 19 nt, Homo sapiens
  misc_RNA (1)...(19): siRNA sense strand
gucgaaggcuggacagauc

SEQ ID NO: 1654585 - RNA, 19 nt, Homo sapiens
  misc_RNA (1)...(19): siRNA sense strand
agacaagagccagacaaua

SEQ ID NO: 1654586 - RNA, 19 nt, Homo sapiens
  misc_RNA (1)...(19): siRNA sense strand
gaauaucaggcaggagauu

SEQ ID NO: 1654587 - RNA, 19 nt, Homo sapiens
  misc_RNA (1)...(19): siRNA sense strand
gguagcagcgggugacaug

SEQ ID NO: 1654588 - RNA, 19 nt, Homo sapiens
  misc_RNA (1)...(19): siRNA sense strand
caaaccugauuucaucgau

SEQ ID NO: 1654589 - RNA, 19 nt, Homo sapiens
  misc_RNA (1)...(19): siRNA sense strand
gaagcuuauucgaauuugg

SEQ ID NO: 1654590 - RNA, 19 nt, Homo sapiens
  misc_RNA (1)...(19): siRNA sense strand
aguacaagcuuacgucucu

SEQ ID NO: 1654591 - RNA, 19 nt, Homo sapiens
  misc_RNA (1)...(19): siRNA sense strand
ggagacaagagccagacaa

SEQ ID NO: 1654592 - RNA, 19 nt, Homo sapiens
  misc_RNA (1)...(19): siRNA sense strand
ugaguuggcacaucgagaa

SEQ ID NO: 1654593 - RNA, 19 nt, Homo sapiens
  misc_RNA (1)...(19): siRNA sense strand
uggcagaagcuuauucgaa

SEQ ID NO: 1654594 - RNA, 19 nt, Homo sapiens
  misc_RNA (1)...(19): siRNA sense strand
gaauguguacaaggaaaga

SEQ ID NO: 1654595 - RNA, 19 nt, Homo sapiens
  misc_RNA (1)...(19): siRNA sense strand
gcacucuggcaauuaaaca

SEQ ID NO: 1654596 - RNA, 19 nt, Homo sapiens
  misc_RNA (1)...(19): siRNA sense strand
gacaauacuggugugcuuu

SEQ ID NO: 1654597 - RNA, 19 nt, Homo sapiens
  misc_RNA (1)...(19): siRNA sense strand
ggugugcuuuuauuacuuu

SEQ ID NO: 1654598 - RNA, 19 nt, Homo sapiens
  misc_RNA (1)...(19): siRNA sense strand
gauuucaucgaugguuaua

SEQ ID NO: 1654599 - RNA, 19 nt, Homo sapiens
  misc_RNA (1)...(19): siRNA sense strand
caaggaaagagggcaguug

SEQ ID NO: 1654600 - RNA, 19 nt, Homo sapiens
  misc_RNA (1)...(19): siRNA sense strand
gcuuacgucucugcucuuc

SEQ ID NO: 1654601 - RNA, 19 nt, Homo sapiens
  misc_RNA (1)...(19): siRNA sense strand
caauacuggugugcuuuua

SEQ ID NO: 1654602 - RNA, 19 nt, Homo sapiens
  misc_RNA (1)...(19): siRNA sense strand
gcaggaggcaauugagcau

SEQ ID NO: 1654603 - RNA, 19 nt, Homo sapiens
  misc_RNA (1)...(19): siRNA sense strand
uuacgucucugcucuucag

SEQ ID NO: 1654604 - RNA, 19 nt, Homo sapiens
  misc_RNA (1)...(19): siRNA sense strand
ggaauguguacaaggaaag

SEQ ID NO: 1654605 - RNA, 19 nt, Homo sapiens
  misc_RNA (1)...(19): siRNA sense strand
gacagaucugcucacuuua

SEQ ID NO: 1654606 - RNA, 19 nt, Homo sapiens
  misc_RNA (1)...(19): siRNA sense strand
cgucucugcucuucaguac

SEQ ID NO: 1654607 - RNA, 19 nt, Homo sapiens
  misc_RNA (1)...(19): siRNA sense strand
cuuuagcacucuggcaauu

SEQ ID NO: 1654608 - RNA, 19 nt, Homo sapiens
  misc_RNA (1)...(19): siRNA sense strand
acagaucugcucacuuuag

SEQ ID NO: 1654609 - RNA, 19 nt, Homo sapiens
  misc_RNA (1)...(19): siRNA sense strand
agaagcuuauucgaauuug

SEQ ID NO: 1654610 - RNA, 19 nt, Homo sapiens
  misc_RNA (1)...(19): siRNA sense strand
uggcacaucgagaauauca

SEQ ID NO: 1654611 - RNA, 19 nt, Homo sapiens
  misc_RNA (1)...(19): siRNA sense strand
cagaucugcucacuuuagc

SEQ ID NO: 1654612 - RNA, 19 nt, Homo sapiens
  misc_RNA (1)...(19): siRNA sense strand
caagagccagacaauacug

SEQ ID NO: 1654613 - RNA, 19 nt, Homo sapiens
  misc_RNA (1)...(19): siRNA sense strand
augcagcucuggagacaag

SEQ ID NO: 1654614 - RNA, 19 nt, Homo sapiens
  misc_RNA (1)...(19): siRNA sense strand
ggacagaucugcucacuuu

SEQ ID NO: 1654615 - RNA, 19 nt, Homo sapiens
  misc_RNA (1)...(19): siRNA sense strand
gcacaauccugauaaauuu

SEQ ID NO: 1654616 - RNA, 19 nt, Homo sapiens
  misc_RNA (1)...(19): siRNA sense strand
gcaguucgcuuguaucgua

SEQ ID NO: 1654617 - RNA, 19 nt, Homo sapiens
  misc_RNA (1)...(19): siRNA sense strand
uaacacagcucuuaauaug

SEQ ID NO: 1654618 - RNA, 19 nt, Homo sapiens
  misc_RNA (1)...(19): siRNA sense strand
caacaaaccugaccacaug

SEQ ID NO: 1654619 - RNA, 19 nt, Homo sapiens
  misc_RNA (1)...(19): siRNA sense strand
gcacggcucugaaacuuaa

SEQ ID NO: 1654620 - RNA, 19 nt, Homo sapiens
  misc_RNA (1)...(19): siRNA sense strand
cuacucagaucaacaauaa

SEQ ID NO: 1654621 - RNA, 19 nt, Homo sapiens
  misc_RNA (1)...(19): siRNA sense strand
gcugaugccuacucuaaua

SEQ ID NO: 1654622 - RNA, 19 nt, Homo sapiens
  misc_RNA (1)...(19): siRNA sense strand
ugaauaaccuagccaauau

SEQ ID NO: 1654623 - RNA, 19 nt, Homo sapiens
  misc_RNA (1)...(19): siRNA sense strand
caaacuuucuggaugcuua

SEQ ID NO: 1654624 - RNA, 19 nt, Homo sapiens
  misc_RNA (1)...(19): siRNA sense strand
uaaaggagaugcaggaugu

SEQ ID NO: 1654625 - RNA, 19 nt, Homo sapiens
  misc_RNA (1)...(19): siRNA sense strand
gcugggaacugaucuagaa

SEQ ID NO: 1654626 - RNA, 19 nt, Homo sapiens
  misc_RNA (1)...(19): siRNA sense strand
aggaagcucugaugcauua

SEQ ID NO: 1654627 - RNA, 19 nt, Homo sapiens
  misc_RNA (1)...(19): siRNA sense strand
gaacugaucuagaauaccu

SEQ ID NO: 1654628 - RNA, 19 nt, Homo sapiens
  misc_RNA (1)...(19): siRNA sense strand
gcaauggacuggcaacuac

SEQ ID NO: 1654629 - RNA, 19 nt, Homo sapiens
  misc_RNA (1)...(19): siRNA sense strand
ugaagaaguuggucaguau

SEQ ID NO: 1654630 - RNA, 19 nt, Homo sapiens
  misc_RNA (1)...(19): siRNA sense strand
uauuguggcugaccaguua

SEQ ID NO: 1654631 - RNA, 19 nt, Homo sapiens
  misc_RNA (1)...(19): siRNA sense strand
ggaguaaucuuggcugugu

SEQ ID NO: 1654632 - RNA, 19 nt, Homo sapiens
  misc_RNA (1)...(19): siRNA sense strand
aauuugagguguucuguua

SEQ ID NO: 1654633 - RNA, 19 nt, Homo sapiens
  misc_RNA (1)...(19): siRNA sense strand
ggcagaagcuuauucgaau

SEQ ID NO: 1654634 - RNA, 19 nt, Homo sapiens
  misc_RNA (1)...(19): siRNA sense strand
gaaacacucuaaaggagau

SEQ ID NO: 1654635 - RNA, 19 nt, Homo sapiens
  misc_RNA (1)...(19): siRNA sense strand
ggaaucauccuacuucuca

SEQ ID NO: 1654636 - RNA, 19 nt, Homo sapiens
  misc_RNA (1)...(19): siRNA sense strand
gcagaagcuuauucgaauu

SEQ ID NO: 1654637 - RNA, 19 nt, Homo sapiens
  misc_RNA (1)...(19): siRNA sense strand
gcaucgaccucaaagcauu

SEQ ID NO: 1654638 - RNA, 19 nt, Homo sapiens
  misc_RNA (1)...(19): siRNA sense strand
uaaccuagccaauaucaaa

SEQ ID NO: 1654639 - RNA, 19 nt, Homo sapiens
  misc_RNA (1)...(19): siRNA sense strand
ggcaaagucuggaagcaaa

SEQ ID NO: 1654640 - RNA, 19 nt, Homo sapiens
  misc_RNA (1)...(19): siRNA sense strand
cgacaugcauugcgucuca

SEQ ID NO: 1654641 - RNA, 19 nt, Homo sapiens
  misc_RNA (1)...(19): siRNA sense strand
ggacagauucaaauaacaa

SEQ ID NO: 1654642 - RNA, 19 nt, Homo sapiens
  misc_RNA (1)...(19): siRNA sense strand
gcacaaacuuccgagugaa

SEQ ID NO: 1654643 - RNA, 19 nt, Homo sapiens
  misc_RNA (1)...(19): siRNA sense strand
ucucaaaccugauuucauc

SEQ ID NO: 1654644 - RNA, 19 nt, Homo sapiens
  misc_RNA (1)...(19): siRNA sense strand
caucguauacuguaacuuu

SEQ ID NO: 1654645 - RNA, 19 nt, Homo sapiens
  misc_RNA (1)...(19): siRNA sense strand
cagaagcaguuauugaaau

SEQ ID NO: 1654646 - RNA, 19 nt, Homo sapiens
  misc_RNA (1)...(19): siRNA sense strand
ggcacaaacuuccgaguga

SEQ ID NO: 1654647 - RNA, 19 nt, Homo sapiens
  misc_RNA (1)...(19): siRNA sense strand
gcaggaagcucugaugcau

SEQ ID NO: 1654648 - RNA, 19 nt, Homo sapiens
  misc_RNA (1)...(19): siRNA sense strand
caaccgaacuuugcaguag

SEQ ID NO: 1654649 - RNA, 19 nt, Homo sapiens
  misc_RNA (1)...(19): siRNA sense strand
gauuaagccuguugaaguc

SEQ ID NO: 1654650 - RNA, 19 nt, Homo sapiens
  misc_RNA (1)...(19): siRNA sense strand
gaucuagaauaccugaaga

SEQ ID NO: 1654651 - RNA, 19 nt, Homo sapiens
  misc_RNA (1)...(19): siRNA sense strand
gucuugagcuuauugcuaa

SEQ ID NO: 1654652 - RNA, 19 nt, Homo sapiens
  misc_RNA (1)...(19): siRNA sense strand
gaggacagauucaaauaac

SEQ ID NO: 1654653 - RNA, 19 nt, Homo sapiens
  misc_RNA (1)...(19): siRNA sense strand
cauccuacuucucaccuua

SEQ ID NO: 1654654 - RNA, 19 nt, Homo sapiens
  misc_RNA (1)...(19): siRNA sense strand
ggcaaccugugcuuagaua

SEQ ID NO: 1654655 - RNA, 19 nt, Homo sapiens
  misc_RNA (1)...(19): siRNA sense strand
gaauauuccagaagccaua

SEQ ID NO: 1654656 - RNA, 19 nt, Homo sapiens
  misc_RNA (1)...(19): siRNA sense strand
aaauugacccuucuacuuu

SEQ ID NO: 1654657 - RNA, 19 nt, Homo sapiens
  misc_RNA (1)...(19): siRNA sense strand
gcagaagcaguuauugaaa

SEQ ID NO: 1654658 - RNA, 19 nt, Homo sapiens
  misc_RNA (1)...(19): siRNA sense strand
ggaauucauauccuuguaa

SEQ ID NO: 1654659 - RNA, 19 nt, Homo sapiens
  misc_RNA (1)...(19): siRNA sense strand
gacaagagccagacaauac

SEQ ID NO: 1654660 - RNA, 19 nt, Homo sapiens
  misc_RNA (1)...(19): siRNA sense strand
gcucuuaauaugccuguua

SEQ ID NO: 1654661 - RNA, 19 nt, Homo sapiens
  misc_RNA (1)...(19): siRNA sense strand
gggaauguguacaaggaaa

SEQ ID NO: 1654662 - RNA, 19 nt, Homo sapiens
  misc_RNA (1)...(19): siRNA sense strand
gaugaaguguccugaugga

SEQ ID NO: 1654663 - RNA, 19 nt, Homo sapiens
  misc_RNA (1)...(19): siRNA sense strand
uaaggaggcuauucgaauc

SEQ ID NO: 1654664 - RNA, 19 nt, Homo sapiens
  misc_RNA (1)...(19): siRNA sense strand
gaagcucugaugcauuaua

SEQ ID NO: 1654665 - RNA, 19 nt, Homo sapiens
  misc_RNA (1)...(19): siRNA sense strand
gcucauugccugcagauug

SEQ ID NO: 1654666 - RNA, 19 nt, Homo sapiens
  misc_RNA (1)...(19): siRNA sense strand
gcaguaacacagcucuuaa

SEQ ID NO: 1654667 - RNA, 19 nt, Homo sapiens
  misc_RNA (1)...(19): siRNA sense strand
ccgagaaauuggcuuauau

SEQ ID NO: 1654668 - RNA, 19 nt, Homo sapiens
  misc_RNA (1)...(19): siRNA sense strand
gcaguagcuuggaguaauc

SEQ ID NO: 1654669 - RNA, 19 nt, Homo sapiens
  misc_RNA (1)...(19): siRNA sense strand
aaaccugaccacaugauua

SEQ ID NO: 1654670 - RNA, 19 nt, Homo sapiens
  misc_RNA (1)...(19): siRNA sense strand
caacuacucagaucaacaa

SEQ ID NO: 1654671 - RNA, 19 nt, Homo sapiens
  misc_RNA (1)...(19): siRNA sense strand
caaagcauuucuugauagu

SEQ ID NO: 1654672 - RNA, 19 nt, Homo sapiens
  misc_RNA (1)...(19): siRNA sense strand
aggaggcaauugagcauua

SEQ ID NO: 1654673 - RNA, 19 nt, Homo sapiens
  misc_RNA (1)...(19): siRNA sense strand
gagaacagggaaacauuga

SEQ ID NO: 1654674 - RNA, 19 nt, Homo sapiens
  misc_RNA (1)...(19): siRNA sense strand
gaacagggaaacauugaag

SEQ ID NO: 1654675 - RNA, 19 nt, Homo sapiens
  misc_RNA (1)...(19): siRNA sense strand
uuagcacucuggcaauuaa

SEQ ID NO: 1654676 - RNA, 19 nt, Homo sapiens
  misc_RNA (1)...(19): siRNA sense strand
uuaugcagcuggcaacaaa

SEQ ID NO: 1654677 - RNA, 19 nt, Homo sapiens
  misc_RNA (1)...(19): siRNA sense strand
gaagcagaagauuguuaua

SEQ ID NO: 1654678 - RNA, 19 nt, Homo sapiens
  misc_RNA (1)...(19): siRNA sense strand
cuacagaugugggagcauu

SEQ ID NO: 1654679 - RNA, 19 nt, Homo sapiens
  misc_RNA (1)...(19): siRNA sense strand
guaacacagcucuuaauau

SEQ ID NO: 1654680 - RNA, 19 nt, Homo sapiens
  misc_RNA (1)...(19): siRNA sense strand
uaagggcgcucgaaaugag

SEQ ID NO: 1654681 - RNA, 19 nt, Homo sapiens
  misc_RNA (1)...(19): siRNA sense strand
ucgaaucaguccuaccuuu

SEQ ID NO: 1654682 - RNA, 19 nt, Homo sapiens
  misc_RNA (1)...(19): siRNA sense strand
aagcucugaugcauuauaa

SEQ ID NO: 1654683 - RNA, 19 nt, Homo sapiens
  misc_RNA (1)...(19): siRNA sense strand
gaagaaguuggucaguauu

SEQ ID NO: 1654684 - RNA, 19 nt, Homo sapiens
  misc_RNA (1)...(19): siRNA sense strand
agaagcaguuauugaaaug

SEQ ID NO: 1654685 - RNA, 19 nt, Homo sapiens
  misc_RNA (1)...(19): siRNA sense strand
agaagccaaucauuucauu

SEQ ID NO: 1654686 - RNA, 19 nt, Homo sapiens
  misc_RNA (1)...(19): siRNA sense strand
aaucuggcuuccauucaua

SEQ ID NO: 1654687 - RNA, 19 nt, Homo sapiens
  misc_RNA (1)...(19): siRNA sense strand
gggaacugaucuagaauac

SEQ ID NO: 1654688 - RNA, 19 nt, Homo sapiens
  misc_RNA (1)...(19): siRNA sense strand
cugaauaaccuagccaaua

SEQ ID NO: 1654689 - RNA, 19 nt, Homo sapiens
  misc_RNA (1)...(19): siRNA sense strand
gcaacaaaccugaccacau

SEQ ID NO: 1654690 - RNA, 19 nt, Homo sapiens
  misc_RNA (1)...(19): siRNA sense strand
agacaauacuggugugcuu

SEQ ID NO: 1654691 - RNA, 19 nt, Homo sapiens
  misc_RNA (1)...(19): siRNA sense strand
caucccagcucacuugcuu

SEQ ID NO: 1654692 - RNA, 19 nt, Homo sapiens
  misc_RNA (1)...(19): siRNA sense strand
cgaggacagauucaaauaa

SEQ ID NO: 1654693 - RNA, 19 nt, Homo sapiens
  misc_RNA (1)...(19): siRNA sense strand
aagaugaaguguccugaug

SEQ ID NO: 1654694 - RNA, 19 nt, Homo sapiens
  misc_RNA (1)...(19): siRNA sense strand
guuggcacaucgagaauau

SEQ ID NO: 1654695 - RNA, 19 nt, Homo sapiens
  misc_RNA (1)...(19): siRNA sense strand
ggaggcaauugagcauuau

SEQ ID NO: 1654696 - RNA, 19 nt, Homo sapiens
  misc_RNA (1)...(19): siRNA sense strand
caaacaauacacaauggaa

SEQ ID NO: 1654697 - RNA, 19 nt, Homo sapiens
  misc_RNA (1)...(19): siRNA sense strand
gcaugcagcucuggagaca

SEQ ID NO: 1654698 - RNA, 19 nt, Homo sapiens
  misc_RNA (1)...(19): siRNA sense strand
gcaguauuccgagaaauug

SEQ ID NO: 1654699 - RNA, 19 nt, Homo sapiens
  misc_RNA (1)...(19): siRNA sense strand
ucacugaucaggaaacuuc

SEQ ID NO: 1654700 - RNA, 19 nt, Homo sapiens
  misc_RNA (1)...(19): siRNA sense strand
cagaagcuuauucgaauuu

SEQ ID NO: 1654701 - RNA, 19 nt, Homo sapiens
  misc_RNA (1)...(19): siRNA sense strand
gcagaagccaaucauuuca

SEQ ID NO: 1654702 - RNA, 19 nt, Homo sapiens
  misc_RNA (1)...(19): siRNA sense strand
gcuugcaauucaucacuuu

SEQ ID NO: 1654703 - RNA, 19 nt, Homo sapiens
  misc_RNA (1)...(19): siRNA sense strand
ucucugcucuucaguacaa

SEQ ID NO: 1654704 - RNA, 19 nt, Homo sapiens
  misc_RNA (1)...(19): siRNA sense strand
guaaagcauuagaagucuu

SEQ ID NO: 1654705 - RNA, 19 nt, Homo sapiens
  misc_RNA (1)...(19): siRNA sense strand
uagguugucuugagcuuau

SEQ ID NO: 1654706 - RNA, 19 nt, Homo sapiens
  misc_RNA (1)...(19): siRNA sense strand
uauuguaacuuggcucauu

SEQ ID NO: 1654707 - RNA, 19 nt, Homo sapiens
  misc_RNA (1)...(19): siRNA sense strand
ggcagaagccaaucauuuc

SEQ ID NO: 1654708 - RNA, 19 nt, Homo sapiens
  misc_RNA (1)...(19): siRNA sense strand
gcaugcacaauccugauaa

SEQ ID NO: 1654709 - RNA, 19 nt, Homo sapiens
  misc_RNA (1)...(19): siRNA sense strand
ugaagcguguucccaauag

SEQ ID NO: 1654710 - RNA, 19 nt, Homo sapiens
  misc_RNA (1)...(19): siRNA sense strand
uaaccacccguucucagua

SEQ ID NO: 1654711 - RNA, 19 nt, Homo sapiens
  misc_RNA (1)...(19): siRNA sense strand
ugagcaguauuccgagaaa

SEQ ID NO: 1654712 - RNA, 19 nt, Homo sapiens
  misc_RNA (1)...(19): siRNA sense strand
gaaccuaauauucaacagu

SEQ ID NO: 1654713 - RNA, 19 nt, Homo sapiens
  misc_RNA (1)...(19): siRNA sense strand
ggacuggcaacuacucaga

SEQ ID NO: 1654714 - RNA, 19 nt, Homo sapiens
  misc_RNA (1)...(19): siRNA sense strand
ggacagaucugcucacuuu

SEQ ID NO: 1654715 - RNA, 19 nt, Homo sapiens
  misc_RNA (1)...(19): siRNA sense strand
gcacaauccugauaaauuu

SEQ ID NO: 1654716 - RNA, 19 nt, Homo sapiens
  misc_RNA (1)...(19): siRNA sense strand
gcaguucgcuuguaucgua

SEQ ID NO: 1654717 - RNA, 19 nt, Homo sapiens
  misc_RNA (1)...(19): siRNA sense strand
uaacacagcucuuaauaug

SEQ ID NO: 1654718 - RNA, 19 nt, Homo sapiens
  misc_RNA (1)...(19): siRNA sense strand
caacaaaccugaccacaug

SEQ ID NO: 1654719 - RNA, 19 nt, Homo sapiens
  misc_RNA (1)...(19): siRNA sense strand
gcacggcucugaaacuuaa

SEQ ID NO: 1654720 - RNA, 19 nt, Homo sapiens
  misc_RNA (1)...(19): siRNA sense strand
cuacucagaucaacaauaa

SEQ ID NO: 1654721 - RNA, 19 nt, Homo sapiens
  misc_RNA (1)...(19): siRNA sense strand
gcugaugccuacucuaaua

SEQ ID NO: 1654722 - RNA, 19 nt, Homo sapiens
  misc_RNA (1)...(19): siRNA sense strand
ugaauaaccuagccaauau

SEQ ID NO: 1654723 - RNA, 19 nt, Homo sapiens
  misc_RNA (1)...(19): siRNA sense strand
caaacuuucuggaugcuua

SEQ ID NO: 1654724 - RNA, 19 nt, Homo sapiens
  misc_RNA (1)...(19): siRNA sense strand
uaaaggagaugcaggaugu

SEQ ID NO: 1654725 - RNA, 19 nt, Homo sapiens
  misc_RNA (1)...(19): siRNA sense strand
gcugggaacugaucuagaa

SEQ ID NO: 1654726 - RNA, 19 nt, Homo sapiens
  misc_RNA (1)...(19): siRNA sense strand
aggaagcucugaugcauua

SEQ ID NO: 1654727 - RNA, 19 nt, Homo sapiens
  misc_RNA (1)...(19): siRNA sense strand
gaacugaucuagaauaccu

SEQ ID NO: 1654728 - RNA, 19 nt, Homo sapiens
  misc_RNA (1)...(19): siRNA sense strand
gcaauggacuggcaacuac

SEQ ID NO: 1654729 - RNA, 19 nt, Homo sapiens
  misc_RNA (1)...(19): siRNA sense strand
ugaagaaguuggucaguau

SEQ ID NO: 1654730 - RNA, 19 nt, Homo sapiens
  misc_RNA (1)...(19): siRNA sense strand
uauuguggcugaccaguua

SEQ ID NO: 1654731 - RNA, 19 nt, Homo sapiens
  misc_RNA (1)...(19): siRNA sense strand
ggaguaaucuuggcugugu

SEQ ID NO: 1654732 - RNA, 19 nt, Homo sapiens
  misc_RNA (1)...(19): siRNA sense strand
aauuugagguguucuguua

SEQ ID NO: 1654733 - RNA, 19 nt, Homo sapiens
  misc_RNA (1)...(19): siRNA sense strand
ggcagaagcuuauucgaau

SEQ ID NO: 1654734 - RNA, 19 nt, Homo sapiens
  misc_RNA (1)...(19): siRNA sense strand
gaaacacucuaaaggagau

SEQ ID NO: 1654735 - RNA, 19 nt, Homo sapiens
  misc_RNA (1)...(19): siRNA sense strand
ggaaucauccuacuucuca

SEQ ID NO: 1654736 - RNA, 19 nt, Homo sapiens
  misc_RNA (1)...(19): siRNA sense strand
gcagaagcuuauucgaauu

SEQ ID NO: 1654737 - RNA, 19 nt, Homo sapiens
  misc_RNA (1)...(19): siRNA sense strand
gcaucgaccucaaagcauu

SEQ ID NO: 1654738 - RNA, 19 nt, Homo sapiens
  misc_RNA (1)...(19): siRNA sense strand
uaaccuagccaauaucaaa

SEQ ID NO: 1654739 - RNA, 19 nt, Homo sapiens
  misc_RNA (1)...(19): siRNA sense strand
ggcaaagucuggaagcaaa

SEQ ID NO: 1654740 - RNA, 19 nt, Homo sapiens
  misc_RNA (1)...(19): siRNA sense strand
cgacaugcauugcgucuca

SEQ ID NO: 1654741 - RNA, 19 nt, Homo sapiens
  misc_RNA (1)...(19): siRNA sense strand
ggacagauucaaauaacaa

SEQ ID NO: 1654742 - RNA, 19 nt, Homo sapiens
  misc_RNA (1)...(19): siRNA sense strand
gcacaaacuuccgagugaa

SEQ ID NO: 1654743 - RNA, 19 nt, Homo sapiens
  misc_RNA (1)...(19): siRNA sense strand
ucucaaaccugauuucauc

SEQ ID NO: 1654744 - RNA, 19 nt, Homo sapiens
  misc_RNA (1)...(19): siRNA sense strand
caucguauacuguaacuuu

SEQ ID NO: 1654745 - RNA, 19 nt, Homo sapiens
  misc_RNA (1)...(19): siRNA sense strand
cagaagcaguuauugaaau

SEQ ID NO: 1654746 - RNA, 19 nt, Homo sapiens
  misc_RNA (1)...(19): siRNA sense strand
ggcacaaacuuccgaguga

SEQ ID NO: 1654747 - RNA, 19 nt, Homo sapiens
  misc_RNA (1)...(19): siRNA sense strand
gcaggaagcucugaugcau

SEQ ID NO: 1654748 - RNA, 19 nt, Homo sapiens
  misc_RNA (1)...(19): siRNA sense strand
caaccgaacuuugcaguag

SEQ ID NO: 1654749 - RNA, 19 nt, Homo sapiens
  misc_RNA (1)...(19): siRNA sense strand
gauuaagccuguugaaguc

SEQ ID NO: 1654750 - RNA, 19 nt, Homo sapiens
  misc_RNA (1)...(19): siRNA sense strand
gaucuagaauaccugaaga

SEQ ID NO: 1654751 - RNA, 19 nt, Homo sapiens
  misc_RNA (1)...(19): siRNA sense strand
gucuugagcuuauugcuaa

SEQ ID NO: 1654752 - RNA, 19 nt, Homo sapiens
  misc_RNA (1)...(19): siRNA sense strand
gaggacagauucaaauaac

SEQ ID NO: 1654753 - RNA, 19 nt, Homo sapiens
  misc_RNA (1)...(19): siRNA sense strand
cauccuacuucucaccuua

SEQ ID NO: 1654754 - RNA, 19 nt, Homo sapiens
  misc_RNA (1)...(19): siRNA sense strand
ggcaaccugugcuuagaua

SEQ ID NO: 1654755 - RNA, 19 nt, Homo sapiens
  misc_RNA (1)...(19): siRNA sense strand
gaauauuccagaagccaua

SEQ ID NO: 1654756 - RNA, 19 nt, Homo sapiens
  misc_RNA (1)...(19): siRNA sense strand
aaauugacccuucuacuuu

SEQ ID NO: 1654757 - RNA, 19 nt, Homo sapiens
  misc_RNA (1)...(19): siRNA sense strand
gcagaagcaguuauugaaa

SEQ ID NO: 1654758 - RNA, 19 nt, Homo sapiens
  misc_RNA (1)...(19): siRNA sense strand
ggaauucauauccuuguaa

SEQ ID NO: 1654759 - RNA, 19 nt, Homo sapiens
  misc_RNA (1)...(19): siRNA sense strand
gacaagagccagacaauac

SEQ ID NO: 1654760 - RNA, 19 nt, Homo sapiens
  misc_RNA (1)...(19): siRNA sense strand
gcucuuaauaugccuguua

SEQ ID NO: 1654761 - RNA, 19 nt, Homo sapiens
  misc_RNA (1)...(19): siRNA sense strand
gggaauguguacaaggaaa

SEQ ID NO: 1654762 - RNA, 19 nt, Homo sapiens
  misc_RNA (1)...(19): siRNA sense strand
gaugaaguguccugaugga

SEQ ID NO: 1654763 - RNA, 19 nt, Homo sapiens
  misc_RNA (1)...(19): siRNA sense strand
uaaggaggcuauucgaauc

SEQ ID NO: 1654764 - RNA, 19 nt, Homo sapiens
  misc_RNA (1)...(19): siRNA sense strand
gaagcucugaugcauuaua

SEQ ID NO: 1654765 - RNA, 19 nt, Homo sapiens
  misc_RNA (1)...(19): siRNA sense strand
gcucauugccugcagauug

SEQ ID NO: 1654766 - RNA, 19 nt, Homo sapiens
  misc_RNA (1)...(19): siRNA sense strand
gcaguaacacagcucuuaa

SEQ ID NO: 1654767 - RNA, 19 nt, Homo sapiens
  misc_RNA (1)...(19): siRNA sense strand
ccgagaaauuggcuuauau

SEQ ID NO: 1654768 - RNA, 19 nt, Homo sapiens
  misc_RNA (1)...(19): siRNA sense strand
gcaguagcuuggaguaauc

SEQ ID NO: 1654769 - RNA, 19 nt, Homo sapiens
  misc_RNA (1)...(19): siRNA sense strand
aaaccugaccacaugauua

SEQ ID NO: 1654770 - RNA, 19 nt, Homo sapiens
  misc_RNA (1)...(19): siRNA sense strand
caacuacucagaucaacaa

SEQ ID NO: 1654771 - RNA, 19 nt, Homo sapiens
  misc_RNA (1)...(19): siRNA sense strand
caaagcauuucuugauagu

SEQ ID NO: 1654772 - RNA, 19 nt, Homo sapiens
  misc_RNA (1)...(19): siRNA sense strand
aggaggcaauugagcauua

SEQ ID NO: 1654773 - RNA, 19 nt, Homo sapiens
  misc_RNA (1)...(19): siRNA sense strand
gagaacagggaaacauuga

SEQ ID NO: 1654774 - RNA, 19 nt, Homo sapiens
  misc_RNA (1)...(19): siRNA sense strand
gaacagggaaacauugaag

SEQ ID NO: 1654775 - RNA, 19 nt, Homo sapiens
  misc_RNA (1)...(19): siRNA sense strand
uuagcacucuggcaauuaa

SEQ ID NO: 1654776 - RNA, 19 nt, Homo sapiens
  misc_RNA (1)...(19): siRNA sense strand
uuaugcagcuggcaacaaa

SEQ ID NO: 1654777 - RNA, 19 nt, Homo sapiens
  misc_RNA (1)...(19): siRNA sense strand
gaagcagaagauuguuaua

SEQ ID NO: 1654778 - RNA, 19 nt, Homo sapiens
  misc_RNA (1)...(19): siRNA sense strand
cuacagaugugggagcauu

SEQ ID NO: 1654779 - RNA, 19 nt, Homo sapiens
  misc_RNA (1)...(19): siRNA sense strand
guaacacagcucuuaauau

SEQ ID NO: 1654780 - RNA, 19 nt, Homo sapiens
  misc_RNA (1)...(19): siRNA sense strand
uaagggcgcucgaaaugag

SEQ ID NO: 1654781 - RNA, 19 nt, Homo sapiens
  misc_RNA (1)...(19): siRNA sense strand
ucgaaucaguccuaccuuu

SEQ ID NO: 1654782 - RNA, 19 nt, Homo sapiens
  misc_RNA (1)...(19): siRNA sense strand
aagcucugaugcauuauaa

SEQ ID NO: 1654783 - RNA, 19 nt, Homo sapiens
  misc_RNA (1)...(19): siRNA sense strand
gaagaaguuggucaguauu

SEQ ID NO: 1654784 - RNA, 19 nt, Homo sapiens
  misc_RNA (1)...(19): siRNA sense strand
agaagcaguuauugaaaug

SEQ ID NO: 1654785 - RNA, 19 nt, Homo sapiens
  misc_RNA (1)...(19): siRNA sense strand
agaagccaaucauuucauu

SEQ ID NO: 1654786 - RNA, 19 nt, Homo sapiens
  misc_RNA (1)...(19): siRNA sense strand
aaucuggcuuccauucaua

SEQ ID NO: 1654787 - RNA, 19 nt, Homo sapiens
  misc_RNA (1)...(19): siRNA sense strand
gggaacugaucuagaauac

SEQ ID NO: 1654788 - RNA, 19 nt, Homo sapiens
  misc_RNA (1)...(19): siRNA sense strand
cugaauaaccuagccaaua

SEQ ID NO: 1654789 - RNA, 19 nt, Homo sapiens
  misc_RNA (1)...(19): siRNA sense strand
gcaacaaaccugaccacau

SEQ ID NO: 1654790 - RNA, 19 nt, Homo sapiens
  misc_RNA (1)...(19): siRNA sense strand
agacaauacuggugugcuu

SEQ ID NO: 1654791 - RNA, 19 nt, Homo sapiens
  misc_RNA (1)...(19): siRNA sense strand
caucccagcucacuugcuu

SEQ ID NO: 1654792 - RNA, 19 nt, Homo sapiens
  misc_RNA (1)...(19): siRNA sense strand
cgaggacagauucaaauaa

SEQ ID NO: 1654793 - RNA, 19 nt, Homo sapiens
  misc_RNA (1)...(19): siRNA sense strand
aagaugaaguguccugaug

SEQ ID NO: 1654794 - RNA, 19 nt, Homo sapiens
  misc_RNA (1)...(19): siRNA sense strand
guuggcacaucgagaauau

SEQ ID NO: 1654795 - RNA, 19 nt, Homo sapiens
  misc_RNA (1)...(19): siRNA sense strand
ggaggcaauugagcauuau

SEQ ID NO: 1654796 - RNA, 19 nt, Homo sapiens
  misc_RNA (1)...(19): siRNA sense strand
caaacaauacacaauggaa

SEQ ID NO: 1654797 - RNA, 19 nt, Homo sapiens
  misc_RNA (1)...(19): siRNA sense strand
gcaugcagcucuggagaca

SEQ ID NO: 1654798 - RNA, 19 nt, Homo sapiens
  misc_RNA (1)...(19): siRNA sense strand
gcaguauuccgagaaauug

SEQ ID NO: 1654799 - RNA, 19 nt, Homo sapiens
  misc_RNA (1)...(19): siRNA sense strand
ucacugaucaggaaacuuc

SEQ ID NO: 1654800 - RNA, 19 nt, Homo sapiens
  misc_RNA (1)...(19): siRNA sense strand
cagaagcuuauucgaauuu

SEQ ID NO: 1654801 - RNA, 19 nt, Homo sapiens
  misc_RNA (1)...(19): siRNA sense strand
gcagaagccaaucauuuca

SEQ ID NO: 1654802 - RNA, 19 nt, Homo sapiens
  misc_RNA (1)...(19): siRNA sense strand
gcuugcaauucaucacuuu

SEQ ID NO: 1654803 - RNA, 19 nt, Homo sapiens
  misc_RNA (1)...(19): siRNA sense strand
ucucugcucuucaguacaa

SEQ ID NO: 1654804 - RNA, 19 nt, Homo sapiens
  misc_RNA (1)...(19): siRNA sense strand
guaaagcauuagaagucuu

SEQ ID NO: 1654805 - RNA, 19 nt, Homo sapiens
  misc_RNA (1)...(19): siRNA sense strand
uagguugucuugagcuuau

SEQ ID NO: 1654806 - RNA, 19 nt, Homo sapiens
  misc_RNA (1)...(19): siRNA sense strand
uauuguaacuuggcucauu

SEQ ID NO: 1654807 - RNA, 19 nt, Homo sapiens
  misc_RNA (1)...(19): siRNA sense strand
ggcagaagccaaucauuuc

SEQ ID NO: 1654808 - RNA, 19 nt, Homo sapiens
  misc_RNA (1)...(19): siRNA sense strand
gcaugcacaauccugauaa

SEQ ID NO: 1654809 - RNA, 19 nt, Homo sapiens
  misc_RNA (1)...(19): siRNA sense strand
ugaagcguguucccaauag

SEQ ID NO: 1654810 - RNA, 19 nt, Homo sapiens
  misc_RNA (1)...(19): siRNA sense strand
uaaccacccguucucagua

SEQ ID NO: 1654811 - RNA, 19 nt, Homo sapiens
  misc_RNA (1)...(19): siRNA sense strand
ugagcaguauuccgagaaa

SEQ ID NO: 1654812 - RNA, 19 nt, Homo sapiens
  misc_RNA (1)...(19): siRNA sense strand
gaaccuaauauucaacagu

SEQ ID NO: 1654813 - RNA, 19 nt, Homo sapiens
  misc_RNA (1)...(19): siRNA sense strand
ggacuggcaacuacucaga

SEQ ID NO: 1654814 - RNA, 19 nt, Homo sapiens
  misc_RNA (1)...(19): siRNA sense strand
ggacagaucugcucacuuu

SEQ ID NO: 1654815 - RNA, 19 nt, Homo sapiens
  misc_RNA (1)...(19): siRNA sense strand
ggcagaagcuuauucgaau

SEQ ID NO: 1654816 - RNA, 19 nt, Homo sapiens
  misc_RNA (1)...(19): siRNA sense strand
gcagaagcuuauucgaauu

SEQ ID NO: 1654817 - RNA, 19 nt, Homo sapiens
  misc_RNA (1)...(19): siRNA sense strand
cgacaugcauugcgucuca

SEQ ID NO: 1654818 - RNA, 19 nt, Homo sapiens
  misc_RNA (1)...(19): siRNA sense strand
ucucaaaccugauuucauc

SEQ ID NO: 1654819 - RNA, 19 nt, Homo sapiens
  misc_RNA (1)...(19): siRNA sense strand
gacaagagccagacaauac

SEQ ID NO: 1654820 - RNA, 19 nt, Homo sapiens
  misc_RNA (1)...(19): siRNA sense strand
gggaauguguacaaggaaa

SEQ ID NO: 1654821 - RNA, 19 nt, Homo sapiens
  misc_RNA (1)...(19): siRNA sense strand
aggaggcaauugagcauua

SEQ ID NO: 1654822 - RNA, 19 nt, Homo sapiens
  misc_RNA (1)...(19): siRNA sense strand
uuagcacucuggcaauuaa

SEQ ID NO: 1654823 - RNA, 19 nt, Homo sapiens
  misc_RNA (1)...(19): siRNA sense strand
agacaauacuggugugcuu

SEQ ID NO: 1654824 - RNA, 19 nt, Homo sapiens
  misc_RNA (1)...(19): siRNA sense strand
guuggcacaucgagaauau

SEQ ID NO: 1654825 - RNA, 19 nt, Homo sapiens
  misc_RNA (1)...(19): siRNA sense strand
gcaugcagcucuggagaca

SEQ ID NO: 1654826 - RNA, 19 nt, Homo sapiens
  misc_RNA (1)...(19): siRNA sense strand
ucucugcucuucaguacaa

SEQ ID NO: 1654827 - RNA, 19 nt, Homo sapiens
  misc_RNA (1)...(19): siRNA sense strand
ggaggcaauugagcauuau

SEQ ID NO: 1654828 - RNA, 19 nt, Homo sapiens
  misc_RNA (1)...(19): siRNA sense strand
cagaagcuuauucgaauuu

SEQ ID NO: 1654829 - RNA, 19 nt, Homo sapiens
  misc_RNA (1)...(19): siRNA sense strand
gagacaagagccagacaau

SEQ ID NO: 1654830 - RNA, 19 nt, Homo sapiens
  misc_RNA (1)...(19): siRNA sense strand
cugauuucaucgaugguua

SEQ ID NO: 1654831 - RNA, 19 nt, Homo sapiens
  misc_RNA (1)...(19): siRNA sense strand
gucgaaggcuggacagauc

SEQ ID NO: 1654832 - RNA, 19 nt, Homo sapiens
  misc_RNA (1)...(19): siRNA sense strand
agacaagagccagacaaua

SEQ ID NO: 1654833 - RNA, 19 nt, Homo sapiens
  misc_RNA (1)...(19): siRNA sense strand
gaauaucaggcaggagauu

SEQ ID NO: 1654834 - RNA, 19 nt, Homo sapiens
  misc_RNA (1)...(19): siRNA sense strand
gguagcagcgggugacaug

SEQ ID NO: 1654835 - RNA, 19 nt, Homo sapiens
  misc_RNA (1)...(19): siRNA sense strand
caaaccugauuucaucgau

SEQ ID NO: 1654836 - RNA, 19 nt, Homo sapiens
  misc_RNA (1)...(19): siRNA sense strand
gaagcuuauucgaauuugg

SEQ ID NO: 1654837 - RNA, 19 nt, Homo sapiens
  misc_RNA (1)...(19): siRNA sense strand
aguacaagcuuacgucucu

SEQ ID NO: 1654838 - RNA, 19 nt, Homo sapiens
  misc_RNA (1)...(19): siRNA sense strand
ggagacaagagccagacaa

SEQ ID NO: 1654839 - RNA, 19 nt, Homo sapiens
  misc_RNA (1)...(19): siRNA sense strand
ugaguuggcacaucgagaa

SEQ ID NO: 1654840 - RNA, 19 nt, Homo sapiens
  misc_RNA (1)...(19): siRNA sense strand
uggcagaagcuuauucgaa

SEQ ID NO: 1654841 - RNA, 19 nt, Homo sapiens
  misc_RNA (1)...(19): siRNA sense strand
gaauguguacaaggaaaga

SEQ ID NO: 1654842 - RNA, 19 nt, Homo sapiens
  misc_RNA (1)...(19): siRNA sense strand
gcacucuggcaauuaaaca

SEQ ID NO: 1654843 - RNA, 19 nt, Homo sapiens
  misc_RNA (1)...(19): siRNA sense strand
gacaauacuggugugcuuu

SEQ ID NO: 1654844 - RNA, 19 nt, Homo sapiens
  misc_RNA (1)...(19): siRNA sense strand
ggugugcuuuuauuacuuu

SEQ ID NO: 1654845 - RNA, 19 nt, Homo sapiens
  misc_RNA (1)...(19): siRNA sense strand
gauuucaucgaugguuaua

SEQ ID NO: 1654846 - RNA, 19 nt, Homo sapiens
  misc_RNA (1)...(19): siRNA sense strand
caaggaaagagggcaguug

SEQ ID NO: 1654847 - RNA, 19 nt, Homo sapiens
  misc_RNA (1)...(19): siRNA sense strand
gcuuacgucucugcucuuc

SEQ ID NO: 1654848 - RNA, 19 nt, Homo sapiens
  misc_RNA (1)...(19): siRNA sense strand
caauacuggugugcuuuua

SEQ ID NO: 1654849 - RNA, 19 nt, Homo sapiens
  misc_RNA (1)...(19): siRNA sense strand
gcaggaggcaauugagcau

SEQ ID NO: 1654850 - RNA, 19 nt, Homo sapiens
  misc_RNA (1)...(19): siRNA sense strand
uuacgucucugcucuucag

SEQ ID NO: 1654851 - RNA, 19 nt, Homo sapiens
  misc_RNA (1)...(19): siRNA sense strand
ggaauguguacaaggaaag

SEQ ID NO: 1654852 - RNA, 19 nt, Homo sapiens
  misc_RNA (1)...(19): siRNA sense strand
gacagaucugcucacuuua

SEQ ID NO: 1654853 - RNA, 19 nt, Homo sapiens
  misc_RNA (1)...(19): siRNA sense strand
cgucucugcucuucaguac

SEQ ID NO: 1654854 - RNA, 19 nt, Homo sapiens
  misc_RNA (1)...(19): siRNA sense strand
cuuuagcacucuggcaauu

SEQ ID NO: 1654855 - RNA, 19 nt, Homo sapiens
  misc_RNA (1)...(19): siRNA sense strand
acagaucugcucacuuuag

SEQ ID NO: 1654856 - RNA, 19 nt, Homo sapiens
  misc_RNA (1)...(19): siRNA sense strand
agaagcuuauucgaauuug

SEQ ID NO: 1654857 - RNA, 19 nt, Homo sapiens
  misc_RNA (1)...(19): siRNA sense strand
uggcacaucgagaauauca

SEQ ID NO: 1654858 - RNA, 19 nt, Homo sapiens
  misc_RNA (1)...(19): siRNA sense strand
cagaucugcucacuuuagc

SEQ ID NO: 1654859 - RNA, 19 nt, Homo sapiens
  misc_RNA (1)...(19): siRNA sense strand
caagagccagacaauacug

SEQ ID NO: 1654860 - RNA, 19 nt, Homo sapiens
  misc_RNA (1)...(19): siRNA sense strand
augcagcucuggagacaag

SEQ ID NO: 1654861 - RNA, 19 nt, Homo sapiens
  misc_RNA (1)...(19): siRNA sense strand
ggacagaucugcucacuuu

SEQ ID NO: 1654862 - RNA, 19 nt, Homo sapiens
  misc_RNA (1)...(19): siRNA sense strand
gcacaauccugauaaauuu

SEQ ID NO: 1654863 - RNA, 19 nt, Homo sapiens
  misc_RNA (1)...(19): siRNA sense strand
gcaguucgcuuguaucgua

SEQ ID NO: 1654864 - RNA, 19 nt, Homo sapiens
  misc_RNA (1)...(19): siRNA sense strand
uaacacagcucuuaauaug

SEQ ID NO: 1654865 - RNA, 19 nt, Homo sapiens
  misc_RNA (1)...(19): siRNA sense strand
caacaaaccugaccacaug

SEQ ID NO: 1654866 - RNA, 19 nt, Homo sapiens
  misc_RNA (1)...(19): siRNA sense strand
gcacggcucugaaacuuaa

SEQ ID NO: 1654867 - RNA, 19 nt, Homo sapiens
  misc_RNA (1)...(19): siRNA sense strand
cuacucagaucaacaauaa

SEQ ID NO: 1654868 - RNA, 19 nt, Homo sapiens
  misc_RNA (1)...(19): siRNA sense strand
gcugaugccuacucuaaua

SEQ ID NO: 1654869 - RNA, 19 nt, Homo sapiens
  misc_RNA (1)...(19): siRNA sense strand
ugaauaaccuagccaauau

SEQ ID NO: 1654870 - RNA, 19 nt, Homo sapiens
  misc_RNA (1)...(19): siRNA sense strand
caaacuuucuggaugcuua

SEQ ID NO: 1654871 - RNA, 19 nt, Homo sapiens
  misc_RNA (1)...(19): siRNA sense strand
uaaaggagaugcaggaugu

SEQ ID NO: 1654872 - RNA, 19 nt, Homo sapiens
  misc_RNA (1)...(19): siRNA sense strand
gcugggaacugaucuagaa

SEQ ID NO: 1654873 - RNA, 19 nt, Homo sapiens
  misc_RNA (1)...(19): siRNA sense strand
aggaagcucugaugcauua

SEQ ID NO: 1654874 - RNA, 19 nt, Homo sapiens
  misc_RNA (1)...(19): siRNA sense strand
gaacugaucuagaauaccu

SEQ ID NO: 1654875 - RNA, 19 nt, Homo sapiens
  misc_RNA (1)...(19): siRNA sense strand
gcaauggacuggcaacuac

SEQ ID NO: 1654876 - RNA, 19 nt, Homo sapiens
  misc_RNA (1)...(19): siRNA sense strand
ugaagaaguuggucaguau

SEQ ID NO: 1654877 - RNA, 19 nt, Homo sapiens
  misc_RNA (1)...(19): siRNA sense strand
uauuguggcugaccaguua

SEQ ID NO: 1654878 - RNA, 19 nt, Homo sapiens
  misc_RNA (1)...(19): siRNA sense strand
ggaguaaucuuggcugugu

SEQ ID NO: 1654879 - RNA, 19 nt, Homo sapiens
  misc_RNA (1)...(19): siRNA sense strand
aauuugagguguucuguua

SEQ ID NO: 1654880 - RNA, 19 nt, Homo sapiens
  misc_RNA (1)...(19): siRNA sense strand
ggcagaagcuuauucgaau

SEQ ID NO: 1654881 - RNA, 19 nt, Homo sapiens
  misc_RNA (1)...(19): siRNA sense strand
gaaacacucuaaaggagau

SEQ ID NO: 1654882 - RNA, 19 nt, Homo sapiens
  misc_RNA (1)...(19): siRNA sense strand
ggaaucauccuacuucuca

SEQ ID NO: 1654883 - RNA, 19 nt, Homo sapiens
  misc_RNA (1)...(19): siRNA sense strand
gcagaagcuuauucgaauu

SEQ ID NO: 1654884 - RNA, 19 nt, Homo sapiens
  misc_RNA (1)...(19): siRNA sense strand
gcaucgaccucaaagcauu

SEQ ID NO: 1654885 - RNA, 19 nt, Homo sapiens
  misc_RNA (1)...(19): siRNA sense strand
uaaccuagccaauaucaaa

SEQ ID NO: 1654886 - RNA, 19 nt, Homo sapiens
  misc_RNA (1)...(19): siRNA sense strand
ggcaaagucuggaagcaaa

SEQ ID NO: 1654887 - RNA, 19 nt, Homo sapiens
  misc_RNA (1)...(19): siRNA sense strand
cgacaugcauugcgucuca

SEQ ID NO: 1654888 - RNA, 19 nt, Homo sapiens
  misc_RNA (1)...(19): siRNA sense strand
ggacagauucaaauaacaa

SEQ ID NO: 1654889 - RNA, 19 nt, Homo sapiens
  misc_RNA (1)...(19): siRNA sense strand
gcacaaacuuccgagugaa

SEQ ID NO: 1654890 - RNA, 19 nt, Homo sapiens
  misc_RNA (1)...(19): siRNA sense strand
ucucaaaccugauuucauc

SEQ ID NO: 1654891 - RNA, 19 nt, Homo sapiens
  misc_RNA (1)...(19): siRNA sense strand
caucguauacuguaacuuu

SEQ ID NO: 1654892 - RNA, 19 nt, Homo sapiens
  misc_RNA (1)...(19): siRNA sense strand
cagaagcaguuauugaaau

SEQ ID NO: 1654893 - RNA, 19 nt, Homo sapiens
  misc_RNA (1)...(19): siRNA sense strand
ggcacaaacuuccgaguga

SEQ ID NO: 1654894 - RNA, 19 nt, Homo sapiens
  misc_RNA (1)...(19): siRNA sense strand
gcaggaagcucugaugcau

SEQ ID NO: 1654895 - RNA, 19 nt, Homo sapiens
  misc_RNA (1)...(19): siRNA sense strand
caaccgaacuuugcaguag

SEQ ID NO: 1654896 - RNA, 19 nt, Homo sapiens
  misc_RNA (1)...(19): siRNA sense strand
gauuaagccuguugaaguc

SEQ ID NO: 1654897 - RNA, 19 nt, Homo sapiens
  misc_RNA (1)...(19): siRNA sense strand
gaucuagaauaccugaaga

SEQ ID NO: 1654898 - RNA, 19 nt, Homo sapiens
  misc_RNA (1)...(19): siRNA sense strand
gucuugagcuuauugcuaa

SEQ ID NO: 1654899 - RNA, 19 nt, Homo sapiens
  misc_RNA (1)...(19): siRNA sense strand
gaggacagauucaaauaac

SEQ ID NO: 1654900 - RNA, 19 nt, Homo sapiens
  misc_RNA (1)...(19): siRNA sense strand
cauccuacuucucaccuua

SEQ ID NO: 1654901 - RNA, 19 nt, Homo sapiens
  misc_RNA (1)...(19): siRNA sense strand
ggcaaccugugcuuagaua

SEQ ID NO: 1654902 - RNA, 19 nt, Homo sapiens
  misc_RNA (1)...(19): siRNA sense strand
gaauauuccagaagccaua

SEQ ID NO: 1654903 - RNA, 19 nt, Homo sapiens
  misc_RNA (1)...(19): siRNA sense strand
aaauugacccuucuacuuu

SEQ ID NO: 1654904 - RNA, 19 nt, Homo sapiens
  misc_RNA (1)...(19): siRNA sense strand
gcagaagcaguuauugaaa

SEQ ID NO: 1654905 - RNA, 19 nt, Homo sapiens
  misc_RNA (1)...(19): siRNA sense strand
ggaauucauauccuuguaa

SEQ ID NO: 1654906 - RNA, 19 nt, Homo sapiens
  misc_RNA (1)...(19): siRNA sense strand
gacaagagccagacaauac

SEQ ID NO: 1654907 - RNA, 19 nt, Homo sapiens
  misc_RNA (1)...(19): siRNA sense strand
gcucuuaauaugccuguua

SEQ ID NO: 1654908 - RNA, 19 nt, Homo sapiens
  misc_RNA (1)...(19): siRNA sense strand
gggaauguguacaaggaaa

SEQ ID NO: 1654909 - RNA, 19 nt, Homo sapiens
  misc_RNA (1)...(19): siRNA sense strand
gaugaaguguccugaugga

SEQ ID NO: 1654910 - RNA, 19 nt, Homo sapiens
  misc_RNA (1)...(19): siRNA sense strand
uaaggaggcuauucgaauc

SEQ ID NO: 1654911 - RNA, 19 nt, Homo sapiens
  misc_RNA (1)...(19): siRNA sense strand
gaagcucugaugcauuaua

SEQ ID NO: 1654912 - RNA, 19 nt, Homo sapiens
  misc_RNA (1)...(19): siRNA sense strand
gcucauugccugcagauug

SEQ ID NO: 1654913 - RNA, 19 nt, Homo sapiens
  misc_RNA (1)...(19): siRNA sense strand
gcaguaacacagcucuuaa

SEQ ID NO: 1654914 - RNA, 19 nt, Homo sapiens
  misc_RNA (1)...(19): siRNA sense strand
ccgagaaauuggcuuauau

SEQ ID NO: 1654915 - RNA, 19 nt, Homo sapiens
  misc_RNA (1)...(19): siRNA sense strand
gcaguagcuuggaguaauc

SEQ ID NO: 1654916 - RNA, 19 nt, Homo sapiens
  misc_RNA (1)...(19): siRNA sense strand
aaaccugaccacaugauua

SEQ ID NO: 1654917 - RNA, 19 nt, Homo sapiens
  misc_RNA (1)...(19): siRNA sense strand
caacuacucagaucaacaa

SEQ ID NO: 1654918 - RNA, 19 nt, Homo sapiens
  misc_RNA (1)...(19): siRNA sense strand
caaagcauuucuugauagu

SEQ ID NO: 1654919 - RNA, 19 nt, Homo sapiens
  misc_RNA (1)...(19): siRNA sense strand
aggaggcaauugagcauua

SEQ ID NO: 1654920 - RNA, 19 nt, Homo sapiens
  misc_RNA (1)...(19): siRNA sense strand
gagaacagggaaacauuga

SEQ ID NO: 1654921 - RNA, 19 nt, Homo sapiens
  misc_RNA (1)...(19): siRNA sense strand
gaacagggaaacauugaag

SEQ ID NO: 1654922 - RNA, 19 nt, Homo sapiens
  misc_RNA (1)...(19): siRNA sense strand
uuagcacucuggcaauuaa

SEQ ID NO: 1654923 - RNA, 19 nt, Homo sapiens
  misc_RNA (1)...(19): siRNA sense strand
uuaugcagcuggcaacaaa

SEQ ID NO: 1654924 - RNA, 19 nt, Homo sapiens
  misc_RNA (1)...(19): siRNA sense strand
gaagcagaagauuguuaua

SEQ ID NO: 1654925 - RNA, 19 nt, Homo sapiens
  misc_RNA (1)...(19): siRNA sense strand
cuacagaugugggagcauu

SEQ ID NO: 1654926 - RNA, 19 nt, Homo sapiens
  misc_RNA (1)...(19): siRNA sense strand
guaacacagcucuuaauau

SEQ ID NO: 1654927 - RNA, 19 nt, Homo sapiens
  misc_RNA (1)...(19): siRNA sense strand
uaagggcgcucgaaaugag

SEQ ID NO: 1654928 - RNA, 19 nt, Homo sapiens
  misc_RNA (1)...(19): siRNA sense strand
ucgaaucaguccuaccuuu

SEQ ID NO: 1654929 - RNA, 19 nt, Homo sapiens
  misc_RNA (1)...(19): siRNA sense strand
aagcucugaugcauuauaa

SEQ ID NO: 1654930 - RNA, 19 nt, Homo sapiens
  misc_RNA (1)...(19): siRNA sense strand
gaagaaguuggucaguauu

SEQ ID NO: 1654931 - RNA, 19 nt, Homo sapiens
  misc_RNA (1)...(19): siRNA sense strand
agaagcaguuauugaaaug

SEQ ID NO: 1654932 - RNA, 19 nt, Homo sapiens
  misc_RNA (1)...(19): siRNA sense strand
agaagccaaucauuucauu

SEQ ID NO: 1654933 - RNA, 19 nt, Homo sapiens
  misc_RNA (1)...(19): siRNA sense strand
aaucuggcuuccauucaua

SEQ ID NO: 1654934 - RNA, 19 nt, Homo sapiens
  misc_RNA (1)...(19): siRNA sense strand
gggaacugaucuagaauac

SEQ ID NO: 1654935 - RNA, 19 nt, Homo sapiens
  misc_RNA (1)...(19): siRNA sense strand
cugaauaaccuagccaaua

SEQ ID NO: 1654936 - RNA, 19 nt, Homo sapiens
  misc_RNA (1)...(19): siRNA sense strand
gcaacaaaccugaccacau

SEQ ID NO: 1654937 - RNA, 19 nt, Homo sapiens
  misc_RNA (1)...(19): siRNA sense strand
agacaauacuggugugcuu

SEQ ID NO: 1654938 - RNA, 19 nt, Homo sapiens
  misc_RNA (1)...(19): siRNA sense strand
caucccagcucacuugcuu

SEQ ID NO: 1654939 - RNA, 19 nt, Homo sapiens
  misc_RNA (1)...(19): siRNA sense strand
cgaggacagauucaaauaa

SEQ ID NO: 1654940 - RNA, 19 nt, Homo sapiens
  misc_RNA (1)...(19): siRNA sense strand
aagaugaaguguccugaug

SEQ ID NO: 1654941 - RNA, 19 nt, Homo sapiens
  misc_RNA (1)...(19): siRNA sense strand
guuggcacaucgagaauau

SEQ ID NO: 1654942 - RNA, 19 nt, Homo sapiens
  misc_RNA (1)...(19): siRNA sense strand
ggaggcaauugagcauuau

SEQ ID NO: 1654943 - RNA, 19 nt, Homo sapiens
  misc_RNA (1)...(19): siRNA sense strand
caaacaauacacaauggaa

SEQ ID NO: 1654944 - RNA, 19 nt, Homo sapiens
  misc_RNA (1)...(19): siRNA sense strand
gcaugcagcucuggagaca

SEQ ID NO: 1654945 - RNA, 19 nt, Homo sapiens
  misc_RNA (1)...(19): siRNA sense strand
gcaguauuccgagaaauug

SEQ ID NO: 1654946 - RNA, 19 nt, Homo sapiens
  misc_RNA (1)...(19): siRNA sense strand
ucacugaucaggaaacuuc

SEQ ID NO: 1654947 - RNA, 19 nt, Homo sapiens
  misc_RNA (1)...(19): siRNA sense strand
cagaagcuuauucgaauuu

SEQ ID NO: 1654948 - RNA, 19 nt, Homo sapiens
  misc_RNA (1)...(19): siRNA sense strand
gcagaagccaaucauuuca

SEQ ID NO: 1654949 - RNA, 19 nt, Homo sapiens
  misc_RNA (1)...(19): siRNA sense strand
gcuugcaauucaucacuuu

SEQ ID NO: 1654950 - RNA, 19 nt, Homo sapiens
  misc_RNA (1)...(19): siRNA sense strand
ucucugcucuucaguacaa

SEQ ID NO: 1654951 - RNA, 19 nt, Homo sapiens
  misc_RNA (1)...(19): siRNA sense strand
guaaagcauuagaagucuu

SEQ ID NO: 1654952 - RNA, 19 nt, Homo sapiens
  misc_RNA (1)...(19): siRNA sense strand
uagguugucuugagcuuau

SEQ ID NO: 1654953 - RNA, 19 nt, Homo sapiens
  misc_RNA (1)...(19): siRNA sense strand
uauuguaacuuggcucauu

SEQ ID NO: 1654954 - RNA, 19 nt, Homo sapiens
  misc_RNA (1)...(19): siRNA sense strand
ggcagaagccaaucauuuc

SEQ ID NO: 1654955 - RNA, 19 nt, Homo sapiens
  misc_RNA (1)...(19): siRNA sense strand
gcaugcacaauccugauaa

SEQ ID NO: 1654956 - RNA, 19 nt, Homo sapiens
  misc_RNA (1)...(19): siRNA sense strand
ugaagcguguucccaauag

SEQ ID NO: 1654957 - RNA, 19 nt, Homo sapiens
  misc_RNA (1)...(19): siRNA sense strand
uaaccacccguucucagua

SEQ ID NO: 1654958 - RNA, 19 nt, Homo sapiens
  misc_RNA (1)...(19): siRNA sense strand
ugagcaguauuccgagaaa

SEQ ID NO: 1654959 - RNA, 19 nt, Homo sapiens
  misc_RNA (1)...(19): siRNA sense strand
gaaccuaauauucaacagu

SEQ ID NO: 1654960 - RNA, 19 nt, Homo sapiens
  misc_RNA (1)...(19): siRNA sense strand
ggacuggcaacuacucaga

SEQ ID NO: 1654961 - RNA, 19 nt, Homo sapiens
  misc_RNA (1)...(19): siRNA sense strand
ggacagaucugcucacuuu

SEQ ID NO: 1654962 - RNA, 19 nt, Homo sapiens
  misc_RNA (1)...(19): siRNA sense strand
gcacaauccugauaaauuu

SEQ ID NO: 1654963 - RNA, 19 nt, Homo sapiens
  misc_RNA (1)...(19): siRNA sense strand
gcaguucgcuuguaucgua

SEQ ID NO: 1654964 - RNA, 19 nt, Homo sapiens
  misc_RNA (1)...(19): siRNA sense strand
uaacacagcucuuaauaug

SEQ ID NO: 1654965 - RNA, 19 nt, Homo sapiens
  misc_RNA (1)...(19): siRNA sense strand
caacaaaccugaccacaug

SEQ ID NO: 1654966 - RNA, 19 nt, Homo sapiens
  misc_RNA (1)...(19): siRNA sense strand
gcacggcucugaaacuuaa

SEQ ID NO: 1654967 - RNA, 19 nt, Homo sapiens
  misc_RNA (1)...(19): siRNA sense strand
cuacucagaucaacaauaa

SEQ ID NO: 1654968 - RNA, 19 nt, Homo sapiens
  misc_RNA (1)...(19): siRNA sense strand
gcugaugccuacucuaaua

SEQ ID NO: 1654969 - RNA, 19 nt, Homo sapiens
  misc_RNA (1)...(19): siRNA sense strand
ugaauaaccuagccaauau

SEQ ID NO: 1654970 - RNA, 19 nt, Homo sapiens
  misc_RNA (1)...(19): siRNA sense strand
caaacuuucuggaugcuua

SEQ ID NO: 1654971 - RNA, 19 nt, Homo sapiens
  misc_RNA (1)...(19): siRNA sense strand
uaaaggagaugcaggaugu

SEQ ID NO: 1654972 - RNA, 19 nt, Homo sapiens
  misc_RNA (1)...(19): siRNA sense strand
gcugggaacugaucuagaa

SEQ ID NO: 1654973 - RNA, 19 nt, Homo sapiens
  misc_RNA (1)...(19): siRNA sense strand
aggaagcucugaugcauua

SEQ ID NO: 1654974 - RNA, 19 nt, Homo sapiens
  misc_RNA (1)...(19): siRNA sense strand
gaacugaucuagaauaccu

SEQ ID NO: 1654975 - RNA, 19 nt, Homo sapiens
  misc_RNA (1)...(19): siRNA sense strand
gcaauggacuggcaacuac

SEQ ID NO: 1654976 - RNA, 19 nt, Homo sapiens
  misc_RNA (1)...(19): siRNA sense strand
ugaagaaguuggucaguau

SEQ ID NO: 1654977 - RNA, 19 nt, Homo sapiens
  misc_RNA (1)...(19): siRNA sense strand
uauuguggcugaccaguua

SEQ ID NO: 1654978 - RNA, 19 nt, Homo sapiens
  misc_RNA (1)...(19): siRNA sense strand
ggaguaaucuuggcugugu

SEQ ID NO: 1654979 - RNA, 19 nt, Homo sapiens
  misc_RNA (1)...(19): siRNA sense strand
aauuugagguguucuguua

SEQ ID NO: 1654980 - RNA, 19 nt, Homo sapiens
  misc_RNA (1)...(19): siRNA sense strand
ggcagaagcuuauucgaau

SEQ ID NO: 1654981 - RNA, 19 nt, Homo sapiens
  misc_RNA (1)...(19): siRNA sense strand
gaaacacucuaaaggagau

SEQ ID NO: 1654982 - RNA, 19 nt, Homo sapiens
  misc_RNA (1)...(19): siRNA sense strand
ggaaucauccuacuucuca

SEQ ID NO: 1654983 - RNA, 19 nt, Homo sapiens
  misc_RNA (1)...(19): siRNA sense strand
gcagaagcuuauucgaauu

SEQ ID NO: 1654984 - RNA, 19 nt, Homo sapiens
  misc_RNA (1)...(19): siRNA sense strand
gcaucgaccucaaagcauu

SEQ ID NO: 1654985 - RNA, 19 nt, Homo sapiens
  misc_RNA (1)...(19): siRNA sense strand
uaaccuagccaauaucaaa

SEQ ID NO: 1654986 - RNA, 19 nt, Homo sapiens
  misc_RNA (1)...(19): siRNA sense strand
ggcaaagucuggaagcaaa

SEQ ID NO: 1654987 - RNA, 19 nt, Homo sapiens
  misc_RNA (1)...(19): siRNA sense strand
cgacaugcauugcgucuca

SEQ ID NO: 1654988 - RNA, 19 nt, Homo sapiens
  misc_RNA (1)...(19): siRNA sense strand
ggacagauucaaauaacaa

SEQ ID NO: 1654989 - RNA, 19 nt, Homo sapiens
  misc_RNA (1)...(19): siRNA sense strand
gcacaaacuuccgagugaa

SEQ ID NO: 1654990 - RNA, 19 nt, Homo sapiens
  misc_RNA (1)...(19): siRNA sense strand
ucucaaaccugauuucauc

SEQ ID NO: 1654991 - RNA, 19 nt, Homo sapiens
  misc_RNA (1)...(19): siRNA sense strand
caucguauacuguaacuuu

SEQ ID NO: 1654992 - RNA, 19 nt, Homo sapiens
  misc_RNA (1)...(19): siRNA sense strand
cagaagcaguuauugaaau

SEQ ID NO: 1654993 - RNA, 19 nt, Homo sapiens
  misc_RNA (1)...(19): siRNA sense strand
ggcacaaacuuccgaguga

SEQ ID NO: 1654994 - RNA, 19 nt, Homo sapiens
  misc_RNA (1)...(19): siRNA sense strand
gcaggaagcucugaugcau

SEQ ID NO: 1654995 - RNA, 19 nt, Homo sapiens
  misc_RNA (1)...(19): siRNA sense strand
caaccgaacuuugcaguag

SEQ ID NO: 1654996 - RNA, 19 nt, Homo sapiens
  misc_RNA (1)...(19): siRNA sense strand
gauuaagccuguugaaguc

SEQ ID NO: 1654997 - RNA, 19 nt, Homo sapiens
  misc_RNA (1)...(19): siRNA sense strand
gaucuagaauaccugaaga

SEQ ID NO: 1654998 - RNA, 19 nt, Homo sapiens
  misc_RNA (1)...(19): siRNA sense strand
gucuugagcuuauugcuaa

SEQ ID NO: 1654999 - RNA, 19 nt, Homo sapiens
  misc_RNA (1)...(19): siRNA sense strand
gaggacagauucaaauaac

SEQ ID NO: 1655000 - RNA, 19 nt, Homo sapiens
  misc_RNA (1)...(19): siRNA sense strand
cauccuacuucucaccuua

SEQ ID NO: 1655001 - RNA, 19 nt, Homo sapiens
  misc_RNA (1)...(19): siRNA sense strand
ggcaaccugugcuuagaua

SEQ ID NO: 1655002 - RNA, 19 nt, Homo sapiens
  misc_RNA (1)...(19): siRNA sense strand
gaauauuccagaagccaua

SEQ ID NO: 1655003 - RNA, 19 nt, Homo sapiens
  misc_RNA (1)...(19): siRNA sense strand
aaauugacccuucuacuuu

SEQ ID NO: 1655004 - RNA, 19 nt, Homo sapiens
  misc_RNA (1)...(19): siRNA sense strand
gcagaagcaguuauugaaa

SEQ ID NO: 1655005 - RNA, 19 nt, Homo sapiens
  misc_RNA (1)...(19): siRNA sense strand
ggaauucauauccuuguaa

SEQ ID NO: 1655006 - RNA, 19 nt, Homo sapiens
  misc_RNA (1)...(19): siRNA sense strand
gacaagagccagacaauac

SEQ ID NO: 1655007 - RNA, 19 nt, Homo sapiens
  misc_RNA (1)...(19): siRNA sense strand
gcucuuaauaugccuguua

SEQ ID NO: 1655008 - RNA, 19 nt, Homo sapiens
  misc_RNA (1)...(19): siRNA sense strand
gggaauguguacaaggaaa

SEQ ID NO: 1655009 - RNA, 19 nt, Homo sapiens
  misc_RNA (1)...(19): siRNA sense strand
gaugaaguguccugaugga

SEQ ID NO: 1655010 - RNA, 19 nt, Homo sapiens
  misc_RNA (1)...(19): siRNA sense strand
uaaggaggcuauucgaauc

SEQ ID NO: 1655011 - RNA, 19 nt, Homo sapiens
  misc_RNA (1)...(19): siRNA sense strand
gaagcucugaugcauuaua

SEQ ID NO: 1655012 - RNA, 19 nt, Homo sapiens
  misc_RNA (1)...(19): siRNA sense strand
gcucauugccugcagauug

SEQ ID NO: 1655013 - RNA, 19 nt, Homo sapiens
  misc_RNA (1)...(19): siRNA sense strand
gcaguaacacagcucuuaa

SEQ ID NO: 1655014 - RNA, 19 nt, Homo sapiens
  misc_RNA (1)...(19): siRNA sense strand
ccgagaaauuggcuuauau

SEQ ID NO: 1655015 - RNA, 19 nt, Homo sapiens
  misc_RNA (1)...(19): siRNA sense strand
gcaguagcuuggaguaauc

SEQ ID NO: 1655016 - RNA, 19 nt, Homo sapiens
  misc_RNA (1)...(19): siRNA sense strand
aaaccugaccacaugauua

SEQ ID NO: 1655017 - RNA, 19 nt, Homo sapiens
  misc_RNA (1)...(19): siRNA sense strand
caacuacucagaucaacaa

SEQ ID NO: 1655018 - RNA, 19 nt, Homo sapiens
  misc_RNA (1)...(19): siRNA sense strand
caaagcauuucuugauagu

SEQ ID NO: 1655019 - RNA, 19 nt, Homo sapiens
  misc_RNA (1)...(19): siRNA sense strand
aggaggcaauugagcauua

SEQ ID NO: 1655020 - RNA, 19 nt, Homo sapiens
  misc_RNA (1)...(19): siRNA sense strand
gagaacagggaaacauuga

SEQ ID NO: 1655021 - RNA, 19 nt, Homo sapiens
  misc_RNA (1)...(19): siRNA sense strand
gaacagggaaacauugaag

SEQ ID NO: 1655022 - RNA, 19 nt, Homo sapiens
  misc_RNA (1)...(19): siRNA sense strand
uuagcacucuggcaauuaa

SEQ ID NO: 1655023 - RNA, 19 nt, Homo sapiens
  misc_RNA (1)...(19): siRNA sense strand
uuaugcagcuggcaacaaa

SEQ ID NO: 1655024 - RNA, 19 nt, Homo sapiens
  misc_RNA (1)...(19): siRNA sense strand
gaagcagaagauuguuaua

SEQ ID NO: 1655025 - RNA, 19 nt, Homo sapiens
  misc_RNA (1)...(19): siRNA sense strand
cuacagaugugggagcauu

SEQ ID NO: 1655026 - RNA, 19 nt, Homo sapiens
  misc_RNA (1)...(19): siRNA sense strand
guaacacagcucuuaauau

SEQ ID NO: 1655027 - RNA, 19 nt, Homo sapiens
  misc_RNA (1)...(19): siRNA sense strand
uaagggcgcucgaaaugag

SEQ ID NO: 1655028 - RNA, 19 nt, Homo sapiens
  misc_RNA (1)...(19): siRNA sense strand
ucgaaucaguccuaccuuu

SEQ ID NO: 1655029 - RNA, 19 nt, Homo sapiens
  misc_RNA (1)...(19): siRNA sense strand
aagcucugaugcauuauaa

SEQ ID NO: 1655030 - RNA, 19 nt, Homo sapiens
  misc_RNA (1)...(19): siRNA sense strand
gaagaaguuggucaguauu

SEQ ID NO: 1655031 - RNA, 19 nt, Homo sapiens
  misc_RNA (1)...(19): siRNA sense strand
agaagcaguuauugaaaug

SEQ ID NO: 1655032 - RNA, 19 nt, Homo sapiens
  misc_RNA (1)...(19): siRNA sense strand
agaagccaaucauuucauu

SEQ ID NO: 1655033 - RNA, 19 nt, Homo sapiens
  misc_RNA (1)...(19): siRNA sense strand
aaucuggcuuccauucaua

SEQ ID NO: 1655034 - RNA, 19 nt, Homo sapiens
  misc_RNA (1)...(19): siRNA sense strand
gggaacugaucuagaauac

SEQ ID NO: 1655035 - RNA, 19 nt, Homo sapiens
  misc_RNA (1)...(19): siRNA sense strand
cugaauaaccuagccaaua

SEQ ID NO: 1655036 - RNA, 19 nt, Homo sapiens
  misc_RNA (1)...(19): siRNA sense strand
gcaacaaaccugaccacau

SEQ ID NO: 1655037 - RNA, 19 nt, Homo sapiens
  misc_RNA (1)...(19): siRNA sense strand
agacaauacuggugugcuu

SEQ ID NO: 1655038 - RNA, 19 nt, Homo sapiens
  misc_RNA (1)...(19): siRNA sense strand
caucccagcucacuugcuu

SEQ ID NO: 1655039 - RNA, 19 nt, Homo sapiens
  misc_RNA (1)...(19): siRNA sense strand
cgaggacagauucaaauaa

SEQ ID NO: 1655040 - RNA, 19 nt, Homo sapiens
  misc_RNA (1)...(19): siRNA sense strand
aagaugaaguguccugaug

SEQ ID NO: 1655041 - RNA, 19 nt, Homo sapiens
  misc_RNA (1)...(19): siRNA sense strand
guuggcacaucgagaauau

SEQ ID NO: 1655042 - RNA, 19 nt, Homo sapiens
  misc_RNA (1)...(19): siRNA sense strand
ggaggcaauugagcauuau

SEQ ID NO: 1655043 - RNA, 19 nt, Homo sapiens
  misc_RNA (1)...(19): siRNA sense strand
caaacaauacacaauggaa

SEQ ID NO: 1655044 - RNA, 19 nt, Homo sapiens
  misc_RNA (1)...(19): siRNA sense strand
gcaugcagcucuggagaca

SEQ ID NO: 1655045 - RNA, 19 nt, Homo sapiens
  misc_RNA (1)...(19): siRNA sense strand
gcaguauuccgagaaauug

SEQ ID NO: 1655046 - RNA, 19 nt, Homo sapiens
  misc_RNA (1)...(19): siRNA sense strand
ucacugaucaggaaacuuc

SEQ ID NO: 1655047 - RNA, 19 nt, Homo sapiens
  misc_RNA (1)...(19): siRNA sense strand
cagaagcuuauucgaauuu

SEQ ID NO: 1655048 - RNA, 19 nt, Homo sapiens
  misc_RNA (1)...(19): siRNA sense strand
gcagaagccaaucauuuca

SEQ ID NO: 1655049 - RNA, 19 nt, Homo sapiens
  misc_RNA (1)...(19): siRNA sense strand
gcuugcaauucaucacuuu

SEQ ID NO: 1655050 - RNA, 19 nt, Homo sapiens
  misc_RNA (1)...(19): siRNA sense strand
ucucugcucuucaguacaa

SEQ ID NO: 1655051 - RNA, 19 nt, Homo sapiens
  misc_RNA (1)...(19): siRNA sense strand
guaaagcauuagaagucuu

SEQ ID NO: 1655052 - RNA, 19 nt, Homo sapiens
  misc_RNA (1)...(19): siRNA sense strand
uagguugucuugagcuuau

SEQ ID NO: 1655053 - RNA, 19 nt, Homo sapiens
  misc_RNA (1)...(19): siRNA sense strand
uauuguaacuuggcucauu

SEQ ID NO: 1655054 - RNA, 19 nt, Homo sapiens
  misc_RNA (1)...(19): siRNA sense strand
ggcagaagccaaucauuuc

SEQ ID NO: 1655055 - RNA, 19 nt, Homo sapiens
  misc_RNA (1)...(19): siRNA sense strand
gcaugcacaauccugauaa

SEQ ID NO: 1655056 - RNA, 19 nt, Homo sapiens
  misc_RNA (1)...(19): siRNA sense strand
ugaagcguguucccaauag

SEQ ID NO: 1655057 - RNA, 19 nt, Homo sapiens
  misc_RNA (1)...(19): siRNA sense strand
uaaccacccguucucagua

SEQ ID NO: 1655058 - RNA, 19 nt, Homo sapiens
  misc_RNA (1)...(19): siRNA sense strand
ugagcaguauuccgagaaa

SEQ ID NO: 1655059 - RNA, 19 nt, Homo sapiens
  misc_RNA (1)...(19): siRNA sense strand
gaaccuaauauucaacagu

SEQ ID NO: 1655060 - RNA, 19 nt, Homo sapiens
  misc_RNA (1)...(19): siRNA sense strand
ggacuggcaacuacucaga

SEQ ID NO: 1655061 - RNA, 19 nt, Homo sapiens
  misc_RNA (1)...(19): siRNA sense strand
gaaugcagcuuacuuucuu

SEQ ID NO: 1655062 - RNA, 19 nt, Homo sapiens
  misc_RNA (1)...(19): siRNA sense strand
ucgauuaccugaagaguuu

SEQ ID NO: 1655063 - RNA, 19 nt, Homo sapiens
  misc_RNA (1)...(19): siRNA sense strand
gcacacacauaucacauca

SEQ ID NO: 1655064 - RNA, 19 nt, Homo sapiens
  misc_RNA (1)...(19): siRNA sense strand
ccugaagaguuuagaaaua

SEQ ID NO: 1655065 - RNA, 19 nt, Homo sapiens
  misc_RNA (1)...(19): siRNA sense strand
gcugaugaccugaggauua

SEQ ID NO: 1655066 - RNA, 19 nt, Homo sapiens
  misc_RNA (1)...(19): siRNA sense strand
caaccacacgggagaauua

SEQ ID NO: 1655067 - RNA, 19 nt, Homo sapiens
  misc_RNA (1)...(19): siRNA sense strand
gcagaaugcagcuuacuuu

SEQ ID NO: 1655068 - RNA, 19 nt, Homo sapiens
  misc_RNA (1)...(19): siRNA sense strand
caucgagacuuaccagguu

SEQ ID NO: 1655069 - RNA, 19 nt, Homo sapiens
  misc_RNA (1)...(19): siRNA sense strand
gcaguggcggcuacaaaua

SEQ ID NO: 1655070 - RNA, 19 nt, Homo sapiens
  misc_RNA (1)...(19): siRNA sense strand
ggauuaaccuauggaacuu

SEQ ID NO: 1655071 - RNA, 19 nt, Homo sapiens
  misc_RNA (1)...(19): siRNA sense strand
gaucacagcagccgaguuc

SEQ ID NO: 1655072 - RNA, 19 nt, Homo sapiens
  misc_RNA (1)...(19): siRNA sense strand
ggacaauccggcuguguga

SEQ ID NO: 1655073 - RNA, 19 nt, Homo sapiens
  misc_RNA (1)...(19): siRNA sense strand
gcagcuuacuuucuucugu

SEQ ID NO: 1655074 - RNA, 19 nt, Homo sapiens
  misc_RNA (1)...(19): siRNA sense strand
ccuauggaacuuugaaaua

SEQ ID NO: 1655075 - RNA, 19 nt, Homo sapiens
  misc_RNA (1)...(19): siRNA sense strand
cugaugaccugaggauuaa

SEQ ID NO: 1655076 - RNA, 19 nt, Homo sapiens
  misc_RNA (1)...(19): siRNA sense strand
ucucugaaauuaucucuuc

SEQ ID NO: 1655077 - RNA, 19 nt, Homo sapiens
  misc_RNA (1)...(19): siRNA sense strand
ugacaggcacaccaaauuu

SEQ ID NO: 1655078 - RNA, 19 nt, Homo sapiens
  misc_RNA (1)...(19): siRNA sense strand
gugaagcuguggaaaguca

SEQ ID NO: 1655079 - RNA, 19 nt, Homo sapiens
  misc_RNA (1)...(19): siRNA sense strand
caagcuguguucccucuau

SEQ ID NO: 1655080 - RNA, 19 nt, Homo sapiens
  misc_RNA (1)...(19): siRNA sense strand
cgaguucgauuaccugaag

SEQ ID NO: 1655081 - RNA, 19 nt, Homo sapiens
  misc_RNA (1)...(19): siRNA sense strand
agacuuaccagguucauga

SEQ ID NO: 1655082 - RNA, 19 nt, Homo sapiens
  misc_RNA (1)...(19): siRNA sense strand
gggucggguuguaauauuu

SEQ ID NO: 1655083 - RNA, 19 nt, Homo sapiens
  misc_RNA (1)...(19): siRNA sense strand
ccacacgggagaauuacua

SEQ ID NO: 1655084 - RNA, 19 nt, Homo sapiens
  misc_RNA (1)...(19): siRNA sense strand
gaagauccaagcaacagau

SEQ ID NO: 1655085 - RNA, 19 nt, Homo sapiens
  misc_RNA (1)...(19): siRNA sense strand
cugaagaguuuagaaauag

SEQ ID NO: 1655086 - RNA, 19 nt, Homo sapiens
  misc_RNA (1)...(19): siRNA sense strand
cgagaucagugucgacagu

SEQ ID NO: 1655087 - RNA, 19 nt, Homo sapiens
  misc_RNA (1)...(19): siRNA sense strand
aaagucagcgagcgugaua

SEQ ID NO: 1655088 - RNA, 19 nt, Homo sapiens
  misc_RNA (1)...(19): siRNA sense strand
gaccugaggauuaaccuau

SEQ ID NO: 1655089 - RNA, 19 nt, Homo sapiens
  misc_RNA (1)...(19): siRNA sense strand
gcacauuccagagccauga

SEQ ID NO: 1655090 - RNA, 19 nt, Homo sapiens
  misc_RNA (1)...(19): siRNA sense strand
ggcuacaaauaaccuauau

SEQ ID NO: 1655091 - RNA, 19 nt, Homo sapiens
  misc_RNA (1)...(19): siRNA sense strand
acacacauaucacaucaac

SEQ ID NO: 1655092 - RNA, 19 nt, Homo sapiens
  misc_RNA (1)...(19): siRNA sense strand
ucucuucgauuucggaugu

SEQ ID NO: 1655093 - RNA, 19 nt, Homo sapiens
  misc_RNA (1)...(19): siRNA sense strand
aacgagagcaggagaguaa

SEQ ID NO: 1655094 - RNA, 19 nt, Homo sapiens
  misc_RNA (1)...(19): siRNA sense strand
gaaaagacgagaucagugu

SEQ ID NO: 1655095 - RNA, 19 nt, Homo sapiens
  misc_RNA (1)...(19): siRNA sense strand
ucaggauguucgacagaaa

SEQ ID NO: 1655096 - RNA, 19 nt, Homo sapiens
  misc_RNA (1)...(19): siRNA sense strand
ucacaucaacuccauaucu

SEQ ID NO: 1655097 - RNA, 19 nt, Homo sapiens
  misc_RNA (1)...(19): siRNA sense strand
caguggcggcuacaaauaa

SEQ ID NO: 1655098 - RNA, 19 nt, Homo sapiens
  misc_RNA (1)...(19): siRNA sense strand
ucugggaucucaacaugga

SEQ ID NO: 1655099 - RNA, 19 nt, Homo sapiens
  misc_RNA (1)...(19): siRNA sense strand
agugggagguauaucauga

SEQ ID NO: 1655100 - RNA, 19 nt, Homo sapiens
  misc_RNA (1)...(19): siRNA sense strand
acacauaucacaucaacuc

SEQ ID NO: 1655101 - RNA, 19 nt, Homo sapiens
  misc_RNA (1)...(19): siRNA sense strand
cagcuuggcauccuucaga

SEQ ID NO: 1655102 - RNA, 19 nt, Homo sapiens
  misc_RNA (1)...(19): siRNA sense strand
ggaaugggucagacagugu

SEQ ID NO: 1655103 - RNA, 19 nt, Homo sapiens
  misc_RNA (1)...(19): siRNA sense strand
gucaaagucugggaucuca

SEQ ID NO: 1655104 - RNA, 19 nt, Homo sapiens
  misc_RNA (1)...(19): siRNA sense strand
gugacaggcacaccaaauu

SEQ ID NO: 1655105 - RNA, 19 nt, Homo sapiens
  misc_RNA (1)...(19): siRNA sense strand
caacagcgacuaugaaacc

SEQ ID NO: 1655106 - RNA, 19 nt, Homo sapiens
  misc_RNA (1)...(19): siRNA sense strand
cacaucaacuccauaucug

SEQ ID NO: 1655107 - RNA, 19 nt, Homo sapiens
  misc_RNA (1)...(19): siRNA sense strand
uuucuucugucuacuaaug

SEQ ID NO: 1655108 - RNA, 19 nt, Homo sapiens
  misc_RNA (1)...(19): siRNA sense strand
cauaucacaucaacuccau

SEQ ID NO: 1655109 - RNA, 19 nt, Homo sapiens
  misc_RNA (1)...(19): siRNA sense strand
ccaacgcacacacauauca

SEQ ID NO: 1655110 - RNA, 19 nt, Homo sapiens
  misc_RNA (1)...(19): siRNA sense strand
agucugggaucucaacaug

SEQ ID NO: 1655111 - RNA, 19 nt, Homo sapiens
  misc_RNA (1)...(19): siRNA sense strand
gucaacagcgacuaugaaa

SEQ ID NO: 1655112 - RNA, 19 nt, Homo sapiens
  misc_RNA (1)...(19): siRNA sense strand
cuuaccagguucaugacua

SEQ ID NO: 1655113 - RNA, 19 nt, Homo sapiens
  misc_RNA (1)...(19): siRNA sense strand
ggaagauccaagcaacaga

SEQ ID NO: 1655114 - RNA, 19 nt, Homo sapiens
  misc_RNA (1)...(19): siRNA sense strand
uaucacaucaacuccauau

SEQ ID NO: 1655115 - RNA, 19 nt, Homo sapiens
  misc_RNA (1)...(19): siRNA sense strand
gauuucggaugugaaguuc

SEQ ID NO: 1655116 - RNA, 19 nt, Homo sapiens
  misc_RNA (1)...(19): siRNA sense strand
gcauacagcuuggcauccu

SEQ ID NO: 1655117 - RNA, 19 nt, Homo sapiens
  misc_RNA (1)...(19): siRNA sense strand
acaacaacuucuucaggau

SEQ ID NO: 1655118 - RNA, 19 nt, Homo sapiens
  misc_RNA (1)...(19): siRNA sense strand
caacgagagcaggagagua

SEQ ID NO: 1655119 - RNA, 19 nt, Homo sapiens
  misc_RNA (1)...(19): siRNA sense strand
ugacaggcuccuacaacaa

SEQ ID NO: 1655120 - RNA, 19 nt, Homo sapiens
  misc_RNA (1)...(19): siRNA sense strand
uaaccuauggaacuuugaa

SEQ ID NO: 1655121 - RNA, 19 nt, Homo sapiens
  misc_RNA (1)...(19): siRNA sense strand
cgauuucggaugugaaguu

SEQ ID NO: 1655122 - RNA, 19 nt, Homo sapiens
  misc_RNA (1)...(19): siRNA sense strand
agaaggcuacaaucugaaa

SEQ ID NO: 1655123 - RNA, 19 nt, Homo sapiens
  misc_RNA (1)...(19): siRNA sense strand
uaccugaagaguuuagaaa

SEQ ID NO: 1655124 - RNA, 19 nt, Homo sapiens
  misc_RNA (1)...(19): siRNA sense strand
ccaagcaacagaucauuuu

SEQ ID NO: 1655125 - RNA, 19 nt, Homo sapiens
  misc_RNA (1)...(19): siRNA sense strand
gaaagucagcgagcgugau

SEQ ID NO: 1655126 - RNA, 19 nt, Homo sapiens
  misc_RNA (1)...(19): siRNA sense strand
cggcuacaaauaaccuaua

SEQ ID NO: 1655127 - RNA, 19 nt, Homo sapiens
  misc_RNA (1)...(19): siRNA sense strand
ggccagaaggcuacaaucu

SEQ ID NO: 1655128 - RNA, 19 nt, Homo sapiens
  misc_RNA (1)...(19): siRNA sense strand
gcuguguucccucuaugaa

SEQ ID NO: 1655129 - RNA, 19 nt, Homo sapiens
  misc_RNA (1)...(19): siRNA sense strand
gauccugccaccaucacaa

SEQ ID NO: 1655130 - RNA, 19 nt, Homo sapiens
  misc_RNA (1)...(19): siRNA sense strand
aaacugugaagcuguggaa

SEQ ID NO: 1655131 - RNA, 19 nt, Homo sapiens
  misc_RNA (1)...(19): siRNA sense strand
gaaacaccaagcgugaugu

SEQ ID NO: 1655132 - RNA, 19 nt, Homo sapiens
  misc_RNA (1)...(19): siRNA sense strand
agaaacaccaagcgugaug

SEQ ID NO: 1655133 - RNA, 19 nt, Homo sapiens
  misc_RNA (1)...(19): siRNA sense strand
cccagcagaaugcagcuua

SEQ ID NO: 1655134 - RNA, 19 nt, Homo sapiens
  misc_RNA (1)...(19): siRNA sense strand
gugaauacaauguuuacag

SEQ ID NO: 1655135 - RNA, 19 nt, Homo sapiens
  misc_RNA (1)...(19): siRNA sense strand
ugccaacgcacacacauau

SEQ ID NO: 1655136 - RNA, 19 nt, Homo sapiens
  misc_RNA (1)...(19): siRNA sense strand
ugucaacagcgacuaugaa

SEQ ID NO: 1655137 - RNA, 19 nt, Homo sapiens
  misc_RNA (1)...(19): siRNA sense strand
aacaacuucuucaggaugu

SEQ ID NO: 1655138 - RNA, 19 nt, Homo sapiens
  misc_RNA (1)...(19): siRNA sense strand
gacaggcuccuacaacaac

SEQ ID NO: 1655139 - RNA, 19 nt, Homo sapiens
  misc_RNA (1)...(19): siRNA sense strand
cagaaugcagcuuacuuuc

SEQ ID NO: 1655140 - RNA, 19 nt, Homo sapiens
  misc_RNA (1)...(19): siRNA sense strand
ucaacuccauaucugucaa

SEQ ID NO: 1655141 - RNA, 19 nt, Homo sapiens
  misc_RNA (1)...(19): siRNA sense strand
cacagugggagguauauca

SEQ ID NO: 1655142 - RNA, 19 nt, Homo sapiens
  misc_RNA (1)...(19): siRNA sense strand
cugaaauuaucucuucgau

SEQ ID NO: 1655143 - RNA, 19 nt, Homo sapiens
  misc_RNA (1)...(19): siRNA sense strand
gauuaaccuauggaacuuu

SEQ ID NO: 1655144 - RNA, 19 nt, Homo sapiens
  misc_RNA (1)...(19): siRNA sense strand
ucagcgagcgugauaagag

SEQ ID NO: 1655145 - RNA, 19 nt, Homo sapiens
  misc_RNA (1)...(19): siRNA sense strand
uuaccagguucaugacuac

SEQ ID NO: 1655146 - RNA, 19 nt, Homo sapiens
  misc_RNA (1)...(19): siRNA sense strand
cugugaagcuguggaaagu

SEQ ID NO: 1655147 - RNA, 19 nt, Homo sapiens
  misc_RNA (1)...(19): siRNA sense strand
gcaucugcccugugugaca

SEQ ID NO: 1655148 - RNA, 19 nt, Homo sapiens
  misc_RNA (1)...(19): siRNA sense strand
auuaaccuauggaacuuug

SEQ ID NO: 1655149 - RNA, 19 nt, Homo sapiens
  misc_RNA (1)...(19): siRNA sense strand
gacauuaagccagccaaca

SEQ ID NO: 1655150 - RNA, 19 nt, Homo sapiens
  misc_RNA (1)...(19): siRNA sense strand
cauacagcuuggcauccuu

SEQ ID NO: 1655151 - RNA, 19 nt, Homo sapiens
  misc_RNA (1)...(19): siRNA sense strand
gcuccuacaacaacuucuu

SEQ ID NO: 1655152 - RNA, 19 nt, Homo sapiens
  misc_RNA (1)...(19): siRNA sense strand
caaagucugggaucucaac

SEQ ID NO: 1655153 - RNA, 19 nt, Homo sapiens
  misc_RNA (1)...(19): siRNA sense strand
gaaugcagcuuacuuucuu

SEQ ID NO: 1655154 - RNA, 19 nt, Homo sapiens
  misc_RNA (1)...(19): siRNA sense strand
ucgauuaccugaagaguuu

SEQ ID NO: 1655155 - RNA, 19 nt, Homo sapiens
  misc_RNA (1)...(19): siRNA sense strand
gcacacacauaucacauca

SEQ ID NO: 1655156 - RNA, 19 nt, Homo sapiens
  misc_RNA (1)...(19): siRNA sense strand
ccugaagaguuuagaaaua

SEQ ID NO: 1655157 - RNA, 19 nt, Homo sapiens
  misc_RNA (1)...(19): siRNA sense strand
gcugaugaccugaggauua

SEQ ID NO: 1655158 - RNA, 19 nt, Homo sapiens
  misc_RNA (1)...(19): siRNA sense strand
caaccacacgggagaauua

SEQ ID NO: 1655159 - RNA, 19 nt, Homo sapiens
  misc_RNA (1)...(19): siRNA sense strand
gcagaaugcagcuuacuuu

SEQ ID NO: 1655160 - RNA, 19 nt, Homo sapiens
  misc_RNA (1)...(19): siRNA sense strand
caucgagacuuaccagguu

SEQ ID NO: 1655161 - RNA, 19 nt, Homo sapiens
  misc_RNA (1)...(19): siRNA sense strand
gcaguggcggcuacaaaua

SEQ ID NO: 1655162 - RNA, 19 nt, Homo sapiens
  misc_RNA (1)...(19): siRNA sense strand
ggauuaaccuauggaacuu

SEQ ID NO: 1655163 - RNA, 19 nt, Homo sapiens
  misc_RNA (1)...(19): siRNA sense strand
gaucacagcagccgaguuc

SEQ ID NO: 1655164 - RNA, 19 nt, Homo sapiens
  misc_RNA (1)...(19): siRNA sense strand
ggacaauccggcuguguga

SEQ ID NO: 1655165 - RNA, 19 nt, Homo sapiens
  misc_RNA (1)...(19): siRNA sense strand
gcagcuuacuuucuucugu

SEQ ID NO: 1655166 - RNA, 19 nt, Homo sapiens
  misc_RNA (1)...(19): siRNA sense strand
ccuauggaacuuugaaaua

SEQ ID NO: 1655167 - RNA, 19 nt, Homo sapiens
  misc_RNA (1)...(19): siRNA sense strand
cugaugaccugaggauuaa

SEQ ID NO: 1655168 - RNA, 19 nt, Homo sapiens
  misc_RNA (1)...(19): siRNA sense strand
ucucugaaauuaucucuuc

SEQ ID NO: 1655169 - RNA, 19 nt, Homo sapiens
  misc_RNA (1)...(19): siRNA sense strand
ugacaggcacaccaaauuu

SEQ ID NO: 1655170 - RNA, 19 nt, Homo sapiens
  misc_RNA (1)...(19): siRNA sense strand
gugaagcuguggaaaguca

SEQ ID NO: 1655171 - RNA, 19 nt, Homo sapiens
  misc_RNA (1)...(19): siRNA sense strand
caagcuguguucccucuau

SEQ ID NO: 1655172 - RNA, 19 nt, Homo sapiens
  misc_RNA (1)...(19): siRNA sense strand
cgaguucgauuaccugaag

SEQ ID NO: 1655173 - RNA, 19 nt, Homo sapiens
  misc_RNA (1)...(19): siRNA sense strand
agacuuaccagguucauga

SEQ ID NO: 1655174 - RNA, 19 nt, Homo sapiens
  misc_RNA (1)...(19): siRNA sense strand
gggucggguuguaauauuu

SEQ ID NO: 1655175 - RNA, 19 nt, Homo sapiens
  misc_RNA (1)...(19): siRNA sense strand
ccacacgggagaauuacua

SEQ ID NO: 1655176 - RNA, 19 nt, Homo sapiens
  misc_RNA (1)...(19): siRNA sense strand
gaagauccaagcaacagau

SEQ ID NO: 1655177 - RNA, 19 nt, Homo sapiens
  misc_RNA (1)...(19): siRNA sense strand
cugaagaguuuagaaauag

SEQ ID NO: 1655178 - RNA, 19 nt, Homo sapiens
  misc_RNA (1)...(19): siRNA sense strand
cgagaucagugucgacagu

SEQ ID NO: 1655179 - RNA, 19 nt, Homo sapiens
  misc_RNA (1)...(19): siRNA sense strand
aaagucagcgagcgugaua

SEQ ID NO: 1655180 - RNA, 19 nt, Homo sapiens
  misc_RNA (1)...(19): siRNA sense strand
gaccugaggauuaaccuau

SEQ ID NO: 1655181 - RNA, 19 nt, Homo sapiens
  misc_RNA (1)...(19): siRNA sense strand
gcacauuccagagccauga

SEQ ID NO: 1655182 - RNA, 19 nt, Homo sapiens
  misc_RNA (1)...(19): siRNA sense strand
ggcuacaaauaaccuauau

SEQ ID NO: 1655183 - RNA, 19 nt, Homo sapiens
  misc_RNA (1)...(19): siRNA sense strand
acacacauaucacaucaac

SEQ ID NO: 1655184 - RNA, 19 nt, Homo sapiens
  misc_RNA (1)...(19): siRNA sense strand
ucucuucgauuucggaugu

SEQ ID NO: 1655185 - RNA, 19 nt, Homo sapiens
  misc_RNA (1)...(19): siRNA sense strand
aacgagagcaggagaguaa

SEQ ID NO: 1655186 - RNA, 19 nt, Homo sapiens
  misc_RNA (1)...(19): siRNA sense strand
gaaaagacgagaucagugu

SEQ ID NO: 1655187 - RNA, 19 nt, Homo sapiens
  misc_RNA (1)...(19): siRNA sense strand
ucaggauguucgacagaaa

SEQ ID NO: 1655188 - RNA, 19 nt, Homo sapiens
  misc_RNA (1)...(19): siRNA sense strand
ucacaucaacuccauaucu

SEQ ID NO: 1655189 - RNA, 19 nt, Homo sapiens
  misc_RNA (1)...(19): siRNA sense strand
caguggcggcuacaaauaa

SEQ ID NO: 1655190 - RNA, 19 nt, Homo sapiens
  misc_RNA (1)...(19): siRNA sense strand
ucugggaucucaacaugga

SEQ ID NO: 1655191 - RNA, 19 nt, Homo sapiens
  misc_RNA (1)...(19): siRNA sense strand
agugggagguauaucauga

SEQ ID NO: 1655192 - RNA, 19 nt, Homo sapiens
  misc_RNA (1)...(19): siRNA sense strand
acacauaucacaucaacuc

SEQ ID NO: 1655193 - RNA, 19 nt, Homo sapiens
  misc_RNA (1)...(19): siRNA sense strand
cagcuuggcauccuucaga

SEQ ID NO: 1655194 - RNA, 19 nt, Homo sapiens
  misc_RNA (1)...(19): siRNA sense strand
ggaaugggucagacagugu

SEQ ID NO: 1655195 - RNA, 19 nt, Homo sapiens
  misc_RNA (1)...(19): siRNA sense strand
gucaaagucugggaucuca

SEQ ID NO: 1655196 - RNA, 19 nt, Homo sapiens
  misc_RNA (1)...(19): siRNA sense strand
gugacaggcacaccaaauu

SEQ ID NO: 1655197 - RNA, 19 nt, Homo sapiens
  misc_RNA (1)...(19): siRNA sense strand
caacagcgacuaugaaacc

SEQ ID NO: 1655198 - RNA, 19 nt, Homo sapiens
  misc_RNA (1)...(19): siRNA sense strand
cacaucaacuccauaucug

SEQ ID NO: 1655199 - RNA, 19 nt, Homo sapiens
  misc_RNA (1)...(19): siRNA sense strand
uuucuucugucuacuaaug

SEQ ID NO: 1655200 - RNA, 19 nt, Homo sapiens
  misc_RNA (1)...(19): siRNA sense strand
cauaucacaucaacuccau

SEQ ID NO: 1655201 - RNA, 19 nt, Homo sapiens
  misc_RNA (1)...(19): siRNA sense strand
ccaacgcacacacauauca

SEQ ID NO: 1655202 - RNA, 19 nt, Homo sapiens
  misc_RNA (1)...(19): siRNA sense strand
agucugggaucucaacaug

SEQ ID NO: 1655203 - RNA, 19 nt, Homo sapiens
  misc_RNA (1)...(19): siRNA sense strand
gucaacagcgacuaugaaa

SEQ ID NO: 1655204 - RNA, 19 nt, Homo sapiens
  misc_RNA (1)...(19): siRNA sense strand
cuuaccagguucaugacua

SEQ ID NO: 1655205 - RNA, 19 nt, Homo sapiens
  misc_RNA (1)...(19): siRNA sense strand
ggaagauccaagcaacaga

SEQ ID NO: 1655206 - RNA, 19 nt, Homo sapiens
  misc_RNA (1)...(19): siRNA sense strand
uaucacaucaacuccauau

SEQ ID NO: 1655207 - RNA, 19 nt, Homo sapiens
  misc_RNA (1)...(19): siRNA sense strand
gauuucggaugugaaguuc

SEQ ID NO: 1655208 - RNA, 19 nt, Homo sapiens
  misc_RNA (1)...(19): siRNA sense strand
gcauacagcuuggcauccu

SEQ ID NO: 1655209 - RNA, 19 nt, Homo sapiens
  misc_RNA (1)...(19): siRNA sense strand
acaacaacuucuucaggau

SEQ ID NO: 1655210 - RNA, 19 nt, Homo sapiens
  misc_RNA (1)...(19): siRNA sense strand
caacgagagcaggagagua

SEQ ID NO: 1655211 - RNA, 19 nt, Homo sapiens
  misc_RNA (1)...(19): siRNA sense strand
ugacaggcuccuacaacaa

SEQ ID NO: 1655212 - RNA, 19 nt, Homo sapiens
  misc_RNA (1)...(19): siRNA sense strand
uaaccuauggaacuuugaa

SEQ ID NO: 1655213 - RNA, 19 nt, Homo sapiens
  misc_RNA (1)...(19): siRNA sense strand
cgauuucggaugugaaguu

SEQ ID NO: 1655214 - RNA, 19 nt, Homo sapiens
  misc_RNA (1)...(19): siRNA sense strand
agaaggcuacaaucugaaa

SEQ ID NO: 1655215 - RNA, 19 nt, Homo sapiens
  misc_RNA (1)...(19): siRNA sense strand
uaccugaagaguuuagaaa

SEQ ID NO: 1655216 - RNA, 19 nt, Homo sapiens
  misc_RNA (1)...(19): siRNA sense strand
ccaagcaacagaucauuuu

SEQ ID NO: 1655217 - RNA, 19 nt, Homo sapiens
  misc_RNA (1)...(19): siRNA sense strand
gaaagucagcgagcgugau

SEQ ID NO: 1655218 - RNA, 19 nt, Homo sapiens
  misc_RNA (1)...(19): siRNA sense strand
cggcuacaaauaaccuaua

SEQ ID NO: 1655219 - RNA, 19 nt, Homo sapiens
  misc_RNA (1)...(19): siRNA sense strand
ggccagaaggcuacaaucu

SEQ ID NO: 1655220 - RNA, 19 nt, Homo sapiens
  misc_RNA (1)...(19): siRNA sense strand
gcuguguucccucuaugaa

SEQ ID NO: 1655221 - RNA, 19 nt, Homo sapiens
  misc_RNA (1)...(19): siRNA sense strand
gauccugccaccaucacaa

SEQ ID NO: 1655222 - RNA, 19 nt, Homo sapiens
  misc_RNA (1)...(19): siRNA sense strand
aaacugugaagcuguggaa

SEQ ID NO: 1655223 - RNA, 19 nt, Homo sapiens
  misc_RNA (1)...(19): siRNA sense strand
gaaacaccaagcgugaugu

SEQ ID NO: 1655224 - RNA, 19 nt, Homo sapiens
  misc_RNA (1)...(19): siRNA sense strand
agaaacaccaagcgugaug

SEQ ID NO: 1655225 - RNA, 19 nt, Homo sapiens
  misc_RNA (1)...(19): siRNA sense strand
cccagcagaaugcagcuua

SEQ ID NO: 1655226 - RNA, 19 nt, Homo sapiens
  misc_RNA (1)...(19): siRNA sense strand
gugaauacaauguuuacag

SEQ ID NO: 1655227 - RNA, 19 nt, Homo sapiens
  misc_RNA (1)...(19): siRNA sense strand
ugccaacgcacacacauau

SEQ ID NO: 1655228 - RNA, 19 nt, Homo sapiens
  misc_RNA (1)...(19): siRNA sense strand
ugucaacagcgacuaugaa

SEQ ID NO: 1655229 - RNA, 19 nt, Homo sapiens
  misc_RNA (1)...(19): siRNA sense strand
aacaacuucuucaggaugu

SEQ ID NO: 1655230 - RNA, 19 nt, Homo sapiens
  misc_RNA (1)...(19): siRNA sense strand
gacaggcuccuacaacaac

SEQ ID NO: 1655231 - RNA, 19 nt, Homo sapiens
  misc_RNA (1)...(19): siRNA sense strand
cagaaugcagcuuacuuuc

SEQ ID NO: 1655232 - RNA, 19 nt, Homo sapiens
  misc_RNA (1)...(19): siRNA sense strand
ucaacuccauaucugucaa

SEQ ID NO: 1655233 - RNA, 19 nt, Homo sapiens
  misc_RNA (1)...(19): siRNA sense strand
cacagugggagguauauca

SEQ ID NO: 1655234 - RNA, 19 nt, Homo sapiens
  misc_RNA (1)...(19): siRNA sense strand
cugaaauuaucucuucgau

SEQ ID NO: 1655235 - RNA, 19 nt, Homo sapiens
  misc_RNA (1)...(19): siRNA sense strand
gauuaaccuauggaacuuu

SEQ ID NO: 1655236 - RNA, 19 nt, Homo sapiens
  misc_RNA (1)...(19): siRNA sense strand
ucagcgagcgugauaagag

SEQ ID NO: 1655237 - RNA, 19 nt, Homo sapiens
  misc_RNA (1)...(19): siRNA sense strand
uuaccagguucaugacuac

SEQ ID NO: 1655238 - RNA, 19 nt, Homo sapiens
  misc_RNA (1)...(19): siRNA sense strand
cugugaagcuguggaaagu

SEQ ID NO: 1655239 - RNA, 19 nt, Homo sapiens
  misc_RNA (1)...(19): siRNA sense strand
gcaucugcccugugugaca

SEQ ID NO: 1655240 - RNA, 19 nt, Homo sapiens
  misc_RNA (1)...(19): siRNA sense strand
auuaaccuauggaacuuug

SEQ ID NO: 1655241 - RNA, 19 nt, Homo sapiens
  misc_RNA (1)...(19): siRNA sense strand
gacauuaagccagccaaca

SEQ ID NO: 1655242 - RNA, 19 nt, Homo sapiens
  misc_RNA (1)...(19): siRNA sense strand
cauacagcuuggcauccuu

SEQ ID NO: 1655243 - RNA, 19 nt, Homo sapiens
  misc_RNA (1)...(19): siRNA sense strand
gcuccuacaacaacuucuu

SEQ ID NO: 1655244 - RNA, 19 nt, Homo sapiens
  misc_RNA (1)...(19): siRNA sense strand
caaagucugggaucucaac

SEQ ID NO: 1655245 - RNA, 19 nt, Homo sapiens
  misc_RNA (1)...(19): siRNA sense strand
gaaugcagcuuacuuucuu

SEQ ID NO: 1655246 - RNA, 19 nt, Homo sapiens
  misc_RNA (1)...(19): siRNA sense strand
ucgauuaccugaagaguuu

SEQ ID NO: 1655247 - RNA, 19 nt, Homo sapiens
  misc_RNA (1)...(19): siRNA sense strand
gcacacacauaucacauca

SEQ ID NO: 1655248 - RNA, 19 nt, Homo sapiens
  misc_RNA (1)...(19): siRNA sense strand
ccugaagaguuuagaaaua

SEQ ID NO: 1655249 - RNA, 19 nt, Homo sapiens
  misc_RNA (1)...(19): siRNA sense strand
gcugaugaccugaggauua

SEQ ID NO: 1655250 - RNA, 19 nt, Homo sapiens
  misc_RNA (1)...(19): siRNA sense strand
caaccacacgggagaauua

SEQ ID NO: 1655251 - RNA, 19 nt, Homo sapiens
  misc_RNA (1)...(19): siRNA sense strand
gcagaaugcagcuuacuuu

SEQ ID NO: 1655252 - RNA, 19 nt, Homo sapiens
  misc_RNA (1)...(19): siRNA sense strand
caucgagacuuaccagguu

SEQ ID NO: 1655253 - RNA, 19 nt, Homo sapiens
  misc_RNA (1)...(19): siRNA sense strand
gcaguggcggcuacaaaua

SEQ ID NO: 1655254 - RNA, 19 nt, Homo sapiens
  misc_RNA (1)...(19): siRNA sense strand
ggauuaaccuauggaacuu

SEQ ID NO: 1655255 - RNA, 19 nt, Homo sapiens
  misc_RNA (1)...(19): siRNA sense strand
gaucacagcagccgaguuc

SEQ ID NO: 1655256 - RNA, 19 nt, Homo sapiens
  misc_RNA (1)...(19): siRNA sense strand
ggacaauccggcuguguga

SEQ ID NO: 1655257 - RNA, 19 nt, Homo sapiens
  misc_RNA (1)...(19): siRNA sense strand
gcagcuuacuuucuucugu

SEQ ID NO: 1655258 - RNA, 19 nt, Homo sapiens
  misc_RNA (1)...(19): siRNA sense strand
ccuauggaacuuugaaaua

SEQ ID NO: 1655259 - RNA, 19 nt, Homo sapiens
  misc_RNA (1)...(19): siRNA sense strand
cugaugaccugaggauuaa

SEQ ID NO: 1655260 - RNA, 19 nt, Homo sapiens
  misc_RNA (1)...(19): siRNA sense strand
ucucugaaauuaucucuuc

SEQ ID NO: 1655261 - RNA, 19 nt, Homo sapiens
  misc_RNA (1)...(19): siRNA sense strand
ugacaggcacaccaaauuu

SEQ ID NO: 1655262 - RNA, 19 nt, Homo sapiens
  misc_RNA (1)...(19): siRNA sense strand
gugaagcuguggaaaguca

SEQ ID NO: 1655263 - RNA, 19 nt, Homo sapiens
  misc_RNA (1)...(19): siRNA sense strand
caagcuguguucccucuau

SEQ ID NO: 1655264 - RNA, 19 nt, Homo sapiens
  misc_RNA (1)...(19): siRNA sense strand
cgaguucgauuaccugaag

SEQ ID NO: 1655265 - RNA, 19 nt, Homo sapiens
  misc_RNA (1)...(19): siRNA sense strand
agacuuaccagguucauga

SEQ ID NO: 1655266 - RNA, 19 nt, Homo sapiens
  misc_RNA (1)...(19): siRNA sense strand
gggucggguuguaauauuu

SEQ ID NO: 1655267 - RNA, 19 nt, Homo sapiens
  misc_RNA (1)...(19): siRNA sense strand
ccacacgggagaauuacua

SEQ ID NO: 1655268 - RNA, 19 nt, Homo sapiens
  misc_RNA (1)...(19): siRNA sense strand
gaagauccaagcaacagau

SEQ ID NO: 1655269 - RNA, 19 nt, Homo sapiens
  misc_RNA (1)...(19): siRNA sense strand
cugaagaguuuagaaauag

SEQ ID NO: 1655270 - RNA, 19 nt, Homo sapiens
  misc_RNA (1)...(19): siRNA sense strand
cgagaucagugucgacagu

SEQ ID NO: 1655271 - RNA, 19 nt, Homo sapiens
  misc_RNA (1)...(19): siRNA sense strand
aaagucagcgagcgugaua

SEQ ID NO: 1655272 - RNA, 19 nt, Homo sapiens
  misc_RNA (1)...(19): siRNA sense strand
gaccugaggauuaaccuau

SEQ ID NO: 1655273 - RNA, 19 nt, Homo sapiens
  misc_RNA (1)...(19): siRNA sense strand
gcacauuccagagccauga

SEQ ID NO: 1655274 - RNA, 19 nt, Homo sapiens
  misc_RNA (1)...(19): siRNA sense strand
ggcuacaaauaaccuauau

SEQ ID NO: 1655275 - RNA, 19 nt, Homo sapiens
  misc_RNA (1)...(19): siRNA sense strand
acacacauaucacaucaac

SEQ ID NO: 1655276 - RNA, 19 nt, Homo sapiens
  misc_RNA (1)...(19): siRNA sense strand
ucucuucgauuucggaugu

SEQ ID NO: 1655277 - RNA, 19 nt, Homo sapiens
  misc_RNA (1)...(19): siRNA sense strand
aacgagagcaggagaguaa

SEQ ID NO: 1655278 - RNA, 19 nt, Homo sapiens
  misc_RNA (1)...(19): siRNA sense strand
gaaaagacgagaucagugu

SEQ ID NO: 1655279 - RNA, 19 nt, Homo sapiens
  misc_RNA (1)...(19): siRNA sense strand
ucaggauguucgacagaaa

SEQ ID NO: 1655280 - RNA, 19 nt, Homo sapiens
  misc_RNA (1)...(19): siRNA sense strand
ucacaucaacuccauaucu

SEQ ID NO: 1655281 - RNA, 19 nt, Homo sapiens
  misc_RNA (1)...(19): siRNA sense strand
caguggcggcuacaaauaa

SEQ ID NO: 1655282 - RNA, 19 nt, Homo sapiens
  misc_RNA (1)...(19): siRNA sense strand
ucugggaucucaacaugga

SEQ ID NO: 1655283 - RNA, 19 nt, Homo sapiens
  misc_RNA (1)...(19): siRNA sense strand
agugggagguauaucauga

SEQ ID NO: 1655284 - RNA, 19 nt, Homo sapiens
  misc_RNA (1)...(19): siRNA sense strand
acacauaucacaucaacuc

SEQ ID NO: 1655285 - RNA, 19 nt, Homo sapiens
  misc_RNA (1)...(19): siRNA sense strand
cagcuuggcauccuucaga

SEQ ID NO: 1655286 - RNA, 19 nt, Homo sapiens
  misc_RNA (1)...(19): siRNA sense strand
ggaaugggucagacagugu

SEQ ID NO: 1655287 - RNA, 19 nt, Homo sapiens
  misc_RNA (1)...(19): siRNA sense strand
gucaaagucugggaucuca

SEQ ID NO: 1655288 - RNA, 19 nt, Homo sapiens
  misc_RNA (1)...(19): siRNA sense strand
gugacaggcacaccaaauu

SEQ ID NO: 1655289 - RNA, 19 nt, Homo sapiens
  misc_RNA (1)...(19): siRNA sense strand
caacagcgacuaugaaacc

SEQ ID NO: 1655290 - RNA, 19 nt, Homo sapiens
  misc_RNA (1)...(19): siRNA sense strand
cacaucaacuccauaucug

SEQ ID NO: 1655291 - RNA, 19 nt, Homo sapiens
  misc_RNA (1)...(19): siRNA sense strand
uuucuucugucuacuaaug

SEQ ID NO: 1655292 - RNA, 19 nt, Homo sapiens
  misc_RNA (1)...(19): siRNA sense strand
cauaucacaucaacuccau

SEQ ID NO: 1655293 - RNA, 19 nt, Homo sapiens
  misc_RNA (1)...(19): siRNA sense strand
ccaacgcacacacauauca

SEQ ID NO: 1655294 - RNA, 19 nt, Homo sapiens
  misc_RNA (1)...(19): siRNA sense strand
agucugggaucucaacaug

SEQ ID NO: 1655295 - RNA, 19 nt, Homo sapiens
  misc_RNA (1)...(19): siRNA sense strand
gucaacagcgacuaugaaa

SEQ ID NO: 1655296 - RNA, 19 nt, Homo sapiens
  misc_RNA (1)...(19): siRNA sense strand
cuuaccagguucaugacua

SEQ ID NO: 1655297 - RNA, 19 nt, Homo sapiens
  misc_RNA (1)...(19): siRNA sense strand
ggaagauccaagcaacaga

SEQ ID NO: 1655298 - RNA, 19 nt, Homo sapiens
  misc_RNA (1)...(19): siRNA sense strand
uaucacaucaacuccauau

SEQ ID NO: 1655299 - RNA, 19 nt, Homo sapiens
  misc_RNA (1)...(19): siRNA sense strand
gauuucggaugugaaguuc

SEQ ID NO: 1655300 - RNA, 19 nt, Homo sapiens
  misc_RNA (1)...(19): siRNA sense strand
gcauacagcuuggcauccu

SEQ ID NO: 1655301 - RNA, 19 nt, Homo sapiens
  misc_RNA (1)...(19): siRNA sense strand
acaacaacuucuucaggau

SEQ ID NO: 1655302 - RNA, 19 nt, Homo sapiens
  misc_RNA (1)...(19): siRNA sense strand
caacgagagcaggagagua

SEQ ID NO: 1655303 - RNA, 19 nt, Homo sapiens
  misc_RNA (1)...(19): siRNA sense strand
ugacaggcuccuacaacaa

SEQ ID NO: 1655304 - RNA, 19 nt, Homo sapiens
  misc_RNA (1)...(19): siRNA sense strand
uaaccuauggaacuuugaa

SEQ ID NO: 1655305 - RNA, 19 nt, Homo sapiens
  misc_RNA (1)...(19): siRNA sense strand
cgauuucggaugugaaguu

SEQ ID NO: 1655306 - RNA, 19 nt, Homo sapiens
  misc_RNA (1)...(19): siRNA sense strand
agaaggcuacaaucugaaa

SEQ ID NO: 1655307 - RNA, 19 nt, Homo sapiens
  misc_RNA (1)...(19): siRNA sense strand
uaccugaagaguuuagaaa

SEQ ID NO: 1655308 - RNA, 19 nt, Homo sapiens
  misc_RNA (1)...(19): siRNA sense strand
ccaagcaacagaucauuuu

SEQ ID NO: 1655309 - RNA, 19 nt, Homo sapiens
  misc_RNA (1)...(19): siRNA sense strand
gaaagucagcgagcgugau

SEQ ID NO: 1655310 - RNA, 19 nt, Homo sapiens
  misc_RNA (1)...(19): siRNA sense strand
cggcuacaaauaaccuaua

SEQ ID NO: 1655311 - RNA, 19 nt, Homo sapiens
  misc_RNA (1)...(19): siRNA sense strand
ggccagaaggcuacaaucu

SEQ ID NO: 1655312 - RNA, 19 nt, Homo sapiens
  misc_RNA (1)...(19): siRNA sense strand
gcuguguucccucuaugaa

SEQ ID NO: 1655313 - RNA, 19 nt, Homo sapiens
  misc_RNA (1)...(19): siRNA sense strand
gauccugccaccaucacaa

SEQ ID NO: 1655314 - RNA, 19 nt, Homo sapiens
  misc_RNA (1)...(19): siRNA sense strand
aaacugugaagcuguggaa

SEQ ID NO: 1655315 - RNA, 19 nt, Homo sapiens
  misc_RNA (1)...(19): siRNA sense strand
gaaacaccaagcgugaugu

SEQ ID NO: 1655316 - RNA, 19 nt, Homo sapiens
  misc_RNA (1)...(19): siRNA sense strand
agaaacaccaagcgugaug

SEQ ID NO: 1655317 - RNA, 19 nt, Homo sapiens
  misc_RNA (1)...(19): siRNA sense strand
cccagcagaaugcagcuua

SEQ ID NO: 1655318 - RNA, 19 nt, Homo sapiens
  misc_RNA (1)...(19): siRNA sense strand
gugaauacaauguuuacag

SEQ ID NO: 1655319 - RNA, 19 nt, Homo sapiens
  misc_RNA (1)...(19): siRNA sense strand
ugccaacgcacacacauau

SEQ ID NO: 1655320 - RNA, 19 nt, Homo sapiens
  misc_RNA (1)...(19): siRNA sense strand
ugucaacagcgacuaugaa

SEQ ID NO: 1655321 - RNA, 19 nt, Homo sapiens
  misc_RNA (1)...(19): siRNA sense strand
aacaacuucuucaggaugu

SEQ ID NO: 1655322 - RNA, 19 nt, Homo sapiens
  misc_RNA (1)...(19): siRNA sense strand
gacaggcuccuacaacaac

SEQ ID NO: 1655323 - RNA, 19 nt, Homo sapiens
  misc_RNA (1)...(19): siRNA sense strand
cagaaugcagcuuacuuuc

SEQ ID NO: 1655324 - RNA, 19 nt, Homo sapiens
  misc_RNA (1)...(19): siRNA sense strand
ucaacuccauaucugucaa

SEQ ID NO: 1655325 - RNA, 19 nt, Homo sapiens
  misc_RNA (1)...(19): siRNA sense strand
cacagugggagguauauca

SEQ ID NO: 1655326 - RNA, 19 nt, Homo sapiens
  misc_RNA (1)...(19): siRNA sense strand
cugaaauuaucucuucgau

SEQ ID NO: 1655327 - RNA, 19 nt, Homo sapiens
  misc_RNA (1)...(19): siRNA sense strand
gauuaaccuauggaacuuu

SEQ ID NO: 1655328 - RNA, 19 nt, Homo sapiens
  misc_RNA (1)...(19): siRNA sense strand
ucagcgagcgugauaagag

SEQ ID NO: 1655329 - RNA, 19 nt, Homo sapiens
  misc_RNA (1)...(19): siRNA sense strand
uuaccagguucaugacuac

SEQ ID NO: 1655330 - RNA, 19 nt, Homo sapiens
  misc_RNA (1)...(19): siRNA sense strand
cugugaagcuguggaaagu

SEQ ID NO: 1655331 - RNA, 19 nt, Homo sapiens
  misc_RNA (1)...(19): siRNA sense strand
gcaucugcccugugugaca

SEQ ID NO: 1655332 - RNA, 19 nt, Homo sapiens
  misc_RNA (1)...(19): siRNA sense strand
auuaaccuauggaacuuug

SEQ ID NO: 1655333 - RNA, 19 nt, Homo sapiens
  misc_RNA (1)...(19): siRNA sense strand
gacauuaagccagccaaca

SEQ ID NO: 1655334 - RNA, 19 nt, Homo sapiens
  misc_RNA (1)...(19): siRNA sense strand
cauacagcuuggcauccuu

SEQ ID NO: 1655335 - RNA, 19 nt, Homo sapiens
  misc_RNA (1)...(19): siRNA sense strand
gcuccuacaacaacuucuu

SEQ ID NO: 1655336 - RNA, 19 nt, Homo sapiens
  misc_RNA (1)...(19): siRNA sense strand
caaagucugggaucucaac

SEQ ID NO: 1655337 - RNA, 19 nt, Homo sapiens
  misc_RNA (1)...(19): siRNA sense strand
gaaugcagcuuacuuucuu

SEQ ID NO: 1655338 - RNA, 19 nt, Homo sapiens
  misc_RNA (1)...(19): siRNA sense strand
ucgauuaccugaagaguuu

SEQ ID NO: 1655339 - RNA, 19 nt, Homo sapiens
  misc_RNA (1)...(19): siRNA sense strand
gcacacacauaucacauca

SEQ ID NO: 1655340 - RNA, 19 nt, Homo sapiens
  misc_RNA (1)...(19): siRNA sense strand
ccugaagaguuuagaaaua

SEQ ID NO: 1655341 - RNA, 19 nt, Homo sapiens
  misc_RNA (1)...(19): siRNA sense strand
gcugaugaccugaggauua

SEQ ID NO: 1655342 - RNA, 19 nt, Homo sapiens
  misc_RNA (1)...(19): siRNA sense strand
caaccacacgggagaauua

SEQ ID NO: 1655343 - RNA, 19 nt, Homo sapiens
  misc_RNA (1)...(19): siRNA sense strand
gcagaaugcagcuuacuuu

SEQ ID NO: 1655344 - RNA, 19 nt, Homo sapiens
  misc_RNA (1)...(19): siRNA sense strand
caucgagacuuaccagguu

SEQ ID NO: 1655345 - RNA, 19 nt, Homo sapiens
  misc_RNA (1)...(19): siRNA sense strand
gcaguggcggcuacaaaua

SEQ ID NO: 1655346 - RNA, 19 nt, Homo sapiens
  misc_RNA (1)...(19): siRNA sense strand
ggauuaaccuauggaacuu

SEQ ID NO: 1655347 - RNA, 19 nt, Homo sapiens
  misc_RNA (1)...(19): siRNA sense strand
gaucacagcagccgaguuc

SEQ ID NO: 1655348 - RNA, 19 nt, Homo sapiens
  misc_RNA (1)...(19): siRNA sense strand
ggacaauccggcuguguga

SEQ ID NO: 1655349 - RNA, 19 nt, Homo sapiens
  misc_RNA (1)...(19): siRNA sense strand
gcagcuuacuuucuucugu

SEQ ID NO: 1655350 - RNA, 19 nt, Homo sapiens
  misc_RNA (1)...(19): siRNA sense strand
ccuauggaacuuugaaaua

SEQ ID NO: 1655351 - RNA, 19 nt, Homo sapiens
  misc_RNA (1)...(19): siRNA sense strand
cugaugaccugaggauuaa

SEQ ID NO: 1655352 - RNA, 19 nt, Homo sapiens
  misc_RNA (1)...(19): siRNA sense strand
ucucugaaauuaucucuuc

SEQ ID NO: 1655353 - RNA, 19 nt, Homo sapiens
  misc_RNA (1)...(19): siRNA sense strand
ugacaggcacaccaaauuu

SEQ ID NO: 1655354 - RNA, 19 nt, Homo sapiens
  misc_RNA (1)...(19): siRNA sense strand
gugaagcuguggaaaguca

SEQ ID NO: 1655355 - RNA, 19 nt, Homo sapiens
  misc_RNA (1)...(19): siRNA sense strand
caagcuguguucccucuau

SEQ ID NO: 1655356 - RNA, 19 nt, Homo sapiens
  misc_RNA (1)...(19): siRNA sense strand
cgaguucgauuaccugaag

SEQ ID NO: 1655357 - RNA, 19 nt, Homo sapiens
  misc_RNA (1)...(19): siRNA sense strand
agacuuaccagguucauga

SEQ ID NO: 1655358 - RNA, 19 nt, Homo sapiens
  misc_RNA (1)...(19): siRNA sense strand
gggucggguuguaauauuu

SEQ ID NO: 1655359 - RNA, 19 nt, Homo sapiens
  misc_RNA (1)...(19): siRNA sense strand
ccacacgggagaauuacua

SEQ ID NO: 1655360 - RNA, 19 nt, Homo sapiens
  misc_RNA (1)...(19): siRNA sense strand
gaagauccaagcaacagau

SEQ ID NO: 1655361 - RNA, 19 nt, Homo sapiens
  misc_RNA (1)...(19): siRNA sense strand
cugaagaguuuagaaauag

SEQ ID NO: 1655362 - RNA, 19 nt, Homo sapiens
  misc_RNA (1)...(19): siRNA sense strand
cgagaucagugucgacagu

SEQ ID NO: 1655363 - RNA, 19 nt, Homo sapiens
  misc_RNA (1)...(19): siRNA sense strand
aaagucagcgagcgugaua

SEQ ID NO: 1655364 - RNA, 19 nt, Homo sapiens
  misc_RNA (1)...(19): siRNA sense strand
gaccugaggauuaaccuau

SEQ ID NO: 1655365 - RNA, 19 nt, Homo sapiens
  misc_RNA (1)...(19): siRNA sense strand
gcacauuccagagccauga

SEQ ID NO: 1655366 - RNA, 19 nt, Homo sapiens
  misc_RNA (1)...(19): siRNA sense strand
ggcuacaaauaaccuauau

SEQ ID NO: 1655367 - RNA, 19 nt, Homo sapiens
  misc_RNA (1)...(19): siRNA sense strand
acacacauaucacaucaac

SEQ ID NO: 1655368 - RNA, 19 nt, Homo sapiens
  misc_RNA (1)...(19): siRNA sense strand
ucucuucgauuucggaugu

SEQ ID NO: 1655369 - RNA, 19 nt, Homo sapiens
  misc_RNA (1)...(19): siRNA sense strand
aacgagagcaggagaguaa

SEQ ID NO: 1655370 - RNA, 19 nt, Homo sapiens
  misc_RNA (1)...(19): siRNA sense strand
gaaaagacgagaucagugu

SEQ ID NO: 1655371 - RNA, 19 nt, Homo sapiens
  misc_RNA (1)...(19): siRNA sense strand
ucaggauguucgacagaaa

SEQ ID NO: 1655372 - RNA, 19 nt, Homo sapiens
  misc_RNA (1)...(19): siRNA sense strand
ucacaucaacuccauaucu

SEQ ID NO: 1655373 - RNA, 19 nt, Homo sapiens
  misc_RNA (1)...(19): siRNA sense strand
caguggcggcuacaaauaa

SEQ ID NO: 1655374 - RNA, 19 nt, Homo sapiens
  misc_RNA (1)...(19): siRNA sense strand
ucugggaucucaacaugga

SEQ ID NO: 1655375 - RNA, 19 nt, Homo sapiens
  misc_RNA (1)...(19): siRNA sense strand
agugggagguauaucauga

SEQ ID NO: 1655376 - RNA, 19 nt, Homo sapiens
  misc_RNA (1)...(19): siRNA sense strand
acacauaucacaucaacuc

SEQ ID NO: 1655377 - RNA, 19 nt, Homo sapiens
  misc_RNA (1)...(19): siRNA sense strand
cagcuuggcauccuucaga

SEQ ID NO: 1655378 - RNA, 19 nt, Homo sapiens
  misc_RNA (1)...(19): siRNA sense strand
ggaaugggucagacagugu

SEQ ID NO: 1655379 - RNA, 19 nt, Homo sapiens
  misc_RNA (1)...(19): siRNA sense strand
gucaaagucugggaucuca

SEQ ID NO: 1655380 - RNA, 19 nt, Homo sapiens
  misc_RNA (1)...(19): siRNA sense strand
gugacaggcacaccaaauu

SEQ ID NO: 1655381 - RNA, 19 nt, Homo sapiens
  misc_RNA (1)...(19): siRNA sense strand
caacagcgacuaugaaacc

SEQ ID NO: 1655382 - RNA, 19 nt, Homo sapiens
  misc_RNA (1)...(19): siRNA sense strand
cacaucaacuccauaucug

SEQ ID NO: 1655383 - RNA, 19 nt, Homo sapiens
  misc_RNA (1)...(19): siRNA sense strand
uuucuucugucuacuaaug

SEQ ID NO: 1655384 - RNA, 19 nt, Homo sapiens
  misc_RNA (1)...(19): siRNA sense strand
cauaucacaucaacuccau

SEQ ID NO: 1655385 - RNA, 19 nt, Homo sapiens
  misc_RNA (1)...(19): siRNA sense strand
ccaacgcacacacauauca

SEQ ID NO: 1655386 - RNA, 19 nt, Homo sapiens
  misc_RNA (1)...(19): siRNA sense strand
agucugggaucucaacaug

SEQ ID NO: 1655387 - RNA, 19 nt, Homo sapiens
  misc_RNA (1)...(19): siRNA sense strand
gucaacagcgacuaugaaa

SEQ ID NO: 1655388 - RNA, 19 nt, Homo sapiens
  misc_RNA (1)...(19): siRNA sense strand
cuuaccagguucaugacua

SEQ ID NO: 1655389 - RNA, 19 nt, Homo sapiens
  misc_RNA (1)...(19): siRNA sense strand
ggaagauccaagcaacaga

SEQ ID NO: 1655390 - RNA, 19 nt, Homo sapiens
  misc_RNA (1)...(19): siRNA sense strand
uaucacaucaacuccauau

SEQ ID NO: 1655391 - RNA, 19 nt, Homo sapiens
  misc_RNA (1)...(19): siRNA sense strand
gauuucggaugugaaguuc

SEQ ID NO: 1655392 - RNA, 19 nt, Homo sapiens
  misc_RNA (1)...(19): siRNA sense strand
gcauacagcuuggcauccu

SEQ ID NO: 1655393 - RNA, 19 nt, Homo sapiens
  misc_RNA (1)...(19): siRNA sense strand
acaacaacuucuucaggau

SEQ ID NO: 1655394 - RNA, 19 nt, Homo sapiens
  misc_RNA (1)...(19): siRNA sense strand
caacgagagcaggagagua

SEQ ID NO: 1655395 - RNA, 19 nt, Homo sapiens
  misc_RNA (1)...(19): siRNA sense strand
ugacaggcuccuacaacaa

SEQ ID NO: 1655396 - RNA, 19 nt, Homo sapiens
  misc_RNA (1)...(19): siRNA sense strand
uaaccuauggaacuuugaa

SEQ ID NO: 1655397 - RNA, 19 nt, Homo sapiens
  misc_RNA (1)...(19): siRNA sense strand
cgauuucggaugugaaguu

SEQ ID NO: 1655398 - RNA, 19 nt, Homo sapiens
  misc_RNA (1)...(19): siRNA sense strand
agaaggcuacaaucugaaa

SEQ ID NO: 1655399 - RNA, 19 nt, Homo sapiens
  misc_RNA (1)...(19): siRNA sense strand
uaccugaagaguuuagaaa

SEQ ID NO: 1655400 - RNA, 19 nt, Homo sapiens
  misc_RNA (1)...(19): siRNA sense strand
ccaagcaacagaucauuuu

SEQ ID NO: 1655401 - RNA, 19 nt, Homo sapiens
  misc_RNA (1)...(19): siRNA sense strand
gaaagucagcgagcgugau

SEQ ID NO: 1655402 - RNA, 19 nt, Homo sapiens
  misc_RNA (1)...(19): siRNA sense strand
cggcuacaaauaaccuaua

SEQ ID NO: 1655403 - RNA, 19 nt, Homo sapiens
  misc_RNA (1)...(19): siRNA sense strand
ggccagaaggcuacaaucu

SEQ ID NO: 1655404 - RNA, 19 nt, Homo sapiens
  misc_RNA (1)...(19): siRNA sense strand
gcuguguucccucuaugaa

SEQ ID NO: 1655405 - RNA, 19 nt, Homo sapiens
  misc_RNA (1)...(19): siRNA sense strand
gauccugccaccaucacaa

SEQ ID NO: 1655406 - RNA, 19 nt, Homo sapiens
  misc_RNA (1)...(19): siRNA sense strand
aaacugugaagcuguggaa

SEQ ID NO: 1655407 - RNA, 19 nt, Homo sapiens
  misc_RNA (1)...(19): siRNA sense strand
gaaacaccaagcgugaugu

SEQ ID NO: 1655408 - RNA, 19 nt, Homo sapiens
  misc_RNA (1)...(19): siRNA sense strand
agaaacaccaagcgugaug

SEQ ID NO: 1655409 - RNA, 19 nt, Homo sapiens
  misc_RNA (1)...(19): siRNA sense strand
cccagcagaaugcagcuua

SEQ ID NO: 1655410 - RNA, 19 nt, Homo sapiens
  misc_RNA (1)...(19): siRNA sense strand
gugaauacaauguuuacag

SEQ ID NO: 1655411 - RNA, 19 nt, Homo sapiens
  misc_RNA (1)...(19): siRNA sense strand
ugccaacgcacacacauau

SEQ ID NO: 1655412 - RNA, 19 nt, Homo sapiens
  misc_RNA (1)...(19): siRNA sense strand
ugucaacagcgacuaugaa

SEQ ID NO: 1655413 - RNA, 19 nt, Homo sapiens
  misc_RNA (1)...(19): siRNA sense strand
aacaacuucuucaggaugu

SEQ ID NO: 1655414 - RNA, 19 nt, Homo sapiens
  misc_RNA (1)...(19): siRNA sense strand
gacaggcuccuacaacaac

SEQ ID NO: 1655415 - RNA, 19 nt, Homo sapiens
  misc_RNA (1)...(19): siRNA sense strand
cagaaugcagcuuacuuuc

SEQ ID NO: 1655416 - RNA, 19 nt, Homo sapiens
  misc_RNA (1)...(19): siRNA sense strand
ucaacuccauaucugucaa

SEQ ID NO: 1655417 - RNA, 19 nt, Homo sapiens
  misc_RNA (1)...(19): siRNA sense strand
cacagugggagguauauca

SEQ ID NO: 1655418 - RNA, 19 nt, Homo sapiens
  misc_RNA (1)...(19): siRNA sense strand
cugaaauuaucucuucgau

SEQ ID NO: 1655419 - RNA, 19 nt, Homo sapiens
  misc_RNA (1)...(19): siRNA sense strand
gauuaaccuauggaacuuu

SEQ ID NO: 1655420 - RNA, 19 nt, Homo sapiens
  misc_RNA (1)...(19): siRNA sense strand
ucagcgagcgugauaagag

SEQ ID NO: 1655421 - RNA, 19 nt, Homo sapiens
  misc_RNA (1)...(19): siRNA sense strand
uuaccagguucaugacuac

SEQ ID NO: 1655422 - RNA, 19 nt, Homo sapiens
  misc_RNA (1)...(19): siRNA sense strand
cugugaagcuguggaaagu

SEQ ID NO: 1655423 - RNA, 19 nt, Homo sapiens
  misc_RNA (1)...(19): siRNA sense strand
gcaucugcccugugugaca

SEQ ID NO: 1655424 - RNA, 19 nt, Homo sapiens
  misc_RNA (1)...(19): siRNA sense strand
auuaaccuauggaacuuug

SEQ ID NO: 1655425 - RNA, 19 nt, Homo sapiens
  misc_RNA (1)...(19): siRNA sense strand
gacauuaagccagccaaca

SEQ ID NO: 1655426 - RNA, 19 nt, Homo sapiens
  misc_RNA (1)...(19): siRNA sense strand
cauacagcuuggcauccuu

SEQ ID NO: 1655427 - RNA, 19 nt, Homo sapiens
  misc_RNA (1)...(19): siRNA sense strand
gcuccuacaacaacuucuu

SEQ ID NO: 1655428 - RNA, 19 nt, Homo sapiens
  misc_RNA (1)...(19): siRNA sense strand
caaagucugggaucucaac

SEQ ID NO: 1655429 - RNA, 19 nt, Homo sapiens
  misc_RNA (1)...(19): siRNA sense strand
gaaugcagcuuacuuucuu

SEQ ID NO: 1655430 - RNA, 19 nt, Homo sapiens
  misc_RNA (1)...(19): siRNA sense strand
ucgauuaccugaagaguuu

SEQ ID NO: 1655431 - RNA, 19 nt, Homo sapiens
  misc_RNA (1)...(19): siRNA sense strand
gcacacacauaucacauca

SEQ ID NO: 1655432 - RNA, 19 nt, Homo sapiens
  misc_RNA (1)...(19): siRNA sense strand
ccugaagaguuuagaaaua

SEQ ID NO: 1655433 - RNA, 19 nt, Homo sapiens
  misc_RNA (1)...(19): siRNA sense strand
gcugaugaccugaggauua

SEQ ID NO: 1655434 - RNA, 19 nt, Homo sapiens
  misc_RNA (1)...(19): siRNA sense strand
caaccacacgggagaauua

SEQ ID NO: 1655435 - RNA, 19 nt, Homo sapiens
  misc_RNA (1)...(19): siRNA sense strand
gcagaaugcagcuuacuuu

SEQ ID NO: 1655436 - RNA, 19 nt, Homo sapiens
  misc_RNA (1)...(19): siRNA sense strand
caucgagacuuaccagguu

SEQ ID NO: 1655437 - RNA, 19 nt, Homo sapiens
  misc_RNA (1)...(19): siRNA sense strand
gcaguggcggcuacaaaua

SEQ ID NO: 1655438 - RNA, 19 nt, Homo sapiens
  misc_RNA (1)...(19): siRNA sense strand
ggauuaaccuauggaacuu

SEQ ID NO: 1655439 - RNA, 19 nt, Homo sapiens
  misc_RNA (1)...(19): siRNA sense strand
gaucacagcagccgaguuc

SEQ ID NO: 1655440 - RNA, 19 nt, Homo sapiens
  misc_RNA (1)...(19): siRNA sense strand
ggacaauccggcuguguga

SEQ ID NO: 1655441 - RNA, 19 nt, Homo sapiens
  misc_RNA (1)...(19): siRNA sense strand
gcagcuuacuuucuucugu

SEQ ID NO: 1655442 - RNA, 19 nt, Homo sapiens
  misc_RNA (1)...(19): siRNA sense strand
ccuauggaacuuugaaaua

SEQ ID NO: 1655443 - RNA, 19 nt, Homo sapiens
  misc_RNA (1)...(19): siRNA sense strand
cugaugaccugaggauuaa

SEQ ID NO: 1655444 - RNA, 19 nt, Homo sapiens
  misc_RNA (1)...(19): siRNA sense strand
ucucugaaauuaucucuuc

SEQ ID NO: 1655445 - RNA, 19 nt, Homo sapiens
  misc_RNA (1)...(19): siRNA sense strand
ugacaggcacaccaaauuu

SEQ ID NO: 1655446 - RNA, 19 nt, Homo sapiens
  misc_RNA (1)...(19): siRNA sense strand
gugaagcuguggaaaguca

SEQ ID NO: 1655447 - RNA, 19 nt, Homo sapiens
  misc_RNA (1)...(19): siRNA sense strand
caagcuguguucccucuau

SEQ ID NO: 1655448 - RNA, 19 nt, Homo sapiens
  misc_RNA (1)...(19): siRNA sense strand
cgaguucgauuaccugaag

SEQ ID NO: 1655449 - RNA, 19 nt, Homo sapiens
  misc_RNA (1)...(19): siRNA sense strand
agacuuaccagguucauga

SEQ ID NO: 1655450 - RNA, 19 nt, Homo sapiens
  misc_RNA (1)...(19): siRNA sense strand
gggucggguuguaauauuu

SEQ ID NO: 1655451 - RNA, 19 nt, Homo sapiens
  misc_RNA (1)...(19): siRNA sense strand
ccacacgggagaauuacua

SEQ ID NO: 1655452 - RNA, 19 nt, Homo sapiens
  misc_RNA (1)...(19): siRNA sense strand
gaagauccaagcaacagau

SEQ ID NO: 1655453 - RNA, 19 nt, Homo sapiens
  misc_RNA (1)...(19): siRNA sense strand
cugaagaguuuagaaauag

SEQ ID NO: 1655454 - RNA, 19 nt, Homo sapiens
  misc_RNA (1)...(19): siRNA sense strand
cgagaucagugucgacagu

SEQ ID NO: 1655455 - RNA, 19 nt, Homo sapiens
  misc_RNA (1)...(19): siRNA sense strand
aaagucagcgagcgugaua

SEQ ID NO: 1655456 - RNA, 19 nt, Homo sapiens
  misc_RNA (1)...(19): siRNA sense strand
gaccugaggauuaaccuau

SEQ ID NO: 1655457 - RNA, 19 nt, Homo sapiens
  misc_RNA (1)...(19): siRNA sense strand
gcacauuccagagccauga

SEQ ID NO: 1655458 - RNA, 19 nt, Homo sapiens
  misc_RNA (1)...(19): siRNA sense strand
ggcuacaaauaaccuauau

SEQ ID NO: 1655459 - RNA, 19 nt, Homo sapiens
  misc_RNA (1)...(19): siRNA sense strand
acacacauaucacaucaac

SEQ ID NO: 1655460 - RNA, 19 nt, Homo sapiens
  misc_RNA (1)...(19): siRNA sense strand
ucucuucgauuucggaugu

SEQ ID NO: 1655461 - RNA, 19 nt, Homo sapiens
  misc_RNA (1)...(19): siRNA sense strand
aacgagagcaggagaguaa

SEQ ID NO: 1655462 - RNA, 19 nt, Homo sapiens
  misc_RNA (1)...(19): siRNA sense strand
gaaaagacgagaucagugu

SEQ ID NO: 1655463 - RNA, 19 nt, Homo sapiens
  misc_RNA (1)...(19): siRNA sense strand
ucaggauguucgacagaaa

SEQ ID NO: 1655464 - RNA, 19 nt, Homo sapiens
  misc_RNA (1)...(19): siRNA sense strand
ucacaucaacuccauaucu

SEQ ID NO: 1655465 - RNA, 19 nt, Homo sapiens
  misc_RNA (1)...(19): siRNA sense strand
caguggcggcuacaaauaa

SEQ ID NO: 1655466 - RNA, 19 nt, Homo sapiens
  misc_RNA (1)...(19): siRNA sense strand
ucugggaucucaacaugga

SEQ ID NO: 1655467 - RNA, 19 nt, Homo sapiens
  misc_RNA (1)...(19): siRNA sense strand
agugggagguauaucauga

SEQ ID NO: 1655468 - RNA, 19 nt, Homo sapiens
  misc_RNA (1)...(19): siRNA sense strand
acacauaucacaucaacuc

SEQ ID NO: 1655469 - RNA, 19 nt, Homo sapiens
  misc_RNA (1)...(19): siRNA sense strand
cagcuuggcauccuucaga

SEQ ID NO: 1655470 - RNA, 19 nt, Homo sapiens
  misc_RNA (1)...(19): siRNA sense strand
ggaaugggucagacagugu

SEQ ID NO: 1655471 - RNA, 19 nt, Homo sapiens
  misc_RNA (1)...(19): siRNA sense strand
gucaaagucugggaucuca

SEQ ID NO: 1655472 - RNA, 19 nt, Homo sapiens
  misc_RNA (1)...(19): siRNA sense strand
gugacaggcacaccaaauu

SEQ ID NO: 1655473 - RNA, 19 nt, Homo sapiens
  misc_RNA (1)...(19): siRNA sense strand
caacagcgacuaugaaacc

SEQ ID NO: 1655474 - RNA, 19 nt, Homo sapiens
  misc_RNA (1)...(19): siRNA sense strand
cacaucaacuccauaucug

SEQ ID NO: 1655475 - RNA, 19 nt, Homo sapiens
  misc_RNA (1)...(19): siRNA sense strand
uuucuucugucuacuaaug

SEQ ID NO: 1655476 - RNA, 19 nt, Homo sapiens
  misc_RNA (1)...(19): siRNA sense strand
cauaucacaucaacuccau

SEQ ID NO: 1655477 - RNA, 19 nt, Homo sapiens
  misc_RNA (1)...(19): siRNA sense strand
ccaacgcacacacauauca

SEQ ID NO: 1655478 - RNA, 19 nt, Homo sapiens
  misc_RNA (1)...(19): siRNA sense strand
agucugggaucucaacaug

SEQ ID NO: 1655479 - RNA, 19 nt, Homo sapiens
  misc_RNA (1)...(19): siRNA sense strand
gucaacagcgacuaugaaa

SEQ ID NO: 1655480 - RNA, 19 nt, Homo sapiens
  misc_RNA (1)...(19): siRNA sense strand
cuuaccagguucaugacua

SEQ ID NO: 1655481 - RNA, 19 nt, Homo sapiens
  misc_RNA (1)...(19): siRNA sense strand
ggaagauccaagcaacaga

SEQ ID NO: 1655482 - RNA, 19 nt, Homo sapiens
  misc_RNA (1)...(19): siRNA sense strand
uaucacaucaacuccauau

SEQ ID NO: 1655483 - RNA, 19 nt, Homo sapiens
  misc_RNA (1)...(19): siRNA sense strand
gauuucggaugugaaguuc

SEQ ID NO: 1655484 - RNA, 19 nt, Homo sapiens
  misc_RNA (1)...(19): siRNA sense strand
gcauacagcuuggcauccu

SEQ ID NO: 1655485 - RNA, 19 nt, Homo sapiens
  misc_RNA (1)...(19): siRNA sense strand
acaacaacuucuucaggau

SEQ ID NO: 1655486 - RNA, 19 nt, Homo sapiens
  misc_RNA (1)...(19): siRNA sense strand
caacgagagcaggagagua

SEQ ID NO: 1655487 - RNA, 19 nt, Homo sapiens
  misc_RNA (1)...(19): siRNA sense strand
ugacaggcuccuacaacaa

SEQ ID NO: 1655488 - RNA, 19 nt, Homo sapiens
  misc_RNA (1)...(19): siRNA sense strand
uaaccuauggaacuuugaa

SEQ ID NO: 1655489 - RNA, 19 nt, Homo sapiens
  misc_RNA (1)...(19): siRNA sense strand
cgauuucggaugugaaguu

SEQ ID NO: 1655490 - RNA, 19 nt, Homo sapiens
  misc_RNA (1)...(19): siRNA sense strand
agaaggcuacaaucugaaa

SEQ ID NO: 1655491 - RNA, 19 nt, Homo sapiens
  misc_RNA (1)...(19): siRNA sense strand
uaccugaagaguuuagaaa

SEQ ID NO: 1655492 - RNA, 19 nt, Homo sapiens
  misc_RNA (1)...(19): siRNA sense strand
ccaagcaacagaucauuuu

SEQ ID NO: 1655493 - RNA, 19 nt, Homo sapiens
  misc_RNA (1)...(19): siRNA sense strand
gaaagucagcgagcgugau

SEQ ID NO: 1655494 - RNA, 19 nt, Homo sapiens
  misc_RNA (1)...(19): siRNA sense strand
cggcuacaaauaaccuaua

SEQ ID NO: 1655495 - RNA, 19 nt, Homo sapiens
  misc_RNA (1)...(19): siRNA sense strand
ggccagaaggcuacaaucu

SEQ ID NO: 1655496 - RNA, 19 nt, Homo sapiens
  misc_RNA (1)...(19): siRNA sense strand
gcuguguucccucuaugaa

SEQ ID NO: 1655497 - RNA, 19 nt, Homo sapiens
  misc_RNA (1)...(19): siRNA sense strand
gauccugccaccaucacaa

SEQ ID NO: 1655498 - RNA, 19 nt, Homo sapiens
  misc_RNA (1)...(19): siRNA sense strand
aaacugugaagcuguggaa

SEQ ID NO: 1655499 - RNA, 19 nt, Homo sapiens
  misc_RNA (1)...(19): siRNA sense strand
gaaacaccaagcgugaugu

SEQ ID NO: 1655500 - RNA, 19 nt, Homo sapiens
  misc_RNA (1)...(19): siRNA sense strand
agaaacaccaagcgugaug

SEQ ID NO: 1655501 - RNA, 19 nt, Homo sapiens
  misc_RNA (1)...(19): siRNA sense strand
cccagcagaaugcagcuua

SEQ ID NO: 1655502 - RNA, 19 nt, Homo sapiens
  misc_RNA (1)...(19): siRNA sense strand
gugaauacaauguuuacag

SEQ ID NO: 1655503 - RNA, 19 nt, Homo sapiens
  misc_RNA (1)...(19): siRNA sense strand
ugccaacgcacacacauau

SEQ ID NO: 1655504 - RNA, 19 nt, Homo sapiens
  misc_RNA (1)...(19): siRNA sense strand
ugucaacagcgacuaugaa

SEQ ID NO: 1655505 - RNA, 19 nt, Homo sapiens
  misc_RNA (1)...(19): siRNA sense strand
aacaacuucuucaggaugu

SEQ ID NO: 1655506 - RNA, 19 nt, Homo sapiens
  misc_RNA (1)...(19): siRNA sense strand
gacaggcuccuacaacaac

SEQ ID NO: 1655507 - RNA, 19 nt, Homo sapiens
  misc_RNA (1)...(19): siRNA sense strand
cagaaugcagcuuacuuuc

SEQ ID NO: 1655508 - RNA, 19 nt, Homo sapiens
  misc_RNA (1)...(19): siRNA sense strand
ucaacuccauaucugucaa

SEQ ID NO: 1655509 - RNA, 19 nt, Homo sapiens
  misc_RNA (1)...(19): siRNA sense strand
cacagugggagguauauca

SEQ ID NO: 1655510 - RNA, 19 nt, Homo sapiens
  misc_RNA (1)...(19): siRNA sense strand
cugaaauuaucucuucgau

SEQ ID NO: 1655511 - RNA, 19 nt, Homo sapiens
  misc_RNA (1)...(19): siRNA sense strand
gauuaaccuauggaacuuu

SEQ ID NO: 1655512 - RNA, 19 nt, Homo sapiens
  misc_RNA (1)...(19): siRNA sense strand
ucagcgagcgugauaagag

SEQ ID NO: 1655513 - RNA, 19 nt, Homo sapiens
  misc_RNA (1)...(19): siRNA sense strand
uuaccagguucaugacuac

SEQ ID NO: 1655514 - RNA, 19 nt, Homo sapiens
  misc_RNA (1)...(19): siRNA sense strand
cugugaagcuguggaaagu

SEQ ID NO: 1655515 - RNA, 19 nt, Homo sapiens
  misc_RNA (1)...(19): siRNA sense strand
gcaucugcccugugugaca

SEQ ID NO: 1655516 - RNA, 19 nt, Homo sapiens
  misc_RNA (1)...(19): siRNA sense strand
auuaaccuauggaacuuug

SEQ ID NO: 1655517 - RNA, 19 nt, Homo sapiens
  misc_RNA (1)...(19): siRNA sense strand
gacauuaagccagccaaca

SEQ ID NO: 1655518 - RNA, 19 nt, Homo sapiens
  misc_RNA (1)...(19): siRNA sense strand
cauacagcuuggcauccuu

SEQ ID NO: 1655519 - RNA, 19 nt, Homo sapiens
  misc_RNA (1)...(19): siRNA sense strand
gcuccuacaacaacuucuu

SEQ ID NO: 1655520 - RNA, 19 nt, Homo sapiens
  misc_RNA (1)...(19): siRNA sense strand
caaagucugggaucucaac

SEQ ID NO: 1655521 - RNA, 19 nt, Homo sapiens
  misc_RNA (1)...(19): siRNA sense strand
gaaugcagcuuacuuucuu

SEQ ID NO: 1655522 - RNA, 19 nt, Homo sapiens
  misc_RNA (1)...(19): siRNA sense strand
ucgauuaccugaagaguuu

SEQ ID NO: 1655523 - RNA, 19 nt, Homo sapiens
  misc_RNA (1)...(19): siRNA sense strand
gcacacacauaucacauca

SEQ ID NO: 1655524 - RNA, 19 nt, Homo sapiens
  misc_RNA (1)...(19): siRNA sense strand
ccugaagaguuuagaaaua

SEQ ID NO: 1655525 - RNA, 19 nt, Homo sapiens
  misc_RNA (1)...(19): siRNA sense strand
gcugaugaccugaggauua

SEQ ID NO: 1655526 - RNA, 19 nt, Homo sapiens
  misc_RNA (1)...(19): siRNA sense strand
caaccacacgggagaauua

SEQ ID NO: 1655527 - RNA, 19 nt, Homo sapiens
  misc_RNA (1)...(19): siRNA sense strand
gcagaaugcagcuuacuuu

SEQ ID NO: 1655528 - RNA, 19 nt, Homo sapiens
  misc_RNA (1)...(19): siRNA sense strand
caucgagacuuaccagguu

SEQ ID NO: 1655529 - RNA, 19 nt, Homo sapiens
  misc_RNA (1)...(19): siRNA sense strand
gcaguggcggcuacaaaua

SEQ ID NO: 1655530 - RNA, 19 nt, Homo sapiens
  misc_RNA (1)...(19): siRNA sense strand
ggauuaaccuauggaacuu

SEQ ID NO: 1655531 - RNA, 19 nt, Homo sapiens
  misc_RNA (1)...(19): siRNA sense strand
gaucacagcagccgaguuc

SEQ ID NO: 1655532 - RNA, 19 nt, Homo sapiens
  misc_RNA (1)...(19): siRNA sense strand
ggacaauccggcuguguga

SEQ ID NO: 1655533 - RNA, 19 nt, Homo sapiens
  misc_RNA (1)...(19): siRNA sense strand
gcagcuuacuuucuucugu

SEQ ID NO: 1655534 - RNA, 19 nt, Homo sapiens
  misc_RNA (1)...(19): siRNA sense strand
ccuauggaacuuugaaaua

SEQ ID NO: 1655535 - RNA, 19 nt, Homo sapiens
  misc_RNA (1)...(19): siRNA sense strand
cugaugaccugaggauuaa

SEQ ID NO: 1655536 - RNA, 19 nt, Homo sapiens
  misc_RNA (1)...(19): siRNA sense strand
ucucugaaauuaucucuuc

SEQ ID NO: 1655537 - RNA, 19 nt, Homo sapiens
  misc_RNA (1)...(19): siRNA sense strand
ugacaggcacaccaaauuu

SEQ ID NO: 1655538 - RNA, 19 nt, Homo sapiens
  misc_RNA (1)...(19): siRNA sense strand
gugaagcuguggaaaguca

SEQ ID NO: 1655539 - RNA, 19 nt, Homo sapiens
  misc_RNA (1)...(19): siRNA sense strand
caagcuguguucccucuau

SEQ ID NO: 1655540 - RNA, 19 nt, Homo sapiens
  misc_RNA (1)...(19): siRNA sense strand
cgaguucgauuaccugaag

SEQ ID NO: 1655541 - RNA, 19 nt, Homo sapiens
  misc_RNA (1)...(19): siRNA sense strand
agacuuaccagguucauga

SEQ ID NO: 1655542 - RNA, 19 nt, Homo sapiens
  misc_RNA (1)...(19): siRNA sense strand
gggucggguuguaauauuu

SEQ ID NO: 1655543 - RNA, 19 nt, Homo sapiens
  misc_RNA (1)...(19): siRNA sense strand
ccacacgggagaauuacua

SEQ ID NO: 1655544 - RNA, 19 nt, Homo sapiens
  misc_RNA (1)...(19): siRNA sense strand
gaagauccaagcaacagau

SEQ ID NO: 1655545 - RNA, 19 nt, Homo sapiens
  misc_RNA (1)...(19): siRNA sense strand
cugaagaguuuagaaauag

SEQ ID NO: 1655546 - RNA, 19 nt, Homo sapiens
  misc_RNA (1)...(19): siRNA sense strand
cgagaucagugucgacagu

SEQ ID NO: 1655547 - RNA, 19 nt, Homo sapiens
  misc_RNA (1)...(19): siRNA sense strand
aaagucagcgagcgugaua

SEQ ID NO: 1655548 - RNA, 19 nt, Homo sapiens
  misc_RNA (1)...(19): siRNA sense strand
gaccugaggauuaaccuau

SEQ ID NO: 1655549 - RNA, 19 nt, Homo sapiens
  misc_RNA (1)...(19): siRNA sense strand
gcacauuccagagccauga

SEQ ID NO: 1655550 - RNA, 19 nt, Homo sapiens
  misc_RNA (1)...(19): siRNA sense strand
ggcuacaaauaaccuauau

SEQ ID NO: 1655551 - RNA, 19 nt, Homo sapiens
  misc_RNA (1)...(19): siRNA sense strand
acacacauaucacaucaac

SEQ ID NO: 1655552 - RNA, 19 nt, Homo sapiens
  misc_RNA (1)...(19): siRNA sense strand
ucucuucgauuucggaugu

SEQ ID NO: 1655553 - RNA, 19 nt, Homo sapiens
  misc_RNA (1)...(19): siRNA sense strand
aacgagagcaggagaguaa

SEQ ID NO: 1655554 - RNA, 19 nt, Homo sapiens
  misc_RNA (1)...(19): siRNA sense strand
gaaaagacgagaucagugu

SEQ ID NO: 1655555 - RNA, 19 nt, Homo sapiens
  misc_RNA (1)...(19): siRNA sense strand
ucaggauguucgacagaaa

SEQ ID NO: 1655556 - RNA, 19 nt, Homo sapiens
  misc_RNA (1)...(19): siRNA sense strand
ucacaucaacuccauaucu

SEQ ID NO: 1655557 - RNA, 19 nt, Homo sapiens
  misc_RNA (1)...(19): siRNA sense strand
caguggcggcuacaaauaa

SEQ ID NO: 1655558 - RNA, 19 nt, Homo sapiens
  misc_RNA (1)...(19): siRNA sense strand
ucugggaucucaacaugga

SEQ ID NO: 1655559 - RNA, 19 nt, Homo sapiens
  misc_RNA (1)...(19): siRNA sense strand
agugggagguauaucauga

SEQ ID NO: 1655560 - RNA, 19 nt, Homo sapiens
  misc_RNA (1)...(19): siRNA sense strand
acacauaucacaucaacuc

SEQ ID NO: 1655561 - RNA, 19 nt, Homo sapiens
  misc_RNA (1)...(19): siRNA sense strand
cagcuuggcauccuucaga

SEQ ID NO: 1655562 - RNA, 19 nt, Homo sapiens
  misc_RNA (1)...(19): siRNA sense strand
ggaaugggucagacagugu

SEQ ID NO: 1655563 - RNA, 19 nt, Homo sapiens
  misc_RNA (1)...(19): siRNA sense strand
gucaaagucugggaucuca

SEQ ID NO: 1655564 - RNA, 19 nt, Homo sapiens
  misc_RNA (1)...(19): siRNA sense strand
gugacaggcacaccaaauu

SEQ ID NO: 1655565 - RNA, 19 nt, Homo sapiens
  misc_RNA (1)...(19): siRNA sense strand
caacagcgacuaugaaacc

SEQ ID NO: 1655566 - RNA, 19 nt, Homo sapiens
  misc_RNA (1)...(19): siRNA sense strand
cacaucaacuccauaucug

SEQ ID NO: 1655567 - RNA, 19 nt, Homo sapiens
  misc_RNA (1)...(19): siRNA sense strand
uuucuucugucuacuaaug

SEQ ID NO: 1655568 - RNA, 19 nt, Homo sapiens
  misc_RNA (1)...(19): siRNA sense strand
cauaucacaucaacuccau

SEQ ID NO: 1655569 - RNA, 19 nt, Homo sapiens
  misc_RNA (1)...(19): siRNA sense strand
ccaacgcacacacauauca

SEQ ID NO: 1655570 - RNA, 19 nt, Homo sapiens
  misc_RNA (1)...(19): siRNA sense strand
agucugggaucucaacaug

SEQ ID NO: 1655571 - RNA, 19 nt, Homo sapiens
  misc_RNA (1)...(19): siRNA sense strand
gucaacagcgacuaugaaa

SEQ ID NO: 1655572 - RNA, 19 nt, Homo sapiens
  misc_RNA (1)...(19): siRNA sense strand
cuuaccagguucaugacua

SEQ ID NO: 1655573 - RNA, 19 nt, Homo sapiens
  misc_RNA (1)...(19): siRNA sense strand
ggaagauccaagcaacaga

SEQ ID NO: 1655574 - RNA, 19 nt, Homo sapiens
  misc_RNA (1)...(19): siRNA sense strand
uaucacaucaacuccauau

SEQ ID NO: 1655575 - RNA, 19 nt, Homo sapiens
  misc_RNA (1)...(19): siRNA sense strand
gauuucggaugugaaguuc

SEQ ID NO: 1655576 - RNA, 19 nt, Homo sapiens
  misc_RNA (1)...(19): siRNA sense strand
gcauacagcuuggcauccu

SEQ ID NO: 1655577 - RNA, 19 nt, Homo sapiens
  misc_RNA (1)...(19): siRNA sense strand
acaacaacuucuucaggau

SEQ ID NO: 1655578 - RNA, 19 nt, Homo sapiens
  misc_RNA (1)...(19): siRNA sense strand
caacgagagcaggagagua

SEQ ID NO: 1655579 - RNA, 19 nt, Homo sapiens
  misc_RNA (1)...(19): siRNA sense strand
ugacaggcuccuacaacaa

SEQ ID NO: 1655580 - RNA, 19 nt, Homo sapiens
  misc_RNA (1)...(19): siRNA sense strand
uaaccuauggaacuuugaa

SEQ ID NO: 1655581 - RNA, 19 nt, Homo sapiens
  misc_RNA (1)...(19): siRNA sense strand
cgauuucggaugugaaguu

SEQ ID NO: 1655582 - RNA, 19 nt, Homo sapiens
  misc_RNA (1)...(19): siRNA sense strand
agaaggcuacaaucugaaa

SEQ ID NO: 1655583 - RNA, 19 nt, Homo sapiens
  misc_RNA (1)...(19): siRNA sense strand
uaccugaagaguuuagaaa

SEQ ID NO: 1655584 - RNA, 19 nt, Homo sapiens
  misc_RNA (1)...(19): siRNA sense strand
ccaagcaacagaucauuuu

SEQ ID NO: 1655585 - RNA, 19 nt, Homo sapiens
  misc_RNA (1)...(19): siRNA sense strand
gaaagucagcgagcgugau

SEQ ID NO: 1655586 - RNA, 19 nt, Homo sapiens
  misc_RNA (1)...(19): siRNA sense strand
cggcuacaaauaaccuaua

SEQ ID NO: 1655587 - RNA, 19 nt, Homo sapiens
  misc_RNA (1)...(19): siRNA sense strand
ggccagaaggcuacaaucu

SEQ ID NO: 1655588 - RNA, 19 nt, Homo sapiens
  misc_RNA (1)...(19): siRNA sense strand
gcuguguucccucuaugaa

SEQ ID NO: 1655589 - RNA, 19 nt, Homo sapiens
  misc_RNA (1)...(19): siRNA sense strand
gauccugccaccaucacaa

SEQ ID NO: 1655590 - RNA, 19 nt, Homo sapiens
  misc_RNA (1)...(19): siRNA sense strand
aaacugugaagcuguggaa

SEQ ID NO: 1655591 - RNA, 19 nt, Homo sapiens
  misc_RNA (1)...(19): siRNA sense strand
gaaacaccaagcgugaugu

SEQ ID NO: 1655592 - RNA, 19 nt, Homo sapiens
  misc_RNA (1)...(19): siRNA sense strand
agaaacaccaagcgugaug

SEQ ID NO: 1655593 - RNA, 19 nt, Homo sapiens
  misc_RNA (1)...(19): siRNA sense strand
cccagcagaaugcagcuua

SEQ ID NO: 1655594 - RNA, 19 nt, Homo sapiens
  misc_RNA (1)...(19): siRNA sense strand
gugaauacaauguuuacag

SEQ ID NO: 1655595 - RNA, 19 nt, Homo sapiens
  misc_RNA (1)...(19): siRNA sense strand
ugccaacgcacacacauau

SEQ ID NO: 1655596 - RNA, 19 nt, Homo sapiens
  misc_RNA (1)...(19): siRNA sense strand
ugucaacagcgacuaugaa

SEQ ID NO: 1655597 - RNA, 19 nt, Homo sapiens
  misc_RNA (1)...(19): siRNA sense strand
aacaacuucuucaggaugu

SEQ ID NO: 1655598 - RNA, 19 nt, Homo sapiens
  misc_RNA (1)...(19): siRNA sense strand
gacaggcuccuacaacaac

SEQ ID NO: 1655599 - RNA, 19 nt, Homo sapiens
  misc_RNA (1)...(19): siRNA sense strand
cagaaugcagcuuacuuuc

SEQ ID NO: 1655600 - RNA, 19 nt, Homo sapiens
  misc_RNA (1)...(19): siRNA sense strand
ucaacuccauaucugucaa

SEQ ID NO: 1655601 - RNA, 19 nt, Homo sapiens
  misc_RNA (1)...(19): siRNA sense strand
cacagugggagguauauca

SEQ ID NO: 1655602 - RNA, 19 nt, Homo sapiens
  misc_RNA (1)...(19): siRNA sense strand
cugaaauuaucucuucgau

SEQ ID NO: 1655603 - RNA, 19 nt, Homo sapiens
  misc_RNA (1)...(19): siRNA sense strand
gauuaaccuauggaacuuu

SEQ ID NO: 1655604 - RNA, 19 nt, Homo sapiens
  misc_RNA (1)...(19): siRNA sense strand
ucagcgagcgugauaagag

SEQ ID NO: 1655605 - RNA, 19 nt, Homo sapiens
  misc_RNA (1)...(19): siRNA sense strand
uuaccagguucaugacuac

SEQ ID NO: 1655606 - RNA, 19 nt, Homo sapiens
  misc_RNA (1)...(19): siRNA sense strand
cugugaagcuguggaaagu

SEQ ID NO: 1655607 - RNA, 19 nt, Homo sapiens
  misc_RNA (1)...(19): siRNA sense strand
gcaucugcccugugugaca

SEQ ID NO: 1655608 - RNA, 19 nt, Homo sapiens
  misc_RNA (1)...(19): siRNA sense strand
auuaaccuauggaacuuug

SEQ ID NO: 1655609 - RNA, 19 nt, Homo sapiens
  misc_RNA (1)...(19): siRNA sense strand
gacauuaagccagccaaca

SEQ ID NO: 1655610 - RNA, 19 nt, Homo sapiens
  misc_RNA (1)...(19): siRNA sense strand
cauacagcuuggcauccuu

SEQ ID NO: 1655611 - RNA, 19 nt, Homo sapiens
  misc_RNA (1)...(19): siRNA sense strand
gcuccuacaacaacuucuu

SEQ ID NO: 1655612 - RNA, 19 nt, Homo sapiens
  misc_RNA (1)...(19): siRNA sense strand
caaagucugggaucucaac

SEQ ID NO: 1655613 - RNA, 19 nt, Homo sapiens
  misc_RNA (1)...(19): siRNA sense strand
gaaugcagcuuacuuucuu

SEQ ID NO: 1655614 - RNA, 19 nt, Homo sapiens
  misc_RNA (1)...(19): siRNA sense strand
ucgauuaccugaagaguuu

SEQ ID NO: 1655615 - RNA, 19 nt, Homo sapiens
  misc_RNA (1)...(19): siRNA sense strand
gcacacacauaucacauca

SEQ ID NO: 1655616 - RNA, 19 nt, Homo sapiens
  misc_RNA (1)...(19): siRNA sense strand
ccugaagaguuuagaaaua

SEQ ID NO: 1655617 - RNA, 19 nt, Homo sapiens
  misc_RNA (1)...(19): siRNA sense strand
gcugaugaccugaggauua

SEQ ID NO: 1655618 - RNA, 19 nt, Homo sapiens
  misc_RNA (1)...(19): siRNA sense strand
caaccacacgggagaauua

SEQ ID NO: 1655619 - RNA, 19 nt, Homo sapiens
  misc_RNA (1)...(19): siRNA sense strand
gcagaaugcagcuuacuuu

SEQ ID NO: 1655620 - RNA, 19 nt, Homo sapiens
  misc_RNA (1)...(19): siRNA sense strand
caucgagacuuaccagguu

SEQ ID NO: 1655621 - RNA, 19 nt, Homo sapiens
  misc_RNA (1)...(19): siRNA sense strand
gcaguggcggcuacaaaua

SEQ ID NO: 1655622 - RNA, 19 nt, Homo sapiens
  misc_RNA (1)...(19): siRNA sense strand
ggauuaaccuauggaacuu

SEQ ID NO: 1655623 - RNA, 19 nt, Homo sapiens
  misc_RNA (1)...(19): siRNA sense strand
gaucacagcagccgaguuc

SEQ ID NO: 1655624 - RNA, 19 nt, Homo sapiens
  misc_RNA (1)...(19): siRNA sense strand
ggacaauccggcuguguga

SEQ ID NO: 1655625 - RNA, 19 nt, Homo sapiens
  misc_RNA (1)...(19): siRNA sense strand
gcagcuuacuuucuucugu

SEQ ID NO: 1655626 - RNA, 19 nt, Homo sapiens
  misc_RNA (1)...(19): siRNA sense strand
ccuauggaacuuugaaaua

SEQ ID NO: 1655627 - RNA, 19 nt, Homo sapiens
  misc_RNA (1)...(19): siRNA sense strand
cugaugaccugaggauuaa

SEQ ID NO: 1655628 - RNA, 19 nt, Homo sapiens
  misc_RNA (1)...(19): siRNA sense strand
ucucugaaauuaucucuuc

SEQ ID NO: 1655629 - RNA, 19 nt, Homo sapiens
  misc_RNA (1)...(19): siRNA sense strand
ugacaggcacaccaaauuu

SEQ ID NO: 1655630 - RNA, 19 nt, Homo sapiens
  misc_RNA (1)...(19): siRNA sense strand
gugaagcuguggaaaguca

SEQ ID NO: 1655631 - RNA, 19 nt, Homo sapiens
  misc_RNA (1)...(19): siRNA sense strand
caagcuguguucccucuau

SEQ ID NO: 1655632 - RNA, 19 nt, Homo sapiens
  misc_RNA (1)...(19): siRNA sense strand
cgaguucgauuaccugaag

SEQ ID NO: 1655633 - RNA, 19 nt, Homo sapiens
  misc_RNA (1)...(19): siRNA sense strand
agacuuaccagguucauga

SEQ ID NO: 1655634 - RNA, 19 nt, Homo sapiens
  misc_RNA (1)...(19): siRNA sense strand
gggucggguuguaauauuu

SEQ ID NO: 1655635 - RNA, 19 nt, Homo sapiens
  misc_RNA (1)...(19): siRNA sense strand
ccacacgggagaauuacua

SEQ ID NO: 1655636 - RNA, 19 nt, Homo sapiens
  misc_RNA (1)...(19): siRNA sense strand
gaagauccaagcaacagau

SEQ ID NO: 1655637 - RNA, 19 nt, Homo sapiens
  misc_RNA (1)...(19): siRNA sense strand
cugaagaguuuagaaauag

SEQ ID NO: 1655638 - RNA, 19 nt, Homo sapiens
  misc_RNA (1)...(19): siRNA sense strand
cgagaucagugucgacagu

SEQ ID NO: 1655639 - RNA, 19 nt, Homo sapiens
  misc_RNA (1)...(19): siRNA sense strand
aaagucagcgagcgugaua

SEQ ID NO: 1655640 - RNA, 19 nt, Homo sapiens
  misc_RNA (1)...(19): siRNA sense strand
gaccugaggauuaaccuau

SEQ ID NO: 1655641 - RNA, 19 nt, Homo sapiens
  misc_RNA (1)...(19): siRNA sense strand
gcacauuccagagccauga

SEQ ID NO: 1655642 - RNA, 19 nt, Homo sapiens
  misc_RNA (1)...(19): siRNA sense strand
ggcuacaaauaaccuauau

SEQ ID NO: 1655643 - RNA, 19 nt, Homo sapiens
  misc_RNA (1)...(19): siRNA sense strand
acacacauaucacaucaac

SEQ ID NO: 1655644 - RNA, 19 nt, Homo sapiens
  misc_RNA (1)...(19): siRNA sense strand
ucucuucgauuucggaugu

SEQ ID NO: 1655645 - RNA, 19 nt, Homo sapiens
  misc_RNA (1)...(19): siRNA sense strand
aacgagagcaggagaguaa

SEQ ID NO: 1655646 - RNA, 19 nt, Homo sapiens
  misc_RNA (1)...(19): siRNA sense strand
gaaaagacgagaucagugu

SEQ ID NO: 1655647 - RNA, 19 nt, Homo sapiens
  misc_RNA (1)...(19): siRNA sense strand
ucaggauguucgacagaaa

SEQ ID NO: 1655648 - RNA, 19 nt, Homo sapiens
  misc_RNA (1)...(19): siRNA sense strand
ucacaucaacuccauaucu

SEQ ID NO: 1655649 - RNA, 19 nt, Homo sapiens
  misc_RNA (1)...(19): siRNA sense strand
caguggcggcuacaaauaa

SEQ ID NO: 1655650 - RNA, 19 nt, Homo sapiens
  misc_RNA (1)...(19): siRNA sense strand
ucugggaucucaacaugga

SEQ ID NO: 1655651 - RNA, 19 nt, Homo sapiens
  misc_RNA (1)...(19): siRNA sense strand
agugggagguauaucauga

SEQ ID NO: 1655652 - RNA, 19 nt, Homo sapiens
  misc_RNA (1)...(19): siRNA sense strand
acacauaucacaucaacuc

SEQ ID NO: 1655653 - RNA, 19 nt, Homo sapiens
  misc_RNA (1)...(19): siRNA sense strand
cagcuuggcauccuucaga

SEQ ID NO: 1655654 - RNA, 19 nt, Homo sapiens
  misc_RNA (1)...(19): siRNA sense strand
ggaaugggucagacagugu

SEQ ID NO: 1655655 - RNA, 19 nt, Homo sapiens
  misc_RNA (1)...(19): siRNA sense strand
gucaaagucugggaucuca

SEQ ID NO: 1655656 - RNA, 19 nt, Homo sapiens
  misc_RNA (1)...(19): siRNA sense strand
gugacaggcacaccaaauu

SEQ ID NO: 1655657 - RNA, 19 nt, Homo sapiens
  misc_RNA (1)...(19): siRNA sense strand
caacagcgacuaugaaacc

SEQ ID NO: 1655658 - RNA, 19 nt, Homo sapiens
  misc_RNA (1)...(19): siRNA sense strand
cacaucaacuccauaucug

SEQ ID NO: 1655659 - RNA, 19 nt, Homo sapiens
  misc_RNA (1)...(19): siRNA sense strand
uuucuucugucuacuaaug

SEQ ID NO: 1655660 - RNA, 19 nt, Homo sapiens
  misc_RNA (1)...(19): siRNA sense strand
cauaucacaucaacuccau

SEQ ID NO: 1655661 - RNA, 19 nt, Homo sapiens
  misc_RNA (1)...(19): siRNA sense strand
ccaacgcacacacauauca

SEQ ID NO: 1655662 - RNA, 19 nt, Homo sapiens
  misc_RNA (1)...(19): siRNA sense strand
agucugggaucucaacaug

SEQ ID NO: 1655663 - RNA, 19 nt, Homo sapiens
  misc_RNA (1)...(19): siRNA sense strand
gucaacagcgacuaugaaa

SEQ ID NO: 1655664 - RNA, 19 nt, Homo sapiens
  misc_RNA (1)...(19): siRNA sense strand
cuuaccagguucaugacua

SEQ ID NO: 1655665 - RNA, 19 nt, Homo sapiens
  misc_RNA (1)...(19): siRNA sense strand
ggaagauccaagcaacaga

SEQ ID NO: 1655666 - RNA, 19 nt, Homo sapiens
  misc_RNA (1)...(19): siRNA sense strand
uaucacaucaacuccauau

SEQ ID NO: 1655667 - RNA, 19 nt, Homo sapiens
  misc_RNA (1)...(19): siRNA sense strand
gauuucggaugugaaguuc

SEQ ID NO: 1655668 - RNA, 19 nt, Homo sapiens
  misc_RNA (1)...(19): siRNA sense strand
gcauacagcuuggcauccu

SEQ ID NO: 1655669 - RNA, 19 nt, Homo sapiens
  misc_RNA (1)...(19): siRNA sense strand
acaacaacuucuucaggau

SEQ ID NO: 1655670 - RNA, 19 nt, Homo sapiens
  misc_RNA (1)...(19): siRNA sense strand
caacgagagcaggagagua

SEQ ID NO: 1655671 - RNA, 19 nt, Homo sapiens
  misc_RNA (1)...(19): siRNA sense strand
ugacaggcuccuacaacaa

SEQ ID NO: 1655672 - RNA, 19 nt, Homo sapiens
  misc_RNA (1)...(19): siRNA sense strand
uaaccuauggaacuuugaa

SEQ ID NO: 1655673 - RNA, 19 nt, Homo sapiens
  misc_RNA (1)...(19): siRNA sense strand
cgauuucggaugugaaguu

SEQ ID NO: 1655674 - RNA, 19 nt, Homo sapiens
  misc_RNA (1)...(19): siRNA sense strand
agaaggcuacaaucugaaa

SEQ ID NO: 1655675 - RNA, 19 nt, Homo sapiens
  misc_RNA (1)...(19): siRNA sense strand
uaccugaagaguuuagaaa

SEQ ID NO: 1655676 - RNA, 19 nt, Homo sapiens
  misc_RNA (1)...(19): siRNA sense strand
ccaagcaacagaucauuuu

SEQ ID NO: 1655677 - RNA, 19 nt, Homo sapiens
  misc_RNA (1)...(19): siRNA sense strand
gaaagucagcgagcgugau

SEQ ID NO: 1655678 - RNA, 19 nt, Homo sapiens
  misc_RNA (1)...(19): siRNA sense strand
cggcuacaaauaaccuaua

SEQ ID NO: 1655679 - RNA, 19 nt, Homo sapiens
  misc_RNA (1)...(19): siRNA sense strand
ggccagaaggcuacaaucu

SEQ ID NO: 1655680 - RNA, 19 nt, Homo sapiens
  misc_RNA (1)...(19): siRNA sense strand
gcuguguucccucuaugaa

SEQ ID NO: 1655681 - RNA, 19 nt, Homo sapiens
  misc_RNA (1)...(19): siRNA sense strand
gauccugccaccaucacaa

SEQ ID NO: 1655682 - RNA, 19 nt, Homo sapiens
  misc_RNA (1)...(19): siRNA sense strand
aaacugugaagcuguggaa

SEQ ID NO: 1655683 - RNA, 19 nt, Homo sapiens
  misc_RNA (1)...(19): siRNA sense strand
gaaacaccaagcgugaugu

SEQ ID NO: 1655684 - RNA, 19 nt, Homo sapiens
  misc_RNA (1)...(19): siRNA sense strand
agaaacaccaagcgugaug

SEQ ID NO: 1655685 - RNA, 19 nt, Homo sapiens
  misc_RNA (1)...(19): siRNA sense strand
cccagcagaaugcagcuua

SEQ ID NO: 1655686 - RNA, 19 nt, Homo sapiens
  misc_RNA (1)...(19): siRNA sense strand
gugaauacaauguuuacag

SEQ ID NO: 1655687 - RNA, 19 nt, Homo sapiens
  misc_RNA (1)...(19): siRNA sense strand
ugccaacgcacacacauau

SEQ ID NO: 1655688 - RNA, 19 nt, Homo sapiens
  misc_RNA (1)...(19): siRNA sense strand
ugucaacagcgacuaugaa

SEQ ID NO: 1655689 - RNA, 19 nt, Homo sapiens
  misc_RNA (1)...(19): siRNA sense strand
aacaacuucuucaggaugu

SEQ ID NO: 1655690 - RNA, 19 nt, Homo sapiens
  misc_RNA (1)...(19): siRNA sense strand
gacaggcuccuacaacaac

SEQ ID NO: 1655691 - RNA, 19 nt, Homo sapiens
  misc_RNA (1)...(19): siRNA sense strand
cagaaugcagcuuacuuuc

SEQ ID NO: 1655692 - RNA, 19 nt, Homo sapiens
  misc_RNA (1)...(19): siRNA sense strand
ucaacuccauaucugucaa

SEQ ID NO: 1655693 - RNA, 19 nt, Homo sapiens
  misc_RNA (1)...(19): siRNA sense strand
cacagugggagguauauca

SEQ ID NO: 1655694 - RNA, 19 nt, Homo sapiens
  misc_RNA (1)...(19): siRNA sense strand
cugaaauuaucucuucgau

SEQ ID NO: 1655695 - RNA, 19 nt, Homo sapiens
  misc_RNA (1)...(19): siRNA sense strand
gauuaaccuauggaacuuu

SEQ ID NO: 1655696 - RNA, 19 nt, Homo sapiens
  misc_RNA (1)...(19): siRNA sense strand
ucagcgagcgugauaagag

SEQ ID NO: 1655697 - RNA, 19 nt, Homo sapiens
  misc_RNA (1)...(19): siRNA sense strand
uuaccagguucaugacuac

SEQ ID NO: 1655698 - RNA, 19 nt, Homo sapiens
  misc_RNA (1)...(19): siRNA sense strand
cugugaagcuguggaaagu

SEQ ID NO: 1655699 - RNA, 19 nt, Homo sapiens
  misc_RNA (1)...(19): siRNA sense strand
gcaucugcccugugugaca

SEQ ID NO: 1655700 - RNA, 19 nt, Homo sapiens
  misc_RNA (1)...(19): siRNA sense strand
auuaaccuauggaacuuug

SEQ ID NO: 1655701 - RNA, 19 nt, Homo sapiens
  misc_RNA (1)...(19): siRNA sense strand
gacauuaagccagccaaca

SEQ ID NO: 1655702 - RNA, 19 nt, Homo sapiens
  misc_RNA (1)...(19): siRNA sense strand
cauacagcuuggcauccuu

SEQ ID NO: 1655703 - RNA, 19 nt, Homo sapiens
  misc_RNA (1)...(19): siRNA sense strand
gcuccuacaacaacuucuu

SEQ ID NO: 1655704 - RNA, 19 nt, Homo sapiens
  misc_RNA (1)...(19): siRNA sense strand
caaagucugggaucucaac

SEQ ID NO: 1655705 - RNA, 19 nt, Homo sapiens
  misc_RNA (1)...(19): siRNA sense strand
gaaugcagcuuacuuucuu

SEQ ID NO: 1655706 - RNA, 19 nt, Homo sapiens
  misc_RNA (1)...(19): siRNA sense strand
ucgauuaccugaagaguuu

SEQ ID NO: 1655707 - RNA, 19 nt, Homo sapiens
  misc_RNA (1)...(19): siRNA sense strand
gcacacacauaucacauca

SEQ ID NO: 1655708 - RNA, 19 nt, Homo sapiens
  misc_RNA (1)...(19): siRNA sense strand
ccugaagaguuuagaaaua

SEQ ID NO: 1655709 - RNA, 19 nt, Homo sapiens
  misc_RNA (1)...(19): siRNA sense strand
gcugaugaccugaggauua

SEQ ID NO: 1655710 - RNA, 19 nt, Homo sapiens
  misc_RNA (1)...(19): siRNA sense strand
caaccacacgggagaauua

SEQ ID NO: 1655711 - RNA, 19 nt, Homo sapiens
  misc_RNA (1)...(19): siRNA sense strand
gcagaaugcagcuuacuuu

SEQ ID NO: 1655712 - RNA, 19 nt, Homo sapiens
  misc_RNA (1)...(19): siRNA sense strand
caucgagacuuaccagguu

SEQ ID NO: 1655713 - RNA, 19 nt, Homo sapiens
  misc_RNA (1)...(19): siRNA sense strand
gcaguggcggcuacaaaua

SEQ ID NO: 1655714 - RNA, 19 nt, Homo sapiens
  misc_RNA (1)...(19): siRNA sense strand
ggauuaaccuauggaacuu

SEQ ID NO: 1655715 - RNA, 19 nt, Homo sapiens
  misc_RNA (1)...(19): siRNA sense strand
gaucacagcagccgaguuc

SEQ ID NO: 1655716 - RNA, 19 nt, Homo sapiens
  misc_RNA (1)...(19): siRNA sense strand
ggacaauccggcuguguga

SEQ ID NO: 1655717 - RNA, 19 nt, Homo sapiens
  misc_RNA (1)...(19): siRNA sense strand
gcagcuuacuuucuucugu

SEQ ID NO: 1655718 - RNA, 19 nt, Homo sapiens
  misc_RNA (1)...(19): siRNA sense strand
ccuauggaacuuugaaaua

SEQ ID NO: 1655719 - RNA, 19 nt, Homo sapiens
  misc_RNA (1)...(19): siRNA sense strand
cugaugaccugaggauuaa

SEQ ID NO: 1655720 - RNA, 19 nt, Homo sapiens
  misc_RNA (1)...(19): siRNA sense strand
ucucugaaauuaucucuuc

SEQ ID NO: 1655721 - RNA, 19 nt, Homo sapiens
  misc_RNA (1)...(19): siRNA sense strand
ugacaggcacaccaaauuu

SEQ ID NO: 1655722 - RNA, 19 nt, Homo sapiens
  misc_RNA (1)...(19): siRNA sense strand
gugaagcuguggaaaguca

SEQ ID NO: 1655723 - RNA, 19 nt, Homo sapiens
  misc_RNA (1)...(19): siRNA sense strand
caagcuguguucccucuau

SEQ ID NO: 1655724 - RNA, 19 nt, Homo sapiens
  misc_RNA (1)...(19): siRNA sense strand
cgaguucgauuaccugaag

SEQ ID NO: 1655725 - RNA, 19 nt, Homo sapiens
  misc_RNA (1)...(19): siRNA sense strand
agacuuaccagguucauga

SEQ ID NO: 1655726 - RNA, 19 nt, Homo sapiens
  misc_RNA (1)...(19): siRNA sense strand
gggucggguuguaauauuu

SEQ ID NO: 1655727 - RNA, 19 nt, Homo sapiens
  misc_RNA (1)...(19): siRNA sense strand
ccacacgggagaauuacua

SEQ ID NO: 1655728 - RNA, 19 nt, Homo sapiens
  misc_RNA (1)...(19): siRNA sense strand
gaagauccaagcaacagau

SEQ ID NO: 1655729 - RNA, 19 nt, Homo sapiens
  misc_RNA (1)...(19): siRNA sense strand
cugaagaguuuagaaauag

SEQ ID NO: 1655730 - RNA, 19 nt, Homo sapiens
  misc_RNA (1)...(19): siRNA sense strand
cgagaucagugucgacagu

SEQ ID NO: 1655731 - RNA, 19 nt, Homo sapiens
  misc_RNA (1)...(19): siRNA sense strand
aaagucagcgagcgugaua

SEQ ID NO: 1655732 - RNA, 19 nt, Homo sapiens
  misc_RNA (1)...(19): siRNA sense strand
gaccugaggauuaaccuau

SEQ ID NO: 1655733 - RNA, 19 nt, Homo sapiens
  misc_RNA (1)...(19): siRNA sense strand
gcacauuccagagccauga

SEQ ID NO: 1655734 - RNA, 19 nt, Homo sapiens
  misc_RNA (1)...(19): siRNA sense strand
ggcuacaaauaaccuauau

SEQ ID NO: 1655735 - RNA, 19 nt, Homo sapiens
  misc_RNA (1)...(19): siRNA sense strand
acacacauaucacaucaac

SEQ ID NO: 1655736 - RNA, 19 nt, Homo sapiens
  misc_RNA (1)...(19): siRNA sense strand
ucucuucgauuucggaugu

SEQ ID NO: 1655737 - RNA, 19 nt, Homo sapiens
  misc_RNA (1)...(19): siRNA sense strand
aacgagagcaggagaguaa

SEQ ID NO: 1655738 - RNA, 19 nt, Homo sapiens
  misc_RNA (1)...(19): siRNA sense strand
gaaaagacgagaucagugu

SEQ ID NO: 1655739 - RNA, 19 nt, Homo sapiens
  misc_RNA (1)...(19): siRNA sense strand
ucaggauguucgacagaaa

SEQ ID NO: 1655740 - RNA, 19 nt, Homo sapiens
  misc_RNA (1)...(19): siRNA sense strand
ucacaucaacuccauaucu

SEQ ID NO: 1655741 - RNA, 19 nt, Homo sapiens
  misc_RNA (1)...(19): siRNA sense strand
caguggcggcuacaaauaa

SEQ ID NO: 1655742 - RNA, 19 nt, Homo sapiens
  misc_RNA (1)...(19): siRNA sense strand
ucugggaucucaacaugga

SEQ ID NO: 1655743 - RNA, 19 nt, Homo sapiens
  misc_RNA (1)...(19): siRNA sense strand
agugggagguauaucauga

SEQ ID NO: 1655744 - RNA, 19 nt, Homo sapiens
  misc_RNA (1)...(19): siRNA sense strand
acacauaucacaucaacuc

SEQ ID NO: 1655745 - RNA, 19 nt, Homo sapiens
  misc_RNA (1)...(19): siRNA sense strand
cagcuuggcauccuucaga

SEQ ID NO: 1655746 - RNA, 19 nt, Homo sapiens
  misc_RNA (1)...(19): siRNA sense strand
ggaaugggucagacagugu

SEQ ID NO: 1655747 - RNA, 19 nt, Homo sapiens
  misc_RNA (1)...(19): siRNA sense strand
gucaaagucugggaucuca

SEQ ID NO: 1655748 - RNA, 19 nt, Homo sapiens
  misc_RNA (1)...(19): siRNA sense strand
gugacaggcacaccaaauu

SEQ ID NO: 1655749 - RNA, 19 nt, Homo sapiens
  misc_RNA (1)...(19): siRNA sense strand
caacagcgacuaugaaacc

SEQ ID NO: 1655750 - RNA, 19 nt, Homo sapiens
  misc_RNA (1)...(19): siRNA sense strand
cacaucaacuccauaucug

SEQ ID NO: 1655751 - RNA, 19 nt, Homo sapiens
  misc_RNA (1)...(19): siRNA sense strand
uuucuucugucuacuaaug

SEQ ID NO: 1655752 - RNA, 19 nt, Homo sapiens
  misc_RNA (1)...(19): siRNA sense strand
cauaucacaucaacuccau

SEQ ID NO: 1655753 - RNA, 19 nt, Homo sapiens
  misc_RNA (1)...(19): siRNA sense strand
ccaacgcacacacauauca

SEQ ID NO: 1655754 - RNA, 19 nt, Homo sapiens
  misc_RNA (1)...(19): siRNA sense strand
agucugggaucucaacaug

SEQ ID NO: 1655755 - RNA, 19 nt, Homo sapiens
  misc_RNA (1)...(19): siRNA sense strand
gucaacagcgacuaugaaa

SEQ ID NO: 1655756 - RNA, 19 nt, Homo sapiens
  misc_RNA (1)...(19): siRNA sense strand
cuuaccagguucaugacua

SEQ ID NO: 1655757 - RNA, 19 nt, Homo sapiens
  misc_RNA (1)...(19): siRNA sense strand
ggaagauccaagcaacaga

SEQ ID NO: 1655758 - RNA, 19 nt, Homo sapiens
  misc_RNA (1)...(19): siRNA sense strand
uaucacaucaacuccauau

SEQ ID NO: 1655759 - RNA, 19 nt, Homo sapiens
  misc_RNA (1)...(19): siRNA sense strand
gauuucggaugugaaguuc

SEQ ID NO: 1655760 - RNA, 19 nt, Homo sapiens
  misc_RNA (1)...(19): siRNA sense strand
gcauacagcuuggcauccu

SEQ ID NO: 1655761 - RNA, 19 nt, Homo sapiens
  misc_RNA (1)...(19): siRNA sense strand
acaacaacuucuucaggau

SEQ ID NO: 1655762 - RNA, 19 nt, Homo sapiens
  misc_RNA (1)...(19): siRNA sense strand
caacgagagcaggagagua

SEQ ID NO: 1655763 - RNA, 19 nt, Homo sapiens
  misc_RNA (1)...(19): siRNA sense strand
ugacaggcuccuacaacaa

SEQ ID NO: 1655764 - RNA, 19 nt, Homo sapiens
  misc_RNA (1)...(19): siRNA sense strand
uaaccuauggaacuuugaa

SEQ ID NO: 1655765 - RNA, 19 nt, Homo sapiens
  misc_RNA (1)...(19): siRNA sense strand
cgauuucggaugugaaguu

SEQ ID NO: 1655766 - RNA, 19 nt, Homo sapiens
  misc_RNA (1)...(19): siRNA sense strand
agaaggcuacaaucugaaa

SEQ ID NO: 1655767 - RNA, 19 nt, Homo sapiens
  misc_RNA (1)...(19): siRNA sense strand
uaccugaagaguuuagaaa

SEQ ID NO: 1655768 - RNA, 19 nt, Homo sapiens
  misc_RNA (1)...(19): siRNA sense strand
ccaagcaacagaucauuuu

SEQ ID NO: 1655769 - RNA, 19 nt, Homo sapiens
  misc_RNA (1)...(19): siRNA sense strand
gaaagucagcgagcgugau

SEQ ID NO: 1655770 - RNA, 19 nt, Homo sapiens
  misc_RNA (1)...(19): siRNA sense strand
cggcuacaaauaaccuaua

SEQ ID NO: 1655771 - RNA, 19 nt, Homo sapiens
  misc_RNA (1)...(19): siRNA sense strand
ggccagaaggcuacaaucu

SEQ ID NO: 1655772 - RNA, 19 nt, Homo sapiens
  misc_RNA (1)...(19): siRNA sense strand
gcuguguucccucuaugaa

SEQ ID NO: 1655773 - RNA, 19 nt, Homo sapiens
  misc_RNA (1)...(19): siRNA sense strand
gauccugccaccaucacaa

SEQ ID NO: 1655774 - RNA, 19 nt, Homo sapiens
  misc_RNA (1)...(19): siRNA sense strand
aaacugugaagcuguggaa

SEQ ID NO: 1655775 - RNA, 19 nt, Homo sapiens
  misc_RNA (1)...(19): siRNA sense strand
gaaacaccaagcgugaugu

SEQ ID NO: 1655776 - RNA, 19 nt, Homo sapiens
  misc_RNA (1)...(19): siRNA sense strand
agaaacaccaagcgugaug

SEQ ID NO: 1655777 - RNA, 19 nt, Homo sapiens
  misc_RNA (1)...(19): siRNA sense strand
cccagcagaaugcagcuua

SEQ ID NO: 1655778 - RNA, 19 nt, Homo sapiens
  misc_RNA (1)...(19): siRNA sense strand
gugaauacaauguuuacag

SEQ ID NO: 1655779 - RNA, 19 nt, Homo sapiens
  misc_RNA (1)...(19): siRNA sense strand
ugccaacgcacacacauau

SEQ ID NO: 1655780 - RNA, 19 nt, Homo sapiens
  misc_RNA (1)...(19): siRNA sense strand
ugucaacagcgacuaugaa

SEQ ID NO: 1655781 - RNA, 19 nt, Homo sapiens
  misc_RNA (1)...(19): siRNA sense strand
aacaacuucuucaggaugu

SEQ ID NO: 1655782 - RNA, 19 nt, Homo sapiens
  misc_RNA (1)...(19): siRNA sense strand
gacaggcuccuacaacaac

SEQ ID NO: 1655783 - RNA, 19 nt, Homo sapiens
  misc_RNA (1)...(19): siRNA sense strand
cagaaugcagcuuacuuuc

SEQ ID NO: 1655784 - RNA, 19 nt, Homo sapiens
  misc_RNA (1)...(19): siRNA sense strand
ucaacuccauaucugucaa

SEQ ID NO: 1655785 - RNA, 19 nt, Homo sapiens
  misc_RNA (1)...(19): siRNA sense strand
cacagugggagguauauca

SEQ ID NO: 1655786 - RNA, 19 nt, Homo sapiens
  misc_RNA (1)...(19): siRNA sense strand
cugaaauuaucucuucgau

SEQ ID NO: 1655787 - RNA, 19 nt, Homo sapiens
  misc_RNA (1)...(19): siRNA sense strand
gauuaaccuauggaacuuu

SEQ ID NO: 1655788 - RNA, 19 nt, Homo sapiens
  misc_RNA (1)...(19): siRNA sense strand
ucagcgagcgugauaagag

SEQ ID NO: 1655789 - RNA, 19 nt, Homo sapiens
  misc_RNA (1)...(19): siRNA sense strand
uuaccagguucaugacuac

SEQ ID NO: 1655790 - RNA, 19 nt, Homo sapiens
  misc_RNA (1)...(19): siRNA sense strand
cugugaagcuguggaaagu

SEQ ID NO: 1655791 - RNA, 19 nt, Homo sapiens
  misc_RNA (1)...(19): siRNA sense strand
gcaucugcccugugugaca

SEQ ID NO: 1655792 - RNA, 19 nt, Homo sapiens
  misc_RNA (1)...(19): siRNA sense strand
auuaaccuauggaacuuug

SEQ ID NO: 1655793 - RNA, 19 nt, Homo sapiens
  misc_RNA (1)...(19): siRNA sense strand
gacauuaagccagccaaca

SEQ ID NO: 1655794 - RNA, 19 nt, Homo sapiens
  misc_RNA (1)...(19): siRNA sense strand
cauacagcuuggcauccuu

SEQ ID NO: 1655795 - RNA, 19 nt, Homo sapiens
  misc_RNA (1)...(19): siRNA sense strand
gcuccuacaacaacuucuu

SEQ ID NO: 1655796 - RNA, 19 nt, Homo sapiens
  misc_RNA (1)...(19): siRNA sense strand
caaagucugggaucucaac

SEQ ID NO: 1655797 - RNA, 19 nt, Homo sapiens
  misc_RNA (1)...(19): siRNA sense strand
gaaugcagcuuacuuucuu

SEQ ID NO: 1655798 - RNA, 19 nt, Homo sapiens
  misc_RNA (1)...(19): siRNA sense strand
ucgauuaccugaagaguuu

SEQ ID NO: 1655799 - RNA, 19 nt, Homo sapiens
  misc_RNA (1)...(19): siRNA sense strand
gcacacacauaucacauca

SEQ ID NO: 1655800 - RNA, 19 nt, Homo sapiens
  misc_RNA (1)...(19): siRNA sense strand
ccugaagaguuuagaaaua

SEQ ID NO: 1655801 - RNA, 19 nt, Homo sapiens
  misc_RNA (1)...(19): siRNA sense strand
gcugaugaccugaggauua

SEQ ID NO: 1655802 - RNA, 19 nt, Homo sapiens
  misc_RNA (1)...(19): siRNA sense strand
caaccacacgggagaauua

SEQ ID NO: 1655803 - RNA, 19 nt, Homo sapiens
  misc_RNA (1)...(19): siRNA sense strand
gcagaaugcagcuuacuuu

SEQ ID NO: 1655804 - RNA, 19 nt, Homo sapiens
  misc_RNA (1)...(19): siRNA sense strand
caucgagacuuaccagguu

SEQ ID NO: 1655805 - RNA, 19 nt, Homo sapiens
  misc_RNA (1)...(19): siRNA sense strand
gcaguggcggcuacaaaua

SEQ ID NO: 1655806 - RNA, 19 nt, Homo sapiens
  misc_RNA (1)...(19): siRNA sense strand
ggauuaaccuauggaacuu

SEQ ID NO: 1655807 - RNA, 19 nt, Homo sapiens
  misc_RNA (1)...(19): siRNA sense strand
gaucacagcagccgaguuc

SEQ ID NO: 1655808 - RNA, 19 nt, Homo sapiens
  misc_RNA (1)...(19): siRNA sense strand
ggacaauccggcuguguga

SEQ ID NO: 1655809 - RNA, 19 nt, Homo sapiens
  misc_RNA (1)...(19): siRNA sense strand
gcagcuuacuuucuucugu

SEQ ID NO: 1655810 - RNA, 19 nt, Homo sapiens
  misc_RNA (1)...(19): siRNA sense strand
ccuauggaacuuugaaaua

SEQ ID NO: 1655811 - RNA, 19 nt, Homo sapiens
  misc_RNA (1)...(19): siRNA sense strand
cugaugaccugaggauuaa

SEQ ID NO: 1655812 - RNA, 19 nt, Homo sapiens
  misc_RNA (1)...(19): siRNA sense strand
ucucugaaauuaucucuuc

SEQ ID NO: 1655813 - RNA, 19 nt, Homo sapiens
  misc_RNA (1)...(19): siRNA sense strand
ugacaggcacaccaaauuu

SEQ ID NO: 1655814 - RNA, 19 nt, Homo sapiens
  misc_RNA (1)...(19): siRNA sense strand
gugaagcuguggaaaguca

SEQ ID NO: 1655815 - RNA, 19 nt, Homo sapiens
  misc_RNA (1)...(19): siRNA sense strand
caagcuguguucccucuau

SEQ ID NO: 1655816 - RNA, 19 nt, Homo sapiens
  misc_RNA (1)...(19): siRNA sense strand
cgaguucgauuaccugaag

SEQ ID NO: 1655817 - RNA, 19 nt, Homo sapiens
  misc_RNA (1)...(19): siRNA sense strand
agacuuaccagguucauga

SEQ ID NO: 1655818 - RNA, 19 nt, Homo sapiens
  misc_RNA (1)...(19): siRNA sense strand
gggucggguuguaauauuu

SEQ ID NO: 1655819 - RNA, 19 nt, Homo sapiens
  misc_RNA (1)...(19): siRNA sense strand
ccacacgggagaauuacua

SEQ ID NO: 1655820 - RNA, 19 nt, Homo sapiens
  misc_RNA (1)...(19): siRNA sense strand
gaagauccaagcaacagau

SEQ ID NO: 1655821 - RNA, 19 nt, Homo sapiens
  misc_RNA (1)...(19): siRNA sense strand
cugaagaguuuagaaauag

SEQ ID NO: 1655822 - RNA, 19 nt, Homo sapiens
  misc_RNA (1)...(19): siRNA sense strand
cgagaucagugucgacagu

SEQ ID NO: 1655823 - RNA, 19 nt, Homo sapiens
  misc_RNA (1)...(19): siRNA sense strand
aaagucagcgagcgugaua

SEQ ID NO: 1655824 - RNA, 19 nt, Homo sapiens
  misc_RNA (1)...(19): siRNA sense strand
gaccugaggauuaaccuau

SEQ ID NO: 1655825 - RNA, 19 nt, Homo sapiens
  misc_RNA (1)...(19): siRNA sense strand
gcacauuccagagccauga

SEQ ID NO: 1655826 - RNA, 19 nt, Homo sapiens
  misc_RNA (1)...(19): siRNA sense strand
ggcuacaaauaaccuauau

SEQ ID NO: 1655827 - RNA, 19 nt, Homo sapiens
  misc_RNA (1)...(19): siRNA sense strand
acacacauaucacaucaac

SEQ ID NO: 1655828 - RNA, 19 nt, Homo sapiens
  misc_RNA (1)...(19): siRNA sense strand
ucucuucgauuucggaugu

SEQ ID NO: 1655829 - RNA, 19 nt, Homo sapiens
  misc_RNA (1)...(19): siRNA sense strand
aacgagagcaggagaguaa

SEQ ID NO: 1655830 - RNA, 19 nt, Homo sapiens
  misc_RNA (1)...(19): siRNA sense strand
gaaaagacgagaucagugu

SEQ ID NO: 1655831 - RNA, 19 nt, Homo sapiens
  misc_RNA (1)...(19): siRNA sense strand
ucaggauguucgacagaaa

SEQ ID NO: 1655832 - RNA, 19 nt, Homo sapiens
  misc_RNA (1)...(19): siRNA sense strand
ucacaucaacuccauaucu

SEQ ID NO: 1655833 - RNA, 19 nt, Homo sapiens
  misc_RNA (1)...(19): siRNA sense strand
caguggcggcuacaaauaa

SEQ ID NO: 1655834 - RNA, 19 nt, Homo sapiens
  misc_RNA (1)...(19): siRNA sense strand
ucugggaucucaacaugga

SEQ ID NO: 1655835 - RNA, 19 nt, Homo sapiens
  misc_RNA (1)...(19): siRNA sense strand
agugggagguauaucauga

SEQ ID NO: 1655836 - RNA, 19 nt, Homo sapiens
  misc_RNA (1)...(19): siRNA sense strand
acacauaucacaucaacuc

SEQ ID NO: 1655837 - RNA, 19 nt, Homo sapiens
  misc_RNA (1)...(19): siRNA sense strand
cagcuuggcauccuucaga

SEQ ID NO: 1655838 - RNA, 19 nt, Homo sapiens
  misc_RNA (1)...(19): siRNA sense strand
ggaaugggucagacagugu

SEQ ID NO: 1655839 - RNA, 19 nt, Homo sapiens
  misc_RNA (1)...(19): siRNA sense strand
gucaaagucugggaucuca

SEQ ID NO: 1655840 - RNA, 19 nt, Homo sapiens
  misc_RNA (1)...(19): siRNA sense strand
gugacaggcacaccaaauu

SEQ ID NO: 1655841 - RNA, 19 nt, Homo sapiens
  misc_RNA (1)...(19): siRNA sense strand
caacagcgacuaugaaacc

SEQ ID NO: 1655842 - RNA, 19 nt, Homo sapiens
  misc_RNA (1)...(19): siRNA sense strand
cacaucaacuccauaucug

SEQ ID NO: 1655843 - RNA, 19 nt, Homo sapiens
  misc_RNA (1)...(19): siRNA sense strand
uuucuucugucuacuaaug

SEQ ID NO: 1655844 - RNA, 19 nt, Homo sapiens
  misc_RNA (1)...(19): siRNA sense strand
cauaucacaucaacuccau

SEQ ID NO: 1655845 - RNA, 19 nt, Homo sapiens
  misc_RNA (1)...(19): siRNA sense strand
ccaacgcacacacauauca

SEQ ID NO: 1655846 - RNA, 19 nt, Homo sapiens
  misc_RNA (1)...(19): siRNA sense strand
agucugggaucucaacaug

SEQ ID NO: 1655847 - RNA, 19 nt, Homo sapiens
  misc_RNA (1)...(19): siRNA sense strand
gucaacagcgacuaugaaa

SEQ ID NO: 1655848 - RNA, 19 nt, Homo sapiens
  misc_RNA (1)...(19): siRNA sense strand
cuuaccagguucaugacua

SEQ ID NO: 1655849 - RNA, 19 nt, Homo sapiens
  misc_RNA (1)...(19): siRNA sense strand
ggaagauccaagcaacaga

SEQ ID NO: 1655850 - RNA, 19 nt, Homo sapiens
  misc_RNA (1)...(19): siRNA sense strand
uaucacaucaacuccauau

SEQ ID NO: 1655851 - RNA, 19 nt, Homo sapiens
  misc_RNA (1)...(19): siRNA sense strand
gauuucggaugugaaguuc

SEQ ID NO: 1655852 - RNA, 19 nt, Homo sapiens
  misc_RNA (1)...(19): siRNA sense strand
gcauacagcuuggcauccu

SEQ ID NO: 1655853 - RNA, 19 nt, Homo sapiens
  misc_RNA (1)...(19): siRNA sense strand
acaacaacuucuucaggau

SEQ ID NO: 1655854 - RNA, 19 nt, Homo sapiens
  misc_RNA (1)...(19): siRNA sense strand
caacgagagcaggagagua

SEQ ID NO: 1655855 - RNA, 19 nt, Homo sapiens
  misc_RNA (1)...(19): siRNA sense strand
ugacaggcuccuacaacaa

SEQ ID NO: 1655856 - RNA, 19 nt, Homo sapiens
  misc_RNA (1)...(19): siRNA sense strand
uaaccuauggaacuuugaa

SEQ ID NO: 1655857 - RNA, 19 nt, Homo sapiens
  misc_RNA (1)...(19): siRNA sense strand
cgauuucggaugugaaguu

SEQ ID NO: 1655858 - RNA, 19 nt, Homo sapiens
  misc_RNA (1)...(19): siRNA sense strand
agaaggcuacaaucugaaa

SEQ ID NO: 1655859 - RNA, 19 nt, Homo sapiens
  misc_RNA (1)...(19): siRNA sense strand
uaccugaagaguuuagaaa

SEQ ID NO: 1655860 - RNA, 19 nt, Homo sapiens
  misc_RNA (1)...(19): siRNA sense strand
ccaagcaacagaucauuuu

SEQ ID NO: 1655861 - RNA, 19 nt, Homo sapiens
  misc_RNA (1)...(19): siRNA sense strand
gaaagucagcgagcgugau

SEQ ID NO: 1655862 - RNA, 19 nt, Homo sapiens
  misc_RNA (1)...(19): siRNA sense strand
cggcuacaaauaaccuaua

SEQ ID NO: 1655863 - RNA, 19 nt, Homo sapiens
  misc_RNA (1)...(19): siRNA sense strand
ggccagaaggcuacaaucu

SEQ ID NO: 1655864 - RNA, 19 nt, Homo sapiens
  misc_RNA (1)...(19): siRNA sense strand
gcuguguucccucuaugaa

SEQ ID NO: 1655865 - RNA, 19 nt, Homo sapiens
  misc_RNA (1)...(19): siRNA sense strand
gauccugccaccaucacaa

SEQ ID NO: 1655866 - RNA, 19 nt, Homo sapiens
  misc_RNA (1)...(19): siRNA sense strand
aaacugugaagcuguggaa

SEQ ID NO: 1655867 - RNA, 19 nt, Homo sapiens
  misc_RNA (1)...(19): siRNA sense strand
gaaacaccaagcgugaugu

SEQ ID NO: 1655868 - RNA, 19 nt, Homo sapiens
  misc_RNA (1)...(19): siRNA sense strand
agaaacaccaagcgugaug

SEQ ID NO: 1655869 - RNA, 19 nt, Homo sapiens
  misc_RNA (1)...(19): siRNA sense strand
cccagcagaaugcagcuua

SEQ ID NO: 1655870 - RNA, 19 nt, Homo sapiens
  misc_RNA (1)...(19): siRNA sense strand
gugaauacaauguuuacag

SEQ ID NO: 1655871 - RNA, 19 nt, Homo sapiens
  misc_RNA (1)...(19): siRNA sense strand
ugccaacgcacacacauau

SEQ ID NO: 1655872 - RNA, 19 nt, Homo sapiens
  misc_RNA (1)...(19): siRNA sense strand
ugucaacagcgacuaugaa

SEQ ID NO: 1655873 - RNA, 19 nt, Homo sapiens
  misc_RNA (1)...(19): siRNA sense strand
aacaacuucuucaggaugu

SEQ ID NO: 1655874 - RNA, 19 nt, Homo sapiens
  misc_RNA (1)...(19): siRNA sense strand
gacaggcuccuacaacaac

SEQ ID NO: 1655875 - RNA, 19 nt, Homo sapiens
  misc_RNA (1)...(19): siRNA sense strand
cagaaugcagcuuacuuuc

SEQ ID NO: 1655876 - RNA, 19 nt, Homo sapiens
  misc_RNA (1)...(19): siRNA sense strand
ucaacuccauaucugucaa

SEQ ID NO: 1655877 - RNA, 19 nt, Homo sapiens
  misc_RNA (1)...(19): siRNA sense strand
cacagugggagguauauca

SEQ ID NO: 1655878 - RNA, 19 nt, Homo sapiens
  misc_RNA (1)...(19): siRNA sense strand
cugaaauuaucucuucgau

SEQ ID NO: 1655879 - RNA, 19 nt, Homo sapiens
  misc_RNA (1)...(19): siRNA sense strand
gauuaaccuauggaacuuu

SEQ ID NO: 1655880 - RNA, 19 nt, Homo sapiens
  misc_RNA (1)...(19): siRNA sense strand
ucagcgagcgugauaagag

SEQ ID NO: 1655881 - RNA, 19 nt, Homo sapiens
  misc_RNA (1)...(19): siRNA sense strand
uuaccagguucaugacuac

SEQ ID NO: 1655882 - RNA, 19 nt, Homo sapiens
  misc_RNA (1)...(19): siRNA sense strand
cugugaagcuguggaaagu

SEQ ID NO: 1655883 - RNA, 19 nt, Homo sapiens
  misc_RNA (1)...(19): siRNA sense strand
gcaucugcccugugugaca

SEQ ID NO: 1655884 - RNA, 19 nt, Homo sapiens
  misc_RNA (1)...(19): siRNA sense strand
auuaaccuauggaacuuug

SEQ ID NO: 1655885 - RNA, 19 nt, Homo sapiens
  misc_RNA (1)...(19): siRNA sense strand
gacauuaagccagccaaca

SEQ ID NO: 1655886 - RNA, 19 nt, Homo sapiens
  misc_RNA (1)...(19): siRNA sense strand
cauacagcuuggcauccuu

SEQ ID NO: 1655887 - RNA, 19 nt, Homo sapiens
  misc_RNA (1)...(19): siRNA sense strand
gcuccuacaacaacuucuu

SEQ ID NO: 1655888 - RNA, 19 nt, Homo sapiens
  misc_RNA (1)...(19): siRNA sense strand
caaagucugggaucucaac

SEQ ID NO: 1655889 - RNA, 19 nt, Homo sapiens
  misc_RNA (1)...(19): siRNA sense strand
gaaugcagcuuacuuucuu

SEQ ID NO: 1655890 - RNA, 19 nt, Homo sapiens
  misc_RNA (1)...(19): siRNA sense strand
ucgauuaccugaagaguuu

SEQ ID NO: 1655891 - RNA, 19 nt, Homo sapiens
  misc_RNA (1)...(19): siRNA sense strand
gcacacacauaucacauca

SEQ ID NO: 1655892 - RNA, 19 nt, Homo sapiens
  misc_RNA (1)...(19): siRNA sense strand
ccugaagaguuuagaaaua

SEQ ID NO: 1655893 - RNA, 19 nt, Homo sapiens
  misc_RNA (1)...(19): siRNA sense strand
gcugaugaccugaggauua

SEQ ID NO: 1655894 - RNA, 19 nt, Homo sapiens
  misc_RNA (1)...(19): siRNA sense strand
caaccacacgggagaauua

SEQ ID NO: 1655895 - RNA, 19 nt, Homo sapiens
  misc_RNA (1)...(19): siRNA sense strand
gcagaaugcagcuuacuuu

SEQ ID NO: 1655896 - RNA, 19 nt, Homo sapiens
  misc_RNA (1)...(19): siRNA sense strand
caucgagacuuaccagguu

SEQ ID NO: 1655897 - RNA, 19 nt, Homo sapiens
  misc_RNA (1)...(19): siRNA sense strand
gcaguggcggcuacaaaua

SEQ ID NO: 1655898 - RNA, 19 nt, Homo sapiens
  misc_RNA (1)...(19): siRNA sense strand
ggauuaaccuauggaacuu

SEQ ID NO: 1655899 - RNA, 19 nt, Homo sapiens
  misc_RNA (1)...(19): siRNA sense strand
gaucacagcagccgaguuc

SEQ ID NO: 1655900 - RNA, 19 nt, Homo sapiens
  misc_RNA (1)...(19): siRNA sense strand
ggacaauccggcuguguga

SEQ ID NO: 1655901 - RNA, 19 nt, Homo sapiens
  misc_RNA (1)...(19): siRNA sense strand
gcagcuuacuuucuucugu

SEQ ID NO: 1655902 - RNA, 19 nt, Homo sapiens
  misc_RNA (1)...(19): siRNA sense strand
ccuauggaacuuugaaaua

SEQ ID NO: 1655903 - RNA, 19 nt, Homo sapiens
  misc_RNA (1)...(19): siRNA sense strand
cugaugaccugaggauuaa

SEQ ID NO: 1655904 - RNA, 19 nt, Homo sapiens
  misc_RNA (1)...(19): siRNA sense strand
ucucugaaauuaucucuuc

SEQ ID NO: 1655905 - RNA, 19 nt, Homo sapiens
  misc_RNA (1)...(19): siRNA sense strand
ugacaggcacaccaaauuu

SEQ ID NO: 1655906 - RNA, 19 nt, Homo sapiens
  misc_RNA (1)...(19): siRNA sense strand
gugaagcuguggaaaguca

SEQ ID NO: 1655907 - RNA, 19 nt, Homo sapiens
  misc_RNA (1)...(19): siRNA sense strand
caagcuguguucccucuau

SEQ ID NO: 1655908 - RNA, 19 nt, Homo sapiens
  misc_RNA (1)...(19): siRNA sense strand
cgaguucgauuaccugaag

SEQ ID NO: 1655909 - RNA, 19 nt, Homo sapiens
  misc_RNA (1)...(19): siRNA sense strand
agacuuaccagguucauga

SEQ ID NO: 1655910 - RNA, 19 nt, Homo sapiens
  misc_RNA (1)...(19): siRNA sense strand
gggucggguuguaauauuu

SEQ ID NO: 1655911 - RNA, 19 nt, Homo sapiens
  misc_RNA (1)...(19): siRNA sense strand
ccacacgggagaauuacua

SEQ ID NO: 1655912 - RNA, 19 nt, Homo sapiens
  misc_RNA (1)...(19): siRNA sense strand
gaagauccaagcaacagau

SEQ ID NO: 1655913 - RNA, 19 nt, Homo sapiens
  misc_RNA (1)...(19): siRNA sense strand
cugaagaguuuagaaauag

SEQ ID NO: 1655914 - RNA, 19 nt, Homo sapiens
  misc_RNA (1)...(19): siRNA sense strand
cgagaucagugucgacagu

SEQ ID NO: 1655915 - RNA, 19 nt, Homo sapiens
  misc_RNA (1)...(19): siRNA sense strand
aaagucagcgagcgugaua

SEQ ID NO: 1655916 - RNA, 19 nt, Homo sapiens
  misc_RNA (1)...(19): siRNA sense strand
gaccugaggauuaaccuau

SEQ ID NO: 1655917 - RNA, 19 nt, Homo sapiens
  misc_RNA (1)...(19): siRNA sense strand
gcacauuccagagccauga

SEQ ID NO: 1655918 - RNA, 19 nt, Homo sapiens
  misc_RNA (1)...(19): siRNA sense strand
ggcuacaaauaaccuauau

SEQ ID NO: 1655919 - RNA, 19 nt, Homo sapiens
  misc_RNA (1)...(19): siRNA sense strand
acacacauaucacaucaac

SEQ ID NO: 1655920 - RNA, 19 nt, Homo sapiens
  misc_RNA (1)...(19): siRNA sense strand
ucucuucgauuucggaugu

SEQ ID NO: 1655921 - RNA, 19 nt, Homo sapiens
  misc_RNA (1)...(19): siRNA sense strand
aacgagagcaggagaguaa

SEQ ID NO: 1655922 - RNA, 19 nt, Homo sapiens
  misc_RNA (1)...(19): siRNA sense strand
gaaaagacgagaucagugu

SEQ ID NO: 1655923 - RNA, 19 nt, Homo sapiens
  misc_RNA (1)...(19): siRNA sense strand
ucaggauguucgacagaaa

SEQ ID NO: 1655924 - RNA, 19 nt, Homo sapiens
  misc_RNA (1)...(19): siRNA sense strand
ucacaucaacuccauaucu

SEQ ID NO: 1655925 - RNA, 19 nt, Homo sapiens
  misc_RNA (1)...(19): siRNA sense strand
caguggcggcuacaaauaa

SEQ ID NO: 1655926 - RNA, 19 nt, Homo sapiens
  misc_RNA (1)...(19): siRNA sense strand
ucugggaucucaacaugga

SEQ ID NO: 1655927 - RNA, 19 nt, Homo sapiens
  misc_RNA (1)...(19): siRNA sense strand
agugggagguauaucauga

SEQ ID NO: 1655928 - RNA, 19 nt, Homo sapiens
  misc_RNA (1)...(19): siRNA sense strand
acacauaucacaucaacuc

SEQ ID NO: 1655929 - RNA, 19 nt, Homo sapiens
  misc_RNA (1)...(19): siRNA sense strand
cagcuuggcauccuucaga

SEQ ID NO: 1655930 - RNA, 19 nt, Homo sapiens
  misc_RNA (1)...(19): siRNA sense strand
ggaaugggucagacagugu

SEQ ID NO: 1655931 - RNA, 19 nt, Homo sapiens
  misc_RNA (1)...(19): siRNA sense strand
gucaaagucugggaucuca

SEQ ID NO: 1655932 - RNA, 19 nt, Homo sapiens
  misc_RNA (1)...(19): siRNA sense strand
gugacaggcacaccaaauu

SEQ ID NO: 1655933 - RNA, 19 nt, Homo sapiens
  misc_RNA (1)...(19): siRNA sense strand
caacagcgacuaugaaacc

SEQ ID NO: 1655934 - RNA, 19 nt, Homo sapiens
  misc_RNA (1)...(19): siRNA sense strand
cacaucaacuccauaucug

SEQ ID NO: 1655935 - RNA, 19 nt, Homo sapiens
  misc_RNA (1)...(19): siRNA sense strand
uuucuucugucuacuaaug

SEQ ID NO: 1655936 - RNA, 19 nt, Homo sapiens
  misc_RNA (1)...(19): siRNA sense strand
cauaucacaucaacuccau

SEQ ID NO: 1655937 - RNA, 19 nt, Homo sapiens
  misc_RNA (1)...(19): siRNA sense strand
ccaacgcacacacauauca

SEQ ID NO: 1655938 - RNA, 19 nt, Homo sapiens
  misc_RNA (1)...(19): siRNA sense strand
agucugggaucucaacaug

SEQ ID NO: 1655939 - RNA, 19 nt, Homo sapiens
  misc_RNA (1)...(19): siRNA sense strand
gucaacagcgacuaugaaa

SEQ ID NO: 1655940 - RNA, 19 nt, Homo sapiens
  misc_RNA (1)...(19): siRNA sense strand
cuuaccagguucaugacua

SEQ ID NO: 1655941 - RNA, 19 nt, Homo sapiens
  misc_RNA (1)...(19): siRNA sense strand
ggaagauccaagcaacaga

SEQ ID NO: 1655942 - RNA, 19 nt, Homo sapiens
  misc_RNA (1)...(19): siRNA sense strand
uaucacaucaacuccauau

SEQ ID NO: 1655943 - RNA, 19 nt, Homo sapiens
  misc_RNA (1)...(19): siRNA sense strand
gauuucggaugugaaguuc

SEQ ID NO: 1655944 - RNA, 19 nt, Homo sapiens
  misc_RNA (1)...(19): siRNA sense strand
gcauacagcuuggcauccu

SEQ ID NO: 1655945 - RNA, 19 nt, Homo sapiens
  misc_RNA (1)...(19): siRNA sense strand
acaacaacuucuucaggau

SEQ ID NO: 1655946 - RNA, 19 nt, Homo sapiens
  misc_RNA (1)...(19): siRNA sense strand
caacgagagcaggagagua

SEQ ID NO: 1655947 - RNA, 19 nt, Homo sapiens
  misc_RNA (1)...(19): siRNA sense strand
ugacaggcuccuacaacaa

SEQ ID NO: 1655948 - RNA, 19 nt, Homo sapiens
  misc_RNA (1)...(19): siRNA sense strand
uaaccuauggaacuuugaa

SEQ ID NO: 1655949 - RNA, 19 nt, Homo sapiens
  misc_RNA (1)...(19): siRNA sense strand
cgauuucggaugugaaguu

SEQ ID NO: 1655950 - RNA, 19 nt, Homo sapiens
  misc_RNA (1)...(19): siRNA sense strand
agaaggcuacaaucugaaa

SEQ ID NO: 1655951 - RNA, 19 nt, Homo sapiens
  misc_RNA (1)...(19): siRNA sense strand
uaccugaagaguuuagaaa

SEQ ID NO: 1655952 - RNA, 19 nt, Homo sapiens
  misc_RNA (1)...(19): siRNA sense strand
ccaagcaacagaucauuuu

SEQ ID NO: 1655953 - RNA, 19 nt, Homo sapiens
  misc_RNA (1)...(19): siRNA sense strand
gaaagucagcgagcgugau

SEQ ID NO: 1655954 - RNA, 19 nt, Homo sapiens
  misc_RNA (1)...(19): siRNA sense strand
cggcuacaaauaaccuaua

SEQ ID NO: 1655955 - RNA, 19 nt, Homo sapiens
  misc_RNA (1)...(19): siRNA sense strand
ggccagaaggcuacaaucu

SEQ ID NO: 1655956 - RNA, 19 nt, Homo sapiens
  misc_RNA (1)...(19): siRNA sense strand
gcuguguucccucuaugaa

SEQ ID NO: 1655957 - RNA, 19 nt, Homo sapiens
  misc_RNA (1)...(19): siRNA sense strand
gauccugccaccaucacaa

SEQ ID NO: 1655958 - RNA, 19 nt, Homo sapiens
  misc_RNA (1)...(19): siRNA sense strand
aaacugugaagcuguggaa

SEQ ID NO: 1655959 - RNA, 19 nt, Homo sapiens
  misc_RNA (1)...(19): siRNA sense strand
gaaacaccaagcgugaugu

SEQ ID NO: 1655960 - RNA, 19 nt, Homo sapiens
  misc_RNA (1)...(19): siRNA sense strand
agaaacaccaagcgugaug

SEQ ID NO: 1655961 - RNA, 19 nt, Homo sapiens
  misc_RNA (1)...(19): siRNA sense strand
cccagcagaaugcagcuua

SEQ ID NO: 1655962 - RNA, 19 nt, Homo sapiens
  misc_RNA (1)...(19): siRNA sense strand
gugaauacaauguuuacag

SEQ ID NO: 1655963 - RNA, 19 nt, Homo sapiens
  misc_RNA (1)...(19): siRNA sense strand
ugccaacgcacacacauau

SEQ ID NO: 1655964 - RNA, 19 nt, Homo sapiens
  misc_RNA (1)...(19): siRNA sense strand
ugucaacagcgacuaugaa

SEQ ID NO: 1655965 - RNA, 19 nt, Homo sapiens
  misc_RNA (1)...(19): siRNA sense strand
aacaacuucuucaggaugu

SEQ ID NO: 1655966 - RNA, 19 nt, Homo sapiens
  misc_RNA (1)...(19): siRNA sense strand
gacaggcuccuacaacaac

SEQ ID NO: 1655967 - RNA, 19 nt, Homo sapiens
  misc_RNA (1)...(19): siRNA sense strand
cagaaugcagcuuacuuuc

SEQ ID NO: 1655968 - RNA, 19 nt, Homo sapiens
  misc_RNA (1)...(19): siRNA sense strand
ucaacuccauaucugucaa

SEQ ID NO: 1655969 - RNA, 19 nt, Homo sapiens
  misc_RNA (1)...(19): siRNA sense strand
cacagugggagguauauca

SEQ ID NO: 1655970 - RNA, 19 nt, Homo sapiens
  misc_RNA (1)...(19): siRNA sense strand
cugaaauuaucucuucgau

SEQ ID NO: 1655971 - RNA, 19 nt, Homo sapiens
  misc_RNA (1)...(19): siRNA sense strand
gauuaaccuauggaacuuu

SEQ ID NO: 1655972 - RNA, 19 nt, Homo sapiens
  misc_RNA (1)...(19): siRNA sense strand
ucagcgagcgugauaagag

SEQ ID NO: 1655973 - RNA, 19 nt, Homo sapiens
  misc_RNA (1)...(19): siRNA sense strand
uuaccagguucaugacuac

SEQ ID NO: 1655974 - RNA, 19 nt, Homo sapiens
  misc_RNA (1)...(19): siRNA sense strand
cugugaagcuguggaaagu

SEQ ID NO: 1655975 - RNA, 19 nt, Homo sapiens
  misc_RNA (1)...(19): siRNA sense strand
gcaucugcccugugugaca

SEQ ID NO: 1655976 - RNA, 19 nt, Homo sapiens
  misc_RNA (1)...(19): siRNA sense strand
auuaaccuauggaacuuug

SEQ ID NO: 1655977 - RNA, 19 nt, Homo sapiens
  misc_RNA (1)...(19): siRNA sense strand
gacauuaagccagccaaca

SEQ ID NO: 1655978 - RNA, 19 nt, Homo sapiens
  misc_RNA (1)...(19): siRNA sense strand
cauacagcuuggcauccuu

SEQ ID NO: 1655979 - RNA, 19 nt, Homo sapiens
  misc_RNA (1)...(19): siRNA sense strand
gcuccuacaacaacuucuu

SEQ ID NO: 1655980 - RNA, 19 nt, Homo sapiens
  misc_RNA (1)...(19): siRNA sense strand
caaagucugggaucucaac

SEQ ID NO: 1655981 - RNA, 19 nt, Homo sapiens
  misc_RNA (1)...(19): siRNA sense strand
gaaugcagcuuacuuucuu

SEQ ID NO: 1655982 - RNA, 19 nt, Homo sapiens
  misc_RNA (1)...(19): siRNA sense strand
ucgauuaccugaagaguuu

SEQ ID NO: 1655983 - RNA, 19 nt, Homo sapiens
  misc_RNA (1)...(19): siRNA sense strand
gcacacacauaucacauca

SEQ ID NO: 1655984 - RNA, 19 nt, Homo sapiens
  misc_RNA (1)...(19): siRNA sense strand
ccugaagaguuuagaaaua

SEQ ID NO: 1655985 - RNA, 19 nt, Homo sapiens
  misc_RNA (1)...(19): siRNA sense strand
gcugaugaccugaggauua

SEQ ID NO: 1655986 - RNA, 19 nt, Homo sapiens
  misc_RNA (1)...(19): siRNA sense strand
caaccacacgggagaauua

SEQ ID NO: 1655987 - RNA, 19 nt, Homo sapiens
  misc_RNA (1)...(19): siRNA sense strand
gcagaaugcagcuuacuuu

SEQ ID NO: 1655988 - RNA, 19 nt, Homo sapiens
  misc_RNA (1)...(19): siRNA sense strand
caucgagacuuaccagguu

SEQ ID NO: 1655989 - RNA, 19 nt, Homo sapiens
  misc_RNA (1)...(19): siRNA sense strand
gcaguggcggcuacaaaua

SEQ ID NO: 1655990 - RNA, 19 nt, Homo sapiens
  misc_RNA (1)...(19): siRNA sense strand
ggauuaaccuauggaacuu

SEQ ID NO: 1655991 - RNA, 19 nt, Homo sapiens
  misc_RNA (1)...(19): siRNA sense strand
gaucacagcagccgaguuc

SEQ ID NO: 1655992 - RNA, 19 nt, Homo sapiens
  misc_RNA (1)...(19): siRNA sense strand
ggacaauccggcuguguga

SEQ ID NO: 1655993 - RNA, 19 nt, Homo sapiens
  misc_RNA (1)...(19): siRNA sense strand
gcagcuuacuuucuucugu

SEQ ID NO: 1655994 - RNA, 19 nt, Homo sapiens
  misc_RNA (1)...(19): siRNA sense strand
ccuauggaacuuugaaaua

SEQ ID NO: 1655995 - RNA, 19 nt, Homo sapiens
  misc_RNA (1)...(19): siRNA sense strand
cugaugaccugaggauuaa

SEQ ID NO: 1655996 - RNA, 19 nt, Homo sapiens
  misc_RNA (1)...(19): siRNA sense strand
ucucugaaauuaucucuuc

SEQ ID NO: 1655997 - RNA, 19 nt, Homo sapiens
  misc_RNA (1)...(19): siRNA sense strand
ugacaggcacaccaaauuu

SEQ ID NO: 1655998 - RNA, 19 nt, Homo sapiens
  misc_RNA (1)...(19): siRNA sense strand
gugaagcuguggaaaguca

SEQ ID NO: 1655999 - RNA, 19 nt, Homo sapiens
  misc_RNA (1)...(19): siRNA sense strand
caagcuguguucccucuau

SEQ ID NO: 1656000 - RNA, 19 nt, Homo sapiens
  misc_RNA (1)...(19): siRNA sense strand
cgaguucgauuaccugaag

SEQ ID NO: 1656001 - RNA, 19 nt, Homo sapiens
  misc_RNA (1)...(19): siRNA sense strand
agacuuaccagguucauga

SEQ ID NO: 1656002 - RNA, 19 nt, Homo sapiens
  misc_RNA (1)...(19): siRNA sense strand
gggucggguuguaauauuu

SEQ ID NO: 1656003 - RNA, 19 nt, Homo sapiens
  misc_RNA (1)...(19): siRNA sense strand
ccacacgggagaauuacua

SEQ ID NO: 1656004 - RNA, 19 nt, Homo sapiens
  misc_RNA (1)...(19): siRNA sense strand
gaagauccaagcaacagau

SEQ ID NO: 1656005 - RNA, 19 nt, Homo sapiens
  misc_RNA (1)...(19): siRNA sense strand
cugaagaguuuagaaauag

SEQ ID NO: 1656006 - RNA, 19 nt, Homo sapiens
  misc_RNA (1)...(19): siRNA sense strand
cgagaucagugucgacagu

SEQ ID NO: 1656007 - RNA, 19 nt, Homo sapiens
  misc_RNA (1)...(19): siRNA sense strand
aaagucagcgagcgugaua

SEQ ID NO: 1656008 - RNA, 19 nt, Homo sapiens
  misc_RNA (1)...(19): siRNA sense strand
gaccugaggauuaaccuau

SEQ ID NO: 1656009 - RNA, 19 nt, Homo sapiens
  misc_RNA (1)...(19): siRNA sense strand
gcacauuccagagccauga

SEQ ID NO: 1656010 - RNA, 19 nt, Homo sapiens
  misc_RNA (1)...(19): siRNA sense strand
ggcuacaaauaaccuauau

SEQ ID NO: 1656011 - RNA, 19 nt, Homo sapiens
  misc_RNA (1)...(19): siRNA sense strand
acacacauaucacaucaac

SEQ ID NO: 1656012 - RNA, 19 nt, Homo sapiens
  misc_RNA (1)...(19): siRNA sense strand
ucucuucgauuucggaugu

SEQ ID NO: 1656013 - RNA, 19 nt, Homo sapiens
  misc_RNA (1)...(19): siRNA sense strand
aacgagagcaggagaguaa

SEQ ID NO: 1656014 - RNA, 19 nt, Homo sapiens
  misc_RNA (1)...(19): siRNA sense strand
gaaaagacgagaucagugu

SEQ ID NO: 1656015 - RNA, 19 nt, Homo sapiens
  misc_RNA (1)...(19): siRNA sense strand
ucaggauguucgacagaaa

SEQ ID NO: 1656016 - RNA, 19 nt, Homo sapiens
  misc_RNA (1)...(19): siRNA sense strand
ucacaucaacuccauaucu

SEQ ID NO: 1656017 - RNA, 19 nt, Homo sapiens
  misc_RNA (1)...(19): siRNA sense strand
caguggcggcuacaaauaa

SEQ ID NO: 1656018 - RNA, 19 nt, Homo sapiens
  misc_RNA (1)...(19): siRNA sense strand
ucugggaucucaacaugga

SEQ ID NO: 1656019 - RNA, 19 nt, Homo sapiens
  misc_RNA (1)...(19): siRNA sense strand
agugggagguauaucauga

SEQ ID NO: 1656020 - RNA, 19 nt, Homo sapiens
  misc_RNA (1)...(19): siRNA sense strand
acacauaucacaucaacuc

SEQ ID NO: 1656021 - RNA, 19 nt, Homo sapiens
  misc_RNA (1)...(19): siRNA sense strand
cagcuuggcauccuucaga

SEQ ID NO: 1656022 - RNA, 19 nt, Homo sapiens
  misc_RNA (1)...(19): siRNA sense strand
ggaaugggucagacagugu

SEQ ID NO: 1656023 - RNA, 19 nt, Homo sapiens
  misc_RNA (1)...(19): siRNA sense strand
gucaaagucugggaucuca

SEQ ID NO: 1656024 - RNA, 19 nt, Homo sapiens
  misc_RNA (1)...(19): siRNA sense strand
gugacaggcacaccaaauu

SEQ ID NO: 1656025 - RNA, 19 nt, Homo sapiens
  misc_RNA (1)...(19): siRNA sense strand
caacagcgacuaugaaacc

SEQ ID NO: 1656026 - RNA, 19 nt, Homo sapiens
  misc_RNA (1)...(19): siRNA sense strand
cacaucaacuccauaucug

SEQ ID NO: 1656027 - RNA, 19 nt, Homo sapiens
  misc_RNA (1)...(19): siRNA sense strand
uuucuucugucuacuaaug

SEQ ID NO: 1656028 - RNA, 19 nt, Homo sapiens
  misc_RNA (1)...(19): siRNA sense strand
cauaucacaucaacuccau

SEQ ID NO: 1656029 - RNA, 19 nt, Homo sapiens
  misc_RNA (1)...(19): siRNA sense strand
ccaacgcacacacauauca

SEQ ID NO: 1656030 - RNA, 19 nt, Homo sapiens
  misc_RNA (1)...(19): siRNA sense strand
agucugggaucucaacaug

SEQ ID NO: 1656031 - RNA, 19 nt, Homo sapiens
  misc_RNA (1)...(19): siRNA sense strand
gucaacagcgacuaugaaa

SEQ ID NO: 1656032 - RNA, 19 nt, Homo sapiens
  misc_RNA (1)...(19): siRNA sense strand
cuuaccagguucaugacua

SEQ ID NO: 1656033 - RNA, 19 nt, Homo sapiens
  misc_RNA (1)...(19): siRNA sense strand
ggaagauccaagcaacaga

SEQ ID NO: 1656034 - RNA, 19 nt, Homo sapiens
  misc_RNA (1)...(19): siRNA sense strand
uaucacaucaacuccauau

SEQ ID NO: 1656035 - RNA, 19 nt, Homo sapiens
  misc_RNA (1)...(19): siRNA sense strand
gauuucggaugugaaguuc

SEQ ID NO: 1656036 - RNA, 19 nt, Homo sapiens
  misc_RNA (1)...(19): siRNA sense strand
gcauacagcuuggcauccu

SEQ ID NO: 1656037 - RNA, 19 nt, Homo sapiens
  misc_RNA (1)...(19): siRNA sense strand
acaacaacuucuucaggau

SEQ ID NO: 1656038 - RNA, 19 nt, Homo sapiens
  misc_RNA (1)...(19): siRNA sense strand
caacgagagcaggagagua

SEQ ID NO: 1656039 - RNA, 19 nt, Homo sapiens
  misc_RNA (1)...(19): siRNA sense strand
ugacaggcuccuacaacaa

SEQ ID NO: 1656040 - RNA, 19 nt, Homo sapiens
  misc_RNA (1)...(19): siRNA sense strand
uaaccuauggaacuuugaa

SEQ ID NO: 1656041 - RNA, 19 nt, Homo sapiens
  misc_RNA (1)...(19): siRNA sense strand
cgauuucggaugugaaguu

SEQ ID NO: 1656042 - RNA, 19 nt, Homo sapiens
  misc_RNA (1)...(19): siRNA sense strand
agaaggcuacaaucugaaa

SEQ ID NO: 1656043 - RNA, 19 nt, Homo sapiens
  misc_RNA (1)...(19): siRNA sense strand
uaccugaagaguuuagaaa

SEQ ID NO: 1656044 - RNA, 19 nt, Homo sapiens
  misc_RNA (1)...(19): siRNA sense strand
ccaagcaacagaucauuuu

SEQ ID NO: 1656045 - RNA, 19 nt, Homo sapiens
  misc_RNA (1)...(19): siRNA sense strand
gaaagucagcgagcgugau

SEQ ID NO: 1656046 - RNA, 19 nt, Homo sapiens
  misc_RNA (1)...(19): siRNA sense strand
cggcuacaaauaaccuaua

SEQ ID NO: 1656047 - RNA, 19 nt, Homo sapiens
  misc_RNA (1)...(19): siRNA sense strand
ggccagaaggcuacaaucu

SEQ ID NO: 1656048 - RNA, 19 nt, Homo sapiens
  misc_RNA (1)...(19): siRNA sense strand
gcuguguucccucuaugaa

SEQ ID NO: 1656049 - RNA, 19 nt, Homo sapiens
  misc_RNA (1)...(19): siRNA sense strand
gauccugccaccaucacaa

SEQ ID NO: 1656050 - RNA, 19 nt, Homo sapiens
  misc_RNA (1)...(19): siRNA sense strand
aaacugugaagcuguggaa

SEQ ID NO: 1656051 - RNA, 19 nt, Homo sapiens
  misc_RNA (1)...(19): siRNA sense strand
gaaacaccaagcgugaugu

SEQ ID NO: 1656052 - RNA, 19 nt, Homo sapiens
  misc_RNA (1)...(19): siRNA sense strand
agaaacaccaagcgugaug

SEQ ID NO: 1656053 - RNA, 19 nt, Homo sapiens
  misc_RNA (1)...(19): siRNA sense strand
cccagcagaaugcagcuua

SEQ ID NO: 1656054 - RNA, 19 nt, Homo sapiens
  misc_RNA (1)...(19): siRNA sense strand
gugaauacaauguuuacag

SEQ ID NO: 1656055 - RNA, 19 nt, Homo sapiens
  misc_RNA (1)...(19): siRNA sense strand
ugccaacgcacacacauau

SEQ ID NO: 1656056 - RNA, 19 nt, Homo sapiens
  misc_RNA (1)...(19): siRNA sense strand
ugucaacagcgacuaugaa

SEQ ID NO: 1656057 - RNA, 19 nt, Homo sapiens
  misc_RNA (1)...(19): siRNA sense strand
aacaacuucuucaggaugu

SEQ ID NO: 1656058 - RNA, 19 nt, Homo sapiens
  misc_RNA (1)...(19): siRNA sense strand
gacaggcuccuacaacaac

SEQ ID NO: 1656059 - RNA, 19 nt, Homo sapiens
  misc_RNA (1)...(19): siRNA sense strand
cagaaugcagcuuacuuuc

SEQ ID NO: 1656060 - RNA, 19 nt, Homo sapiens
  misc_RNA (1)...(19): siRNA sense strand
ucaacuccauaucugucaa

SEQ ID NO: 1656061 - RNA, 19 nt, Homo sapiens
  misc_RNA (1)...(19): siRNA sense strand
cacagugggagguauauca

SEQ ID NO: 1656062 - RNA, 19 nt, Homo sapiens
  misc_RNA (1)...(19): siRNA sense strand
cugaaauuaucucuucgau

SEQ ID NO: 1656063 - RNA, 19 nt, Homo sapiens
  misc_RNA (1)...(19): siRNA sense strand
gauuaaccuauggaacuuu

SEQ ID NO: 1656064 - RNA, 19 nt, Homo sapiens
  misc_RNA (1)...(19): siRNA sense strand
ucagcgagcgugauaagag

SEQ ID NO: 1656065 - RNA, 19 nt, Homo sapiens
  misc_RNA (1)...(19): siRNA sense strand
uuaccagguucaugacuac

SEQ ID NO: 1656066 - RNA, 19 nt, Homo sapiens
  misc_RNA (1)...(19): siRNA sense strand
cugugaagcuguggaaagu

SEQ ID NO: 1656067 - RNA, 19 nt, Homo sapiens
  misc_RNA (1)...(19): siRNA sense strand
gcaucugcccugugugaca

SEQ ID NO: 1656068 - RNA, 19 nt, Homo sapiens
  misc_RNA (1)...(19): siRNA sense strand
auuaaccuauggaacuuug

SEQ ID NO: 1656069 - RNA, 19 nt, Homo sapiens
  misc_RNA (1)...(19): siRNA sense strand
gacauuaagccagccaaca

SEQ ID NO: 1656070 - RNA, 19 nt, Homo sapiens
  misc_RNA (1)...(19): siRNA sense strand
cauacagcuuggcauccuu

SEQ ID NO: 1656071 - RNA, 19 nt, Homo sapiens
  misc_RNA (1)...(19): siRNA sense strand
gcuccuacaacaacuucuu

SEQ ID NO: 1656072 - RNA, 19 nt, Homo sapiens
  misc_RNA (1)...(19): siRNA sense strand
caaagucugggaucucaac

SEQ ID NO: 1656073 - RNA, 19 nt, Homo sapiens
  misc_RNA (1)...(19): siRNA sense strand
gaaugcagcuuacuuucuu

SEQ ID NO: 1656074 - RNA, 19 nt, Homo sapiens
  misc_RNA (1)...(19): siRNA sense strand
ucgauuaccugaagaguuu

SEQ ID NO: 1656075 - RNA, 19 nt, Homo sapiens
  misc_RNA (1)...(19): siRNA sense strand
gcacacacauaucacauca

SEQ ID NO: 1656076 - RNA, 19 nt, Homo sapiens
  misc_RNA (1)...(19): siRNA sense strand
ccugaagaguuuagaaaua

SEQ ID NO: 1656077 - RNA, 19 nt, Homo sapiens
  misc_RNA (1)...(19): siRNA sense strand
gcugaugaccugaggauua

SEQ ID NO: 1656078 - RNA, 19 nt, Homo sapiens
  misc_RNA (1)...(19): siRNA sense strand
caaccacacgggagaauua

SEQ ID NO: 1656079 - RNA, 19 nt, Homo sapiens
  misc_RNA (1)...(19): siRNA sense strand
gcagaaugcagcuuacuuu

SEQ ID NO: 1656080 - RNA, 19 nt, Homo sapiens
  misc_RNA (1)...(19): siRNA sense strand
caucgagacuuaccagguu

SEQ ID NO: 1656081 - RNA, 19 nt, Homo sapiens
  misc_RNA (1)...(19): siRNA sense strand
gcaguggcggcuacaaaua

SEQ ID NO: 1656082 - RNA, 19 nt, Homo sapiens
  misc_RNA (1)...(19): siRNA sense strand
ggauuaaccuauggaacuu

SEQ ID NO: 1656083 - RNA, 19 nt, Homo sapiens
  misc_RNA (1)...(19): siRNA sense strand
gaucacagcagccgaguuc

SEQ ID NO: 1656084 - RNA, 19 nt, Homo sapiens
  misc_RNA (1)...(19): siRNA sense strand
ggacaauccggcuguguga

SEQ ID NO: 1656085 - RNA, 19 nt, Homo sapiens
  misc_RNA (1)...(19): siRNA sense strand
gcagcuuacuuucuucugu

SEQ ID NO: 1656086 - RNA, 19 nt, Homo sapiens
  misc_RNA (1)...(19): siRNA sense strand
ccuauggaacuuugaaaua

SEQ ID NO: 1656087 - RNA, 19 nt, Homo sapiens
  misc_RNA (1)...(19): siRNA sense strand
cugaugaccugaggauuaa

SEQ ID NO: 1656088 - RNA, 19 nt, Homo sapiens
  misc_RNA (1)...(19): siRNA sense strand
ucucugaaauuaucucuuc

SEQ ID NO: 1656089 - RNA, 19 nt, Homo sapiens
  misc_RNA (1)...(19): siRNA sense strand
ugacaggcacaccaaauuu

SEQ ID NO: 1656090 - RNA, 19 nt, Homo sapiens
  misc_RNA (1)...(19): siRNA sense strand
gugaagcuguggaaaguca

SEQ ID NO: 1656091 - RNA, 19 nt, Homo sapiens
  misc_RNA (1)...(19): siRNA sense strand
caagcuguguucccucuau

SEQ ID NO: 1656092 - RNA, 19 nt, Homo sapiens
  misc_RNA (1)...(19): siRNA sense strand
cgaguucgauuaccugaag

SEQ ID NO: 1656093 - RNA, 19 nt, Homo sapiens
  misc_RNA (1)...(19): siRNA sense strand
agacuuaccagguucauga

SEQ ID NO: 1656094 - RNA, 19 nt, Homo sapiens
  misc_RNA (1)...(19): siRNA sense strand
gggucggguuguaauauuu

SEQ ID NO: 1656095 - RNA, 19 nt, Homo sapiens
  misc_RNA (1)...(19): siRNA sense strand
ccacacgggagaauuacua

SEQ ID NO: 1656096 - RNA, 19 nt, Homo sapiens
  misc_RNA (1)...(19): siRNA sense strand
gaagauccaagcaacagau

SEQ ID NO: 1656097 - RNA, 19 nt, Homo sapiens
  misc_RNA (1)...(19): siRNA sense strand
cugaagaguuuagaaauag

SEQ ID NO: 1656098 - RNA, 19 nt, Homo sapiens
  misc_RNA (1)...(19): siRNA sense strand
cgagaucagugucgacagu

SEQ ID NO: 1656099 - RNA, 19 nt, Homo sapiens
  misc_RNA (1)...(19): siRNA sense strand
aaagucagcgagcgugaua

SEQ ID NO: 1656100 - RNA, 19 nt, Homo sapiens
  misc_RNA (1)...(19): siRNA sense strand
gaccugaggauuaaccuau

SEQ ID NO: 1656101 - RNA, 19 nt, Homo sapiens
  misc_RNA (1)...(19): siRNA sense strand
gcacauuccagagccauga

SEQ ID NO: 1656102 - RNA, 19 nt, Homo sapiens
  misc_RNA (1)...(19): siRNA sense strand
ggcuacaaauaaccuauau

SEQ ID NO: 1656103 - RNA, 19 nt, Homo sapiens
  misc_RNA (1)...(19): siRNA sense strand
acacacauaucacaucaac

SEQ ID NO: 1656104 - RNA, 19 nt, Homo sapiens
  misc_RNA (1)...(19): siRNA sense strand
ucucuucgauuucggaugu

SEQ ID NO: 1656105 - RNA, 19 nt, Homo sapiens
  misc_RNA (1)...(19): siRNA sense strand
aacgagagcaggagaguaa

SEQ ID NO: 1656106 - RNA, 19 nt, Homo sapiens
  misc_RNA (1)...(19): siRNA sense strand
gaaaagacgagaucagugu

SEQ ID NO: 1656107 - RNA, 19 nt, Homo sapiens
  misc_RNA (1)...(19): siRNA sense strand
ucaggauguucgacagaaa

SEQ ID NO: 1656108 - RNA, 19 nt, Homo sapiens
  misc_RNA (1)...(19): siRNA sense strand
ucacaucaacuccauaucu

SEQ ID NO: 1656109 - RNA, 19 nt, Homo sapiens
  misc_RNA (1)...(19): siRNA sense strand
caguggcggcuacaaauaa

SEQ ID NO: 1656110 - RNA, 19 nt, Homo sapiens
  misc_RNA (1)...(19): siRNA sense strand
ucugggaucucaacaugga

SEQ ID NO: 1656111 - RNA, 19 nt, Homo sapiens
  misc_RNA (1)...(19): siRNA sense strand
agugggagguauaucauga

SEQ ID NO: 1656112 - RNA, 19 nt, Homo sapiens
  misc_RNA (1)...(19): siRNA sense strand
acacauaucacaucaacuc

SEQ ID NO: 1656113 - RNA, 19 nt, Homo sapiens
  misc_RNA (1)...(19): siRNA sense strand
cagcuuggcauccuucaga

SEQ ID NO: 1656114 - RNA, 19 nt, Homo sapiens
  misc_RNA (1)...(19): siRNA sense strand
ggaaugggucagacagugu

SEQ ID NO: 1656115 - RNA, 19 nt, Homo sapiens
  misc_RNA (1)...(19): siRNA sense strand
gucaaagucugggaucuca

SEQ ID NO: 1656116 - RNA, 19 nt, Homo sapiens
  misc_RNA (1)...(19): siRNA sense strand
gugacaggcacaccaaauu

SEQ ID NO: 1656117 - RNA, 19 nt, Homo sapiens
  misc_RNA (1)...(19): siRNA sense strand
caacagcgacuaugaaacc

SEQ ID NO: 1656118 - RNA, 19 nt, Homo sapiens
  misc_RNA (1)...(19): siRNA sense strand
cacaucaacuccauaucug

SEQ ID NO: 1656119 - RNA, 19 nt, Homo sapiens
  misc_RNA (1)...(19): siRNA sense strand
uuucuucugucuacuaaug

SEQ ID NO: 1656120 - RNA, 19 nt, Homo sapiens
  misc_RNA (1)...(19): siRNA sense strand
cauaucacaucaacuccau

SEQ ID NO: 1656121 - RNA, 19 nt, Homo sapiens
  misc_RNA (1)...(19): siRNA sense strand
ccaacgcacacacauauca

SEQ ID NO: 1656122 - RNA, 19 nt, Homo sapiens
  misc_RNA (1)...(19): siRNA sense strand
agucugggaucucaacaug

SEQ ID NO: 1656123 - RNA, 19 nt, Homo sapiens
  misc_RNA (1)...(19): siRNA sense strand
gucaacagcgacuaugaaa

SEQ ID NO: 1656124 - RNA, 19 nt, Homo sapiens
  misc_RNA (1)...(19): siRNA sense strand
cuuaccagguucaugacua

SEQ ID NO: 1656125 - RNA, 19 nt, Homo sapiens
  misc_RNA (1)...(19): siRNA sense strand
ggaagauccaagcaacaga

SEQ ID NO: 1656126 - RNA, 19 nt, Homo sapiens
  misc_RNA (1)...(19): siRNA sense strand
uaucacaucaacuccauau

SEQ ID NO: 1656127 - RNA, 19 nt, Homo sapiens
  misc_RNA (1)...(19): siRNA sense strand
gauuucggaugugaaguuc

SEQ ID NO: 1656128 - RNA, 19 nt, Homo sapiens
  misc_RNA (1)...(19): siRNA sense strand
gcauacagcuuggcauccu

SEQ ID NO: 1656129 - RNA, 19 nt, Homo sapiens
  misc_RNA (1)...(19): siRNA sense strand
acaacaacuucuucaggau

SEQ ID NO: 1656130 - RNA, 19 nt, Homo sapiens
  misc_RNA (1)...(19): siRNA sense strand
caacgagagcaggagagua

SEQ ID NO: 1656131 - RNA, 19 nt, Homo sapiens
  misc_RNA (1)...(19): siRNA sense strand
ugacaggcuccuacaacaa

SEQ ID NO: 1656132 - RNA, 19 nt, Homo sapiens
  misc_RNA (1)...(19): siRNA sense strand
uaaccuauggaacuuugaa

SEQ ID NO: 1656133 - RNA, 19 nt, Homo sapiens
  misc_RNA (1)...(19): siRNA sense strand
cgauuucggaugugaaguu

SEQ ID NO: 1656134 - RNA, 19 nt, Homo sapiens
  misc_RNA (1)...(19): siRNA sense strand
agaaggcuacaaucugaaa

SEQ ID NO: 1656135 - RNA, 19 nt, Homo sapiens
  misc_RNA (1)...(19): siRNA sense strand
uaccugaagaguuuagaaa

SEQ ID NO: 1656136 - RNA, 19 nt, Homo sapiens
  misc_RNA (1)...(19): siRNA sense strand
ccaagcaacagaucauuuu

SEQ ID NO: 1656137 - RNA, 19 nt, Homo sapiens
  misc_RNA (1)...(19): siRNA sense strand
gaaagucagcgagcgugau

SEQ ID NO: 1656138 - RNA, 19 nt, Homo sapiens
  misc_RNA (1)...(19): siRNA sense strand
cggcuacaaauaaccuaua

SEQ ID NO: 1656139 - RNA, 19 nt, Homo sapiens
  misc_RNA (1)...(19): siRNA sense strand
ggccagaaggcuacaaucu

SEQ ID NO: 1656140 - RNA, 19 nt, Homo sapiens
  misc_RNA (1)...(19): siRNA sense strand
gcuguguucccucuaugaa

SEQ ID NO: 1656141 - RNA, 19 nt, Homo sapiens
  misc_RNA (1)...(19): siRNA sense strand
gauccugccaccaucacaa

SEQ ID NO: 1656142 - RNA, 19 nt, Homo sapiens
  misc_RNA (1)...(19): siRNA sense strand
aaacugugaagcuguggaa

SEQ ID NO: 1656143 - RNA, 19 nt, Homo sapiens
  misc_RNA (1)...(19): siRNA sense strand
gaaacaccaagcgugaugu

SEQ ID NO: 1656144 - RNA, 19 nt, Homo sapiens
  misc_RNA (1)...(19): siRNA sense strand
agaaacaccaagcgugaug

SEQ ID NO: 1656145 - RNA, 19 nt, Homo sapiens
  misc_RNA (1)...(19): siRNA sense strand
cccagcagaaugcagcuua

SEQ ID NO: 1656146 - RNA, 19 nt, Homo sapiens
  misc_RNA (1)...(19): siRNA sense strand
gugaauacaauguuuacag

SEQ ID NO: 1656147 - RNA, 19 nt, Homo sapiens
  misc_RNA (1)...(19): siRNA sense strand
ugccaacgcacacacauau

SEQ ID NO: 1656148 - RNA, 19 nt, Homo sapiens
  misc_RNA (1)...(19): siRNA sense strand
ugucaacagcgacuaugaa

SEQ ID NO: 1656149 - RNA, 19 nt, Homo sapiens
  misc_RNA (1)...(19): siRNA sense strand
aacaacuucuucaggaugu

SEQ ID NO: 1656150 - RNA, 19 nt, Homo sapiens
  misc_RNA (1)...(19): siRNA sense strand
gacaggcuccuacaacaac

SEQ ID NO: 1656151 - RNA, 19 nt, Homo sapiens
  misc_RNA (1)...(19): siRNA sense strand
cagaaugcagcuuacuuuc

SEQ ID NO: 1656152 - RNA, 19 nt, Homo sapiens
  misc_RNA (1)...(19): siRNA sense strand
ucaacuccauaucugucaa

SEQ ID NO: 1656153 - RNA, 19 nt, Homo sapiens
  misc_RNA (1)...(19): siRNA sense strand
cacagugggagguauauca

SEQ ID NO: 1656154 - RNA, 19 nt, Homo sapiens
  misc_RNA (1)...(19): siRNA sense strand
cugaaauuaucucuucgau

SEQ ID NO: 1656155 - RNA, 19 nt, Homo sapiens
  misc_RNA (1)...(19): siRNA sense strand
gauuaaccuauggaacuuu

SEQ ID NO: 1656156 - RNA, 19 nt, Homo sapiens
  misc_RNA (1)...(19): siRNA sense strand
ucagcgagcgugauaagag

SEQ ID NO: 1656157 - RNA, 19 nt, Homo sapiens
  misc_RNA (1)...(19): siRNA sense strand
uuaccagguucaugacuac

SEQ ID NO: 1656158 - RNA, 19 nt, Homo sapiens
  misc_RNA (1)...(19): siRNA sense strand
cugugaagcuguggaaagu

SEQ ID NO: 1656159 - RNA, 19 nt, Homo sapiens
  misc_RNA (1)...(19): siRNA sense strand
gcaucugcccugugugaca

SEQ ID NO: 1656160 - RNA, 19 nt, Homo sapiens
  misc_RNA (1)...(19): siRNA sense strand
auuaaccuauggaacuuug

SEQ ID NO: 1656161 - RNA, 19 nt, Homo sapiens
  misc_RNA (1)...(19): siRNA sense strand
gacauuaagccagccaaca

SEQ ID NO: 1656162 - RNA, 19 nt, Homo sapiens
  misc_RNA (1)...(19): siRNA sense strand
cauacagcuuggcauccuu

SEQ ID NO: 1656163 - RNA, 19 nt, Homo sapiens
  misc_RNA (1)...(19): siRNA sense strand
gcuccuacaacaacuucuu

SEQ ID NO: 1656164 - RNA, 19 nt, Homo sapiens
  misc_RNA (1)...(19): siRNA sense strand
caaagucugggaucucaac

SEQ ID NO: 1656165 - RNA, 19 nt, Homo sapiens
  misc_RNA (1)...(19): siRNA sense strand
ccuaugaccuagacuauua

SEQ ID NO: 1656166 - RNA, 19 nt, Homo sapiens
  misc_RNA (1)...(19): siRNA sense strand
gaggaaacauuauuugaag

SEQ ID NO: 1656167 - RNA, 19 nt, Homo sapiens
  misc_RNA (1)...(19): siRNA sense strand
ugacuugggugaaauuuau

SEQ ID NO: 1656168 - RNA, 19 nt, Homo sapiens
  misc_RNA (1)...(19): siRNA sense strand
ggaggaaacauuauuugaa

SEQ ID NO: 1656169 - RNA, 19 nt, Homo sapiens
  misc_RNA (1)...(19): siRNA sense strand
uaucaccuguuuagcauuu

SEQ ID NO: 1656170 - RNA, 19 nt, Homo sapiens
  misc_RNA (1)...(19): siRNA sense strand
ggaccacuauauccacuug

SEQ ID NO: 1656171 - RNA, 19 nt, Homo sapiens
  misc_RNA (1)...(19): siRNA sense strand
cucaagaacucucugauug

SEQ ID NO: 1656172 - RNA, 19 nt, Homo sapiens
  misc_RNA (1)...(19): siRNA sense strand
gguuuggcauuccucaaua

SEQ ID NO: 1656173 - RNA, 19 nt, Homo sapiens
  misc_RNA (1)...(19): siRNA sense strand
cuugauccauccugucuua

SEQ ID NO: 1656174 - RNA, 19 nt, Homo sapiens
  misc_RNA (1)...(19): siRNA sense strand
gaacucagaaaccaagaau

SEQ ID NO: 1656175 - RNA, 19 nt, Homo sapiens
  misc_RNA (1)...(19): siRNA sense strand
gaaucugugucuccuggaa

SEQ ID NO: 1656176 - RNA, 19 nt, Homo sapiens
  misc_RNA (1)...(19): siRNA sense strand
caagaacucucugauuguc

SEQ ID NO: 1656177 - RNA, 19 nt, Homo sapiens
  misc_RNA (1)...(19): siRNA sense strand
gauccugaccucacuuuga

SEQ ID NO: 1656178 - RNA, 19 nt, Homo sapiens
  misc_RNA (1)...(19): siRNA sense strand
gggucucccugguguuaua

SEQ ID NO: 1656179 - RNA, 19 nt, Homo sapiens
  misc_RNA (1)...(19): siRNA sense strand
ugggugaaauuuaucauug

SEQ ID NO: 1656180 - RNA, 19 nt, Homo sapiens
  misc_RNA (1)...(19): siRNA sense strand
cuacuugugucucaucuuc

SEQ ID NO: 1656181 - RNA, 19 nt, Homo sapiens
  misc_RNA (1)...(19): siRNA sense strand
uggcauuccucaauaguug

SEQ ID NO: 1656182 - RNA, 19 nt, Homo sapiens
  misc_RNA (1)...(19): siRNA sense strand
gauccauccugucuuaucu

SEQ ID NO: 1656183 - RNA, 19 nt, Homo sapiens
  misc_RNA (1)...(19): siRNA sense strand
ccuggaaacagcucaauaa

SEQ ID NO: 1656184 - RNA, 19 nt, Homo sapiens
  misc_RNA (1)...(19): siRNA sense strand
cauccugucuuaucucauc

SEQ ID NO: 1656185 - RNA, 19 nt, Homo sapiens
  misc_RNA (1)...(19): siRNA sense strand
gcuuuuggcuucucuaauu

SEQ ID NO: 1656186 - RNA, 19 nt, Homo sapiens
  misc_RNA (1)...(19): siRNA sense strand
ggaguucaauaaucauacu

SEQ ID NO: 1656187 - RNA, 19 nt, Homo sapiens
  misc_RNA (1)...(19): siRNA sense strand
aggcauuucuggacaauuc

SEQ ID NO: 1656188 - RNA, 19 nt, Homo sapiens
  misc_RNA (1)...(19): siRNA sense strand
uuugggagcucaccauuca

SEQ ID NO: 1656189 - RNA, 19 nt, Homo sapiens
  misc_RNA (1)...(19): siRNA sense strand
agauuuggaggaaacauua

SEQ ID NO: 1656190 - RNA, 19 nt, Homo sapiens
  misc_RNA (1)...(19): siRNA sense strand
gugaacagcucaggaacuc

SEQ ID NO: 1656191 - RNA, 19 nt, Homo sapiens
  misc_RNA (1)...(19): siRNA sense strand
ccuauguggccaugaauuu

SEQ ID NO: 1656192 - RNA, 19 nt, Homo sapiens
  misc_RNA (1)...(19): siRNA sense strand
gcucaccauucaccacaau

SEQ ID NO: 1656193 - RNA, 19 nt, Homo sapiens
  misc_RNA (1)...(19): siRNA sense strand
guuguggccuuugugguuu

SEQ ID NO: 1656194 - RNA, 19 nt, Homo sapiens
  misc_RNA (1)...(19): siRNA sense strand
caaagccaauuccuucacu

SEQ ID NO: 1656195 - RNA, 19 nt, Homo sapiens
  misc_RNA (1)...(19): siRNA sense strand
ggcaccauguucugacuug

SEQ ID NO: 1656196 - RNA, 19 nt, Homo sapiens
  misc_RNA (1)...(19): siRNA sense strand
ccucaagaacucucugauu

SEQ ID NO: 1656197 - RNA, 19 nt, Homo sapiens
  misc_RNA (1)...(19): siRNA sense strand
guuccucaaucuagccauu

SEQ ID NO: 1656198 - RNA, 19 nt, Homo sapiens
  misc_RNA (1)...(19): siRNA sense strand
gaauuuccacuggcccuuu

SEQ ID NO: 1656199 - RNA, 19 nt, Homo sapiens
  misc_RNA (1)...(19): siRNA sense strand
gaaaguccagcugggaguu

SEQ ID NO: 1656200 - RNA, 19 nt, Homo sapiens
  misc_RNA (1)...(19): siRNA sense strand
cauacucuuugcuauaaca

SEQ ID NO: 1656201 - RNA, 19 nt, Homo sapiens
  misc_RNA (1)...(19): siRNA sense strand
ugaucagccuggaccacua

SEQ ID NO: 1656202 - RNA, 19 nt, Homo sapiens
  misc_RNA (1)...(19): siRNA sense strand
ggaacucagaaaccaagaa

SEQ ID NO: 1656203 - RNA, 19 nt, Homo sapiens
  misc_RNA (1)...(19): siRNA sense strand
gguuguggccuuugugguu

SEQ ID NO: 1656204 - RNA, 19 nt, Homo sapiens
  misc_RNA (1)...(19): siRNA sense strand
uuggcuaucucuucccuuu

SEQ ID NO: 1656205 - RNA, 19 nt, Homo sapiens
  misc_RNA (1)...(19): siRNA sense strand
gaucaggcaccauguucug

SEQ ID NO: 1656206 - RNA, 19 nt, Homo sapiens
  misc_RNA (1)...(19): siRNA sense strand
ugaccuagacuauuacucu

SEQ ID NO: 1656207 - RNA, 19 nt, Homo sapiens
  misc_RNA (1)...(19): siRNA sense strand
ucaagaacucucugauugu

SEQ ID NO: 1656208 - RNA, 19 nt, Homo sapiens
  misc_RNA (1)...(19): siRNA sense strand
gaucagccuggaccacuau

SEQ ID NO: 1656209 - RNA, 19 nt, Homo sapiens
  misc_RNA (1)...(19): siRNA sense strand
gggugaaauuuaucauugg

SEQ ID NO: 1656210 - RNA, 19 nt, Homo sapiens
  misc_RNA (1)...(19): siRNA sense strand
gugguuugcuggacuccuu

SEQ ID NO: 1656211 - RNA, 19 nt, Homo sapiens
  misc_RNA (1)...(19): siRNA sense strand
gaagcgaagcauccugauc

SEQ ID NO: 1656212 - RNA, 19 nt, Homo sapiens
  misc_RNA (1)...(19): siRNA sense strand
agaagacagucaccacucu

SEQ ID NO: 1656213 - RNA, 19 nt, Homo sapiens
  misc_RNA (1)...(19): siRNA sense strand
uaucauuggcuaucucuuc

SEQ ID NO: 1656214 - RNA, 19 nt, Homo sapiens
  misc_RNA (1)...(19): siRNA sense strand
ucuccuauguggccaugaa

SEQ ID NO: 1656215 - RNA, 19 nt, Homo sapiens
  misc_RNA (1)...(19): siRNA sense strand
cuguggaguucaauaauca

SEQ ID NO: 1656216 - RNA, 19 nt, Homo sapiens
  misc_RNA (1)...(19): siRNA sense strand
agucugauuuggaggagaa

SEQ ID NO: 1656217 - RNA, 19 nt, Homo sapiens
  misc_RNA (1)...(19): siRNA sense strand
gcaugauccugaccucacu

SEQ ID NO: 1656218 - RNA, 19 nt, Homo sapiens
  misc_RNA (1)...(19): siRNA sense strand
caucgaacccucaagaacu

SEQ ID NO: 1656219 - RNA, 19 nt, Homo sapiens
  misc_RNA (1)...(19): siRNA sense strand
ucucuucccuuugcuaaca

SEQ ID NO: 1656220 - RNA, 19 nt, Homo sapiens
  misc_RNA (1)...(19): siRNA sense strand
guggaguucaauaaucaua

SEQ ID NO: 1656221 - RNA, 19 nt, Homo sapiens
  misc_RNA (1)...(19): siRNA sense strand
uggaggaaacauuauuuga

SEQ ID NO: 1656222 - RNA, 19 nt, Homo sapiens
  misc_RNA (1)...(19): siRNA sense strand
ccauucaccacaauagcua

SEQ ID NO: 1656223 - RNA, 19 nt, Homo sapiens
  misc_RNA (1)...(19): siRNA sense strand
guaggcauuucuggacaau

SEQ ID NO: 1656224 - RNA, 19 nt, Homo sapiens
  misc_RNA (1)...(19): siRNA sense strand
guucugacuugggugaaau

SEQ ID NO: 1656225 - RNA, 19 nt, Homo sapiens
  misc_RNA (1)...(19): siRNA sense strand
ugaacauguuugccagugu

SEQ ID NO: 1656226 - RNA, 19 nt, Homo sapiens
  misc_RNA (1)...(19): siRNA sense strand
cuuaucaccuguuuagcau

SEQ ID NO: 1656227 - RNA, 19 nt, Homo sapiens
  misc_RNA (1)...(19): siRNA sense strand
gcaucuggcugugcaaagc

SEQ ID NO: 1656228 - RNA, 19 nt, Homo sapiens
  misc_RNA (1)...(19): siRNA sense strand
aaaccaagaaucugugucu

SEQ ID NO: 1656229 - RNA, 19 nt, Homo sapiens
  misc_RNA (1)...(19): siRNA sense strand
caauucugguugugguugu

SEQ ID NO: 1656230 - RNA, 19 nt, Homo sapiens
  misc_RNA (1)...(19): siRNA sense strand
gaucuccaguaggcauuuc

SEQ ID NO: 1656231 - RNA, 19 nt, Homo sapiens
  misc_RNA (1)...(19): siRNA sense strand
ucccugguguuauauuguu

SEQ ID NO: 1656232 - RNA, 19 nt, Homo sapiens
  misc_RNA (1)...(19): siRNA sense strand
agaacucucugauugucau

SEQ ID NO: 1656233 - RNA, 19 nt, Homo sapiens
  misc_RNA (1)...(19): siRNA sense strand
gcaucgaacccucaagaac

SEQ ID NO: 1656234 - RNA, 19 nt, Homo sapiens
  misc_RNA (1)...(19): siRNA sense strand
gguugugguuguggccuuu

SEQ ID NO: 1656235 - RNA, 19 nt, Homo sapiens
  misc_RNA (1)...(19): siRNA sense strand
ucucccugguguuauauug

SEQ ID NO: 1656236 - RNA, 19 nt, Homo sapiens
  misc_RNA (1)...(19): siRNA sense strand
acucagaaaccaagaaucu

SEQ ID NO: 1656237 - RNA, 19 nt, Homo sapiens
  misc_RNA (1)...(19): siRNA sense strand
cagcucaggaacucagaaa

SEQ ID NO: 1656238 - RNA, 19 nt, Homo sapiens
  misc_RNA (1)...(19): siRNA sense strand
gcuugaaccccauccuuua

SEQ ID NO: 1656239 - RNA, 19 nt, Homo sapiens
  misc_RNA (1)...(19): siRNA sense strand
gcauccugaucuccaguag

SEQ ID NO: 1656240 - RNA, 19 nt, Homo sapiens
  misc_RNA (1)...(19): siRNA sense strand
ggcuaucucuucccuuugc

SEQ ID NO: 1656241 - RNA, 19 nt, Homo sapiens
  misc_RNA (1)...(19): siRNA sense strand
caauaaucauacucuuugc

SEQ ID NO: 1656242 - RNA, 19 nt, Homo sapiens
  misc_RNA (1)...(19): siRNA sense strand
ucaaguggaagaagacagu

SEQ ID NO: 1656243 - RNA, 19 nt, Homo sapiens
  misc_RNA (1)...(19): siRNA sense strand
aagcgaagcauccugaucu

SEQ ID NO: 1656244 - RNA, 19 nt, Homo sapiens
  misc_RNA (1)...(19): siRNA sense strand
uaucucuucccuuugcuaa

SEQ ID NO: 1656245 - RNA, 19 nt, Homo sapiens
  misc_RNA (1)...(19): siRNA sense strand
acucucugauugucauuau

SEQ ID NO: 1656246 - RNA, 19 nt, Homo sapiens
  misc_RNA (1)...(19): siRNA sense strand
gaacucucugauugucauu

SEQ ID NO: 1656247 - RNA, 19 nt, Homo sapiens
  misc_RNA (1)...(19): siRNA sense strand
cggcaucgaacccucaaga

SEQ ID NO: 1656248 - RNA, 19 nt, Homo sapiens
  misc_RNA (1)...(19): siRNA sense strand
gccauugcggauuucauuu

SEQ ID NO: 1656249 - RNA, 19 nt, Homo sapiens
  misc_RNA (1)...(19): siRNA sense strand
acuguggaguucaauaauc

SEQ ID NO: 1656250 - RNA, 19 nt, Homo sapiens
  misc_RNA (1)...(19): siRNA sense strand
guuuggcauuccucaauag

SEQ ID NO: 1656251 - RNA, 19 nt, Homo sapiens
  misc_RNA (1)...(19): siRNA sense strand
gcaaagccaauuccuucac

SEQ ID NO: 1656252 - RNA, 19 nt, Homo sapiens
  misc_RNA (1)...(19): siRNA sense strand
caaaggaguuuacuguuua

SEQ ID NO: 1656253 - RNA, 19 nt, Homo sapiens
  misc_RNA (1)...(19): siRNA sense strand
gcaaaggaguuuacuguuu

SEQ ID NO: 1656254 - RNA, 19 nt, Homo sapiens
  misc_RNA (1)...(19): siRNA sense strand
ugacaacacuaucagauua

SEQ ID NO: 1656255 - RNA, 19 nt, Homo sapiens
  misc_RNA (1)...(19): siRNA sense strand
cacauaaacucguaucuua

SEQ ID NO: 1656256 - RNA, 19 nt, Homo sapiens
  misc_RNA (1)...(19): siRNA sense strand
gcagagagauuucauaacu

SEQ ID NO: 1656257 - RNA, 19 nt, Homo sapiens
  misc_RNA (1)...(19): siRNA sense strand
gcacugcuaugaagacuga

SEQ ID NO: 1656258 - RNA, 19 nt, Homo sapiens
  misc_RNA (1)...(19): siRNA sense strand
gaccuuaaauggacacaaa

SEQ ID NO: 1656259 - RNA, 19 nt, Homo sapiens
  misc_RNA (1)...(19): siRNA sense strand
gcacuugcguuucaauaau

SEQ ID NO: 1656260 - RNA, 19 nt, Homo sapiens
  misc_RNA (1)...(19): siRNA sense strand
agacauaguuuacagagaa

SEQ ID NO: 1656261 - RNA, 19 nt, Homo sapiens
  misc_RNA (1)...(19): siRNA sense strand
gagaaggcacucaaguuua

SEQ ID NO: 1656262 - RNA, 19 nt, Homo sapiens
  misc_RNA (1)...(19): siRNA sense strand
agagaagacuguaauaaug

SEQ ID NO: 1656263 - RNA, 19 nt, Homo sapiens
  misc_RNA (1)...(19): siRNA sense strand
caucuuauaucccaaaugu

SEQ ID NO: 1656264 - RNA, 19 nt, Homo sapiens
  misc_RNA (1)...(19): siRNA sense strand
gagagaagacuguaauaau

SEQ ID NO: 1656265 - RNA, 19 nt, Homo sapiens
  misc_RNA (1)...(19): siRNA sense strand
gaagaagcuuaucgagaga

SEQ ID NO: 1656266 - RNA, 19 nt, Homo sapiens
  misc_RNA (1)...(19): siRNA sense strand
aaauacaggugaaaugcua

SEQ ID NO: 1656267 - RNA, 19 nt, Homo sapiens
  misc_RNA (1)...(19): siRNA sense strand
agaauguggugcauguuua

SEQ ID NO: 1656268 - RNA, 19 nt, Homo sapiens
  misc_RNA (1)...(19): siRNA sense strand
agaaggcacucaaguuuau

SEQ ID NO: 1656269 - RNA, 19 nt, Homo sapiens
  misc_RNA (1)...(19): siRNA sense strand
caaucaagaucugggauaa

SEQ ID NO: 1656270 - RNA, 19 nt, Homo sapiens
  misc_RNA (1)...(19): siRNA sense strand
ggaacugugugucaaauac

SEQ ID NO: 1656271 - RNA, 19 nt, Homo sapiens
  misc_RNA (1)...(19): siRNA sense strand
gaacauacaccuacaucuc

SEQ ID NO: 1656272 - RNA, 19 nt, Homo sapiens
  misc_RNA (1)...(19): siRNA sense strand
auagagcacuuuauccuaa

SEQ ID NO: 1656273 - RNA, 19 nt, Homo sapiens
  misc_RNA (1)...(19): siRNA sense strand
gaacaucuuauaucccaaa

SEQ ID NO: 1656274 - RNA, 19 nt, Homo sapiens
  misc_RNA (1)...(19): siRNA sense strand
gagaagaauucacuuagac

SEQ ID NO: 1656275 - RNA, 19 nt, Homo sapiens
  misc_RNA (1)...(19): siRNA sense strand
gggacaguauuuauucaaa

SEQ ID NO: 1656276 - RNA, 19 nt, Homo sapiens
  misc_RNA (1)...(19): siRNA sense strand
ccagagaagaauucacuua

SEQ ID NO: 1656277 - RNA, 19 nt, Homo sapiens
  misc_RNA (1)...(19): siRNA sense strand
gaauuuguggaacaucuua

SEQ ID NO: 1656278 - RNA, 19 nt, Homo sapiens
  misc_RNA (1)...(19): siRNA sense strand
ggaagauaauaccagagaa

SEQ ID NO: 1656279 - RNA, 19 nt, Homo sapiens
  misc_RNA (1)...(19): siRNA sense strand
gacuacaguuugaugaauu

SEQ ID NO: 1656280 - RNA, 19 nt, Homo sapiens
  misc_RNA (1)...(19): siRNA sense strand
cauagaauguggugcaugu

SEQ ID NO: 1656281 - RNA, 19 nt, Homo sapiens
  misc_RNA (1)...(19): siRNA sense strand
acaccgagcugcugucaau

SEQ ID NO: 1656282 - RNA, 19 nt, Homo sapiens
  misc_RNA (1)...(19): siRNA sense strand
gcacauaaacucguaucuu

SEQ ID NO: 1656283 - RNA, 19 nt, Homo sapiens
  misc_RNA (1)...(19): siRNA sense strand
gagcauuccggaagaguuu

SEQ ID NO: 1656284 - RNA, 19 nt, Homo sapiens
  misc_RNA (1)...(19): siRNA sense strand
gugaaaugcuaaacacguu

SEQ ID NO: 1656285 - RNA, 19 nt, Homo sapiens
  misc_RNA (1)...(19): siRNA sense strand
aaacaaaacuugccaaugg

SEQ ID NO: 1656286 - RNA, 19 nt, Homo sapiens
  misc_RNA (1)...(19): siRNA sense strand
gagagagaagacuguaaua

SEQ ID NO: 1656287 - RNA, 19 nt, Homo sapiens
  misc_RNA (1)...(19): siRNA sense strand
gauaauaccagagaagaau

SEQ ID NO: 1656288 - RNA, 19 nt, Homo sapiens
  misc_RNA (1)...(19): siRNA sense strand
agagaagaauucacuuaga

SEQ ID NO: 1656289 - RNA, 19 nt, Homo sapiens
  misc_RNA (1)...(19): siRNA sense strand
acucguaucuuaaaccuau

SEQ ID NO: 1656290 - RNA, 19 nt, Homo sapiens
  misc_RNA (1)...(19): siRNA sense strand
gaaacucucagcaagcuau

SEQ ID NO: 1656291 - RNA, 19 nt, Homo sapiens
  misc_RNA (1)...(19): siRNA sense strand
agagaaggcacucaaguuu

SEQ ID NO: 1656292 - RNA, 19 nt, Homo sapiens
  misc_RNA (1)...(19): siRNA sense strand
gagcugcugucaauguugu

SEQ ID NO: 1656293 - RNA, 19 nt, Homo sapiens
  misc_RNA (1)...(19): siRNA sense strand
guucugcacuugcguuuca

SEQ ID NO: 1656294 - RNA, 19 nt, Homo sapiens
  misc_RNA (1)...(19): siRNA sense strand
caauggcacuuccaguaug

SEQ ID NO: 1656295 - RNA, 19 nt, Homo sapiens
  misc_RNA (1)...(19): siRNA sense strand
ggacacaaacgaggcauug

SEQ ID NO: 1656296 - RNA, 19 nt, Homo sapiens
  misc_RNA (1)...(19): siRNA sense strand
guacauuguuucugcaucu

SEQ ID NO: 1656297 - RNA, 19 nt, Homo sapiens
  misc_RNA (1)...(19): siRNA sense strand
acacguugauucaccauug

SEQ ID NO: 1656298 - RNA, 19 nt, Homo sapiens
  misc_RNA (1)...(19): siRNA sense strand
caacggaaacucucagcaa

SEQ ID NO: 1656299 - RNA, 19 nt, Homo sapiens
  misc_RNA (1)...(19): siRNA sense strand
gaacuauaaagguauggaa

SEQ ID NO: 1656300 - RNA, 19 nt, Homo sapiens
  misc_RNA (1)...(19): siRNA sense strand
ugucaauguuguagacuuu

SEQ ID NO: 1656301 - RNA, 19 nt, Homo sapiens
  misc_RNA (1)...(19): siRNA sense strand
agagucagaucaaguggaa

SEQ ID NO: 1656302 - RNA, 19 nt, Homo sapiens
  misc_RNA (1)...(19): siRNA sense strand
gaagauaauaccagagaag

SEQ ID NO: 1656303 - RNA, 19 nt, Homo sapiens
  misc_RNA (1)...(19): siRNA sense strand
gaaaugcuaaacacguuga

SEQ ID NO: 1656304 - RNA, 19 nt, Homo sapiens
  misc_RNA (1)...(19): siRNA sense strand
cagaucaaguggaauuugu

SEQ ID NO: 1656305 - RNA, 19 nt, Homo sapiens
  misc_RNA (1)...(19): siRNA sense strand
cuccaaagaucguuccauu

SEQ ID NO: 1656306 - RNA, 19 nt, Homo sapiens
  misc_RNA (1)...(19): siRNA sense strand
cuaugaagacugagaauug

SEQ ID NO: 1656307 - RNA, 19 nt, Homo sapiens
  misc_RNA (1)...(19): siRNA sense strand
gauaacaagaggauaguca

SEQ ID NO: 1656308 - RNA, 19 nt, Homo sapiens
  misc_RNA (1)...(19): siRNA sense strand
ggaauuggugcguuguauu

SEQ ID NO: 1656309 - RNA, 19 nt, Homo sapiens
  misc_RNA (1)...(19): siRNA sense strand
gagaagacuguaauaaugg

SEQ ID NO: 1656310 - RNA, 19 nt, Homo sapiens
  misc_RNA (1)...(19): siRNA sense strand
gucaguaguucacaugaug

SEQ ID NO: 1656311 - RNA, 19 nt, Homo sapiens
  misc_RNA (1)...(19): siRNA sense strand
uuaccaacaugggcacaua

SEQ ID NO: 1656312 - RNA, 19 nt, Homo sapiens
  misc_RNA (1)...(19): siRNA sense strand
cgacuacaguuugaugaau

SEQ ID NO: 1656313 - RNA, 19 nt, Homo sapiens
  misc_RNA (1)...(19): siRNA sense strand
gcacuuccaguaugauugu

SEQ ID NO: 1656314 - RNA, 19 nt, Homo sapiens
  misc_RNA (1)...(19): siRNA sense strand
guuagaaggccaugaggaa

SEQ ID NO: 1656315 - RNA, 19 nt, Homo sapiens
  misc_RNA (1)...(19): siRNA sense strand
auaaagguauggaacacaa

SEQ ID NO: 1656316 - RNA, 19 nt, Homo sapiens
  misc_RNA (1)...(19): siRNA sense strand
gauggugaccugcuccaaa

SEQ ID NO: 1656317 - RNA, 19 nt, Homo sapiens
  misc_RNA (1)...(19): siRNA sense strand
cgagacaacacaaucaaga

SEQ ID NO: 1656318 - RNA, 19 nt, Homo sapiens
  misc_RNA (1)...(19): siRNA sense strand
ggaaugcuccucccaacuc

SEQ ID NO: 1656319 - RNA, 19 nt, Homo sapiens
  misc_RNA (1)...(19): siRNA sense strand
caacaugggcacauaaacu

SEQ ID NO: 1656320 - RNA, 19 nt, Homo sapiens
  misc_RNA (1)...(19): siRNA sense strand
agaaggccaugaggaauug

SEQ ID NO: 1656321 - RNA, 19 nt, Homo sapiens
  misc_RNA (1)...(19): siRNA sense strand
cugcugaacuugugugcaa

SEQ ID NO: 1656322 - RNA, 19 nt, Homo sapiens
  misc_RNA (1)...(19): siRNA sense strand
uaugaagacugagaauugu

SEQ ID NO: 1656323 - RNA, 19 nt, Homo sapiens
  misc_RNA (1)...(19): siRNA sense strand
ucugggacuuccuaaauga

SEQ ID NO: 1656324 - RNA, 19 nt, Homo sapiens
  misc_RNA (1)...(19): siRNA sense strand
caucugggacuuccuaaau

SEQ ID NO: 1656325 - RNA, 19 nt, Homo sapiens
  misc_RNA (1)...(19): siRNA sense strand
ccaaagaucguuccauugc

SEQ ID NO: 1656326 - RNA, 19 nt, Homo sapiens
  misc_RNA (1)...(19): siRNA sense strand
ggaagacauaguuuacaga

SEQ ID NO: 1656327 - RNA, 19 nt, Homo sapiens
  misc_RNA (1)...(19): siRNA sense strand
ccaauggcacuuccaguau

SEQ ID NO: 1656328 - RNA, 19 nt, Homo sapiens
  misc_RNA (1)...(19): siRNA sense strand
guauggaacacaaguacuu

SEQ ID NO: 1656329 - RNA, 19 nt, Homo sapiens
  misc_RNA (1)...(19): siRNA sense strand
agagagaagacuguaauaa

SEQ ID NO: 1656330 - RNA, 19 nt, Homo sapiens
  misc_RNA (1)...(19): siRNA sense strand
gaaaaggaacuguguguca

SEQ ID NO: 1656331 - RNA, 19 nt, Homo sapiens
  misc_RNA (1)...(19): siRNA sense strand
gaauucacuuagacagaca

SEQ ID NO: 1656332 - RNA, 19 nt, Homo sapiens
  misc_RNA (1)...(19): siRNA sense strand
auaccuggaugccaaauca

SEQ ID NO: 1656333 - RNA, 19 nt, Homo sapiens
  misc_RNA (1)...(19): siRNA sense strand
uagaaggccaugaggaauu

SEQ ID NO: 1656334 - RNA, 19 nt, Homo sapiens
  misc_RNA (1)...(19): siRNA sense strand
uagaauguggugcauguuu

SEQ ID NO: 1656335 - RNA, 19 nt, Homo sapiens
  misc_RNA (1)...(19): siRNA sense strand
gcucaucugacaacacuau

SEQ ID NO: 1656336 - RNA, 19 nt, Homo sapiens
  misc_RNA (1)...(19): siRNA sense strand
guacagggacaggcuggua

SEQ ID NO: 1656337 - RNA, 19 nt, Homo sapiens
  misc_RNA (1)...(19): siRNA sense strand
gaugccaaaucacuaugug

SEQ ID NO: 1656338 - RNA, 19 nt, Homo sapiens
  misc_RNA (1)...(19): siRNA sense strand
ucaaguggaauuuguggaa

SEQ ID NO: 1656339 - RNA, 19 nt, Homo sapiens
  misc_RNA (1)...(19): siRNA sense strand
caagagaaggcacucaagu

SEQ ID NO: 1656340 - RNA, 19 nt, Homo sapiens
  misc_RNA (1)...(19): siRNA sense strand
ggucagagugugggaugua

SEQ ID NO: 1656341 - RNA, 19 nt, Homo sapiens
  misc_RNA (1)...(19): siRNA sense strand
auaacaggaucaucggauu

SEQ ID NO: 1656342 - RNA, 19 nt, Homo sapiens
  misc_RNA (1)...(19): siRNA sense strand
guaagcggccuucgagaca

SEQ ID NO: 1656343 - RNA, 19 nt, Homo sapiens
  misc_RNA (1)...(19): siRNA sense strand
gacauaguuuacagagaau

SEQ ID NO: 1656344 - RNA, 19 nt, Homo sapiens
  misc_RNA (1)...(19): siRNA sense strand
cagagagauuucauaacug

SEQ ID NO: 1656345 - RNA, 19 nt, Homo sapiens
  misc_RNA (1)...(19): siRNA sense strand
gaugaauuccagauuguca

SEQ ID NO: 1656346 - RNA, 19 nt, Homo sapiens
  misc_RNA (1)...(19): siRNA sense strand
uuugaugaauuccagauug

SEQ ID NO: 1656347 - RNA, 19 nt, Homo sapiens
  misc_RNA (1)...(19): siRNA sense strand
ucacuuagacagacauaca

SEQ ID NO: 1656348 - RNA, 19 nt, Homo sapiens
  misc_RNA (1)...(19): siRNA sense strand
cgaauucucacaggccaua

SEQ ID NO: 1656349 - RNA, 19 nt, Homo sapiens
  misc_RNA (1)...(19): siRNA sense strand
gaaugcuccucccaacucu

SEQ ID NO: 1656350 - RNA, 19 nt, Homo sapiens
  misc_RNA (1)...(19): siRNA sense strand
gggaucuuguggcugcuuu

SEQ ID NO: 1656351 - RNA, 19 nt, Homo sapiens
  misc_RNA (1)...(19): siRNA sense strand
aagcaaaggaguuuacugu

SEQ ID NO: 1656352 - RNA, 19 nt, Homo sapiens
  misc_RNA (1)...(19): siRNA sense strand
caaaggaguuuacuguuua

SEQ ID NO: 1656353 - RNA, 19 nt, Homo sapiens
  misc_RNA (1)...(19): siRNA sense strand
gcaaaggaguuuacuguuu

SEQ ID NO: 1656354 - RNA, 19 nt, Homo sapiens
  misc_RNA (1)...(19): siRNA sense strand
ugacaacacuaucagauua

SEQ ID NO: 1656355 - RNA, 19 nt, Homo sapiens
  misc_RNA (1)...(19): siRNA sense strand
cacauaaacucguaucuua

SEQ ID NO: 1656356 - RNA, 19 nt, Homo sapiens
  misc_RNA (1)...(19): siRNA sense strand
gcagagagauuucauaacu

SEQ ID NO: 1656357 - RNA, 19 nt, Homo sapiens
  misc_RNA (1)...(19): siRNA sense strand
gcacugcuaugaagacuga

SEQ ID NO: 1656358 - RNA, 19 nt, Homo sapiens
  misc_RNA (1)...(19): siRNA sense strand
gaccuuaaauggacacaaa

SEQ ID NO: 1656359 - RNA, 19 nt, Homo sapiens
  misc_RNA (1)...(19): siRNA sense strand
gcacuugcguuucaauaau

SEQ ID NO: 1656360 - RNA, 19 nt, Homo sapiens
  misc_RNA (1)...(19): siRNA sense strand
agacauaguuuacagagaa

SEQ ID NO: 1656361 - RNA, 19 nt, Homo sapiens
  misc_RNA (1)...(19): siRNA sense strand
gagaaggcacucaaguuua

SEQ ID NO: 1656362 - RNA, 19 nt, Homo sapiens
  misc_RNA (1)...(19): siRNA sense strand
agagaagacuguaauaaug

SEQ ID NO: 1656363 - RNA, 19 nt, Homo sapiens
  misc_RNA (1)...(19): siRNA sense strand
caucuuauaucccaaaugu

SEQ ID NO: 1656364 - RNA, 19 nt, Homo sapiens
  misc_RNA (1)...(19): siRNA sense strand
gagagaagacuguaauaau

SEQ ID NO: 1656365 - RNA, 19 nt, Homo sapiens
  misc_RNA (1)...(19): siRNA sense strand
gaagaagcuuaucgagaga

SEQ ID NO: 1656366 - RNA, 19 nt, Homo sapiens
  misc_RNA (1)...(19): siRNA sense strand
aaauacaggugaaaugcua

SEQ ID NO: 1656367 - RNA, 19 nt, Homo sapiens
  misc_RNA (1)...(19): siRNA sense strand
agaauguggugcauguuua

SEQ ID NO: 1656368 - RNA, 19 nt, Homo sapiens
  misc_RNA (1)...(19): siRNA sense strand
agaaggcacucaaguuuau

SEQ ID NO: 1656369 - RNA, 19 nt, Homo sapiens
  misc_RNA (1)...(19): siRNA sense strand
caaucaagaucugggauaa

SEQ ID NO: 1656370 - RNA, 19 nt, Homo sapiens
  misc_RNA (1)...(19): siRNA sense strand
ggaacugugugucaaauac

SEQ ID NO: 1656371 - RNA, 19 nt, Homo sapiens
  misc_RNA (1)...(19): siRNA sense strand
gaacauacaccuacaucuc

SEQ ID NO: 1656372 - RNA, 19 nt, Homo sapiens
  misc_RNA (1)...(19): siRNA sense strand
auagagcacuuuauccuaa

SEQ ID NO: 1656373 - RNA, 19 nt, Homo sapiens
  misc_RNA (1)...(19): siRNA sense strand
gaacaucuuauaucccaaa

SEQ ID NO: 1656374 - RNA, 19 nt, Homo sapiens
  misc_RNA (1)...(19): siRNA sense strand
gagaagaauucacuuagac

SEQ ID NO: 1656375 - RNA, 19 nt, Homo sapiens
  misc_RNA (1)...(19): siRNA sense strand
gggacaguauuuauucaaa

SEQ ID NO: 1656376 - RNA, 19 nt, Homo sapiens
  misc_RNA (1)...(19): siRNA sense strand
ccagagaagaauucacuua

SEQ ID NO: 1656377 - RNA, 19 nt, Homo sapiens
  misc_RNA (1)...(19): siRNA sense strand
gaauuuguggaacaucuua

SEQ ID NO: 1656378 - RNA, 19 nt, Homo sapiens
  misc_RNA (1)...(19): siRNA sense strand
ggaagauaauaccagagaa

SEQ ID NO: 1656379 - RNA, 19 nt, Homo sapiens
  misc_RNA (1)...(19): siRNA sense strand
gacuacaguuugaugaauu

SEQ ID NO: 1656380 - RNA, 19 nt, Homo sapiens
  misc_RNA (1)...(19): siRNA sense strand
cauagaauguggugcaugu

SEQ ID NO: 1656381 - RNA, 19 nt, Homo sapiens
  misc_RNA (1)...(19): siRNA sense strand
acaccgagcugcugucaau

SEQ ID NO: 1656382 - RNA, 19 nt, Homo sapiens
  misc_RNA (1)...(19): siRNA sense strand
gcacauaaacucguaucuu

SEQ ID NO: 1656383 - RNA, 19 nt, Homo sapiens
  misc_RNA (1)...(19): siRNA sense strand
gagcauuccggaagaguuu

SEQ ID NO: 1656384 - RNA, 19 nt, Homo sapiens
  misc_RNA (1)...(19): siRNA sense strand
gugaaaugcuaaacacguu

SEQ ID NO: 1656385 - RNA, 19 nt, Homo sapiens
  misc_RNA (1)...(19): siRNA sense strand
aaacaaaacuugccaaugg

SEQ ID NO: 1656386 - RNA, 19 nt, Homo sapiens
  misc_RNA (1)...(19): siRNA sense strand
gagagagaagacuguaaua

SEQ ID NO: 1656387 - RNA, 19 nt, Homo sapiens
  misc_RNA (1)...(19): siRNA sense strand
gauaauaccagagaagaau

SEQ ID NO: 1656388 - RNA, 19 nt, Homo sapiens
  misc_RNA (1)...(19): siRNA sense strand
agagaagaauucacuuaga

SEQ ID NO: 1656389 - RNA, 19 nt, Homo sapiens
  misc_RNA (1)...(19): siRNA sense strand
acucguaucuuaaaccuau

SEQ ID NO: 1656390 - RNA, 19 nt, Homo sapiens
  misc_RNA (1)...(19): siRNA sense strand
gaaacucucagcaagcuau

SEQ ID NO: 1656391 - RNA, 19 nt, Homo sapiens
  misc_RNA (1)...(19): siRNA sense strand
agagaaggcacucaaguuu

SEQ ID NO: 1656392 - RNA, 19 nt, Homo sapiens
  misc_RNA (1)...(19): siRNA sense strand
gagcugcugucaauguugu

SEQ ID NO: 1656393 - RNA, 19 nt, Homo sapiens
  misc_RNA (1)...(19): siRNA sense strand
guucugcacuugcguuuca

SEQ ID NO: 1656394 - RNA, 19 nt, Homo sapiens
  misc_RNA (1)...(19): siRNA sense strand
caauggcacuuccaguaug

SEQ ID NO: 1656395 - RNA, 19 nt, Homo sapiens
  misc_RNA (1)...(19): siRNA sense strand
ggacacaaacgaggcauug

SEQ ID NO: 1656396 - RNA, 19 nt, Homo sapiens
  misc_RNA (1)...(19): siRNA sense strand
guacauuguuucugcaucu

SEQ ID NO: 1656397 - RNA, 19 nt, Homo sapiens
  misc_RNA (1)...(19): siRNA sense strand
acacguugauucaccauug

SEQ ID NO: 1656398 - RNA, 19 nt, Homo sapiens
  misc_RNA (1)...(19): siRNA sense strand
caacggaaacucucagcaa

SEQ ID NO: 1656399 - RNA, 19 nt, Homo sapiens
  misc_RNA (1)...(19): siRNA sense strand
gaacuauaaagguauggaa

SEQ ID NO: 1656400 - RNA, 19 nt, Homo sapiens
  misc_RNA (1)...(19): siRNA sense strand
ugucaauguuguagacuuu

SEQ ID NO: 1656401 - RNA, 19 nt, Homo sapiens
  misc_RNA (1)...(19): siRNA sense strand
agagucagaucaaguggaa

SEQ ID NO: 1656402 - RNA, 19 nt, Homo sapiens
  misc_RNA (1)...(19): siRNA sense strand
gaagauaauaccagagaag

SEQ ID NO: 1656403 - RNA, 19 nt, Homo sapiens
  misc_RNA (1)...(19): siRNA sense strand
gaaaugcuaaacacguuga

SEQ ID NO: 1656404 - RNA, 19 nt, Homo sapiens
  misc_RNA (1)...(19): siRNA sense strand
cagaucaaguggaauuugu

SEQ ID NO: 1656405 - RNA, 19 nt, Homo sapiens
  misc_RNA (1)...(19): siRNA sense strand
cuccaaagaucguuccauu

SEQ ID NO: 1656406 - RNA, 19 nt, Homo sapiens
  misc_RNA (1)...(19): siRNA sense strand
cuaugaagacugagaauug

SEQ ID NO: 1656407 - RNA, 19 nt, Homo sapiens
  misc_RNA (1)...(19): siRNA sense strand
gauaacaagaggauaguca

SEQ ID NO: 1656408 - RNA, 19 nt, Homo sapiens
  misc_RNA (1)...(19): siRNA sense strand
ggaauuggugcguuguauu

SEQ ID NO: 1656409 - RNA, 19 nt, Homo sapiens
  misc_RNA (1)...(19): siRNA sense strand
gagaagacuguaauaaugg

SEQ ID NO: 1656410 - RNA, 19 nt, Homo sapiens
  misc_RNA (1)...(19): siRNA sense strand
gucaguaguucacaugaug

SEQ ID NO: 1656411 - RNA, 19 nt, Homo sapiens
  misc_RNA (1)...(19): siRNA sense strand
uuaccaacaugggcacaua

SEQ ID NO: 1656412 - RNA, 19 nt, Homo sapiens
  misc_RNA (1)...(19): siRNA sense strand
cgacuacaguuugaugaau

SEQ ID NO: 1656413 - RNA, 19 nt, Homo sapiens
  misc_RNA (1)...(19): siRNA sense strand
gcacuuccaguaugauugu

SEQ ID NO: 1656414 - RNA, 19 nt, Homo sapiens
  misc_RNA (1)...(19): siRNA sense strand
guuagaaggccaugaggaa

SEQ ID NO: 1656415 - RNA, 19 nt, Homo sapiens
  misc_RNA (1)...(19): siRNA sense strand
auaaagguauggaacacaa

SEQ ID NO: 1656416 - RNA, 19 nt, Homo sapiens
  misc_RNA (1)...(19): siRNA sense strand
gauggugaccugcuccaaa

SEQ ID NO: 1656417 - RNA, 19 nt, Homo sapiens
  misc_RNA (1)...(19): siRNA sense strand
cgagacaacacaaucaaga

SEQ ID NO: 1656418 - RNA, 19 nt, Homo sapiens
  misc_RNA (1)...(19): siRNA sense strand
ggaaugcuccucccaacuc

SEQ ID NO: 1656419 - RNA, 19 nt, Homo sapiens
  misc_RNA (1)...(19): siRNA sense strand
caacaugggcacauaaacu

SEQ ID NO: 1656420 - RNA, 19 nt, Homo sapiens
  misc_RNA (1)...(19): siRNA sense strand
agaaggccaugaggaauug

SEQ ID NO: 1656421 - RNA, 19 nt, Homo sapiens
  misc_RNA (1)...(19): siRNA sense strand
cugcugaacuugugugcaa

SEQ ID NO: 1656422 - RNA, 19 nt, Homo sapiens
  misc_RNA (1)...(19): siRNA sense strand
uaugaagacugagaauugu

SEQ ID NO: 1656423 - RNA, 19 nt, Homo sapiens
  misc_RNA (1)...(19): siRNA sense strand
ucugggacuuccuaaauga

SEQ ID NO: 1656424 - RNA, 19 nt, Homo sapiens
  misc_RNA (1)...(19): siRNA sense strand
caucugggacuuccuaaau

SEQ ID NO: 1656425 - RNA, 19 nt, Homo sapiens
  misc_RNA (1)...(19): siRNA sense strand
ccaaagaucguuccauugc

SEQ ID NO: 1656426 - RNA, 19 nt, Homo sapiens
  misc_RNA (1)...(19): siRNA sense strand
ggaagacauaguuuacaga

SEQ ID NO: 1656427 - RNA, 19 nt, Homo sapiens
  misc_RNA (1)...(19): siRNA sense strand
ccaauggcacuuccaguau

SEQ ID NO: 1656428 - RNA, 19 nt, Homo sapiens
  misc_RNA (1)...(19): siRNA sense strand
guauggaacacaaguacuu

SEQ ID NO: 1656429 - RNA, 19 nt, Homo sapiens
  misc_RNA (1)...(19): siRNA sense strand
agagagaagacuguaauaa

SEQ ID NO: 1656430 - RNA, 19 nt, Homo sapiens
  misc_RNA (1)...(19): siRNA sense strand
gaaaaggaacuguguguca

SEQ ID NO: 1656431 - RNA, 19 nt, Homo sapiens
  misc_RNA (1)...(19): siRNA sense strand
gaauucacuuagacagaca

SEQ ID NO: 1656432 - RNA, 19 nt, Homo sapiens
  misc_RNA (1)...(19): siRNA sense strand
auaccuggaugccaaauca

SEQ ID NO: 1656433 - RNA, 19 nt, Homo sapiens
  misc_RNA (1)...(19): siRNA sense strand
uagaaggccaugaggaauu

SEQ ID NO: 1656434 - RNA, 19 nt, Homo sapiens
  misc_RNA (1)...(19): siRNA sense strand
uagaauguggugcauguuu

SEQ ID NO: 1656435 - RNA, 19 nt, Homo sapiens
  misc_RNA (1)...(19): siRNA sense strand
gcucaucugacaacacuau

SEQ ID NO: 1656436 - RNA, 19 nt, Homo sapiens
  misc_RNA (1)...(19): siRNA sense strand
guacagggacaggcuggua

SEQ ID NO: 1656437 - RNA, 19 nt, Homo sapiens
  misc_RNA (1)...(19): siRNA sense strand
gaugccaaaucacuaugug

SEQ ID NO: 1656438 - RNA, 19 nt, Homo sapiens
  misc_RNA (1)...(19): siRNA sense strand
ucaaguggaauuuguggaa

SEQ ID NO: 1656439 - RNA, 19 nt, Homo sapiens
  misc_RNA (1)...(19): siRNA sense strand
caagagaaggcacucaagu

SEQ ID NO: 1656440 - RNA, 19 nt, Homo sapiens
  misc_RNA (1)...(19): siRNA sense strand
ggucagagugugggaugua

SEQ ID NO: 1656441 - RNA, 19 nt, Homo sapiens
  misc_RNA (1)...(19): siRNA sense strand
auaacaggaucaucggauu

SEQ ID NO: 1656442 - RNA, 19 nt, Homo sapiens
  misc_RNA (1)...(19): siRNA sense strand
guaagcggccuucgagaca

SEQ ID NO: 1656443 - RNA, 19 nt, Homo sapiens
  misc_RNA (1)...(19): siRNA sense strand
gacauaguuuacagagaau

SEQ ID NO: 1656444 - RNA, 19 nt, Homo sapiens
  misc_RNA (1)...(19): siRNA sense strand
cagagagauuucauaacug

SEQ ID NO: 1656445 - RNA, 19 nt, Homo sapiens
  misc_RNA (1)...(19): siRNA sense strand
gaugaauuccagauuguca

SEQ ID NO: 1656446 - RNA, 19 nt, Homo sapiens
  misc_RNA (1)...(19): siRNA sense strand
uuugaugaauuccagauug

SEQ ID NO: 1656447 - RNA, 19 nt, Homo sapiens
  misc_RNA (1)...(19): siRNA sense strand
ucacuuagacagacauaca

SEQ ID NO: 1656448 - RNA, 19 nt, Homo sapiens
  misc_RNA (1)...(19): siRNA sense strand
cgaauucucacaggccaua

SEQ ID NO: 1656449 - RNA, 19 nt, Homo sapiens
  misc_RNA (1)...(19): siRNA sense strand
gaaugcuccucccaacucu

SEQ ID NO: 1656450 - RNA, 19 nt, Homo sapiens
  misc_RNA (1)...(19): siRNA sense strand
gggaucuuguggcugcuuu

SEQ ID NO: 1656451 - RNA, 19 nt, Homo sapiens
  misc_RNA (1)...(19): siRNA sense strand
aagcaaaggaguuuacugu

SEQ ID NO: 1656452 - RNA, 19 nt, Homo sapiens
  misc_RNA (1)...(19): siRNA sense strand
gaaagaagguggaugaaac

SEQ ID NO: 1656453 - RNA, 19 nt, Homo sapiens
  misc_RNA (1)...(19): siRNA sense strand
gaaggaaccuccauaaacu

SEQ ID NO: 1656454 - RNA, 19 nt, Homo sapiens
  misc_RNA (1)...(19): siRNA sense strand
acaaaucguucuacaguuu

SEQ ID NO: 1656455 - RNA, 19 nt, Homo sapiens
  misc_RNA (1)...(19): siRNA sense strand
caacguggauucaggaaau

SEQ ID NO: 1656456 - RNA, 19 nt, Homo sapiens
  misc_RNA (1)...(19): siRNA sense strand
gccaaagacuguaugguuu

SEQ ID NO: 1656457 - RNA, 19 nt, Homo sapiens
  misc_RNA (1)...(19): siRNA sense strand
gaugaaacagugcuagaua

SEQ ID NO: 1656458 - RNA, 19 nt, Homo sapiens
  misc_RNA (1)...(19): siRNA sense strand
ucaauuuccuccuucauga

SEQ ID NO: 1656459 - RNA, 19 nt, Homo sapiens
  misc_RNA (1)...(19): siRNA sense strand
ggaaggaaccuccauaaac

SEQ ID NO: 1656460 - RNA, 19 nt, Homo sapiens
  misc_RNA (1)...(19): siRNA sense strand
gagguuugaugaaaucuau

SEQ ID NO: 1656461 - RNA, 19 nt, Homo sapiens
  misc_RNA (1)...(19): siRNA sense strand
gaaagacagacaccagauu

SEQ ID NO: 1656462 - RNA, 19 nt, Homo sapiens
  misc_RNA (1)...(19): siRNA sense strand
gaaauuguggauaugauug

SEQ ID NO: 1656463 - RNA, 19 nt, Homo sapiens
  misc_RNA (1)...(19): siRNA sense strand
ggaaagaagguggaugaaa

SEQ ID NO: 1656464 - RNA, 19 nt, Homo sapiens
  misc_RNA (1)...(19): siRNA sense strand
ggauaugauugaacagaau

SEQ ID NO: 1656465 - RNA, 19 nt, Homo sapiens
  misc_RNA (1)...(19): siRNA sense strand
gaaagaaaaucccaugaca

SEQ ID NO: 1656466 - RNA, 19 nt, Homo sapiens
  misc_RNA (1)...(19): siRNA sense strand
caggagacgucauuugaga

SEQ ID NO: 1656467 - RNA, 19 nt, Homo sapiens
  misc_RNA (1)...(19): siRNA sense strand
ggaaauuguggauaugauu

SEQ ID NO: 1656468 - RNA, 19 nt, Homo sapiens
  misc_RNA (1)...(19): siRNA sense strand
ggagacgucauuugagaaa

SEQ ID NO: 1656469 - RNA, 19 nt, Homo sapiens
  misc_RNA (1)...(19): siRNA sense strand
aaugagagguuugaugaaa

SEQ ID NO: 1656470 - RNA, 19 nt, Homo sapiens
  misc_RNA (1)...(19): siRNA sense strand
gacaaaucguucuacaguu

SEQ ID NO: 1656471 - RNA, 19 nt, Homo sapiens
  misc_RNA (1)...(19): siRNA sense strand
ggaaacagauaaaacugaa

SEQ ID NO: 1656472 - RNA, 19 nt, Homo sapiens
  misc_RNA (1)...(19): siRNA sense strand
gaaaugccaaagacuguau

SEQ ID NO: 1656473 - RNA, 19 nt, Homo sapiens
  misc_RNA (1)...(19): siRNA sense strand
ggaaggugaugcaguucau

SEQ ID NO: 1656474 - RNA, 19 nt, Homo sapiens
  misc_RNA (1)...(19): siRNA sense strand
ggacccaaagcaugaaauu

SEQ ID NO: 1656475 - RNA, 19 nt, Homo sapiens
  misc_RNA (1)...(19): siRNA sense strand
agaaugagagguuugauga

SEQ ID NO: 1656476 - RNA, 19 nt, Homo sapiens
  misc_RNA (1)...(19): siRNA sense strand
ggagccagauccagagcuu

SEQ ID NO: 1656477 - RNA, 19 nt, Homo sapiens
  misc_RNA (1)...(19): siRNA sense strand
caacaccgccauccuuuca

SEQ ID NO: 1656478 - RNA, 19 nt, Homo sapiens
  misc_RNA (1)...(19): siRNA sense strand
gaaccuccauaaacuucug

SEQ ID NO: 1656479 - RNA, 19 nt, Homo sapiens
  misc_RNA (1)...(19): siRNA sense strand
ugacaaaucguucuacagu

SEQ ID NO: 1656480 - RNA, 19 nt, Homo sapiens
  misc_RNA (1)...(19): siRNA sense strand
guucuacaguuuccaaauc

SEQ ID NO: 1656481 - RNA, 19 nt, Homo sapiens
  misc_RNA (1)...(19): siRNA sense strand
gaaaggauggugggagaug

SEQ ID NO: 1656482 - RNA, 19 nt, Homo sapiens
  misc_RNA (1)...(19): siRNA sense strand
ugagagguuugaugaaauc

SEQ ID NO: 1656483 - RNA, 19 nt, Homo sapiens
  misc_RNA (1)...(19): siRNA sense strand
gaaaaucccaugacaaauc

SEQ ID NO: 1656484 - RNA, 19 nt, Homo sapiens
  misc_RNA (1)...(19): siRNA sense strand
ugaaacagugcuagauaaa

SEQ ID NO: 1656485 - RNA, 19 nt, Homo sapiens
  misc_RNA (1)...(19): siRNA sense strand
augaaacagugcuagauaa

SEQ ID NO: 1656486 - RNA, 19 nt, Homo sapiens
  misc_RNA (1)...(19): siRNA sense strand
guaccugggaagaguauuu

SEQ ID NO: 1656487 - RNA, 19 nt, Homo sapiens
  misc_RNA (1)...(19): siRNA sense strand
gauggugggagaugaaaga

SEQ ID NO: 1656488 - RNA, 19 nt, Homo sapiens
  misc_RNA (1)...(19): siRNA sense strand
cagauucucuuccucuucu

SEQ ID NO: 1656489 - RNA, 19 nt, Homo sapiens
  misc_RNA (1)...(19): siRNA sense strand
gaaugagagguuugaugaa

SEQ ID NO: 1656490 - RNA, 19 nt, Homo sapiens
  misc_RNA (1)...(19): siRNA sense strand
gcagggacaacguggauuc

SEQ ID NO: 1656491 - RNA, 19 nt, Homo sapiens
  misc_RNA (1)...(19): siRNA sense strand
aaaccuucaucaauggaaa

SEQ ID NO: 1656492 - RNA, 19 nt, Homo sapiens
  misc_RNA (1)...(19): siRNA sense strand
acaccgccauccuuucauu

SEQ ID NO: 1656493 - RNA, 19 nt, Homo sapiens
  misc_RNA (1)...(19): siRNA sense strand
uggauaugauugaacagaa

SEQ ID NO: 1656494 - RNA, 19 nt, Homo sapiens
  misc_RNA (1)...(19): siRNA sense strand
caucugcaccuacccuaaa

SEQ ID NO: 1656495 - RNA, 19 nt, Homo sapiens
  misc_RNA (1)...(19): siRNA sense strand
cuacuaccauuuccaaagg

SEQ ID NO: 1656496 - RNA, 19 nt, Homo sapiens
  misc_RNA (1)...(19): siRNA sense strand
gaaaccuucaucaauggaa

SEQ ID NO: 1656497 - RNA, 19 nt, Homo sapiens
  misc_RNA (1)...(19): siRNA sense strand
caugacaaaucguucuaca

SEQ ID NO: 1656498 - RNA, 19 nt, Homo sapiens
  misc_RNA (1)...(19): siRNA sense strand
ugaugcaguucaugggaaa

SEQ ID NO: 1656499 - RNA, 19 nt, Homo sapiens
  misc_RNA (1)...(19): siRNA sense strand
gauaugauugaacagaaug

SEQ ID NO: 1656500 - RNA, 19 nt, Homo sapiens
  misc_RNA (1)...(19): siRNA sense strand
aaagacagacaccagauuc

SEQ ID NO: 1656501 - RNA, 19 nt, Homo sapiens
  misc_RNA (1)...(19): siRNA sense strand
aaaggauggugggagauga

SEQ ID NO: 1656502 - RNA, 19 nt, Homo sapiens
  misc_RNA (1)...(19): siRNA sense strand
ccaaagacuguaugguuuc

SEQ ID NO: 1656503 - RNA, 19 nt, Homo sapiens
  misc_RNA (1)...(19): siRNA sense strand
caaguuccuuuauguagcu

SEQ ID NO: 1656504 - RNA, 19 nt, Homo sapiens
  misc_RNA (1)...(19): siRNA sense strand
ucaggaaauuguggauaug

SEQ ID NO: 1656505 - RNA, 19 nt, Homo sapiens
  misc_RNA (1)...(19): siRNA sense strand
cauaaacuucugcauggaa

SEQ ID NO: 1656506 - RNA, 19 nt, Homo sapiens
  misc_RNA (1)...(19): siRNA sense strand
aagacuguaugguuuccua

SEQ ID NO: 1656507 - RNA, 19 nt, Homo sapiens
  misc_RNA (1)...(19): siRNA sense strand
ugccaaagacuguaugguu

SEQ ID NO: 1656508 - RNA, 19 nt, Homo sapiens
  misc_RNA (1)...(19): siRNA sense strand
uucaggaaauuguggauau

SEQ ID NO: 1656509 - RNA, 19 nt, Homo sapiens
  misc_RNA (1)...(19): siRNA sense strand
ucacuguugcccagaauga

SEQ ID NO: 1656510 - RNA, 19 nt, Homo sapiens
  misc_RNA (1)...(19): siRNA sense strand
agagggacccaaagcauga

SEQ ID NO: 1656511 - RNA, 19 nt, Homo sapiens
  misc_RNA (1)...(19): siRNA sense strand
ggaugaaacagugcuagau

SEQ ID NO: 1656512 - RNA, 19 nt, Homo sapiens
  misc_RNA (1)...(19): siRNA sense strand
cgaaaugccaaagacugua

SEQ ID NO: 1656513 - RNA, 19 nt, Homo sapiens
  misc_RNA (1)...(19): siRNA sense strand
ugggaaagaagguggauga

SEQ ID NO: 1656514 - RNA, 19 nt, Homo sapiens
  misc_RNA (1)...(19): siRNA sense strand
uaaagagggacccaaagca

SEQ ID NO: 1656515 - RNA, 19 nt, Homo sapiens
  misc_RNA (1)...(19): siRNA sense strand
acuguaugguuuccuacua

SEQ ID NO: 1656516 - RNA, 19 nt, Homo sapiens
  misc_RNA (1)...(19): siRNA sense strand
acauaaagagggacccaaa

SEQ ID NO: 1656517 - RNA, 19 nt, Homo sapiens
  misc_RNA (1)...(19): siRNA sense strand
cagaaugagagguuugaug

SEQ ID NO: 1656518 - RNA, 19 nt, Homo sapiens
  misc_RNA (1)...(19): siRNA sense strand
aagaaaaucccaugacaaa

SEQ ID NO: 1656519 - RNA, 19 nt, Homo sapiens
  misc_RNA (1)...(19): siRNA sense strand
aaagaagguggaugaaaca

SEQ ID NO: 1656520 - RNA, 19 nt, Homo sapiens
  misc_RNA (1)...(19): siRNA sense strand
uccaggagacgucauuuga

SEQ ID NO: 1656521 - RNA, 19 nt, Homo sapiens
  misc_RNA (1)...(19): siRNA sense strand
gaaacagugcuagauaaaa

SEQ ID NO: 1656522 - RNA, 19 nt, Homo sapiens
  misc_RNA (1)...(19): siRNA sense strand
ccagcgagccaucauccaa

SEQ ID NO: 1656523 - RNA, 19 nt, Homo sapiens
  misc_RNA (1)...(19): siRNA sense strand
uaucuuggaccagucaauu

SEQ ID NO: 1656524 - RNA, 19 nt, Homo sapiens
  misc_RNA (1)...(19): siRNA sense strand
acugcaaguuccuuuaugu

SEQ ID NO: 1656525 - RNA, 19 nt, Homo sapiens
  misc_RNA (1)...(19): siRNA sense strand
caggaaauuguggauauga

SEQ ID NO: 1656526 - RNA, 19 nt, Homo sapiens
  misc_RNA (1)...(19): siRNA sense strand
cugcaacuguggacaacug

SEQ ID NO: 1656527 - RNA, 19 nt, Homo sapiens
  misc_RNA (1)...(19): siRNA sense strand
cuacaguuuccaaaucuau

SEQ ID NO: 1656528 - RNA, 19 nt, Homo sapiens
  misc_RNA (1)...(19): siRNA sense strand
caaaucguucuacaguuuc

SEQ ID NO: 1656529 - RNA, 19 nt, Homo sapiens
  misc_RNA (1)...(19): siRNA sense strand
uccaaaggaugaaccacau

SEQ ID NO: 1656530 - RNA, 19 nt, Homo sapiens
  misc_RNA (1)...(19): siRNA sense strand
ucuacaguuuccaaaucua

SEQ ID NO: 1656531 - RNA, 19 nt, Homo sapiens
  misc_RNA (1)...(19): siRNA sense strand
aaagagggacccaaagcau

SEQ ID NO: 1656532 - RNA, 19 nt, Homo sapiens
  misc_RNA (1)...(19): siRNA sense strand
cugcaaguuccuuuaugua

SEQ ID NO: 1656533 - RNA, 19 nt, Homo sapiens
  misc_RNA (1)...(19): siRNA sense strand
gucaauuuccuccuucaug

SEQ ID NO: 1656534 - RNA, 19 nt, Homo sapiens
  misc_RNA (1)...(19): siRNA sense strand
ugaaagacagacaccagau

SEQ ID NO: 1656535 - RNA, 19 nt, Homo sapiens
  misc_RNA (1)...(19): siRNA sense strand
gagcuucgaggccaaacca

SEQ ID NO: 1656536 - RNA, 19 nt, Homo sapiens
  misc_RNA (1)...(19): siRNA sense strand
uaccauuuccaaaggauga

SEQ ID NO: 1656537 - RNA, 19 nt, Homo sapiens
  misc_RNA (1)...(19): siRNA sense strand
gaaggugaugcaguucaug

SEQ ID NO: 1656538 - RNA, 19 nt, Homo sapiens
  misc_RNA (1)...(19): siRNA sense strand
uucggaaggugaugcaguu

SEQ ID NO: 1656539 - RNA, 19 nt, Homo sapiens
  misc_RNA (1)...(19): siRNA sense strand
gacagacaccagauucucu

SEQ ID NO: 1656540 - RNA, 19 nt, Homo sapiens
  misc_RNA (1)...(19): siRNA sense strand
ggaagaguauuuugaaacc

SEQ ID NO: 1656541 - RNA, 19 nt, Homo sapiens
  misc_RNA (1)...(19): siRNA sense strand
ccugguaccugggaagagu

SEQ ID NO: 1656542 - RNA, 19 nt, Homo sapiens
  misc_RNA (1)...(19): siRNA sense strand
gggaaagaagguggaugaa

SEQ ID NO: 1656543 - RNA, 19 nt, Homo sapiens
  misc_RNA (1)...(19): siRNA sense strand
gaaagaagguggaugaaac

SEQ ID NO: 1656544 - RNA, 19 nt, Homo sapiens
  misc_RNA (1)...(19): siRNA sense strand
gaaggaaccuccauaaacu

SEQ ID NO: 1656545 - RNA, 19 nt, Homo sapiens
  misc_RNA (1)...(19): siRNA sense strand
acaaaucguucuacaguuu

SEQ ID NO: 1656546 - RNA, 19 nt, Homo sapiens
  misc_RNA (1)...(19): siRNA sense strand
caacguggauucaggaaau

SEQ ID NO: 1656547 - RNA, 19 nt, Homo sapiens
  misc_RNA (1)...(19): siRNA sense strand
gccaaagacuguaugguuu

SEQ ID NO: 1656548 - RNA, 19 nt, Homo sapiens
  misc_RNA (1)...(19): siRNA sense strand
gaugaaacagugcuagaua

SEQ ID NO: 1656549 - RNA, 19 nt, Homo sapiens
  misc_RNA (1)...(19): siRNA sense strand
ucaauuuccuccuucauga

SEQ ID NO: 1656550 - RNA, 19 nt, Homo sapiens
  misc_RNA (1)...(19): siRNA sense strand
ggaaggaaccuccauaaac

SEQ ID NO: 1656551 - RNA, 19 nt, Homo sapiens
  misc_RNA (1)...(19): siRNA sense strand
gagguuugaugaaaucuau

SEQ ID NO: 1656552 - RNA, 19 nt, Homo sapiens
  misc_RNA (1)...(19): siRNA sense strand
gaaagacagacaccagauu

SEQ ID NO: 1656553 - RNA, 19 nt, Homo sapiens
  misc_RNA (1)...(19): siRNA sense strand
gaaauuguggauaugauug

SEQ ID NO: 1656554 - RNA, 19 nt, Homo sapiens
  misc_RNA (1)...(19): siRNA sense strand
ggaaagaagguggaugaaa

SEQ ID NO: 1656555 - RNA, 19 nt, Homo sapiens
  misc_RNA (1)...(19): siRNA sense strand
ggauaugauugaacagaau

SEQ ID NO: 1656556 - RNA, 19 nt, Homo sapiens
  misc_RNA (1)...(19): siRNA sense strand
gaaagaaaaucccaugaca

SEQ ID NO: 1656557 - RNA, 19 nt, Homo sapiens
  misc_RNA (1)...(19): siRNA sense strand
caggagacgucauuugaga

SEQ ID NO: 1656558 - RNA, 19 nt, Homo sapiens
  misc_RNA (1)...(19): siRNA sense strand
ggaaauuguggauaugauu

SEQ ID NO: 1656559 - RNA, 19 nt, Homo sapiens
  misc_RNA (1)...(19): siRNA sense strand
ggagacgucauuugagaaa

SEQ ID NO: 1656560 - RNA, 19 nt, Homo sapiens
  misc_RNA (1)...(19): siRNA sense strand
aaugagagguuugaugaaa

SEQ ID NO: 1656561 - RNA, 19 nt, Homo sapiens
  misc_RNA (1)...(19): siRNA sense strand
gacaaaucguucuacaguu

SEQ ID NO: 1656562 - RNA, 19 nt, Homo sapiens
  misc_RNA (1)...(19): siRNA sense strand
ggaaacagauaaaacugaa

SEQ ID NO: 1656563 - RNA, 19 nt, Homo sapiens
  misc_RNA (1)...(19): siRNA sense strand
gaaaugccaaagacuguau

SEQ ID NO: 1656564 - RNA, 19 nt, Homo sapiens
  misc_RNA (1)...(19): siRNA sense strand
ggaaggugaugcaguucau

SEQ ID NO: 1656565 - RNA, 19 nt, Homo sapiens
  misc_RNA (1)...(19): siRNA sense strand
ggacccaaagcaugaaauu

SEQ ID NO: 1656566 - RNA, 19 nt, Homo sapiens
  misc_RNA (1)...(19): siRNA sense strand
agaaugagagguuugauga

SEQ ID NO: 1656567 - RNA, 19 nt, Homo sapiens
  misc_RNA (1)...(19): siRNA sense strand
ggagccagauccagagcuu

SEQ ID NO: 1656568 - RNA, 19 nt, Homo sapiens
  misc_RNA (1)...(19): siRNA sense strand
caacaccgccauccuuuca

SEQ ID NO: 1656569 - RNA, 19 nt, Homo sapiens
  misc_RNA (1)...(19): siRNA sense strand
gaaccuccauaaacuucug

SEQ ID NO: 1656570 - RNA, 19 nt, Homo sapiens
  misc_RNA (1)...(19): siRNA sense strand
ugacaaaucguucuacagu

SEQ ID NO: 1656571 - RNA, 19 nt, Homo sapiens
  misc_RNA (1)...(19): siRNA sense strand
guucuacaguuuccaaauc

SEQ ID NO: 1656572 - RNA, 19 nt, Homo sapiens
  misc_RNA (1)...(19): siRNA sense strand
gaaaggauggugggagaug

SEQ ID NO: 1656573 - RNA, 19 nt, Homo sapiens
  misc_RNA (1)...(19): siRNA sense strand
ugagagguuugaugaaauc

SEQ ID NO: 1656574 - RNA, 19 nt, Homo sapiens
  misc_RNA (1)...(19): siRNA sense strand
gaaaaucccaugacaaauc

SEQ ID NO: 1656575 - RNA, 19 nt, Homo sapiens
  misc_RNA (1)...(19): siRNA sense strand
ugaaacagugcuagauaaa

SEQ ID NO: 1656576 - RNA, 19 nt, Homo sapiens
  misc_RNA (1)...(19): siRNA sense strand
augaaacagugcuagauaa

SEQ ID NO: 1656577 - RNA, 19 nt, Homo sapiens
  misc_RNA (1)...(19): siRNA sense strand
guaccugggaagaguauuu

SEQ ID NO: 1656578 - RNA, 19 nt, Homo sapiens
  misc_RNA (1)...(19): siRNA sense strand
gauggugggagaugaaaga

SEQ ID NO: 1656579 - RNA, 19 nt, Homo sapiens
  misc_RNA (1)...(19): siRNA sense strand
cagauucucuuccucuucu

SEQ ID NO: 1656580 - RNA, 19 nt, Homo sapiens
  misc_RNA (1)...(19): siRNA sense strand
gaaugagagguuugaugaa

SEQ ID NO: 1656581 - RNA, 19 nt, Homo sapiens
  misc_RNA (1)...(19): siRNA sense strand
gcagggacaacguggauuc

SEQ ID NO: 1656582 - RNA, 19 nt, Homo sapiens
  misc_RNA (1)...(19): siRNA sense strand
aaaccuucaucaauggaaa

SEQ ID NO: 1656583 - RNA, 19 nt, Homo sapiens
  misc_RNA (1)...(19): siRNA sense strand
acaccgccauccuuucauu

SEQ ID NO: 1656584 - RNA, 19 nt, Homo sapiens
  misc_RNA (1)...(19): siRNA sense strand
uggauaugauugaacagaa

SEQ ID NO: 1656585 - RNA, 19 nt, Homo sapiens
  misc_RNA (1)...(19): siRNA sense strand
caucugcaccuacccuaaa

SEQ ID NO: 1656586 - RNA, 19 nt, Homo sapiens
  misc_RNA (1)...(19): siRNA sense strand
cuacuaccauuuccaaagg

SEQ ID NO: 1656587 - RNA, 19 nt, Homo sapiens
  misc_RNA (1)...(19): siRNA sense strand
gaaaccuucaucaauggaa

SEQ ID NO: 1656588 - RNA, 19 nt, Homo sapiens
  misc_RNA (1)...(19): siRNA sense strand
caugacaaaucguucuaca

SEQ ID NO: 1656589 - RNA, 19 nt, Homo sapiens
  misc_RNA (1)...(19): siRNA sense strand
ugaugcaguucaugggaaa

SEQ ID NO: 1656590 - RNA, 19 nt, Homo sapiens
  misc_RNA (1)...(19): siRNA sense strand
gauaugauugaacagaaug

SEQ ID NO: 1656591 - RNA, 19 nt, Homo sapiens
  misc_RNA (1)...(19): siRNA sense strand
aaagacagacaccagauuc

SEQ ID NO: 1656592 - RNA, 19 nt, Homo sapiens
  misc_RNA (1)...(19): siRNA sense strand
aaaggauggugggagauga

SEQ ID NO: 1656593 - RNA, 19 nt, Homo sapiens
  misc_RNA (1)...(19): siRNA sense strand
ccaaagacuguaugguuuc

SEQ ID NO: 1656594 - RNA, 19 nt, Homo sapiens
  misc_RNA (1)...(19): siRNA sense strand
caaguuccuuuauguagcu

SEQ ID NO: 1656595 - RNA, 19 nt, Homo sapiens
  misc_RNA (1)...(19): siRNA sense strand
ucaggaaauuguggauaug

SEQ ID NO: 1656596 - RNA, 19 nt, Homo sapiens
  misc_RNA (1)...(19): siRNA sense strand
cauaaacuucugcauggaa

SEQ ID NO: 1656597 - RNA, 19 nt, Homo sapiens
  misc_RNA (1)...(19): siRNA sense strand
aagacuguaugguuuccua

SEQ ID NO: 1656598 - RNA, 19 nt, Homo sapiens
  misc_RNA (1)...(19): siRNA sense strand
ugccaaagacuguaugguu

SEQ ID NO: 1656599 - RNA, 19 nt, Homo sapiens
  misc_RNA (1)...(19): siRNA sense strand
uucaggaaauuguggauau

SEQ ID NO: 1656600 - RNA, 19 nt, Homo sapiens
  misc_RNA (1)...(19): siRNA sense strand
ucacuguugcccagaauga

SEQ ID NO: 1656601 - RNA, 19 nt, Homo sapiens
  misc_RNA (1)...(19): siRNA sense strand
agagggacccaaagcauga

SEQ ID NO: 1656602 - RNA, 19 nt, Homo sapiens
  misc_RNA (1)...(19): siRNA sense strand
ggaugaaacagugcuagau

SEQ ID NO: 1656603 - RNA, 19 nt, Homo sapiens
  misc_RNA (1)...(19): siRNA sense strand
cgaaaugccaaagacugua

SEQ ID NO: 1656604 - RNA, 19 nt, Homo sapiens
  misc_RNA (1)...(19): siRNA sense strand
ugggaaagaagguggauga

SEQ ID NO: 1656605 - RNA, 19 nt, Homo sapiens
  misc_RNA (1)...(19): siRNA sense strand
uaaagagggacccaaagca

SEQ ID NO: 1656606 - RNA, 19 nt, Homo sapiens
  misc_RNA (1)...(19): siRNA sense strand
acuguaugguuuccuacua

SEQ ID NO: 1656607 - RNA, 19 nt, Homo sapiens
  misc_RNA (1)...(19): siRNA sense strand
acauaaagagggacccaaa

SEQ ID NO: 1656608 - RNA, 19 nt, Homo sapiens
  misc_RNA (1)...(19): siRNA sense strand
cagaaugagagguuugaug

SEQ ID NO: 1656609 - RNA, 19 nt, Homo sapiens
  misc_RNA (1)...(19): siRNA sense strand
aagaaaaucccaugacaaa

SEQ ID NO: 1656610 - RNA, 19 nt, Homo sapiens
  misc_RNA (1)...(19): siRNA sense strand
aaagaagguggaugaaaca

SEQ ID NO: 1656611 - RNA, 19 nt, Homo sapiens
  misc_RNA (1)...(19): siRNA sense strand
uccaggagacgucauuuga

SEQ ID NO: 1656612 - RNA, 19 nt, Homo sapiens
  misc_RNA (1)...(19): siRNA sense strand
gaaacagugcuagauaaaa

SEQ ID NO: 1656613 - RNA, 19 nt, Homo sapiens
  misc_RNA (1)...(19): siRNA sense strand
ccagcgagccaucauccaa

SEQ ID NO: 1656614 - RNA, 19 nt, Homo sapiens
  misc_RNA (1)...(19): siRNA sense strand
uaucuuggaccagucaauu

SEQ ID NO: 1656615 - RNA, 19 nt, Homo sapiens
  misc_RNA (1)...(19): siRNA sense strand
acugcaaguuccuuuaugu

SEQ ID NO: 1656616 - RNA, 19 nt, Homo sapiens
  misc_RNA (1)...(19): siRNA sense strand
caggaaauuguggauauga

SEQ ID NO: 1656617 - RNA, 19 nt, Homo sapiens
  misc_RNA (1)...(19): siRNA sense strand
cugcaacuguggacaacug

SEQ ID NO: 1656618 - RNA, 19 nt, Homo sapiens
  misc_RNA (1)...(19): siRNA sense strand
cuacaguuuccaaaucuau

SEQ ID NO: 1656619 - RNA, 19 nt, Homo sapiens
  misc_RNA (1)...(19): siRNA sense strand
caaaucguucuacaguuuc

SEQ ID NO: 1656620 - RNA, 19 nt, Homo sapiens
  misc_RNA (1)...(19): siRNA sense strand
uccaaaggaugaaccacau

SEQ ID NO: 1656621 - RNA, 19 nt, Homo sapiens
  misc_RNA (1)...(19): siRNA sense strand
ucuacaguuuccaaaucua

SEQ ID NO: 1656622 - RNA, 19 nt, Homo sapiens
  misc_RNA (1)...(19): siRNA sense strand
aaagagggacccaaagcau

SEQ ID NO: 1656623 - RNA, 19 nt, Homo sapiens
  misc_RNA (1)...(19): siRNA sense strand
cugcaaguuccuuuaugua

SEQ ID NO: 1656624 - RNA, 19 nt, Homo sapiens
  misc_RNA (1)...(19): siRNA sense strand
gucaauuuccuccuucaug

SEQ ID NO: 1656625 - RNA, 19 nt, Homo sapiens
  misc_RNA (1)...(19): siRNA sense strand
ugaaagacagacaccagau

SEQ ID NO: 1656626 - RNA, 19 nt, Homo sapiens
  misc_RNA (1)...(19): siRNA sense strand
gagcuucgaggccaaacca

SEQ ID NO: 1656627 - RNA, 19 nt, Homo sapiens
  misc_RNA (1)...(19): siRNA sense strand
uaccauuuccaaaggauga

SEQ ID NO: 1656628 - RNA, 19 nt, Homo sapiens
  misc_RNA (1)...(19): siRNA sense strand
gaaggugaugcaguucaug

SEQ ID NO: 1656629 - RNA, 19 nt, Homo sapiens
  misc_RNA (1)...(19): siRNA sense strand
uucggaaggugaugcaguu

SEQ ID NO: 1656630 - RNA, 19 nt, Homo sapiens
  misc_RNA (1)...(19): siRNA sense strand
gacagacaccagauucucu

SEQ ID NO: 1656631 - RNA, 19 nt, Homo sapiens
  misc_RNA (1)...(19): siRNA sense strand
ggaagaguauuuugaaacc

SEQ ID NO: 1656632 - RNA, 19 nt, Homo sapiens
  misc_RNA (1)...(19): siRNA sense strand
ccugguaccugggaagagu

SEQ ID NO: 1656633 - RNA, 19 nt, Homo sapiens
  misc_RNA (1)...(19): siRNA sense strand
gggaaagaagguggaugaa

SEQ ID NO: 1656634 - RNA, 19 nt, Homo sapiens
  misc_RNA (1)...(19): siRNA sense strand
gaaagaagguggaugaaac

SEQ ID NO: 1656635 - RNA, 19 nt, Homo sapiens
  misc_RNA (1)...(19): siRNA sense strand
gaaggaaccuccauaaacu

SEQ ID NO: 1656636 - RNA, 19 nt, Homo sapiens
  misc_RNA (1)...(19): siRNA sense strand
acaaaucguucuacaguuu

SEQ ID NO: 1656637 - RNA, 19 nt, Homo sapiens
  misc_RNA (1)...(19): siRNA sense strand
caacguggauucaggaaau

SEQ ID NO: 1656638 - RNA, 19 nt, Homo sapiens
  misc_RNA (1)...(19): siRNA sense strand
gccaaagacuguaugguuu

SEQ ID NO: 1656639 - RNA, 19 nt, Homo sapiens
  misc_RNA (1)...(19): siRNA sense strand
gaugaaacagugcuagaua

SEQ ID NO: 1656640 - RNA, 19 nt, Homo sapiens
  misc_RNA (1)...(19): siRNA sense strand
ucaauuuccuccuucauga

SEQ ID NO: 1656641 - RNA, 19 nt, Homo sapiens
  misc_RNA (1)...(19): siRNA sense strand
ggaaggaaccuccauaaac

SEQ ID NO: 1656642 - RNA, 19 nt, Homo sapiens
  misc_RNA (1)...(19): siRNA sense strand
gagguuugaugaaaucuau

SEQ ID NO: 1656643 - RNA, 19 nt, Homo sapiens
  misc_RNA (1)...(19): siRNA sense strand
gaaagacagacaccagauu

SEQ ID NO: 1656644 - RNA, 19 nt, Homo sapiens
  misc_RNA (1)...(19): siRNA sense strand
gaaauuguggauaugauug

SEQ ID NO: 1656645 - RNA, 19 nt, Homo sapiens
  misc_RNA (1)...(19): siRNA sense strand
ggaaagaagguggaugaaa

SEQ ID NO: 1656646 - RNA, 19 nt, Homo sapiens
  misc_RNA (1)...(19): siRNA sense strand
ggauaugauugaacagaau

SEQ ID NO: 1656647 - RNA, 19 nt, Homo sapiens
  misc_RNA (1)...(19): siRNA sense strand
gaaagaaaaucccaugaca

SEQ ID NO: 1656648 - RNA, 19 nt, Homo sapiens
  misc_RNA (1)...(19): siRNA sense strand
caggagacgucauuugaga

SEQ ID NO: 1656649 - RNA, 19 nt, Homo sapiens
  misc_RNA (1)...(19): siRNA sense strand
ggaaauuguggauaugauu

SEQ ID NO: 1656650 - RNA, 19 nt, Homo sapiens
  misc_RNA (1)...(19): siRNA sense strand
ggagacgucauuugagaaa

SEQ ID NO: 1656651 - RNA, 19 nt, Homo sapiens
  misc_RNA (1)...(19): siRNA sense strand
aaugagagguuugaugaaa

SEQ ID NO: 1656652 - RNA, 19 nt, Homo sapiens
  misc_RNA (1)...(19): siRNA sense strand
gacaaaucguucuacaguu

SEQ ID NO: 1656653 - RNA, 19 nt, Homo sapiens
  misc_RNA (1)...(19): siRNA sense strand
ggaaacagauaaaacugaa

SEQ ID NO: 1656654 - RNA, 19 nt, Homo sapiens
  misc_RNA (1)...(19): siRNA sense strand
gaaaugccaaagacuguau

SEQ ID NO: 1656655 - RNA, 19 nt, Homo sapiens
  misc_RNA (1)...(19): siRNA sense strand
ggaaggugaugcaguucau

SEQ ID NO: 1656656 - RNA, 19 nt, Homo sapiens
  misc_RNA (1)...(19): siRNA sense strand
ggacccaaagcaugaaauu

SEQ ID NO: 1656657 - RNA, 19 nt, Homo sapiens
  misc_RNA (1)...(19): siRNA sense strand
agaaugagagguuugauga

SEQ ID NO: 1656658 - RNA, 19 nt, Homo sapiens
  misc_RNA (1)...(19): siRNA sense strand
ggagccagauccagagcuu

SEQ ID NO: 1656659 - RNA, 19 nt, Homo sapiens
  misc_RNA (1)...(19): siRNA sense strand
caacaccgccauccuuuca

SEQ ID NO: 1656660 - RNA, 19 nt, Homo sapiens
  misc_RNA (1)...(19): siRNA sense strand
gaaccuccauaaacuucug

SEQ ID NO: 1656661 - RNA, 19 nt, Homo sapiens
  misc_RNA (1)...(19): siRNA sense strand
ugacaaaucguucuacagu

SEQ ID NO: 1656662 - RNA, 19 nt, Homo sapiens
  misc_RNA (1)...(19): siRNA sense strand
guucuacaguuuccaaauc

SEQ ID NO: 1656663 - RNA, 19 nt, Homo sapiens
  misc_RNA (1)...(19): siRNA sense strand
gaaaggauggugggagaug

SEQ ID NO: 1656664 - RNA, 19 nt, Homo sapiens
  misc_RNA (1)...(19): siRNA sense strand
ugagagguuugaugaaauc

SEQ ID NO: 1656665 - RNA, 19 nt, Homo sapiens
  misc_RNA (1)...(19): siRNA sense strand
gaaaaucccaugacaaauc

SEQ ID NO: 1656666 - RNA, 19 nt, Homo sapiens
  misc_RNA (1)...(19): siRNA sense strand
ugaaacagugcuagauaaa

SEQ ID NO: 1656667 - RNA, 19 nt, Homo sapiens
  misc_RNA (1)...(19): siRNA sense strand
augaaacagugcuagauaa

SEQ ID NO: 1656668 - RNA, 19 nt, Homo sapiens
  misc_RNA (1)...(19): siRNA sense strand
guaccugggaagaguauuu

SEQ ID NO: 1656669 - RNA, 19 nt, Homo sapiens
  misc_RNA (1)...(19): siRNA sense strand
gauggugggagaugaaaga

SEQ ID NO: 1656670 - RNA, 19 nt, Homo sapiens
  misc_RNA (1)...(19): siRNA sense strand
cagauucucuuccucuucu

SEQ ID NO: 1656671 - RNA, 19 nt, Homo sapiens
  misc_RNA (1)...(19): siRNA sense strand
gaaugagagguuugaugaa

SEQ ID NO: 1656672 - RNA, 19 nt, Homo sapiens
  misc_RNA (1)...(19): siRNA sense strand
gcagggacaacguggauuc

SEQ ID NO: 1656673 - RNA, 19 nt, Homo sapiens
  misc_RNA (1)...(19): siRNA sense strand
aaaccuucaucaauggaaa

SEQ ID NO: 1656674 - RNA, 19 nt, Homo sapiens
  misc_RNA (1)...(19): siRNA sense strand
acaccgccauccuuucauu

SEQ ID NO: 1656675 - RNA, 19 nt, Homo sapiens
  misc_RNA (1)...(19): siRNA sense strand
uggauaugauugaacagaa

SEQ ID NO: 1656676 - RNA, 19 nt, Homo sapiens
  misc_RNA (1)...(19): siRNA sense strand
caucugcaccuacccuaaa

SEQ ID NO: 1656677 - RNA, 19 nt, Homo sapiens
  misc_RNA (1)...(19): siRNA sense strand
cuacuaccauuuccaaagg

SEQ ID NO: 1656678 - RNA, 19 nt, Homo sapiens
  misc_RNA (1)...(19): siRNA sense strand
gaaaccuucaucaauggaa

SEQ ID NO: 1656679 - RNA, 19 nt, Homo sapiens
  misc_RNA (1)...(19): siRNA sense strand
caugacaaaucguucuaca

SEQ ID NO: 1656680 - RNA, 19 nt, Homo sapiens
  misc_RNA (1)...(19): siRNA sense strand
ugaugcaguucaugggaaa

SEQ ID NO: 1656681 - RNA, 19 nt, Homo sapiens
  misc_RNA (1)...(19): siRNA sense strand
gauaugauugaacagaaug

SEQ ID NO: 1656682 - RNA, 19 nt, Homo sapiens
  misc_RNA (1)...(19): siRNA sense strand
aaagacagacaccagauuc

SEQ ID NO: 1656683 - RNA, 19 nt, Homo sapiens
  misc_RNA (1)...(19): siRNA sense strand
aaaggauggugggagauga

SEQ ID NO: 1656684 - RNA, 19 nt, Homo sapiens
  misc_RNA (1)...(19): siRNA sense strand
ccaaagacuguaugguuuc

SEQ ID NO: 1656685 - RNA, 19 nt, Homo sapiens
  misc_RNA (1)...(19): siRNA sense strand
caaguuccuuuauguagcu

SEQ ID NO: 1656686 - RNA, 19 nt, Homo sapiens
  misc_RNA (1)...(19): siRNA sense strand
ucaggaaauuguggauaug

SEQ ID NO: 1656687 - RNA, 19 nt, Homo sapiens
  misc_RNA (1)...(19): siRNA sense strand
cauaaacuucugcauggaa

SEQ ID NO: 1656688 - RNA, 19 nt, Homo sapiens
  misc_RNA (1)...(19): siRNA sense strand
aagacuguaugguuuccua

SEQ ID NO: 1656689 - RNA, 19 nt, Homo sapiens
  misc_RNA (1)...(19): siRNA sense strand
ugccaaagacuguaugguu

SEQ ID NO: 1656690 - RNA, 19 nt, Homo sapiens
  misc_RNA (1)...(19): siRNA sense strand
uucaggaaauuguggauau

SEQ ID NO: 1656691 - RNA, 19 nt, Homo sapiens
  misc_RNA (1)...(19): siRNA sense strand
ucacuguugcccagaauga

SEQ ID NO: 1656692 - RNA, 19 nt, Homo sapiens
  misc_RNA (1)...(19): siRNA sense strand
agagggacccaaagcauga

SEQ ID NO: 1656693 - RNA, 19 nt, Homo sapiens
  misc_RNA (1)...(19): siRNA sense strand
ggaugaaacagugcuagau

SEQ ID NO: 1656694 - RNA, 19 nt, Homo sapiens
  misc_RNA (1)...(19): siRNA sense strand
cgaaaugccaaagacugua

SEQ ID NO: 1656695 - RNA, 19 nt, Homo sapiens
  misc_RNA (1)...(19): siRNA sense strand
ugggaaagaagguggauga

SEQ ID NO: 1656696 - RNA, 19 nt, Homo sapiens
  misc_RNA (1)...(19): siRNA sense strand
uaaagagggacccaaagca

SEQ ID NO: 1656697 - RNA, 19 nt, Homo sapiens
  misc_RNA (1)...(19): siRNA sense strand
acuguaugguuuccuacua

SEQ ID NO: 1656698 - RNA, 19 nt, Homo sapiens
  misc_RNA (1)...(19): siRNA sense strand
acauaaagagggacccaaa

SEQ ID NO: 1656699 - RNA, 19 nt, Homo sapiens
  misc_RNA (1)...(19): siRNA sense strand
cagaaugagagguuugaug

SEQ ID NO: 1656700 - RNA, 19 nt, Homo sapiens
  misc_RNA (1)...(19): siRNA sense strand
aagaaaaucccaugacaaa

SEQ ID NO: 1656701 - RNA, 19 nt, Homo sapiens
  misc_RNA (1)...(19): siRNA sense strand
aaagaagguggaugaaaca

SEQ ID NO: 1656702 - RNA, 19 nt, Homo sapiens
  misc_RNA (1)...(19): siRNA sense strand
uccaggagacgucauuuga

SEQ ID NO: 1656703 - RNA, 19 nt, Homo sapiens
  misc_RNA (1)...(19): siRNA sense strand
gaaacagugcuagauaaaa

SEQ ID NO: 1656704 - RNA, 19 nt, Homo sapiens
  misc_RNA (1)...(19): siRNA sense strand
ccagcgagccaucauccaa

SEQ ID NO: 1656705 - RNA, 19 nt, Homo sapiens
  misc_RNA (1)...(19): siRNA sense strand
uaucuuggaccagucaauu

SEQ ID NO: 1656706 - RNA, 19 nt, Homo sapiens
  misc_RNA (1)...(19): siRNA sense strand
acugcaaguuccuuuaugu

SEQ ID NO: 1656707 - RNA, 19 nt, Homo sapiens
  misc_RNA (1)...(19): siRNA sense strand
caggaaauuguggauauga

SEQ ID NO: 1656708 - RNA, 19 nt, Homo sapiens
  misc_RNA (1)...(19): siRNA sense strand
cugcaacuguggacaacug

SEQ ID NO: 1656709 - RNA, 19 nt, Homo sapiens
  misc_RNA (1)...(19): siRNA sense strand
cuacaguuuccaaaucuau

SEQ ID NO: 1656710 - RNA, 19 nt, Homo sapiens
  misc_RNA (1)...(19): siRNA sense strand
caaaucguucuacaguuuc

SEQ ID NO: 1656711 - RNA, 19 nt, Homo sapiens
  misc_RNA (1)...(19): siRNA sense strand
uccaaaggaugaaccacau

SEQ ID NO: 1656712 - RNA, 19 nt, Homo sapiens
  misc_RNA (1)...(19): siRNA sense strand
ucuacaguuuccaaaucua

SEQ ID NO: 1656713 - RNA, 19 nt, Homo sapiens
  misc_RNA (1)...(19): siRNA sense strand
aaagagggacccaaagcau

SEQ ID NO: 1656714 - RNA, 19 nt, Homo sapiens
  misc_RNA (1)...(19): siRNA sense strand
cugcaaguuccuuuaugua

SEQ ID NO: 1656715 - RNA, 19 nt, Homo sapiens
  misc_RNA (1)...(19): siRNA sense strand
gucaauuuccuccuucaug

SEQ ID NO: 1656716 - RNA, 19 nt, Homo sapiens
  misc_RNA (1)...(19): siRNA sense strand
ugaaagacagacaccagau

SEQ ID NO: 1656717 - RNA, 19 nt, Homo sapiens
  misc_RNA (1)...(19): siRNA sense strand
gagcuucgaggccaaacca

SEQ ID NO: 1656718 - RNA, 19 nt, Homo sapiens
  misc_RNA (1)...(19): siRNA sense strand
uaccauuuccaaaggauga

SEQ ID NO: 1656719 - RNA, 19 nt, Homo sapiens
  misc_RNA (1)...(19): siRNA sense strand
gaaggugaugcaguucaug

SEQ ID NO: 1656720 - RNA, 19 nt, Homo sapiens
  misc_RNA (1)...(19): siRNA sense strand
uucggaaggugaugcaguu

SEQ ID NO: 1656721 - RNA, 19 nt, Homo sapiens
  misc_RNA (1)...(19): siRNA sense strand
gacagacaccagauucucu

SEQ ID NO: 1656722 - RNA, 19 nt, Homo sapiens
  misc_RNA (1)...(19): siRNA sense strand
ggaagaguauuuugaaacc

SEQ ID NO: 1656723 - RNA, 19 nt, Homo sapiens
  misc_RNA (1)...(19): siRNA sense strand
ccugguaccugggaagagu

SEQ ID NO: 1656724 - RNA, 19 nt, Homo sapiens
  misc_RNA (1)...(19): siRNA sense strand
gggaaagaagguggaugaa

SEQ ID NO: 1656725 - RNA, 19 nt, Homo sapiens
  misc_RNA (1)...(19): siRNA sense strand
gaaagaagguggaugaaac

SEQ ID NO: 1656726 - RNA, 19 nt, Homo sapiens
  misc_RNA (1)...(19): siRNA sense strand
gaaggaaccuccauaaacu

SEQ ID NO: 1656727 - RNA, 19 nt, Homo sapiens
  misc_RNA (1)...(19): siRNA sense strand
acaaaucguucuacaguuu

SEQ ID NO: 1656728 - RNA, 19 nt, Homo sapiens
  misc_RNA (1)...(19): siRNA sense strand
caacguggauucaggaaau

SEQ ID NO: 1656729 - RNA, 19 nt, Homo sapiens
  misc_RNA (1)...(19): siRNA sense strand
gccaaagacuguaugguuu

SEQ ID NO: 1656730 - RNA, 19 nt, Homo sapiens
  misc_RNA (1)...(19): siRNA sense strand
gaugaaacagugcuagaua

SEQ ID NO: 1656731 - RNA, 19 nt, Homo sapiens
  misc_RNA (1)...(19): siRNA sense strand
ucaauuuccuccuucauga

SEQ ID NO: 1656732 - RNA, 19 nt, Homo sapiens
  misc_RNA (1)...(19): siRNA sense strand
ggaaggaaccuccauaaac

SEQ ID NO: 1656733 - RNA, 19 nt, Homo sapiens
  misc_RNA (1)...(19): siRNA sense strand
gagguuugaugaaaucuau

SEQ ID NO: 1656734 - RNA, 19 nt, Homo sapiens
  misc_RNA (1)...(19): siRNA sense strand
gaaagacagacaccagauu

SEQ ID NO: 1656735 - RNA, 19 nt, Homo sapiens
  misc_RNA (1)...(19): siRNA sense strand
gaaauuguggauaugauug

SEQ ID NO: 1656736 - RNA, 19 nt, Homo sapiens
  misc_RNA (1)...(19): siRNA sense strand
ggaaagaagguggaugaaa

SEQ ID NO: 1656737 - RNA, 19 nt, Homo sapiens
  misc_RNA (1)...(19): siRNA sense strand
ggauaugauugaacagaau

SEQ ID NO: 1656738 - RNA, 19 nt, Homo sapiens
  misc_RNA (1)...(19): siRNA sense strand
gaaagaaaaucccaugaca

SEQ ID NO: 1656739 - RNA, 19 nt, Homo sapiens
  misc_RNA (1)...(19): siRNA sense strand
caggagacgucauuugaga

SEQ ID NO: 1656740 - RNA, 19 nt, Homo sapiens
  misc_RNA (1)...(19): siRNA sense strand
ggaaauuguggauaugauu

SEQ ID NO: 1656741 - RNA, 19 nt, Homo sapiens
  misc_RNA (1)...(19): siRNA sense strand
ggagacgucauuugagaaa

SEQ ID NO: 1656742 - RNA, 19 nt, Homo sapiens
  misc_RNA (1)...(19): siRNA sense strand
aaugagagguuugaugaaa

SEQ ID NO: 1656743 - RNA, 19 nt, Homo sapiens
  misc_RNA (1)...(19): siRNA sense strand
gacaaaucguucuacaguu

SEQ ID NO: 1656744 - RNA, 19 nt, Homo sapiens
  misc_RNA (1)...(19): siRNA sense strand
ggaaacagauaaaacugaa

SEQ ID NO: 1656745 - RNA, 19 nt, Homo sapiens
  misc_RNA (1)...(19): siRNA sense strand
gaaaugccaaagacuguau

SEQ ID NO: 1656746 - RNA, 19 nt, Homo sapiens
  misc_RNA (1)...(19): siRNA sense strand
ggaaggugaugcaguucau

SEQ ID NO: 1656747 - RNA, 19 nt, Homo sapiens
  misc_RNA (1)...(19): siRNA sense strand
ggacccaaagcaugaaauu

SEQ ID NO: 1656748 - RNA, 19 nt, Homo sapiens
  misc_RNA (1)...(19): siRNA sense strand
agaaugagagguuugauga

SEQ ID NO: 1656749 - RNA, 19 nt, Homo sapiens
  misc_RNA (1)...(19): siRNA sense strand
ggagccagauccagagcuu

SEQ ID NO: 1656750 - RNA, 19 nt, Homo sapiens
  misc_RNA (1)...(19): siRNA sense strand
caacaccgccauccuuuca

SEQ ID NO: 1656751 - RNA, 19 nt, Homo sapiens
  misc_RNA (1)...(19): siRNA sense strand
gaaccuccauaaacuucug

SEQ ID NO: 1656752 - RNA, 19 nt, Homo sapiens
  misc_RNA (1)...(19): siRNA sense strand
ugacaaaucguucuacagu

SEQ ID NO: 1656753 - RNA, 19 nt, Homo sapiens
  misc_RNA (1)...(19): siRNA sense strand
guucuacaguuuccaaauc

SEQ ID NO: 1656754 - RNA, 19 nt, Homo sapiens
  misc_RNA (1)...(19): siRNA sense strand
gaaaggauggugggagaug

SEQ ID NO: 1656755 - RNA, 19 nt, Homo sapiens
  misc_RNA (1)...(19): siRNA sense strand
ugagagguuugaugaaauc

SEQ ID NO: 1656756 - RNA, 19 nt, Homo sapiens
  misc_RNA (1)...(19): siRNA sense strand
gaaaaucccaugacaaauc

SEQ ID NO: 1656757 - RNA, 19 nt, Homo sapiens
  misc_RNA (1)...(19): siRNA sense strand
ugaaacagugcuagauaaa

SEQ ID NO: 1656758 - RNA, 19 nt, Homo sapiens
  misc_RNA (1)...(19): siRNA sense strand
augaaacagugcuagauaa

SEQ ID NO: 1656759 - RNA, 19 nt, Homo sapiens
  misc_RNA (1)...(19): siRNA sense strand
guaccugggaagaguauuu

SEQ ID NO: 1656760 - RNA, 19 nt, Homo sapiens
  misc_RNA (1)...(19): siRNA sense strand
gauggugggagaugaaaga

SEQ ID NO: 1656761 - RNA, 19 nt, Homo sapiens
  misc_RNA (1)...(19): siRNA sense strand
cagauucucuuccucuucu

SEQ ID NO: 1656762 - RNA, 19 nt, Homo sapiens
  misc_RNA (1)...(19): siRNA sense strand
gaaugagagguuugaugaa

SEQ ID NO: 1656763 - RNA, 19 nt, Homo sapiens
  misc_RNA (1)...(19): siRNA sense strand
gcagggacaacguggauuc

SEQ ID NO: 1656764 - RNA, 19 nt, Homo sapiens
  misc_RNA (1)...(19): siRNA sense strand
aaaccuucaucaauggaaa

SEQ ID NO: 1656765 - RNA, 19 nt, Homo sapiens
  misc_RNA (1)...(19): siRNA sense strand
acaccgccauccuuucauu

SEQ ID NO: 1656766 - RNA, 19 nt, Homo sapiens
  misc_RNA (1)...(19): siRNA sense strand
uggauaugauugaacagaa

SEQ ID NO: 1656767 - RNA, 19 nt, Homo sapiens
  misc_RNA (1)...(19): siRNA sense strand
caucugcaccuacccuaaa

SEQ ID NO: 1656768 - RNA, 19 nt, Homo sapiens
  misc_RNA (1)...(19): siRNA sense strand
cuacuaccauuuccaaagg

SEQ ID NO: 1656769 - RNA, 19 nt, Homo sapiens
  misc_RNA (1)...(19): siRNA sense strand
gaaaccuucaucaauggaa

SEQ ID NO: 1656770 - RNA, 19 nt, Homo sapiens
  misc_RNA (1)...(19): siRNA sense strand
caugacaaaucguucuaca

SEQ ID NO: 1656771 - RNA, 19 nt, Homo sapiens
  misc_RNA (1)...(19): siRNA sense strand
ugaugcaguucaugggaaa

SEQ ID NO: 1656772 - RNA, 19 nt, Homo sapiens
  misc_RNA (1)...(19): siRNA sense strand
gauaugauugaacagaaug

SEQ ID NO: 1656773 - RNA, 19 nt, Homo sapiens
  misc_RNA (1)...(19): siRNA sense strand
aaagacagacaccagauuc

SEQ ID NO: 1656774 - RNA, 19 nt, Homo sapiens
  misc_RNA (1)...(19): siRNA sense strand
aaaggauggugggagauga

SEQ ID NO: 1656775 - RNA, 19 nt, Homo sapiens
  misc_RNA (1)...(19): siRNA sense strand
ccaaagacuguaugguuuc

SEQ ID NO: 1656776 - RNA, 19 nt, Homo sapiens
  misc_RNA (1)...(19): siRNA sense strand
caaguuccuuuauguagcu

SEQ ID NO: 1656777 - RNA, 19 nt, Homo sapiens
  misc_RNA (1)...(19): siRNA sense strand
ucaggaaauuguggauaug

SEQ ID NO: 1656778 - RNA, 19 nt, Homo sapiens
  misc_RNA (1)...(19): siRNA sense strand
cauaaacuucugcauggaa

SEQ ID NO: 1656779 - RNA, 19 nt, Homo sapiens
  misc_RNA (1)...(19): siRNA sense strand
aagacuguaugguuuccua

SEQ ID NO: 1656780 - RNA, 19 nt, Homo sapiens
  misc_RNA (1)...(19): siRNA sense strand
ugccaaagacuguaugguu

SEQ ID NO: 1656781 - RNA, 19 nt, Homo sapiens
  misc_RNA (1)...(19): siRNA sense strand
uucaggaaauuguggauau

SEQ ID NO: 1656782 - RNA, 19 nt, Homo sapiens
  misc_RNA (1)...(19): siRNA sense strand
ucacuguugcccagaauga

SEQ ID NO: 1656783 - RNA, 19 nt, Homo sapiens
  misc_RNA (1)...(19): siRNA sense strand
agagggacccaaagcauga

SEQ ID NO: 1656784 - RNA, 19 nt, Homo sapiens
  misc_RNA (1)...(19): siRNA sense strand
ggaugaaacagugcuagau

SEQ ID NO: 1656785 - RNA, 19 nt, Homo sapiens
  misc_RNA (1)...(19): siRNA sense strand
cgaaaugccaaagacugua

SEQ ID NO: 1656786 - RNA, 19 nt, Homo sapiens
  misc_RNA (1)...(19): siRNA sense strand
ugggaaagaagguggauga

SEQ ID NO: 1656787 - RNA, 19 nt, Homo sapiens
  misc_RNA (1)...(19): siRNA sense strand
uaaagagggacccaaagca

SEQ ID NO: 1656788 - RNA, 19 nt, Homo sapiens
  misc_RNA (1)...(19): siRNA sense strand
acuguaugguuuccuacua

SEQ ID NO: 1656789 - RNA, 19 nt, Homo sapiens
  misc_RNA (1)...(19): siRNA sense strand
acauaaagagggacccaaa

SEQ ID NO: 1656790 - RNA, 19 nt, Homo sapiens
  misc_RNA (1)...(19): siRNA sense strand
cagaaugagagguuugaug

SEQ ID NO: 1656791 - RNA, 19 nt, Homo sapiens
  misc_RNA (1)...(19): siRNA sense strand
aagaaaaucccaugacaaa

SEQ ID NO: 1656792 - RNA, 19 nt, Homo sapiens
  misc_RNA (1)...(19): siRNA sense strand
aaagaagguggaugaaaca

SEQ ID NO: 1656793 - RNA, 19 nt, Homo sapiens
  misc_RNA (1)...(19): siRNA sense strand
uccaggagacgucauuuga

SEQ ID NO: 1656794 - RNA, 19 nt, Homo sapiens
  misc_RNA (1)...(19): siRNA sense strand
gaaacagugcuagauaaaa

SEQ ID NO: 1656795 - RNA, 19 nt, Homo sapiens
  misc_RNA (1)...(19): siRNA sense strand
ccagcgagccaucauccaa

SEQ ID NO: 1656796 - RNA, 19 nt, Homo sapiens
  misc_RNA (1)...(19): siRNA sense strand
uaucuuggaccagucaauu

SEQ ID NO: 1656797 - RNA, 19 nt, Homo sapiens
  misc_RNA (1)...(19): siRNA sense strand
acugcaaguuccuuuaugu

SEQ ID NO: 1656798 - RNA, 19 nt, Homo sapiens
  misc_RNA (1)...(19): siRNA sense strand
caggaaauuguggauauga

SEQ ID NO: 1656799 - RNA, 19 nt, Homo sapiens
  misc_RNA (1)...(19): siRNA sense strand
cugcaacuguggacaacug

SEQ ID NO: 1656800 - RNA, 19 nt, Homo sapiens
  misc_RNA (1)...(19): siRNA sense strand
cuacaguuuccaaaucuau

SEQ ID NO: 1656801 - RNA, 19 nt, Homo sapiens
  misc_RNA (1)...(19): siRNA sense strand
caaaucguucuacaguuuc

SEQ ID NO: 1656802 - RNA, 19 nt, Homo sapiens
  misc_RNA (1)...(19): siRNA sense strand
uccaaaggaugaaccacau

SEQ ID NO: 1656803 - RNA, 19 nt, Homo sapiens
  misc_RNA (1)...(19): siRNA sense strand
ucuacaguuuccaaaucua

SEQ ID NO: 1656804 - RNA, 19 nt, Homo sapiens
  misc_RNA (1)...(19): siRNA sense strand
aaagagggacccaaagcau

SEQ ID NO: 1656805 - RNA, 19 nt, Homo sapiens
  misc_RNA (1)...(19): siRNA sense strand
cugcaaguuccuuuaugua

SEQ ID NO: 1656806 - RNA, 19 nt, Homo sapiens
  misc_RNA (1)...(19): siRNA sense strand
gucaauuuccuccuucaug

SEQ ID NO: 1656807 - RNA, 19 nt, Homo sapiens
  misc_RNA (1)...(19): siRNA sense strand
ugaaagacagacaccagau

SEQ ID NO: 1656808 - RNA, 19 nt, Homo sapiens
  misc_RNA (1)...(19): siRNA sense strand
gagcuucgaggccaaacca

SEQ ID NO: 1656809 - RNA, 19 nt, Homo sapiens
  misc_RNA (1)...(19): siRNA sense strand
uaccauuuccaaaggauga

SEQ ID NO: 1656810 - RNA, 19 nt, Homo sapiens
  misc_RNA (1)...(19): siRNA sense strand
gaaggugaugcaguucaug

SEQ ID NO: 1656811 - RNA, 19 nt, Homo sapiens
  misc_RNA (1)...(19): siRNA sense strand
uucggaaggugaugcaguu

SEQ ID NO: 1656812 - RNA, 19 nt, Homo sapiens
  misc_RNA (1)...(19): siRNA sense strand
gacagacaccagauucucu

SEQ ID NO: 1656813 - RNA, 19 nt, Homo sapiens
  misc_RNA (1)...(19): siRNA sense strand
ggaagaguauuuugaaacc

SEQ ID NO: 1656814 - RNA, 19 nt, Homo sapiens
  misc_RNA (1)...(19): siRNA sense strand
ccugguaccugggaagagu

SEQ ID NO: 1656815 - RNA, 19 nt, Homo sapiens
  misc_RNA (1)...(19): siRNA sense strand
gggaaagaagguggaugaa

SEQ ID NO: 1656816 - RNA, 19 nt, Homo sapiens
  misc_RNA (1)...(19): siRNA sense strand
ggagaacgauuucaagaag

SEQ ID NO: 1656817 - RNA, 19 nt, Homo sapiens
  misc_RNA (1)...(19): siRNA sense strand
aaacagcacugacaucuuc

SEQ ID NO: 1656818 - RNA, 19 nt, Homo sapiens
  misc_RNA (1)...(19): siRNA sense strand
ggaagggaaugaugagaug

SEQ ID NO: 1656819 - RNA, 19 nt, Homo sapiens
  misc_RNA (1)...(19): siRNA sense strand
agacaacucucgccagaaa

SEQ ID NO: 1656820 - RNA, 19 nt, Homo sapiens
  misc_RNA (1)...(19): siRNA sense strand
caccagagguuccuauuug

SEQ ID NO: 1656821 - RNA, 19 nt, Homo sapiens
  misc_RNA (1)...(19): siRNA sense strand
gaagaaaaguugaagaaga

SEQ ID NO: 1656822 - RNA, 19 nt, Homo sapiens
  misc_RNA (1)...(19): siRNA sense strand
gggcaaagauaauauagca

SEQ ID NO: 1656823 - RNA, 19 nt, Homo sapiens
  misc_RNA (1)...(19): siRNA sense strand
gcagaggcccuuugaagaa

SEQ ID NO: 1656824 - RNA, 19 nt, Homo sapiens
  misc_RNA (1)...(19): siRNA sense strand
ucacagagccagaauuuau

SEQ ID NO: 1656825 - RNA, 19 nt, Homo sapiens
  misc_RNA (1)...(19): siRNA sense strand
gcucaggaaacauaauuua

SEQ ID NO: 1656826 - RNA, 19 nt, Homo sapiens
  misc_RNA (1)...(19): siRNA sense strand
ugagugaccuugaggagaa

SEQ ID NO: 1656827 - RNA, 19 nt, Homo sapiens
  misc_RNA (1)...(19): siRNA sense strand
cgcaggaucugaagcauuu

SEQ ID NO: 1656828 - RNA, 19 nt, Homo sapiens
  misc_RNA (1)...(19): siRNA sense strand
gaccagcucagccauauuu

SEQ ID NO: 1656829 - RNA, 19 nt, Homo sapiens
  misc_RNA (1)...(19): siRNA sense strand
ggacagaggaaacaccaaa

SEQ ID NO: 1656830 - RNA, 19 nt, Homo sapiens
  misc_RNA (1)...(19): siRNA sense strand
gagaggcaaaguugucuua

SEQ ID NO: 1656831 - RNA, 19 nt, Homo sapiens
  misc_RNA (1)...(19): siRNA sense strand
aaaggaggcugugaaaguu

SEQ ID NO: 1656832 - RNA, 19 nt, Homo sapiens
  misc_RNA (1)...(19): siRNA sense strand
gaaggagucccgcagagaa

SEQ ID NO: 1656833 - RNA, 19 nt, Homo sapiens
  misc_RNA (1)...(19): siRNA sense strand
gcaggaagcaggagucaau

SEQ ID NO: 1656834 - RNA, 19 nt, Homo sapiens
  misc_RNA (1)...(19): siRNA sense strand
uauguaagcugcaaagaag

SEQ ID NO: 1656835 - RNA, 19 nt, Homo sapiens
  misc_RNA (1)...(19): siRNA sense strand
ggagggcaaagauaauaua

SEQ ID NO: 1656836 - RNA, 19 nt, Homo sapiens
  misc_RNA (1)...(19): siRNA sense strand
gaaacaagcacgucauguc

SEQ ID NO: 1656837 - RNA, 19 nt, Homo sapiens
  misc_RNA (1)...(19): siRNA sense strand
cuacaaagcgugucagguu

SEQ ID NO: 1656838 - RNA, 19 nt, Homo sapiens
  misc_RNA (1)...(19): siRNA sense strand
gaggcaaaguugucuuaga

SEQ ID NO: 1656839 - RNA, 19 nt, Homo sapiens
  misc_RNA (1)...(19): siRNA sense strand
ccuagcagcugaagggauu

SEQ ID NO: 1656840 - RNA, 19 nt, Homo sapiens
  misc_RNA (1)...(19): siRNA sense strand
aaagacagcuucucgaacu

SEQ ID NO: 1656841 - RNA, 19 nt, Homo sapiens
  misc_RNA (1)...(19): siRNA sense strand
gguggaggcucuauuugau

SEQ ID NO: 1656842 - RNA, 19 nt, Homo sapiens
  misc_RNA (1)...(19): siRNA sense strand
gcaccagagguuccuauuu

SEQ ID NO: 1656843 - RNA, 19 nt, Homo sapiens
  misc_RNA (1)...(19): siRNA sense strand
gagcucaaguucugcuuca

SEQ ID NO: 1656844 - RNA, 19 nt, Homo sapiens
  misc_RNA (1)...(19): siRNA sense strand
cugcugcaccuucuaauua

SEQ ID NO: 1656845 - RNA, 19 nt, Homo sapiens
  misc_RNA (1)...(19): siRNA sense strand
uaauauagcaggaacacaa

SEQ ID NO: 1656846 - RNA, 19 nt, Homo sapiens
  misc_RNA (1)...(19): siRNA sense strand
agaaggagggcaaagauaa

SEQ ID NO: 1656847 - RNA, 19 nt, Homo sapiens
  misc_RNA (1)...(19): siRNA sense strand
ggaauucucccuguaugaa

SEQ ID NO: 1656848 - RNA, 19 nt, Homo sapiens
  misc_RNA (1)...(19): siRNA sense strand
gaccugggauuuggaauuc

SEQ ID NO: 1656849 - RNA, 19 nt, Homo sapiens
  misc_RNA (1)...(19): siRNA sense strand
gcuccuauuucacggauga

SEQ ID NO: 1656850 - RNA, 19 nt, Homo sapiens
  misc_RNA (1)...(19): siRNA sense strand
cagaggcccuuugaagaaa

SEQ ID NO: 1656851 - RNA, 19 nt, Homo sapiens
  misc_RNA (1)...(19): siRNA sense strand
gagaugacccucacuaugc

SEQ ID NO: 1656852 - RNA, 19 nt, Homo sapiens
  misc_RNA (1)...(19): siRNA sense strand
gagcucaggaaacauaauu

SEQ ID NO: 1656853 - RNA, 19 nt, Homo sapiens
  misc_RNA (1)...(19): siRNA sense strand
gaggagaacgauuucaaga

SEQ ID NO: 1656854 - RNA, 19 nt, Homo sapiens
  misc_RNA (1)...(19): siRNA sense strand
gaaggagggcaaagauaau

SEQ ID NO: 1656855 - RNA, 19 nt, Homo sapiens
  misc_RNA (1)...(19): siRNA sense strand
gaccgugccuucgacauug

SEQ ID NO: 1656856 - RNA, 19 nt, Homo sapiens
  misc_RNA (1)...(19): siRNA sense strand
agaacgauuucaagaaguu

SEQ ID NO: 1656857 - RNA, 19 nt, Homo sapiens
  misc_RNA (1)...(19): siRNA sense strand
gaacgauuucaagaaguua

SEQ ID NO: 1656858 - RNA, 19 nt, Homo sapiens
  misc_RNA (1)...(19): siRNA sense strand
aaucacagagccagaauuu

SEQ ID NO: 1656859 - RNA, 19 nt, Homo sapiens
  misc_RNA (1)...(19): siRNA sense strand
ggaccugggauuuggaauu

SEQ ID NO: 1656860 - RNA, 19 nt, Homo sapiens
  misc_RNA (1)...(19): siRNA sense strand
uaaagaaucugguaaaagg

SEQ ID NO: 1656861 - RNA, 19 nt, Homo sapiens
  misc_RNA (1)...(19): siRNA sense strand
ccgguuugauuaugucuuu

SEQ ID NO: 1656862 - RNA, 19 nt, Homo sapiens
  misc_RNA (1)...(19): siRNA sense strand
gguaaaagguauucagaug

SEQ ID NO: 1656863 - RNA, 19 nt, Homo sapiens
  misc_RNA (1)...(19): siRNA sense strand
gagaacgauuucaagaagu

SEQ ID NO: 1656864 - RNA, 19 nt, Homo sapiens
  misc_RNA (1)...(19): siRNA sense strand
ggaguuggagggccugauu

SEQ ID NO: 1656865 - RNA, 19 nt, Homo sapiens
  misc_RNA (1)...(19): siRNA sense strand
gcauugcucugggccuuga

SEQ ID NO: 1656866 - RNA, 19 nt, Homo sapiens
  misc_RNA (1)...(19): siRNA sense strand
gaaacagcacugacaucuu

SEQ ID NO: 1656867 - RNA, 19 nt, Homo sapiens
  misc_RNA (1)...(19): siRNA sense strand
ggagagaggcaaaguuguc

SEQ ID NO: 1656868 - RNA, 19 nt, Homo sapiens
  misc_RNA (1)...(19): siRNA sense strand
cagaaggagggcaaagaua

SEQ ID NO: 1656869 - RNA, 19 nt, Homo sapiens
  misc_RNA (1)...(19): siRNA sense strand
guacuucagcuccuauuuc

SEQ ID NO: 1656870 - RNA, 19 nt, Homo sapiens
  misc_RNA (1)...(19): siRNA sense strand
ggaccuggcagaauuacug

SEQ ID NO: 1656871 - RNA, 19 nt, Homo sapiens
  misc_RNA (1)...(19): siRNA sense strand
gcagaauuacugauuucaa

SEQ ID NO: 1656872 - RNA, 19 nt, Homo sapiens
  misc_RNA (1)...(19): siRNA sense strand
ggauucagcaccagagguu

SEQ ID NO: 1656873 - RNA, 19 nt, Homo sapiens
  misc_RNA (1)...(19): siRNA sense strand
cgguggaccuggcagaauu

SEQ ID NO: 1656874 - RNA, 19 nt, Homo sapiens
  misc_RNA (1)...(19): siRNA sense strand
gaaaucacagagccagaau

SEQ ID NO: 1656875 - RNA, 19 nt, Homo sapiens
  misc_RNA (1)...(19): siRNA sense strand
uuaaagaacagauggaauc

SEQ ID NO: 1656876 - RNA, 19 nt, Homo sapiens
  misc_RNA (1)...(19): siRNA sense strand
gacccucacuaugcaguuu

SEQ ID NO: 1656877 - RNA, 19 nt, Homo sapiens
  misc_RNA (1)...(19): siRNA sense strand
aaaggcugcuggagguaaa

SEQ ID NO: 1656878 - RNA, 19 nt, Homo sapiens
  misc_RNA (1)...(19): siRNA sense strand
gcagauggagagaggcaaa

SEQ ID NO: 1656879 - RNA, 19 nt, Homo sapiens
  misc_RNA (1)...(19): siRNA sense strand
ggaaggagucccgcagaga

SEQ ID NO: 1656880 - RNA, 19 nt, Homo sapiens
  misc_RNA (1)...(19): siRNA sense strand
gagcaggaagggaaugaug

SEQ ID NO: 1656881 - RNA, 19 nt, Homo sapiens
  misc_RNA (1)...(19): siRNA sense strand
uggaaucuaugaagcacaa

SEQ ID NO: 1656882 - RNA, 19 nt, Homo sapiens
  misc_RNA (1)...(19): siRNA sense strand
ccgcuuuccugaguaguaa

SEQ ID NO: 1656883 - RNA, 19 nt, Homo sapiens
  misc_RNA (1)...(19): siRNA sense strand
agcaggagcuggagucugu

SEQ ID NO: 1656884 - RNA, 19 nt, Homo sapiens
  misc_RNA (1)...(19): siRNA sense strand
gggauaugacccugucuga

SEQ ID NO: 1656885 - RNA, 19 nt, Homo sapiens
  misc_RNA (1)...(19): siRNA sense strand
caaaggcugcuggagguaa

SEQ ID NO: 1656886 - RNA, 19 nt, Homo sapiens
  misc_RNA (1)...(19): siRNA sense strand
aggcaaaguugucuuagag

SEQ ID NO: 1656887 - RNA, 19 nt, Homo sapiens
  misc_RNA (1)...(19): siRNA sense strand
cgagguacuucagcuccua

SEQ ID NO: 1656888 - RNA, 19 nt, Homo sapiens
  misc_RNA (1)...(19): siRNA sense strand
ucaugaaccuguuggaacu

SEQ ID NO: 1656889 - RNA, 19 nt, Homo sapiens
  misc_RNA (1)...(19): siRNA sense strand
gguggaccuggcagaauua

SEQ ID NO: 1656890 - RNA, 19 nt, Homo sapiens
  misc_RNA (1)...(19): siRNA sense strand
gcaugauuacagagaagua

SEQ ID NO: 1656891 - RNA, 19 nt, Homo sapiens
  misc_RNA (1)...(19): siRNA sense strand
uacuucagcuccuauuuca

SEQ ID NO: 1656892 - RNA, 19 nt, Homo sapiens
  misc_RNA (1)...(19): siRNA sense strand
uggcagaauuacugauuuc

SEQ ID NO: 1656893 - RNA, 19 nt, Homo sapiens
  misc_RNA (1)...(19): siRNA sense strand
uggaggcucuauuugauuc

SEQ ID NO: 1656894 - RNA, 19 nt, Homo sapiens
  misc_RNA (1)...(19): siRNA sense strand
gcuuacgucuccaccuuuc

SEQ ID NO: 1656895 - RNA, 19 nt, Homo sapiens
  misc_RNA (1)...(19): siRNA sense strand
acagagccagaauuuauuu

SEQ ID NO: 1656896 - RNA, 19 nt, Homo sapiens
  misc_RNA (1)...(19): siRNA sense strand
ucagaugaacaauguauca

SEQ ID NO: 1656897 - RNA, 19 nt, Homo sapiens
  misc_RNA (1)...(19): siRNA sense strand
ugugaaaguuguccucaag

SEQ ID NO: 1656898 - RNA, 19 nt, Homo sapiens
  misc_RNA (1)...(19): siRNA sense strand
gcaaaggcugcuggaggua

SEQ ID NO: 1656899 - RNA, 19 nt, Homo sapiens
  misc_RNA (1)...(19): siRNA sense strand
uuagagacaccuagaaaca

SEQ ID NO: 1656900 - RNA, 19 nt, Homo sapiens
  misc_RNA (1)...(19): siRNA sense strand
gaagggaaugaugagauga

SEQ ID NO: 1656901 - RNA, 19 nt, Homo sapiens
  misc_RNA (1)...(19): siRNA sense strand
gacagaaggagggcaaaga

SEQ ID NO: 1656902 - RNA, 19 nt, Homo sapiens
  misc_RNA (1)...(19): siRNA sense strand
gcacuggaaagacaacucu

SEQ ID NO: 1656903 - RNA, 19 nt, Homo sapiens
  misc_RNA (1)...(19): siRNA sense strand
agagguuccuauuugaaga

SEQ ID NO: 1656904 - RNA, 19 nt, Homo sapiens
  misc_RNA (1)...(19): siRNA sense strand
ccagagguuccuauuugaa

SEQ ID NO: 1656905 - RNA, 19 nt, Homo sapiens
  misc_RNA (1)...(19): siRNA sense strand
uggcuuacgucuccaccuu

SEQ ID NO: 1656906 - RNA, 19 nt, Homo sapiens
  misc_RNA (1)...(19): siRNA sense strand
gauggagagaggcaaaguu

SEQ ID NO: 1656907 - RNA, 19 nt, Homo sapiens
  misc_RNA (1)...(19): siRNA sense strand
cuucgacauuguacagaaa

SEQ ID NO: 1656908 - RNA, 19 nt, Homo sapiens
  misc_RNA (1)...(19): siRNA sense strand
ugaccgugccuucgacauu

SEQ ID NO: 1656909 - RNA, 19 nt, Homo sapiens
  misc_RNA (1)...(19): siRNA sense strand
ggagagggcgagguacuuc

SEQ ID NO: 1656910 - RNA, 19 nt, Homo sapiens
  misc_RNA (1)...(19): siRNA sense strand
cauauuugucugcaugauu

SEQ ID NO: 1656911 - RNA, 19 nt, Homo sapiens
  misc_RNA (1)...(19): siRNA sense strand
ggaagcuucuacuggaaaa

SEQ ID NO: 1656912 - RNA, 19 nt, Homo sapiens
  misc_RNA (1)...(19): siRNA sense strand
aaggagggcaaagauaaua

SEQ ID NO: 1656913 - RNA, 19 nt, Homo sapiens
  misc_RNA (1)...(19): siRNA sense strand
cacagagccagaauuuauu

SEQ ID NO: 1656914 - RNA, 19 nt, Homo sapiens
  misc_RNA (1)...(19): siRNA sense strand
gcgcaggaucugaagcauu

SEQ ID NO: 1656915 - RNA, 19 nt, Homo sapiens
  misc_RNA (1)...(19): siRNA sense strand
ggagguaaaggagcaggaa

SEQ ID NO: 1656916 - RNA, 19 nt, Homo sapiens
  misc_RNA (1)...(19): siRNA sense strand
gcaaagaccaacauuauua

SEQ ID NO: 1656917 - RNA, 19 nt, Homo sapiens
  misc_RNA (1)...(19): siRNA sense strand
caacagagcccauucauaa

SEQ ID NO: 1656918 - RNA, 19 nt, Homo sapiens
  misc_RNA (1)...(19): siRNA sense strand
gcaguuaauugaugcuuua

SEQ ID NO: 1656919 - RNA, 19 nt, Homo sapiens
  misc_RNA (1)...(19): siRNA sense strand
gaaacaaaccucacugaaa

SEQ ID NO: 1656920 - RNA, 19 nt, Homo sapiens
  misc_RNA (1)...(19): siRNA sense strand
gaacucacuuuauugauca

SEQ ID NO: 1656921 - RNA, 19 nt, Homo sapiens
  misc_RNA (1)...(19): siRNA sense strand
caaacacacuuuaaagcua

SEQ ID NO: 1656922 - RNA, 19 nt, Homo sapiens
  misc_RNA (1)...(19): siRNA sense strand
ggaguaacaucucagaaga

SEQ ID NO: 1656923 - RNA, 19 nt, Homo sapiens
  misc_RNA (1)...(19): siRNA sense strand
caacacaccucaggagaaa

SEQ ID NO: 1656924 - RNA, 19 nt, Homo sapiens
  misc_RNA (1)...(19): siRNA sense strand
aaacaaaccucacugaaag

SEQ ID NO: 1656925 - RNA, 19 nt, Homo sapiens
  misc_RNA (1)...(19): siRNA sense strand
guacagacugcaauagaua

SEQ ID NO: 1656926 - RNA, 19 nt, Homo sapiens
  misc_RNA (1)...(19): siRNA sense strand
gaacaccuuucuagauaca

SEQ ID NO: 1656927 - RNA, 19 nt, Homo sapiens
  misc_RNA (1)...(19): siRNA sense strand
gaucugaugugauguaugc

SEQ ID NO: 1656928 - RNA, 19 nt, Homo sapiens
  misc_RNA (1)...(19): siRNA sense strand
uaacaggccaguucaguuu

SEQ ID NO: 1656929 - RNA, 19 nt, Homo sapiens
  misc_RNA (1)...(19): siRNA sense strand
aaagacagcuaugaugaaa

SEQ ID NO: 1656930 - RNA, 19 nt, Homo sapiens
  misc_RNA (1)...(19): siRNA sense strand
acagagugauguuccaaua

SEQ ID NO: 1656931 - RNA, 19 nt, Homo sapiens
  misc_RNA (1)...(19): siRNA sense strand
ggaaagagagaauuaucaa

SEQ ID NO: 1656932 - RNA, 19 nt, Homo sapiens
  misc_RNA (1)...(19): siRNA sense strand
gaaaguaccuacagaaaag

SEQ ID NO: 1656933 - RNA, 19 nt, Homo sapiens
  misc_RNA (1)...(19): siRNA sense strand
gcuaauuccugccucaaga

SEQ ID NO: 1656934 - RNA, 19 nt, Homo sapiens
  misc_RNA (1)...(19): siRNA sense strand
ucaacagucuucucaauca

SEQ ID NO: 1656935 - RNA, 19 nt, Homo sapiens
  misc_RNA (1)...(19): siRNA sense strand
uaacaucucagaagacuau

SEQ ID NO: 1656936 - RNA, 19 nt, Homo sapiens
  misc_RNA (1)...(19): siRNA sense strand
cuacaaggcuggaacucaa

SEQ ID NO: 1656937 - RNA, 19 nt, Homo sapiens
  misc_RNA (1)...(19): siRNA sense strand
ggacagagugcucagaguu

SEQ ID NO: 1656938 - RNA, 19 nt, Homo sapiens
  misc_RNA (1)...(19): siRNA sense strand
cuaagaaagugcaguuaau

SEQ ID NO: 1656939 - RNA, 19 nt, Homo sapiens
  misc_RNA (1)...(19): siRNA sense strand
uggaacauuugcaguauaa

SEQ ID NO: 1656940 - RNA, 19 nt, Homo sapiens
  misc_RNA (1)...(19): siRNA sense strand
cagcaguguucaagacuuu

SEQ ID NO: 1656941 - RNA, 19 nt, Homo sapiens
  misc_RNA (1)...(19): siRNA sense strand
aaaccucacugaaagcauu

SEQ ID NO: 1656942 - RNA, 19 nt, Homo sapiens
  misc_RNA (1)...(19): siRNA sense strand
uauaagguauugcaggaaa

SEQ ID NO: 1656943 - RNA, 19 nt, Homo sapiens
  misc_RNA (1)...(19): siRNA sense strand
gcuaagaaagugcaguuaa

SEQ ID NO: 1656944 - RNA, 19 nt, Homo sapiens
  misc_RNA (1)...(19): siRNA sense strand
gaccaacauuauuaccuuu

SEQ ID NO: 1656945 - RNA, 19 nt, Homo sapiens
  misc_RNA (1)...(19): siRNA sense strand
ucuacuaucuccauccuaa

SEQ ID NO: 1656946 - RNA, 19 nt, Homo sapiens
  misc_RNA (1)...(19): siRNA sense strand
ccaauagauuuacuugaug

SEQ ID NO: 1656947 - RNA, 19 nt, Homo sapiens
  misc_RNA (1)...(19): siRNA sense strand
agacagcuaugaugaaauc

SEQ ID NO: 1656948 - RNA, 19 nt, Homo sapiens
  misc_RNA (1)...(19): siRNA sense strand
acagggaucugaugugaug

SEQ ID NO: 1656949 - RNA, 19 nt, Homo sapiens
  misc_RNA (1)...(19): siRNA sense strand
auaaagaugaugccaguua

SEQ ID NO: 1656950 - RNA, 19 nt, Homo sapiens
  misc_RNA (1)...(19): siRNA sense strand
gaaaagacagcuaugauga

SEQ ID NO: 1656951 - RNA, 19 nt, Homo sapiens
  misc_RNA (1)...(19): siRNA sense strand
gaaaacaguuccucuccuu

SEQ ID NO: 1656952 - RNA, 19 nt, Homo sapiens
  misc_RNA (1)...(19): siRNA sense strand
gacaacauuucuacuaucu

SEQ ID NO: 1656953 - RNA, 19 nt, Homo sapiens
  misc_RNA (1)...(19): siRNA sense strand
gguacagacugcaauagau

SEQ ID NO: 1656954 - RNA, 19 nt, Homo sapiens
  misc_RNA (1)...(19): siRNA sense strand
ggagguauuuuguguauug

SEQ ID NO: 1656955 - RNA, 19 nt, Homo sapiens
  misc_RNA (1)...(19): siRNA sense strand
gagaagaccuuuuguuugg

SEQ ID NO: 1656956 - RNA, 19 nt, Homo sapiens
  misc_RNA (1)...(19): siRNA sense strand
uuacagggaucugauguga

SEQ ID NO: 1656957 - RNA, 19 nt, Homo sapiens
  misc_RNA (1)...(19): siRNA sense strand
aaagugcaguuaauugaug

SEQ ID NO: 1656958 - RNA, 19 nt, Homo sapiens
  misc_RNA (1)...(19): siRNA sense strand
uaucaacagucuucucaau

SEQ ID NO: 1656959 - RNA, 19 nt, Homo sapiens
  misc_RNA (1)...(19): siRNA sense strand
guacgcaagugggaaauuc

SEQ ID NO: 1656960 - RNA, 19 nt, Homo sapiens
  misc_RNA (1)...(19): siRNA sense strand
gaugccaguuacagccuua

SEQ ID NO: 1656961 - RNA, 19 nt, Homo sapiens
  misc_RNA (1)...(19): siRNA sense strand
agagugauguuccaauaga

SEQ ID NO: 1656962 - RNA, 19 nt, Homo sapiens
  misc_RNA (1)...(19): siRNA sense strand
gagauuagaggcuucacaa

SEQ ID NO: 1656963 - RNA, 19 nt, Homo sapiens
  misc_RNA (1)...(19): siRNA sense strand
gaaagugcaguuaauugau

SEQ ID NO: 1656964 - RNA, 19 nt, Homo sapiens
  misc_RNA (1)...(19): siRNA sense strand
caacagucuucucaaucaa

SEQ ID NO: 1656965 - RNA, 19 nt, Homo sapiens
  misc_RNA (1)...(19): siRNA sense strand
gcgcuuauacagauuacua

SEQ ID NO: 1656966 - RNA, 19 nt, Homo sapiens
  misc_RNA (1)...(19): siRNA sense strand
gaugugauguaugcaguug

SEQ ID NO: 1656967 - RNA, 19 nt, Homo sapiens
  misc_RNA (1)...(19): siRNA sense strand
aaagcaaccugcacaucuu

SEQ ID NO: 1656968 - RNA, 19 nt, Homo sapiens
  misc_RNA (1)...(19): siRNA sense strand
aagauucgcucaauugaag

SEQ ID NO: 1656969 - RNA, 19 nt, Homo sapiens
  misc_RNA (1)...(19): siRNA sense strand
guuacagccuuaucuuaga

SEQ ID NO: 1656970 - RNA, 19 nt, Homo sapiens
  misc_RNA (1)...(19): siRNA sense strand
aucaggagaugcagaauaa

SEQ ID NO: 1656971 - RNA, 19 nt, Homo sapiens
  misc_RNA (1)...(19): siRNA sense strand
cagaucaccuacaggaaga

SEQ ID NO: 1656972 - RNA, 19 nt, Homo sapiens
  misc_RNA (1)...(19): siRNA sense strand
guuaugugcuuuggcauga

SEQ ID NO: 1656973 - RNA, 19 nt, Homo sapiens
  misc_RNA (1)...(19): siRNA sense strand
agaaagugcaguuaauuga

SEQ ID NO: 1656974 - RNA, 19 nt, Homo sapiens
  misc_RNA (1)...(19): siRNA sense strand
ugggagagaugacggaaug

SEQ ID NO: 1656975 - RNA, 19 nt, Homo sapiens
  misc_RNA (1)...(19): siRNA sense strand
gcagcaguguucaagacuu

SEQ ID NO: 1656976 - RNA, 19 nt, Homo sapiens
  misc_RNA (1)...(19): siRNA sense strand
ugagggaaauacgaacuuu

SEQ ID NO: 1656977 - RNA, 19 nt, Homo sapiens
  misc_RNA (1)...(19): siRNA sense strand
agaacucacuuuauugauc

SEQ ID NO: 1656978 - RNA, 19 nt, Homo sapiens
  misc_RNA (1)...(19): siRNA sense strand
ucagaagacuaugaagcua

SEQ ID NO: 1656979 - RNA, 19 nt, Homo sapiens
  misc_RNA (1)...(19): siRNA sense strand
ggaaaguggaccaggagaa

SEQ ID NO: 1656980 - RNA, 19 nt, Homo sapiens
  misc_RNA (1)...(19): siRNA sense strand
agaccaacauuauuaccuu

SEQ ID NO: 1656981 - RNA, 19 nt, Homo sapiens
  misc_RNA (1)...(19): siRNA sense strand
agacugcaauagauaaugu

SEQ ID NO: 1656982 - RNA, 19 nt, Homo sapiens
  misc_RNA (1)...(19): siRNA sense strand
gauguaugcaguugaaguu

SEQ ID NO: 1656983 - RNA, 19 nt, Homo sapiens
  misc_RNA (1)...(19): siRNA sense strand
gacagagugcucagaguuu

SEQ ID NO: 1656984 - RNA, 19 nt, Homo sapiens
  misc_RNA (1)...(19): siRNA sense strand
ugacagcuuugacauugug

SEQ ID NO: 1656985 - RNA, 19 nt, Homo sapiens
  misc_RNA (1)...(19): siRNA sense strand
cauacgagauaaaugaagu

SEQ ID NO: 1656986 - RNA, 19 nt, Homo sapiens
  misc_RNA (1)...(19): siRNA sense strand
aacgacaacuuccuucuug

SEQ ID NO: 1656987 - RNA, 19 nt, Homo sapiens
  misc_RNA (1)...(19): siRNA sense strand
guucuacgauuugaucaga

SEQ ID NO: 1656988 - RNA, 19 nt, Homo sapiens
  misc_RNA (1)...(19): siRNA sense strand
cugcaaagaccaacauuau

SEQ ID NO: 1656989 - RNA, 19 nt, Homo sapiens
  misc_RNA (1)...(19): siRNA sense strand
aauacgaacuuucugauac

SEQ ID NO: 1656990 - RNA, 19 nt, Homo sapiens
  misc_RNA (1)...(19): siRNA sense strand
ugacaacauuucuacuauc

SEQ ID NO: 1656991 - RNA, 19 nt, Homo sapiens
  misc_RNA (1)...(19): siRNA sense strand
gcauaugugacuccaagaa

SEQ ID NO: 1656992 - RNA, 19 nt, Homo sapiens
  misc_RNA (1)...(19): siRNA sense strand
uaaagaugaugccaguuac

SEQ ID NO: 1656993 - RNA, 19 nt, Homo sapiens
  misc_RNA (1)...(19): siRNA sense strand
agacacagagcuacacaaa

SEQ ID NO: 1656994 - RNA, 19 nt, Homo sapiens
  misc_RNA (1)...(19): siRNA sense strand
aaacaguuccucuccuuug

SEQ ID NO: 1656995 - RNA, 19 nt, Homo sapiens
  misc_RNA (1)...(19): siRNA sense strand
uaaagcuaauccacccaaa

SEQ ID NO: 1656996 - RNA, 19 nt, Homo sapiens
  misc_RNA (1)...(19): siRNA sense strand
cuagauacacaacuugaaa

SEQ ID NO: 1656997 - RNA, 19 nt, Homo sapiens
  misc_RNA (1)...(19): siRNA sense strand
cagcugugauucugaguca

SEQ ID NO: 1656998 - RNA, 19 nt, Homo sapiens
  misc_RNA (1)...(19): siRNA sense strand
gaacauuugcaguauaagg

SEQ ID NO: 1656999 - RNA, 19 nt, Homo sapiens
  misc_RNA (1)...(19): siRNA sense strand
gaaaguggaccaggagaag

SEQ ID NO: 1657000 - RNA, 19 nt, Homo sapiens
  misc_RNA (1)...(19): siRNA sense strand
uauccagggugguugugua

SEQ ID NO: 1657001 - RNA, 19 nt, Homo sapiens
  misc_RNA (1)...(19): siRNA sense strand
ugguggaaguguauaguuu

SEQ ID NO: 1657002 - RNA, 19 nt, Homo sapiens
  misc_RNA (1)...(19): siRNA sense strand
acagauuacuacauccaaa

SEQ ID NO: 1657003 - RNA, 19 nt, Homo sapiens
  misc_RNA (1)...(19): siRNA sense strand
gugcaaguuacaucuauaa

SEQ ID NO: 1657004 - RNA, 19 nt, Homo sapiens
  misc_RNA (1)...(19): siRNA sense strand
cugaaagcauuaaagcuau

SEQ ID NO: 1657005 - RNA, 19 nt, Homo sapiens
  misc_RNA (1)...(19): siRNA sense strand
gaacucaagauucgcucaa

SEQ ID NO: 1657006 - RNA, 19 nt, Homo sapiens
  misc_RNA (1)...(19): siRNA sense strand
cagaagacuaugaagcuaa

SEQ ID NO: 1657007 - RNA, 19 nt, Homo sapiens
  misc_RNA (1)...(19): siRNA sense strand
cugaaagcgucacaucuau

SEQ ID NO: 1657008 - RNA, 19 nt, Homo sapiens
  misc_RNA (1)...(19): siRNA sense strand
uaaugcaaaugaaccuguu

SEQ ID NO: 1657009 - RNA, 19 nt, Homo sapiens
  misc_RNA (1)...(19): siRNA sense strand
agaagacuaugaagcuaau

SEQ ID NO: 1657010 - RNA, 19 nt, Homo sapiens
  misc_RNA (1)...(19): siRNA sense strand
gugaugggguuaaagauuu

SEQ ID NO: 1657011 - RNA, 19 nt, Homo sapiens
  misc_RNA (1)...(19): siRNA sense strand
acacagagcuacacaaaag

SEQ ID NO: 1657012 - RNA, 19 nt, Homo sapiens
  misc_RNA (1)...(19): siRNA sense strand
uaaaccgaauggauuaucu

SEQ ID NO: 1657013 - RNA, 19 nt, Homo sapiens
  misc_RNA (1)...(19): siRNA sense strand
auaugugacuccaagaauu

SEQ ID NO: 1657014 - RNA, 19 nt, Homo sapiens
  misc_RNA (1)...(19): siRNA sense strand
ccagggugguuguguagga

SEQ ID NO: 1657015 - RNA, 19 nt, Homo sapiens
  misc_RNA (1)...(19): siRNA sense strand
ucugaaagcgucacaucua

SEQ ID NO: 1657016 - RNA, 19 nt, Homo sapiens
  misc_RNA (1)...(19): siRNA sense strand
gcaaagaccaacauuauua

SEQ ID NO: 1657017 - RNA, 19 nt, Homo sapiens
  misc_RNA (1)...(19): siRNA sense strand
caacagagcccauucauaa

SEQ ID NO: 1657018 - RNA, 19 nt, Homo sapiens
  misc_RNA (1)...(19): siRNA sense strand
gcaguuaauugaugcuuua

SEQ ID NO: 1657019 - RNA, 19 nt, Homo sapiens
  misc_RNA (1)...(19): siRNA sense strand
gaaacaaaccucacugaaa

SEQ ID NO: 1657020 - RNA, 19 nt, Homo sapiens
  misc_RNA (1)...(19): siRNA sense strand
gaacucacuuuauugauca

SEQ ID NO: 1657021 - RNA, 19 nt, Homo sapiens
  misc_RNA (1)...(19): siRNA sense strand
caaacacacuuuaaagcua

SEQ ID NO: 1657022 - RNA, 19 nt, Homo sapiens
  misc_RNA (1)...(19): siRNA sense strand
ggaguaacaucucagaaga

SEQ ID NO: 1657023 - RNA, 19 nt, Homo sapiens
  misc_RNA (1)...(19): siRNA sense strand
caacacaccucaggagaaa

SEQ ID NO: 1657024 - RNA, 19 nt, Homo sapiens
  misc_RNA (1)...(19): siRNA sense strand
aaacaaaccucacugaaag

SEQ ID NO: 1657025 - RNA, 19 nt, Homo sapiens
  misc_RNA (1)...(19): siRNA sense strand
guacagacugcaauagaua

SEQ ID NO: 1657026 - RNA, 19 nt, Homo sapiens
  misc_RNA (1)...(19): siRNA sense strand
gaacaccuuucuagauaca

SEQ ID NO: 1657027 - RNA, 19 nt, Homo sapiens
  misc_RNA (1)...(19): siRNA sense strand
gaucugaugugauguaugc

SEQ ID NO: 1657028 - RNA, 19 nt, Homo sapiens
  misc_RNA (1)...(19): siRNA sense strand
uaacaggccaguucaguuu

SEQ ID NO: 1657029 - RNA, 19 nt, Homo sapiens
  misc_RNA (1)...(19): siRNA sense strand
aaagacagcuaugaugaaa

SEQ ID NO: 1657030 - RNA, 19 nt, Homo sapiens
  misc_RNA (1)...(19): siRNA sense strand
acagagugauguuccaaua

SEQ ID NO: 1657031 - RNA, 19 nt, Homo sapiens
  misc_RNA (1)...(19): siRNA sense strand
ggaaagagagaauuaucaa

SEQ ID NO: 1657032 - RNA, 19 nt, Homo sapiens
  misc_RNA (1)...(19): siRNA sense strand
gaaaguaccuacagaaaag

SEQ ID NO: 1657033 - RNA, 19 nt, Homo sapiens
  misc_RNA (1)...(19): siRNA sense strand
gcuaauuccugccucaaga

SEQ ID NO: 1657034 - RNA, 19 nt, Homo sapiens
  misc_RNA (1)...(19): siRNA sense strand
ucaacagucuucucaauca

SEQ ID NO: 1657035 - RNA, 19 nt, Homo sapiens
  misc_RNA (1)...(19): siRNA sense strand
uaacaucucagaagacuau

SEQ ID NO: 1657036 - RNA, 19 nt, Homo sapiens
  misc_RNA (1)...(19): siRNA sense strand
cuacaaggcuggaacucaa

SEQ ID NO: 1657037 - RNA, 19 nt, Homo sapiens
  misc_RNA (1)...(19): siRNA sense strand
ggacagagugcucagaguu

SEQ ID NO: 1657038 - RNA, 19 nt, Homo sapiens
  misc_RNA (1)...(19): siRNA sense strand
cuaagaaagugcaguuaau

SEQ ID NO: 1657039 - RNA, 19 nt, Homo sapiens
  misc_RNA (1)...(19): siRNA sense strand
uggaacauuugcaguauaa

SEQ ID NO: 1657040 - RNA, 19 nt, Homo sapiens
  misc_RNA (1)...(19): siRNA sense strand
cagcaguguucaagacuuu

SEQ ID NO: 1657041 - RNA, 19 nt, Homo sapiens
  misc_RNA (1)...(19): siRNA sense strand
aaaccucacugaaagcauu

SEQ ID NO: 1657042 - RNA, 19 nt, Homo sapiens
  misc_RNA (1)...(19): siRNA sense strand
uauaagguauugcaggaaa

SEQ ID NO: 1657043 - RNA, 19 nt, Homo sapiens
  misc_RNA (1)...(19): siRNA sense strand
gcuaagaaagugcaguuaa

SEQ ID NO: 1657044 - RNA, 19 nt, Homo sapiens
  misc_RNA (1)...(19): siRNA sense strand
gaccaacauuauuaccuuu

SEQ ID NO: 1657045 - RNA, 19 nt, Homo sapiens
  misc_RNA (1)...(19): siRNA sense strand
ucuacuaucuccauccuaa

SEQ ID NO: 1657046 - RNA, 19 nt, Homo sapiens
  misc_RNA (1)...(19): siRNA sense strand
ccaauagauuuacuugaug

SEQ ID NO: 1657047 - RNA, 19 nt, Homo sapiens
  misc_RNA (1)...(19): siRNA sense strand
agacagcuaugaugaaauc

SEQ ID NO: 1657048 - RNA, 19 nt, Homo sapiens
  misc_RNA (1)...(19): siRNA sense strand
acagggaucugaugugaug

SEQ ID NO: 1657049 - RNA, 19 nt, Homo sapiens
  misc_RNA (1)...(19): siRNA sense strand
auaaagaugaugccaguua

SEQ ID NO: 1657050 - RNA, 19 nt, Homo sapiens
  misc_RNA (1)...(19): siRNA sense strand
gaaaagacagcuaugauga

SEQ ID NO: 1657051 - RNA, 19 nt, Homo sapiens
  misc_RNA (1)...(19): siRNA sense strand
gaaaacaguuccucuccuu

SEQ ID NO: 1657052 - RNA, 19 nt, Homo sapiens
  misc_RNA (1)...(19): siRNA sense strand
gacaacauuucuacuaucu

SEQ ID NO: 1657053 - RNA, 19 nt, Homo sapiens
  misc_RNA (1)...(19): siRNA sense strand
gguacagacugcaauagau

SEQ ID NO: 1657054 - RNA, 19 nt, Homo sapiens
  misc_RNA (1)...(19): siRNA sense strand
ggagguauuuuguguauug

SEQ ID NO: 1657055 - RNA, 19 nt, Homo sapiens
  misc_RNA (1)...(19): siRNA sense strand
gagaagaccuuuuguuugg

SEQ ID NO: 1657056 - RNA, 19 nt, Homo sapiens
  misc_RNA (1)...(19): siRNA sense strand
uuacagggaucugauguga

SEQ ID NO: 1657057 - RNA, 19 nt, Homo sapiens
  misc_RNA (1)...(19): siRNA sense strand
aaagugcaguuaauugaug

SEQ ID NO: 1657058 - RNA, 19 nt, Homo sapiens
  misc_RNA (1)...(19): siRNA sense strand
uaucaacagucuucucaau

SEQ ID NO: 1657059 - RNA, 19 nt, Homo sapiens
  misc_RNA (1)...(19): siRNA sense strand
guacgcaagugggaaauuc

SEQ ID NO: 1657060 - RNA, 19 nt, Homo sapiens
  misc_RNA (1)...(19): siRNA sense strand
gaugccaguuacagccuua

SEQ ID NO: 1657061 - RNA, 19 nt, Homo sapiens
  misc_RNA (1)...(19): siRNA sense strand
agagugauguuccaauaga

SEQ ID NO: 1657062 - RNA, 19 nt, Homo sapiens
  misc_RNA (1)...(19): siRNA sense strand
gagauuagaggcuucacaa

SEQ ID NO: 1657063 - RNA, 19 nt, Homo sapiens
  misc_RNA (1)...(19): siRNA sense strand
gaaagugcaguuaauugau

SEQ ID NO: 1657064 - RNA, 19 nt, Homo sapiens
  misc_RNA (1)...(19): siRNA sense strand
caacagucuucucaaucaa

SEQ ID NO: 1657065 - RNA, 19 nt, Homo sapiens
  misc_RNA (1)...(19): siRNA sense strand
gcgcuuauacagauuacua

SEQ ID NO: 1657066 - RNA, 19 nt, Homo sapiens
  misc_RNA (1)...(19): siRNA sense strand
gaugugauguaugcaguug

SEQ ID NO: 1657067 - RNA, 19 nt, Homo sapiens
  misc_RNA (1)...(19): siRNA sense strand
aaagcaaccugcacaucuu

SEQ ID NO: 1657068 - RNA, 19 nt, Homo sapiens
  misc_RNA (1)...(19): siRNA sense strand
aagauucgcucaauugaag

SEQ ID NO: 1657069 - RNA, 19 nt, Homo sapiens
  misc_RNA (1)...(19): siRNA sense strand
guuacagccuuaucuuaga

SEQ ID NO: 1657070 - RNA, 19 nt, Homo sapiens
  misc_RNA (1)...(19): siRNA sense strand
aucaggagaugcagaauaa

SEQ ID NO: 1657071 - RNA, 19 nt, Homo sapiens
  misc_RNA (1)...(19): siRNA sense strand
cagaucaccuacaggaaga

SEQ ID NO: 1657072 - RNA, 19 nt, Homo sapiens
  misc_RNA (1)...(19): siRNA sense strand
guuaugugcuuuggcauga

SEQ ID NO: 1657073 - RNA, 19 nt, Homo sapiens
  misc_RNA (1)...(19): siRNA sense strand
agaaagugcaguuaauuga

SEQ ID NO: 1657074 - RNA, 19 nt, Homo sapiens
  misc_RNA (1)...(19): siRNA sense strand
ugggagagaugacggaaug

SEQ ID NO: 1657075 - RNA, 19 nt, Homo sapiens
  misc_RNA (1)...(19): siRNA sense strand
gcagcaguguucaagacuu

SEQ ID NO: 1657076 - RNA, 19 nt, Homo sapiens
  misc_RNA (1)...(19): siRNA sense strand
ugagggaaauacgaacuuu

SEQ ID NO: 1657077 - RNA, 19 nt, Homo sapiens
  misc_RNA (1)...(19): siRNA sense strand
agaacucacuuuauugauc

SEQ ID NO: 1657078 - RNA, 19 nt, Homo sapiens
  misc_RNA (1)...(19): siRNA sense strand
ucagaagacuaugaagcua

SEQ ID NO: 1657079 - RNA, 19 nt, Homo sapiens
  misc_RNA (1)...(19): siRNA sense strand
ggaaaguggaccaggagaa

SEQ ID NO: 1657080 - RNA, 19 nt, Homo sapiens
  misc_RNA (1)...(19): siRNA sense strand
agaccaacauuauuaccuu

SEQ ID NO: 1657081 - RNA, 19 nt, Homo sapiens
  misc_RNA (1)...(19): siRNA sense strand
agacugcaauagauaaugu

SEQ ID NO: 1657082 - RNA, 19 nt, Homo sapiens
  misc_RNA (1)...(19): siRNA sense strand
gauguaugcaguugaaguu

SEQ ID NO: 1657083 - RNA, 19 nt, Homo sapiens
  misc_RNA (1)...(19): siRNA sense strand
gacagagugcucagaguuu

SEQ ID NO: 1657084 - RNA, 19 nt, Homo sapiens
  misc_RNA (1)...(19): siRNA sense strand
ugacagcuuugacauugug

SEQ ID NO: 1657085 - RNA, 19 nt, Homo sapiens
  misc_RNA (1)...(19): siRNA sense strand
cauacgagauaaaugaagu

SEQ ID NO: 1657086 - RNA, 19 nt, Homo sapiens
  misc_RNA (1)...(19): siRNA sense strand
aacgacaacuuccuucuug

SEQ ID NO: 1657087 - RNA, 19 nt, Homo sapiens
  misc_RNA (1)...(19): siRNA sense strand
guucuacgauuugaucaga

SEQ ID NO: 1657088 - RNA, 19 nt, Homo sapiens
  misc_RNA (1)...(19): siRNA sense strand
cugcaaagaccaacauuau

SEQ ID NO: 1657089 - RNA, 19 nt, Homo sapiens
  misc_RNA (1)...(19): siRNA sense strand
aauacgaacuuucugauac

SEQ ID NO: 1657090 - RNA, 19 nt, Homo sapiens
  misc_RNA (1)...(19): siRNA sense strand
ugacaacauuucuacuauc

SEQ ID NO: 1657091 - RNA, 19 nt, Homo sapiens
  misc_RNA (1)...(19): siRNA sense strand
gcauaugugacuccaagaa

SEQ ID NO: 1657092 - RNA, 19 nt, Homo sapiens
  misc_RNA (1)...(19): siRNA sense strand
uaaagaugaugccaguuac

SEQ ID NO: 1657093 - RNA, 19 nt, Homo sapiens
  misc_RNA (1)...(19): siRNA sense strand
agacacagagcuacacaaa

SEQ ID NO: 1657094 - RNA, 19 nt, Homo sapiens
  misc_RNA (1)...(19): siRNA sense strand
aaacaguuccucuccuuug

SEQ ID NO: 1657095 - RNA, 19 nt, Homo sapiens
  misc_RNA (1)...(19): siRNA sense strand
uaaagcuaauccacccaaa

SEQ ID NO: 1657096 - RNA, 19 nt, Homo sapiens
  misc_RNA (1)...(19): siRNA sense strand
cuagauacacaacuugaaa

SEQ ID NO: 1657097 - RNA, 19 nt, Homo sapiens
  misc_RNA (1)...(19): siRNA sense strand
cagcugugauucugaguca

SEQ ID NO: 1657098 - RNA, 19 nt, Homo sapiens
  misc_RNA (1)...(19): siRNA sense strand
gaacauuugcaguauaagg

SEQ ID NO: 1657099 - RNA, 19 nt, Homo sapiens
  misc_RNA (1)...(19): siRNA sense strand
gaaaguggaccaggagaag

SEQ ID NO: 1657100 - RNA, 19 nt, Homo sapiens
  misc_RNA (1)...(19): siRNA sense strand
uauccagggugguugugua

SEQ ID NO: 1657101 - RNA, 19 nt, Homo sapiens
  misc_RNA (1)...(19): siRNA sense strand
ugguggaaguguauaguuu

SEQ ID NO: 1657102 - RNA, 19 nt, Homo sapiens
  misc_RNA (1)...(19): siRNA sense strand
acagauuacuacauccaaa

SEQ ID NO: 1657103 - RNA, 19 nt, Homo sapiens
  misc_RNA (1)...(19): siRNA sense strand
gugcaaguuacaucuauaa

SEQ ID NO: 1657104 - RNA, 19 nt, Homo sapiens
  misc_RNA (1)...(19): siRNA sense strand
cugaaagcauuaaagcuau

SEQ ID NO: 1657105 - RNA, 19 nt, Homo sapiens
  misc_RNA (1)...(19): siRNA sense strand
gaacucaagauucgcucaa

SEQ ID NO: 1657106 - RNA, 19 nt, Homo sapiens
  misc_RNA (1)...(19): siRNA sense strand
cagaagacuaugaagcuaa

SEQ ID NO: 1657107 - RNA, 19 nt, Homo sapiens
  misc_RNA (1)...(19): siRNA sense strand
cugaaagcgucacaucuau

SEQ ID NO: 1657108 - RNA, 19 nt, Homo sapiens
  misc_RNA (1)...(19): siRNA sense strand
uaaugcaaaugaaccuguu

SEQ ID NO: 1657109 - RNA, 19 nt, Homo sapiens
  misc_RNA (1)...(19): siRNA sense strand
agaagacuaugaagcuaau

SEQ ID NO: 1657110 - RNA, 19 nt, Homo sapiens
  misc_RNA (1)...(19): siRNA sense strand
gugaugggguuaaagauuu

SEQ ID NO: 1657111 - RNA, 19 nt, Homo sapiens
  misc_RNA (1)...(19): siRNA sense strand
acacagagcuacacaaaag

SEQ ID NO: 1657112 - RNA, 19 nt, Homo sapiens
  misc_RNA (1)...(19): siRNA sense strand
uaaaccgaauggauuaucu

SEQ ID NO: 1657113 - RNA, 19 nt, Homo sapiens
  misc_RNA (1)...(19): siRNA sense strand
auaugugacuccaagaauu

SEQ ID NO: 1657114 - RNA, 19 nt, Homo sapiens
  misc_RNA (1)...(19): siRNA sense strand
ccagggugguuguguagga

SEQ ID NO: 1657115 - RNA, 19 nt, Homo sapiens
  misc_RNA (1)...(19): siRNA sense strand
ucugaaagcgucacaucua

SEQ ID NO: 1657116 - RNA, 19 nt, Homo sapiens
  misc_RNA (1)...(19): siRNA sense strand
gaaugcagcuuacuuucuu

SEQ ID NO: 1657117 - RNA, 19 nt, Homo sapiens
  misc_RNA (1)...(19): siRNA sense strand
ucgauuaccugaagaguuu

SEQ ID NO: 1657118 - RNA, 19 nt, Homo sapiens
  misc_RNA (1)...(19): siRNA sense strand
gcacacacauaucacauca

SEQ ID NO: 1657119 - RNA, 19 nt, Homo sapiens
  misc_RNA (1)...(19): siRNA sense strand
ccugaagaguuuagaaaua

SEQ ID NO: 1657120 - RNA, 19 nt, Homo sapiens
  misc_RNA (1)...(19): siRNA sense strand
gcugaugaccugaggauua

SEQ ID NO: 1657121 - RNA, 19 nt, Homo sapiens
  misc_RNA (1)...(19): siRNA sense strand
caaccacacgggagaauua

SEQ ID NO: 1657122 - RNA, 19 nt, Homo sapiens
  misc_RNA (1)...(19): siRNA sense strand
gcagaaugcagcuuacuuu

SEQ ID NO: 1657123 - RNA, 19 nt, Homo sapiens
  misc_RNA (1)...(19): siRNA sense strand
caucgagacuuaccagguu

SEQ ID NO: 1657124 - RNA, 19 nt, Homo sapiens
  misc_RNA (1)...(19): siRNA sense strand
gcaguggcggcuacaaaua

SEQ ID NO: 1657125 - RNA, 19 nt, Homo sapiens
  misc_RNA (1)...(19): siRNA sense strand
ggauuaaccuauggaacuu

SEQ ID NO: 1657126 - RNA, 19 nt, Homo sapiens
  misc_RNA (1)...(19): siRNA sense strand
gaucacagcagccgaguuc

SEQ ID NO: 1657127 - RNA, 19 nt, Homo sapiens
  misc_RNA (1)...(19): siRNA sense strand
ggacaauccggcuguguga

SEQ ID NO: 1657128 - RNA, 19 nt, Homo sapiens
  misc_RNA (1)...(19): siRNA sense strand
gcagcuuacuuucuucugu

SEQ ID NO: 1657129 - RNA, 19 nt, Homo sapiens
  misc_RNA (1)...(19): siRNA sense strand
ccuauggaacuuugaaaua

SEQ ID NO: 1657130 - RNA, 19 nt, Homo sapiens
  misc_RNA (1)...(19): siRNA sense strand
cugaugaccugaggauuaa

SEQ ID NO: 1657131 - RNA, 19 nt, Homo sapiens
  misc_RNA (1)...(19): siRNA sense strand
ucucugaaauuaucucuuc

SEQ ID NO: 1657132 - RNA, 19 nt, Homo sapiens
  misc_RNA (1)...(19): siRNA sense strand
ugacaggcacaccaaauuu

SEQ ID NO: 1657133 - RNA, 19 nt, Homo sapiens
  misc_RNA (1)...(19): siRNA sense strand
gugaagcuguggaaaguca

SEQ ID NO: 1657134 - RNA, 19 nt, Homo sapiens
  misc_RNA (1)...(19): siRNA sense strand
caagcuguguucccucuau

SEQ ID NO: 1657135 - RNA, 19 nt, Homo sapiens
  misc_RNA (1)...(19): siRNA sense strand
cgaguucgauuaccugaag

SEQ ID NO: 1657136 - RNA, 19 nt, Homo sapiens
  misc_RNA (1)...(19): siRNA sense strand
agacuuaccagguucauga

SEQ ID NO: 1657137 - RNA, 19 nt, Homo sapiens
  misc_RNA (1)...(19): siRNA sense strand
gggucggguuguaauauuu

SEQ ID NO: 1657138 - RNA, 19 nt, Homo sapiens
  misc_RNA (1)...(19): siRNA sense strand
ccacacgggagaauuacua

SEQ ID NO: 1657139 - RNA, 19 nt, Homo sapiens
  misc_RNA (1)...(19): siRNA sense strand
gaagauccaagcaacagau

SEQ ID NO: 1657140 - RNA, 19 nt, Homo sapiens
  misc_RNA (1)...(19): siRNA sense strand
cugaagaguuuagaaauag

SEQ ID NO: 1657141 - RNA, 19 nt, Homo sapiens
  misc_RNA (1)...(19): siRNA sense strand
cgagaucagugucgacagu

SEQ ID NO: 1657142 - RNA, 19 nt, Homo sapiens
  misc_RNA (1)...(19): siRNA sense strand
aaagucagcgagcgugaua

SEQ ID NO: 1657143 - RNA, 19 nt, Homo sapiens
  misc_RNA (1)...(19): siRNA sense strand
gaccugaggauuaaccuau

SEQ ID NO: 1657144 - RNA, 19 nt, Homo sapiens
  misc_RNA (1)...(19): siRNA sense strand
gcacauuccagagccauga

SEQ ID NO: 1657145 - RNA, 19 nt, Homo sapiens
  misc_RNA (1)...(19): siRNA sense strand
ggcuacaaauaaccuauau

SEQ ID NO: 1657146 - RNA, 19 nt, Homo sapiens
  misc_RNA (1)...(19): siRNA sense strand
acacacauaucacaucaac

SEQ ID NO: 1657147 - RNA, 19 nt, Homo sapiens
  misc_RNA (1)...(19): siRNA sense strand
ucucuucgauuucggaugu

SEQ ID NO: 1657148 - RNA, 19 nt, Homo sapiens
  misc_RNA (1)...(19): siRNA sense strand
aacgagagcaggagaguaa

SEQ ID NO: 1657149 - RNA, 19 nt, Homo sapiens
  misc_RNA (1)...(19): siRNA sense strand
gaaaagacgagaucagugu

SEQ ID NO: 1657150 - RNA, 19 nt, Homo sapiens
  misc_RNA (1)...(19): siRNA sense strand
ucaggauguucgacagaaa

SEQ ID NO: 1657151 - RNA, 19 nt, Homo sapiens
  misc_RNA (1)...(19): siRNA sense strand
ucacaucaacuccauaucu

SEQ ID NO: 1657152 - RNA, 19 nt, Homo sapiens
  misc_RNA (1)...(19): siRNA sense strand
caguggcggcuacaaauaa

SEQ ID NO: 1657153 - RNA, 19 nt, Homo sapiens
  misc_RNA (1)...(19): siRNA sense strand
ucugggaucucaacaugga

SEQ ID NO: 1657154 - RNA, 19 nt, Homo sapiens
  misc_RNA (1)...(19): siRNA sense strand
agugggagguauaucauga

SEQ ID NO: 1657155 - RNA, 19 nt, Homo sapiens
  misc_RNA (1)...(19): siRNA sense strand
acacauaucacaucaacuc

SEQ ID NO: 1657156 - RNA, 19 nt, Homo sapiens
  misc_RNA (1)...(19): siRNA sense strand
cagcuuggcauccuucaga

SEQ ID NO: 1657157 - RNA, 19 nt, Homo sapiens
  misc_RNA (1)...(19): siRNA sense strand
ggaaugggucagacagugu

SEQ ID NO: 1657158 - RNA, 19 nt, Homo sapiens
  misc_RNA (1)...(19): siRNA sense strand
gucaaagucugggaucuca

SEQ ID NO: 1657159 - RNA, 19 nt, Homo sapiens
  misc_RNA (1)...(19): siRNA sense strand
gugacaggcacaccaaauu

SEQ ID NO: 1657160 - RNA, 19 nt, Homo sapiens
  misc_RNA (1)...(19): siRNA sense strand
caacagcgacuaugaaacc

SEQ ID NO: 1657161 - RNA, 19 nt, Homo sapiens
  misc_RNA (1)...(19): siRNA sense strand
cacaucaacuccauaucug

SEQ ID NO: 1657162 - RNA, 19 nt, Homo sapiens
  misc_RNA (1)...(19): siRNA sense strand
uuucuucugucuacuaaug

SEQ ID NO: 1657163 - RNA, 19 nt, Homo sapiens
  misc_RNA (1)...(19): siRNA sense strand
cauaucacaucaacuccau

SEQ ID NO: 1657164 - RNA, 19 nt, Homo sapiens
  misc_RNA (1)...(19): siRNA sense strand
ccaacgcacacacauauca

SEQ ID NO: 1657165 - RNA, 19 nt, Homo sapiens
  misc_RNA (1)...(19): siRNA sense strand
agucugggaucucaacaug

SEQ ID NO: 1657166 - RNA, 19 nt, Homo sapiens
  misc_RNA (1)...(19): siRNA sense strand
gucaacagcgacuaugaaa

SEQ ID NO: 1657167 - RNA, 19 nt, Homo sapiens
  misc_RNA (1)...(19): siRNA sense strand
cuuaccagguucaugacua

SEQ ID NO: 1657168 - RNA, 19 nt, Homo sapiens
  misc_RNA (1)...(19): siRNA sense strand
ggaagauccaagcaacaga

SEQ ID NO: 1657169 - RNA, 19 nt, Homo sapiens
  misc_RNA (1)...(19): siRNA sense strand
uaucacaucaacuccauau

SEQ ID NO: 1657170 - RNA, 19 nt, Homo sapiens
  misc_RNA (1)...(19): siRNA sense strand
gauuucggaugugaaguuc

SEQ ID NO: 1657171 - RNA, 19 nt, Homo sapiens
  misc_RNA (1)...(19): siRNA sense strand
gcauacagcuuggcauccu

SEQ ID NO: 1657172 - RNA, 19 nt, Homo sapiens
  misc_RNA (1)...(19): siRNA sense strand
acaacaacuucuucaggau

SEQ ID NO: 1657173 - RNA, 19 nt, Homo sapiens
  misc_RNA (1)...(19): siRNA sense strand
caacgagagcaggagagua

SEQ ID NO: 1657174 - RNA, 19 nt, Homo sapiens
  misc_RNA (1)...(19): siRNA sense strand
ugacaggcuccuacaacaa

SEQ ID NO: 1657175 - RNA, 19 nt, Homo sapiens
  misc_RNA (1)...(19): siRNA sense strand
uaaccuauggaacuuugaa

SEQ ID NO: 1657176 - RNA, 19 nt, Homo sapiens
  misc_RNA (1)...(19): siRNA sense strand
cgauuucggaugugaaguu

SEQ ID NO: 1657177 - RNA, 19 nt, Homo sapiens
  misc_RNA (1)...(19): siRNA sense strand
agaaggcuacaaucugaaa

SEQ ID NO: 1657178 - RNA, 19 nt, Homo sapiens
  misc_RNA (1)...(19): siRNA sense strand
uaccugaagaguuuagaaa

SEQ ID NO: 1657179 - RNA, 19 nt, Homo sapiens
  misc_RNA (1)...(19): siRNA sense strand
ccaagcaacagaucauuuu

SEQ ID NO: 1657180 - RNA, 19 nt, Homo sapiens
  misc_RNA (1)...(19): siRNA sense strand
gaaagucagcgagcgugau

SEQ ID NO: 1657181 - RNA, 19 nt, Homo sapiens
  misc_RNA (1)...(19): siRNA sense strand
cggcuacaaauaaccuaua

SEQ ID NO: 1657182 - RNA, 19 nt, Homo sapiens
  misc_RNA (1)...(19): siRNA sense strand
ggccagaaggcuacaaucu

SEQ ID NO: 1657183 - RNA, 19 nt, Homo sapiens
  misc_RNA (1)...(19): siRNA sense strand
gcuguguucccucuaugaa

SEQ ID NO: 1657184 - RNA, 19 nt, Homo sapiens
  misc_RNA (1)...(19): siRNA sense strand
gauccugccaccaucacaa

SEQ ID NO: 1657185 - RNA, 19 nt, Homo sapiens
  misc_RNA (1)...(19): siRNA sense strand
aaacugugaagcuguggaa

SEQ ID NO: 1657186 - RNA, 19 nt, Homo sapiens
  misc_RNA (1)...(19): siRNA sense strand
gaaacaccaagcgugaugu

SEQ ID NO: 1657187 - RNA, 19 nt, Homo sapiens
  misc_RNA (1)...(19): siRNA sense strand
agaaacaccaagcgugaug

SEQ ID NO: 1657188 - RNA, 19 nt, Homo sapiens
  misc_RNA (1)...(19): siRNA sense strand
cccagcagaaugcagcuua

SEQ ID NO: 1657189 - RNA, 19 nt, Homo sapiens
  misc_RNA (1)...(19): siRNA sense strand
gugaauacaauguuuacag

SEQ ID NO: 1657190 - RNA, 19 nt, Homo sapiens
  misc_RNA (1)...(19): siRNA sense strand
ugccaacgcacacacauau

SEQ ID NO: 1657191 - RNA, 19 nt, Homo sapiens
  misc_RNA (1)...(19): siRNA sense strand
ugucaacagcgacuaugaa

SEQ ID NO: 1657192 - RNA, 19 nt, Homo sapiens
  misc_RNA (1)...(19): siRNA sense strand
aacaacuucuucaggaugu

SEQ ID NO: 1657193 - RNA, 19 nt, Homo sapiens
  misc_RNA (1)...(19): siRNA sense strand
gacaggcuccuacaacaac

SEQ ID NO: 1657194 - RNA, 19 nt, Homo sapiens
  misc_RNA (1)...(19): siRNA sense strand
cagaaugcagcuuacuuuc

SEQ ID NO: 1657195 - RNA, 19 nt, Homo sapiens
  misc_RNA (1)...(19): siRNA sense strand
ucaacuccauaucugucaa

SEQ ID NO: 1657196 - RNA, 19 nt, Homo sapiens
  misc_RNA (1)...(19): siRNA sense strand
cacagugggagguauauca

SEQ ID NO: 1657197 - RNA, 19 nt, Homo sapiens
  misc_RNA (1)...(19): siRNA sense strand
cugaaauuaucucuucgau

SEQ ID NO: 1657198 - RNA, 19 nt, Homo sapiens
  misc_RNA (1)...(19): siRNA sense strand
gauuaaccuauggaacuuu

SEQ ID NO: 1657199 - RNA, 19 nt, Homo sapiens
  misc_RNA (1)...(19): siRNA sense strand
ucagcgagcgugauaagag

SEQ ID NO: 1657200 - RNA, 19 nt, Homo sapiens
  misc_RNA (1)...(19): siRNA sense strand
uuaccagguucaugacuac

SEQ ID NO: 1657201 - RNA, 19 nt, Homo sapiens
  misc_RNA (1)...(19): siRNA sense strand
cugugaagcuguggaaagu

SEQ ID NO: 1657202 - RNA, 19 nt, Homo sapiens
  misc_RNA (1)...(19): siRNA sense strand
gcaucugcccugugugaca

SEQ ID NO: 1657203 - RNA, 19 nt, Homo sapiens
  misc_RNA (1)...(19): siRNA sense strand
auuaaccuauggaacuuug

SEQ ID NO: 1657204 - RNA, 19 nt, Homo sapiens
  misc_RNA (1)...(19): siRNA sense strand
gacauuaagccagccaaca

SEQ ID NO: 1657205 - RNA, 19 nt, Homo sapiens
  misc_RNA (1)...(19): siRNA sense strand
cauacagcuuggcauccuu

SEQ ID NO: 1657206 - RNA, 19 nt, Homo sapiens
  misc_RNA (1)...(19): siRNA sense strand
gcuccuacaacaacuucuu

SEQ ID NO: 1657207 - RNA, 19 nt, Homo sapiens
  misc_RNA (1)...(19): siRNA sense strand
caaagucugggaucucaac

SEQ ID NO: 1657208 - RNA, 19 nt, Homo sapiens
  misc_RNA (1)...(19): siRNA sense strand
gaaugcagcuuacuuucuu

SEQ ID NO: 1657209 - RNA, 19 nt, Homo sapiens
  misc_RNA (1)...(19): siRNA sense strand
ucgauuaccugaagaguuu

SEQ ID NO: 1657210 - RNA, 19 nt, Homo sapiens
  misc_RNA (1)...(19): siRNA sense strand
gcacacacauaucacauca

SEQ ID NO: 1657211 - RNA, 19 nt, Homo sapiens
  misc_RNA (1)...(19): siRNA sense strand
ccugaagaguuuagaaaua

SEQ ID NO: 1657212 - RNA, 19 nt, Homo sapiens
  misc_RNA (1)...(19): siRNA sense strand
gcugaugaccugaggauua

SEQ ID NO: 1657213 - RNA, 19 nt, Homo sapiens
  misc_RNA (1)...(19): siRNA sense strand
caaccacacgggagaauua

SEQ ID NO: 1657214 - RNA, 19 nt, Homo sapiens
  misc_RNA (1)...(19): siRNA sense strand
gcagaaugcagcuuacuuu

SEQ ID NO: 1657215 - RNA, 19 nt, Homo sapiens
  misc_RNA (1)...(19): siRNA sense strand
caucgagacuuaccagguu

SEQ ID NO: 1657216 - RNA, 19 nt, Homo sapiens
  misc_RNA (1)...(19): siRNA sense strand
gcaguggcggcuacaaaua

SEQ ID NO: 1657217 - RNA, 19 nt, Homo sapiens
  misc_RNA (1)...(19): siRNA sense strand
ggauuaaccuauggaacuu

SEQ ID NO: 1657218 - RNA, 19 nt, Homo sapiens
  misc_RNA (1)...(19): siRNA sense strand
gaucacagcagccgaguuc

SEQ ID NO: 1657219 - RNA, 19 nt, Homo sapiens
  misc_RNA (1)...(19): siRNA sense strand
ggacaauccggcuguguga

SEQ ID NO: 1657220 - RNA, 19 nt, Homo sapiens
  misc_RNA (1)...(19): siRNA sense strand
gcagcuuacuuucuucugu

SEQ ID NO: 1657221 - RNA, 19 nt, Homo sapiens
  misc_RNA (1)...(19): siRNA sense strand
ccuauggaacuuugaaaua

SEQ ID NO: 1657222 - RNA, 19 nt, Homo sapiens
  misc_RNA (1)...(19): siRNA sense strand
cugaugaccugaggauuaa

SEQ ID NO: 1657223 - RNA, 19 nt, Homo sapiens
  misc_RNA (1)...(19): siRNA sense strand
ucucugaaauuaucucuuc

SEQ ID NO: 1657224 - RNA, 19 nt, Homo sapiens
  misc_RNA (1)...(19): siRNA sense strand
ugacaggcacaccaaauuu

SEQ ID NO: 1657225 - RNA, 19 nt, Homo sapiens
  misc_RNA (1)...(19): siRNA sense strand
gugaagcuguggaaaguca

SEQ ID NO: 1657226 - RNA, 19 nt, Homo sapiens
  misc_RNA (1)...(19): siRNA sense strand
caagcuguguucccucuau

SEQ ID NO: 1657227 - RNA, 19 nt, Homo sapiens
  misc_RNA (1)...(19): siRNA sense strand
cgaguucgauuaccugaag

SEQ ID NO: 1657228 - RNA, 19 nt, Homo sapiens
  misc_RNA (1)...(19): siRNA sense strand
agacuuaccagguucauga

SEQ ID NO: 1657229 - RNA, 19 nt, Homo sapiens
  misc_RNA (1)...(19): siRNA sense strand
gggucggguuguaauauuu

SEQ ID NO: 1657230 - RNA, 19 nt, Homo sapiens
  misc_RNA (1)...(19): siRNA sense strand
ccacacgggagaauuacua

SEQ ID NO: 1657231 - RNA, 19 nt, Homo sapiens
  misc_RNA (1)...(19): siRNA sense strand
gaagauccaagcaacagau

SEQ ID NO: 1657232 - RNA, 19 nt, Homo sapiens
  misc_RNA (1)...(19): siRNA sense strand
cugaagaguuuagaaauag

SEQ ID NO: 1657233 - RNA, 19 nt, Homo sapiens
  misc_RNA (1)...(19): siRNA sense strand
cgagaucagugucgacagu

SEQ ID NO: 1657234 - RNA, 19 nt, Homo sapiens
  misc_RNA (1)...(19): siRNA sense strand
aaagucagcgagcgugaua

SEQ ID NO: 1657235 - RNA, 19 nt, Homo sapiens
  misc_RNA (1)...(19): siRNA sense strand
gaccugaggauuaaccuau

SEQ ID NO: 1657236 - RNA, 19 nt, Homo sapiens
  misc_RNA (1)...(19): siRNA sense strand
gcacauuccagagccauga

SEQ ID NO: 1657237 - RNA, 19 nt, Homo sapiens
  misc_RNA (1)...(19): siRNA sense strand
ggcuacaaauaaccuauau

SEQ ID NO: 1657238 - RNA, 19 nt, Homo sapiens
  misc_RNA (1)...(19): siRNA sense strand
acacacauaucacaucaac

SEQ ID NO: 1657239 - RNA, 19 nt, Homo sapiens
  misc_RNA (1)...(19): siRNA sense strand
ucucuucgauuucggaugu

SEQ ID NO: 1657240 - RNA, 19 nt, Homo sapiens
  misc_RNA (1)...(19): siRNA sense strand
aacgagagcaggagaguaa

SEQ ID NO: 1657241 - RNA, 19 nt, Homo sapiens
  misc_RNA (1)...(19): siRNA sense strand
gaaaagacgagaucagugu

SEQ ID NO: 1657242 - RNA, 19 nt, Homo sapiens
  misc_RNA (1)...(19): siRNA sense strand
ucaggauguucgacagaaa

SEQ ID NO: 1657243 - RNA, 19 nt, Homo sapiens
  misc_RNA (1)...(19): siRNA sense strand
ucacaucaacuccauaucu

SEQ ID NO: 1657244 - RNA, 19 nt, Homo sapiens
  misc_RNA (1)...(19): siRNA sense strand
caguggcggcuacaaauaa

SEQ ID NO: 1657245 - RNA, 19 nt, Homo sapiens
  misc_RNA (1)...(19): siRNA sense strand
ucugggaucucaacaugga

SEQ ID NO: 1657246 - RNA, 19 nt, Homo sapiens
  misc_RNA (1)...(19): siRNA sense strand
agugggagguauaucauga

SEQ ID NO: 1657247 - RNA, 19 nt, Homo sapiens
  misc_RNA (1)...(19): siRNA sense strand
acacauaucacaucaacuc

SEQ ID NO: 1657248 - RNA, 19 nt, Homo sapiens
  misc_RNA (1)...(19): siRNA sense strand
cagcuuggcauccuucaga

SEQ ID NO: 1657249 - RNA, 19 nt, Homo sapiens
  misc_RNA (1)...(19): siRNA sense strand
ggaaugggucagacagugu

SEQ ID NO: 1657250 - RNA, 19 nt, Homo sapiens
  misc_RNA (1)...(19): siRNA sense strand
gucaaagucugggaucuca

SEQ ID NO: 1657251 - RNA, 19 nt, Homo sapiens
  misc_RNA (1)...(19): siRNA sense strand
gugacaggcacaccaaauu

SEQ ID NO: 1657252 - RNA, 19 nt, Homo sapiens
  misc_RNA (1)...(19): siRNA sense strand
caacagcgacuaugaaacc

SEQ ID NO: 1657253 - RNA, 19 nt, Homo sapiens
  misc_RNA (1)...(19): siRNA sense strand
cacaucaacuccauaucug

SEQ ID NO: 1657254 - RNA, 19 nt, Homo sapiens
  misc_RNA (1)...(19): siRNA sense strand
uuucuucugucuacuaaug

SEQ ID NO: 1657255 - RNA, 19 nt, Homo sapiens
  misc_RNA (1)...(19): siRNA sense strand
cauaucacaucaacuccau

SEQ ID NO: 1657256 - RNA, 19 nt, Homo sapiens
  misc_RNA (1)...(19): siRNA sense strand
ccaacgcacacacauauca

SEQ ID NO: 1657257 - RNA, 19 nt, Homo sapiens
  misc_RNA (1)...(19): siRNA sense strand
agucugggaucucaacaug

SEQ ID NO: 1657258 - RNA, 19 nt, Homo sapiens
  misc_RNA (1)...(19): siRNA sense strand
gucaacagcgacuaugaaa

SEQ ID NO: 1657259 - RNA, 19 nt, Homo sapiens
  misc_RNA (1)...(19): siRNA sense strand
cuuaccagguucaugacua

SEQ ID NO: 1657260 - RNA, 19 nt, Homo sapiens
  misc_RNA (1)...(19): siRNA sense strand
ggaagauccaagcaacaga

SEQ ID NO: 1657261 - RNA, 19 nt, Homo sapiens
  misc_RNA (1)...(19): siRNA sense strand
uaucacaucaacuccauau

SEQ ID NO: 1657262 - RNA, 19 nt, Homo sapiens
  misc_RNA (1)...(19): siRNA sense strand
gauuucggaugugaaguuc

SEQ ID NO: 1657263 - RNA, 19 nt, Homo sapiens
  misc_RNA (1)...(19): siRNA sense strand
gcauacagcuuggcauccu

SEQ ID NO: 1657264 - RNA, 19 nt, Homo sapiens
  misc_RNA (1)...(19): siRNA sense strand
acaacaacuucuucaggau

SEQ ID NO: 1657265 - RNA, 19 nt, Homo sapiens
  misc_RNA (1)...(19): siRNA sense strand
caacgagagcaggagagua

SEQ ID NO: 1657266 - RNA, 19 nt, Homo sapiens
  misc_RNA (1)...(19): siRNA sense strand
ugacaggcuccuacaacaa

SEQ ID NO: 1657267 - RNA, 19 nt, Homo sapiens
  misc_RNA (1)...(19): siRNA sense strand
uaaccuauggaacuuugaa

SEQ ID NO: 1657268 - RNA, 19 nt, Homo sapiens
  misc_RNA (1)...(19): siRNA sense strand
cgauuucggaugugaaguu

SEQ ID NO: 1657269 - RNA, 19 nt, Homo sapiens
  misc_RNA (1)...(19): siRNA sense strand
agaaggcuacaaucugaaa

SEQ ID NO: 1657270 - RNA, 19 nt, Homo sapiens
  misc_RNA (1)...(19): siRNA sense strand
uaccugaagaguuuagaaa

SEQ ID NO: 1657271 - RNA, 19 nt, Homo sapiens
  misc_RNA (1)...(19): siRNA sense strand
ccaagcaacagaucauuuu

SEQ ID NO: 1657272 - RNA, 19 nt, Homo sapiens
  misc_RNA (1)...(19): siRNA sense strand
gaaagucagcgagcgugau

SEQ ID NO: 1657273 - RNA, 19 nt, Homo sapiens
  misc_RNA (1)...(19): siRNA sense strand
cggcuacaaauaaccuaua

SEQ ID NO: 1657274 - RNA, 19 nt, Homo sapiens
  misc_RNA (1)...(19): siRNA sense strand
ggccagaaggcuacaaucu

SEQ ID NO: 1657275 - RNA, 19 nt, Homo sapiens
  misc_RNA (1)...(19): siRNA sense strand
gcuguguucccucuaugaa

SEQ ID NO: 1657276 - RNA, 19 nt, Homo sapiens
  misc_RNA (1)...(19): siRNA sense strand
gauccugccaccaucacaa

SEQ ID NO: 1657277 - RNA, 19 nt, Homo sapiens
  misc_RNA (1)...(19): siRNA sense strand
aaacugugaagcuguggaa

SEQ ID NO: 1657278 - RNA, 19 nt, Homo sapiens
  misc_RNA (1)...(19): siRNA sense strand
gaaacaccaagcgugaugu

SEQ ID NO: 1657279 - RNA, 19 nt, Homo sapiens
  misc_RNA (1)...(19): siRNA sense strand
agaaacaccaagcgugaug

SEQ ID NO: 1657280 - RNA, 19 nt, Homo sapiens
  misc_RNA (1)...(19): siRNA sense strand
cccagcagaaugcagcuua

SEQ ID NO: 1657281 - RNA, 19 nt, Homo sapiens
  misc_RNA (1)...(19): siRNA sense strand
gugaauacaauguuuacag

SEQ ID NO: 1657282 - RNA, 19 nt, Homo sapiens
  misc_RNA (1)...(19): siRNA sense strand
ugccaacgcacacacauau

SEQ ID NO: 1657283 - RNA, 19 nt, Homo sapiens
  misc_RNA (1)...(19): siRNA sense strand
ugucaacagcgacuaugaa

SEQ ID NO: 1657284 - RNA, 19 nt, Homo sapiens
  misc_RNA (1)...(19): siRNA sense strand
aacaacuucuucaggaugu

SEQ ID NO: 1657285 - RNA, 19 nt, Homo sapiens
  misc_RNA (1)...(19): siRNA sense strand
gacaggcuccuacaacaac

SEQ ID NO: 1657286 - RNA, 19 nt, Homo sapiens
  misc_RNA (1)...(19): siRNA sense strand
cagaaugcagcuuacuuuc

SEQ ID NO: 1657287 - RNA, 19 nt, Homo sapiens
  misc_RNA (1)...(19): siRNA sense strand
ucaacuccauaucugucaa

SEQ ID NO: 1657288 - RNA, 19 nt, Homo sapiens
  misc_RNA (1)...(19): siRNA sense strand
cacagugggagguauauca

SEQ ID NO: 1657289 - RNA, 19 nt, Homo sapiens
  misc_RNA (1)...(19): siRNA sense strand
cugaaauuaucucuucgau

SEQ ID NO: 1657290 - RNA, 19 nt, Homo sapiens
  misc_RNA (1)...(19): siRNA sense strand
gauuaaccuauggaacuuu

SEQ ID NO: 1657291 - RNA, 19 nt, Homo sapiens
  misc_RNA (1)...(19): siRNA sense strand
ucagcgagcgugauaagag

SEQ ID NO: 1657292 - RNA, 19 nt, Homo sapiens
  misc_RNA (1)...(19): siRNA sense strand
uuaccagguucaugacuac

SEQ ID NO: 1657293 - RNA, 19 nt, Homo sapiens
  misc_RNA (1)...(19): siRNA sense strand
cugugaagcuguggaaagu

SEQ ID NO: 1657294 - RNA, 19 nt, Homo sapiens
  misc_RNA (1)...(19): siRNA sense strand
gcaucugcccugugugaca

SEQ ID NO: 1657295 - RNA, 19 nt, Homo sapiens
  misc_RNA (1)...(19): siRNA sense strand
auuaaccuauggaacuuug

SEQ ID NO: 1657296 - RNA, 19 nt, Homo sapiens
  misc_RNA (1)...(19): siRNA sense strand
gacauuaagccagccaaca

SEQ ID NO: 1657297 - RNA, 19 nt, Homo sapiens
  misc_RNA (1)...(19): siRNA sense strand
cauacagcuuggcauccuu

SEQ ID NO: 1657298 - RNA, 19 nt, Homo sapiens
  misc_RNA (1)...(19): siRNA sense strand
gcuccuacaacaacuucuu

SEQ ID NO: 1657299 - RNA, 19 nt, Homo sapiens
  misc_RNA (1)...(19): siRNA sense strand
caaagucugggaucucaac

SEQ ID NO: 1657300 - RNA, 19 nt, Homo sapiens
  misc_RNA (1)...(19): siRNA sense strand
gaaugcagcuuacuuucuu

SEQ ID NO: 1657301 - RNA, 19 nt, Homo sapiens
  misc_RNA (1)...(19): siRNA sense strand
ucgauuaccugaagaguuu

SEQ ID NO: 1657302 - RNA, 19 nt, Homo sapiens
  misc_RNA (1)...(19): siRNA sense strand
gcacacacauaucacauca

SEQ ID NO: 1657303 - RNA, 19 nt, Homo sapiens
  misc_RNA (1)...(19): siRNA sense strand
ccugaagaguuuagaaaua

SEQ ID NO: 1657304 - RNA, 19 nt, Homo sapiens
  misc_RNA (1)...(19): siRNA sense strand
gcugaugaccugaggauua

SEQ ID NO: 1657305 - RNA, 19 nt, Homo sapiens
  misc_RNA (1)...(19): siRNA sense strand
caaccacacgggagaauua

SEQ ID NO: 1657306 - RNA, 19 nt, Homo sapiens
  misc_RNA (1)...(19): siRNA sense strand
gcagaaugcagcuuacuuu

SEQ ID NO: 1657307 - RNA, 19 nt, Homo sapiens
  misc_RNA (1)...(19): siRNA sense strand
caucgagacuuaccagguu

SEQ ID NO: 1657308 - RNA, 19 nt, Homo sapiens
  misc_RNA (1)...(19): siRNA sense strand
gcaguggcggcuacaaaua

SEQ ID NO: 1657309 - RNA, 19 nt, Homo sapiens
  misc_RNA (1)...(19): siRNA sense strand
ggauuaaccuauggaacuu

SEQ ID NO: 1657310 - RNA, 19 nt, Homo sapiens
  misc_RNA (1)...(19): siRNA sense strand
gaucacagcagccgaguuc

SEQ ID NO: 1657311 - RNA, 19 nt, Homo sapiens
  misc_RNA (1)...(19): siRNA sense strand
ggacaauccggcuguguga

SEQ ID NO: 1657312 - RNA, 19 nt, Homo sapiens
  misc_RNA (1)...(19): siRNA sense strand
gcagcuuacuuucuucugu

SEQ ID NO: 1657313 - RNA, 19 nt, Homo sapiens
  misc_RNA (1)...(19): siRNA sense strand
ccuauggaacuuugaaaua

SEQ ID NO: 1657314 - RNA, 19 nt, Homo sapiens
  misc_RNA (1)...(19): siRNA sense strand
cugaugaccugaggauuaa

SEQ ID NO: 1657315 - RNA, 19 nt, Homo sapiens
  misc_RNA (1)...(19): siRNA sense strand
ucucugaaauuaucucuuc

SEQ ID NO: 1657316 - RNA, 19 nt, Homo sapiens
  misc_RNA (1)...(19): siRNA sense strand
ugacaggcacaccaaauuu

SEQ ID NO: 1657317 - RNA, 19 nt, Homo sapiens
  misc_RNA (1)...(19): siRNA sense strand
gugaagcuguggaaaguca

SEQ ID NO: 1657318 - RNA, 19 nt, Homo sapiens
  misc_RNA (1)...(19): siRNA sense strand
caagcuguguucccucuau

SEQ ID NO: 1657319 - RNA, 19 nt, Homo sapiens
  misc_RNA (1)...(19): siRNA sense strand
cgaguucgauuaccugaag

SEQ ID NO: 1657320 - RNA, 19 nt, Homo sapiens
  misc_RNA (1)...(19): siRNA sense strand
agacuuaccagguucauga

SEQ ID NO: 1657321 - RNA, 19 nt, Homo sapiens
  misc_RNA (1)...(19): siRNA sense strand
gggucggguuguaauauuu

SEQ ID NO: 1657322 - RNA, 19 nt, Homo sapiens
  misc_RNA (1)...(19): siRNA sense strand
ccacacgggagaauuacua

SEQ ID NO: 1657323 - RNA, 19 nt, Homo sapiens
  misc_RNA (1)...(19): siRNA sense strand
gaagauccaagcaacagau

SEQ ID NO: 1657324 - RNA, 19 nt, Homo sapiens
  misc_RNA (1)...(19): siRNA sense strand
cugaagaguuuagaaauag

SEQ ID NO: 1657325 - RNA, 19 nt, Homo sapiens
  misc_RNA (1)...(19): siRNA sense strand
cgagaucagugucgacagu

SEQ ID NO: 1657326 - RNA, 19 nt, Homo sapiens
  misc_RNA (1)...(19): siRNA sense strand
aaagucagcgagcgugaua

SEQ ID NO: 1657327 - RNA, 19 nt, Homo sapiens
  misc_RNA (1)...(19): siRNA sense strand
gaccugaggauuaaccuau

SEQ ID NO: 1657328 - RNA, 19 nt, Homo sapiens
  misc_RNA (1)...(19): siRNA sense strand
gcacauuccagagccauga

SEQ ID NO: 1657329 - RNA, 19 nt, Homo sapiens
  misc_RNA (1)...(19): siRNA sense strand
ggcuacaaauaaccuauau

SEQ ID NO: 1657330 - RNA, 19 nt, Homo sapiens
  misc_RNA (1)...(19): siRNA sense strand
acacacauaucacaucaac

SEQ ID NO: 1657331 - RNA, 19 nt, Homo sapiens
  misc_RNA (1)...(19): siRNA sense strand
ucucuucgauuucggaugu

SEQ ID NO: 1657332 - RNA, 19 nt, Homo sapiens
  misc_RNA (1)...(19): siRNA sense strand
aacgagagcaggagaguaa

SEQ ID NO: 1657333 - RNA, 19 nt, Homo sapiens
  misc_RNA (1)...(19): siRNA sense strand
gaaaagacgagaucagugu

SEQ ID NO: 1657334 - RNA, 19 nt, Homo sapiens
  misc_RNA (1)...(19): siRNA sense strand
ucaggauguucgacagaaa

SEQ ID NO: 1657335 - RNA, 19 nt, Homo sapiens
  misc_RNA (1)...(19): siRNA sense strand
ucacaucaacuccauaucu

SEQ ID NO: 1657336 - RNA, 19 nt, Homo sapiens
  misc_RNA (1)...(19): siRNA sense strand
caguggcggcuacaaauaa

SEQ ID NO: 1657337 - RNA, 19 nt, Homo sapiens
  misc_RNA (1)...(19): siRNA sense strand
ucugggaucucaacaugga

SEQ ID NO: 1657338 - RNA, 19 nt, Homo sapiens
  misc_RNA (1)...(19): siRNA sense strand
agugggagguauaucauga

SEQ ID NO: 1657339 - RNA, 19 nt, Homo sapiens
  misc_RNA (1)...(19): siRNA sense strand
acacauaucacaucaacuc

SEQ ID NO: 1657340 - RNA, 19 nt, Homo sapiens
  misc_RNA (1)...(19): siRNA sense strand
cagcuuggcauccuucaga

SEQ ID NO: 1657341 - RNA, 19 nt, Homo sapiens
  misc_RNA (1)...(19): siRNA sense strand
ggaaugggucagacagugu

SEQ ID NO: 1657342 - RNA, 19 nt, Homo sapiens
  misc_RNA (1)...(19): siRNA sense strand
gucaaagucugggaucuca

SEQ ID NO: 1657343 - RNA, 19 nt, Homo sapiens
  misc_RNA (1)...(19): siRNA sense strand
gugacaggcacaccaaauu

SEQ ID NO: 1657344 - RNA, 19 nt, Homo sapiens
  misc_RNA (1)...(19): siRNA sense strand
caacagcgacuaugaaacc

SEQ ID NO: 1657345 - RNA, 19 nt, Homo sapiens
  misc_RNA (1)...(19): siRNA sense strand
cacaucaacuccauaucug

SEQ ID NO: 1657346 - RNA, 19 nt, Homo sapiens
  misc_RNA (1)...(19): siRNA sense strand
uuucuucugucuacuaaug

SEQ ID NO: 1657347 - RNA, 19 nt, Homo sapiens
  misc_RNA (1)...(19): siRNA sense strand
cauaucacaucaacuccau

SEQ ID NO: 1657348 - RNA, 19 nt, Homo sapiens
  misc_RNA (1)...(19): siRNA sense strand
ccaacgcacacacauauca

SEQ ID NO: 1657349 - RNA, 19 nt, Homo sapiens
  misc_RNA (1)...(19): siRNA sense strand
agucugggaucucaacaug

SEQ ID NO: 1657350 - RNA, 19 nt, Homo sapiens
  misc_RNA (1)...(19): siRNA sense strand
gucaacagcgacuaugaaa

SEQ ID NO: 1657351 - RNA, 19 nt, Homo sapiens
  misc_RNA (1)...(19): siRNA sense strand
cuuaccagguucaugacua

SEQ ID NO: 1657352 - RNA, 19 nt, Homo sapiens
  misc_RNA (1)...(19): siRNA sense strand
ggaagauccaagcaacaga

SEQ ID NO: 1657353 - RNA, 19 nt, Homo sapiens
  misc_RNA (1)...(19): siRNA sense strand
uaucacaucaacuccauau

SEQ ID NO: 1657354 - RNA, 19 nt, Homo sapiens
  misc_RNA (1)...(19): siRNA sense strand
gauuucggaugugaaguuc

SEQ ID NO: 1657355 - RNA, 19 nt, Homo sapiens
  misc_RNA (1)...(19): siRNA sense strand
gcauacagcuuggcauccu

SEQ ID NO: 1657356 - RNA, 19 nt, Homo sapiens
  misc_RNA (1)...(19): siRNA sense strand
acaacaacuucuucaggau

SEQ ID NO: 1657357 - RNA, 19 nt, Homo sapiens
  misc_RNA (1)...(19): siRNA sense strand
caacgagagcaggagagua

SEQ ID NO: 1657358 - RNA, 19 nt, Homo sapiens
  misc_RNA (1)...(19): siRNA sense strand
ugacaggcuccuacaacaa

SEQ ID NO: 1657359 - RNA, 19 nt, Homo sapiens
  misc_RNA (1)...(19): siRNA sense strand
uaaccuauggaacuuugaa

SEQ ID NO: 1657360 - RNA, 19 nt, Homo sapiens
  misc_RNA (1)...(19): siRNA sense strand
cgauuucggaugugaaguu

SEQ ID NO: 1657361 - RNA, 19 nt, Homo sapiens
  misc_RNA (1)...(19): siRNA sense strand
agaaggcuacaaucugaaa

SEQ ID NO: 1657362 - RNA, 19 nt, Homo sapiens
  misc_RNA (1)...(19): siRNA sense strand
uaccugaagaguuuagaaa

SEQ ID NO: 1657363 - RNA, 19 nt, Homo sapiens
  misc_RNA (1)...(19): siRNA sense strand
ccaagcaacagaucauuuu

SEQ ID NO: 1657364 - RNA, 19 nt, Homo sapiens
  misc_RNA (1)...(19): siRNA sense strand
gaaagucagcgagcgugau

SEQ ID NO: 1657365 - RNA, 19 nt, Homo sapiens
  misc_RNA (1)...(19): siRNA sense strand
cggcuacaaauaaccuaua

SEQ ID NO: 1657366 - RNA, 19 nt, Homo sapiens
  misc_RNA (1)...(19): siRNA sense strand
ggccagaaggcuacaaucu

SEQ ID NO: 1657367 - RNA, 19 nt, Homo sapiens
  misc_RNA (1)...(19): siRNA sense strand
gcuguguucccucuaugaa

SEQ ID NO: 1657368 - RNA, 19 nt, Homo sapiens
  misc_RNA (1)...(19): siRNA sense strand
gauccugccaccaucacaa

SEQ ID NO: 1657369 - RNA, 19 nt, Homo sapiens
  misc_RNA (1)...(19): siRNA sense strand
aaacugugaagcuguggaa

SEQ ID NO: 1657370 - RNA, 19 nt, Homo sapiens
  misc_RNA (1)...(19): siRNA sense strand
gaaacaccaagcgugaugu

SEQ ID NO: 1657371 - RNA, 19 nt, Homo sapiens
  misc_RNA (1)...(19): siRNA sense strand
agaaacaccaagcgugaug

SEQ ID NO: 1657372 - RNA, 19 nt, Homo sapiens
  misc_RNA (1)...(19): siRNA sense strand
cccagcagaaugcagcuua

SEQ ID NO: 1657373 - RNA, 19 nt, Homo sapiens
  misc_RNA (1)...(19): siRNA sense strand
gugaauacaauguuuacag

SEQ ID NO: 1657374 - RNA, 19 nt, Homo sapiens
  misc_RNA (1)...(19): siRNA sense strand
ugccaacgcacacacauau

SEQ ID NO: 1657375 - RNA, 19 nt, Homo sapiens
  misc_RNA (1)...(19): siRNA sense strand
ugucaacagcgacuaugaa

SEQ ID NO: 1657376 - RNA, 19 nt, Homo sapiens
  misc_RNA (1)...(19): siRNA sense strand
aacaacuucuucaggaugu

SEQ ID NO: 1657377 - RNA, 19 nt, Homo sapiens
  misc_RNA (1)...(19): siRNA sense strand
gacaggcuccuacaacaac

SEQ ID NO: 1657378 - RNA, 19 nt, Homo sapiens
  misc_RNA (1)...(19): siRNA sense strand
cagaaugcagcuuacuuuc

SEQ ID NO: 1657379 - RNA, 19 nt, Homo sapiens
  misc_RNA (1)...(19): siRNA sense strand
ucaacuccauaucugucaa

SEQ ID NO: 1657380 - RNA, 19 nt, Homo sapiens
  misc_RNA (1)...(19): siRNA sense strand
cacagugggagguauauca

SEQ ID NO: 1657381 - RNA, 19 nt, Homo sapiens
  misc_RNA (1)...(19): siRNA sense strand
cugaaauuaucucuucgau

SEQ ID NO: 1657382 - RNA, 19 nt, Homo sapiens
  misc_RNA (1)...(19): siRNA sense strand
gauuaaccuauggaacuuu

SEQ ID NO: 1657383 - RNA, 19 nt, Homo sapiens
  misc_RNA (1)...(19): siRNA sense strand
ucagcgagcgugauaagag

SEQ ID NO: 1657384 - RNA, 19 nt, Homo sapiens
  misc_RNA (1)...(19): siRNA sense strand
uuaccagguucaugacuac

SEQ ID NO: 1657385 - RNA, 19 nt, Homo sapiens
  misc_RNA (1)...(19): siRNA sense strand
cugugaagcuguggaaagu

SEQ ID NO: 1657386 - RNA, 19 nt, Homo sapiens
  misc_RNA (1)...(19): siRNA sense strand
gcaucugcccugugugaca

SEQ ID NO: 1657387 - RNA, 19 nt, Homo sapiens
  misc_RNA (1)...(19): siRNA sense strand
auuaaccuauggaacuuug

SEQ ID NO: 1657388 - RNA, 19 nt, Homo sapiens
  misc_RNA (1)...(19): siRNA sense strand
gacauuaagccagccaaca

SEQ ID NO: 1657389 - RNA, 19 nt, Homo sapiens
  misc_RNA (1)...(19): siRNA sense strand
cauacagcuuggcauccuu

SEQ ID NO: 1657390 - RNA, 19 nt, Homo sapiens
  misc_RNA (1)...(19): siRNA sense strand
gcuccuacaacaacuucuu

SEQ ID NO: 1657391 - RNA, 19 nt, Homo sapiens
  misc_RNA (1)...(19): siRNA sense strand
caaagucugggaucucaac

SEQ ID NO: 1657392 - RNA, 19 nt, Homo sapiens
  misc_RNA (1)...(19): siRNA sense strand
gaaugcagcuuacuuucuu

SEQ ID NO: 1657393 - RNA, 19 nt, Homo sapiens
  misc_RNA (1)...(19): siRNA sense strand
ucgauuaccugaagaguuu

SEQ ID NO: 1657394 - RNA, 19 nt, Homo sapiens
  misc_RNA (1)...(19): siRNA sense strand
gcacacacauaucacauca

SEQ ID NO: 1657395 - RNA, 19 nt, Homo sapiens
  misc_RNA (1)...(19): siRNA sense strand
ccugaagaguuuagaaaua

SEQ ID NO: 1657396 - RNA, 19 nt, Homo sapiens
  misc_RNA (1)...(19): siRNA sense strand
gcugaugaccugaggauua

SEQ ID NO: 1657397 - RNA, 19 nt, Homo sapiens
  misc_RNA (1)...(19): siRNA sense strand
caaccacacgggagaauua

SEQ ID NO: 1657398 - RNA, 19 nt, Homo sapiens
  misc_RNA (1)...(19): siRNA sense strand
gcagaaugcagcuuacuuu

SEQ ID NO: 1657399 - RNA, 19 nt, Homo sapiens
  misc_RNA (1)...(19): siRNA sense strand
caucgagacuuaccagguu

SEQ ID NO: 1657400 - RNA, 19 nt, Homo sapiens
  misc_RNA (1)...(19): siRNA sense strand
gcaguggcggcuacaaaua

SEQ ID NO: 1657401 - RNA, 19 nt, Homo sapiens
  misc_RNA (1)...(19): siRNA sense strand
ggauuaaccuauggaacuu

SEQ ID NO: 1657402 - RNA, 19 nt, Homo sapiens
  misc_RNA (1)...(19): siRNA sense strand
gaucacagcagccgaguuc

SEQ ID NO: 1657403 - RNA, 19 nt, Homo sapiens
  misc_RNA (1)...(19): siRNA sense strand
ggacaauccggcuguguga

SEQ ID NO: 1657404 - RNA, 19 nt, Homo sapiens
  misc_RNA (1)...(19): siRNA sense strand
gcagcuuacuuucuucugu

SEQ ID NO: 1657405 - RNA, 19 nt, Homo sapiens
  misc_RNA (1)...(19): siRNA sense strand
ccuauggaacuuugaaaua

SEQ ID NO: 1657406 - RNA, 19 nt, Homo sapiens
  misc_RNA (1)...(19): siRNA sense strand
cugaugaccugaggauuaa

SEQ ID NO: 1657407 - RNA, 19 nt, Homo sapiens
  misc_RNA (1)...(19): siRNA sense strand
ucucugaaauuaucucuuc

SEQ ID NO: 1657408 - RNA, 19 nt, Homo sapiens
  misc_RNA (1)...(19): siRNA sense strand
ugacaggcacaccaaauuu

SEQ ID NO: 1657409 - RNA, 19 nt, Homo sapiens
  misc_RNA (1)...(19): siRNA sense strand
gugaagcuguggaaaguca

SEQ ID NO: 1657410 - RNA, 19 nt, Homo sapiens
  misc_RNA (1)...(19): siRNA sense strand
caagcuguguucccucuau

SEQ ID NO: 1657411 - RNA, 19 nt, Homo sapiens
  misc_RNA (1)...(19): siRNA sense strand
cgaguucgauuaccugaag

SEQ ID NO: 1657412 - RNA, 19 nt, Homo sapiens
  misc_RNA (1)...(19): siRNA sense strand
agacuuaccagguucauga

SEQ ID NO: 1657413 - RNA, 19 nt, Homo sapiens
  misc_RNA (1)...(19): siRNA sense strand
gggucggguuguaauauuu

SEQ ID NO: 1657414 - RNA, 19 nt, Homo sapiens
  misc_RNA (1)...(19): siRNA sense strand
ccacacgggagaauuacua

SEQ ID NO: 1657415 - RNA, 19 nt, Homo sapiens
  misc_RNA (1)...(19): siRNA sense strand
gaagauccaagcaacagau

SEQ ID NO: 1657416 - RNA, 19 nt, Homo sapiens
  misc_RNA (1)...(19): siRNA sense strand
cugaagaguuuagaaauag

SEQ ID NO: 1657417 - RNA, 19 nt, Homo sapiens
  misc_RNA (1)...(19): siRNA sense strand
cgagaucagugucgacagu

SEQ ID NO: 1657418 - RNA, 19 nt, Homo sapiens
  misc_RNA (1)...(19): siRNA sense strand
aaagucagcgagcgugaua

SEQ ID NO: 1657419 - RNA, 19 nt, Homo sapiens
  misc_RNA (1)...(19): siRNA sense strand
gaccugaggauuaaccuau

SEQ ID NO: 1657420 - RNA, 19 nt, Homo sapiens
  misc_RNA (1)...(19): siRNA sense strand
gcacauuccagagccauga

SEQ ID NO: 1657421 - RNA, 19 nt, Homo sapiens
  misc_RNA (1)...(19): siRNA sense strand
ggcuacaaauaaccuauau

SEQ ID NO: 1657422 - RNA, 19 nt, Homo sapiens
  misc_RNA (1)...(19): siRNA sense strand
acacacauaucacaucaac

SEQ ID NO: 1657423 - RNA, 19 nt, Homo sapiens
  misc_RNA (1)...(19): siRNA sense strand
ucucuucgauuucggaugu

SEQ ID NO: 1657424 - RNA, 19 nt, Homo sapiens
  misc_RNA (1)...(19): siRNA sense strand
aacgagagcaggagaguaa

SEQ ID NO: 1657425 - RNA, 19 nt, Homo sapiens
  misc_RNA (1)...(19): siRNA sense strand
gaaaagacgagaucagugu

SEQ ID NO: 1657426 - RNA, 19 nt, Homo sapiens
  misc_RNA (1)...(19): siRNA sense strand
ucaggauguucgacagaaa

SEQ ID NO: 1657427 - RNA, 19 nt, Homo sapiens
  misc_RNA (1)...(19): siRNA sense strand
ucacaucaacuccauaucu

SEQ ID NO: 1657428 - RNA, 19 nt, Homo sapiens
  misc_RNA (1)...(19): siRNA sense strand
caguggcggcuacaaauaa

SEQ ID NO: 1657429 - RNA, 19 nt, Homo sapiens
  misc_RNA (1)...(19): siRNA sense strand
ucugggaucucaacaugga

SEQ ID NO: 1657430 - RNA, 19 nt, Homo sapiens
  misc_RNA (1)...(19): siRNA sense strand
agugggagguauaucauga

SEQ ID NO: 1657431 - RNA, 19 nt, Homo sapiens
  misc_RNA (1)...(19): siRNA sense strand
acacauaucacaucaacuc

SEQ ID NO: 1657432 - RNA, 19 nt, Homo sapiens
  misc_RNA (1)...(19): siRNA sense strand
cagcuuggcauccuucaga

SEQ ID NO: 1657433 - RNA, 19 nt, Homo sapiens
  misc_RNA (1)...(19): siRNA sense strand
ggaaugggucagacagugu

SEQ ID NO: 1657434 - RNA, 19 nt, Homo sapiens
  misc_RNA (1)...(19): siRNA sense strand
gucaaagucugggaucuca

SEQ ID NO: 1657435 - RNA, 19 nt, Homo sapiens
  misc_RNA (1)...(19): siRNA sense strand
gugacaggcacaccaaauu

SEQ ID NO: 1657436 - RNA, 19 nt, Homo sapiens
  misc_RNA (1)...(19): siRNA sense strand
caacagcgacuaugaaacc

SEQ ID NO: 1657437 - RNA, 19 nt, Homo sapiens
  misc_RNA (1)...(19): siRNA sense strand
cacaucaacuccauaucug

SEQ ID NO: 1657438 - RNA, 19 nt, Homo sapiens
  misc_RNA (1)...(19): siRNA sense strand
uuucuucugucuacuaaug

SEQ ID NO: 1657439 - RNA, 19 nt, Homo sapiens
  misc_RNA (1)...(19): siRNA sense strand
cauaucacaucaacuccau

SEQ ID NO: 1657440 - RNA, 19 nt, Homo sapiens
  misc_RNA (1)...(19): siRNA sense strand
ccaacgcacacacauauca

SEQ ID NO: 1657441 - RNA, 19 nt, Homo sapiens
  misc_RNA (1)...(19): siRNA sense strand
agucugggaucucaacaug

SEQ ID NO: 1657442 - RNA, 19 nt, Homo sapiens
  misc_RNA (1)...(19): siRNA sense strand
gucaacagcgacuaugaaa

SEQ ID NO: 1657443 - RNA, 19 nt, Homo sapiens
  misc_RNA (1)...(19): siRNA sense strand
cuuaccagguucaugacua

SEQ ID NO: 1657444 - RNA, 19 nt, Homo sapiens
  misc_RNA (1)...(19): siRNA sense strand
ggaagauccaagcaacaga

SEQ ID NO: 1657445 - RNA, 19 nt, Homo sapiens
  misc_RNA (1)...(19): siRNA sense strand
uaucacaucaacuccauau

SEQ ID NO: 1657446 - RNA, 19 nt, Homo sapiens
  misc_RNA (1)...(19): siRNA sense strand
gauuucggaugugaaguuc

SEQ ID NO: 1657447 - RNA, 19 nt, Homo sapiens
  misc_RNA (1)...(19): siRNA sense strand
gcauacagcuuggcauccu

SEQ ID NO: 1657448 - RNA, 19 nt, Homo sapiens
  misc_RNA (1)...(19): siRNA sense strand
acaacaacuucuucaggau

SEQ ID NO: 1657449 - RNA, 19 nt, Homo sapiens
  misc_RNA (1)...(19): siRNA sense strand
caacgagagcaggagagua

SEQ ID NO: 1657450 - RNA, 19 nt, Homo sapiens
  misc_RNA (1)...(19): siRNA sense strand
ugacaggcuccuacaacaa

SEQ ID NO: 1657451 - RNA, 19 nt, Homo sapiens
  misc_RNA (1)...(19): siRNA sense strand
uaaccuauggaacuuugaa

SEQ ID NO: 1657452 - RNA, 19 nt, Homo sapiens
  misc_RNA (1)...(19): siRNA sense strand
cgauuucggaugugaaguu

SEQ ID NO: 1657453 - RNA, 19 nt, Homo sapiens
  misc_RNA (1)...(19): siRNA sense strand
agaaggcuacaaucugaaa

SEQ ID NO: 1657454 - RNA, 19 nt, Homo sapiens
  misc_RNA (1)...(19): siRNA sense strand
uaccugaagaguuuagaaa

SEQ ID NO: 1657455 - RNA, 19 nt, Homo sapiens
  misc_RNA (1)...(19): siRNA sense strand
ccaagcaacagaucauuuu

SEQ ID NO: 1657456 - RNA, 19 nt, Homo sapiens
  misc_RNA (1)...(19): siRNA sense strand
gaaagucagcgagcgugau

SEQ ID NO: 1657457 - RNA, 19 nt, Homo sapiens
  misc_RNA (1)...(19): siRNA sense strand
cggcuacaaauaaccuaua

SEQ ID NO: 1657458 - RNA, 19 nt, Homo sapiens
  misc_RNA (1)...(19): siRNA sense strand
ggccagaaggcuacaaucu

SEQ ID NO: 1657459 - RNA, 19 nt, Homo sapiens
  misc_RNA (1)...(19): siRNA sense strand
gcuguguucccucuaugaa

SEQ ID NO: 1657460 - RNA, 19 nt, Homo sapiens
  misc_RNA (1)...(19): siRNA sense strand
gauccugccaccaucacaa

SEQ ID NO: 1657461 - RNA, 19 nt, Homo sapiens
  misc_RNA (1)...(19): siRNA sense strand
aaacugugaagcuguggaa

SEQ ID NO: 1657462 - RNA, 19 nt, Homo sapiens
  misc_RNA (1)...(19): siRNA sense strand
gaaacaccaagcgugaugu

SEQ ID NO: 1657463 - RNA, 19 nt, Homo sapiens
  misc_RNA (1)...(19): siRNA sense strand
agaaacaccaagcgugaug

SEQ ID NO: 1657464 - RNA, 19 nt, Homo sapiens
  misc_RNA (1)...(19): siRNA sense strand
cccagcagaaugcagcuua

SEQ ID NO: 1657465 - RNA, 19 nt, Homo sapiens
  misc_RNA (1)...(19): siRNA sense strand
gugaauacaauguuuacag

SEQ ID NO: 1657466 - RNA, 19 nt, Homo sapiens
  misc_RNA (1)...(19): siRNA sense strand
ugccaacgcacacacauau

SEQ ID NO: 1657467 - RNA, 19 nt, Homo sapiens
  misc_RNA (1)...(19): siRNA sense strand
ugucaacagcgacuaugaa

SEQ ID NO: 1657468 - RNA, 19 nt, Homo sapiens
  misc_RNA (1)...(19): siRNA sense strand
aacaacuucuucaggaugu

SEQ ID NO: 1657469 - RNA, 19 nt, Homo sapiens
  misc_RNA (1)...(19): siRNA sense strand
gacaggcuccuacaacaac

SEQ ID NO: 1657470 - RNA, 19 nt, Homo sapiens
  misc_RNA (1)...(19): siRNA sense strand
cagaaugcagcuuacuuuc

SEQ ID NO: 1657471 - RNA, 19 nt, Homo sapiens
  misc_RNA (1)...(19): siRNA sense strand
ucaacuccauaucugucaa

SEQ ID NO: 1657472 - RNA, 19 nt, Homo sapiens
  misc_RNA (1)...(19): siRNA sense strand
cacagugggagguauauca

SEQ ID NO: 1657473 - RNA, 19 nt, Homo sapiens
  misc_RNA (1)...(19): siRNA sense strand
cugaaauuaucucuucgau

SEQ ID NO: 1657474 - RNA, 19 nt, Homo sapiens
  misc_RNA (1)...(19): siRNA sense strand
gauuaaccuauggaacuuu

SEQ ID NO: 1657475 - RNA, 19 nt, Homo sapiens
  misc_RNA (1)...(19): siRNA sense strand
ucagcgagcgugauaagag

SEQ ID NO: 1657476 - RNA, 19 nt, Homo sapiens
  misc_RNA (1)...(19): siRNA sense strand
uuaccagguucaugacuac

SEQ ID NO: 1657477 - RNA, 19 nt, Homo sapiens
  misc_RNA (1)...(19): siRNA sense strand
cugugaagcuguggaaagu

SEQ ID NO: 1657478 - RNA, 19 nt, Homo sapiens
  misc_RNA (1)...(19): siRNA sense strand
gcaucugcccugugugaca

SEQ ID NO: 1657479 - RNA, 19 nt, Homo sapiens
  misc_RNA (1)...(19): siRNA sense strand
auuaaccuauggaacuuug

SEQ ID NO: 1657480 - RNA, 19 nt, Homo sapiens
  misc_RNA (1)...(19): siRNA sense strand
gacauuaagccagccaaca

SEQ ID NO: 1657481 - RNA, 19 nt, Homo sapiens
  misc_RNA (1)...(19): siRNA sense strand
cauacagcuuggcauccuu

SEQ ID NO: 1657482 - RNA, 19 nt, Homo sapiens
  misc_RNA (1)...(19): siRNA sense strand
gcuccuacaacaacuucuu

SEQ ID NO: 1657483 - RNA, 19 nt, Homo sapiens
  misc_RNA (1)...(19): siRNA sense strand
caaagucugggaucucaac

SEQ ID NO: 1657484 - RNA, 19 nt, Homo sapiens
  misc_RNA (1)...(19): siRNA sense strand
gaaugcagcuuacuuucuu

SEQ ID NO: 1657485 - RNA, 19 nt, Homo sapiens
  misc_RNA (1)...(19): siRNA sense strand
ucgauuaccugaagaguuu

SEQ ID NO: 1657486 - RNA, 19 nt, Homo sapiens
  misc_RNA (1)...(19): siRNA sense strand
gcacacacauaucacauca

SEQ ID NO: 1657487 - RNA, 19 nt, Homo sapiens
  misc_RNA (1)...(19): siRNA sense strand
ccugaagaguuuagaaaua

SEQ ID NO: 1657488 - RNA, 19 nt, Homo sapiens
  misc_RNA (1)...(19): siRNA sense strand
gcugaugaccugaggauua

SEQ ID NO: 1657489 - RNA, 19 nt, Homo sapiens
  misc_RNA (1)...(19): siRNA sense strand
caaccacacgggagaauua

SEQ ID NO: 1657490 - RNA, 19 nt, Homo sapiens
  misc_RNA (1)...(19): siRNA sense strand
gcagaaugcagcuuacuuu

SEQ ID NO: 1657491 - RNA, 19 nt, Homo sapiens
  misc_RNA (1)...(19): siRNA sense strand
caucgagacuuaccagguu

SEQ ID NO: 1657492 - RNA, 19 nt, Homo sapiens
  misc_RNA (1)...(19): siRNA sense strand
gcaguggcggcuacaaaua

SEQ ID NO: 1657493 - RNA, 19 nt, Homo sapiens
  misc_RNA (1)...(19): siRNA sense strand
ggauuaaccuauggaacuu

SEQ ID NO: 1657494 - RNA, 19 nt, Homo sapiens
  misc_RNA (1)...(19): siRNA sense strand
gaucacagcagccgaguuc

SEQ ID NO: 1657495 - RNA, 19 nt, Homo sapiens
  misc_RNA (1)...(19): siRNA sense strand
ggacaauccggcuguguga

SEQ ID NO: 1657496 - RNA, 19 nt, Homo sapiens
  misc_RNA (1)...(19): siRNA sense strand
gcagcuuacuuucuucugu

SEQ ID NO: 1657497 - RNA, 19 nt, Homo sapiens
  misc_RNA (1)...(19): siRNA sense strand
ccuauggaacuuugaaaua

SEQ ID NO: 1657498 - RNA, 19 nt, Homo sapiens
  misc_RNA (1)...(19): siRNA sense strand
cugaugaccugaggauuaa

SEQ ID NO: 1657499 - RNA, 19 nt, Homo sapiens
  misc_RNA (1)...(19): siRNA sense strand
ucucugaaauuaucucuuc

SEQ ID NO: 1657500 - RNA, 19 nt, Homo sapiens
  misc_RNA (1)...(19): siRNA sense strand
ugacaggcacaccaaauuu

SEQ ID NO: 1657501 - RNA, 19 nt, Homo sapiens
  misc_RNA (1)...(19): siRNA sense strand
gugaagcuguggaaaguca

SEQ ID NO: 1657502 - RNA, 19 nt, Homo sapiens
  misc_RNA (1)...(19): siRNA sense strand
caagcuguguucccucuau

SEQ ID NO: 1657503 - RNA, 19 nt, Homo sapiens
  misc_RNA (1)...(19): siRNA sense strand
cgaguucgauuaccugaag

SEQ ID NO: 1657504 - RNA, 19 nt, Homo sapiens
  misc_RNA (1)...(19): siRNA sense strand
agacuuaccagguucauga

SEQ ID NO: 1657505 - RNA, 19 nt, Homo sapiens
  misc_RNA (1)...(19): siRNA sense strand
gggucggguuguaauauuu

SEQ ID NO: 1657506 - RNA, 19 nt, Homo sapiens
  misc_RNA (1)...(19): siRNA sense strand
ccacacgggagaauuacua

SEQ ID NO: 1657507 - RNA, 19 nt, Homo sapiens
  misc_RNA (1)...(19): siRNA sense strand
gaagauccaagcaacagau

SEQ ID NO: 1657508 - RNA, 19 nt, Homo sapiens
  misc_RNA (1)...(19): siRNA sense strand
cugaagaguuuagaaauag

SEQ ID NO: 1657509 - RNA, 19 nt, Homo sapiens
  misc_RNA (1)...(19): siRNA sense strand
cgagaucagugucgacagu

SEQ ID NO: 1657510 - RNA, 19 nt, Homo sapiens
  misc_RNA (1)...(19): siRNA sense strand
aaagucagcgagcgugaua

SEQ ID NO: 1657511 - RNA, 19 nt, Homo sapiens
  misc_RNA (1)...(19): siRNA sense strand
gaccugaggauuaaccuau

SEQ ID NO: 1657512 - RNA, 19 nt, Homo sapiens
  misc_RNA (1)...(19): siRNA sense strand
gcacauuccagagccauga

SEQ ID NO: 1657513 - RNA, 19 nt, Homo sapiens
  misc_RNA (1)...(19): siRNA sense strand
ggcuacaaauaaccuauau

SEQ ID NO: 1657514 - RNA, 19 nt, Homo sapiens
  misc_RNA (1)...(19): siRNA sense strand
acacacauaucacaucaac

SEQ ID NO: 1657515 - RNA, 19 nt, Homo sapiens
  misc_RNA (1)...(19): siRNA sense strand
ucucuucgauuucggaugu

SEQ ID NO: 1657516 - RNA, 19 nt, Homo sapiens
  misc_RNA (1)...(19): siRNA sense strand
aacgagagcaggagaguaa

SEQ ID NO: 1657517 - RNA, 19 nt, Homo sapiens
  misc_RNA (1)...(19): siRNA sense strand
gaaaagacgagaucagugu

SEQ ID NO: 1657518 - RNA, 19 nt, Homo sapiens
  misc_RNA (1)...(19): siRNA sense strand
ucaggauguucgacagaaa

SEQ ID NO: 1657519 - RNA, 19 nt, Homo sapiens
  misc_RNA (1)...(19): siRNA sense strand
ucacaucaacuccauaucu

SEQ ID NO: 1657520 - RNA, 19 nt, Homo sapiens
  misc_RNA (1)...(19): siRNA sense strand
caguggcggcuacaaauaa

SEQ ID NO: 1657521 - RNA, 19 nt, Homo sapiens
  misc_RNA (1)...(19): siRNA sense strand
ucugggaucucaacaugga

SEQ ID NO: 1657522 - RNA, 19 nt, Homo sapiens
  misc_RNA (1)...(19): siRNA sense strand
agugggagguauaucauga

SEQ ID NO: 1657523 - RNA, 19 nt, Homo sapiens
  misc_RNA (1)...(19): siRNA sense strand
acacauaucacaucaacuc

SEQ ID NO: 1657524 - RNA, 19 nt, Homo sapiens
  misc_RNA (1)...(19): siRNA sense strand
cagcuuggcauccuucaga

SEQ ID NO: 1657525 - RNA, 19 nt, Homo sapiens
  misc_RNA (1)...(19): siRNA sense strand
ggaaugggucagacagugu

SEQ ID NO: 1657526 - RNA, 19 nt, Homo sapiens
  misc_RNA (1)...(19): siRNA sense strand
gucaaagucugggaucuca

SEQ ID NO: 1657527 - RNA, 19 nt, Homo sapiens
  misc_RNA (1)...(19): siRNA sense strand
gugacaggcacaccaaauu

SEQ ID NO: 1657528 - RNA, 19 nt, Homo sapiens
  misc_RNA (1)...(19): siRNA sense strand
caacagcgacuaugaaacc

SEQ ID NO: 1657529 - RNA, 19 nt, Homo sapiens
  misc_RNA (1)...(19): siRNA sense strand
cacaucaacuccauaucug

SEQ ID NO: 1657530 - RNA, 19 nt, Homo sapiens
  misc_RNA (1)...(19): siRNA sense strand
uuucuucugucuacuaaug

SEQ ID NO: 1657531 - RNA, 19 nt, Homo sapiens
  misc_RNA (1)...(19): siRNA sense strand
cauaucacaucaacuccau

SEQ ID NO: 1657532 - RNA, 19 nt, Homo sapiens
  misc_RNA (1)...(19): siRNA sense strand
ccaacgcacacacauauca

SEQ ID NO: 1657533 - RNA, 19 nt, Homo sapiens
  misc_RNA (1)...(19): siRNA sense strand
agucugggaucucaacaug

SEQ ID NO: 1657534 - RNA, 19 nt, Homo sapiens
  misc_RNA (1)...(19): siRNA sense strand
gucaacagcgacuaugaaa

SEQ ID NO: 1657535 - RNA, 19 nt, Homo sapiens
  misc_RNA (1)...(19): siRNA sense strand
cuuaccagguucaugacua

SEQ ID NO: 1657536 - RNA, 19 nt, Homo sapiens
  misc_RNA (1)...(19): siRNA sense strand
ggaagauccaagcaacaga

SEQ ID NO: 1657537 - RNA, 19 nt, Homo sapiens
  misc_RNA (1)...(19): siRNA sense strand
uaucacaucaacuccauau

SEQ ID NO: 1657538 - RNA, 19 nt, Homo sapiens
  misc_RNA (1)...(19): siRNA sense strand
gauuucggaugugaaguuc

SEQ ID NO: 1657539 - RNA, 19 nt, Homo sapiens
  misc_RNA (1)...(19): siRNA sense strand
gcauacagcuuggcauccu

SEQ ID NO: 1657540 - RNA, 19 nt, Homo sapiens
  misc_RNA (1)...(19): siRNA sense strand
acaacaacuucuucaggau

SEQ ID NO: 1657541 - RNA, 19 nt, Homo sapiens
  misc_RNA (1)...(19): siRNA sense strand
caacgagagcaggagagua

SEQ ID NO: 1657542 - RNA, 19 nt, Homo sapiens
  misc_RNA (1)...(19): siRNA sense strand
ugacaggcuccuacaacaa

SEQ ID NO: 1657543 - RNA, 19 nt, Homo sapiens
  misc_RNA (1)...(19): siRNA sense strand
uaaccuauggaacuuugaa

SEQ ID NO: 1657544 - RNA, 19 nt, Homo sapiens
  misc_RNA (1)...(19): siRNA sense strand
cgauuucggaugugaaguu

SEQ ID NO: 1657545 - RNA, 19 nt, Homo sapiens
  misc_RNA (1)...(19): siRNA sense strand
agaaggcuacaaucugaaa

SEQ ID NO: 1657546 - RNA, 19 nt, Homo sapiens
  misc_RNA (1)...(19): siRNA sense strand
uaccugaagaguuuagaaa

SEQ ID NO: 1657547 - RNA, 19 nt, Homo sapiens
  misc_RNA (1)...(19): siRNA sense strand
ccaagcaacagaucauuuu

SEQ ID NO: 1657548 - RNA, 19 nt, Homo sapiens
  misc_RNA (1)...(19): siRNA sense strand
gaaagucagcgagcgugau

SEQ ID NO: 1657549 - RNA, 19 nt, Homo sapiens
  misc_RNA (1)...(19): siRNA sense strand
cggcuacaaauaaccuaua

SEQ ID NO: 1657550 - RNA, 19 nt, Homo sapiens
  misc_RNA (1)...(19): siRNA sense strand
ggccagaaggcuacaaucu

SEQ ID NO: 1657551 - RNA, 19 nt, Homo sapiens
  misc_RNA (1)...(19): siRNA sense strand
gcuguguucccucuaugaa

SEQ ID NO: 1657552 - RNA, 19 nt, Homo sapiens
  misc_RNA (1)...(19): siRNA sense strand
gauccugccaccaucacaa

SEQ ID NO: 1657553 - RNA, 19 nt, Homo sapiens
  misc_RNA (1)...(19): siRNA sense strand
aaacugugaagcuguggaa

SEQ ID NO: 1657554 - RNA, 19 nt, Homo sapiens
  misc_RNA (1)...(19): siRNA sense strand
gaaacaccaagcgugaugu

SEQ ID NO: 1657555 - RNA, 19 nt, Homo sapiens
  misc_RNA (1)...(19): siRNA sense strand
agaaacaccaagcgugaug

SEQ ID NO: 1657556 - RNA, 19 nt, Homo sapiens
  misc_RNA (1)...(19): siRNA sense strand
cccagcagaaugcagcuua

SEQ ID NO: 1657557 - RNA, 19 nt, Homo sapiens
  misc_RNA (1)...(19): siRNA sense strand
gugaauacaauguuuacag

SEQ ID NO: 1657558 - RNA, 19 nt, Homo sapiens
  misc_RNA (1)...(19): siRNA sense strand
ugccaacgcacacacauau

SEQ ID NO: 1657559 - RNA, 19 nt, Homo sapiens
  misc_RNA (1)...(19): siRNA sense strand
ugucaacagcgacuaugaa

SEQ ID NO: 1657560 - RNA, 19 nt, Homo sapiens
  misc_RNA (1)...(19): siRNA sense strand
aacaacuucuucaggaugu

SEQ ID NO: 1657561 - RNA, 19 nt, Homo sapiens
  misc_RNA (1)...(19): siRNA sense strand
gacaggcuccuacaacaac

SEQ ID NO: 1657562 - RNA, 19 nt, Homo sapiens
  misc_RNA (1)...(19): siRNA sense strand
cagaaugcagcuuacuuuc

SEQ ID NO: 1657563 - RNA, 19 nt, Homo sapiens
  misc_RNA (1)...(19): siRNA sense strand
ucaacuccauaucugucaa

SEQ ID NO: 1657564 - RNA, 19 nt, Homo sapiens
  misc_RNA (1)...(19): siRNA sense strand
cacagugggagguauauca

SEQ ID NO: 1657565 - RNA, 19 nt, Homo sapiens
  misc_RNA (1)...(19): siRNA sense strand
cugaaauuaucucuucgau

SEQ ID NO: 1657566 - RNA, 19 nt, Homo sapiens
  misc_RNA (1)...(19): siRNA sense strand
gauuaaccuauggaacuuu

SEQ ID NO: 1657567 - RNA, 19 nt, Homo sapiens
  misc_RNA (1)...(19): siRNA sense strand
ucagcgagcgugauaagag

SEQ ID NO: 1657568 - RNA, 19 nt, Homo sapiens
  misc_RNA (1)...(19): siRNA sense strand
uuaccagguucaugacuac

SEQ ID NO: 1657569 - RNA, 19 nt, Homo sapiens
  misc_RNA (1)...(19): siRNA sense strand
cugugaagcuguggaaagu

SEQ ID NO: 1657570 - RNA, 19 nt, Homo sapiens
  misc_RNA (1)...(19): siRNA sense strand
gcaucugcccugugugaca

SEQ ID NO: 1657571 - RNA, 19 nt, Homo sapiens
  misc_RNA (1)...(19): siRNA sense strand
auuaaccuauggaacuuug

SEQ ID NO: 1657572 - RNA, 19 nt, Homo sapiens
  misc_RNA (1)...(19): siRNA sense strand
gacauuaagccagccaaca

SEQ ID NO: 1657573 - RNA, 19 nt, Homo sapiens
  misc_RNA (1)...(19): siRNA sense strand
cauacagcuuggcauccuu

SEQ ID NO: 1657574 - RNA, 19 nt, Homo sapiens
  misc_RNA (1)...(19): siRNA sense strand
gcuccuacaacaacuucuu

SEQ ID NO: 1657575 - RNA, 19 nt, Homo sapiens
  misc_RNA (1)...(19): siRNA sense strand
caaagucugggaucucaac

SEQ ID NO: 1657576 - RNA, 19 nt, Homo sapiens
  misc_RNA (1)...(19): siRNA sense strand
gaaugcagcuuacuuucuu

SEQ ID NO: 1657577 - RNA, 19 nt, Homo sapiens
  misc_RNA (1)...(19): siRNA sense strand
ucgauuaccugaagaguuu

SEQ ID NO: 1657578 - RNA, 19 nt, Homo sapiens
  misc_RNA (1)...(19): siRNA sense strand
gcacacacauaucacauca

SEQ ID NO: 1657579 - RNA, 19 nt, Homo sapiens
  misc_RNA (1)...(19): siRNA sense strand
ccugaagaguuuagaaaua

SEQ ID NO: 1657580 - RNA, 19 nt, Homo sapiens
  misc_RNA (1)...(19): siRNA sense strand
gcugaugaccugaggauua

SEQ ID NO: 1657581 - RNA, 19 nt, Homo sapiens
  misc_RNA (1)...(19): siRNA sense strand
caaccacacgggagaauua

SEQ ID NO: 1657582 - RNA, 19 nt, Homo sapiens
  misc_RNA (1)...(19): siRNA sense strand
gcagaaugcagcuuacuuu

SEQ ID NO: 1657583 - RNA, 19 nt, Homo sapiens
  misc_RNA (1)...(19): siRNA sense strand
caucgagacuuaccagguu

SEQ ID NO: 1657584 - RNA, 19 nt, Homo sapiens
  misc_RNA (1)...(19): siRNA sense strand
gcaguggcggcuacaaaua

SEQ ID NO: 1657585 - RNA, 19 nt, Homo sapiens
  misc_RNA (1)...(19): siRNA sense strand
ggauuaaccuauggaacuu

SEQ ID NO: 1657586 - RNA, 19 nt, Homo sapiens
  misc_RNA (1)...(19): siRNA sense strand
gaucacagcagccgaguuc

SEQ ID NO: 1657587 - RNA, 19 nt, Homo sapiens
  misc_RNA (1)...(19): siRNA sense strand
ggacaauccggcuguguga

SEQ ID NO: 1657588 - RNA, 19 nt, Homo sapiens
  misc_RNA (1)...(19): siRNA sense strand
gcagcuuacuuucuucugu

SEQ ID NO: 1657589 - RNA, 19 nt, Homo sapiens
  misc_RNA (1)...(19): siRNA sense strand
ccuauggaacuuugaaaua

SEQ ID NO: 1657590 - RNA, 19 nt, Homo sapiens
  misc_RNA (1)...(19): siRNA sense strand
cugaugaccugaggauuaa

SEQ ID NO: 1657591 - RNA, 19 nt, Homo sapiens
  misc_RNA (1)...(19): siRNA sense strand
ucucugaaauuaucucuuc

SEQ ID NO: 1657592 - RNA, 19 nt, Homo sapiens
  misc_RNA (1)...(19): siRNA sense strand
ugacaggcacaccaaauuu

SEQ ID NO: 1657593 - RNA, 19 nt, Homo sapiens
  misc_RNA (1)...(19): siRNA sense strand
gugaagcuguggaaaguca

SEQ ID NO: 1657594 - RNA, 19 nt, Homo sapiens
  misc_RNA (1)...(19): siRNA sense strand
caagcuguguucccucuau

SEQ ID NO: 1657595 - RNA, 19 nt, Homo sapiens
  misc_RNA (1)...(19): siRNA sense strand
cgaguucgauuaccugaag

SEQ ID NO: 1657596 - RNA, 19 nt, Homo sapiens
  misc_RNA (1)...(19): siRNA sense strand
agacuuaccagguucauga

SEQ ID NO: 1657597 - RNA, 19 nt, Homo sapiens
  misc_RNA (1)...(19): siRNA sense strand
gggucggguuguaauauuu

SEQ ID NO: 1657598 - RNA, 19 nt, Homo sapiens
  misc_RNA (1)...(19): siRNA sense strand
ccacacgggagaauuacua

SEQ ID NO: 1657599 - RNA, 19 nt, Homo sapiens
  misc_RNA (1)...(19): siRNA sense strand
gaagauccaagcaacagau

SEQ ID NO: 1657600 - RNA, 19 nt, Homo sapiens
  misc_RNA (1)...(19): siRNA sense strand
cugaagaguuuagaaauag

SEQ ID NO: 1657601 - RNA, 19 nt, Homo sapiens
  misc_RNA (1)...(19): siRNA sense strand
cgagaucagugucgacagu

SEQ ID NO: 1657602 - RNA, 19 nt, Homo sapiens
  misc_RNA (1)...(19): siRNA sense strand
aaagucagcgagcgugaua

SEQ ID NO: 1657603 - RNA, 19 nt, Homo sapiens
  misc_RNA (1)...(19): siRNA sense strand
gaccugaggauuaaccuau

SEQ ID NO: 1657604 - RNA, 19 nt, Homo sapiens
  misc_RNA (1)...(19): siRNA sense strand
gcacauuccagagccauga

SEQ ID NO: 1657605 - RNA, 19 nt, Homo sapiens
  misc_RNA (1)...(19): siRNA sense strand
ggcuacaaauaaccuauau

SEQ ID NO: 1657606 - RNA, 19 nt, Homo sapiens
  misc_RNA (1)...(19): siRNA sense strand
acacacauaucacaucaac

SEQ ID NO: 1657607 - RNA, 19 nt, Homo sapiens
  misc_RNA (1)...(19): siRNA sense strand
ucucuucgauuucggaugu

SEQ ID NO: 1657608 - RNA, 19 nt, Homo sapiens
  misc_RNA (1)...(19): siRNA sense strand
aacgagagcaggagaguaa

SEQ ID NO: 1657609 - RNA, 19 nt, Homo sapiens
  misc_RNA (1)...(19): siRNA sense strand
gaaaagacgagaucagugu

SEQ ID NO: 1657610 - RNA, 19 nt, Homo sapiens
  misc_RNA (1)...(19): siRNA sense strand
ucaggauguucgacagaaa

SEQ ID NO: 1657611 - RNA, 19 nt, Homo sapiens
  misc_RNA (1)...(19): siRNA sense strand
ucacaucaacuccauaucu

SEQ ID NO: 1657612 - RNA, 19 nt, Homo sapiens
  misc_RNA (1)...(19): siRNA sense strand
caguggcggcuacaaauaa

SEQ ID NO: 1657613 - RNA, 19 nt, Homo sapiens
  misc_RNA (1)...(19): siRNA sense strand
ucugggaucucaacaugga

SEQ ID NO: 1657614 - RNA, 19 nt, Homo sapiens
  misc_RNA (1)...(19): siRNA sense strand
agugggagguauaucauga

SEQ ID NO: 1657615 - RNA, 19 nt, Homo sapiens
  misc_RNA (1)...(19): siRNA sense strand
acacauaucacaucaacuc

SEQ ID NO: 1657616 - RNA, 19 nt, Homo sapiens
  misc_RNA (1)...(19): siRNA sense strand
cagcuuggcauccuucaga

SEQ ID NO: 1657617 - RNA, 19 nt, Homo sapiens
  misc_RNA (1)...(19): siRNA sense strand
ggaaugggucagacagugu

SEQ ID NO: 1657618 - RNA, 19 nt, Homo sapiens
  misc_RNA (1)...(19): siRNA sense strand
gucaaagucugggaucuca

SEQ ID NO: 1657619 - RNA, 19 nt, Homo sapiens
  misc_RNA (1)...(19): siRNA sense strand
gugacaggcacaccaaauu

SEQ ID NO: 1657620 - RNA, 19 nt, Homo sapiens
  misc_RNA (1)...(19): siRNA sense strand
caacagcgacuaugaaacc

SEQ ID NO: 1657621 - RNA, 19 nt, Homo sapiens
  misc_RNA (1)...(19): siRNA sense strand
cacaucaacuccauaucug

SEQ ID NO: 1657622 - RNA, 19 nt, Homo sapiens
  misc_RNA (1)...(19): siRNA sense strand
uuucuucugucuacuaaug

SEQ ID NO: 1657623 - RNA, 19 nt, Homo sapiens
  misc_RNA (1)...(19): siRNA sense strand
cauaucacaucaacuccau

SEQ ID NO: 1657624 - RNA, 19 nt, Homo sapiens
  misc_RNA (1)...(19): siRNA sense strand
ccaacgcacacacauauca

SEQ ID NO: 1657625 - RNA, 19 nt, Homo sapiens
  misc_RNA (1)...(19): siRNA sense strand
agucugggaucucaacaug

SEQ ID NO: 1657626 - RNA, 19 nt, Homo sapiens
  misc_RNA (1)...(19): siRNA sense strand
gucaacagcgacuaugaaa

SEQ ID NO: 1657627 - RNA, 19 nt, Homo sapiens
  misc_RNA (1)...(19): siRNA sense strand
cuuaccagguucaugacua

SEQ ID NO: 1657628 - RNA, 19 nt, Homo sapiens
  misc_RNA (1)...(19): siRNA sense strand
ggaagauccaagcaacaga

SEQ ID NO: 1657629 - RNA, 19 nt, Homo sapiens
  misc_RNA (1)...(19): siRNA sense strand
uaucacaucaacuccauau

SEQ ID NO: 1657630 - RNA, 19 nt, Homo sapiens
  misc_RNA (1)...(19): siRNA sense strand
gauuucggaugugaaguuc

SEQ ID NO: 1657631 - RNA, 19 nt, Homo sapiens
  misc_RNA (1)...(19): siRNA sense strand
gcauacagcuuggcauccu

SEQ ID NO: 1657632 - RNA, 19 nt, Homo sapiens
  misc_RNA (1)...(19): siRNA sense strand
acaacaacuucuucaggau

SEQ ID NO: 1657633 - RNA, 19 nt, Homo sapiens
  misc_RNA (1)...(19): siRNA sense strand
caacgagagcaggagagua

SEQ ID NO: 1657634 - RNA, 19 nt, Homo sapiens
  misc_RNA (1)...(19): siRNA sense strand
ugacaggcuccuacaacaa

SEQ ID NO: 1657635 - RNA, 19 nt, Homo sapiens
  misc_RNA (1)...(19): siRNA sense strand
uaaccuauggaacuuugaa

SEQ ID NO: 1657636 - RNA, 19 nt, Homo sapiens
  misc_RNA (1)...(19): siRNA sense strand
cgauuucggaugugaaguu

SEQ ID NO: 1657637 - RNA, 19 nt, Homo sapiens
  misc_RNA (1)...(19): siRNA sense strand
agaaggcuacaaucugaaa

SEQ ID NO: 1657638 - RNA, 19 nt, Homo sapiens
  misc_RNA (1)...(19): siRNA sense strand
uaccugaagaguuuagaaa

SEQ ID NO: 1657639 - RNA, 19 nt, Homo sapiens
  misc_RNA (1)...(19): siRNA sense strand
ccaagcaacagaucauuuu

SEQ ID NO: 1657640 - RNA, 19 nt, Homo sapiens
  misc_RNA (1)...(19): siRNA sense strand
gaaagucagcgagcgugau

SEQ ID NO: 1657641 - RNA, 19 nt, Homo sapiens
  misc_RNA (1)...(19): siRNA sense strand
cggcuacaaauaaccuaua

SEQ ID NO: 1657642 - RNA, 19 nt, Homo sapiens
  misc_RNA (1)...(19): siRNA sense strand
ggccagaaggcuacaaucu

SEQ ID NO: 1657643 - RNA, 19 nt, Homo sapiens
  misc_RNA (1)...(19): siRNA sense strand
gcuguguucccucuaugaa

SEQ ID NO: 1657644 - RNA, 19 nt, Homo sapiens
  misc_RNA (1)...(19): siRNA sense strand
gauccugccaccaucacaa

SEQ ID NO: 1657645 - RNA, 19 nt, Homo sapiens
  misc_RNA (1)...(19): siRNA sense strand
aaacugugaagcuguggaa

SEQ ID NO: 1657646 - RNA, 19 nt, Homo sapiens
  misc_RNA (1)...(19): siRNA sense strand
gaaacaccaagcgugaugu

SEQ ID NO: 1657647 - RNA, 19 nt, Homo sapiens
  misc_RNA (1)...(19): siRNA sense strand
agaaacaccaagcgugaug

SEQ ID NO: 1657648 - RNA, 19 nt, Homo sapiens
  misc_RNA (1)...(19): siRNA sense strand
cccagcagaaugcagcuua

SEQ ID NO: 1657649 - RNA, 19 nt, Homo sapiens
  misc_RNA (1)...(19): siRNA sense strand
gugaauacaauguuuacag

SEQ ID NO: 1657650 - RNA, 19 nt, Homo sapiens
  misc_RNA (1)...(19): siRNA sense strand
ugccaacgcacacacauau

SEQ ID NO: 1657651 - RNA, 19 nt, Homo sapiens
  misc_RNA (1)...(19): siRNA sense strand
ugucaacagcgacuaugaa

SEQ ID NO: 1657652 - RNA, 19 nt, Homo sapiens
  misc_RNA (1)...(19): siRNA sense strand
aacaacuucuucaggaugu

SEQ ID NO: 1657653 - RNA, 19 nt, Homo sapiens
  misc_RNA (1)...(19): siRNA sense strand
gacaggcuccuacaacaac

SEQ ID NO: 1657654 - RNA, 19 nt, Homo sapiens
  misc_RNA (1)...(19): siRNA sense strand
cagaaugcagcuuacuuuc

SEQ ID NO: 1657655 - RNA, 19 nt, Homo sapiens
  misc_RNA (1)...(19): siRNA sense strand
ucaacuccauaucugucaa

SEQ ID NO: 1657656 - RNA, 19 nt, Homo sapiens
  misc_RNA (1)...(19): siRNA sense strand
cacagugggagguauauca

SEQ ID NO: 1657657 - RNA, 19 nt, Homo sapiens
  misc_RNA (1)...(19): siRNA sense strand
cugaaauuaucucuucgau

SEQ ID NO: 1657658 - RNA, 19 nt, Homo sapiens
  misc_RNA (1)...(19): siRNA sense strand
gauuaaccuauggaacuuu

SEQ ID NO: 1657659 - RNA, 19 nt, Homo sapiens
  misc_RNA (1)...(19): siRNA sense strand
ucagcgagcgugauaagag

SEQ ID NO: 1657660 - RNA, 19 nt, Homo sapiens
  misc_RNA (1)...(19): siRNA sense strand
uuaccagguucaugacuac

SEQ ID NO: 1657661 - RNA, 19 nt, Homo sapiens
  misc_RNA (1)...(19): siRNA sense strand
cugugaagcuguggaaagu

SEQ ID NO: 1657662 - RNA, 19 nt, Homo sapiens
  misc_RNA (1)...(19): siRNA sense strand
gcaucugcccugugugaca

SEQ ID NO: 1657663 - RNA, 19 nt, Homo sapiens
  misc_RNA (1)...(19): siRNA sense strand
auuaaccuauggaacuuug

SEQ ID NO: 1657664 - RNA, 19 nt, Homo sapiens
  misc_RNA (1)...(19): siRNA sense strand
gacauuaagccagccaaca

SEQ ID NO: 1657665 - RNA, 19 nt, Homo sapiens
  misc_RNA (1)...(19): siRNA sense strand
cauacagcuuggcauccuu

SEQ ID NO: 1657666 - RNA, 19 nt, Homo sapiens
  misc_RNA (1)...(19): siRNA sense strand
gcuccuacaacaacuucuu

SEQ ID NO: 1657667 - RNA, 19 nt, Homo sapiens
  misc_RNA (1)...(19): siRNA sense strand
caaagucugggaucucaac

SEQ ID NO: 1657668 - RNA, 19 nt, Homo sapiens
  misc_RNA (1)...(19): siRNA sense strand
gaaugcagcuuacuuucuu

SEQ ID NO: 1657669 - RNA, 19 nt, Homo sapiens
  misc_RNA (1)...(19): siRNA sense strand
ucgauuaccugaagaguuu

SEQ ID NO: 1657670 - RNA, 19 nt, Homo sapiens
  misc_RNA (1)...(19): siRNA sense strand
gcacacacauaucacauca

SEQ ID NO: 1657671 - RNA, 19 nt, Homo sapiens
  misc_RNA (1)...(19): siRNA sense strand
ccugaagaguuuagaaaua

SEQ ID NO: 1657672 - RNA, 19 nt, Homo sapiens
  misc_RNA (1)...(19): siRNA sense strand
gcugaugaccugaggauua

SEQ ID NO: 1657673 - RNA, 19 nt, Homo sapiens
  misc_RNA (1)...(19): siRNA sense strand
caaccacacgggagaauua

SEQ ID NO: 1657674 - RNA, 19 nt, Homo sapiens
  misc_RNA (1)...(19): siRNA sense strand
gcagaaugcagcuuacuuu

SEQ ID NO: 1657675 - RNA, 19 nt, Homo sapiens
  misc_RNA (1)...(19): siRNA sense strand
caucgagacuuaccagguu

SEQ ID NO: 1657676 - RNA, 19 nt, Homo sapiens
  misc_RNA (1)...(19): siRNA sense strand
gcaguggcggcuacaaaua

SEQ ID NO: 1657677 - RNA, 19 nt, Homo sapiens
  misc_RNA (1)...(19): siRNA sense strand
ggauuaaccuauggaacuu

SEQ ID NO: 1657678 - RNA, 19 nt, Homo sapiens
  misc_RNA (1)...(19): siRNA sense strand
gaucacagcagccgaguuc

SEQ ID NO: 1657679 - RNA, 19 nt, Homo sapiens
  misc_RNA (1)...(19): siRNA sense strand
ggacaauccggcuguguga

SEQ ID NO: 1657680 - RNA, 19 nt, Homo sapiens
  misc_RNA (1)...(19): siRNA sense strand
gcagcuuacuuucuucugu

SEQ ID NO: 1657681 - RNA, 19 nt, Homo sapiens
  misc_RNA (1)...(19): siRNA sense strand
ccuauggaacuuugaaaua

SEQ ID NO: 1657682 - RNA, 19 nt, Homo sapiens
  misc_RNA (1)...(19): siRNA sense strand
cugaugaccugaggauuaa

SEQ ID NO: 1657683 - RNA, 19 nt, Homo sapiens
  misc_RNA (1)...(19): siRNA sense strand
ucucugaaauuaucucuuc

SEQ ID NO: 1657684 - RNA, 19 nt, Homo sapiens
  misc_RNA (1)...(19): siRNA sense strand
ugacaggcacaccaaauuu

SEQ ID NO: 1657685 - RNA, 19 nt, Homo sapiens
  misc_RNA (1)...(19): siRNA sense strand
gugaagcuguggaaaguca

SEQ ID NO: 1657686 - RNA, 19 nt, Homo sapiens
  misc_RNA (1)...(19): siRNA sense strand
caagcuguguucccucuau

SEQ ID NO: 1657687 - RNA, 19 nt, Homo sapiens
  misc_RNA (1)...(19): siRNA sense strand
cgaguucgauuaccugaag

SEQ ID NO: 1657688 - RNA, 19 nt, Homo sapiens
  misc_RNA (1)...(19): siRNA sense strand
agacuuaccagguucauga

SEQ ID NO: 1657689 - RNA, 19 nt, Homo sapiens
  misc_RNA (1)...(19): siRNA sense strand
gggucggguuguaauauuu

SEQ ID NO: 1657690 - RNA, 19 nt, Homo sapiens
  misc_RNA (1)...(19): siRNA sense strand
ccacacgggagaauuacua

SEQ ID NO: 1657691 - RNA, 19 nt, Homo sapiens
  misc_RNA (1)...(19): siRNA sense strand
gaagauccaagcaacagau

SEQ ID NO: 1657692 - RNA, 19 nt, Homo sapiens
  misc_RNA (1)...(19): siRNA sense strand
cugaagaguuuagaaauag

SEQ ID NO: 1657693 - RNA, 19 nt, Homo sapiens
  misc_RNA (1)...(19): siRNA sense strand
cgagaucagugucgacagu

SEQ ID NO: 1657694 - RNA, 19 nt, Homo sapiens
  misc_RNA (1)...(19): siRNA sense strand
aaagucagcgagcgugaua

SEQ ID NO: 1657695 - RNA, 19 nt, Homo sapiens
  misc_RNA (1)...(19): siRNA sense strand
gaccugaggauuaaccuau

SEQ ID NO: 1657696 - RNA, 19 nt, Homo sapiens
  misc_RNA (1)...(19): siRNA sense strand
gcacauuccagagccauga

SEQ ID NO: 1657697 - RNA, 19 nt, Homo sapiens
  misc_RNA (1)...(19): siRNA sense strand
ggcuacaaauaaccuauau

SEQ ID NO: 1657698 - RNA, 19 nt, Homo sapiens
  misc_RNA (1)...(19): siRNA sense strand
acacacauaucacaucaac

SEQ ID NO: 1657699 - RNA, 19 nt, Homo sapiens
  misc_RNA (1)...(19): siRNA sense strand
ucucuucgauuucggaugu

SEQ ID NO: 1657700 - RNA, 19 nt, Homo sapiens
  misc_RNA (1)...(19): siRNA sense strand
aacgagagcaggagaguaa

SEQ ID NO: 1657701 - RNA, 19 nt, Homo sapiens
  misc_RNA (1)...(19): siRNA sense strand
gaaaagacgagaucagugu

SEQ ID NO: 1657702 - RNA, 19 nt, Homo sapiens
  misc_RNA (1)...(19): siRNA sense strand
ucaggauguucgacagaaa

SEQ ID NO: 1657703 - RNA, 19 nt, Homo sapiens
  misc_RNA (1)...(19): siRNA sense strand
ucacaucaacuccauaucu

SEQ ID NO: 1657704 - RNA, 19 nt, Homo sapiens
  misc_RNA (1)...(19): siRNA sense strand
caguggcggcuacaaauaa

SEQ ID NO: 1657705 - RNA, 19 nt, Homo sapiens
  misc_RNA (1)...(19): siRNA sense strand
ucugggaucucaacaugga

SEQ ID NO: 1657706 - RNA, 19 nt, Homo sapiens
  misc_RNA (1)...(19): siRNA sense strand
agugggagguauaucauga

SEQ ID NO: 1657707 - RNA, 19 nt, Homo sapiens
  misc_RNA (1)...(19): siRNA sense strand
acacauaucacaucaacuc

SEQ ID NO: 1657708 - RNA, 19 nt, Homo sapiens
  misc_RNA (1)...(19): siRNA sense strand
cagcuuggcauccuucaga

SEQ ID NO: 1657709 - RNA, 19 nt, Homo sapiens
  misc_RNA (1)...(19): siRNA sense strand
ggaaugggucagacagugu

SEQ ID NO: 1657710 - RNA, 19 nt, Homo sapiens
  misc_RNA (1)...(19): siRNA sense strand
gucaaagucugggaucuca

SEQ ID NO: 1657711 - RNA, 19 nt, Homo sapiens
  misc_RNA (1)...(19): siRNA sense strand
gugacaggcacaccaaauu

SEQ ID NO: 1657712 - RNA, 19 nt, Homo sapiens
  misc_RNA (1)...(19): siRNA sense strand
caacagcgacuaugaaacc

SEQ ID NO: 1657713 - RNA, 19 nt, Homo sapiens
  misc_RNA (1)...(19): siRNA sense strand
cacaucaacuccauaucug

SEQ ID NO: 1657714 - RNA, 19 nt, Homo sapiens
  misc_RNA (1)...(19): siRNA sense strand
uuucuucugucuacuaaug

SEQ ID NO: 1657715 - RNA, 19 nt, Homo sapiens
  misc_RNA (1)...(19): siRNA sense strand
cauaucacaucaacuccau

SEQ ID NO: 1657716 - RNA, 19 nt, Homo sapiens
  misc_RNA (1)...(19): siRNA sense strand
ccaacgcacacacauauca

SEQ ID NO: 1657717 - RNA, 19 nt, Homo sapiens
  misc_RNA (1)...(19): siRNA sense strand
agucugggaucucaacaug

SEQ ID NO: 1657718 - RNA, 19 nt, Homo sapiens
  misc_RNA (1)...(19): siRNA sense strand
gucaacagcgacuaugaaa

SEQ ID NO: 1657719 - RNA, 19 nt, Homo sapiens
  misc_RNA (1)...(19): siRNA sense strand
cuuaccagguucaugacua

SEQ ID NO: 1657720 - RNA, 19 nt, Homo sapiens
  misc_RNA (1)...(19): siRNA sense strand
ggaagauccaagcaacaga

SEQ ID NO: 1657721 - RNA, 19 nt, Homo sapiens
  misc_RNA (1)...(19): siRNA sense strand
uaucacaucaacuccauau

SEQ ID NO: 1657722 - RNA, 19 nt, Homo sapiens
  misc_RNA (1)...(19): siRNA sense strand
gauuucggaugugaaguuc

SEQ ID NO: 1657723 - RNA, 19 nt, Homo sapiens
  misc_RNA (1)...(19): siRNA sense strand
gcauacagcuuggcauccu

SEQ ID NO: 1657724 - RNA, 19 nt, Homo sapiens
  misc_RNA (1)...(19): siRNA sense strand
acaacaacuucuucaggau

SEQ ID NO: 1657725 - RNA, 19 nt, Homo sapiens
  misc_RNA (1)...(19): siRNA sense strand
caacgagagcaggagagua

SEQ ID NO: 1657726 - RNA, 19 nt, Homo sapiens
  misc_RNA (1)...(19): siRNA sense strand
ugacaggcuccuacaacaa

SEQ ID NO: 1657727 - RNA, 19 nt, Homo sapiens
  misc_RNA (1)...(19): siRNA sense strand
uaaccuauggaacuuugaa

SEQ ID NO: 1657728 - RNA, 19 nt, Homo sapiens
  misc_RNA (1)...(19): siRNA sense strand
cgauuucggaugugaaguu

SEQ ID NO: 1657729 - RNA, 19 nt, Homo sapiens
  misc_RNA (1)...(19): siRNA sense strand
agaaggcuacaaucugaaa

SEQ ID NO: 1657730 - RNA, 19 nt, Homo sapiens
  misc_RNA (1)...(19): siRNA sense strand
uaccugaagaguuuagaaa

SEQ ID NO: 1657731 - RNA, 19 nt, Homo sapiens
  misc_RNA (1)...(19): siRNA sense strand
ccaagcaacagaucauuuu

SEQ ID NO: 1657732 - RNA, 19 nt, Homo sapiens
  misc_RNA (1)...(19): siRNA sense strand
gaaagucagcgagcgugau

SEQ ID NO: 1657733 - RNA, 19 nt, Homo sapiens
  misc_RNA (1)...(19): siRNA sense strand
cggcuacaaauaaccuaua

SEQ ID NO: 1657734 - RNA, 19 nt, Homo sapiens
  misc_RNA (1)...(19): siRNA sense strand
ggccagaaggcuacaaucu

SEQ ID NO: 1657735 - RNA, 19 nt, Homo sapiens
  misc_RNA (1)...(19): siRNA sense strand
gcuguguucccucuaugaa

SEQ ID NO: 1657736 - RNA, 19 nt, Homo sapiens
  misc_RNA (1)...(19): siRNA sense strand
gauccugccaccaucacaa

SEQ ID NO: 1657737 - RNA, 19 nt, Homo sapiens
  misc_RNA (1)...(19): siRNA sense strand
aaacugugaagcuguggaa

SEQ ID NO: 1657738 - RNA, 19 nt, Homo sapiens
  misc_RNA (1)...(19): siRNA sense strand
gaaacaccaagcgugaugu

SEQ ID NO: 1657739 - RNA, 19 nt, Homo sapiens
  misc_RNA (1)...(19): siRNA sense strand
agaaacaccaagcgugaug

SEQ ID NO: 1657740 - RNA, 19 nt, Homo sapiens
  misc_RNA (1)...(19): siRNA sense strand
cccagcagaaugcagcuua

SEQ ID NO: 1657741 - RNA, 19 nt, Homo sapiens
  misc_RNA (1)...(19): siRNA sense strand
gugaauacaauguuuacag

SEQ ID NO: 1657742 - RNA, 19 nt, Homo sapiens
  misc_RNA (1)...(19): siRNA sense strand
ugccaacgcacacacauau

SEQ ID NO: 1657743 - RNA, 19 nt, Homo sapiens
  misc_RNA (1)...(19): siRNA sense strand
ugucaacagcgacuaugaa

SEQ ID NO: 1657744 - RNA, 19 nt, Homo sapiens
  misc_RNA (1)...(19): siRNA sense strand
aacaacuucuucaggaugu

SEQ ID NO: 1657745 - RNA, 19 nt, Homo sapiens
  misc_RNA (1)...(19): siRNA sense strand
gacaggcuccuacaacaac

SEQ ID NO: 1657746 - RNA, 19 nt, Homo sapiens
  misc_RNA (1)...(19): siRNA sense strand
cagaaugcagcuuacuuuc

SEQ ID NO: 1657747 - RNA, 19 nt, Homo sapiens
  misc_RNA (1)...(19): siRNA sense strand
ucaacuccauaucugucaa

SEQ ID NO: 1657748 - RNA, 19 nt, Homo sapiens
  misc_RNA (1)...(19): siRNA sense strand
cacagugggagguauauca

SEQ ID NO: 1657749 - RNA, 19 nt, Homo sapiens
  misc_RNA (1)...(19): siRNA sense strand
cugaaauuaucucuucgau

SEQ ID NO: 1657750 - RNA, 19 nt, Homo sapiens
  misc_RNA (1)...(19): siRNA sense strand
gauuaaccuauggaacuuu

SEQ ID NO: 1657751 - RNA, 19 nt, Homo sapiens
  misc_RNA (1)...(19): siRNA sense strand
ucagcgagcgugauaagag

SEQ ID NO: 1657752 - RNA, 19 nt, Homo sapiens
  misc_RNA (1)...(19): siRNA sense strand
uuaccagguucaugacuac

SEQ ID NO: 1657753 - RNA, 19 nt, Homo sapiens
  misc_RNA (1)...(19): siRNA sense strand
cugugaagcuguggaaagu

SEQ ID NO: 1657754 - RNA, 19 nt, Homo sapiens
  misc_RNA (1)...(19): siRNA sense strand
gcaucugcccugugugaca

SEQ ID NO: 1657755 - RNA, 19 nt, Homo sapiens
  misc_RNA (1)...(19): siRNA sense strand
auuaaccuauggaacuuug

SEQ ID NO: 1657756 - RNA, 19 nt, Homo sapiens
  misc_RNA (1)...(19): siRNA sense strand
gacauuaagccagccaaca

SEQ ID NO: 1657757 - RNA, 19 nt, Homo sapiens
  misc_RNA (1)...(19): siRNA sense strand
cauacagcuuggcauccuu

SEQ ID NO: 1657758 - RNA, 19 nt, Homo sapiens
  misc_RNA (1)...(19): siRNA sense strand
gcuccuacaacaacuucuu

SEQ ID NO: 1657759 - RNA, 19 nt, Homo sapiens
  misc_RNA (1)...(19): siRNA sense strand
caaagucugggaucucaac

SEQ ID NO: 1657760 - RNA, 19 nt, Homo sapiens
  misc_RNA (1)...(19): siRNA sense strand
gaaugcagcuuacuuucuu

SEQ ID NO: 1657761 - RNA, 19 nt, Homo sapiens
  misc_RNA (1)...(19): siRNA sense strand
ucgauuaccugaagaguuu

SEQ ID NO: 1657762 - RNA, 19 nt, Homo sapiens
  misc_RNA (1)...(19): siRNA sense strand
gcacacacauaucacauca

SEQ ID NO: 1657763 - RNA, 19 nt, Homo sapiens
  misc_RNA (1)...(19): siRNA sense strand
ccugaagaguuuagaaaua

SEQ ID NO: 1657764 - RNA, 19 nt, Homo sapiens
  misc_RNA (1)...(19): siRNA sense strand
gcugaugaccugaggauua

SEQ ID NO: 1657765 - RNA, 19 nt, Homo sapiens
  misc_RNA (1)...(19): siRNA sense strand
caaccacacgggagaauua

SEQ ID NO: 1657766 - RNA, 19 nt, Homo sapiens
  misc_RNA (1)...(19): siRNA sense strand
gcagaaugcagcuuacuuu

SEQ ID NO: 1657767 - RNA, 19 nt, Homo sapiens
  misc_RNA (1)...(19): siRNA sense strand
caucgagacuuaccagguu

SEQ ID NO: 1657768 - RNA, 19 nt, Homo sapiens
  misc_RNA (1)...(19): siRNA sense strand
gcaguggcggcuacaaaua

SEQ ID NO: 1657769 - RNA, 19 nt, Homo sapiens
  misc_RNA (1)...(19): siRNA sense strand
ggauuaaccuauggaacuu

SEQ ID NO: 1657770 - RNA, 19 nt, Homo sapiens
  misc_RNA (1)...(19): siRNA sense strand
gaucacagcagccgaguuc

SEQ ID NO: 1657771 - RNA, 19 nt, Homo sapiens
  misc_RNA (1)...(19): siRNA sense strand
ggacaauccggcuguguga

SEQ ID NO: 1657772 - RNA, 19 nt, Homo sapiens
  misc_RNA (1)...(19): siRNA sense strand
gcagcuuacuuucuucugu

SEQ ID NO: 1657773 - RNA, 19 nt, Homo sapiens
  misc_RNA (1)...(19): siRNA sense strand
ccuauggaacuuugaaaua

SEQ ID NO: 1657774 - RNA, 19 nt, Homo sapiens
  misc_RNA (1)...(19): siRNA sense strand
cugaugaccugaggauuaa

SEQ ID NO: 1657775 - RNA, 19 nt, Homo sapiens
  misc_RNA (1)...(19): siRNA sense strand
ucucugaaauuaucucuuc

SEQ ID NO: 1657776 - RNA, 19 nt, Homo sapiens
  misc_RNA (1)...(19): siRNA sense strand
ugacaggcacaccaaauuu

SEQ ID NO: 1657777 - RNA, 19 nt, Homo sapiens
  misc_RNA (1)...(19): siRNA sense strand
gugaagcuguggaaaguca

SEQ ID NO: 1657778 - RNA, 19 nt, Homo sapiens
  misc_RNA (1)...(19): siRNA sense strand
caagcuguguucccucuau

SEQ ID NO: 1657779 - RNA, 19 nt, Homo sapiens
  misc_RNA (1)...(19): siRNA sense strand
cgaguucgauuaccugaag

SEQ ID NO: 1657780 - RNA, 19 nt, Homo sapiens
  misc_RNA (1)...(19): siRNA sense strand
agacuuaccagguucauga

SEQ ID NO: 1657781 - RNA, 19 nt, Homo sapiens
  misc_RNA (1)...(19): siRNA sense strand
gggucggguuguaauauuu

SEQ ID NO: 1657782 - RNA, 19 nt, Homo sapiens
  misc_RNA (1)...(19): siRNA sense strand
ccacacgggagaauuacua

SEQ ID NO: 1657783 - RNA, 19 nt, Homo sapiens
  misc_RNA (1)...(19): siRNA sense strand
gaagauccaagcaacagau

SEQ ID NO: 1657784 - RNA, 19 nt, Homo sapiens
  misc_RNA (1)...(19): siRNA sense strand
cugaagaguuuagaaauag

SEQ ID NO: 1657785 - RNA, 19 nt, Homo sapiens
  misc_RNA (1)...(19): siRNA sense strand
cgagaucagugucgacagu

SEQ ID NO: 1657786 - RNA, 19 nt, Homo sapiens
  misc_RNA (1)...(19): siRNA sense strand
aaagucagcgagcgugaua

SEQ ID NO: 1657787 - RNA, 19 nt, Homo sapiens
  misc_RNA (1)...(19): siRNA sense strand
gaccugaggauuaaccuau

SEQ ID NO: 1657788 - RNA, 19 nt, Homo sapiens
  misc_RNA (1)...(19): siRNA sense strand
gcacauuccagagccauga

SEQ ID NO: 1657789 - RNA, 19 nt, Homo sapiens
  misc_RNA (1)...(19): siRNA sense strand
ggcuacaaauaaccuauau

SEQ ID NO: 1657790 - RNA, 19 nt, Homo sapiens
  misc_RNA (1)...(19): siRNA sense strand
acacacauaucacaucaac

SEQ ID NO: 1657791 - RNA, 19 nt, Homo sapiens
  misc_RNA (1)...(19): siRNA sense strand
ucucuucgauuucggaugu

SEQ ID NO: 1657792 - RNA, 19 nt, Homo sapiens
  misc_RNA (1)...(19): siRNA sense strand
aacgagagcaggagaguaa

SEQ ID NO: 1657793 - RNA, 19 nt, Homo sapiens
  misc_RNA (1)...(19): siRNA sense strand
gaaaagacgagaucagugu

SEQ ID NO: 1657794 - RNA, 19 nt, Homo sapiens
  misc_RNA (1)...(19): siRNA sense strand
ucaggauguucgacagaaa

SEQ ID NO: 1657795 - RNA, 19 nt, Homo sapiens
  misc_RNA (1)...(19): siRNA sense strand
ucacaucaacuccauaucu

SEQ ID NO: 1657796 - RNA, 19 nt, Homo sapiens
  misc_RNA (1)...(19): siRNA sense strand
caguggcggcuacaaauaa

SEQ ID NO: 1657797 - RNA, 19 nt, Homo sapiens
  misc_RNA (1)...(19): siRNA sense strand
ucugggaucucaacaugga

SEQ ID NO: 1657798 - RNA, 19 nt, Homo sapiens
  misc_RNA (1)...(19): siRNA sense strand
agugggagguauaucauga

SEQ ID NO: 1657799 - RNA, 19 nt, Homo sapiens
  misc_RNA (1)...(19): siRNA sense strand
acacauaucacaucaacuc

SEQ ID NO: 1657800 - RNA, 19 nt, Homo sapiens
  misc_RNA (1)...(19): siRNA sense strand
cagcuuggcauccuucaga

SEQ ID NO: 1657801 - RNA, 19 nt, Homo sapiens
  misc_RNA (1)...(19): siRNA sense strand
ggaaugggucagacagugu

SEQ ID NO: 1657802 - RNA, 19 nt, Homo sapiens
  misc_RNA (1)...(19): siRNA sense strand
gucaaagucugggaucuca

SEQ ID NO: 1657803 - RNA, 19 nt, Homo sapiens
  misc_RNA (1)...(19): siRNA sense strand
gugacaggcacaccaaauu

SEQ ID NO: 1657804 - RNA, 19 nt, Homo sapiens
  misc_RNA (1)...(19): siRNA sense strand
caacagcgacuaugaaacc

SEQ ID NO: 1657805 - RNA, 19 nt, Homo sapiens
  misc_RNA (1)...(19): siRNA sense strand
cacaucaacuccauaucug

SEQ ID NO: 1657806 - RNA, 19 nt, Homo sapiens
  misc_RNA (1)...(19): siRNA sense strand
uuucuucugucuacuaaug

SEQ ID NO: 1657807 - RNA, 19 nt, Homo sapiens
  misc_RNA (1)...(19): siRNA sense strand
cauaucacaucaacuccau

SEQ ID NO: 1657808 - RNA, 19 nt, Homo sapiens
  misc_RNA (1)...(19): siRNA sense strand
ccaacgcacacacauauca

SEQ ID NO: 1657809 - RNA, 19 nt, Homo sapiens
  misc_RNA (1)...(19): siRNA sense strand
agucugggaucucaacaug

SEQ ID NO: 1657810 - RNA, 19 nt, Homo sapiens
  misc_RNA (1)...(19): siRNA sense strand
gucaacagcgacuaugaaa

SEQ ID NO: 1657811 - RNA, 19 nt, Homo sapiens
  misc_RNA (1)...(19): siRNA sense strand
cuuaccagguucaugacua

SEQ ID NO: 1657812 - RNA, 19 nt, Homo sapiens
  misc_RNA (1)...(19): siRNA sense strand
ggaagauccaagcaacaga

SEQ ID NO: 1657813 - RNA, 19 nt, Homo sapiens
  misc_RNA (1)...(19): siRNA sense strand
uaucacaucaacuccauau

SEQ ID NO: 1657814 - RNA, 19 nt, Homo sapiens
  misc_RNA (1)...(19): siRNA sense strand
gauuucggaugugaaguuc

SEQ ID NO: 1657815 - RNA, 19 nt, Homo sapiens
  misc_RNA (1)...(19): siRNA sense strand
gcauacagcuuggcauccu

SEQ ID NO: 1657816 - RNA, 19 nt, Homo sapiens
  misc_RNA (1)...(19): siRNA sense strand
acaacaacuucuucaggau

SEQ ID NO: 1657817 - RNA, 19 nt, Homo sapiens
  misc_RNA (1)...(19): siRNA sense strand
caacgagagcaggagagua

SEQ ID NO: 1657818 - RNA, 19 nt, Homo sapiens
  misc_RNA (1)...(19): siRNA sense strand
ugacaggcuccuacaacaa

SEQ ID NO: 1657819 - RNA, 19 nt, Homo sapiens
  misc_RNA (1)...(19): siRNA sense strand
uaaccuauggaacuuugaa

SEQ ID NO: 1657820 - RNA, 19 nt, Homo sapiens
  misc_RNA (1)...(19): siRNA sense strand
cgauuucggaugugaaguu

SEQ ID NO: 1657821 - RNA, 19 nt, Homo sapiens
  misc_RNA (1)...(19): siRNA sense strand
agaaggcuacaaucugaaa

SEQ ID NO: 1657822 - RNA, 19 nt, Homo sapiens
  misc_RNA (1)...(19): siRNA sense strand
uaccugaagaguuuagaaa

SEQ ID NO: 1657823 - RNA, 19 nt, Homo sapiens
  misc_RNA (1)...(19): siRNA sense strand
ccaagcaacagaucauuuu

SEQ ID NO: 1657824 - RNA, 19 nt, Homo sapiens
  misc_RNA (1)...(19): siRNA sense strand
gaaagucagcgagcgugau

SEQ ID NO: 1657825 - RNA, 19 nt, Homo sapiens
  misc_RNA (1)...(19): siRNA sense strand
cggcuacaaauaaccuaua

SEQ ID NO: 1657826 - RNA, 19 nt, Homo sapiens
  misc_RNA (1)...(19): siRNA sense strand
ggccagaaggcuacaaucu

SEQ ID NO: 1657827 - RNA, 19 nt, Homo sapiens
  misc_RNA (1)...(19): siRNA sense strand
gcuguguucccucuaugaa

SEQ ID NO: 1657828 - RNA, 19 nt, Homo sapiens
  misc_RNA (1)...(19): siRNA sense strand
gauccugccaccaucacaa

SEQ ID NO: 1657829 - RNA, 19 nt, Homo sapiens
  misc_RNA (1)...(19): siRNA sense strand
aaacugugaagcuguggaa

SEQ ID NO: 1657830 - RNA, 19 nt, Homo sapiens
  misc_RNA (1)...(19): siRNA sense strand
gaaacaccaagcgugaugu

SEQ ID NO: 1657831 - RNA, 19 nt, Homo sapiens
  misc_RNA (1)...(19): siRNA sense strand
agaaacaccaagcgugaug

SEQ ID NO: 1657832 - RNA, 19 nt, Homo sapiens
  misc_RNA (1)...(19): siRNA sense strand
cccagcagaaugcagcuua

SEQ ID NO: 1657833 - RNA, 19 nt, Homo sapiens
  misc_RNA (1)...(19): siRNA sense strand
gugaauacaauguuuacag

SEQ ID NO: 1657834 - RNA, 19 nt, Homo sapiens
  misc_RNA (1)...(19): siRNA sense strand
ugccaacgcacacacauau

SEQ ID NO: 1657835 - RNA, 19 nt, Homo sapiens
  misc_RNA (1)...(19): siRNA sense strand
ugucaacagcgacuaugaa

SEQ ID NO: 1657836 - RNA, 19 nt, Homo sapiens
  misc_RNA (1)...(19): siRNA sense strand
aacaacuucuucaggaugu

SEQ ID NO: 1657837 - RNA, 19 nt, Homo sapiens
  misc_RNA (1)...(19): siRNA sense strand
gacaggcuccuacaacaac

SEQ ID NO: 1657838 - RNA, 19 nt, Homo sapiens
  misc_RNA (1)...(19): siRNA sense strand
cagaaugcagcuuacuuuc

SEQ ID NO: 1657839 - RNA, 19 nt, Homo sapiens
  misc_RNA (1)...(19): siRNA sense strand
ucaacuccauaucugucaa

SEQ ID NO: 1657840 - RNA, 19 nt, Homo sapiens
  misc_RNA (1)...(19): siRNA sense strand
cacagugggagguauauca

SEQ ID NO: 1657841 - RNA, 19 nt, Homo sapiens
  misc_RNA (1)...(19): siRNA sense strand
cugaaauuaucucuucgau

SEQ ID NO: 1657842 - RNA, 19 nt, Homo sapiens
  misc_RNA (1)...(19): siRNA sense strand
gauuaaccuauggaacuuu

SEQ ID NO: 1657843 - RNA, 19 nt, Homo sapiens
  misc_RNA (1)...(19): siRNA sense strand
ucagcgagcgugauaagag

SEQ ID NO: 1657844 - RNA, 19 nt, Homo sapiens
  misc_RNA (1)...(19): siRNA sense strand
uuaccagguucaugacuac

SEQ ID NO: 1657845 - RNA, 19 nt, Homo sapiens
  misc_RNA (1)...(19): siRNA sense strand
cugugaagcuguggaaagu

SEQ ID NO: 1657846 - RNA, 19 nt, Homo sapiens
  misc_RNA (1)...(19): siRNA sense strand
gcaucugcccugugugaca

SEQ ID NO: 1657847 - RNA, 19 nt, Homo sapiens
  misc_RNA (1)...(19): siRNA sense strand
auuaaccuauggaacuuug

SEQ ID NO: 1657848 - RNA, 19 nt, Homo sapiens
  misc_RNA (1)...(19): siRNA sense strand
gacauuaagccagccaaca

SEQ ID NO: 1657849 - RNA, 19 nt, Homo sapiens
  misc_RNA (1)...(19): siRNA sense strand
cauacagcuuggcauccuu

SEQ ID NO: 1657850 - RNA, 19 nt, Homo sapiens
  misc_RNA (1)...(19): siRNA sense strand
gcuccuacaacaacuucuu

SEQ ID NO: 1657851 - RNA, 19 nt, Homo sapiens
  misc_RNA (1)...(19): siRNA sense strand
caaagucugggaucucaac

SEQ ID NO: 1657852 - RNA, 19 nt, Homo sapiens
  misc_RNA (1)...(19): siRNA sense strand
gaaugcagcuuacuuucuu

SEQ ID NO: 1657853 - RNA, 19 nt, Homo sapiens
  misc_RNA (1)...(19): siRNA sense strand
ucgauuaccugaagaguuu

SEQ ID NO: 1657854 - RNA, 19 nt, Homo sapiens
  misc_RNA (1)...(19): siRNA sense strand
gcacacacauaucacauca

SEQ ID NO: 1657855 - RNA, 19 nt, Homo sapiens
  misc_RNA (1)...(19): siRNA sense strand
ccugaagaguuuagaaaua

SEQ ID NO: 1657856 - RNA, 19 nt, Homo sapiens
  misc_RNA (1)...(19): siRNA sense strand
gcugaugaccugaggauua

SEQ ID NO: 1657857 - RNA, 19 nt, Homo sapiens
  misc_RNA (1)...(19): siRNA sense strand
caaccacacgggagaauua

SEQ ID NO: 1657858 - RNA, 19 nt, Homo sapiens
  misc_RNA (1)...(19): siRNA sense strand
gcagaaugcagcuuacuuu

SEQ ID NO: 1657859 - RNA, 19 nt, Homo sapiens
  misc_RNA (1)...(19): siRNA sense strand
caucgagacuuaccagguu

SEQ ID NO: 1657860 - RNA, 19 nt, Homo sapiens
  misc_RNA (1)...(19): siRNA sense strand
gcaguggcggcuacaaaua

SEQ ID NO: 1657861 - RNA, 19 nt, Homo sapiens
  misc_RNA (1)...(19): siRNA sense strand
ggauuaaccuauggaacuu

SEQ ID NO: 1657862 - RNA, 19 nt, Homo sapiens
  misc_RNA (1)...(19): siRNA sense strand
gaucacagcagccgaguuc

SEQ ID NO: 1657863 - RNA, 19 nt, Homo sapiens
  misc_RNA (1)...(19): siRNA sense strand
ggacaauccggcuguguga

SEQ ID NO: 1657864 - RNA, 19 nt, Homo sapiens
  misc_RNA (1)...(19): siRNA sense strand
gcagcuuacuuucuucugu

SEQ ID NO: 1657865 - RNA, 19 nt, Homo sapiens
  misc_RNA (1)...(19): siRNA sense strand
ccuauggaacuuugaaaua

SEQ ID NO: 1657866 - RNA, 19 nt, Homo sapiens
  misc_RNA (1)...(19): siRNA sense strand
cugaugaccugaggauuaa

SEQ ID NO: 1657867 - RNA, 19 nt, Homo sapiens
  misc_RNA (1)...(19): siRNA sense strand
ucucugaaauuaucucuuc

SEQ ID NO: 1657868 - RNA, 19 nt, Homo sapiens
  misc_RNA (1)...(19): siRNA sense strand
ugacaggcacaccaaauuu

SEQ ID NO: 1657869 - RNA, 19 nt, Homo sapiens
  misc_RNA (1)...(19): siRNA sense strand
gugaagcuguggaaaguca

SEQ ID NO: 1657870 - RNA, 19 nt, Homo sapiens
  misc_RNA (1)...(19): siRNA sense strand
caagcuguguucccucuau

SEQ ID NO: 1657871 - RNA, 19 nt, Homo sapiens
  misc_RNA (1)...(19): siRNA sense strand
cgaguucgauuaccugaag

SEQ ID NO: 1657872 - RNA, 19 nt, Homo sapiens
  misc_RNA (1)...(19): siRNA sense strand
agacuuaccagguucauga

SEQ ID NO: 1657873 - RNA, 19 nt, Homo sapiens
  misc_RNA (1)...(19): siRNA sense strand
gggucggguuguaauauuu

SEQ ID NO: 1657874 - RNA, 19 nt, Homo sapiens
  misc_RNA (1)...(19): siRNA sense strand
ccacacgggagaauuacua

SEQ ID NO: 1657875 - RNA, 19 nt, Homo sapiens
  misc_RNA (1)...(19): siRNA sense strand
gaagauccaagcaacagau

SEQ ID NO: 1657876 - RNA, 19 nt, Homo sapiens
  misc_RNA (1)...(19): siRNA sense strand
cugaagaguuuagaaauag

SEQ ID NO: 1657877 - RNA, 19 nt, Homo sapiens
  misc_RNA (1)...(19): siRNA sense strand
cgagaucagugucgacagu

SEQ ID NO: 1657878 - RNA, 19 nt, Homo sapiens
  misc_RNA (1)...(19): siRNA sense strand
aaagucagcgagcgugaua

SEQ ID NO: 1657879 - RNA, 19 nt, Homo sapiens
  misc_RNA (1)...(19): siRNA sense strand
gaccugaggauuaaccuau

SEQ ID NO: 1657880 - RNA, 19 nt, Homo sapiens
  misc_RNA (1)...(19): siRNA sense strand
gcacauuccagagccauga

SEQ ID NO: 1657881 - RNA, 19 nt, Homo sapiens
  misc_RNA (1)...(19): siRNA sense strand
ggcuacaaauaaccuauau

SEQ ID NO: 1657882 - RNA, 19 nt, Homo sapiens
  misc_RNA (1)...(19): siRNA sense strand
acacacauaucacaucaac

SEQ ID NO: 1657883 - RNA, 19 nt, Homo sapiens
  misc_RNA (1)...(19): siRNA sense strand
ucucuucgauuucggaugu

SEQ ID NO: 1657884 - RNA, 19 nt, Homo sapiens
  misc_RNA (1)...(19): siRNA sense strand
aacgagagcaggagaguaa

SEQ ID NO: 1657885 - RNA, 19 nt, Homo sapiens
  misc_RNA (1)...(19): siRNA sense strand
gaaaagacgagaucagugu

SEQ ID NO: 1657886 - RNA, 19 nt, Homo sapiens
  misc_RNA (1)...(19): siRNA sense strand
ucaggauguucgacagaaa

SEQ ID NO: 1657887 - RNA, 19 nt, Homo sapiens
  misc_RNA (1)...(19): siRNA sense strand
ucacaucaacuccauaucu

SEQ ID NO: 1657888 - RNA, 19 nt, Homo sapiens
  misc_RNA (1)...(19): siRNA sense strand
caguggcggcuacaaauaa

SEQ ID NO: 1657889 - RNA, 19 nt, Homo sapiens
  misc_RNA (1)...(19): siRNA sense strand
ucugggaucucaacaugga

SEQ ID NO: 1657890 - RNA, 19 nt, Homo sapiens
  misc_RNA (1)...(19): siRNA sense strand
agugggagguauaucauga

SEQ ID NO: 1657891 - RNA, 19 nt, Homo sapiens
  misc_RNA (1)...(19): siRNA sense strand
acacauaucacaucaacuc

SEQ ID NO: 1657892 - RNA, 19 nt, Homo sapiens
  misc_RNA (1)...(19): siRNA sense strand
cagcuuggcauccuucaga

SEQ ID NO: 1657893 - RNA, 19 nt, Homo sapiens
  misc_RNA (1)...(19): siRNA sense strand
ggaaugggucagacagugu

SEQ ID NO: 1657894 - RNA, 19 nt, Homo sapiens
  misc_RNA (1)...(19): siRNA sense strand
gucaaagucugggaucuca

SEQ ID NO: 1657895 - RNA, 19 nt, Homo sapiens
  misc_RNA (1)...(19): siRNA sense strand
gugacaggcacaccaaauu

SEQ ID NO: 1657896 - RNA, 19 nt, Homo sapiens
  misc_RNA (1)...(19): siRNA sense strand
caacagcgacuaugaaacc

SEQ ID NO: 1657897 - RNA, 19 nt, Homo sapiens
  misc_RNA (1)...(19): siRNA sense strand
cacaucaacuccauaucug

SEQ ID NO: 1657898 - RNA, 19 nt, Homo sapiens
  misc_RNA (1)...(19): siRNA sense strand
uuucuucugucuacuaaug

SEQ ID NO: 1657899 - RNA, 19 nt, Homo sapiens
  misc_RNA (1)...(19): siRNA sense strand
cauaucacaucaacuccau

SEQ ID NO: 1657900 - RNA, 19 nt, Homo sapiens
  misc_RNA (1)...(19): siRNA sense strand
ccaacgcacacacauauca

SEQ ID NO: 1657901 - RNA, 19 nt, Homo sapiens
  misc_RNA (1)...(19): siRNA sense strand
agucugggaucucaacaug

SEQ ID NO: 1657902 - RNA, 19 nt, Homo sapiens
  misc_RNA (1)...(19): siRNA sense strand
gucaacagcgacuaugaaa

SEQ ID NO: 1657903 - RNA, 19 nt, Homo sapiens
  misc_RNA (1)...(19): siRNA sense strand
cuuaccagguucaugacua

SEQ ID NO: 1657904 - RNA, 19 nt, Homo sapiens
  misc_RNA (1)...(19): siRNA sense strand
ggaagauccaagcaacaga

SEQ ID NO: 1657905 - RNA, 19 nt, Homo sapiens
  misc_RNA (1)...(19): siRNA sense strand
uaucacaucaacuccauau

SEQ ID NO: 1657906 - RNA, 19 nt, Homo sapiens
  misc_RNA (1)...(19): siRNA sense strand
gauuucggaugugaaguuc

SEQ ID NO: 1657907 - RNA, 19 nt, Homo sapiens
  misc_RNA (1)...(19): siRNA sense strand
gcauacagcuuggcauccu

SEQ ID NO: 1657908 - RNA, 19 nt, Homo sapiens
  misc_RNA (1)...(19): siRNA sense strand
acaacaacuucuucaggau

SEQ ID NO: 1657909 - RNA, 19 nt, Homo sapiens
  misc_RNA (1)...(19): siRNA sense strand
caacgagagcaggagagua

SEQ ID NO: 1657910 - RNA, 19 nt, Homo sapiens
  misc_RNA (1)...(19): siRNA sense strand
ugacaggcuccuacaacaa

SEQ ID NO: 1657911 - RNA, 19 nt, Homo sapiens
  misc_RNA (1)...(19): siRNA sense strand
uaaccuauggaacuuugaa

SEQ ID NO: 1657912 - RNA, 19 nt, Homo sapiens
  misc_RNA (1)...(19): siRNA sense strand
cgauuucggaugugaaguu

SEQ ID NO: 1657913 - RNA, 19 nt, Homo sapiens
  misc_RNA (1)...(19): siRNA sense strand
agaaggcuacaaucugaaa

SEQ ID NO: 1657914 - RNA, 19 nt, Homo sapiens
  misc_RNA (1)...(19): siRNA sense strand
uaccugaagaguuuagaaa

SEQ ID NO: 1657915 - RNA, 19 nt, Homo sapiens
  misc_RNA (1)...(19): siRNA sense strand
ccaagcaacagaucauuuu

SEQ ID NO: 1657916 - RNA, 19 nt, Homo sapiens
  misc_RNA (1)...(19): siRNA sense strand
gaaagucagcgagcgugau

SEQ ID NO: 1657917 - RNA, 19 nt, Homo sapiens
  misc_RNA (1)...(19): siRNA sense strand
cggcuacaaauaaccuaua

SEQ ID NO: 1657918 - RNA, 19 nt, Homo sapiens
  misc_RNA (1)...(19): siRNA sense strand
ggccagaaggcuacaaucu

SEQ ID NO: 1657919 - RNA, 19 nt, Homo sapiens
  misc_RNA (1)...(19): siRNA sense strand
gcuguguucccucuaugaa

SEQ ID NO: 1657920 - RNA, 19 nt, Homo sapiens
  misc_RNA (1)...(19): siRNA sense strand
gauccugccaccaucacaa

SEQ ID NO: 1657921 - RNA, 19 nt, Homo sapiens
  misc_RNA (1)...(19): siRNA sense strand
aaacugugaagcuguggaa

SEQ ID NO: 1657922 - RNA, 19 nt, Homo sapiens
  misc_RNA (1)...(19): siRNA sense strand
gaaacaccaagcgugaugu

SEQ ID NO: 1657923 - RNA, 19 nt, Homo sapiens
  misc_RNA (1)...(19): siRNA sense strand
agaaacaccaagcgugaug

SEQ ID NO: 1657924 - RNA, 19 nt, Homo sapiens
  misc_RNA (1)...(19): siRNA sense strand
cccagcagaaugcagcuua

SEQ ID NO: 1657925 - RNA, 19 nt, Homo sapiens
  misc_RNA (1)...(19): siRNA sense strand
gugaauacaauguuuacag

SEQ ID NO: 1657926 - RNA, 19 nt, Homo sapiens
  misc_RNA (1)...(19): siRNA sense strand
ugccaacgcacacacauau

SEQ ID NO: 1657927 - RNA, 19 nt, Homo sapiens
  misc_RNA (1)...(19): siRNA sense strand
ugucaacagcgacuaugaa

SEQ ID NO: 1657928 - RNA, 19 nt, Homo sapiens
  misc_RNA (1)...(19): siRNA sense strand
aacaacuucuucaggaugu

SEQ ID NO: 1657929 - RNA, 19 nt, Homo sapiens
  misc_RNA (1)...(19): siRNA sense strand
gacaggcuccuacaacaac

SEQ ID NO: 1657930 - RNA, 19 nt, Homo sapiens
  misc_RNA (1)...(19): siRNA sense strand
cagaaugcagcuuacuuuc

SEQ ID NO: 1657931 - RNA, 19 nt, Homo sapiens
  misc_RNA (1)...(19): siRNA sense strand
ucaacuccauaucugucaa

SEQ ID NO: 1657932 - RNA, 19 nt, Homo sapiens
  misc_RNA (1)...(19): siRNA sense strand
cacagugggagguauauca

SEQ ID NO: 1657933 - RNA, 19 nt, Homo sapiens
  misc_RNA (1)...(19): siRNA sense strand
cugaaauuaucucuucgau

SEQ ID NO: 1657934 - RNA, 19 nt, Homo sapiens
  misc_RNA (1)...(19): siRNA sense strand
gauuaaccuauggaacuuu

SEQ ID NO: 1657935 - RNA, 19 nt, Homo sapiens
  misc_RNA (1)...(19): siRNA sense strand
ucagcgagcgugauaagag

SEQ ID NO: 1657936 - RNA, 19 nt, Homo sapiens
  misc_RNA (1)...(19): siRNA sense strand
uuaccagguucaugacuac

SEQ ID NO: 1657937 - RNA, 19 nt, Homo sapiens
  misc_RNA (1)...(19): siRNA sense strand
cugugaagcuguggaaagu

SEQ ID NO: 1657938 - RNA, 19 nt, Homo sapiens
  misc_RNA (1)...(19): siRNA sense strand
gcaucugcccugugugaca

SEQ ID NO: 1657939 - RNA, 19 nt, Homo sapiens
  misc_RNA (1)...(19): siRNA sense strand
auuaaccuauggaacuuug

SEQ ID NO: 1657940 - RNA, 19 nt, Homo sapiens
  misc_RNA (1)...(19): siRNA sense strand
gacauuaagccagccaaca

SEQ ID NO: 1657941 - RNA, 19 nt, Homo sapiens
  misc_RNA (1)...(19): siRNA sense strand
cauacagcuuggcauccuu

SEQ ID NO: 1657942 - RNA, 19 nt, Homo sapiens
  misc_RNA (1)...(19): siRNA sense strand
gcuccuacaacaacuucuu

SEQ ID NO: 1657943 - RNA, 19 nt, Homo sapiens
  misc_RNA (1)...(19): siRNA sense strand
caaagucugggaucucaac

SEQ ID NO: 1657944 - RNA, 19 nt, Homo sapiens
  misc_RNA (1)...(19): siRNA sense strand
gaaugcagcuuacuuucuu

SEQ ID NO: 1657945 - RNA, 19 nt, Homo sapiens
  misc_RNA (1)...(19): siRNA sense strand
ucgauuaccugaagaguuu

SEQ ID NO: 1657946 - RNA, 19 nt, Homo sapiens
  misc_RNA (1)...(19): siRNA sense strand
gcacacacauaucacauca

SEQ ID NO: 1657947 - RNA, 19 nt, Homo sapiens
  misc_RNA (1)...(19): siRNA sense strand
ccugaagaguuuagaaaua

SEQ ID NO: 1657948 - RNA, 19 nt, Homo sapiens
  misc_RNA (1)...(19): siRNA sense strand
gcugaugaccugaggauua

SEQ ID NO: 1657949 - RNA, 19 nt, Homo sapiens
  misc_RNA (1)...(19): siRNA sense strand
caaccacacgggagaauua

SEQ ID NO: 1657950 - RNA, 19 nt, Homo sapiens
  misc_RNA (1)...(19): siRNA sense strand
gcagaaugcagcuuacuuu

SEQ ID NO: 1657951 - RNA, 19 nt, Homo sapiens
  misc_RNA (1)...(19): siRNA sense strand
caucgagacuuaccagguu

SEQ ID NO: 1657952 - RNA, 19 nt, Homo sapiens
  misc_RNA (1)...(19): siRNA sense strand
gcaguggcggcuacaaaua

SEQ ID NO: 1657953 - RNA, 19 nt, Homo sapiens
  misc_RNA (1)...(19): siRNA sense strand
ggauuaaccuauggaacuu

SEQ ID NO: 1657954 - RNA, 19 nt, Homo sapiens
  misc_RNA (1)...(19): siRNA sense strand
gaucacagcagccgaguuc

SEQ ID NO: 1657955 - RNA, 19 nt, Homo sapiens
  misc_RNA (1)...(19): siRNA sense strand
ggacaauccggcuguguga

SEQ ID NO: 1657956 - RNA, 19 nt, Homo sapiens
  misc_RNA (1)...(19): siRNA sense strand
gcagcuuacuuucuucugu

SEQ ID NO: 1657957 - RNA, 19 nt, Homo sapiens
  misc_RNA (1)...(19): siRNA sense strand
ccuauggaacuuugaaaua

SEQ ID NO: 1657958 - RNA, 19 nt, Homo sapiens
  misc_RNA (1)...(19): siRNA sense strand
cugaugaccugaggauuaa

SEQ ID NO: 1657959 - RNA, 19 nt, Homo sapiens
  misc_RNA (1)...(19): siRNA sense strand
ucucugaaauuaucucuuc

SEQ ID NO: 1657960 - RNA, 19 nt, Homo sapiens
  misc_RNA (1)...(19): siRNA sense strand
ugacaggcacaccaaauuu

SEQ ID NO: 1657961 - RNA, 19 nt, Homo sapiens
  misc_RNA (1)...(19): siRNA sense strand
gugaagcuguggaaaguca

SEQ ID NO: 1657962 - RNA, 19 nt, Homo sapiens
  misc_RNA (1)...(19): siRNA sense strand
caagcuguguucccucuau

SEQ ID NO: 1657963 - RNA, 19 nt, Homo sapiens
  misc_RNA (1)...(19): siRNA sense strand
cgaguucgauuaccugaag

SEQ ID NO: 1657964 - RNA, 19 nt, Homo sapiens
  misc_RNA (1)...(19): siRNA sense strand
agacuuaccagguucauga

SEQ ID NO: 1657965 - RNA, 19 nt, Homo sapiens
  misc_RNA (1)...(19): siRNA sense strand
gggucggguuguaauauuu

SEQ ID NO: 1657966 - RNA, 19 nt, Homo sapiens
  misc_RNA (1)...(19): siRNA sense strand
ccacacgggagaauuacua

SEQ ID NO: 1657967 - RNA, 19 nt, Homo sapiens
  misc_RNA (1)...(19): siRNA sense strand
gaagauccaagcaacagau

SEQ ID NO: 1657968 - RNA, 19 nt, Homo sapiens
  misc_RNA (1)...(19): siRNA sense strand
cugaagaguuuagaaauag

SEQ ID NO: 1657969 - RNA, 19 nt, Homo sapiens
  misc_RNA (1)...(19): siRNA sense strand
cgagaucagugucgacagu

SEQ ID NO: 1657970 - RNA, 19 nt, Homo sapiens
  misc_RNA (1)...(19): siRNA sense strand
aaagucagcgagcgugaua

SEQ ID NO: 1657971 - RNA, 19 nt, Homo sapiens
  misc_RNA (1)...(19): siRNA sense strand
gaccugaggauuaaccuau

SEQ ID NO: 1657972 - RNA, 19 nt, Homo sapiens
  misc_RNA (1)...(19): siRNA sense strand
gcacauuccagagccauga

SEQ ID NO: 1657973 - RNA, 19 nt, Homo sapiens
  misc_RNA (1)...(19): siRNA sense strand
ggcuacaaauaaccuauau

SEQ ID NO: 1657974 - RNA, 19 nt, Homo sapiens
  misc_RNA (1)...(19): siRNA sense strand
acacacauaucacaucaac

SEQ ID NO: 1657975 - RNA, 19 nt, Homo sapiens
  misc_RNA (1)...(19): siRNA sense strand
ucucuucgauuucggaugu

SEQ ID NO: 1657976 - RNA, 19 nt, Homo sapiens
  misc_RNA (1)...(19): siRNA sense strand
aacgagagcaggagaguaa

SEQ ID NO: 1657977 - RNA, 19 nt, Homo sapiens
  misc_RNA (1)...(19): siRNA sense strand
gaaaagacgagaucagugu

SEQ ID NO: 1657978 - RNA, 19 nt, Homo sapiens
  misc_RNA (1)...(19): siRNA sense strand
ucaggauguucgacagaaa

SEQ ID NO: 1657979 - RNA, 19 nt, Homo sapiens
  misc_RNA (1)...(19): siRNA sense strand
ucacaucaacuccauaucu

SEQ ID NO: 1657980 - RNA, 19 nt, Homo sapiens
  misc_RNA (1)...(19): siRNA sense strand
caguggcggcuacaaauaa

SEQ ID NO: 1657981 - RNA, 19 nt, Homo sapiens
  misc_RNA (1)...(19): siRNA sense strand
ucugggaucucaacaugga

SEQ ID NO: 1657982 - RNA, 19 nt, Homo sapiens
  misc_RNA (1)...(19): siRNA sense strand
agugggagguauaucauga

SEQ ID NO: 1657983 - RNA, 19 nt, Homo sapiens
  misc_RNA (1)...(19): siRNA sense strand
acacauaucacaucaacuc

SEQ ID NO: 1657984 - RNA, 19 nt, Homo sapiens
  misc_RNA (1)...(19): siRNA sense strand
cagcuuggcauccuucaga

SEQ ID NO: 1657985 - RNA, 19 nt, Homo sapiens
  misc_RNA (1)...(19): siRNA sense strand
ggaaugggucagacagugu

SEQ ID NO: 1657986 - RNA, 19 nt, Homo sapiens
  misc_RNA (1)...(19): siRNA sense strand
gucaaagucugggaucuca

SEQ ID NO: 1657987 - RNA, 19 nt, Homo sapiens
  misc_RNA (1)...(19): siRNA sense strand
gugacaggcacaccaaauu

SEQ ID NO: 1657988 - RNA, 19 nt, Homo sapiens
  misc_RNA (1)...(19): siRNA sense strand
caacagcgacuaugaaacc

SEQ ID NO: 1657989 - RNA, 19 nt, Homo sapiens
  misc_RNA (1)...(19): siRNA sense strand
cacaucaacuccauaucug

SEQ ID NO: 1657990 - RNA, 19 nt, Homo sapiens
  misc_RNA (1)...(19): siRNA sense strand
uuucuucugucuacuaaug

SEQ ID NO: 1657991 - RNA, 19 nt, Homo sapiens
  misc_RNA (1)...(19): siRNA sense strand
cauaucacaucaacuccau

SEQ ID NO: 1657992 - RNA, 19 nt, Homo sapiens
  misc_RNA (1)...(19): siRNA sense strand
ccaacgcacacacauauca

SEQ ID NO: 1657993 - RNA, 19 nt, Homo sapiens
  misc_RNA (1)...(19): siRNA sense strand
agucugggaucucaacaug

SEQ ID NO: 1657994 - RNA, 19 nt, Homo sapiens
  misc_RNA (1)...(19): siRNA sense strand
gucaacagcgacuaugaaa

SEQ ID NO: 1657995 - RNA, 19 nt, Homo sapiens
  misc_RNA (1)...(19): siRNA sense strand
cuuaccagguucaugacua

SEQ ID NO: 1657996 - RNA, 19 nt, Homo sapiens
  misc_RNA (1)...(19): siRNA sense strand
ggaagauccaagcaacaga

SEQ ID NO: 1657997 - RNA, 19 nt, Homo sapiens
  misc_RNA (1)...(19): siRNA sense strand
uaucacaucaacuccauau

SEQ ID NO: 1657998 - RNA, 19 nt, Homo sapiens
  misc_RNA (1)...(19): siRNA sense strand
gauuucggaugugaaguuc

SEQ ID NO: 1657999 - RNA, 19 nt, Homo sapiens
  misc_RNA (1)...(19): siRNA sense strand
gcauacagcuuggcauccu

SEQ ID NO: 1658000 - RNA, 19 nt, Homo sapiens
  misc_RNA (1)...(19): siRNA sense strand
acaacaacuucuucaggau

SEQ ID NO: 1658001 - RNA, 19 nt, Homo sapiens
  misc_RNA (1)...(19): siRNA sense strand
caacgagagcaggagagua

SEQ ID NO: 1658002 - RNA, 19 nt, Homo sapiens
  misc_RNA (1)...(19): siRNA sense strand
ugacaggcuccuacaacaa

SEQ ID NO: 1658003 - RNA, 19 nt, Homo sapiens
  misc_RNA (1)...(19): siRNA sense strand
uaaccuauggaacuuugaa

SEQ ID NO: 1658004 - RNA, 19 nt, Homo sapiens
  misc_RNA (1)...(19): siRNA sense strand
cgauuucggaugugaaguu

SEQ ID NO: 1658005 - RNA, 19 nt, Homo sapiens
  misc_RNA (1)...(19): siRNA sense strand
agaaggcuacaaucugaaa

SEQ ID NO: 1658006 - RNA, 19 nt, Homo sapiens
  misc_RNA (1)...(19): siRNA sense strand
uaccugaagaguuuagaaa

SEQ ID NO: 1658007 - RNA, 19 nt, Homo sapiens
  misc_RNA (1)...(19): siRNA sense strand
ccaagcaacagaucauuuu

SEQ ID NO: 1658008 - RNA, 19 nt, Homo sapiens
  misc_RNA (1)...(19): siRNA sense strand
gaaagucagcgagcgugau

SEQ ID NO: 1658009 - RNA, 19 nt, Homo sapiens
  misc_RNA (1)...(19): siRNA sense strand
cggcuacaaauaaccuaua

SEQ ID NO: 1658010 - RNA, 19 nt, Homo sapiens
  misc_RNA (1)...(19): siRNA sense strand
ggccagaaggcuacaaucu

SEQ ID NO: 1658011 - RNA, 19 nt, Homo sapiens
  misc_RNA (1)...(19): siRNA sense strand
gcuguguucccucuaugaa

SEQ ID NO: 1658012 - RNA, 19 nt, Homo sapiens
  misc_RNA (1)...(19): siRNA sense strand
gauccugccaccaucacaa

SEQ ID NO: 1658013 - RNA, 19 nt, Homo sapiens
  misc_RNA (1)...(19): siRNA sense strand
aaacugugaagcuguggaa

SEQ ID NO: 1658014 - RNA, 19 nt, Homo sapiens
  misc_RNA (1)...(19): siRNA sense strand
gaaacaccaagcgugaugu

SEQ ID NO: 1658015 - RNA, 19 nt, Homo sapiens
  misc_RNA (1)...(19): siRNA sense strand
agaaacaccaagcgugaug

SEQ ID NO: 1658016 - RNA, 19 nt, Homo sapiens
  misc_RNA (1)...(19): siRNA sense strand
cccagcagaaugcagcuua

SEQ ID NO: 1658017 - RNA, 19 nt, Homo sapiens
  misc_RNA (1)...(19): siRNA sense strand
gugaauacaauguuuacag

SEQ ID NO: 1658018 - RNA, 19 nt, Homo sapiens
  misc_RNA (1)...(19): siRNA sense strand
ugccaacgcacacacauau

SEQ ID NO: 1658019 - RNA, 19 nt, Homo sapiens
  misc_RNA (1)...(19): siRNA sense strand
ugucaacagcgacuaugaa

SEQ ID NO: 1658020 - RNA, 19 nt, Homo sapiens
  misc_RNA (1)...(19): siRNA sense strand
aacaacuucuucaggaugu

SEQ ID NO: 1658021 - RNA, 19 nt, Homo sapiens
  misc_RNA (1)...(19): siRNA sense strand
gacaggcuccuacaacaac

SEQ ID NO: 1658022 - RNA, 19 nt, Homo sapiens
  misc_RNA (1)...(19): siRNA sense strand
cagaaugcagcuuacuuuc

SEQ ID NO: 1658023 - RNA, 19 nt, Homo sapiens
  misc_RNA (1)...(19): siRNA sense strand
ucaacuccauaucugucaa

SEQ ID NO: 1658024 - RNA, 19 nt, Homo sapiens
  misc_RNA (1)...(19): siRNA sense strand
cacagugggagguauauca

SEQ ID NO: 1658025 - RNA, 19 nt, Homo sapiens
  misc_RNA (1)...(19): siRNA sense strand
cugaaauuaucucuucgau

SEQ ID NO: 1658026 - RNA, 19 nt, Homo sapiens
  misc_RNA (1)...(19): siRNA sense strand
gauuaaccuauggaacuuu

SEQ ID NO: 1658027 - RNA, 19 nt, Homo sapiens
  misc_RNA (1)...(19): siRNA sense strand
ucagcgagcgugauaagag

SEQ ID NO: 1658028 - RNA, 19 nt, Homo sapiens
  misc_RNA (1)...(19): siRNA sense strand
uuaccagguucaugacuac

SEQ ID NO: 1658029 - RNA, 19 nt, Homo sapiens
  misc_RNA (1)...(19): siRNA sense strand
cugugaagcuguggaaagu

SEQ ID NO: 1658030 - RNA, 19 nt, Homo sapiens
  misc_RNA (1)...(19): siRNA sense strand
gcaucugcccugugugaca

SEQ ID NO: 1658031 - RNA, 19 nt, Homo sapiens
  misc_RNA (1)...(19): siRNA sense strand
auuaaccuauggaacuuug

SEQ ID NO: 1658032 - RNA, 19 nt, Homo sapiens
  misc_RNA (1)...(19): siRNA sense strand
gacauuaagccagccaaca

SEQ ID NO: 1658033 - RNA, 19 nt, Homo sapiens
  misc_RNA (1)...(19): siRNA sense strand
cauacagcuuggcauccuu

SEQ ID NO: 1658034 - RNA, 19 nt, Homo sapiens
  misc_RNA (1)...(19): siRNA sense strand
gcuccuacaacaacuucuu

SEQ ID NO: 1658035 - RNA, 19 nt, Homo sapiens
  misc_RNA (1)...(19): siRNA sense strand
caaagucugggaucucaac

SEQ ID NO: 1658036 - RNA, 19 nt, Homo sapiens
  misc_RNA (1)...(19): siRNA sense strand
gaaugcagcuuacuuucuu

SEQ ID NO: 1658037 - RNA, 19 nt, Homo sapiens
  misc_RNA (1)...(19): siRNA sense strand
ucgauuaccugaagaguuu

SEQ ID NO: 1658038 - RNA, 19 nt, Homo sapiens
  misc_RNA (1)...(19): siRNA sense strand
gcacacacauaucacauca

SEQ ID NO: 1658039 - RNA, 19 nt, Homo sapiens
  misc_RNA (1)...(19): siRNA sense strand
ccugaagaguuuagaaaua

SEQ ID NO: 1658040 - RNA, 19 nt, Homo sapiens
  misc_RNA (1)...(19): siRNA sense strand
gcugaugaccugaggauua

SEQ ID NO: 1658041 - RNA, 19 nt, Homo sapiens
  misc_RNA (1)...(19): siRNA sense strand
caaccacacgggagaauua

SEQ ID NO: 1658042 - RNA, 19 nt, Homo sapiens
  misc_RNA (1)...(19): siRNA sense strand
gcagaaugcagcuuacuuu

SEQ ID NO: 1658043 - RNA, 19 nt, Homo sapiens
  misc_RNA (1)...(19): siRNA sense strand
caucgagacuuaccagguu

SEQ ID NO: 1658044 - RNA, 19 nt, Homo sapiens
  misc_RNA (1)...(19): siRNA sense strand
gcaguggcggcuacaaaua

SEQ ID NO: 1658045 - RNA, 19 nt, Homo sapiens
  misc_RNA (1)...(19): siRNA sense strand
ggauuaaccuauggaacuu

SEQ ID NO: 1658046 - RNA, 19 nt, Homo sapiens
  misc_RNA (1)...(19): siRNA sense strand
gaucacagcagccgaguuc

SEQ ID NO: 1658047 - RNA, 19 nt, Homo sapiens
  misc_RNA (1)...(19): siRNA sense strand
ggacaauccggcuguguga

SEQ ID NO: 1658048 - RNA, 19 nt, Homo sapiens
  misc_RNA (1)...(19): siRNA sense strand
gcagcuuacuuucuucugu

SEQ ID NO: 1658049 - RNA, 19 nt, Homo sapiens
  misc_RNA (1)...(19): siRNA sense strand
ccuauggaacuuugaaaua

SEQ ID NO: 1658050 - RNA, 19 nt, Homo sapiens
  misc_RNA (1)...(19): siRNA sense strand
cugaugaccugaggauuaa

SEQ ID NO: 1658051 - RNA, 19 nt, Homo sapiens
  misc_RNA (1)...(19): siRNA sense strand
ucucugaaauuaucucuuc

SEQ ID NO: 1658052 - RNA, 19 nt, Homo sapiens
  misc_RNA (1)...(19): siRNA sense strand
ugacaggcacaccaaauuu

SEQ ID NO: 1658053 - RNA, 19 nt, Homo sapiens
  misc_RNA (1)...(19): siRNA sense strand
gugaagcuguggaaaguca

SEQ ID NO: 1658054 - RNA, 19 nt, Homo sapiens
  misc_RNA (1)...(19): siRNA sense strand
caagcuguguucccucuau

SEQ ID NO: 1658055 - RNA, 19 nt, Homo sapiens
  misc_RNA (1)...(19): siRNA sense strand
cgaguucgauuaccugaag

SEQ ID NO: 1658056 - RNA, 19 nt, Homo sapiens
  misc_RNA (1)...(19): siRNA sense strand
agacuuaccagguucauga

SEQ ID NO: 1658057 - RNA, 19 nt, Homo sapiens
  misc_RNA (1)...(19): siRNA sense strand
gggucggguuguaauauuu

SEQ ID NO: 1658058 - RNA, 19 nt, Homo sapiens
  misc_RNA (1)...(19): siRNA sense strand
ccacacgggagaauuacua

SEQ ID NO: 1658059 - RNA, 19 nt, Homo sapiens
  misc_RNA (1)...(19): siRNA sense strand
gaagauccaagcaacagau

SEQ ID NO: 1658060 - RNA, 19 nt, Homo sapiens
  misc_RNA (1)...(19): siRNA sense strand
cugaagaguuuagaaauag

SEQ ID NO: 1658061 - RNA, 19 nt, Homo sapiens
  misc_RNA (1)...(19): siRNA sense strand
cgagaucagugucgacagu

SEQ ID NO: 1658062 - RNA, 19 nt, Homo sapiens
  misc_RNA (1)...(19): siRNA sense strand
aaagucagcgagcgugaua

SEQ ID NO: 1658063 - RNA, 19 nt, Homo sapiens
  misc_RNA (1)...(19): siRNA sense strand
gaccugaggauuaaccuau

SEQ ID NO: 1658064 - RNA, 19 nt, Homo sapiens
  misc_RNA (1)...(19): siRNA sense strand
gcacauuccagagccauga

SEQ ID NO: 1658065 - RNA, 19 nt, Homo sapiens
  misc_RNA (1)...(19): siRNA sense strand
ggcuacaaauaaccuauau

SEQ ID NO: 1658066 - RNA, 19 nt, Homo sapiens
  misc_RNA (1)...(19): siRNA sense strand
acacacauaucacaucaac

SEQ ID NO: 1658067 - RNA, 19 nt, Homo sapiens
  misc_RNA (1)...(19): siRNA sense strand
ucucuucgauuucggaugu

SEQ ID NO: 1658068 - RNA, 19 nt, Homo sapiens
  misc_RNA (1)...(19): siRNA sense strand
aacgagagcaggagaguaa

SEQ ID NO: 1658069 - RNA, 19 nt, Homo sapiens
  misc_RNA (1)...(19): siRNA sense strand
gaaaagacgagaucagugu

SEQ ID NO: 1658070 - RNA, 19 nt, Homo sapiens
  misc_RNA (1)...(19): siRNA sense strand
ucaggauguucgacagaaa

SEQ ID NO: 1658071 - RNA, 19 nt, Homo sapiens
  misc_RNA (1)...(19): siRNA sense strand
ucacaucaacuccauaucu

SEQ ID NO: 1658072 - RNA, 19 nt, Homo sapiens
  misc_RNA (1)...(19): siRNA sense strand
caguggcggcuacaaauaa

SEQ ID NO: 1658073 - RNA, 19 nt, Homo sapiens
  misc_RNA (1)...(19): siRNA sense strand
ucugggaucucaacaugga

SEQ ID NO: 1658074 - RNA, 19 nt, Homo sapiens
  misc_RNA (1)...(19): siRNA sense strand
agugggagguauaucauga

SEQ ID NO: 1658075 - RNA, 19 nt, Homo sapiens
  misc_RNA (1)...(19): siRNA sense strand
acacauaucacaucaacuc

SEQ ID NO: 1658076 - RNA, 19 nt, Homo sapiens
  misc_RNA (1)...(19): siRNA sense strand
cagcuuggcauccuucaga

SEQ ID NO: 1658077 - RNA, 19 nt, Homo sapiens
  misc_RNA (1)...(19): siRNA sense strand
ggaaugggucagacagugu

SEQ ID NO: 1658078 - RNA, 19 nt, Homo sapiens
  misc_RNA (1)...(19): siRNA sense strand
gucaaagucugggaucuca

SEQ ID NO: 1658079 - RNA, 19 nt, Homo sapiens
  misc_RNA (1)...(19): siRNA sense strand
gugacaggcacaccaaauu

SEQ ID NO: 1658080 - RNA, 19 nt, Homo sapiens
  misc_RNA (1)...(19): siRNA sense strand
caacagcgacuaugaaacc

SEQ ID NO: 1658081 - RNA, 19 nt, Homo sapiens
  misc_RNA (1)...(19): siRNA sense strand
cacaucaacuccauaucug

SEQ ID NO: 1658082 - RNA, 19 nt, Homo sapiens
  misc_RNA (1)...(19): siRNA sense strand
uuucuucugucuacuaaug

SEQ ID NO: 1658083 - RNA, 19 nt, Homo sapiens
  misc_RNA (1)...(19): siRNA sense strand
cauaucacaucaacuccau

SEQ ID NO: 1658084 - RNA, 19 nt, Homo sapiens
  misc_RNA (1)...(19): siRNA sense strand
ccaacgcacacacauauca

SEQ ID NO: 1658085 - RNA, 19 nt, Homo sapiens
  misc_RNA (1)...(19): siRNA sense strand
agucugggaucucaacaug

SEQ ID NO: 1658086 - RNA, 19 nt, Homo sapiens
  misc_RNA (1)...(19): siRNA sense strand
gucaacagcgacuaugaaa

SEQ ID NO: 1658087 - RNA, 19 nt, Homo sapiens
  misc_RNA (1)...(19): siRNA sense strand
cuuaccagguucaugacua

SEQ ID NO: 1658088 - RNA, 19 nt, Homo sapiens
  misc_RNA (1)...(19): siRNA sense strand
ggaagauccaagcaacaga

SEQ ID NO: 1658089 - RNA, 19 nt, Homo sapiens
  misc_RNA (1)...(19): siRNA sense strand
uaucacaucaacuccauau

SEQ ID NO: 1658090 - RNA, 19 nt, Homo sapiens
  misc_RNA (1)...(19): siRNA sense strand
gauuucggaugugaaguuc

SEQ ID NO: 1658091 - RNA, 19 nt, Homo sapiens
  misc_RNA (1)...(19): siRNA sense strand
gcauacagcuuggcauccu

SEQ ID NO: 1658092 - RNA, 19 nt, Homo sapiens
  misc_RNA (1)...(19): siRNA sense strand
acaacaacuucuucaggau

SEQ ID NO: 1658093 - RNA, 19 nt, Homo sapiens
  misc_RNA (1)...(19): siRNA sense strand
caacgagagcaggagagua

SEQ ID NO: 1658094 - RNA, 19 nt, Homo sapiens
  misc_RNA (1)...(19): siRNA sense strand
ugacaggcuccuacaacaa

SEQ ID NO: 1658095 - RNA, 19 nt, Homo sapiens
  misc_RNA (1)...(19): siRNA sense strand
uaaccuauggaacuuugaa

SEQ ID NO: 1658096 - RNA, 19 nt, Homo sapiens
  misc_RNA (1)...(19): siRNA sense strand
cgauuucggaugugaaguu

SEQ ID NO: 1658097 - RNA, 19 nt, Homo sapiens
  misc_RNA (1)...(19): siRNA sense strand
agaaggcuacaaucugaaa

SEQ ID NO: 1658098 - RNA, 19 nt, Homo sapiens
  misc_RNA (1)...(19): siRNA sense strand
uaccugaagaguuuagaaa

SEQ ID NO: 1658099 - RNA, 19 nt, Homo sapiens
  misc_RNA (1)...(19): siRNA sense strand
ccaagcaacagaucauuuu

SEQ ID NO: 1658100 - RNA, 19 nt, Homo sapiens
  misc_RNA (1)...(19): siRNA sense strand
gaaagucagcgagcgugau

SEQ ID NO: 1658101 - RNA, 19 nt, Homo sapiens
  misc_RNA (1)...(19): siRNA sense strand
cggcuacaaauaaccuaua

SEQ ID NO: 1658102 - RNA, 19 nt, Homo sapiens
  misc_RNA (1)...(19): siRNA sense strand
ggccagaaggcuacaaucu

SEQ ID NO: 1658103 - RNA, 19 nt, Homo sapiens
  misc_RNA (1)...(19): siRNA sense strand
gcuguguucccucuaugaa

SEQ ID NO: 1658104 - RNA, 19 nt, Homo sapiens
  misc_RNA (1)...(19): siRNA sense strand
gauccugccaccaucacaa

SEQ ID NO: 1658105 - RNA, 19 nt, Homo sapiens
  misc_RNA (1)...(19): siRNA sense strand
aaacugugaagcuguggaa

SEQ ID NO: 1658106 - RNA, 19 nt, Homo sapiens
  misc_RNA (1)...(19): siRNA sense strand
gaaacaccaagcgugaugu

SEQ ID NO: 1658107 - RNA, 19 nt, Homo sapiens
  misc_RNA (1)...(19): siRNA sense strand
agaaacaccaagcgugaug

SEQ ID NO: 1658108 - RNA, 19 nt, Homo sapiens
  misc_RNA (1)...(19): siRNA sense strand
cccagcagaaugcagcuua

SEQ ID NO: 1658109 - RNA, 19 nt, Homo sapiens
  misc_RNA (1)...(19): siRNA sense strand
gugaauacaauguuuacag

SEQ ID NO: 1658110 - RNA, 19 nt, Homo sapiens
  misc_RNA (1)...(19): siRNA sense strand
ugccaacgcacacacauau

SEQ ID NO: 1658111 - RNA, 19 nt, Homo sapiens
  misc_RNA (1)...(19): siRNA sense strand
ugucaacagcgacuaugaa

SEQ ID NO: 1658112 - RNA, 19 nt, Homo sapiens
  misc_RNA (1)...(19): siRNA sense strand
aacaacuucuucaggaugu

SEQ ID NO: 1658113 - RNA, 19 nt, Homo sapiens
  misc_RNA (1)...(19): siRNA sense strand
gacaggcuccuacaacaac

SEQ ID NO: 1658114 - RNA, 19 nt, Homo sapiens
  misc_RNA (1)...(19): siRNA sense strand
cagaaugcagcuuacuuuc

SEQ ID NO: 1658115 - RNA, 19 nt, Homo sapiens
  misc_RNA (1)...(19): siRNA sense strand
ucaacuccauaucugucaa

SEQ ID NO: 1658116 - RNA, 19 nt, Homo sapiens
  misc_RNA (1)...(19): siRNA sense strand
cacagugggagguauauca

SEQ ID NO: 1658117 - RNA, 19 nt, Homo sapiens
  misc_RNA (1)...(19): siRNA sense strand
cugaaauuaucucuucgau

SEQ ID NO: 1658118 - RNA, 19 nt, Homo sapiens
  misc_RNA (1)...(19): siRNA sense strand
gauuaaccuauggaacuuu

SEQ ID NO: 1658119 - RNA, 19 nt, Homo sapiens
  misc_RNA (1)...(19): siRNA sense strand
ucagcgagcgugauaagag

SEQ ID NO: 1658120 - RNA, 19 nt, Homo sapiens
  misc_RNA (1)...(19): siRNA sense strand
uuaccagguucaugacuac

SEQ ID NO: 1658121 - RNA, 19 nt, Homo sapiens
  misc_RNA (1)...(19): siRNA sense strand
cugugaagcuguggaaagu

SEQ ID NO: 1658122 - RNA, 19 nt, Homo sapiens
  misc_RNA (1)...(19): siRNA sense strand
gcaucugcccugugugaca

SEQ ID NO: 1658123 - RNA, 19 nt, Homo sapiens
  misc_RNA (1)...(19): siRNA sense strand
auuaaccuauggaacuuug

SEQ ID NO: 1658124 - RNA, 19 nt, Homo sapiens
  misc_RNA (1)...(19): siRNA sense strand
gacauuaagccagccaaca

SEQ ID NO: 1658125 - RNA, 19 nt, Homo sapiens
  misc_RNA (1)...(19): siRNA sense strand
cauacagcuuggcauccuu

SEQ ID NO: 1658126 - RNA, 19 nt, Homo sapiens
  misc_RNA (1)...(19): siRNA sense strand
gcuccuacaacaacuucuu

SEQ ID NO: 1658127 - RNA, 19 nt, Homo sapiens
  misc_RNA (1)...(19): siRNA sense strand
caaagucugggaucucaac

SEQ ID NO: 1658128 - RNA, 19 nt, Homo sapiens
  misc_RNA (1)...(19): siRNA sense strand
gaaugcagcuuacuuucuu

SEQ ID NO: 1658129 - RNA, 19 nt, Homo sapiens
  misc_RNA (1)...(19): siRNA sense strand
ucgauuaccugaagaguuu

SEQ ID NO: 1658130 - RNA, 19 nt, Homo sapiens
  misc_RNA (1)...(19): siRNA sense strand
gcacacacauaucacauca

SEQ ID NO: 1658131 - RNA, 19 nt, Homo sapiens
  misc_RNA (1)...(19): siRNA sense strand
ccugaagaguuuagaaaua

SEQ ID NO: 1658132 - RNA, 19 nt, Homo sapiens
  misc_RNA (1)...(19): siRNA sense strand
gcugaugaccugaggauua

SEQ ID NO: 1658133 - RNA, 19 nt, Homo sapiens
  misc_RNA (1)...(19): siRNA sense strand
caaccacacgggagaauua

SEQ ID NO: 1658134 - RNA, 19 nt, Homo sapiens
  misc_RNA (1)...(19): siRNA sense strand
gcagaaugcagcuuacuuu

SEQ ID NO: 1658135 - RNA, 19 nt, Homo sapiens
  misc_RNA (1)...(19): siRNA sense strand
caucgagacuuaccagguu

SEQ ID NO: 1658136 - RNA, 19 nt, Homo sapiens
  misc_RNA (1)...(19): siRNA sense strand
gcaguggcggcuacaaaua

SEQ ID NO: 1658137 - RNA, 19 nt, Homo sapiens
  misc_RNA (1)...(19): siRNA sense strand
ggauuaaccuauggaacuu

SEQ ID NO: 1658138 - RNA, 19 nt, Homo sapiens
  misc_RNA (1)...(19): siRNA sense strand
gaucacagcagccgaguuc

SEQ ID NO: 1658139 - RNA, 19 nt, Homo sapiens
  misc_RNA (1)...(19): siRNA sense strand
ggacaauccggcuguguga

SEQ ID NO: 1658140 - RNA, 19 nt, Homo sapiens
  misc_RNA (1)...(19): siRNA sense strand
gcagcuuacuuucuucugu

SEQ ID NO: 1658141 - RNA, 19 nt, Homo sapiens
  misc_RNA (1)...(19): siRNA sense strand
ccuauggaacuuugaaaua

SEQ ID NO: 1658142 - RNA, 19 nt, Homo sapiens
  misc_RNA (1)...(19): siRNA sense strand
cugaugaccugaggauuaa

SEQ ID NO: 1658143 - RNA, 19 nt, Homo sapiens
  misc_RNA (1)...(19): siRNA sense strand
ucucugaaauuaucucuuc

SEQ ID NO: 1658144 - RNA, 19 nt, Homo sapiens
  misc_RNA (1)...(19): siRNA sense strand
ugacaggcacaccaaauuu

SEQ ID NO: 1658145 - RNA, 19 nt, Homo sapiens
  misc_RNA (1)...(19): siRNA sense strand
gugaagcuguggaaaguca

SEQ ID NO: 1658146 - RNA, 19 nt, Homo sapiens
  misc_RNA (1)...(19): siRNA sense strand
caagcuguguucccucuau

SEQ ID NO: 1658147 - RNA, 19 nt, Homo sapiens
  misc_RNA (1)...(19): siRNA sense strand
cgaguucgauuaccugaag

SEQ ID NO: 1658148 - RNA, 19 nt, Homo sapiens
  misc_RNA (1)...(19): siRNA sense strand
agacuuaccagguucauga

SEQ ID NO: 1658149 - RNA, 19 nt, Homo sapiens
  misc_RNA (1)...(19): siRNA sense strand
gggucggguuguaauauuu

SEQ ID NO: 1658150 - RNA, 19 nt, Homo sapiens
  misc_RNA (1)...(19): siRNA sense strand
ccacacgggagaauuacua

SEQ ID NO: 1658151 - RNA, 19 nt, Homo sapiens
  misc_RNA (1)...(19): siRNA sense strand
gaagauccaagcaacagau

SEQ ID NO: 1658152 - RNA, 19 nt, Homo sapiens
  misc_RNA (1)...(19): siRNA sense strand
cugaagaguuuagaaauag

SEQ ID NO: 1658153 - RNA, 19 nt, Homo sapiens
  misc_RNA (1)...(19): siRNA sense strand
cgagaucagugucgacagu

SEQ ID NO: 1658154 - RNA, 19 nt, Homo sapiens
  misc_RNA (1)...(19): siRNA sense strand
aaagucagcgagcgugaua

SEQ ID NO: 1658155 - RNA, 19 nt, Homo sapiens
  misc_RNA (1)...(19): siRNA sense strand
gaccugaggauuaaccuau

SEQ ID NO: 1658156 - RNA, 19 nt, Homo sapiens
  misc_RNA (1)...(19): siRNA sense strand
gcacauuccagagccauga

SEQ ID NO: 1658157 - RNA, 19 nt, Homo sapiens
  misc_RNA (1)...(19): siRNA sense strand
ggcuacaaauaaccuauau

SEQ ID NO: 1658158 - RNA, 19 nt, Homo sapiens
  misc_RNA (1)...(19): siRNA sense strand
acacacauaucacaucaac

SEQ ID NO: 1658159 - RNA, 19 nt, Homo sapiens
  misc_RNA (1)...(19): siRNA sense strand
ucucuucgauuucggaugu

SEQ ID NO: 1658160 - RNA, 19 nt, Homo sapiens
  misc_RNA (1)...(19): siRNA sense strand
aacgagagcaggagaguaa

SEQ ID NO: 1658161 - RNA, 19 nt, Homo sapiens
  misc_RNA (1)...(19): siRNA sense strand
gaaaagacgagaucagugu

SEQ ID NO: 1658162 - RNA, 19 nt, Homo sapiens
  misc_RNA (1)...(19): siRNA sense strand
ucaggauguucgacagaaa

SEQ ID NO: 1658163 - RNA, 19 nt, Homo sapiens
  misc_RNA (1)...(19): siRNA sense strand
ucacaucaacuccauaucu

SEQ ID NO: 1658164 - RNA, 19 nt, Homo sapiens
  misc_RNA (1)...(19): siRNA sense strand
caguggcggcuacaaauaa

SEQ ID NO: 1658165 - RNA, 19 nt, Homo sapiens
  misc_RNA (1)...(19): siRNA sense strand
ucugggaucucaacaugga

SEQ ID NO: 1658166 - RNA, 19 nt, Homo sapiens
  misc_RNA (1)...(19): siRNA sense strand
agugggagguauaucauga

SEQ ID NO: 1658167 - RNA, 19 nt, Homo sapiens
  misc_RNA (1)...(19): siRNA sense strand
acacauaucacaucaacuc

SEQ ID NO: 1658168 - RNA, 19 nt, Homo sapiens
  misc_RNA (1)...(19): siRNA sense strand
cagcuuggcauccuucaga

SEQ ID NO: 1658169 - RNA, 19 nt, Homo sapiens
  misc_RNA (1)...(19): siRNA sense strand
ggaaugggucagacagugu

SEQ ID NO: 1658170 - RNA, 19 nt, Homo sapiens
  misc_RNA (1)...(19): siRNA sense strand
gucaaagucugggaucuca

SEQ ID NO: 1658171 - RNA, 19 nt, Homo sapiens
  misc_RNA (1)...(19): siRNA sense strand
gugacaggcacaccaaauu

SEQ ID NO: 1658172 - RNA, 19 nt, Homo sapiens
  misc_RNA (1)...(19): siRNA sense strand
caacagcgacuaugaaacc

SEQ ID NO: 1658173 - RNA, 19 nt, Homo sapiens
  misc_RNA (1)...(19): siRNA sense strand
cacaucaacuccauaucug

SEQ ID NO: 1658174 - RNA, 19 nt, Homo sapiens
  misc_RNA (1)...(19): siRNA sense strand
uuucuucugucuacuaaug

SEQ ID NO: 1658175 - RNA, 19 nt, Homo sapiens
  misc_RNA (1)...(19): siRNA sense strand
cauaucacaucaacuccau

SEQ ID NO: 1658176 - RNA, 19 nt, Homo sapiens
  misc_RNA (1)...(19): siRNA sense strand
ccaacgcacacacauauca

SEQ ID NO: 1658177 - RNA, 19 nt, Homo sapiens
  misc_RNA (1)...(19): siRNA sense strand
agucugggaucucaacaug

SEQ ID NO: 1658178 - RNA, 19 nt, Homo sapiens
  misc_RNA (1)...(19): siRNA sense strand
gucaacagcgacuaugaaa

SEQ ID NO: 1658179 - RNA, 19 nt, Homo sapiens
  misc_RNA (1)...(19): siRNA sense strand
cuuaccagguucaugacua

SEQ ID NO: 1658180 - RNA, 19 nt, Homo sapiens
  misc_RNA (1)...(19): siRNA sense strand
ggaagauccaagcaacaga

SEQ ID NO: 1658181 - RNA, 19 nt, Homo sapiens
  misc_RNA (1)...(19): siRNA sense strand
uaucacaucaacuccauau

SEQ ID NO: 1658182 - RNA, 19 nt, Homo sapiens
  misc_RNA (1)...(19): siRNA sense strand
gauuucggaugugaaguuc

SEQ ID NO: 1658183 - RNA, 19 nt, Homo sapiens
  misc_RNA (1)...(19): siRNA sense strand
gcauacagcuuggcauccu

SEQ ID NO: 1658184 - RNA, 19 nt, Homo sapiens
  misc_RNA (1)...(19): siRNA sense strand
acaacaacuucuucaggau

SEQ ID NO: 1658185 - RNA, 19 nt, Homo sapiens
  misc_RNA (1)...(19): siRNA sense strand
caacgagagcaggagagua

SEQ ID NO: 1658186 - RNA, 19 nt, Homo sapiens
  misc_RNA (1)...(19): siRNA sense strand
ugacaggcuccuacaacaa

SEQ ID NO: 1658187 - RNA, 19 nt, Homo sapiens
  misc_RNA (1)...(19): siRNA sense strand
uaaccuauggaacuuugaa

SEQ ID NO: 1658188 - RNA, 19 nt, Homo sapiens
  misc_RNA (1)...(19): siRNA sense strand
cgauuucggaugugaaguu

SEQ ID NO: 1658189 - RNA, 19 nt, Homo sapiens
  misc_RNA (1)...(19): siRNA sense strand
agaaggcuacaaucugaaa

SEQ ID NO: 1658190 - RNA, 19 nt, Homo sapiens
  misc_RNA (1)...(19): siRNA sense strand
uaccugaagaguuuagaaa

SEQ ID NO: 1658191 - RNA, 19 nt, Homo sapiens
  misc_RNA (1)...(19): siRNA sense strand
ccaagcaacagaucauuuu

SEQ ID NO: 1658192 - RNA, 19 nt, Homo sapiens
  misc_RNA (1)...(19): siRNA sense strand
gaaagucagcgagcgugau

SEQ ID NO: 1658193 - RNA, 19 nt, Homo sapiens
  misc_RNA (1)...(19): siRNA sense strand
cggcuacaaauaaccuaua

SEQ ID NO: 1658194 - RNA, 19 nt, Homo sapiens
  misc_RNA (1)...(19): siRNA sense strand
ggccagaaggcuacaaucu

SEQ ID NO: 1658195 - RNA, 19 nt, Homo sapiens
  misc_RNA (1)...(19): siRNA sense strand
gcuguguucccucuaugaa

SEQ ID NO: 1658196 - RNA, 19 nt, Homo sapiens
  misc_RNA (1)...(19): siRNA sense strand
gauccugccaccaucacaa

SEQ ID NO: 1658197 - RNA, 19 nt, Homo sapiens
  misc_RNA (1)...(19): siRNA sense strand
aaacugugaagcuguggaa

SEQ ID NO: 1658198 - RNA, 19 nt, Homo sapiens
  misc_RNA (1)...(19): siRNA sense strand
gaaacaccaagcgugaugu

SEQ ID NO: 1658199 - RNA, 19 nt, Homo sapiens
  misc_RNA (1)...(19): siRNA sense strand
agaaacaccaagcgugaug

SEQ ID NO: 1658200 - RNA, 19 nt, Homo sapiens
  misc_RNA (1)...(19): siRNA sense strand
cccagcagaaugcagcuua

SEQ ID NO: 1658201 - RNA, 19 nt, Homo sapiens
  misc_RNA (1)...(19): siRNA sense strand
gugaauacaauguuuacag

SEQ ID NO: 1658202 - RNA, 19 nt, Homo sapiens
  misc_RNA (1)...(19): siRNA sense strand
ugccaacgcacacacauau

SEQ ID NO: 1658203 - RNA, 19 nt, Homo sapiens
  misc_RNA (1)...(19): siRNA sense strand
ugucaacagcgacuaugaa

SEQ ID NO: 1658204 - RNA, 19 nt, Homo sapiens
  misc_RNA (1)...(19): siRNA sense strand
aacaacuucuucaggaugu

SEQ ID NO: 1658205 - RNA, 19 nt, Homo sapiens
  misc_RNA (1)...(19): siRNA sense strand
gacaggcuccuacaacaac

SEQ ID NO: 1658206 - RNA, 19 nt, Homo sapiens
  misc_RNA (1)...(19): siRNA sense strand
cagaaugcagcuuacuuuc

SEQ ID NO: 1658207 - RNA, 19 nt, Homo sapiens
  misc_RNA (1)...(19): siRNA sense strand
ucaacuccauaucugucaa

SEQ ID NO: 1658208 - RNA, 19 nt, Homo sapiens
  misc_RNA (1)...(19): siRNA sense strand
cacagugggagguauauca

SEQ ID NO: 1658209 - RNA, 19 nt, Homo sapiens
  misc_RNA (1)...(19): siRNA sense strand
cugaaauuaucucuucgau

SEQ ID NO: 1658210 - RNA, 19 nt, Homo sapiens
  misc_RNA (1)...(19): siRNA sense strand
gauuaaccuauggaacuuu

SEQ ID NO: 1658211 - RNA, 19 nt, Homo sapiens
  misc_RNA (1)...(19): siRNA sense strand
ucagcgagcgugauaagag

SEQ ID NO: 1658212 - RNA, 19 nt, Homo sapiens
  misc_RNA (1)...(19): siRNA sense strand
uuaccagguucaugacuac

SEQ ID NO: 1658213 - RNA, 19 nt, Homo sapiens
  misc_RNA (1)...(19): siRNA sense strand
cugugaagcuguggaaagu

SEQ ID NO: 1658214 - RNA, 19 nt, Homo sapiens
  misc_RNA (1)...(19): siRNA sense strand
gcaucugcccugugugaca

SEQ ID NO: 1658215 - RNA, 19 nt, Homo sapiens
  misc_RNA (1)...(19): siRNA sense strand
auuaaccuauggaacuuug

SEQ ID NO: 1658216 - RNA, 19 nt, Homo sapiens
  misc_RNA (1)...(19): siRNA sense strand
gacauuaagccagccaaca

SEQ ID NO: 1658217 - RNA, 19 nt, Homo sapiens
  misc_RNA (1)...(19): siRNA sense strand
cauacagcuuggcauccuu

SEQ ID NO: 1658218 - RNA, 19 nt, Homo sapiens
  misc_RNA (1)...(19): siRNA sense strand
gcuccuacaacaacuucuu

SEQ ID NO: 1658219 - RNA, 19 nt, Homo sapiens
  misc_RNA (1)...(19): siRNA sense strand
caaagucugggaucucaac

SEQ ID NO: 1658220 - RNA, 19 nt, Homo sapiens
  misc_RNA (1)...(19): siRNA sense strand
ccagugagcuagcaaagua

SEQ ID NO: 1658221 - RNA, 19 nt, Homo sapiens
  misc_RNA (1)...(19): siRNA sense strand
gaauauaagucuguuggua

SEQ ID NO: 1658222 - RNA, 19 nt, Homo sapiens
  misc_RNA (1)...(19): siRNA sense strand
gggcagaccuuugaccuua

SEQ ID NO: 1658223 - RNA, 19 nt, Homo sapiens
  misc_RNA (1)...(19): siRNA sense strand
caaaguaucugaaggaagu

SEQ ID NO: 1658224 - RNA, 19 nt, Homo sapiens
  misc_RNA (1)...(19): siRNA sense strand
guugggaucugacaaauuu

SEQ ID NO: 1658225 - RNA, 19 nt, Homo sapiens
  misc_RNA (1)...(19): siRNA sense strand
uggcaugucuucucauuua

SEQ ID NO: 1658226 - RNA, 19 nt, Homo sapiens
  misc_RNA (1)...(19): siRNA sense strand
ggaaggauuucacuguaaa

SEQ ID NO: 1658227 - RNA, 19 nt, Homo sapiens
  misc_RNA (1)...(19): siRNA sense strand
caacaaaucccaugcaguu

SEQ ID NO: 1658228 - RNA, 19 nt, Homo sapiens
  misc_RNA (1)...(19): siRNA sense strand
gaggaaggauuucacugua

SEQ ID NO: 1658229 - RNA, 19 nt, Homo sapiens
  misc_RNA (1)...(19): siRNA sense strand
gcaagcauuuggagaauau

SEQ ID NO: 1658230 - RNA, 19 nt, Homo sapiens
  misc_RNA (1)...(19): siRNA sense strand
gaaaaggcaucaagaauau

SEQ ID NO: 1658231 - RNA, 19 nt, Homo sapiens
  misc_RNA (1)...(19): siRNA sense strand
gcauugagcacuuguuuaa

SEQ ID NO: 1658232 - RNA, 19 nt, Homo sapiens
  misc_RNA (1)...(19): siRNA sense strand
gcacaaaucccuucguguu

SEQ ID NO: 1658233 - RNA, 19 nt, Homo sapiens
  misc_RNA (1)...(19): siRNA sense strand
gcauugaaauccauaccua

SEQ ID NO: 1658234 - RNA, 19 nt, Homo sapiens
  misc_RNA (1)...(19): siRNA sense strand
uaccauaucugcuuguaaa

SEQ ID NO: 1658235 - RNA, 19 nt, Homo sapiens
  misc_RNA (1)...(19): siRNA sense strand
gcagauucauucauucaug

SEQ ID NO: 1658236 - RNA, 19 nt, Homo sapiens
  misc_RNA (1)...(19): siRNA sense strand
ucauucauguggaagauua

SEQ ID NO: 1658237 - RNA, 19 nt, Homo sapiens
  misc_RNA (1)...(19): siRNA sense strand
ggauuuggaugaauuugga

SEQ ID NO: 1658238 - RNA, 19 nt, Homo sapiens
  misc_RNA (1)...(19): siRNA sense strand
gcauuauccugggcuguuu

SEQ ID NO: 1658239 - RNA, 19 nt, Homo sapiens
  misc_RNA (1)...(19): siRNA sense strand
gagaaaugguuuuggaauu

SEQ ID NO: 1658240 - RNA, 19 nt, Homo sapiens
  misc_RNA (1)...(19): siRNA sense strand
ggaggaaggauuucacugu

SEQ ID NO: 1658241 - RNA, 19 nt, Homo sapiens
  misc_RNA (1)...(19): siRNA sense strand
ggagaauaugucaaugaua

SEQ ID NO: 1658242 - RNA, 19 nt, Homo sapiens
  misc_RNA (1)...(19): siRNA sense strand
ggcaagcauuuggagaaua

SEQ ID NO: 1658243 - RNA, 19 nt, Homo sapiens
  misc_RNA (1)...(19): siRNA sense strand
ugaaaaggcaucaagaaua

SEQ ID NO: 1658244 - RNA, 19 nt, Homo sapiens
  misc_RNA (1)...(19): siRNA sense strand
gaagugccaagcaaagaga

SEQ ID NO: 1658245 - RNA, 19 nt, Homo sapiens
  misc_RNA (1)...(19): siRNA sense strand
aggaaggauuucacuguaa

SEQ ID NO: 1658246 - RNA, 19 nt, Homo sapiens
  misc_RNA (1)...(19): siRNA sense strand
gcagaccuuugaccuuaca

SEQ ID NO: 1658247 - RNA, 19 nt, Homo sapiens
  misc_RNA (1)...(19): siRNA sense strand
cagauucauucauucaugu

SEQ ID NO: 1658248 - RNA, 19 nt, Homo sapiens
  misc_RNA (1)...(19): siRNA sense strand
gggaaaacuaugagaauua

SEQ ID NO: 1658249 - RNA, 19 nt, Homo sapiens
  misc_RNA (1)...(19): siRNA sense strand
gggcaagcauuuggagaau

SEQ ID NO: 1658250 - RNA, 19 nt, Homo sapiens
  misc_RNA (1)...(19): siRNA sense strand
uccagcagauucauucauu

SEQ ID NO: 1658251 - RNA, 19 nt, Homo sapiens
  misc_RNA (1)...(19): siRNA sense strand
ggcuugcgaucaugugaaa

SEQ ID NO: 1658252 - RNA, 19 nt, Homo sapiens
  misc_RNA (1)...(19): siRNA sense strand
caaaucccaugcaguucug

SEQ ID NO: 1658253 - RNA, 19 nt, Homo sapiens
  misc_RNA (1)...(19): siRNA sense strand
augccagagucaaguauua

SEQ ID NO: 1658254 - RNA, 19 nt, Homo sapiens
  misc_RNA (1)...(19): siRNA sense strand
cacaaaucccuucguguuu

SEQ ID NO: 1658255 - RNA, 19 nt, Homo sapiens
  misc_RNA (1)...(19): siRNA sense strand
uggagaauaugucaaugau

SEQ ID NO: 1658256 - RNA, 19 nt, Homo sapiens
  misc_RNA (1)...(19): siRNA sense strand
uguggaagauuauaacucu

SEQ ID NO: 1658257 - RNA, 19 nt, Homo sapiens
  misc_RNA (1)...(19): siRNA sense strand
gagucaaguauuacaauga

SEQ ID NO: 1658258 - RNA, 19 nt, Homo sapiens
  misc_RNA (1)...(19): siRNA sense strand
gacaucaacauccaaagga

SEQ ID NO: 1658259 - RNA, 19 nt, Homo sapiens
  misc_RNA (1)...(19): siRNA sense strand
gcacuuguuuaaccugacu

SEQ ID NO: 1658260 - RNA, 19 nt, Homo sapiens
  misc_RNA (1)...(19): siRNA sense strand
uagcaaaguaucugaagga

SEQ ID NO: 1658261 - RNA, 19 nt, Homo sapiens
  misc_RNA (1)...(19): siRNA sense strand
ugugcuggguugugaguaa

SEQ ID NO: 1658262 - RNA, 19 nt, Homo sapiens
  misc_RNA (1)...(19): siRNA sense strand
ugauucagauauccaagug

SEQ ID NO: 1658263 - RNA, 19 nt, Homo sapiens
  misc_RNA (1)...(19): siRNA sense strand
ccaccaaaacugauuauuu

SEQ ID NO: 1658264 - RNA, 19 nt, Homo sapiens
  misc_RNA (1)...(19): siRNA sense strand
accaacagcuggaucuuca

SEQ ID NO: 1658265 - RNA, 19 nt, Homo sapiens
  misc_RNA (1)...(19): siRNA sense strand
ggcauugagcacuuguuua

SEQ ID NO: 1658266 - RNA, 19 nt, Homo sapiens
  misc_RNA (1)...(19): siRNA sense strand
gagcuagcaaaguaucuga

SEQ ID NO: 1658267 - RNA, 19 nt, Homo sapiens
  misc_RNA (1)...(19): siRNA sense strand
ccauaucugcuuguaaauu

SEQ ID NO: 1658268 - RNA, 19 nt, Homo sapiens
  misc_RNA (1)...(19): siRNA sense strand
agagucaaguauuacaaug

SEQ ID NO: 1658269 - RNA, 19 nt, Homo sapiens
  misc_RNA (1)...(19): siRNA sense strand
gcucugugcugaaaaugaa

SEQ ID NO: 1658270 - RNA, 19 nt, Homo sapiens
  misc_RNA (1)...(19): siRNA sense strand
gagcuaagcaaaagcauug

SEQ ID NO: 1658271 - RNA, 19 nt, Homo sapiens
  misc_RNA (1)...(19): siRNA sense strand
gcaaaagcauugaaaucca

SEQ ID NO: 1658272 - RNA, 19 nt, Homo sapiens
  misc_RNA (1)...(19): siRNA sense strand
ggccacccuuccagaaaug

SEQ ID NO: 1658273 - RNA, 19 nt, Homo sapiens
  misc_RNA (1)...(19): siRNA sense strand
acaucaacauccaaaggaa

SEQ ID NO: 1658274 - RNA, 19 nt, Homo sapiens
  misc_RNA (1)...(19): siRNA sense strand
ccagcagauucauucauuc

SEQ ID NO: 1658275 - RNA, 19 nt, Homo sapiens
  misc_RNA (1)...(19): siRNA sense strand
uauggcuucuugacgguaa

SEQ ID NO: 1658276 - RNA, 19 nt, Homo sapiens
  misc_RNA (1)...(19): siRNA sense strand
gcaucaagaauauaagucu

SEQ ID NO: 1658277 - RNA, 19 nt, Homo sapiens
  misc_RNA (1)...(19): siRNA sense strand
aaaauucaauccacaagga

SEQ ID NO: 1658278 - RNA, 19 nt, Homo sapiens
  misc_RNA (1)...(19): siRNA sense strand
uaaccugacucugacuuac

SEQ ID NO: 1658279 - RNA, 19 nt, Homo sapiens
  misc_RNA (1)...(19): siRNA sense strand
cagcagauucauucauuca

SEQ ID NO: 1658280 - RNA, 19 nt, Homo sapiens
  misc_RNA (1)...(19): siRNA sense strand
gcauuuggagaauauguca

SEQ ID NO: 1658281 - RNA, 19 nt, Homo sapiens
  misc_RNA (1)...(19): siRNA sense strand
cggaaaagcuauacaaugc

SEQ ID NO: 1658282 - RNA, 19 nt, Homo sapiens
  misc_RNA (1)...(19): siRNA sense strand
uuaacuggaggaaggauuu

SEQ ID NO: 1658283 - RNA, 19 nt, Homo sapiens
  misc_RNA (1)...(19): siRNA sense strand
guacaacaaaucccaugca

SEQ ID NO: 1658284 - RNA, 19 nt, Homo sapiens
  misc_RNA (1)...(19): siRNA sense strand
ggaauucuucgcccauuuu

SEQ ID NO: 1658285 - RNA, 19 nt, Homo sapiens
  misc_RNA (1)...(19): siRNA sense strand
caaguauuacaaugagcua

SEQ ID NO: 1658286 - RNA, 19 nt, Homo sapiens
  misc_RNA (1)...(19): siRNA sense strand
cagauauccaagugccuua

SEQ ID NO: 1658287 - RNA, 19 nt, Homo sapiens
  misc_RNA (1)...(19): siRNA sense strand
aggaauucuucgcccauuu

SEQ ID NO: 1658288 - RNA, 19 nt, Homo sapiens
  misc_RNA (1)...(19): siRNA sense strand
aaauuuaccucagcaagcu

SEQ ID NO: 1658289 - RNA, 19 nt, Homo sapiens
  misc_RNA (1)...(19): siRNA sense strand
cauuugggcagaccuuuga

SEQ ID NO: 1658290 - RNA, 19 nt, Homo sapiens
  misc_RNA (1)...(19): siRNA sense strand
ccuaccauaucugcuugua

SEQ ID NO: 1658291 - RNA, 19 nt, Homo sapiens
  misc_RNA (1)...(19): siRNA sense strand
uuaaccugacucugacuua

SEQ ID NO: 1658292 - RNA, 19 nt, Homo sapiens
  misc_RNA (1)...(19): siRNA sense strand
uuacaaugagcuaagcaaa

SEQ ID NO: 1658293 - RNA, 19 nt, Homo sapiens
  misc_RNA (1)...(19): siRNA sense strand
gauauccaagugccuuaug

SEQ ID NO: 1658294 - RNA, 19 nt, Homo sapiens
  misc_RNA (1)...(19): siRNA sense strand
ugacuuaccgccgugauuc

SEQ ID NO: 1658295 - RNA, 19 nt, Homo sapiens
  misc_RNA (1)...(19): siRNA sense strand
ggaaucaccaacucacacu

SEQ ID NO: 1658296 - RNA, 19 nt, Homo sapiens
  misc_RNA (1)...(19): siRNA sense strand
caacagcuggaucuucagu

SEQ ID NO: 1658297 - RNA, 19 nt, Homo sapiens
  misc_RNA (1)...(19): siRNA sense strand
caaaagcauugaaauccau

SEQ ID NO: 1658298 - RNA, 19 nt, Homo sapiens
  misc_RNA (1)...(19): siRNA sense strand
agucaaguauuacaaugag

SEQ ID NO: 1658299 - RNA, 19 nt, Homo sapiens
  misc_RNA (1)...(19): siRNA sense strand
gagcaugccagagucaagu

SEQ ID NO: 1658300 - RNA, 19 nt, Homo sapiens
  misc_RNA (1)...(19): siRNA sense strand
gccaagcaaagagaaauug

SEQ ID NO: 1658301 - RNA, 19 nt, Homo sapiens
  misc_RNA (1)...(19): siRNA sense strand
uggcauugagcacuuguuu

SEQ ID NO: 1658302 - RNA, 19 nt, Homo sapiens
  misc_RNA (1)...(19): siRNA sense strand
cagagucaaguauuacaau

SEQ ID NO: 1658303 - RNA, 19 nt, Homo sapiens
  misc_RNA (1)...(19): siRNA sense strand
uaccuacgggcaagcauuu

SEQ ID NO: 1658304 - RNA, 19 nt, Homo sapiens
  misc_RNA (1)...(19): siRNA sense strand
guguggguguggccauuug

SEQ ID NO: 1658305 - RNA, 19 nt, Homo sapiens
  misc_RNA (1)...(19): siRNA sense strand
agacaucaguugggaucug

SEQ ID NO: 1658306 - RNA, 19 nt, Homo sapiens
  misc_RNA (1)...(19): siRNA sense strand
ggcuggcucuguaccuguu

SEQ ID NO: 1658307 - RNA, 19 nt, Homo sapiens
  misc_RNA (1)...(19): siRNA sense strand
caguugggaucugacaaau

SEQ ID NO: 1658308 - RNA, 19 nt, Homo sapiens
  misc_RNA (1)...(19): siRNA sense strand
ucugaaggaagucgacaaa

SEQ ID NO: 1658309 - RNA, 19 nt, Homo sapiens
  misc_RNA (1)...(19): siRNA sense strand
aaacuucuuuuccaccaaa

SEQ ID NO: 1658310 - RNA, 19 nt, Homo sapiens
  misc_RNA (1)...(19): siRNA sense strand
caucaacauccaaaggaau

SEQ ID NO: 1658311 - RNA, 19 nt, Homo sapiens
  misc_RNA (1)...(19): siRNA sense strand
ugucuucucauuuacauca

SEQ ID NO: 1658312 - RNA, 19 nt, Homo sapiens
  misc_RNA (1)...(19): siRNA sense strand
ccagagucaaguauuacaa

SEQ ID NO: 1658313 - RNA, 19 nt, Homo sapiens
  misc_RNA (1)...(19): siRNA sense strand
gcaugucuucucauuuaca

SEQ ID NO: 1658314 - RNA, 19 nt, Homo sapiens
  misc_RNA (1)...(19): siRNA sense strand
caacucacacuccccaaaa

SEQ ID NO: 1658315 - RNA, 19 nt, Homo sapiens
  misc_RNA (1)...(19): siRNA sense strand
accguucacuguacaacaa

SEQ ID NO: 1658316 - RNA, 19 nt, Homo sapiens
  misc_RNA (1)...(19): siRNA sense strand
uuagagaaaugguuuugga

SEQ ID NO: 1658317 - RNA, 19 nt, Homo sapiens
  misc_RNA (1)...(19): siRNA sense strand
caagaauauaagucuguug

SEQ ID NO: 1658318 - RNA, 19 nt, Homo sapiens
  misc_RNA (1)...(19): siRNA sense strand
uaacucucccagugagcua

SEQ ID NO: 1658319 - RNA, 19 nt, Homo sapiens
  misc_RNA (1)...(19): siRNA sense strand
aaggaauucuucgcccauu

SEQ ID NO: 1658320 - RNA, 19 nt, Homo sapiens
  misc_RNA (1)...(19): siRNA sense strand
ucaaagacuugcucuggua

SEQ ID NO: 1658321 - RNA, 19 nt, Homo sapiens
  misc_RNA (1)...(19): siRNA sense strand
gaacagcgagcucaaguau

SEQ ID NO: 1658322 - RNA, 19 nt, Homo sapiens
  misc_RNA (1)...(19): siRNA sense strand
caccacaacuaccaccuua

SEQ ID NO: 1658323 - RNA, 19 nt, Homo sapiens
  misc_RNA (1)...(19): siRNA sense strand
caacuuccaccucuucuaa

SEQ ID NO: 1658324 - RNA, 19 nt, Homo sapiens
  misc_RNA (1)...(19): siRNA sense strand
acagcgagcucaaguauuc

SEQ ID NO: 1658325 - RNA, 19 nt, Homo sapiens
  misc_RNA (1)...(19): siRNA sense strand
ccagaccacuugcuaugaa

SEQ ID NO: 1658326 - RNA, 19 nt, Homo sapiens
  misc_RNA (1)...(19): siRNA sense strand
caagaugggcucuacauag

SEQ ID NO: 1658327 - RNA, 19 nt, Homo sapiens
  misc_RNA (1)...(19): siRNA sense strand
gaacccgugugcaaugcuu

SEQ ID NO: 1658328 - RNA, 19 nt, Homo sapiens
  misc_RNA (1)...(19): siRNA sense strand
aagacuugcucugguaaua

SEQ ID NO: 1658329 - RNA, 19 nt, Homo sapiens
  misc_RNA (1)...(19): siRNA sense strand
ccacaacuaccaccuuaug

SEQ ID NO: 1658330 - RNA, 19 nt, Homo sapiens
  misc_RNA (1)...(19): siRNA sense strand
gcucgcugcugcucaguuc

SEQ ID NO: 1658331 - RNA, 19 nt, Homo sapiens
  misc_RNA (1)...(19): siRNA sense strand
gggaggacuugcugcuguu

SEQ ID NO: 1658332 - RNA, 19 nt, Homo sapiens
  misc_RNA (1)...(19): siRNA sense strand
gguaauagcaauaauucca

SEQ ID NO: 1658333 - RNA, 19 nt, Homo sapiens
  misc_RNA (1)...(19): siRNA sense strand
gcaccaaucccgagaacag

SEQ ID NO: 1658334 - RNA, 19 nt, Homo sapiens
  misc_RNA (1)...(19): siRNA sense strand
caaagacuugcucugguaa

SEQ ID NO: 1658335 - RNA, 19 nt, Homo sapiens
  misc_RNA (1)...(19): siRNA sense strand
ucaagaugggcucuacaua

SEQ ID NO: 1658336 - RNA, 19 nt, Homo sapiens
  misc_RNA (1)...(19): siRNA sense strand
gagaacagcgagcucaagu

SEQ ID NO: 1658337 - RNA, 19 nt, Homo sapiens
  misc_RNA (1)...(19): siRNA sense strand
cagaccacuugcuaugaaa

SEQ ID NO: 1658338 - RNA, 19 nt, Homo sapiens
  misc_RNA (1)...(19): siRNA sense strand
gcucugguaauagcaauaa

SEQ ID NO: 1658339 - RNA, 19 nt, Homo sapiens
  misc_RNA (1)...(19): siRNA sense strand
gagcaccaaucccgagaac

SEQ ID NO: 1658340 - RNA, 19 nt, Homo sapiens
  misc_RNA (1)...(19): siRNA sense strand
aagaugggcucuacauagg

SEQ ID NO: 1658341 - RNA, 19 nt, Homo sapiens
  misc_RNA (1)...(19): siRNA sense strand
gcucaaguauucgggucaa

SEQ ID NO: 1658342 - RNA, 19 nt, Homo sapiens
  misc_RNA (1)...(19): siRNA sense strand
gcuuguggacucuacauga

SEQ ID NO: 1658343 - RNA, 19 nt, Homo sapiens
  misc_RNA (1)...(19): siRNA sense strand
cuuguggacucuacaugaa

SEQ ID NO: 1658344 - RNA, 19 nt, Homo sapiens
  misc_RNA (1)...(19): siRNA sense strand
ggugaacccgugugcaaug

SEQ ID NO: 1658345 - RNA, 19 nt, Homo sapiens
  misc_RNA (1)...(19): siRNA sense strand
gcccagaccacuugcuaug

SEQ ID NO: 1658346 - RNA, 19 nt, Homo sapiens
  misc_RNA (1)...(19): siRNA sense strand
cagaaacgccgagggugaa

SEQ ID NO: 1658347 - RNA, 19 nt, Homo sapiens
  misc_RNA (1)...(19): siRNA sense strand
cagcgacuccagagccuuu

SEQ ID NO: 1658348 - RNA, 19 nt, Homo sapiens
  misc_RNA (1)...(19): siRNA sense strand
aauaauuccauucccauga

SEQ ID NO: 1658349 - RNA, 19 nt, Homo sapiens
  misc_RNA (1)...(19): siRNA sense strand
ggaauucaaaccaggaaac

SEQ ID NO: 1658350 - RNA, 19 nt, Homo sapiens
  misc_RNA (1)...(19): siRNA sense strand
caaguauucgggucaagau

SEQ ID NO: 1658351 - RNA, 19 nt, Homo sapiens
  misc_RNA (1)...(19): siRNA sense strand
acgaaaaccuaagaacaua

SEQ ID NO: 1658352 - RNA, 19 nt, Homo sapiens
  misc_RNA (1)...(19): siRNA sense strand
ccugcgggcucuacagcaa

SEQ ID NO: 1658353 - RNA, 19 nt, Homo sapiens
  misc_RNA (1)...(19): siRNA sense strand
ucuucuaacucagaugauu

SEQ ID NO: 1658354 - RNA, 19 nt, Homo sapiens
  misc_RNA (1)...(19): siRNA sense strand
aaagagggaauucaaacca

SEQ ID NO: 1658355 - RNA, 19 nt, Homo sapiens
  misc_RNA (1)...(19): siRNA sense strand
auucaaaccaggaaacgaa

SEQ ID NO: 1658356 - RNA, 19 nt, Homo sapiens
  misc_RNA (1)...(19): siRNA sense strand
agaacagcgagcucaagua

SEQ ID NO: 1658357 - RNA, 19 nt, Homo sapiens
  misc_RNA (1)...(19): siRNA sense strand
uuccaccucuucuaacuca

SEQ ID NO: 1658358 - RNA, 19 nt, Homo sapiens
  misc_RNA (1)...(19): siRNA sense strand
ucaaguauucgggucaaga

SEQ ID NO: 1658359 - RNA, 19 nt, Homo sapiens
  misc_RNA (1)...(19): siRNA sense strand
ccucuucuaacucagauga

SEQ ID NO: 1658360 - RNA, 19 nt, Homo sapiens
  misc_RNA (1)...(19): siRNA sense strand
gugcccagaccacuugcua

SEQ ID NO: 1658361 - RNA, 19 nt, Homo sapiens
  misc_RNA (1)...(19): siRNA sense strand
ccaacuuccaccucuucua

SEQ ID NO: 1658362 - RNA, 19 nt, Homo sapiens
  misc_RNA (1)...(19): siRNA sense strand
gacuugcucugguaauagc

SEQ ID NO: 1658363 - RNA, 19 nt, Homo sapiens
  misc_RNA (1)...(19): siRNA sense strand
gcaauaccaucaucacuuu

SEQ ID NO: 1658364 - RNA, 19 nt, Homo sapiens
  misc_RNA (1)...(19): siRNA sense strand
gagauguuguccucaguua

SEQ ID NO: 1658365 - RNA, 19 nt, Homo sapiens
  misc_RNA (1)...(19): siRNA sense strand
ccaaugaucccaacuguaa

SEQ ID NO: 1658366 - RNA, 19 nt, Homo sapiens
  misc_RNA (1)...(19): siRNA sense strand
caaguucucuuuccacaau

SEQ ID NO: 1658367 - RNA, 19 nt, Homo sapiens
  misc_RNA (1)...(19): siRNA sense strand
cagaauacguguuuaaagu

SEQ ID NO: 1658368 - RNA, 19 nt, Homo sapiens
  misc_RNA (1)...(19): siRNA sense strand
cagcgaagcuccuccaugu

SEQ ID NO: 1658369 - RNA, 19 nt, Homo sapiens
  misc_RNA (1)...(19): siRNA sense strand
gcaacaggcgcaucgcuua

SEQ ID NO: 1658370 - RNA, 19 nt, Homo sapiens
  misc_RNA (1)...(19): siRNA sense strand
gaaaagagaucagaaaugg

SEQ ID NO: 1658371 - RNA, 19 nt, Homo sapiens
  misc_RNA (1)...(19): siRNA sense strand
ggagcucuguggacaaauu

SEQ ID NO: 1658372 - RNA, 19 nt, Homo sapiens
  misc_RNA (1)...(19): siRNA sense strand
ggacaaauucgggacauaa

SEQ ID NO: 1658373 - RNA, 19 nt, Homo sapiens
  misc_RNA (1)...(19): siRNA sense strand
caagagcugccaagguuua

SEQ ID NO: 1658374 - RNA, 19 nt, Homo sapiens
  misc_RNA (1)...(19): siRNA sense strand
ucaaagcaguccgauauga

SEQ ID NO: 1658375 - RNA, 19 nt, Homo sapiens
  misc_RNA (1)...(19): siRNA sense strand
cccaagagcugccaagguu

SEQ ID NO: 1658376 - RNA, 19 nt, Homo sapiens
  misc_RNA (1)...(19): siRNA sense strand
gauaaugaccuaauggaau

SEQ ID NO: 1658377 - RNA, 19 nt, Homo sapiens
  misc_RNA (1)...(19): siRNA sense strand
caucaucacuuuccacaag

SEQ ID NO: 1658378 - RNA, 19 nt, Homo sapiens
  misc_RNA (1)...(19): siRNA sense strand
guucaaagcaguccgauau

SEQ ID NO: 1658379 - RNA, 19 nt, Homo sapiens
  misc_RNA (1)...(19): siRNA sense strand
gagauggaauucuaugaag

SEQ ID NO: 1658380 - RNA, 19 nt, Homo sapiens
  misc_RNA (1)...(19): siRNA sense strand
cgagauggauggucugauc

SEQ ID NO: 1658381 - RNA, 19 nt, Homo sapiens
  misc_RNA (1)...(19): siRNA sense strand
cagcaacacugacaagaag

SEQ ID NO: 1658382 - RNA, 19 nt, Homo sapiens
  misc_RNA (1)...(19): siRNA sense strand
gcaguccgauaugaaauug

SEQ ID NO: 1658383 - RNA, 19 nt, Homo sapiens
  misc_RNA (1)...(19): siRNA sense strand
gcgaagcuccuccauguug

SEQ ID NO: 1658384 - RNA, 19 nt, Homo sapiens
  misc_RNA (1)...(19): siRNA sense strand
gcacucagaaacaaugauu

SEQ ID NO: 1658385 - RNA, 19 nt, Homo sapiens
  misc_RNA (1)...(19): siRNA sense strand
ccagguggaugaaguaaag

SEQ ID NO: 1658386 - RNA, 19 nt, Homo sapiens
  misc_RNA (1)...(19): siRNA sense strand
gagcacggcuaccucaagu

SEQ ID NO: 1658387 - RNA, 19 nt, Homo sapiens
  misc_RNA (1)...(19): siRNA sense strand
aagagaagaucaucaugga

SEQ ID NO: 1658388 - RNA, 19 nt, Homo sapiens
  misc_RNA (1)...(19): siRNA sense strand
ggaagaaccgagcuaagug

SEQ ID NO: 1658389 - RNA, 19 nt, Homo sapiens
  misc_RNA (1)...(19): siRNA sense strand
uaaacuacgugcccuugga

SEQ ID NO: 1658390 - RNA, 19 nt, Homo sapiens
  misc_RNA (1)...(19): siRNA sense strand
gaacaggacgagaagaucu

SEQ ID NO: 1658391 - RNA, 19 nt, Homo sapiens
  misc_RNA (1)...(19): siRNA sense strand
ggagugauaucugcaaggu

SEQ ID NO: 1658392 - RNA, 19 nt, Homo sapiens
  misc_RNA (1)...(19): siRNA sense strand
uuacaaccaugaaagugaa

SEQ ID NO: 1658393 - RNA, 19 nt, Homo sapiens
  misc_RNA (1)...(19): siRNA sense strand
caaagcaguccgauaugaa

SEQ ID NO: 1658394 - RNA, 19 nt, Homo sapiens
  misc_RNA (1)...(19): siRNA sense strand
gaaagagaagaucaucaug

SEQ ID NO: 1658395 - RNA, 19 nt, Homo sapiens
  misc_RNA (1)...(19): siRNA sense strand
gauguuguccucaguuaug

SEQ ID NO: 1658396 - RNA, 19 nt, Homo sapiens
  misc_RNA (1)...(19): siRNA sense strand
ccacagggcccaagaaggu

SEQ ID NO: 1658397 - RNA, 19 nt, Homo sapiens
  misc_RNA (1)...(19): siRNA sense strand
cagacggccucuacaccua

SEQ ID NO: 1658398 - RNA, 19 nt, Homo sapiens
  misc_RNA (1)...(19): siRNA sense strand
ccugggcaauggagugaua

SEQ ID NO: 1658399 - RNA, 19 nt, Homo sapiens
  misc_RNA (1)...(19): siRNA sense strand
ggccaaugaucccaacugu

SEQ ID NO: 1658400 - RNA, 19 nt, Homo sapiens
  misc_RNA (1)...(19): siRNA sense strand
gggaagaaccgagcuaagu

SEQ ID NO: 1658401 - RNA, 19 nt, Homo sapiens
  misc_RNA (1)...(19): siRNA sense strand
ccaaggaagcccugaagga

SEQ ID NO: 1658402 - RNA, 19 nt, Homo sapiens
  misc_RNA (1)...(19): siRNA sense strand
cuaauggaauucaacaucu

SEQ ID NO: 1658403 - RNA, 19 nt, Homo sapiens
  misc_RNA (1)...(19): siRNA sense strand
acaaauugcucugcaccuu

SEQ ID NO: 1658404 - RNA, 19 nt, Homo sapiens
  misc_RNA (1)...(19): siRNA sense strand
aaaguuagagccaucaaug

SEQ ID NO: 1658405 - RNA, 19 nt, Homo sapiens
  misc_RNA (1)...(19): siRNA sense strand
ccaugaaagugaacgagau

SEQ ID NO: 1658406 - RNA, 19 nt, Homo sapiens
  misc_RNA (1)...(19): siRNA sense strand
agaugcagcugcccgagaa

SEQ ID NO: 1658407 - RNA, 19 nt, Homo sapiens
  misc_RNA (1)...(19): siRNA sense strand
gucauuacuucuccuccua

SEQ ID NO: 1658408 - RNA, 19 nt, Homo sapiens
  misc_RNA (1)...(19): siRNA sense strand
ccaggaaggucacuuucag

SEQ ID NO: 1658409 - RNA, 19 nt, Homo sapiens
  misc_RNA (1)...(19): siRNA sense strand
gaucaucauggagcagaua

SEQ ID NO: 1658410 - RNA, 19 nt, Homo sapiens
  misc_RNA (1)...(19): siRNA sense strand
ugagauggaauucuaugaa

SEQ ID NO: 1658411 - RNA, 19 nt, Homo sapiens
  misc_RNA (1)...(19): siRNA sense strand
gaaagugaacgagauggau

SEQ ID NO: 1658412 - RNA, 19 nt, Homo sapiens
  misc_RNA (1)...(19): siRNA sense strand
guuacaaccaugaaaguga

SEQ ID NO: 1658413 - RNA, 19 nt, Homo sapiens
  misc_RNA (1)...(19): siRNA sense strand
gcgauacccagguggauga

SEQ ID NO: 1658414 - RNA, 19 nt, Homo sapiens
  misc_RNA (1)...(19): siRNA sense strand
gcaaccagcacauauacca

SEQ ID NO: 1658415 - RNA, 19 nt, Homo sapiens
  misc_RNA (1)...(19): siRNA sense strand
aaagcaguccgauaugaaa

SEQ ID NO: 1658416 - RNA, 19 nt, Homo sapiens
  misc_RNA (1)...(19): siRNA sense strand
ggaugaaguaaagucaaua

SEQ ID NO: 1658417 - RNA, 19 nt, Homo sapiens
  misc_RNA (1)...(19): siRNA sense strand
ccacaacugguacucauuc

SEQ ID NO: 1658418 - RNA, 19 nt, Homo sapiens
  misc_RNA (1)...(19): siRNA sense strand
ucauggagcagauagagaa

SEQ ID NO: 1658419 - RNA, 19 nt, Homo sapiens
  misc_RNA (1)...(19): siRNA sense strand
aaauggcuuucucaaguug

SEQ ID NO: 1658420 - RNA, 19 nt, Homo sapiens
  misc_RNA (1)...(19): siRNA sense strand
gaacuucuucauccucauc

SEQ ID NO: 1658421 - RNA, 19 nt, Homo sapiens
  misc_RNA (1)...(19): siRNA sense strand
uggaugaaguaaagucaau

SEQ ID NO: 1658422 - RNA, 19 nt, Homo sapiens
  misc_RNA (1)...(19): siRNA sense strand
uuacuucuccuccuaacaa

SEQ ID NO: 1658423 - RNA, 19 nt, Homo sapiens
  misc_RNA (1)...(19): siRNA sense strand
cggcugcacucaauaaacu

SEQ ID NO: 1658424 - RNA, 19 nt, Homo sapiens
  misc_RNA (1)...(19): siRNA sense strand
ccaggcagaaggaaauuga

SEQ ID NO: 1658425 - RNA, 19 nt, Homo sapiens
  misc_RNA (1)...(19): siRNA sense strand
gagaaagagaagaucauca

SEQ ID NO: 1658426 - RNA, 19 nt, Homo sapiens
  misc_RNA (1)...(19): siRNA sense strand
ggagaaagagaagaucauc

SEQ ID NO: 1658427 - RNA, 19 nt, Homo sapiens
  misc_RNA (1)...(19): siRNA sense strand
cuaacaacguacaaaugga

SEQ ID NO: 1658428 - RNA, 19 nt, Homo sapiens
  misc_RNA (1)...(19): siRNA sense strand
auccauaccuccuccaaga

SEQ ID NO: 1658429 - RNA, 19 nt, Homo sapiens
  misc_RNA (1)...(19): siRNA sense strand
gcugaagaauauccagucu

SEQ ID NO: 1658430 - RNA, 19 nt, Homo sapiens
  misc_RNA (1)...(19): siRNA sense strand
gauggaauucuaugaaguc

SEQ ID NO: 1658431 - RNA, 19 nt, Homo sapiens
  misc_RNA (1)...(19): siRNA sense strand
acaaggaggcaaagcgaaa

SEQ ID NO: 1658432 - RNA, 19 nt, Homo sapiens
  misc_RNA (1)...(19): siRNA sense strand
ccagccgcaucaucgagua

SEQ ID NO: 1658433 - RNA, 19 nt, Homo sapiens
  misc_RNA (1)...(19): siRNA sense strand
gcuccuccauguuguccuu

SEQ ID NO: 1658434 - RNA, 19 nt, Homo sapiens
  misc_RNA (1)...(19): siRNA sense strand
caguuaugcuccugucugu

SEQ ID NO: 1658435 - RNA, 19 nt, Homo sapiens
  misc_RNA (1)...(19): siRNA sense strand
cuacgugcccuuggacuuu

SEQ ID NO: 1658436 - RNA, 19 nt, Homo sapiens
  misc_RNA (1)...(19): siRNA sense strand
agaaagagaagaucaucau

SEQ ID NO: 1658437 - RNA, 19 nt, Homo sapiens
  misc_RNA (1)...(19): siRNA sense strand
cgaagcuccuccauguugu

SEQ ID NO: 1658438 - RNA, 19 nt, Homo sapiens
  misc_RNA (1)...(19): siRNA sense strand
gacaaauucgggacauaau

SEQ ID NO: 1658439 - RNA, 19 nt, Homo sapiens
  misc_RNA (1)...(19): siRNA sense strand
gcagcuuccacaacuggua

SEQ ID NO: 1658440 - RNA, 19 nt, Homo sapiens
  misc_RNA (1)...(19): siRNA sense strand
caacugcuacuacuaugag

SEQ ID NO: 1658441 - RNA, 19 nt, Homo sapiens
  misc_RNA (1)...(19): siRNA sense strand
caacugguacucauucaac

SEQ ID NO: 1658442 - RNA, 19 nt, Homo sapiens
  misc_RNA (1)...(19): siRNA sense strand
gcagcagcuuccacaacug

SEQ ID NO: 1658443 - RNA, 19 nt, Homo sapiens
  misc_RNA (1)...(19): siRNA sense strand
ugucugugcugcaaguuca

SEQ ID NO: 1658444 - RNA, 19 nt, Homo sapiens
  misc_RNA (1)...(19): siRNA sense strand
ucagcgccaucgccaaguu

SEQ ID NO: 1658445 - RNA, 19 nt, Homo sapiens
  misc_RNA (1)...(19): siRNA sense strand
gaucgccuacuccaaggaa

SEQ ID NO: 1658446 - RNA, 19 nt, Homo sapiens
  misc_RNA (1)...(19): siRNA sense strand
ccuaacaacguacaaaugg

SEQ ID NO: 1658447 - RNA, 19 nt, Homo sapiens
  misc_RNA (1)...(19): siRNA sense strand
aacgauggcucugugaaga

SEQ ID NO: 1658448 - RNA, 19 nt, Homo sapiens
  misc_RNA (1)...(19): siRNA sense strand
caacgauggcucugugaag

SEQ ID NO: 1658449 - RNA, 19 nt, Homo sapiens
  misc_RNA (1)...(19): siRNA sense strand
caaauucgggacauaaugc

SEQ ID NO: 1658450 - RNA, 19 nt, Homo sapiens
  misc_RNA (1)...(19): siRNA sense strand
ucucaacugcuacuacuau

SEQ ID NO: 1658451 - RNA, 19 nt, Homo sapiens
  misc_RNA (1)...(19): siRNA sense strand
gaugaaguaaagucaauac

SEQ ID NO: 1658452 - RNA, 19 nt, Homo sapiens
  misc_RNA (1)...(19): siRNA sense strand
cacagaauacguguuuaaa

SEQ ID NO: 1658453 - RNA, 19 nt, Homo sapiens
  misc_RNA (1)...(19): siRNA sense strand
uggacaaauucgggacaua

SEQ ID NO: 1658454 - RNA, 19 nt, Homo sapiens
  misc_RNA (1)...(19): siRNA sense strand
gcuccugucugugcugcaa

SEQ ID NO: 1658455 - RNA, 19 nt, Homo sapiens
  misc_RNA (1)...(19): siRNA sense strand
gcaaguucucuuuccacaa

SEQ ID NO: 1658456 - RNA, 19 nt, Homo sapiens
  misc_RNA (1)...(19): siRNA sense strand
aaauugcucugcaccuucu

SEQ ID NO: 1658457 - RNA, 19 nt, Homo sapiens
  misc_RNA (1)...(19): siRNA sense strand
ggaacaggacgagaagauc

SEQ ID NO: 1658458 - RNA, 19 nt, Homo sapiens
  misc_RNA (1)...(19): siRNA sense strand
gccaaugaucccaacugua

SEQ ID NO: 1658459 - RNA, 19 nt, Homo sapiens
  misc_RNA (1)...(19): siRNA sense strand
gguaacaccagauggacau

SEQ ID NO: 1658460 - RNA, 19 nt, Homo sapiens
  misc_RNA (1)...(19): siRNA sense strand
gcccaauuguuaucuacca

SEQ ID NO: 1658461 - RNA, 19 nt, Homo sapiens
  misc_RNA (1)...(19): siRNA sense strand
cacugcaccuguucugaga

SEQ ID NO: 1658462 - RNA, 19 nt, Homo sapiens
  misc_RNA (1)...(19): siRNA sense strand
ugauaaugaccuaauggaa

SEQ ID NO: 1658463 - RNA, 19 nt, Homo sapiens
  misc_RNA (1)...(19): siRNA sense strand
ggaaagauauggaugaagu

SEQ ID NO: 1658464 - RNA, 19 nt, Homo sapiens
  misc_RNA (1)...(19): siRNA sense strand
ggaugaaguugaagagaaa

SEQ ID NO: 1658465 - RNA, 19 nt, Homo sapiens
  misc_RNA (1)...(19): siRNA sense strand
gaagcaagcauaaucauug

SEQ ID NO: 1658466 - RNA, 19 nt, Homo sapiens
  misc_RNA (1)...(19): siRNA sense strand
ggaaauauacgaagaguca

SEQ ID NO: 1658467 - RNA, 19 nt, Homo sapiens
  misc_RNA (1)...(19): siRNA sense strand
gcuaugccauugauacuuu

SEQ ID NO: 1658468 - RNA, 19 nt, Homo sapiens
  misc_RNA (1)...(19): siRNA sense strand
ucagaaagauuuguaguga

SEQ ID NO: 1658469 - RNA, 19 nt, Homo sapiens
  misc_RNA (1)...(19): siRNA sense strand
gaagagucaucaacuugga

SEQ ID NO: 1658470 - RNA, 19 nt, Homo sapiens
  misc_RNA (1)...(19): siRNA sense strand
aaacuuuacugccgagaaa

SEQ ID NO: 1658471 - RNA, 19 nt, Homo sapiens
  misc_RNA (1)...(19): siRNA sense strand
gaagucagaaagauuugua

SEQ ID NO: 1658472 - RNA, 19 nt, Homo sapiens
  misc_RNA (1)...(19): siRNA sense strand
gcagaaauggccagucaaa

SEQ ID NO: 1658473 - RNA, 19 nt, Homo sapiens
  misc_RNA (1)...(19): siRNA sense strand
gagacgaaauugccguuau

SEQ ID NO: 1658474 - RNA, 19 nt, Homo sapiens
  misc_RNA (1)...(19): siRNA sense strand
gucauuagcuuagaauaug

SEQ ID NO: 1658475 - RNA, 19 nt, Homo sapiens
  misc_RNA (1)...(19): siRNA sense strand
uagaugaagucucacaguu

SEQ ID NO: 1658476 - RNA, 19 nt, Homo sapiens
  misc_RNA (1)...(19): siRNA sense strand
gcugugagcuaugccauug

SEQ ID NO: 1658477 - RNA, 19 nt, Homo sapiens
  misc_RNA (1)...(19): siRNA sense strand
agaaagauuuguagugaca

SEQ ID NO: 1658478 - RNA, 19 nt, Homo sapiens
  misc_RNA (1)...(19): siRNA sense strand
guagugacauuaggcagaa

SEQ ID NO: 1658479 - RNA, 19 nt, Homo sapiens
  misc_RNA (1)...(19): siRNA sense strand
agauauggaugaaguugaa

SEQ ID NO: 1658480 - RNA, 19 nt, Homo sapiens
  misc_RNA (1)...(19): siRNA sense strand
uggaugaaguugaagagaa

SEQ ID NO: 1658481 - RNA, 19 nt, Homo sapiens
  misc_RNA (1)...(19): siRNA sense strand
ccauagacuuggcuugguu

SEQ ID NO: 1658482 - RNA, 19 nt, Homo sapiens
  misc_RNA (1)...(19): siRNA sense strand
gaaagauauggaugaaguu

SEQ ID NO: 1658483 - RNA, 19 nt, Homo sapiens
  misc_RNA (1)...(19): siRNA sense strand
gaaaaugaagucagaaaga

SEQ ID NO: 1658484 - RNA, 19 nt, Homo sapiens
  misc_RNA (1)...(19): siRNA sense strand
gaaguugaagagaaaucua

SEQ ID NO: 1658485 - RNA, 19 nt, Homo sapiens
  misc_RNA (1)...(19): siRNA sense strand
uaggaaagauauggaugaa

SEQ ID NO: 1658486 - RNA, 19 nt, Homo sapiens
  misc_RNA (1)...(19): siRNA sense strand
ccaaggugcccauauggaa

SEQ ID NO: 1658487 - RNA, 19 nt, Homo sapiens
  misc_RNA (1)...(19): siRNA sense strand
agaaauggccagucaaaca

SEQ ID NO: 1658488 - RNA, 19 nt, Homo sapiens
  misc_RNA (1)...(19): siRNA sense strand
ggacuacaagaaauaacuu

SEQ ID NO: 1658489 - RNA, 19 nt, Homo sapiens
  misc_RNA (1)...(19): siRNA sense strand
gcaguguuccauagacuug

SEQ ID NO: 1658490 - RNA, 19 nt, Homo sapiens
  misc_RNA (1)...(19): siRNA sense strand
agacgaaauugccguuauc

SEQ ID NO: 1658491 - RNA, 19 nt, Homo sapiens
  misc_RNA (1)...(19): siRNA sense strand
caaggugcccauauggaaa

SEQ ID NO: 1658492 - RNA, 19 nt, Homo sapiens
  misc_RNA (1)...(19): siRNA sense strand
aggcagaaauggccaguca

SEQ ID NO: 1658493 - RNA, 19 nt, Homo sapiens
  misc_RNA (1)...(19): siRNA sense strand
gaaauggccagucaaacac

SEQ ID NO: 1658494 - RNA, 19 nt, Homo sapiens
  misc_RNA (1)...(19): siRNA sense strand
aagccaaggugcccauaug

SEQ ID NO: 1658495 - RNA, 19 nt, Homo sapiens
  misc_RNA (1)...(19): siRNA sense strand
ggagacgaaauugccguua

SEQ ID NO: 1658496 - RNA, 19 nt, Homo sapiens
  misc_RNA (1)...(19): siRNA sense strand
cuaugccauugauacuuua

SEQ ID NO: 1658497 - RNA, 19 nt, Homo sapiens
  misc_RNA (1)...(19): siRNA sense strand
uacgaagagucaucaacuu

SEQ ID NO: 1658498 - RNA, 19 nt, Homo sapiens
  misc_RNA (1)...(19): siRNA sense strand
acauagcaguguuccauag

SEQ ID NO: 1658499 - RNA, 19 nt, Homo sapiens
  misc_RNA (1)...(19): siRNA sense strand
gucaucaacuuggaaagga

SEQ ID NO: 1658500 - RNA, 19 nt, Homo sapiens
  misc_RNA (1)...(19): siRNA sense strand
cuaggaaagauauggauga

SEQ ID NO: 1658501 - RNA, 19 nt, Homo sapiens
  misc_RNA (1)...(19): siRNA sense strand
ggugauuucuccgcucugu

SEQ ID NO: 1658502 - RNA, 19 nt, Homo sapiens
  misc_RNA (1)...(19): siRNA sense strand
ucagaagcaagcauaauca

SEQ ID NO: 1658503 - RNA, 19 nt, Homo sapiens
  misc_RNA (1)...(19): siRNA sense strand
gcuucagccuggagacgaa

SEQ ID NO: 1658504 - RNA, 19 nt, Homo sapiens
  misc_RNA (1)...(19): siRNA sense strand
agaagcaagcauaaucauu

SEQ ID NO: 1658505 - RNA, 19 nt, Homo sapiens
  misc_RNA (1)...(19): siRNA sense strand
ucaucaacuuggaaaggaa

SEQ ID NO: 1658506 - RNA, 19 nt, Homo sapiens
  misc_RNA (1)...(19): siRNA sense strand
gcucuguggugcaauaucc

SEQ ID NO: 1658507 - RNA, 19 nt, Homo sapiens
  misc_RNA (1)...(19): siRNA sense strand
uggcuugguuccaguguca

SEQ ID NO: 1658508 - RNA, 19 nt, Homo sapiens
  misc_RNA (1)...(19): siRNA sense strand
caacuuggaaaggaaacaa

SEQ ID NO: 1658509 - RNA, 19 nt, Homo sapiens
  misc_RNA (1)...(19): siRNA sense strand
guagaugaagucucacagu

SEQ ID NO: 1658510 - RNA, 19 nt, Homo sapiens
  misc_RNA (1)...(19): siRNA sense strand
aaagauauggaugaaguug

SEQ ID NO: 1658511 - RNA, 19 nt, Homo sapiens
  misc_RNA (1)...(19): siRNA sense strand
gucagaagcaagcauaauc

SEQ ID NO: 1658512 - RNA, 19 nt, Homo sapiens
  misc_RNA (1)...(19): siRNA sense strand
agaugaagucucacaguug

SEQ ID NO: 1658513 - RNA, 19 nt, Homo sapiens
  misc_RNA (1)...(19): siRNA sense strand
caucaacuuggaaaggaaa

SEQ ID NO: 1658514 - RNA, 19 nt, Homo sapiens
  misc_RNA (1)...(19): siRNA sense strand
acgaagagucaucaacuug

SEQ ID NO: 1658515 - RNA, 19 nt, Homo sapiens
  misc_RNA (1)...(19): siRNA sense strand
cacauagcaguguuccaua

SEQ ID NO: 1658516 - RNA, 19 nt, Homo sapiens
  misc_RNA (1)...(19): siRNA sense strand
gagcuaugccauugauacu

SEQ ID NO: 1658517 - RNA, 19 nt, Homo sapiens
  misc_RNA (1)...(19): siRNA sense strand
ugugagcuaugccauugau

SEQ ID NO: 1658518 - RNA, 19 nt, Homo sapiens
  misc_RNA (1)...(19): siRNA sense strand
cauagcaguguuccauaga

SEQ ID NO: 1658519 - RNA, 19 nt, Homo sapiens
  misc_RNA (1)...(19): siRNA sense strand
gucagaaagauuuguagug

SEQ ID NO: 1658520 - RNA, 19 nt, Homo sapiens
  misc_RNA (1)...(19): siRNA sense strand
gccaaggugcccauaugga

SEQ ID NO: 1658521 - RNA, 19 nt, Homo sapiens
  misc_RNA (1)...(19): siRNA sense strand
gauuuguagugacauuagg

SEQ ID NO: 1658522 - RNA, 19 nt, Homo sapiens
  misc_RNA (1)...(19): siRNA sense strand
gagacgaaauugccguuau

SEQ ID NO: 1658523 - RNA, 19 nt, Homo sapiens
  misc_RNA (1)...(19): siRNA sense strand
ucaagaauaugucgagcuu

SEQ ID NO: 1658524 - RNA, 19 nt, Homo sapiens
  misc_RNA (1)...(19): siRNA sense strand
uaacaggaguucguucaga

SEQ ID NO: 1658525 - RNA, 19 nt, Homo sapiens
  misc_RNA (1)...(19): siRNA sense strand
gauaauauuugcuguucgu

SEQ ID NO: 1658526 - RNA, 19 nt, Homo sapiens
  misc_RNA (1)...(19): siRNA sense strand
gaaauaacaggaguucguu

SEQ ID NO: 1658527 - RNA, 19 nt, Homo sapiens
  misc_RNA (1)...(19): siRNA sense strand
uggauuggcugauguuaga

SEQ ID NO: 1658528 - RNA, 19 nt, Homo sapiens
  misc_RNA (1)...(19): siRNA sense strand
gauagaaacucgacauccu

SEQ ID NO: 1658529 - RNA, 19 nt, Homo sapiens
  misc_RNA (1)...(19): siRNA sense strand
cagauaauauuugcuguuc

SEQ ID NO: 1658530 - RNA, 19 nt, Homo sapiens
  misc_RNA (1)...(19): siRNA sense strand
ccauuucugugccucaaga

SEQ ID NO: 1658531 - RNA, 19 nt, Homo sapiens
  misc_RNA (1)...(19): siRNA sense strand
agacgaaauugccguuauc

SEQ ID NO: 1658532 - RNA, 19 nt, Homo sapiens
  misc_RNA (1)...(19): siRNA sense strand
ggagauagaaacucgacau

SEQ ID NO: 1658533 - RNA, 19 nt, Homo sapiens
  misc_RNA (1)...(19): siRNA sense strand
aauauuugcuguucgucaa

SEQ ID NO: 1658534 - RNA, 19 nt, Homo sapiens
  misc_RNA (1)...(19): siRNA sense strand
ggagacgaaauugccguua

SEQ ID NO: 1658535 - RNA, 19 nt, Homo sapiens
  misc_RNA (1)...(19): siRNA sense strand
ugaaauaacaggaguucgu

SEQ ID NO: 1658536 - RNA, 19 nt, Homo sapiens
  misc_RNA (1)...(19): siRNA sense strand
gaccauuucugugccucaa

SEQ ID NO: 1658537 - RNA, 19 nt, Homo sapiens
  misc_RNA (1)...(19): siRNA sense strand
gcuucagccuggagacgaa

SEQ ID NO: 1658538 - RNA, 19 nt, Homo sapiens
  misc_RNA (1)...(19): siRNA sense strand
gagauagaaacucgacauc

SEQ ID NO: 1658539 - RNA, 19 nt, Homo sapiens
  misc_RNA (1)...(19): siRNA sense strand
gauuggcugauguuagaaa

SEQ ID NO: 1658540 - RNA, 19 nt, Homo sapiens
  misc_RNA (1)...(19): siRNA sense strand
gcugaaauaacaggaguuc

SEQ ID NO: 1658541 - RNA, 19 nt, Homo sapiens
  misc_RNA (1)...(19): siRNA sense strand
cguugcagcuguggaagga

SEQ ID NO: 1658542 - RNA, 19 nt, Homo sapiens
  misc_RNA (1)...(19): siRNA sense strand
aauaacaggaguucguuca

SEQ ID NO: 1658543 - RNA, 19 nt, Homo sapiens
  misc_RNA (1)...(19): siRNA sense strand
ggaaagauauggaugaagu

SEQ ID NO: 1658544 - RNA, 19 nt, Homo sapiens
  misc_RNA (1)...(19): siRNA sense strand
ggaugaaguugaagagaaa

SEQ ID NO: 1658545 - RNA, 19 nt, Homo sapiens
  misc_RNA (1)...(19): siRNA sense strand
gaagcaagcauaaucauug

SEQ ID NO: 1658546 - RNA, 19 nt, Homo sapiens
  misc_RNA (1)...(19): siRNA sense strand
ggaaauauacgaagaguca

SEQ ID NO: 1658547 - RNA, 19 nt, Homo sapiens
  misc_RNA (1)...(19): siRNA sense strand
gcuaugccauugauacuuu

SEQ ID NO: 1658548 - RNA, 19 nt, Homo sapiens
  misc_RNA (1)...(19): siRNA sense strand
ucagaaagauuuguaguga

SEQ ID NO: 1658549 - RNA, 19 nt, Homo sapiens
  misc_RNA (1)...(19): siRNA sense strand
gaagagucaucaacuugga

SEQ ID NO: 1658550 - RNA, 19 nt, Homo sapiens
  misc_RNA (1)...(19): siRNA sense strand
aaacuuuacugccgagaaa

SEQ ID NO: 1658551 - RNA, 19 nt, Homo sapiens
  misc_RNA (1)...(19): siRNA sense strand
gaagucagaaagauuugua

SEQ ID NO: 1658552 - RNA, 19 nt, Homo sapiens
  misc_RNA (1)...(19): siRNA sense strand
gcagaaauggccagucaaa

SEQ ID NO: 1658553 - RNA, 19 nt, Homo sapiens
  misc_RNA (1)...(19): siRNA sense strand
gagacgaaauugccguuau

SEQ ID NO: 1658554 - RNA, 19 nt, Homo sapiens
  misc_RNA (1)...(19): siRNA sense strand
gucauuagcuuagaauaug

SEQ ID NO: 1658555 - RNA, 19 nt, Homo sapiens
  misc_RNA (1)...(19): siRNA sense strand
uagaugaagucucacaguu

SEQ ID NO: 1658556 - RNA, 19 nt, Homo sapiens
  misc_RNA (1)...(19): siRNA sense strand
gcugugagcuaugccauug

SEQ ID NO: 1658557 - RNA, 19 nt, Homo sapiens
  misc_RNA (1)...(19): siRNA sense strand
agaaagauuuguagugaca

SEQ ID NO: 1658558 - RNA, 19 nt, Homo sapiens
  misc_RNA (1)...(19): siRNA sense strand
guagugacauuaggcagaa

SEQ ID NO: 1658559 - RNA, 19 nt, Homo sapiens
  misc_RNA (1)...(19): siRNA sense strand
agauauggaugaaguugaa

SEQ ID NO: 1658560 - RNA, 19 nt, Homo sapiens
  misc_RNA (1)...(19): siRNA sense strand
uggaugaaguugaagagaa

SEQ ID NO: 1658561 - RNA, 19 nt, Homo sapiens
  misc_RNA (1)...(19): siRNA sense strand
ccauagacuuggcuugguu

SEQ ID NO: 1658562 - RNA, 19 nt, Homo sapiens
  misc_RNA (1)...(19): siRNA sense strand
gaaagauauggaugaaguu

SEQ ID NO: 1658563 - RNA, 19 nt, Homo sapiens
  misc_RNA (1)...(19): siRNA sense strand
gaaaaugaagucagaaaga

SEQ ID NO: 1658564 - RNA, 19 nt, Homo sapiens
  misc_RNA (1)...(19): siRNA sense strand
gaaguugaagagaaaucua

SEQ ID NO: 1658565 - RNA, 19 nt, Homo sapiens
  misc_RNA (1)...(19): siRNA sense strand
uaggaaagauauggaugaa

SEQ ID NO: 1658566 - RNA, 19 nt, Homo sapiens
  misc_RNA (1)...(19): siRNA sense strand
ccaaggugcccauauggaa

SEQ ID NO: 1658567 - RNA, 19 nt, Homo sapiens
  misc_RNA (1)...(19): siRNA sense strand
agaaauggccagucaaaca

SEQ ID NO: 1658568 - RNA, 19 nt, Homo sapiens
  misc_RNA (1)...(19): siRNA sense strand
ggacuacaagaaauaacuu

SEQ ID NO: 1658569 - RNA, 19 nt, Homo sapiens
  misc_RNA (1)...(19): siRNA sense strand
gcaguguuccauagacuug

SEQ ID NO: 1658570 - RNA, 19 nt, Homo sapiens
  misc_RNA (1)...(19): siRNA sense strand
agacgaaauugccguuauc

SEQ ID NO: 1658571 - RNA, 19 nt, Homo sapiens
  misc_RNA (1)...(19): siRNA sense strand
caaggugcccauauggaaa

SEQ ID NO: 1658572 - RNA, 19 nt, Homo sapiens
  misc_RNA (1)...(19): siRNA sense strand
aggcagaaauggccaguca

SEQ ID NO: 1658573 - RNA, 19 nt, Homo sapiens
  misc_RNA (1)...(19): siRNA sense strand
gaaauggccagucaaacac

SEQ ID NO: 1658574 - RNA, 19 nt, Homo sapiens
  misc_RNA (1)...(19): siRNA sense strand
aagccaaggugcccauaug

SEQ ID NO: 1658575 - RNA, 19 nt, Homo sapiens
  misc_RNA (1)...(19): siRNA sense strand
ggagacgaaauugccguua

SEQ ID NO: 1658576 - RNA, 19 nt, Homo sapiens
  misc_RNA (1)...(19): siRNA sense strand
cuaugccauugauacuuua

SEQ ID NO: 1658577 - RNA, 19 nt, Homo sapiens
  misc_RNA (1)...(19): siRNA sense strand
uacgaagagucaucaacuu

SEQ ID NO: 1658578 - RNA, 19 nt, Homo sapiens
  misc_RNA (1)...(19): siRNA sense strand
acauagcaguguuccauag

SEQ ID NO: 1658579 - RNA, 19 nt, Homo sapiens
  misc_RNA (1)...(19): siRNA sense strand
gucaucaacuuggaaagga

SEQ ID NO: 1658580 - RNA, 19 nt, Homo sapiens
  misc_RNA (1)...(19): siRNA sense strand
cuaggaaagauauggauga

SEQ ID NO: 1658581 - RNA, 19 nt, Homo sapiens
  misc_RNA (1)...(19): siRNA sense strand
ggugauuucuccgcucugu

SEQ ID NO: 1658582 - RNA, 19 nt, Homo sapiens
  misc_RNA (1)...(19): siRNA sense strand
ucagaagcaagcauaauca

SEQ ID NO: 1658583 - RNA, 19 nt, Homo sapiens
  misc_RNA (1)...(19): siRNA sense strand
gcuucagccuggagacgaa

SEQ ID NO: 1658584 - RNA, 19 nt, Homo sapiens
  misc_RNA (1)...(19): siRNA sense strand
agaagcaagcauaaucauu

SEQ ID NO: 1658585 - RNA, 19 nt, Homo sapiens
  misc_RNA (1)...(19): siRNA sense strand
ucaucaacuuggaaaggaa

SEQ ID NO: 1658586 - RNA, 19 nt, Homo sapiens
  misc_RNA (1)...(19): siRNA sense strand
gcucuguggugcaauaucc

SEQ ID NO: 1658587 - RNA, 19 nt, Homo sapiens
  misc_RNA (1)...(19): siRNA sense strand
uggcuugguuccaguguca

SEQ ID NO: 1658588 - RNA, 19 nt, Homo sapiens
  misc_RNA (1)...(19): siRNA sense strand
caacuuggaaaggaaacaa

SEQ ID NO: 1658589 - RNA, 19 nt, Homo sapiens
  misc_RNA (1)...(19): siRNA sense strand
guagaugaagucucacagu

SEQ ID NO: 1658590 - RNA, 19 nt, Homo sapiens
  misc_RNA (1)...(19): siRNA sense strand
aaagauauggaugaaguug

SEQ ID NO: 1658591 - RNA, 19 nt, Homo sapiens
  misc_RNA (1)...(19): siRNA sense strand
gucagaagcaagcauaauc

SEQ ID NO: 1658592 - RNA, 19 nt, Homo sapiens
  misc_RNA (1)...(19): siRNA sense strand
agaugaagucucacaguug

SEQ ID NO: 1658593 - RNA, 19 nt, Homo sapiens
  misc_RNA (1)...(19): siRNA sense strand
caucaacuuggaaaggaaa

SEQ ID NO: 1658594 - RNA, 19 nt, Homo sapiens
  misc_RNA (1)...(19): siRNA sense strand
acgaagagucaucaacuug

SEQ ID NO: 1658595 - RNA, 19 nt, Homo sapiens
  misc_RNA (1)...(19): siRNA sense strand
cacauagcaguguuccaua

SEQ ID NO: 1658596 - RNA, 19 nt, Homo sapiens
  misc_RNA (1)...(19): siRNA sense strand
gagcuaugccauugauacu

SEQ ID NO: 1658597 - RNA, 19 nt, Homo sapiens
  misc_RNA (1)...(19): siRNA sense strand
ugugagcuaugccauugau

SEQ ID NO: 1658598 - RNA, 19 nt, Homo sapiens
  misc_RNA (1)...(19): siRNA sense strand
cauagcaguguuccauaga

SEQ ID NO: 1658599 - RNA, 19 nt, Homo sapiens
  misc_RNA (1)...(19): siRNA sense strand
gucagaaagauuuguagug

SEQ ID NO: 1658600 - RNA, 19 nt, Homo sapiens
  misc_RNA (1)...(19): siRNA sense strand
gccaaggugcccauaugga

SEQ ID NO: 1658601 - RNA, 19 nt, Homo sapiens
  misc_RNA (1)...(19): siRNA sense strand
gauuuguagugacauuagg

SEQ ID NO: 1658602 - RNA, 19 nt, Homo sapiens
  misc_RNA (1)...(19): siRNA sense strand
gaaugcagcuuacuuucuu

SEQ ID NO: 1658603 - RNA, 19 nt, Homo sapiens
  misc_RNA (1)...(19): siRNA sense strand
ucgauuaccugaagaguuu

SEQ ID NO: 1658604 - RNA, 19 nt, Homo sapiens
  misc_RNA (1)...(19): siRNA sense strand
gcacacacauaucacauca

SEQ ID NO: 1658605 - RNA, 19 nt, Homo sapiens
  misc_RNA (1)...(19): siRNA sense strand
ccugaagaguuuagaaaua

SEQ ID NO: 1658606 - RNA, 19 nt, Homo sapiens
  misc_RNA (1)...(19): siRNA sense strand
gcugaugaccugaggauua

SEQ ID NO: 1658607 - RNA, 19 nt, Homo sapiens
  misc_RNA (1)...(19): siRNA sense strand
caaccacacgggagaauua

SEQ ID NO: 1658608 - RNA, 19 nt, Homo sapiens
  misc_RNA (1)...(19): siRNA sense strand
gcagaaugcagcuuacuuu

SEQ ID NO: 1658609 - RNA, 19 nt, Homo sapiens
  misc_RNA (1)...(19): siRNA sense strand
caucgagacuuaccagguu

SEQ ID NO: 1658610 - RNA, 19 nt, Homo sapiens
  misc_RNA (1)...(19): siRNA sense strand
gcaguggcggcuacaaaua

SEQ ID NO: 1658611 - RNA, 19 nt, Homo sapiens
  misc_RNA (1)...(19): siRNA sense strand
ggauuaaccuauggaacuu

SEQ ID NO: 1658612 - RNA, 19 nt, Homo sapiens
  misc_RNA (1)...(19): siRNA sense strand
gaucacagcagccgaguuc

SEQ ID NO: 1658613 - RNA, 19 nt, Homo sapiens
  misc_RNA (1)...(19): siRNA sense strand
ggacaauccggcuguguga

SEQ ID NO: 1658614 - RNA, 19 nt, Homo sapiens
  misc_RNA (1)...(19): siRNA sense strand
gcagcuuacuuucuucugu

SEQ ID NO: 1658615 - RNA, 19 nt, Homo sapiens
  misc_RNA (1)...(19): siRNA sense strand
ccuauggaacuuugaaaua

SEQ ID NO: 1658616 - RNA, 19 nt, Homo sapiens
  misc_RNA (1)...(19): siRNA sense strand
cugaugaccugaggauuaa

SEQ ID NO: 1658617 - RNA, 19 nt, Homo sapiens
  misc_RNA (1)...(19): siRNA sense strand
ucucugaaauuaucucuuc

SEQ ID NO: 1658618 - RNA, 19 nt, Homo sapiens
  misc_RNA (1)...(19): siRNA sense strand
ugacaggcacaccaaauuu

SEQ ID NO: 1658619 - RNA, 19 nt, Homo sapiens
  misc_RNA (1)...(19): siRNA sense strand
gugaagcuguggaaaguca

SEQ ID NO: 1658620 - RNA, 19 nt, Homo sapiens
  misc_RNA (1)...(19): siRNA sense strand
caagcuguguucccucuau

SEQ ID NO: 1658621 - RNA, 19 nt, Homo sapiens
  misc_RNA (1)...(19): siRNA sense strand
cgaguucgauuaccugaag

SEQ ID NO: 1658622 - RNA, 19 nt, Homo sapiens
  misc_RNA (1)...(19): siRNA sense strand
agacuuaccagguucauga

SEQ ID NO: 1658623 - RNA, 19 nt, Homo sapiens
  misc_RNA (1)...(19): siRNA sense strand
gggucggguuguaauauuu

SEQ ID NO: 1658624 - RNA, 19 nt, Homo sapiens
  misc_RNA (1)...(19): siRNA sense strand
ccacacgggagaauuacua

SEQ ID NO: 1658625 - RNA, 19 nt, Homo sapiens
  misc_RNA (1)...(19): siRNA sense strand
gaagauccaagcaacagau

SEQ ID NO: 1658626 - RNA, 19 nt, Homo sapiens
  misc_RNA (1)...(19): siRNA sense strand
cugaagaguuuagaaauag

SEQ ID NO: 1658627 - RNA, 19 nt, Homo sapiens
  misc_RNA (1)...(19): siRNA sense strand
cgagaucagugucgacagu

SEQ ID NO: 1658628 - RNA, 19 nt, Homo sapiens
  misc_RNA (1)...(19): siRNA sense strand
aaagucagcgagcgugaua

SEQ ID NO: 1658629 - RNA, 19 nt, Homo sapiens
  misc_RNA (1)...(19): siRNA sense strand
gaccugaggauuaaccuau

SEQ ID NO: 1658630 - RNA, 19 nt, Homo sapiens
  misc_RNA (1)...(19): siRNA sense strand
gcacauuccagagccauga

SEQ ID NO: 1658631 - RNA, 19 nt, Homo sapiens
  misc_RNA (1)...(19): siRNA sense strand
ggcuacaaauaaccuauau

SEQ ID NO: 1658632 - RNA, 19 nt, Homo sapiens
  misc_RNA (1)...(19): siRNA sense strand
acacacauaucacaucaac

SEQ ID NO: 1658633 - RNA, 19 nt, Homo sapiens
  misc_RNA (1)...(19): siRNA sense strand
ucucuucgauuucggaugu

SEQ ID NO: 1658634 - RNA, 19 nt, Homo sapiens
  misc_RNA (1)...(19): siRNA sense strand
aacgagagcaggagaguaa

SEQ ID NO: 1658635 - RNA, 19 nt, Homo sapiens
  misc_RNA (1)...(19): siRNA sense strand
gaaaagacgagaucagugu

SEQ ID NO: 1658636 - RNA, 19 nt, Homo sapiens
  misc_RNA (1)...(19): siRNA sense strand
ucaggauguucgacagaaa

SEQ ID NO: 1658637 - RNA, 19 nt, Homo sapiens
  misc_RNA (1)...(19): siRNA sense strand
ucacaucaacuccauaucu

SEQ ID NO: 1658638 - RNA, 19 nt, Homo sapiens
  misc_RNA (1)...(19): siRNA sense strand
caguggcggcuacaaauaa

SEQ ID NO: 1658639 - RNA, 19 nt, Homo sapiens
  misc_RNA (1)...(19): siRNA sense strand
ucugggaucucaacaugga

SEQ ID NO: 1658640 - RNA, 19 nt, Homo sapiens
  misc_RNA (1)...(19): siRNA sense strand
agugggagguauaucauga

SEQ ID NO: 1658641 - RNA, 19 nt, Homo sapiens
  misc_RNA (1)...(19): siRNA sense strand
acacauaucacaucaacuc

SEQ ID NO: 1658642 - RNA, 19 nt, Homo sapiens
  misc_RNA (1)...(19): siRNA sense strand
cagcuuggcauccuucaga

SEQ ID NO: 1658643 - RNA, 19 nt, Homo sapiens
  misc_RNA (1)...(19): siRNA sense strand
ggaaugggucagacagugu

SEQ ID NO: 1658644 - RNA, 19 nt, Homo sapiens
  misc_RNA (1)...(19): siRNA sense strand
gucaaagucugggaucuca

SEQ ID NO: 1658645 - RNA, 19 nt, Homo sapiens
  misc_RNA (1)...(19): siRNA sense strand
gugacaggcacaccaaauu

SEQ ID NO: 1658646 - RNA, 19 nt, Homo sapiens
  misc_RNA (1)...(19): siRNA sense strand
caacagcgacuaugaaacc

SEQ ID NO: 1658647 - RNA, 19 nt, Homo sapiens
  misc_RNA (1)...(19): siRNA sense strand
cacaucaacuccauaucug

SEQ ID NO: 1658648 - RNA, 19 nt, Homo sapiens
  misc_RNA (1)...(19): siRNA sense strand
uuucuucugucuacuaaug

SEQ ID NO: 1658649 - RNA, 19 nt, Homo sapiens
  misc_RNA (1)...(19): siRNA sense strand
cauaucacaucaacuccau

SEQ ID NO: 1658650 - RNA, 19 nt, Homo sapiens
  misc_RNA (1)...(19): siRNA sense strand
ccaacgcacacacauauca

SEQ ID NO: 1658651 - RNA, 19 nt, Homo sapiens
  misc_RNA (1)...(19): siRNA sense strand
agucugggaucucaacaug

SEQ ID NO: 1658652 - RNA, 19 nt, Homo sapiens
  misc_RNA (1)...(19): siRNA sense strand
gucaacagcgacuaugaaa

SEQ ID NO: 1658653 - RNA, 19 nt, Homo sapiens
  misc_RNA (1)...(19): siRNA sense strand
cuuaccagguucaugacua

SEQ ID NO: 1658654 - RNA, 19 nt, Homo sapiens
  misc_RNA (1)...(19): siRNA sense strand
ggaagauccaagcaacaga

SEQ ID NO: 1658655 - RNA, 19 nt, Homo sapiens
  misc_RNA (1)...(19): siRNA sense strand
uaucacaucaacuccauau

SEQ ID NO: 1658656 - RNA, 19 nt, Homo sapiens
  misc_RNA (1)...(19): siRNA sense strand
gauuucggaugugaaguuc

SEQ ID NO: 1658657 - RNA, 19 nt, Homo sapiens
  misc_RNA (1)...(19): siRNA sense strand
gcauacagcuuggcauccu

SEQ ID NO: 1658658 - RNA, 19 nt, Homo sapiens
  misc_RNA (1)...(19): siRNA sense strand
acaacaacuucuucaggau

SEQ ID NO: 1658659 - RNA, 19 nt, Homo sapiens
  misc_RNA (1)...(19): siRNA sense strand
caacgagagcaggagagua

SEQ ID NO: 1658660 - RNA, 19 nt, Homo sapiens
  misc_RNA (1)...(19): siRNA sense strand
ugacaggcuccuacaacaa

SEQ ID NO: 1658661 - RNA, 19 nt, Homo sapiens
  misc_RNA (1)...(19): siRNA sense strand
uaaccuauggaacuuugaa

SEQ ID NO: 1658662 - RNA, 19 nt, Homo sapiens
  misc_RNA (1)...(19): siRNA sense strand
cgauuucggaugugaaguu

SEQ ID NO: 1658663 - RNA, 19 nt, Homo sapiens
  misc_RNA (1)...(19): siRNA sense strand
agaaggcuacaaucugaaa

SEQ ID NO: 1658664 - RNA, 19 nt, Homo sapiens
  misc_RNA (1)...(19): siRNA sense strand
uaccugaagaguuuagaaa

SEQ ID NO: 1658665 - RNA, 19 nt, Homo sapiens
  misc_RNA (1)...(19): siRNA sense strand
ccaagcaacagaucauuuu

SEQ ID NO: 1658666 - RNA, 19 nt, Homo sapiens
  misc_RNA (1)...(19): siRNA sense strand
gaaagucagcgagcgugau

SEQ ID NO: 1658667 - RNA, 19 nt, Homo sapiens
  misc_RNA (1)...(19): siRNA sense strand
cggcuacaaauaaccuaua

SEQ ID NO: 1658668 - RNA, 19 nt, Homo sapiens
  misc_RNA (1)...(19): siRNA sense strand
ggccagaaggcuacaaucu

SEQ ID NO: 1658669 - RNA, 19 nt, Homo sapiens
  misc_RNA (1)...(19): siRNA sense strand
gcuguguucccucuaugaa

SEQ ID NO: 1658670 - RNA, 19 nt, Homo sapiens
  misc_RNA (1)...(19): siRNA sense strand
gauccugccaccaucacaa

SEQ ID NO: 1658671 - RNA, 19 nt, Homo sapiens
  misc_RNA (1)...(19): siRNA sense strand
aaacugugaagcuguggaa

SEQ ID NO: 1658672 - RNA, 19 nt, Homo sapiens
  misc_RNA (1)...(19): siRNA sense strand
gaaacaccaagcgugaugu

SEQ ID NO: 1658673 - RNA, 19 nt, Homo sapiens
  misc_RNA (1)...(19): siRNA sense strand
agaaacaccaagcgugaug

SEQ ID NO: 1658674 - RNA, 19 nt, Homo sapiens
  misc_RNA (1)...(19): siRNA sense strand
cccagcagaaugcagcuua

SEQ ID NO: 1658675 - RNA, 19 nt, Homo sapiens
  misc_RNA (1)...(19): siRNA sense strand
gugaauacaauguuuacag

SEQ ID NO: 1658676 - RNA, 19 nt, Homo sapiens
  misc_RNA (1)...(19): siRNA sense strand
ugccaacgcacacacauau

SEQ ID NO: 1658677 - RNA, 19 nt, Homo sapiens
  misc_RNA (1)...(19): siRNA sense strand
ugucaacagcgacuaugaa

SEQ ID NO: 1658678 - RNA, 19 nt, Homo sapiens
  misc_RNA (1)...(19): siRNA sense strand
aacaacuucuucaggaugu

SEQ ID NO: 1658679 - RNA, 19 nt, Homo sapiens
  misc_RNA (1)...(19): siRNA sense strand
gacaggcuccuacaacaac

SEQ ID NO: 1658680 - RNA, 19 nt, Homo sapiens
  misc_RNA (1)...(19): siRNA sense strand
cagaaugcagcuuacuuuc

SEQ ID NO: 1658681 - RNA, 19 nt, Homo sapiens
  misc_RNA (1)...(19): siRNA sense strand
ucaacuccauaucugucaa

SEQ ID NO: 1658682 - RNA, 19 nt, Homo sapiens
  misc_RNA (1)...(19): siRNA sense strand
cacagugggagguauauca

SEQ ID NO: 1658683 - RNA, 19 nt, Homo sapiens
  misc_RNA (1)...(19): siRNA sense strand
cugaaauuaucucuucgau

SEQ ID NO: 1658684 - RNA, 19 nt, Homo sapiens
  misc_RNA (1)...(19): siRNA sense strand
gauuaaccuauggaacuuu

SEQ ID NO: 1658685 - RNA, 19 nt, Homo sapiens
  misc_RNA (1)...(19): siRNA sense strand
ucagcgagcgugauaagag

SEQ ID NO: 1658686 - RNA, 19 nt, Homo sapiens
  misc_RNA (1)...(19): siRNA sense strand
uuaccagguucaugacuac

SEQ ID NO: 1658687 - RNA, 19 nt, Homo sapiens
  misc_RNA (1)...(19): siRNA sense strand
cugugaagcuguggaaagu

SEQ ID NO: 1658688 - RNA, 19 nt, Homo sapiens
  misc_RNA (1)...(19): siRNA sense strand
gcaucugcccugugugaca

SEQ ID NO: 1658689 - RNA, 19 nt, Homo sapiens
  misc_RNA (1)...(19): siRNA sense strand
auuaaccuauggaacuuug

SEQ ID NO: 1658690 - RNA, 19 nt, Homo sapiens
  misc_RNA (1)...(19): siRNA sense strand
gacauuaagccagccaaca

SEQ ID NO: 1658691 - RNA, 19 nt, Homo sapiens
  misc_RNA (1)...(19): siRNA sense strand
cauacagcuuggcauccuu

SEQ ID NO: 1658692 - RNA, 19 nt, Homo sapiens
  misc_RNA (1)...(19): siRNA sense strand
gcuccuacaacaacuucuu

SEQ ID NO: 1658693 - RNA, 19 nt, Homo sapiens
  misc_RNA (1)...(19): siRNA sense strand
caaagucugggaucucaac

SEQ ID NO: 1658694 - RNA, 19 nt, Homo sapiens
  misc_RNA (1)...(19): siRNA sense strand
gaaugcagcuuacuuucuu

SEQ ID NO: 1658695 - RNA, 19 nt, Homo sapiens
  misc_RNA (1)...(19): siRNA sense strand
ucgauuaccugaagaguuu

SEQ ID NO: 1658696 - RNA, 19 nt, Homo sapiens
  misc_RNA (1)...(19): siRNA sense strand
gcacacacauaucacauca

SEQ ID NO: 1658697 - RNA, 19 nt, Homo sapiens
  misc_RNA (1)...(19): siRNA sense strand
ccugaagaguuuagaaaua

SEQ ID NO: 1658698 - RNA, 19 nt, Homo sapiens
  misc_RNA (1)...(19): siRNA sense strand
gcugaugaccugaggauua

SEQ ID NO: 1658699 - RNA, 19 nt, Homo sapiens
  misc_RNA (1)...(19): siRNA sense strand
caaccacacgggagaauua

SEQ ID NO: 1658700 - RNA, 19 nt, Homo sapiens
  misc_RNA (1)...(19): siRNA sense strand
gcagaaugcagcuuacuuu

SEQ ID NO: 1658701 - RNA, 19 nt, Homo sapiens
  misc_RNA (1)...(19): siRNA sense strand
caucgagacuuaccagguu

SEQ ID NO: 1658702 - RNA, 19 nt, Homo sapiens
  misc_RNA (1)...(19): siRNA sense strand
gcaguggcggcuacaaaua

SEQ ID NO: 1658703 - RNA, 19 nt, Homo sapiens
  misc_RNA (1)...(19): siRNA sense strand
ggauuaaccuauggaacuu

SEQ ID NO: 1658704 - RNA, 19 nt, Homo sapiens
  misc_RNA (1)...(19): siRNA sense strand
gaucacagcagccgaguuc

SEQ ID NO: 1658705 - RNA, 19 nt, Homo sapiens
  misc_RNA (1)...(19): siRNA sense strand
ggacaauccggcuguguga

SEQ ID NO: 1658706 - RNA, 19 nt, Homo sapiens
  misc_RNA (1)...(19): siRNA sense strand
gcagcuuacuuucuucugu

SEQ ID NO: 1658707 - RNA, 19 nt, Homo sapiens
  misc_RNA (1)...(19): siRNA sense strand
ccuauggaacuuugaaaua

SEQ ID NO: 1658708 - RNA, 19 nt, Homo sapiens
  misc_RNA (1)...(19): siRNA sense strand
cugaugaccugaggauuaa

SEQ ID NO: 1658709 - RNA, 19 nt, Homo sapiens
  misc_RNA (1)...(19): siRNA sense strand
ucucugaaauuaucucuuc

SEQ ID NO: 1658710 - RNA, 19 nt, Homo sapiens
  misc_RNA (1)...(19): siRNA sense strand
ugacaggcacaccaaauuu

SEQ ID NO: 1658711 - RNA, 19 nt, Homo sapiens
  misc_RNA (1)...(19): siRNA sense strand
gugaagcuguggaaaguca

SEQ ID NO: 1658712 - RNA, 19 nt, Homo sapiens
  misc_RNA (1)...(19): siRNA sense strand
caagcuguguucccucuau

SEQ ID NO: 1658713 - RNA, 19 nt, Homo sapiens
  misc_RNA (1)...(19): siRNA sense strand
cgaguucgauuaccugaag

SEQ ID NO: 1658714 - RNA, 19 nt, Homo sapiens
  misc_RNA (1)...(19): siRNA sense strand
agacuuaccagguucauga

SEQ ID NO: 1658715 - RNA, 19 nt, Homo sapiens
  misc_RNA (1)...(19): siRNA sense strand
gggucggguuguaauauuu

SEQ ID NO: 1658716 - RNA, 19 nt, Homo sapiens
  misc_RNA (1)...(19): siRNA sense strand
ccacacgggagaauuacua

SEQ ID NO: 1658717 - RNA, 19 nt, Homo sapiens
  misc_RNA (1)...(19): siRNA sense strand
gaagauccaagcaacagau

SEQ ID NO: 1658718 - RNA, 19 nt, Homo sapiens
  misc_RNA (1)...(19): siRNA sense strand
cugaagaguuuagaaauag

SEQ ID NO: 1658719 - RNA, 19 nt, Homo sapiens
  misc_RNA (1)...(19): siRNA sense strand
cgagaucagugucgacagu

SEQ ID NO: 1658720 - RNA, 19 nt, Homo sapiens
  misc_RNA (1)...(19): siRNA sense strand
aaagucagcgagcgugaua

SEQ ID NO: 1658721 - RNA, 19 nt, Homo sapiens
  misc_RNA (1)...(19): siRNA sense strand
gaccugaggauuaaccuau

SEQ ID NO: 1658722 - RNA, 19 nt, Homo sapiens
  misc_RNA (1)...(19): siRNA sense strand
gcacauuccagagccauga

SEQ ID NO: 1658723 - RNA, 19 nt, Homo sapiens
  misc_RNA (1)...(19): siRNA sense strand
ggcuacaaauaaccuauau

SEQ ID NO: 1658724 - RNA, 19 nt, Homo sapiens
  misc_RNA (1)...(19): siRNA sense strand
acacacauaucacaucaac

SEQ ID NO: 1658725 - RNA, 19 nt, Homo sapiens
  misc_RNA (1)...(19): siRNA sense strand
ucucuucgauuucggaugu

SEQ ID NO: 1658726 - RNA, 19 nt, Homo sapiens
  misc_RNA (1)...(19): siRNA sense strand
aacgagagcaggagaguaa

SEQ ID NO: 1658727 - RNA, 19 nt, Homo sapiens
  misc_RNA (1)...(19): siRNA sense strand
gaaaagacgagaucagugu

SEQ ID NO: 1658728 - RNA, 19 nt, Homo sapiens
  misc_RNA (1)...(19): siRNA sense strand
ucaggauguucgacagaaa

SEQ ID NO: 1658729 - RNA, 19 nt, Homo sapiens
  misc_RNA (1)...(19): siRNA sense strand
ucacaucaacuccauaucu

SEQ ID NO: 1658730 - RNA, 19 nt, Homo sapiens
  misc_RNA (1)...(19): siRNA sense strand
caguggcggcuacaaauaa

SEQ ID NO: 1658731 - RNA, 19 nt, Homo sapiens
  misc_RNA (1)...(19): siRNA sense strand
ucugggaucucaacaugga

SEQ ID NO: 1658732 - RNA, 19 nt, Homo sapiens
  misc_RNA (1)...(19): siRNA sense strand
agugggagguauaucauga

SEQ ID NO: 1658733 - RNA, 19 nt, Homo sapiens
  misc_RNA (1)...(19): siRNA sense strand
acacauaucacaucaacuc

SEQ ID NO: 1658734 - RNA, 19 nt, Homo sapiens
  misc_RNA (1)...(19): siRNA sense strand
cagcuuggcauccuucaga

SEQ ID NO: 1658735 - RNA, 19 nt, Homo sapiens
  misc_RNA (1)...(19): siRNA sense strand
ggaaugggucagacagugu

SEQ ID NO: 1658736 - RNA, 19 nt, Homo sapiens
  misc_RNA (1)...(19): siRNA sense strand
gucaaagucugggaucuca

SEQ ID NO: 1658737 - RNA, 19 nt, Homo sapiens
  misc_RNA (1)...(19): siRNA sense strand
gugacaggcacaccaaauu

SEQ ID NO: 1658738 - RNA, 19 nt, Homo sapiens
  misc_RNA (1)...(19): siRNA sense strand
caacagcgacuaugaaacc

SEQ ID NO: 1658739 - RNA, 19 nt, Homo sapiens
  misc_RNA (1)...(19): siRNA sense strand
cacaucaacuccauaucug

SEQ ID NO: 1658740 - RNA, 19 nt, Homo sapiens
  misc_RNA (1)...(19): siRNA sense strand
uuucuucugucuacuaaug

SEQ ID NO: 1658741 - RNA, 19 nt, Homo sapiens
  misc_RNA (1)...(19): siRNA sense strand
cauaucacaucaacuccau

SEQ ID NO: 1658742 - RNA, 19 nt, Homo sapiens
  misc_RNA (1)...(19): siRNA sense strand
ccaacgcacacacauauca

SEQ ID NO: 1658743 - RNA, 19 nt, Homo sapiens
  misc_RNA (1)...(19): siRNA sense strand
agucugggaucucaacaug

SEQ ID NO: 1658744 - RNA, 19 nt, Homo sapiens
  misc_RNA (1)...(19): siRNA sense strand
gucaacagcgacuaugaaa

SEQ ID NO: 1658745 - RNA, 19 nt, Homo sapiens
  misc_RNA (1)...(19): siRNA sense strand
cuuaccagguucaugacua

SEQ ID NO: 1658746 - RNA, 19 nt, Homo sapiens
  misc_RNA (1)...(19): siRNA sense strand
ggaagauccaagcaacaga

SEQ ID NO: 1658747 - RNA, 19 nt, Homo sapiens
  misc_RNA (1)...(19): siRNA sense strand
uaucacaucaacuccauau

SEQ ID NO: 1658748 - RNA, 19 nt, Homo sapiens
  misc_RNA (1)...(19): siRNA sense strand
gauuucggaugugaaguuc

SEQ ID NO: 1658749 - RNA, 19 nt, Homo sapiens
  misc_RNA (1)...(19): siRNA sense strand
gcauacagcuuggcauccu

SEQ ID NO: 1658750 - RNA, 19 nt, Homo sapiens
  misc_RNA (1)...(19): siRNA sense strand
acaacaacuucuucaggau

SEQ ID NO: 1658751 - RNA, 19 nt, Homo sapiens
  misc_RNA (1)...(19): siRNA sense strand
caacgagagcaggagagua

SEQ ID NO: 1658752 - RNA, 19 nt, Homo sapiens
  misc_RNA (1)...(19): siRNA sense strand
ugacaggcuccuacaacaa

SEQ ID NO: 1658753 - RNA, 19 nt, Homo sapiens
  misc_RNA (1)...(19): siRNA sense strand
uaaccuauggaacuuugaa

SEQ ID NO: 1658754 - RNA, 19 nt, Homo sapiens
  misc_RNA (1)...(19): siRNA sense strand
cgauuucggaugugaaguu

SEQ ID NO: 1658755 - RNA, 19 nt, Homo sapiens
  misc_RNA (1)...(19): siRNA sense strand
agaaggcuacaaucugaaa

SEQ ID NO: 1658756 - RNA, 19 nt, Homo sapiens
  misc_RNA (1)...(19): siRNA sense strand
uaccugaagaguuuagaaa

SEQ ID NO: 1658757 - RNA, 19 nt, Homo sapiens
  misc_RNA (1)...(19): siRNA sense strand
ccaagcaacagaucauuuu

SEQ ID NO: 1658758 - RNA, 19 nt, Homo sapiens
  misc_RNA (1)...(19): siRNA sense strand
gaaagucagcgagcgugau

SEQ ID NO: 1658759 - RNA, 19 nt, Homo sapiens
  misc_RNA (1)...(19): siRNA sense strand
cggcuacaaauaaccuaua

SEQ ID NO: 1658760 - RNA, 19 nt, Homo sapiens
  misc_RNA (1)...(19): siRNA sense strand
ggccagaaggcuacaaucu

SEQ ID NO: 1658761 - RNA, 19 nt, Homo sapiens
  misc_RNA (1)...(19): siRNA sense strand
gcuguguucccucuaugaa

SEQ ID NO: 1658762 - RNA, 19 nt, Homo sapiens
  misc_RNA (1)...(19): siRNA sense strand
gauccugccaccaucacaa

SEQ ID NO: 1658763 - RNA, 19 nt, Homo sapiens
  misc_RNA (1)...(19): siRNA sense strand
aaacugugaagcuguggaa

SEQ ID NO: 1658764 - RNA, 19 nt, Homo sapiens
  misc_RNA (1)...(19): siRNA sense strand
gaaacaccaagcgugaugu

SEQ ID NO: 1658765 - RNA, 19 nt, Homo sapiens
  misc_RNA (1)...(19): siRNA sense strand
agaaacaccaagcgugaug

SEQ ID NO: 1658766 - RNA, 19 nt, Homo sapiens
  misc_RNA (1)...(19): siRNA sense strand
cccagcagaaugcagcuua

SEQ ID NO: 1658767 - RNA, 19 nt, Homo sapiens
  misc_RNA (1)...(19): siRNA sense strand
gugaauacaauguuuacag

SEQ ID NO: 1658768 - RNA, 19 nt, Homo sapiens
  misc_RNA (1)...(19): siRNA sense strand
ugccaacgcacacacauau

SEQ ID NO: 1658769 - RNA, 19 nt, Homo sapiens
  misc_RNA (1)...(19): siRNA sense strand
ugucaacagcgacuaugaa

SEQ ID NO: 1658770 - RNA, 19 nt, Homo sapiens
  misc_RNA (1)...(19): siRNA sense strand
aacaacuucuucaggaugu

SEQ ID NO: 1658771 - RNA, 19 nt, Homo sapiens
  misc_RNA (1)...(19): siRNA sense strand
gacaggcuccuacaacaac

SEQ ID NO: 1658772 - RNA, 19 nt, Homo sapiens
  misc_RNA (1)...(19): siRNA sense strand
cagaaugcagcuuacuuuc

SEQ ID NO: 1658773 - RNA, 19 nt, Homo sapiens
  misc_RNA (1)...(19): siRNA sense strand
ucaacuccauaucugucaa

SEQ ID NO: 1658774 - RNA, 19 nt, Homo sapiens
  misc_RNA (1)...(19): siRNA sense strand
cacagugggagguauauca

SEQ ID NO: 1658775 - RNA, 19 nt, Homo sapiens
  misc_RNA (1)...(19): siRNA sense strand
cugaaauuaucucuucgau

SEQ ID NO: 1658776 - RNA, 19 nt, Homo sapiens
  misc_RNA (1)...(19): siRNA sense strand
gauuaaccuauggaacuuu

SEQ ID NO: 1658777 - RNA, 19 nt, Homo sapiens
  misc_RNA (1)...(19): siRNA sense strand
ucagcgagcgugauaagag

SEQ ID NO: 1658778 - RNA, 19 nt, Homo sapiens
  misc_RNA (1)...(19): siRNA sense strand
uuaccagguucaugacuac

SEQ ID NO: 1658779 - RNA, 19 nt, Homo sapiens
  misc_RNA (1)...(19): siRNA sense strand
cugugaagcuguggaaagu

SEQ ID NO: 1658780 - RNA, 19 nt, Homo sapiens
  misc_RNA (1)...(19): siRNA sense strand
gcaucugcccugugugaca

SEQ ID NO: 1658781 - RNA, 19 nt, Homo sapiens
  misc_RNA (1)...(19): siRNA sense strand
auuaaccuauggaacuuug

SEQ ID NO: 1658782 - RNA, 19 nt, Homo sapiens
  misc_RNA (1)...(19): siRNA sense strand
gacauuaagccagccaaca

SEQ ID NO: 1658783 - RNA, 19 nt, Homo sapiens
  misc_RNA (1)...(19): siRNA sense strand
cauacagcuuggcauccuu

SEQ ID NO: 1658784 - RNA, 19 nt, Homo sapiens
  misc_RNA (1)...(19): siRNA sense strand
gcuccuacaacaacuucuu

SEQ ID NO: 1658785 - RNA, 19 nt, Homo sapiens
  misc_RNA (1)...(19): siRNA sense strand
caaagucugggaucucaac

SEQ ID NO: 1658786 - RNA, 19 nt, Homo sapiens
  misc_RNA (1)...(19): siRNA sense strand
gaaugcagcuuacuuucuu

SEQ ID NO: 1658787 - RNA, 19 nt, Homo sapiens
  misc_RNA (1)...(19): siRNA sense strand
ucgauuaccugaagaguuu

SEQ ID NO: 1658788 - RNA, 19 nt, Homo sapiens
  misc_RNA (1)...(19): siRNA sense strand
gcacacacauaucacauca

SEQ ID NO: 1658789 - RNA, 19 nt, Homo sapiens
  misc_RNA (1)...(19): siRNA sense strand
ccugaagaguuuagaaaua

SEQ ID NO: 1658790 - RNA, 19 nt, Homo sapiens
  misc_RNA (1)...(19): siRNA sense strand
gcugaugaccugaggauua

SEQ ID NO: 1658791 - RNA, 19 nt, Homo sapiens
  misc_RNA (1)...(19): siRNA sense strand
caaccacacgggagaauua

SEQ ID NO: 1658792 - RNA, 19 nt, Homo sapiens
  misc_RNA (1)...(19): siRNA sense strand
gcagaaugcagcuuacuuu

SEQ ID NO: 1658793 - RNA, 19 nt, Homo sapiens
  misc_RNA (1)...(19): siRNA sense strand
caucgagacuuaccagguu

SEQ ID NO: 1658794 - RNA, 19 nt, Homo sapiens
  misc_RNA (1)...(19): siRNA sense strand
gcaguggcggcuacaaaua

SEQ ID NO: 1658795 - RNA, 19 nt, Homo sapiens
  misc_RNA (1)...(19): siRNA sense strand
ggauuaaccuauggaacuu

SEQ ID NO: 1658796 - RNA, 19 nt, Homo sapiens
  misc_RNA (1)...(19): siRNA sense strand
gaucacagcagccgaguuc

SEQ ID NO: 1658797 - RNA, 19 nt, Homo sapiens
  misc_RNA (1)...(19): siRNA sense strand
ggacaauccggcuguguga

SEQ ID NO: 1658798 - RNA, 19 nt, Homo sapiens
  misc_RNA (1)...(19): siRNA sense strand
gcagcuuacuuucuucugu

SEQ ID NO: 1658799 - RNA, 19 nt, Homo sapiens
  misc_RNA (1)...(19): siRNA sense strand
ccuauggaacuuugaaaua

SEQ ID NO: 1658800 - RNA, 19 nt, Homo sapiens
  misc_RNA (1)...(19): siRNA sense strand
cugaugaccugaggauuaa

SEQ ID NO: 1658801 - RNA, 19 nt, Homo sapiens
  misc_RNA (1)...(19): siRNA sense strand
ucucugaaauuaucucuuc

SEQ ID NO: 1658802 - RNA, 19 nt, Homo sapiens
  misc_RNA (1)...(19): siRNA sense strand
ugacaggcacaccaaauuu

SEQ ID NO: 1658803 - RNA, 19 nt, Homo sapiens
  misc_RNA (1)...(19): siRNA sense strand
gugaagcuguggaaaguca

SEQ ID NO: 1658804 - RNA, 19 nt, Homo sapiens
  misc_RNA (1)...(19): siRNA sense strand
caagcuguguucccucuau

SEQ ID NO: 1658805 - RNA, 19 nt, Homo sapiens
  misc_RNA (1)...(19): siRNA sense strand
cgaguucgauuaccugaag

SEQ ID NO: 1658806 - RNA, 19 nt, Homo sapiens
  misc_RNA (1)...(19): siRNA sense strand
agacuuaccagguucauga

SEQ ID NO: 1658807 - RNA, 19 nt, Homo sapiens
  misc_RNA (1)...(19): siRNA sense strand
gggucggguuguaauauuu

SEQ ID NO: 1658808 - RNA, 19 nt, Homo sapiens
  misc_RNA (1)...(19): siRNA sense strand
ccacacgggagaauuacua

SEQ ID NO: 1658809 - RNA, 19 nt, Homo sapiens
  misc_RNA (1)...(19): siRNA sense strand
gaagauccaagcaacagau

SEQ ID NO: 1658810 - RNA, 19 nt, Homo sapiens
  misc_RNA (1)...(19): siRNA sense strand
cugaagaguuuagaaauag

SEQ ID NO: 1658811 - RNA, 19 nt, Homo sapiens
  misc_RNA (1)...(19): siRNA sense strand
cgagaucagugucgacagu

SEQ ID NO: 1658812 - RNA, 19 nt, Homo sapiens
  misc_RNA (1)...(19): siRNA sense strand
aaagucagcgagcgugaua

SEQ ID NO: 1658813 - RNA, 19 nt, Homo sapiens
  misc_RNA (1)...(19): siRNA sense strand
gaccugaggauuaaccuau

SEQ ID NO: 1658814 - RNA, 19 nt, Homo sapiens
  misc_RNA (1)...(19): siRNA sense strand
gcacauuccagagccauga

SEQ ID NO: 1658815 - RNA, 19 nt, Homo sapiens
  misc_RNA (1)...(19): siRNA sense strand
ggcuacaaauaaccuauau

SEQ ID NO: 1658816 - RNA, 19 nt, Homo sapiens
  misc_RNA (1)...(19): siRNA sense strand
acacacauaucacaucaac

SEQ ID NO: 1658817 - RNA, 19 nt, Homo sapiens
  misc_RNA (1)...(19): siRNA sense strand
ucucuucgauuucggaugu

SEQ ID NO: 1658818 - RNA, 19 nt, Homo sapiens
  misc_RNA (1)...(19): siRNA sense strand
aacgagagcaggagaguaa

SEQ ID NO: 1658819 - RNA, 19 nt, Homo sapiens
  misc_RNA (1)...(19): siRNA sense strand
gaaaagacgagaucagugu

SEQ ID NO: 1658820 - RNA, 19 nt, Homo sapiens
  misc_RNA (1)...(19): siRNA sense strand
ucaggauguucgacagaaa

SEQ ID NO: 1658821 - RNA, 19 nt, Homo sapiens
  misc_RNA (1)...(19): siRNA sense strand
ucacaucaacuccauaucu

SEQ ID NO: 1658822 - RNA, 19 nt, Homo sapiens
  misc_RNA (1)...(19): siRNA sense strand
caguggcggcuacaaauaa

SEQ ID NO: 1658823 - RNA, 19 nt, Homo sapiens
  misc_RNA (1)...(19): siRNA sense strand
ucugggaucucaacaugga

SEQ ID NO: 1658824 - RNA, 19 nt, Homo sapiens
  misc_RNA (1)...(19): siRNA sense strand
agugggagguauaucauga

SEQ ID NO: 1658825 - RNA, 19 nt, Homo sapiens
  misc_RNA (1)...(19): siRNA sense strand
acacauaucacaucaacuc

SEQ ID NO: 1658826 - RNA, 19 nt, Homo sapiens
  misc_RNA (1)...(19): siRNA sense strand
cagcuuggcauccuucaga

SEQ ID NO: 1658827 - RNA, 19 nt, Homo sapiens
  misc_RNA (1)...(19): siRNA sense strand
ggaaugggucagacagugu

SEQ ID NO: 1658828 - RNA, 19 nt, Homo sapiens
  misc_RNA (1)...(19): siRNA sense strand
gucaaagucugggaucuca

SEQ ID NO: 1658829 - RNA, 19 nt, Homo sapiens
  misc_RNA (1)...(19): siRNA sense strand
gugacaggcacaccaaauu

SEQ ID NO: 1658830 - RNA, 19 nt, Homo sapiens
  misc_RNA (1)...(19): siRNA sense strand
caacagcgacuaugaaacc

SEQ ID NO: 1658831 - RNA, 19 nt, Homo sapiens
  misc_RNA (1)...(19): siRNA sense strand
cacaucaacuccauaucug

SEQ ID NO: 1658832 - RNA, 19 nt, Homo sapiens
  misc_RNA (1)...(19): siRNA sense strand
uuucuucugucuacuaaug

SEQ ID NO: 1658833 - RNA, 19 nt, Homo sapiens
  misc_RNA (1)...(19): siRNA sense strand
cauaucacaucaacuccau

SEQ ID NO: 1658834 - RNA, 19 nt, Homo sapiens
  misc_RNA (1)...(19): siRNA sense strand
ccaacgcacacacauauca

SEQ ID NO: 1658835 - RNA, 19 nt, Homo sapiens
  misc_RNA (1)...(19): siRNA sense strand
agucugggaucucaacaug

SEQ ID NO: 1658836 - RNA, 19 nt, Homo sapiens
  misc_RNA (1)...(19): siRNA sense strand
gucaacagcgacuaugaaa

SEQ ID NO: 1658837 - RNA, 19 nt, Homo sapiens
  misc_RNA (1)...(19): siRNA sense strand
cuuaccagguucaugacua

SEQ ID NO: 1658838 - RNA, 19 nt, Homo sapiens
  misc_RNA (1)...(19): siRNA sense strand
ggaagauccaagcaacaga

SEQ ID NO: 1658839 - RNA, 19 nt, Homo sapiens
  misc_RNA (1)...(19): siRNA sense strand
uaucacaucaacuccauau

SEQ ID NO: 1658840 - RNA, 19 nt, Homo sapiens
  misc_RNA (1)...(19): siRNA sense strand
gauuucggaugugaaguuc

SEQ ID NO: 1658841 - RNA, 19 nt, Homo sapiens
  misc_RNA (1)...(19): siRNA sense strand
gcauacagcuuggcauccu

SEQ ID NO: 1658842 - RNA, 19 nt, Homo sapiens
  misc_RNA (1)...(19): siRNA sense strand
acaacaacuucuucaggau

SEQ ID NO: 1658843 - RNA, 19 nt, Homo sapiens
  misc_RNA (1)...(19): siRNA sense strand
caacgagagcaggagagua

SEQ ID NO: 1658844 - RNA, 19 nt, Homo sapiens
  misc_RNA (1)...(19): siRNA sense strand
ugacaggcuccuacaacaa

SEQ ID NO: 1658845 - RNA, 19 nt, Homo sapiens
  misc_RNA (1)...(19): siRNA sense strand
uaaccuauggaacuuugaa

SEQ ID NO: 1658846 - RNA, 19 nt, Homo sapiens
  misc_RNA (1)...(19): siRNA sense strand
cgauuucggaugugaaguu

SEQ ID NO: 1658847 - RNA, 19 nt, Homo sapiens
  misc_RNA (1)...(19): siRNA sense strand
agaaggcuacaaucugaaa

SEQ ID NO: 1658848 - RNA, 19 nt, Homo sapiens
  misc_RNA (1)...(19): siRNA sense strand
uaccugaagaguuuagaaa

SEQ ID NO: 1658849 - RNA, 19 nt, Homo sapiens
  misc_RNA (1)...(19): siRNA sense strand
ccaagcaacagaucauuuu

SEQ ID NO: 1658850 - RNA, 19 nt, Homo sapiens
  misc_RNA (1)...(19): siRNA sense strand
gaaagucagcgagcgugau

SEQ ID NO: 1658851 - RNA, 19 nt, Homo sapiens
  misc_RNA (1)...(19): siRNA sense strand
cggcuacaaauaaccuaua

SEQ ID NO: 1658852 - RNA, 19 nt, Homo sapiens
  misc_RNA (1)...(19): siRNA sense strand
ggccagaaggcuacaaucu

SEQ ID NO: 1658853 - RNA, 19 nt, Homo sapiens
  misc_RNA (1)...(19): siRNA sense strand
gcuguguucccucuaugaa

SEQ ID NO: 1658854 - RNA, 19 nt, Homo sapiens
  misc_RNA (1)...(19): siRNA sense strand
gauccugccaccaucacaa

SEQ ID NO: 1658855 - RNA, 19 nt, Homo sapiens
  misc_RNA (1)...(19): siRNA sense strand
aaacugugaagcuguggaa

SEQ ID NO: 1658856 - RNA, 19 nt, Homo sapiens
  misc_RNA (1)...(19): siRNA sense strand
gaaacaccaagcgugaugu

SEQ ID NO: 1658857 - RNA, 19 nt, Homo sapiens
  misc_RNA (1)...(19): siRNA sense strand
agaaacaccaagcgugaug

SEQ ID NO: 1658858 - RNA, 19 nt, Homo sapiens
  misc_RNA (1)...(19): siRNA sense strand
cccagcagaaugcagcuua

SEQ ID NO: 1658859 - RNA, 19 nt, Homo sapiens
  misc_RNA (1)...(19): siRNA sense strand
gugaauacaauguuuacag

SEQ ID NO: 1658860 - RNA, 19 nt, Homo sapiens
  misc_RNA (1)...(19): siRNA sense strand
ugccaacgcacacacauau

SEQ ID NO: 1658861 - RNA, 19 nt, Homo sapiens
  misc_RNA (1)...(19): siRNA sense strand
ugucaacagcgacuaugaa

SEQ ID NO: 1658862 - RNA, 19 nt, Homo sapiens
  misc_RNA (1)...(19): siRNA sense strand
aacaacuucuucaggaugu

SEQ ID NO: 1658863 - RNA, 19 nt, Homo sapiens
  misc_RNA (1)...(19): siRNA sense strand
gacaggcuccuacaacaac

SEQ ID NO: 1658864 - RNA, 19 nt, Homo sapiens
  misc_RNA (1)...(19): siRNA sense strand
cagaaugcagcuuacuuuc

SEQ ID NO: 1658865 - RNA, 19 nt, Homo sapiens
  misc_RNA (1)...(19): siRNA sense strand
ucaacuccauaucugucaa

SEQ ID NO: 1658866 - RNA, 19 nt, Homo sapiens
  misc_RNA (1)...(19): siRNA sense strand
cacagugggagguauauca

SEQ ID NO: 1658867 - RNA, 19 nt, Homo sapiens
  misc_RNA (1)...(19): siRNA sense strand
cugaaauuaucucuucgau

SEQ ID NO: 1658868 - RNA, 19 nt, Homo sapiens
  misc_RNA (1)...(19): siRNA sense strand
gauuaaccuauggaacuuu

SEQ ID NO: 1658869 - RNA, 19 nt, Homo sapiens
  misc_RNA (1)...(19): siRNA sense strand
ucagcgagcgugauaagag

SEQ ID NO: 1658870 - RNA, 19 nt, Homo sapiens
  misc_RNA (1)...(19): siRNA sense strand
uuaccagguucaugacuac

SEQ ID NO: 1658871 - RNA, 19 nt, Homo sapiens
  misc_RNA (1)...(19): siRNA sense strand
cugugaagcuguggaaagu

SEQ ID NO: 1658872 - RNA, 19 nt, Homo sapiens
  misc_RNA (1)...(19): siRNA sense strand
gcaucugcccugugugaca

SEQ ID NO: 1658873 - RNA, 19 nt, Homo sapiens
  misc_RNA (1)...(19): siRNA sense strand
auuaaccuauggaacuuug

SEQ ID NO: 1658874 - RNA, 19 nt, Homo sapiens
  misc_RNA (1)...(19): siRNA sense strand
gacauuaagccagccaaca

SEQ ID NO: 1658875 - RNA, 19 nt, Homo sapiens
  misc_RNA (1)...(19): siRNA sense strand
cauacagcuuggcauccuu

SEQ ID NO: 1658876 - RNA, 19 nt, Homo sapiens
  misc_RNA (1)...(19): siRNA sense strand
gcuccuacaacaacuucuu

SEQ ID NO: 1658877 - RNA, 19 nt, Homo sapiens
  misc_RNA (1)...(19): siRNA sense strand
caaagucugggaucucaac

SEQ ID NO: 1658878 - RNA, 19 nt, Homo sapiens
  misc_RNA (1)...(19): siRNA sense strand
gaaugcagcuuacuuucuu

SEQ ID NO: 1658879 - RNA, 19 nt, Homo sapiens
  misc_RNA (1)...(19): siRNA sense strand
ucgauuaccugaagaguuu

SEQ ID NO: 1658880 - RNA, 19 nt, Homo sapiens
  misc_RNA (1)...(19): siRNA sense strand
gcacacacauaucacauca

SEQ ID NO: 1658881 - RNA, 19 nt, Homo sapiens
  misc_RNA (1)...(19): siRNA sense strand
ccugaagaguuuagaaaua

SEQ ID NO: 1658882 - RNA, 19 nt, Homo sapiens
  misc_RNA (1)...(19): siRNA sense strand
gcugaugaccugaggauua

SEQ ID NO: 1658883 - RNA, 19 nt, Homo sapiens
  misc_RNA (1)...(19): siRNA sense strand
caaccacacgggagaauua

SEQ ID NO: 1658884 - RNA, 19 nt, Homo sapiens
  misc_RNA (1)...(19): siRNA sense strand
gcagaaugcagcuuacuuu

SEQ ID NO: 1658885 - RNA, 19 nt, Homo sapiens
  misc_RNA (1)...(19): siRNA sense strand
caucgagacuuaccagguu

SEQ ID NO: 1658886 - RNA, 19 nt, Homo sapiens
  misc_RNA (1)...(19): siRNA sense strand
gcaguggcggcuacaaaua

SEQ ID NO: 1658887 - RNA, 19 nt, Homo sapiens
  misc_RNA (1)...(19): siRNA sense strand
ggauuaaccuauggaacuu

SEQ ID NO: 1658888 - RNA, 19 nt, Homo sapiens
  misc_RNA (1)...(19): siRNA sense strand
gaucacagcagccgaguuc

SEQ ID NO: 1658889 - RNA, 19 nt, Homo sapiens
  misc_RNA (1)...(19): siRNA sense strand
ggacaauccggcuguguga

SEQ ID NO: 1658890 - RNA, 19 nt, Homo sapiens
  misc_RNA (1)...(19): siRNA sense strand
gcagcuuacuuucuucugu

SEQ ID NO: 1658891 - RNA, 19 nt, Homo sapiens
  misc_RNA (1)...(19): siRNA sense strand
ccuauggaacuuugaaaua

SEQ ID NO: 1658892 - RNA, 19 nt, Homo sapiens
  misc_RNA (1)...(19): siRNA sense strand
cugaugaccugaggauuaa

SEQ ID NO: 1658893 - RNA, 19 nt, Homo sapiens
  misc_RNA (1)...(19): siRNA sense strand
ucucugaaauuaucucuuc

SEQ ID NO: 1658894 - RNA, 19 nt, Homo sapiens
  misc_RNA (1)...(19): siRNA sense strand
ugacaggcacaccaaauuu

SEQ ID NO: 1658895 - RNA, 19 nt, Homo sapiens
  misc_RNA (1)...(19): siRNA sense strand
gugaagcuguggaaaguca

SEQ ID NO: 1658896 - RNA, 19 nt, Homo sapiens
  misc_RNA (1)...(19): siRNA sense strand
caagcuguguucccucuau

SEQ ID NO: 1658897 - RNA, 19 nt, Homo sapiens
  misc_RNA (1)...(19): siRNA sense strand
cgaguucgauuaccugaag

SEQ ID NO: 1658898 - RNA, 19 nt, Homo sapiens
  misc_RNA (1)...(19): siRNA sense strand
agacuuaccagguucauga

SEQ ID NO: 1658899 - RNA, 19 nt, Homo sapiens
  misc_RNA (1)...(19): siRNA sense strand
gggucggguuguaauauuu

SEQ ID NO: 1658900 - RNA, 19 nt, Homo sapiens
  misc_RNA (1)...(19): siRNA sense strand
ccacacgggagaauuacua

SEQ ID NO: 1658901 - RNA, 19 nt, Homo sapiens
  misc_RNA (1)...(19): siRNA sense strand
gaagauccaagcaacagau

SEQ ID NO: 1658902 - RNA, 19 nt, Homo sapiens
  misc_RNA (1)...(19): siRNA sense strand
cugaagaguuuagaaauag

SEQ ID NO: 1658903 - RNA, 19 nt, Homo sapiens
  misc_RNA (1)...(19): siRNA sense strand
cgagaucagugucgacagu

SEQ ID NO: 1658904 - RNA, 19 nt, Homo sapiens
  misc_RNA (1)...(19): siRNA sense strand
aaagucagcgagcgugaua

SEQ ID NO: 1658905 - RNA, 19 nt, Homo sapiens
  misc_RNA (1)...(19): siRNA sense strand
gaccugaggauuaaccuau

SEQ ID NO: 1658906 - RNA, 19 nt, Homo sapiens
  misc_RNA (1)...(19): siRNA sense strand
gcacauuccagagccauga

SEQ ID NO: 1658907 - RNA, 19 nt, Homo sapiens
  misc_RNA (1)...(19): siRNA sense strand
ggcuacaaauaaccuauau

SEQ ID NO: 1658908 - RNA, 19 nt, Homo sapiens
  misc_RNA (1)...(19): siRNA sense strand
acacacauaucacaucaac

SEQ ID NO: 1658909 - RNA, 19 nt, Homo sapiens
  misc_RNA (1)...(19): siRNA sense strand
ucucuucgauuucggaugu

SEQ ID NO: 1658910 - RNA, 19 nt, Homo sapiens
  misc_RNA (1)...(19): siRNA sense strand
aacgagagcaggagaguaa

SEQ ID NO: 1658911 - RNA, 19 nt, Homo sapiens
  misc_RNA (1)...(19): siRNA sense strand
gaaaagacgagaucagugu

SEQ ID NO: 1658912 - RNA, 19 nt, Homo sapiens
  misc_RNA (1)...(19): siRNA sense strand
ucaggauguucgacagaaa

SEQ ID NO: 1658913 - RNA, 19 nt, Homo sapiens
  misc_RNA (1)...(19): siRNA sense strand
ucacaucaacuccauaucu

SEQ ID NO: 1658914 - RNA, 19 nt, Homo sapiens
  misc_RNA (1)...(19): siRNA sense strand
caguggcggcuacaaauaa

SEQ ID NO: 1658915 - RNA, 19 nt, Homo sapiens
  misc_RNA (1)...(19): siRNA sense strand
ucugggaucucaacaugga

SEQ ID NO: 1658916 - RNA, 19 nt, Homo sapiens
  misc_RNA (1)...(19): siRNA sense strand
agugggagguauaucauga

SEQ ID NO: 1658917 - RNA, 19 nt, Homo sapiens
  misc_RNA (1)...(19): siRNA sense strand
acacauaucacaucaacuc

SEQ ID NO: 1658918 - RNA, 19 nt, Homo sapiens
  misc_RNA (1)...(19): siRNA sense strand
cagcuuggcauccuucaga

SEQ ID NO: 1658919 - RNA, 19 nt, Homo sapiens
  misc_RNA (1)...(19): siRNA sense strand
ggaaugggucagacagugu

SEQ ID NO: 1658920 - RNA, 19 nt, Homo sapiens
  misc_RNA (1)...(19): siRNA sense strand
gucaaagucugggaucuca

SEQ ID NO: 1658921 - RNA, 19 nt, Homo sapiens
  misc_RNA (1)...(19): siRNA sense strand
gugacaggcacaccaaauu

SEQ ID NO: 1658922 - RNA, 19 nt, Homo sapiens
  misc_RNA (1)...(19): siRNA sense strand
caacagcgacuaugaaacc

SEQ ID NO: 1658923 - RNA, 19 nt, Homo sapiens
  misc_RNA (1)...(19): siRNA sense strand
cacaucaacuccauaucug

SEQ ID NO: 1658924 - RNA, 19 nt, Homo sapiens
  misc_RNA (1)...(19): siRNA sense strand
uuucuucugucuacuaaug

SEQ ID NO: 1658925 - RNA, 19 nt, Homo sapiens
  misc_RNA (1)...(19): siRNA sense strand
cauaucacaucaacuccau

SEQ ID NO: 1658926 - RNA, 19 nt, Homo sapiens
  misc_RNA (1)...(19): siRNA sense strand
ccaacgcacacacauauca

SEQ ID NO: 1658927 - RNA, 19 nt, Homo sapiens
  misc_RNA (1)...(19): siRNA sense strand
agucugggaucucaacaug

SEQ ID NO: 1658928 - RNA, 19 nt, Homo sapiens
  misc_RNA (1)...(19): siRNA sense strand
gucaacagcgacuaugaaa

SEQ ID NO: 1658929 - RNA, 19 nt, Homo sapiens
  misc_RNA (1)...(19): siRNA sense strand
cuuaccagguucaugacua

SEQ ID NO: 1658930 - RNA, 19 nt, Homo sapiens
  misc_RNA (1)...(19): siRNA sense strand
ggaagauccaagcaacaga

SEQ ID NO: 1658931 - RNA, 19 nt, Homo sapiens
  misc_RNA (1)...(19): siRNA sense strand
uaucacaucaacuccauau

SEQ ID NO: 1658932 - RNA, 19 nt, Homo sapiens
  misc_RNA (1)...(19): siRNA sense strand
gauuucggaugugaaguuc

SEQ ID NO: 1658933 - RNA, 19 nt, Homo sapiens
  misc_RNA (1)...(19): siRNA sense strand
gcauacagcuuggcauccu

SEQ ID NO: 1658934 - RNA, 19 nt, Homo sapiens
  misc_RNA (1)...(19): siRNA sense strand
acaacaacuucuucaggau

SEQ ID NO: 1658935 - RNA, 19 nt, Homo sapiens
  misc_RNA (1)...(19): siRNA sense strand
caacgagagcaggagagua

SEQ ID NO: 1658936 - RNA, 19 nt, Homo sapiens
  misc_RNA (1)...(19): siRNA sense strand
ugacaggcuccuacaacaa

SEQ ID NO: 1658937 - RNA, 19 nt, Homo sapiens
  misc_RNA (1)...(19): siRNA sense strand
uaaccuauggaacuuugaa

SEQ ID NO: 1658938 - RNA, 19 nt, Homo sapiens
  misc_RNA (1)...(19): siRNA sense strand
cgauuucggaugugaaguu

SEQ ID NO: 1658939 - RNA, 19 nt, Homo sapiens
  misc_RNA (1)...(19): siRNA sense strand
agaaggcuacaaucugaaa

SEQ ID NO: 1658940 - RNA, 19 nt, Homo sapiens
  misc_RNA (1)...(19): siRNA sense strand
uaccugaagaguuuagaaa

SEQ ID NO: 1658941 - RNA, 19 nt, Homo sapiens
  misc_RNA (1)...(19): siRNA sense strand
ccaagcaacagaucauuuu

SEQ ID NO: 1658942 - RNA, 19 nt, Homo sapiens
  misc_RNA (1)...(19): siRNA sense strand
gaaagucagcgagcgugau

SEQ ID NO: 1658943 - RNA, 19 nt, Homo sapiens
  misc_RNA (1)...(19): siRNA sense strand
cggcuacaaauaaccuaua

SEQ ID NO: 1658944 - RNA, 19 nt, Homo sapiens
  misc_RNA (1)...(19): siRNA sense strand
ggccagaaggcuacaaucu

SEQ ID NO: 1658945 - RNA, 19 nt, Homo sapiens
  misc_RNA (1)...(19): siRNA sense strand
gcuguguucccucuaugaa

SEQ ID NO: 1658946 - RNA, 19 nt, Homo sapiens
  misc_RNA (1)...(19): siRNA sense strand
gauccugccaccaucacaa

SEQ ID NO: 1658947 - RNA, 19 nt, Homo sapiens
  misc_RNA (1)...(19): siRNA sense strand
aaacugugaagcuguggaa

SEQ ID NO: 1658948 - RNA, 19 nt, Homo sapiens
  misc_RNA (1)...(19): siRNA sense strand
gaaacaccaagcgugaugu

SEQ ID NO: 1658949 - RNA, 19 nt, Homo sapiens
  misc_RNA (1)...(19): siRNA sense strand
agaaacaccaagcgugaug

SEQ ID NO: 1658950 - RNA, 19 nt, Homo sapiens
  misc_RNA (1)...(19): siRNA sense strand
cccagcagaaugcagcuua

SEQ ID NO: 1658951 - RNA, 19 nt, Homo sapiens
  misc_RNA (1)...(19): siRNA sense strand
gugaauacaauguuuacag

SEQ ID NO: 1658952 - RNA, 19 nt, Homo sapiens
  misc_RNA (1)...(19): siRNA sense strand
ugccaacgcacacacauau

SEQ ID NO: 1658953 - RNA, 19 nt, Homo sapiens
  misc_RNA (1)...(19): siRNA sense strand
ugucaacagcgacuaugaa

SEQ ID NO: 1658954 - RNA, 19 nt, Homo sapiens
  misc_RNA (1)...(19): siRNA sense strand
aacaacuucuucaggaugu

SEQ ID NO: 1658955 - RNA, 19 nt, Homo sapiens
  misc_RNA (1)...(19): siRNA sense strand
gacaggcuccuacaacaac

SEQ ID NO: 1658956 - RNA, 19 nt, Homo sapiens
  misc_RNA (1)...(19): siRNA sense strand
cagaaugcagcuuacuuuc

SEQ ID NO: 1658957 - RNA, 19 nt, Homo sapiens
  misc_RNA (1)...(19): siRNA sense strand
ucaacuccauaucugucaa

SEQ ID NO: 1658958 - RNA, 19 nt, Homo sapiens
  misc_RNA (1)...(19): siRNA sense strand
cacagugggagguauauca

SEQ ID NO: 1658959 - RNA, 19 nt, Homo sapiens
  misc_RNA (1)...(19): siRNA sense strand
cugaaauuaucucuucgau

SEQ ID NO: 1658960 - RNA, 19 nt, Homo sapiens
  misc_RNA (1)...(19): siRNA sense strand
gauuaaccuauggaacuuu

SEQ ID NO: 1658961 - RNA, 19 nt, Homo sapiens
  misc_RNA (1)...(19): siRNA sense strand
ucagcgagcgugauaagag

SEQ ID NO: 1658962 - RNA, 19 nt, Homo sapiens
  misc_RNA (1)...(19): siRNA sense strand
uuaccagguucaugacuac

SEQ ID NO: 1658963 - RNA, 19 nt, Homo sapiens
  misc_RNA (1)...(19): siRNA sense strand
cugugaagcuguggaaagu

SEQ ID NO: 1658964 - RNA, 19 nt, Homo sapiens
  misc_RNA (1)...(19): siRNA sense strand
gcaucugcccugugugaca

SEQ ID NO: 1658965 - RNA, 19 nt, Homo sapiens
  misc_RNA (1)...(19): siRNA sense strand
auuaaccuauggaacuuug

SEQ ID NO: 1658966 - RNA, 19 nt, Homo sapiens
  misc_RNA (1)...(19): siRNA sense strand
gacauuaagccagccaaca

SEQ ID NO: 1658967 - RNA, 19 nt, Homo sapiens
  misc_RNA (1)...(19): siRNA sense strand
cauacagcuuggcauccuu

SEQ ID NO: 1658968 - RNA, 19 nt, Homo sapiens
  misc_RNA (1)...(19): siRNA sense strand
gcuccuacaacaacuucuu

SEQ ID NO: 1658969 - RNA, 19 nt, Homo sapiens
  misc_RNA (1)...(19): siRNA sense strand
caaagucugggaucucaac

SEQ ID NO: 1658970 - RNA, 19 nt, Homo sapiens
  misc_RNA (1)...(19): siRNA sense strand
gaaugcagcuuacuuucuu

SEQ ID NO: 1658971 - RNA, 19 nt, Homo sapiens
  misc_RNA (1)...(19): siRNA sense strand
ucgauuaccugaagaguuu

SEQ ID NO: 1658972 - RNA, 19 nt, Homo sapiens
  misc_RNA (1)...(19): siRNA sense strand
gcacacacauaucacauca

SEQ ID NO: 1658973 - RNA, 19 nt, Homo sapiens
  misc_RNA (1)...(19): siRNA sense strand
ccugaagaguuuagaaaua

SEQ ID NO: 1658974 - RNA, 19 nt, Homo sapiens
  misc_RNA (1)...(19): siRNA sense strand
gcugaugaccugaggauua

SEQ ID NO: 1658975 - RNA, 19 nt, Homo sapiens
  misc_RNA (1)...(19): siRNA sense strand
caaccacacgggagaauua

SEQ ID NO: 1658976 - RNA, 19 nt, Homo sapiens
  misc_RNA (1)...(19): siRNA sense strand
gcagaaugcagcuuacuuu

SEQ ID NO: 1658977 - RNA, 19 nt, Homo sapiens
  misc_RNA (1)...(19): siRNA sense strand
caucgagacuuaccagguu

SEQ ID NO: 1658978 - RNA, 19 nt, Homo sapiens
  misc_RNA (1)...(19): siRNA sense strand
gcaguggcggcuacaaaua

SEQ ID NO: 1658979 - RNA, 19 nt, Homo sapiens
  misc_RNA (1)...(19): siRNA sense strand
ggauuaaccuauggaacuu

SEQ ID NO: 1658980 - RNA, 19 nt, Homo sapiens
  misc_RNA (1)...(19): siRNA sense strand
gaucacagcagccgaguuc

SEQ ID NO: 1658981 - RNA, 19 nt, Homo sapiens
  misc_RNA (1)...(19): siRNA sense strand
ggacaauccggcuguguga

SEQ ID NO: 1658982 - RNA, 19 nt, Homo sapiens
  misc_RNA (1)...(19): siRNA sense strand
gcagcuuacuuucuucugu

SEQ ID NO: 1658983 - RNA, 19 nt, Homo sapiens
  misc_RNA (1)...(19): siRNA sense strand
ccuauggaacuuugaaaua

SEQ ID NO: 1658984 - RNA, 19 nt, Homo sapiens
  misc_RNA (1)...(19): siRNA sense strand
cugaugaccugaggauuaa

SEQ ID NO: 1658985 - RNA, 19 nt, Homo sapiens
  misc_RNA (1)...(19): siRNA sense strand
ucucugaaauuaucucuuc

SEQ ID NO: 1658986 - RNA, 19 nt, Homo sapiens
  misc_RNA (1)...(19): siRNA sense strand
ugacaggcacaccaaauuu

SEQ ID NO: 1658987 - RNA, 19 nt, Homo sapiens
  misc_RNA (1)...(19): siRNA sense strand
gugaagcuguggaaaguca

SEQ ID NO: 1658988 - RNA, 19 nt, Homo sapiens
  misc_RNA (1)...(19): siRNA sense strand
caagcuguguucccucuau

SEQ ID NO: 1658989 - RNA, 19 nt, Homo sapiens
  misc_RNA (1)...(19): siRNA sense strand
cgaguucgauuaccugaag

SEQ ID NO: 1658990 - RNA, 19 nt, Homo sapiens
  misc_RNA (1)...(19): siRNA sense strand
agacuuaccagguucauga

SEQ ID NO: 1658991 - RNA, 19 nt, Homo sapiens
  misc_RNA (1)...(19): siRNA sense strand
gggucggguuguaauauuu

SEQ ID NO: 1658992 - RNA, 19 nt, Homo sapiens
  misc_RNA (1)...(19): siRNA sense strand
ccacacgggagaauuacua

SEQ ID NO: 1658993 - RNA, 19 nt, Homo sapiens
  misc_RNA (1)...(19): siRNA sense strand
gaagauccaagcaacagau

SEQ ID NO: 1658994 - RNA, 19 nt, Homo sapiens
  misc_RNA (1)...(19): siRNA sense strand
cugaagaguuuagaaauag

SEQ ID NO: 1658995 - RNA, 19 nt, Homo sapiens
  misc_RNA (1)...(19): siRNA sense strand
cgagaucagugucgacagu

SEQ ID NO: 1658996 - RNA, 19 nt, Homo sapiens
  misc_RNA (1)...(19): siRNA sense strand
aaagucagcgagcgugaua

SEQ ID NO: 1658997 - RNA, 19 nt, Homo sapiens
  misc_RNA (1)...(19): siRNA sense strand
gaccugaggauuaaccuau

SEQ ID NO: 1658998 - RNA, 19 nt, Homo sapiens
  misc_RNA (1)...(19): siRNA sense strand
gcacauuccagagccauga

SEQ ID NO: 1658999 - RNA, 19 nt, Homo sapiens
  misc_RNA (1)...(19): siRNA sense strand
ggcuacaaauaaccuauau

SEQ ID NO: 1659000 - RNA, 19 nt, Homo sapiens
  misc_RNA (1)...(19): siRNA sense strand
acacacauaucacaucaac

SEQ ID NO: 1659001 - RNA, 19 nt, Homo sapiens
  misc_RNA (1)...(19): siRNA sense strand
ucucuucgauuucggaugu

SEQ ID NO: 1659002 - RNA, 19 nt, Homo sapiens
  misc_RNA (1)...(19): siRNA sense strand
aacgagagcaggagaguaa

SEQ ID NO: 1659003 - RNA, 19 nt, Homo sapiens
  misc_RNA (1)...(19): siRNA sense strand
gaaaagacgagaucagugu

SEQ ID NO: 1659004 - RNA, 19 nt, Homo sapiens
  misc_RNA (1)...(19): siRNA sense strand
ucaggauguucgacagaaa

SEQ ID NO: 1659005 - RNA, 19 nt, Homo sapiens
  misc_RNA (1)...(19): siRNA sense strand
ucacaucaacuccauaucu

SEQ ID NO: 1659006 - RNA, 19 nt, Homo sapiens
  misc_RNA (1)...(19): siRNA sense strand
caguggcggcuacaaauaa

SEQ ID NO: 1659007 - RNA, 19 nt, Homo sapiens
  misc_RNA (1)...(19): siRNA sense strand
ucugggaucucaacaugga

SEQ ID NO: 1659008 - RNA, 19 nt, Homo sapiens
  misc_RNA (1)...(19): siRNA sense strand
agugggagguauaucauga

SEQ ID NO: 1659009 - RNA, 19 nt, Homo sapiens
  misc_RNA (1)...(19): siRNA sense strand
acacauaucacaucaacuc

SEQ ID NO: 1659010 - RNA, 19 nt, Homo sapiens
  misc_RNA (1)...(19): siRNA sense strand
cagcuuggcauccuucaga

SEQ ID NO: 1659011 - RNA, 19 nt, Homo sapiens
  misc_RNA (1)...(19): siRNA sense strand
ggaaugggucagacagugu

SEQ ID NO: 1659012 - RNA, 19 nt, Homo sapiens
  misc_RNA (1)...(19): siRNA sense strand
gucaaagucugggaucuca

SEQ ID NO: 1659013 - RNA, 19 nt, Homo sapiens
  misc_RNA (1)...(19): siRNA sense strand
gugacaggcacaccaaauu

SEQ ID NO: 1659014 - RNA, 19 nt, Homo sapiens
  misc_RNA (1)...(19): siRNA sense strand
caacagcgacuaugaaacc

SEQ ID NO: 1659015 - RNA, 19 nt, Homo sapiens
  misc_RNA (1)...(19): siRNA sense strand
cacaucaacuccauaucug

SEQ ID NO: 1659016 - RNA, 19 nt, Homo sapiens
  misc_RNA (1)...(19): siRNA sense strand
uuucuucugucuacuaaug

SEQ ID NO: 1659017 - RNA, 19 nt, Homo sapiens
  misc_RNA (1)...(19): siRNA sense strand
cauaucacaucaacuccau

SEQ ID NO: 1659018 - RNA, 19 nt, Homo sapiens
  misc_RNA (1)...(19): siRNA sense strand
ccaacgcacacacauauca

SEQ ID NO: 1659019 - RNA, 19 nt, Homo sapiens
  misc_RNA (1)...(19): siRNA sense strand
agucugggaucucaacaug

SEQ ID NO: 1659020 - RNA, 19 nt, Homo sapiens
  misc_RNA (1)...(19): siRNA sense strand
gucaacagcgacuaugaaa

SEQ ID NO: 1659021 - RNA, 19 nt, Homo sapiens
  misc_RNA (1)...(19): siRNA sense strand
cuuaccagguucaugacua

SEQ ID NO: 1659022 - RNA, 19 nt, Homo sapiens
  misc_RNA (1)...(19): siRNA sense strand
ggaagauccaagcaacaga

SEQ ID NO: 1659023 - RNA, 19 nt, Homo sapiens
  misc_RNA (1)...(19): siRNA sense strand
uaucacaucaacuccauau

SEQ ID NO: 1659024 - RNA, 19 nt, Homo sapiens
  misc_RNA (1)...(19): siRNA sense strand
gauuucggaugugaaguuc

SEQ ID NO: 1659025 - RNA, 19 nt, Homo sapiens
  misc_RNA (1)...(19): siRNA sense strand
gcauacagcuuggcauccu

SEQ ID NO: 1659026 - RNA, 19 nt, Homo sapiens
  misc_RNA (1)...(19): siRNA sense strand
acaacaacuucuucaggau

SEQ ID NO: 1659027 - RNA, 19 nt, Homo sapiens
  misc_RNA (1)...(19): siRNA sense strand
caacgagagcaggagagua

SEQ ID NO: 1659028 - RNA, 19 nt, Homo sapiens
  misc_RNA (1)...(19): siRNA sense strand
ugacaggcuccuacaacaa

SEQ ID NO: 1659029 - RNA, 19 nt, Homo sapiens
  misc_RNA (1)...(19): siRNA sense strand
uaaccuauggaacuuugaa

SEQ ID NO: 1659030 - RNA, 19 nt, Homo sapiens
  misc_RNA (1)...(19): siRNA sense strand
cgauuucggaugugaaguu

SEQ ID NO: 1659031 - RNA, 19 nt, Homo sapiens
  misc_RNA (1)...(19): siRNA sense strand
agaaggcuacaaucugaaa

SEQ ID NO: 1659032 - RNA, 19 nt, Homo sapiens
  misc_RNA (1)...(19): siRNA sense strand
uaccugaagaguuuagaaa

SEQ ID NO: 1659033 - RNA, 19 nt, Homo sapiens
  misc_RNA (1)...(19): siRNA sense strand
ccaagcaacagaucauuuu

SEQ ID NO: 1659034 - RNA, 19 nt, Homo sapiens
  misc_RNA (1)...(19): siRNA sense strand
gaaagucagcgagcgugau

SEQ ID NO: 1659035 - RNA, 19 nt, Homo sapiens
  misc_RNA (1)...(19): siRNA sense strand
cggcuacaaauaaccuaua

SEQ ID NO: 1659036 - RNA, 19 nt, Homo sapiens
  misc_RNA (1)...(19): siRNA sense strand
ggccagaaggcuacaaucu

SEQ ID NO: 1659037 - RNA, 19 nt, Homo sapiens
  misc_RNA (1)...(19): siRNA sense strand
gcuguguucccucuaugaa

SEQ ID NO: 1659038 - RNA, 19 nt, Homo sapiens
  misc_RNA (1)...(19): siRNA sense strand
gauccugccaccaucacaa

SEQ ID NO: 1659039 - RNA, 19 nt, Homo sapiens
  misc_RNA (1)...(19): siRNA sense strand
aaacugugaagcuguggaa

SEQ ID NO: 1659040 - RNA, 19 nt, Homo sapiens
  misc_RNA (1)...(19): siRNA sense strand
gaaacaccaagcgugaugu

SEQ ID NO: 1659041 - RNA, 19 nt, Homo sapiens
  misc_RNA (1)...(19): siRNA sense strand
agaaacaccaagcgugaug

SEQ ID NO: 1659042 - RNA, 19 nt, Homo sapiens
  misc_RNA (1)...(19): siRNA sense strand
cccagcagaaugcagcuua

SEQ ID NO: 1659043 - RNA, 19 nt, Homo sapiens
  misc_RNA (1)...(19): siRNA sense strand
gugaauacaauguuuacag

SEQ ID NO: 1659044 - RNA, 19 nt, Homo sapiens
  misc_RNA (1)...(19): siRNA sense strand
ugccaacgcacacacauau

SEQ ID NO: 1659045 - RNA, 19 nt, Homo sapiens
  misc_RNA (1)...(19): siRNA sense strand
ugucaacagcgacuaugaa

SEQ ID NO: 1659046 - RNA, 19 nt, Homo sapiens
  misc_RNA (1)...(19): siRNA sense strand
aacaacuucuucaggaugu

SEQ ID NO: 1659047 - RNA, 19 nt, Homo sapiens
  misc_RNA (1)...(19): siRNA sense strand
gacaggcuccuacaacaac

SEQ ID NO: 1659048 - RNA, 19 nt, Homo sapiens
  misc_RNA (1)...(19): siRNA sense strand
cagaaugcagcuuacuuuc

SEQ ID NO: 1659049 - RNA, 19 nt, Homo sapiens
  misc_RNA (1)...(19): siRNA sense strand
ucaacuccauaucugucaa

SEQ ID NO: 1659050 - RNA, 19 nt, Homo sapiens
  misc_RNA (1)...(19): siRNA sense strand
cacagugggagguauauca

SEQ ID NO: 1659051 - RNA, 19 nt, Homo sapiens
  misc_RNA (1)...(19): siRNA sense strand
cugaaauuaucucuucgau

SEQ ID NO: 1659052 - RNA, 19 nt, Homo sapiens
  misc_RNA (1)...(19): siRNA sense strand
gauuaaccuauggaacuuu

SEQ ID NO: 1659053 - RNA, 19 nt, Homo sapiens
  misc_RNA (1)...(19): siRNA sense strand
ucagcgagcgugauaagag

SEQ ID NO: 1659054 - RNA, 19 nt, Homo sapiens
  misc_RNA (1)...(19): siRNA sense strand
uuaccagguucaugacuac

SEQ ID NO: 1659055 - RNA, 19 nt, Homo sapiens
  misc_RNA (1)...(19): siRNA sense strand
cugugaagcuguggaaagu

SEQ ID NO: 1659056 - RNA, 19 nt, Homo sapiens
  misc_RNA (1)...(19): siRNA sense strand
gcaucugcccugugugaca

SEQ ID NO: 1659057 - RNA, 19 nt, Homo sapiens
  misc_RNA (1)...(19): siRNA sense strand
auuaaccuauggaacuuug

SEQ ID NO: 1659058 - RNA, 19 nt, Homo sapiens
  misc_RNA (1)...(19): siRNA sense strand
gacauuaagccagccaaca

SEQ ID NO: 1659059 - RNA, 19 nt, Homo sapiens
  misc_RNA (1)...(19): siRNA sense strand
cauacagcuuggcauccuu

SEQ ID NO: 1659060 - RNA, 19 nt, Homo sapiens
  misc_RNA (1)...(19): siRNA sense strand
gcuccuacaacaacuucuu

SEQ ID NO: 1659061 - RNA, 19 nt, Homo sapiens
  misc_RNA (1)...(19): siRNA sense strand
caaagucugggaucucaac

SEQ ID NO: 1659062 - RNA, 19 nt, Homo sapiens
  misc_RNA (1)...(19): siRNA sense strand
gaaugcagcuuacuuucuu

SEQ ID NO: 1659063 - RNA, 19 nt, Homo sapiens
  misc_RNA (1)...(19): siRNA sense strand
ucgauuaccugaagaguuu

SEQ ID NO: 1659064 - RNA, 19 nt, Homo sapiens
  misc_RNA (1)...(19): siRNA sense strand
gcacacacauaucacauca

SEQ ID NO: 1659065 - RNA, 19 nt, Homo sapiens
  misc_RNA (1)...(19): siRNA sense strand
ccugaagaguuuagaaaua

SEQ ID NO: 1659066 - RNA, 19 nt, Homo sapiens
  misc_RNA (1)...(19): siRNA sense strand
gcugaugaccugaggauua

SEQ ID NO: 1659067 - RNA, 19 nt, Homo sapiens
  misc_RNA (1)...(19): siRNA sense strand
caaccacacgggagaauua

SEQ ID NO: 1659068 - RNA, 19 nt, Homo sapiens
  misc_RNA (1)...(19): siRNA sense strand
gcagaaugcagcuuacuuu

SEQ ID NO: 1659069 - RNA, 19 nt, Homo sapiens
  misc_RNA (1)...(19): siRNA sense strand
caucgagacuuaccagguu

SEQ ID NO: 1659070 - RNA, 19 nt, Homo sapiens
  misc_RNA (1)...(19): siRNA sense strand
gcaguggcggcuacaaaua

SEQ ID NO: 1659071 - RNA, 19 nt, Homo sapiens
  misc_RNA (1)...(19): siRNA sense strand
ggauuaaccuauggaacuu

SEQ ID NO: 1659072 - RNA, 19 nt, Homo sapiens
  misc_RNA (1)...(19): siRNA sense strand
gaucacagcagccgaguuc

SEQ ID NO: 1659073 - RNA, 19 nt, Homo sapiens
  misc_RNA (1)...(19): siRNA sense strand
ggacaauccggcuguguga

SEQ ID NO: 1659074 - RNA, 19 nt, Homo sapiens
  misc_RNA (1)...(19): siRNA sense strand
gcagcuuacuuucuucugu

SEQ ID NO: 1659075 - RNA, 19 nt, Homo sapiens
  misc_RNA (1)...(19): siRNA sense strand
ccuauggaacuuugaaaua

SEQ ID NO: 1659076 - RNA, 19 nt, Homo sapiens
  misc_RNA (1)...(19): siRNA sense strand
cugaugaccugaggauuaa

SEQ ID NO: 1659077 - RNA, 19 nt, Homo sapiens
  misc_RNA (1)...(19): siRNA sense strand
ucucugaaauuaucucuuc

SEQ ID NO: 1659078 - RNA, 19 nt, Homo sapiens
  misc_RNA (1)...(19): siRNA sense strand
ugacaggcacaccaaauuu

SEQ ID NO: 1659079 - RNA, 19 nt, Homo sapiens
  misc_RNA (1)...(19): siRNA sense strand
gugaagcuguggaaaguca

SEQ ID NO: 1659080 - RNA, 19 nt, Homo sapiens
  misc_RNA (1)...(19): siRNA sense strand
caagcuguguucccucuau

SEQ ID NO: 1659081 - RNA, 19 nt, Homo sapiens
  misc_RNA (1)...(19): siRNA sense strand
cgaguucgauuaccugaag

SEQ ID NO: 1659082 - RNA, 19 nt, Homo sapiens
  misc_RNA (1)...(19): siRNA sense strand
agacuuaccagguucauga

SEQ ID NO: 1659083 - RNA, 19 nt, Homo sapiens
  misc_RNA (1)...(19): siRNA sense strand
gggucggguuguaauauuu

SEQ ID NO: 1659084 - RNA, 19 nt, Homo sapiens
  misc_RNA (1)...(19): siRNA sense strand
ccacacgggagaauuacua

SEQ ID NO: 1659085 - RNA, 19 nt, Homo sapiens
  misc_RNA (1)...(19): siRNA sense strand
gaagauccaagcaacagau

SEQ ID NO: 1659086 - RNA, 19 nt, Homo sapiens
  misc_RNA (1)...(19): siRNA sense strand
cugaagaguuuagaaauag

SEQ ID NO: 1659087 - RNA, 19 nt, Homo sapiens
  misc_RNA (1)...(19): siRNA sense strand
cgagaucagugucgacagu

SEQ ID NO: 1659088 - RNA, 19 nt, Homo sapiens
  misc_RNA (1)...(19): siRNA sense strand
aaagucagcgagcgugaua

SEQ ID NO: 1659089 - RNA, 19 nt, Homo sapiens
  misc_RNA (1)...(19): siRNA sense strand
gaccugaggauuaaccuau

SEQ ID NO: 1659090 - RNA, 19 nt, Homo sapiens
  misc_RNA (1)...(19): siRNA sense strand
gcacauuccagagccauga

SEQ ID NO: 1659091 - RNA, 19 nt, Homo sapiens
  misc_RNA (1)...(19): siRNA sense strand
ggcuacaaauaaccuauau

SEQ ID NO: 1659092 - RNA, 19 nt, Homo sapiens
  misc_RNA (1)...(19): siRNA sense strand
acacacauaucacaucaac

SEQ ID NO: 1659093 - RNA, 19 nt, Homo sapiens
  misc_RNA (1)...(19): siRNA sense strand
ucucuucgauuucggaugu

SEQ ID NO: 1659094 - RNA, 19 nt, Homo sapiens
  misc_RNA (1)...(19): siRNA sense strand
aacgagagcaggagaguaa

SEQ ID NO: 1659095 - RNA, 19 nt, Homo sapiens
  misc_RNA (1)...(19): siRNA sense strand
gaaaagacgagaucagugu

SEQ ID NO: 1659096 - RNA, 19 nt, Homo sapiens
  misc_RNA (1)...(19): siRNA sense strand
ucaggauguucgacagaaa

SEQ ID NO: 1659097 - RNA, 19 nt, Homo sapiens
  misc_RNA (1)...(19): siRNA sense strand
ucacaucaacuccauaucu

SEQ ID NO: 1659098 - RNA, 19 nt, Homo sapiens
  misc_RNA (1)...(19): siRNA sense strand
caguggcggcuacaaauaa

SEQ ID NO: 1659099 - RNA, 19 nt, Homo sapiens
  misc_RNA (1)...(19): siRNA sense strand
ucugggaucucaacaugga

SEQ ID NO: 1659100 - RNA, 19 nt, Homo sapiens
  misc_RNA (1)...(19): siRNA sense strand
agugggagguauaucauga

SEQ ID NO: 1659101 - RNA, 19 nt, Homo sapiens
  misc_RNA (1)...(19): siRNA sense strand
acacauaucacaucaacuc

SEQ ID NO: 1659102 - RNA, 19 nt, Homo sapiens
  misc_RNA (1)...(19): siRNA sense strand
cagcuuggcauccuucaga

SEQ ID NO: 1659103 - RNA, 19 nt, Homo sapiens
  misc_RNA (1)...(19): siRNA sense strand
ggaaugggucagacagugu

SEQ ID NO: 1659104 - RNA, 19 nt, Homo sapiens
  misc_RNA (1)...(19): siRNA sense strand
gucaaagucugggaucuca

SEQ ID NO: 1659105 - RNA, 19 nt, Homo sapiens
  misc_RNA (1)...(19): siRNA sense strand
gugacaggcacaccaaauu

SEQ ID NO: 1659106 - RNA, 19 nt, Homo sapiens
  misc_RNA (1)...(19): siRNA sense strand
caacagcgacuaugaaacc

SEQ ID NO: 1659107 - RNA, 19 nt, Homo sapiens
  misc_RNA (1)...(19): siRNA sense strand
cacaucaacuccauaucug

SEQ ID NO: 1659108 - RNA, 19 nt, Homo sapiens
  misc_RNA (1)...(19): siRNA sense strand
uuucuucugucuacuaaug

SEQ ID NO: 1659109 - RNA, 19 nt, Homo sapiens
  misc_RNA (1)...(19): siRNA sense strand
cauaucacaucaacuccau

SEQ ID NO: 1659110 - RNA, 19 nt, Homo sapiens
  misc_RNA (1)...(19): siRNA sense strand
ccaacgcacacacauauca

SEQ ID NO: 1659111 - RNA, 19 nt, Homo sapiens
  misc_RNA (1)...(19): siRNA sense strand
agucugggaucucaacaug

SEQ ID NO: 1659112 - RNA, 19 nt, Homo sapiens
  misc_RNA (1)...(19): siRNA sense strand
gucaacagcgacuaugaaa

SEQ ID NO: 1659113 - RNA, 19 nt, Homo sapiens
  misc_RNA (1)...(19): siRNA sense strand
cuuaccagguucaugacua

SEQ ID NO: 1659114 - RNA, 19 nt, Homo sapiens
  misc_RNA (1)...(19): siRNA sense strand
ggaagauccaagcaacaga

SEQ ID NO: 1659115 - RNA, 19 nt, Homo sapiens
  misc_RNA (1)...(19): siRNA sense strand
uaucacaucaacuccauau

SEQ ID NO: 1659116 - RNA, 19 nt, Homo sapiens
  misc_RNA (1)...(19): siRNA sense strand
gauuucggaugugaaguuc

SEQ ID NO: 1659117 - RNA, 19 nt, Homo sapiens
  misc_RNA (1)...(19): siRNA sense strand
gcauacagcuuggcauccu

SEQ ID NO: 1659118 - RNA, 19 nt, Homo sapiens
  misc_RNA (1)...(19): siRNA sense strand
acaacaacuucuucaggau

SEQ ID NO: 1659119 - RNA, 19 nt, Homo sapiens
  misc_RNA (1)...(19): siRNA sense strand
caacgagagcaggagagua

SEQ ID NO: 1659120 - RNA, 19 nt, Homo sapiens
  misc_RNA (1)...(19): siRNA sense strand
ugacaggcuccuacaacaa

SEQ ID NO: 1659121 - RNA, 19 nt, Homo sapiens
  misc_RNA (1)...(19): siRNA sense strand
uaaccuauggaacuuugaa

SEQ ID NO: 1659122 - RNA, 19 nt, Homo sapiens
  misc_RNA (1)...(19): siRNA sense strand
cgauuucggaugugaaguu

SEQ ID NO: 1659123 - RNA, 19 nt, Homo sapiens
  misc_RNA (1)...(19): siRNA sense strand
agaaggcuacaaucugaaa

SEQ ID NO: 1659124 - RNA, 19 nt, Homo sapiens
  misc_RNA (1)...(19): siRNA sense strand
uaccugaagaguuuagaaa

SEQ ID NO: 1659125 - RNA, 19 nt, Homo sapiens
  misc_RNA (1)...(19): siRNA sense strand
ccaagcaacagaucauuuu

SEQ ID NO: 1659126 - RNA, 19 nt, Homo sapiens
  misc_RNA (1)...(19): siRNA sense strand
gaaagucagcgagcgugau

SEQ ID NO: 1659127 - RNA, 19 nt, Homo sapiens
  misc_RNA (1)...(19): siRNA sense strand
cggcuacaaauaaccuaua

SEQ ID NO: 1659128 - RNA, 19 nt, Homo sapiens
  misc_RNA (1)...(19): siRNA sense strand
ggccagaaggcuacaaucu

SEQ ID NO: 1659129 - RNA, 19 nt, Homo sapiens
  misc_RNA (1)...(19): siRNA sense strand
gcuguguucccucuaugaa

SEQ ID NO: 1659130 - RNA, 19 nt, Homo sapiens
  misc_RNA (1)...(19): siRNA sense strand
gauccugccaccaucacaa

SEQ ID NO: 1659131 - RNA, 19 nt, Homo sapiens
  misc_RNA (1)...(19): siRNA sense strand
aaacugugaagcuguggaa

SEQ ID NO: 1659132 - RNA, 19 nt, Homo sapiens
  misc_RNA (1)...(19): siRNA sense strand
gaaacaccaagcgugaugu

SEQ ID NO: 1659133 - RNA, 19 nt, Homo sapiens
  misc_RNA (1)...(19): siRNA sense strand
agaaacaccaagcgugaug

SEQ ID NO: 1659134 - RNA, 19 nt, Homo sapiens
  misc_RNA (1)...(19): siRNA sense strand
cccagcagaaugcagcuua

SEQ ID NO: 1659135 - RNA, 19 nt, Homo sapiens
  misc_RNA (1)...(19): siRNA sense strand
gugaauacaauguuuacag

SEQ ID NO: 1659136 - RNA, 19 nt, Homo sapiens
  misc_RNA (1)...(19): siRNA sense strand
ugccaacgcacacacauau

SEQ ID NO: 1659137 - RNA, 19 nt, Homo sapiens
  misc_RNA (1)...(19): siRNA sense strand
ugucaacagcgacuaugaa

SEQ ID NO: 1659138 - RNA, 19 nt, Homo sapiens
  misc_RNA (1)...(19): siRNA sense strand
aacaacuucuucaggaugu

SEQ ID NO: 1659139 - RNA, 19 nt, Homo sapiens
  misc_RNA (1)...(19): siRNA sense strand
gacaggcuccuacaacaac

SEQ ID NO: 1659140 - RNA, 19 nt, Homo sapiens
  misc_RNA (1)...(19): siRNA sense strand
cagaaugcagcuuacuuuc

SEQ ID NO: 1659141 - RNA, 19 nt, Homo sapiens
  misc_RNA (1)...(19): siRNA sense strand
ucaacuccauaucugucaa

SEQ ID NO: 1659142 - RNA, 19 nt, Homo sapiens
  misc_RNA (1)...(19): siRNA sense strand
cacagugggagguauauca

SEQ ID NO: 1659143 - RNA, 19 nt, Homo sapiens
  misc_RNA (1)...(19): siRNA sense strand
cugaaauuaucucuucgau

SEQ ID NO: 1659144 - RNA, 19 nt, Homo sapiens
  misc_RNA (1)...(19): siRNA sense strand
gauuaaccuauggaacuuu

SEQ ID NO: 1659145 - RNA, 19 nt, Homo sapiens
  misc_RNA (1)...(19): siRNA sense strand
ucagcgagcgugauaagag

SEQ ID NO: 1659146 - RNA, 19 nt, Homo sapiens
  misc_RNA (1)...(19): siRNA sense strand
uuaccagguucaugacuac

SEQ ID NO: 1659147 - RNA, 19 nt, Homo sapiens
  misc_RNA (1)...(19): siRNA sense strand
cugugaagcuguggaaagu

SEQ ID NO: 1659148 - RNA, 19 nt, Homo sapiens
  misc_RNA (1)...(19): siRNA sense strand
gcaucugcccugugugaca

SEQ ID NO: 1659149 - RNA, 19 nt, Homo sapiens
  misc_RNA (1)...(19): siRNA sense strand
auuaaccuauggaacuuug

SEQ ID NO: 1659150 - RNA, 19 nt, Homo sapiens
  misc_RNA (1)...(19): siRNA sense strand
gacauuaagccagccaaca

SEQ ID NO: 1659151 - RNA, 19 nt, Homo sapiens
  misc_RNA (1)...(19): siRNA sense strand
cauacagcuuggcauccuu

SEQ ID NO: 1659152 - RNA, 19 nt, Homo sapiens
  misc_RNA (1)...(19): siRNA sense strand
gcuccuacaacaacuucuu

SEQ ID NO: 1659153 - RNA, 19 nt, Homo sapiens
  misc_RNA (1)...(19): siRNA sense strand
caaagucugggaucucaac

SEQ ID NO: 1659154 - RNA, 19 nt, Homo sapiens
  misc_RNA (1)...(19): siRNA sense strand
gcaaguagcaucucugauu

SEQ ID NO: 1659155 - RNA, 19 nt, Homo sapiens
  misc_RNA (1)...(19): siRNA sense strand
ccaacaacauagcaauuaa

SEQ ID NO: 1659156 - RNA, 19 nt, Homo sapiens
  misc_RNA (1)...(19): siRNA sense strand
caaguagcaucucugauug

SEQ ID NO: 1659157 - RNA, 19 nt, Homo sapiens
  misc_RNA (1)...(19): siRNA sense strand
gcugcgaccucucuauaug

SEQ ID NO: 1659158 - RNA, 19 nt, Homo sapiens
  misc_RNA (1)...(19): siRNA sense strand
ucccuuaccuaaucaacua

SEQ ID NO: 1659159 - RNA, 19 nt, Homo sapiens
  misc_RNA (1)...(19): siRNA sense strand
gccaugcucccuuaccuaa

SEQ ID NO: 1659160 - RNA, 19 nt, Homo sapiens
  misc_RNA (1)...(19): siRNA sense strand
gugcugcgaccucucuaua

SEQ ID NO: 1659161 - RNA, 19 nt, Homo sapiens
  misc_RNA (1)...(19): siRNA sense strand
uugaugccaugcucccuua

SEQ ID NO: 1659162 - RNA, 19 nt, Homo sapiens
  misc_RNA (1)...(19): siRNA sense strand
gcuacugaauccaacaaca

SEQ ID NO: 1659163 - RNA, 19 nt, Homo sapiens
  misc_RNA (1)...(19): siRNA sense strand
caugcucccuuaccuaauc

SEQ ID NO: 1659164 - RNA, 19 nt, Homo sapiens
  misc_RNA (1)...(19): siRNA sense strand
uccaacaacauagcaauua

SEQ ID NO: 1659165 - RNA, 19 nt, Homo sapiens
  misc_RNA (1)...(19): siRNA sense strand
gagcugauccucgugagau

SEQ ID NO: 1659166 - RNA, 19 nt, Homo sapiens
  misc_RNA (1)...(19): siRNA sense strand
cagcaaguagcaucucuga

SEQ ID NO: 1659167 - RNA, 19 nt, Homo sapiens
  misc_RNA (1)...(19): siRNA sense strand
caacaacauagcaauuaag

SEQ ID NO: 1659168 - RNA, 19 nt, Homo sapiens
  misc_RNA (1)...(19): siRNA sense strand
gagugaggcagccauggaa

SEQ ID NO: 1659169 - RNA, 19 nt, Homo sapiens
  misc_RNA (1)...(19): siRNA sense strand
uacugaauccaacaacaua

SEQ ID NO: 1659170 - RNA, 19 nt, Homo sapiens
  misc_RNA (1)...(19): siRNA sense strand
ccacacucccggacacaug

SEQ ID NO: 1659171 - RNA, 19 nt, Homo sapiens
  misc_RNA (1)...(19): siRNA sense strand
gaauccaacaacauagcaa

SEQ ID NO: 1659172 - RNA, 19 nt, Homo sapiens
  misc_RNA (1)...(19): siRNA sense strand
uuacuaguggugcuacuga

SEQ ID NO: 1659173 - RNA, 19 nt, Homo sapiens
  misc_RNA (1)...(19): siRNA sense strand
cuacugaauccaacaacau

SEQ ID NO: 1659174 - RNA, 19 nt, Homo sapiens
  misc_RNA (1)...(19): siRNA sense strand
ggagcugauccucgugaga

SEQ ID NO: 1659175 - RNA, 19 nt, Homo sapiens
  misc_RNA (1)...(19): siRNA sense strand
gcaaguagcaucucugauu

SEQ ID NO: 1659176 - RNA, 19 nt, Homo sapiens
  misc_RNA (1)...(19): siRNA sense strand
ccaacaacauagcaauuaa

SEQ ID NO: 1659177 - RNA, 19 nt, Homo sapiens
  misc_RNA (1)...(19): siRNA sense strand
caaguagcaucucugauug

SEQ ID NO: 1659178 - RNA, 19 nt, Homo sapiens
  misc_RNA (1)...(19): siRNA sense strand
gcugcgaccucucuauaug

SEQ ID NO: 1659179 - RNA, 19 nt, Homo sapiens
  misc_RNA (1)...(19): siRNA sense strand
ucccuuaccuaaucaacua

SEQ ID NO: 1659180 - RNA, 19 nt, Homo sapiens
  misc_RNA (1)...(19): siRNA sense strand
gccaugcucccuuaccuaa

SEQ ID NO: 1659181 - RNA, 19 nt, Homo sapiens
  misc_RNA (1)...(19): siRNA sense strand
gugcugcgaccucucuaua

SEQ ID NO: 1659182 - RNA, 19 nt, Homo sapiens
  misc_RNA (1)...(19): siRNA sense strand
uugaugccaugcucccuua

SEQ ID NO: 1659183 - RNA, 19 nt, Homo sapiens
  misc_RNA (1)...(19): siRNA sense strand
gcuacugaauccaacaaca

SEQ ID NO: 1659184 - RNA, 19 nt, Homo sapiens
  misc_RNA (1)...(19): siRNA sense strand
caugcucccuuaccuaauc

SEQ ID NO: 1659185 - RNA, 19 nt, Homo sapiens
  misc_RNA (1)...(19): siRNA sense strand
uccaacaacauagcaauua

SEQ ID NO: 1659186 - RNA, 19 nt, Homo sapiens
  misc_RNA (1)...(19): siRNA sense strand
gagcugauccucgugagau

SEQ ID NO: 1659187 - RNA, 19 nt, Homo sapiens
  misc_RNA (1)...(19): siRNA sense strand
cagcaaguagcaucucuga

SEQ ID NO: 1659188 - RNA, 19 nt, Homo sapiens
  misc_RNA (1)...(19): siRNA sense strand
caacaacauagcaauuaag

SEQ ID NO: 1659189 - RNA, 19 nt, Homo sapiens
  misc_RNA (1)...(19): siRNA sense strand
gagugaggcagccauggaa

SEQ ID NO: 1659190 - RNA, 19 nt, Homo sapiens
  misc_RNA (1)...(19): siRNA sense strand
uacugaauccaacaacaua

SEQ ID NO: 1659191 - RNA, 19 nt, Homo sapiens
  misc_RNA (1)...(19): siRNA sense strand
ccacacucccggacacaug

SEQ ID NO: 1659192 - RNA, 19 nt, Homo sapiens
  misc_RNA (1)...(19): siRNA sense strand
gaauccaacaacauagcaa

SEQ ID NO: 1659193 - RNA, 19 nt, Homo sapiens
  misc_RNA (1)...(19): siRNA sense strand
uuacuaguggugcuacuga

SEQ ID NO: 1659194 - RNA, 19 nt, Homo sapiens
  misc_RNA (1)...(19): siRNA sense strand
cuacugaauccaacaacau

SEQ ID NO: 1659195 - RNA, 19 nt, Homo sapiens
  misc_RNA (1)...(19): siRNA sense strand
ggagcugauccucgugaga

SEQ ID NO: 1659196 - RNA, 19 nt, Homo sapiens
  misc_RNA (1)...(19): siRNA sense strand
gcagugaggucuaacauaa

SEQ ID NO: 1659197 - RNA, 19 nt, Homo sapiens
  misc_RNA (1)...(19): siRNA sense strand
ggaaugauaucacaacuug

SEQ ID NO: 1659198 - RNA, 19 nt, Homo sapiens
  misc_RNA (1)...(19): siRNA sense strand
ugacaaaucgcucauauua

SEQ ID NO: 1659199 - RNA, 19 nt, Homo sapiens
  misc_RNA (1)...(19): siRNA sense strand
uaaguaaccucaagaagaa

SEQ ID NO: 1659200 - RNA, 19 nt, Homo sapiens
  misc_RNA (1)...(19): siRNA sense strand
acacagagauuguagauga

SEQ ID NO: 1659201 - RNA, 19 nt, Homo sapiens
  misc_RNA (1)...(19): siRNA sense strand
ggaagaagguauuggcauu

SEQ ID NO: 1659202 - RNA, 19 nt, Homo sapiens
  misc_RNA (1)...(19): siRNA sense strand
gagauuagauuguguucaa

SEQ ID NO: 1659203 - RNA, 19 nt, Homo sapiens
  misc_RNA (1)...(19): siRNA sense strand
gcucaugccugcacucuuu

SEQ ID NO: 1659204 - RNA, 19 nt, Homo sapiens
  misc_RNA (1)...(19): siRNA sense strand
ugacauagcaggaaugaua

SEQ ID NO: 1659205 - RNA, 19 nt, Homo sapiens
  misc_RNA (1)...(19): siRNA sense strand
caaaagagcuuaugcagaa

SEQ ID NO: 1659206 - RNA, 19 nt, Homo sapiens
  misc_RNA (1)...(19): siRNA sense strand
aaacauaccuuggaacuug

SEQ ID NO: 1659207 - RNA, 19 nt, Homo sapiens
  misc_RNA (1)...(19): siRNA sense strand
caagagguuuggaaucaua

SEQ ID NO: 1659208 - RNA, 19 nt, Homo sapiens
  misc_RNA (1)...(19): siRNA sense strand
gaucauaacuggaccaaac

SEQ ID NO: 1659209 - RNA, 19 nt, Homo sapiens
  misc_RNA (1)...(19): siRNA sense strand
ggacuucaaucaguuauau

SEQ ID NO: 1659210 - RNA, 19 nt, Homo sapiens
  misc_RNA (1)...(19): siRNA sense strand
cgacuucguucuaauauau

SEQ ID NO: 1659211 - RNA, 19 nt, Homo sapiens
  misc_RNA (1)...(19): siRNA sense strand
ggucaaugcugcugaauca

SEQ ID NO: 1659212 - RNA, 19 nt, Homo sapiens
  misc_RNA (1)...(19): siRNA sense strand
caaaggaaauacuucaaug

SEQ ID NO: 1659213 - RNA, 19 nt, Homo sapiens
  misc_RNA (1)...(19): siRNA sense strand
ggaaaucacaacucaaauu

SEQ ID NO: 1659214 - RNA, 19 nt, Homo sapiens
  misc_RNA (1)...(19): siRNA sense strand
caacuuccuucagaauuua

SEQ ID NO: 1659215 - RNA, 19 nt, Homo sapiens
  misc_RNA (1)...(19): siRNA sense strand
gaaaggaugccuaaacaug

SEQ ID NO: 1659216 - RNA, 19 nt, Homo sapiens
  misc_RNA (1)...(19): siRNA sense strand
gacaagagguuuggaauca

SEQ ID NO: 1659217 - RNA, 19 nt, Homo sapiens
  misc_RNA (1)...(19): siRNA sense strand
agagaaaucuaucacauga

SEQ ID NO: 1659218 - RNA, 19 nt, Homo sapiens
  misc_RNA (1)...(19): siRNA sense strand
ccagacaguuuacgaauau

SEQ ID NO: 1659219 - RNA, 19 nt, Homo sapiens
  misc_RNA (1)...(19): siRNA sense strand
ccucagagaucagguuaua

SEQ ID NO: 1659220 - RNA, 19 nt, Homo sapiens
  misc_RNA (1)...(19): siRNA sense strand
gaacauacacagagauugu

SEQ ID NO: 1659221 - RNA, 19 nt, Homo sapiens
  misc_RNA (1)...(19): siRNA sense strand
gaaauaggaauggcaagua

SEQ ID NO: 1659222 - RNA, 19 nt, Homo sapiens
  misc_RNA (1)...(19): siRNA sense strand
cgaccagaauuuacugaua

SEQ ID NO: 1659223 - RNA, 19 nt, Homo sapiens
  misc_RNA (1)...(19): siRNA sense strand
ggugaucacuaaacuuaaa

SEQ ID NO: 1659224 - RNA, 19 nt, Homo sapiens
  misc_RNA (1)...(19): siRNA sense strand
gcagaggugucaucacuuc

SEQ ID NO: 1659225 - RNA, 19 nt, Homo sapiens
  misc_RNA (1)...(19): siRNA sense strand
ccaaggaaaucacaacuca

SEQ ID NO: 1659226 - RNA, 19 nt, Homo sapiens
  misc_RNA (1)...(19): siRNA sense strand
uauuguagcuguuguagaa

SEQ ID NO: 1659227 - RNA, 19 nt, Homo sapiens
  misc_RNA (1)...(19): siRNA sense strand
gaacuuggcagagguacua

SEQ ID NO: 1659228 - RNA, 19 nt, Homo sapiens
  misc_RNA (1)...(19): siRNA sense strand
gaacagacagccaugauag

SEQ ID NO: 1659229 - RNA, 19 nt, Homo sapiens
  misc_RNA (1)...(19): siRNA sense strand
ucaacuuccuucagaauuu

SEQ ID NO: 1659230 - RNA, 19 nt, Homo sapiens
  misc_RNA (1)...(19): siRNA sense strand
gaauaucuacugagcuuaa

SEQ ID NO: 1659231 - RNA, 19 nt, Homo sapiens
  misc_RNA (1)...(19): siRNA sense strand
cgaaacaaauucaucaaca

SEQ ID NO: 1659232 - RNA, 19 nt, Homo sapiens
  misc_RNA (1)...(19): siRNA sense strand
aaacacaguugcaucaaau

SEQ ID NO: 1659233 - RNA, 19 nt, Homo sapiens
  misc_RNA (1)...(19): siRNA sense strand
gcucgaaacucucaauugg

SEQ ID NO: 1659234 - RNA, 19 nt, Homo sapiens
  misc_RNA (1)...(19): siRNA sense strand
gcucaagguucauacuuug

SEQ ID NO: 1659235 - RNA, 19 nt, Homo sapiens
  misc_RNA (1)...(19): siRNA sense strand
caacucaaauuacgagaca

SEQ ID NO: 1659236 - RNA, 19 nt, Homo sapiens
  misc_RNA (1)...(19): siRNA sense strand
augcaaaggugaucacuaa

SEQ ID NO: 1659237 - RNA, 19 nt, Homo sapiens
  misc_RNA (1)...(19): siRNA sense strand
cagauuggaucauauguuc

SEQ ID NO: 1659238 - RNA, 19 nt, Homo sapiens
  misc_RNA (1)...(19): siRNA sense strand
gaacuguaacacaccuuua

SEQ ID NO: 1659239 - RNA, 19 nt, Homo sapiens
  misc_RNA (1)...(19): siRNA sense strand
gaacuuguggauccuuuaa

SEQ ID NO: 1659240 - RNA, 19 nt, Homo sapiens
  misc_RNA (1)...(19): siRNA sense strand
gauuguagaugacauagca

SEQ ID NO: 1659241 - RNA, 19 nt, Homo sapiens
  misc_RNA (1)...(19): siRNA sense strand
gugaauaucuacugagcuu

SEQ ID NO: 1659242 - RNA, 19 nt, Homo sapiens
  misc_RNA (1)...(19): siRNA sense strand
agaguacauugaacaguua

SEQ ID NO: 1659243 - RNA, 19 nt, Homo sapiens
  misc_RNA (1)...(19): siRNA sense strand
ccacuaggcuuguucaaac

SEQ ID NO: 1659244 - RNA, 19 nt, Homo sapiens
  misc_RNA (1)...(19): siRNA sense strand
gaauuaguacugaugauga

SEQ ID NO: 1659245 - RNA, 19 nt, Homo sapiens
  misc_RNA (1)...(19): siRNA sense strand
gaccaaacaugaguggaaa

SEQ ID NO: 1659246 - RNA, 19 nt, Homo sapiens
  misc_RNA (1)...(19): siRNA sense strand
guauagcccuaccuaguga

SEQ ID NO: 1659247 - RNA, 19 nt, Homo sapiens
  misc_RNA (1)...(19): siRNA sense strand
uagaguacauugaacaguu

SEQ ID NO: 1659248 - RNA, 19 nt, Homo sapiens
  misc_RNA (1)...(19): siRNA sense strand
ccaaaaccuugaauuguua

SEQ ID NO: 1659249 - RNA, 19 nt, Homo sapiens
  misc_RNA (1)...(19): siRNA sense strand
gagcagcuucuuucuguuu

SEQ ID NO: 1659250 - RNA, 19 nt, Homo sapiens
  misc_RNA (1)...(19): siRNA sense strand
cuaagggacucacagaaga

SEQ ID NO: 1659251 - RNA, 19 nt, Homo sapiens
  misc_RNA (1)...(19): siRNA sense strand
guaaagaauaccucaagaa

SEQ ID NO: 1659252 - RNA, 19 nt, Homo sapiens
  misc_RNA (1)...(19): siRNA sense strand
aaugaaagaugccaagaau

SEQ ID NO: 1659253 - RNA, 19 nt, Homo sapiens
  misc_RNA (1)...(19): siRNA sense strand
gugaucaacuuccuucaga

SEQ ID NO: 1659254 - RNA, 19 nt, Homo sapiens
  misc_RNA (1)...(19): siRNA sense strand
gaauggcaaguauugauuu

SEQ ID NO: 1659255 - RNA, 19 nt, Homo sapiens
  misc_RNA (1)...(19): siRNA sense strand
ucaagaagaaguacaaaga

SEQ ID NO: 1659256 - RNA, 19 nt, Homo sapiens
  misc_RNA (1)...(19): siRNA sense strand
gaagaagguauuggcauuu

SEQ ID NO: 1659257 - RNA, 19 nt, Homo sapiens
  misc_RNA (1)...(19): siRNA sense strand
gaccagaauuuacugauac

SEQ ID NO: 1659258 - RNA, 19 nt, Homo sapiens
  misc_RNA (1)...(19): siRNA sense strand
gcaaacugcuuagugagau

SEQ ID NO: 1659259 - RNA, 19 nt, Homo sapiens
  misc_RNA (1)...(19): siRNA sense strand
gaaugaaagaugccaagaa

SEQ ID NO: 1659260 - RNA, 19 nt, Homo sapiens
  misc_RNA (1)...(19): siRNA sense strand
ccagaugacuacagauugu

SEQ ID NO: 1659261 - RNA, 19 nt, Homo sapiens
  misc_RNA (1)...(19): siRNA sense strand
ggaauaaucacacucucuu

SEQ ID NO: 1659262 - RNA, 19 nt, Homo sapiens
  misc_RNA (1)...(19): siRNA sense strand
ucacuacuauccaaaggaa

SEQ ID NO: 1659263 - RNA, 19 nt, Homo sapiens
  misc_RNA (1)...(19): siRNA sense strand
gcagacaacacaacauaug

SEQ ID NO: 1659264 - RNA, 19 nt, Homo sapiens
  misc_RNA (1)...(19): siRNA sense strand
ggaauggcaaguauugauu

SEQ ID NO: 1659265 - RNA, 19 nt, Homo sapiens
  misc_RNA (1)...(19): siRNA sense strand
gaagaaguacaaagaagau

SEQ ID NO: 1659266 - RNA, 19 nt, Homo sapiens
  misc_RNA (1)...(19): siRNA sense strand
ggaccaaacaugaguggaa

SEQ ID NO: 1659267 - RNA, 19 nt, Homo sapiens
  misc_RNA (1)...(19): siRNA sense strand
gaagacaagagguuuggaa

SEQ ID NO: 1659268 - RNA, 19 nt, Homo sapiens
  misc_RNA (1)...(19): siRNA sense strand
gcugcugaaucaaagauaa

SEQ ID NO: 1659269 - RNA, 19 nt, Homo sapiens
  misc_RNA (1)...(19): siRNA sense strand
gagguucaguccaaguauu

SEQ ID NO: 1659270 - RNA, 19 nt, Homo sapiens
  misc_RNA (1)...(19): siRNA sense strand
caaaggugaucacuaaacu

SEQ ID NO: 1659271 - RNA, 19 nt, Homo sapiens
  misc_RNA (1)...(19): siRNA sense strand
gcauuuacacuguuugcua

SEQ ID NO: 1659272 - RNA, 19 nt, Homo sapiens
  misc_RNA (1)...(19): siRNA sense strand
guuaugcuguuugugaaua

SEQ ID NO: 1659273 - RNA, 19 nt, Homo sapiens
  misc_RNA (1)...(19): siRNA sense strand
caauaccuauguuacagaa

SEQ ID NO: 1659274 - RNA, 19 nt, Homo sapiens
  misc_RNA (1)...(19): siRNA sense strand
gauaugcuacugucauuug

SEQ ID NO: 1659275 - RNA, 19 nt, Homo sapiens
  misc_RNA (1)...(19): siRNA sense strand
agacagccaugauagauuc

SEQ ID NO: 1659276 - RNA, 19 nt, Homo sapiens
  misc_RNA (1)...(19): siRNA sense strand
ggaauuccaccaaguuguu

SEQ ID NO: 1659277 - RNA, 19 nt, Homo sapiens
  misc_RNA (1)...(19): siRNA sense strand
aaauaggaauggcaaguau

SEQ ID NO: 1659278 - RNA, 19 nt, Homo sapiens
  misc_RNA (1)...(19): siRNA sense strand
caagaagaaguacaaagaa

SEQ ID NO: 1659279 - RNA, 19 nt, Homo sapiens
  misc_RNA (1)...(19): siRNA sense strand
uaaaacagauugcucuuug

SEQ ID NO: 1659280 - RNA, 19 nt, Homo sapiens
  misc_RNA (1)...(19): siRNA sense strand
gcuaugcagugaggucuaa

SEQ ID NO: 1659281 - RNA, 19 nt, Homo sapiens
  misc_RNA (1)...(19): siRNA sense strand
caagugggauauucagcuu

SEQ ID NO: 1659282 - RNA, 19 nt, Homo sapiens
  misc_RNA (1)...(19): siRNA sense strand
ucaauuggauccagacagu

SEQ ID NO: 1659283 - RNA, 19 nt, Homo sapiens
  misc_RNA (1)...(19): siRNA sense strand
ugagagaaaucuaucacau

SEQ ID NO: 1659284 - RNA, 19 nt, Homo sapiens
  misc_RNA (1)...(19): siRNA sense strand
caagaacuacuucaagaug

SEQ ID NO: 1659285 - RNA, 19 nt, Homo sapiens
  misc_RNA (1)...(19): siRNA sense strand
aaggugaucacuaaacuua

SEQ ID NO: 1659286 - RNA, 19 nt, Homo sapiens
  misc_RNA (1)...(19): siRNA sense strand
caacacaacauaugcaaag

SEQ ID NO: 1659287 - RNA, 19 nt, Homo sapiens
  misc_RNA (1)...(19): siRNA sense strand
gaauaaucacacucucuuu

SEQ ID NO: 1659288 - RNA, 19 nt, Homo sapiens
  misc_RNA (1)...(19): siRNA sense strand
cagaaaagacugaagaaua

SEQ ID NO: 1659289 - RNA, 19 nt, Homo sapiens
  misc_RNA (1)...(19): siRNA sense strand
uuaaguaaccucaagaaga

SEQ ID NO: 1659290 - RNA, 19 nt, Homo sapiens
  misc_RNA (1)...(19): siRNA sense strand
gguauuggcauuuguuaug

SEQ ID NO: 1659291 - RNA, 19 nt, Homo sapiens
  misc_RNA (1)...(19): siRNA sense strand
gaagguauuggcauuuguu

SEQ ID NO: 1659292 - RNA, 19 nt, Homo sapiens
  misc_RNA (1)...(19): siRNA sense strand
gacaaaucgcucauauuaa

SEQ ID NO: 1659293 - RNA, 19 nt, Homo sapiens
  misc_RNA (1)...(19): siRNA sense strand
gagauagcauauauucuac

SEQ ID NO: 1659294 - RNA, 19 nt, Homo sapiens
  misc_RNA (1)...(19): siRNA sense strand
uagcucugcucgaggauuu

SEQ ID NO: 1659295 - RNA, 19 nt, Homo sapiens
  misc_RNA (1)...(19): siRNA sense strand
agaagaacauacacagaga

SEQ ID NO: 1659296 - RNA, 19 nt, Homo sapiens
  misc_RNA (1)...(19): siRNA sense strand
uaucaucacuuaucuggua

SEQ ID NO: 1659297 - RNA, 19 nt, Homo sapiens
  misc_RNA (1)...(19): siRNA sense strand
gcaacgggcuugugaucug

SEQ ID NO: 1659298 - RNA, 19 nt, Homo sapiens
  misc_RNA (1)...(19): siRNA sense strand
ucacuuaucugguauuugc

SEQ ID NO: 1659299 - RNA, 19 nt, Homo sapiens
  misc_RNA (1)...(19): siRNA sense strand
caaagaaauugguauugca

SEQ ID NO: 1659300 - RNA, 19 nt, Homo sapiens
  misc_RNA (1)...(19): siRNA sense strand
caaggcauguacaaagaaa

SEQ ID NO: 1659301 - RNA, 19 nt, Homo sapiens
  misc_RNA (1)...(19): siRNA sense strand
ugacacagcuaccaauucu

SEQ ID NO: 1659302 - RNA, 19 nt, Homo sapiens
  misc_RNA (1)...(19): siRNA sense strand
cagaauccgugaguuauug

SEQ ID NO: 1659303 - RNA, 19 nt, Homo sapiens
  misc_RNA (1)...(19): siRNA sense strand
ccaccaagauccacaagca

SEQ ID NO: 1659304 - RNA, 19 nt, Homo sapiens
  misc_RNA (1)...(19): siRNA sense strand
ggaguuacaggcaaaguga

SEQ ID NO: 1659305 - RNA, 19 nt, Homo sapiens
  misc_RNA (1)...(19): siRNA sense strand
caucguugcugucaguuau

SEQ ID NO: 1659306 - RNA, 19 nt, Homo sapiens
  misc_RNA (1)...(19): siRNA sense strand
caagugcccuggccuucuu

SEQ ID NO: 1659307 - RNA, 19 nt, Homo sapiens
  misc_RNA (1)...(19): siRNA sense strand
gcucuggaccgcuguguuu

SEQ ID NO: 1659308 - RNA, 19 nt, Homo sapiens
  misc_RNA (1)...(19): siRNA sense strand
ccaguuaucauucguguga

SEQ ID NO: 1659309 - RNA, 19 nt, Homo sapiens
  misc_RNA (1)...(19): siRNA sense strand
ggccguggcugacuucugu

SEQ ID NO: 1659310 - RNA, 19 nt, Homo sapiens
  misc_RNA (1)...(19): siRNA sense strand
ggaccaacgacccuaaaga

SEQ ID NO: 1659311 - RNA, 19 nt, Homo sapiens
  misc_RNA (1)...(19): siRNA sense strand
caucacuuaucugguauuu

SEQ ID NO: 1659312 - RNA, 19 nt, Homo sapiens
  misc_RNA (1)...(19): siRNA sense strand
gcaaggcauguacaaagaa

SEQ ID NO: 1659313 - RNA, 19 nt, Homo sapiens
  misc_RNA (1)...(19): siRNA sense strand
ggacaguagccugcacuuu

SEQ ID NO: 1659314 - RNA, 19 nt, Homo sapiens
  misc_RNA (1)...(19): siRNA sense strand
uccuggauaucaucacuua

SEQ ID NO: 1659315 - RNA, 19 nt, Homo sapiens
  misc_RNA (1)...(19): siRNA sense strand
gguauuugcagucaccuuu

SEQ ID NO: 1659316 - RNA, 19 nt, Homo sapiens
  misc_RNA (1)...(19): siRNA sense strand
gcugguuccugugcaaauu

SEQ ID NO: 1659317 - RNA, 19 nt, Homo sapiens
  misc_RNA (1)...(19): siRNA sense strand
cugcagagguggaguuaca

SEQ ID NO: 1659318 - RNA, 19 nt, Homo sapiens
  misc_RNA (1)...(19): siRNA sense strand
agucagaauccgugaguua

SEQ ID NO: 1659319 - RNA, 19 nt, Homo sapiens
  misc_RNA (1)...(19): siRNA sense strand
acaguagccugcacuuuua

SEQ ID NO: 1659320 - RNA, 19 nt, Homo sapiens
  misc_RNA (1)...(19): siRNA sense strand
gccaagaaggugaucauug

SEQ ID NO: 1659321 - RNA, 19 nt, Homo sapiens
  misc_RNA (1)...(19): siRNA sense strand
cuccucacauugccaguua

SEQ ID NO: 1659322 - RNA, 19 nt, Homo sapiens
  misc_RNA (1)...(19): siRNA sense strand
gcccuggccuucuucaaca

SEQ ID NO: 1659323 - RNA, 19 nt, Homo sapiens
  misc_RNA (1)...(19): siRNA sense strand
gcugucaguuaugggcuua

SEQ ID NO: 1659324 - RNA, 19 nt, Homo sapiens
  misc_RNA (1)...(19): siRNA sense strand
acaaagaaauugguauugc

SEQ ID NO: 1659325 - RNA, 19 nt, Homo sapiens
  misc_RNA (1)...(19): siRNA sense strand
ugcaaggcauguacaaaga

SEQ ID NO: 1659326 - RNA, 19 nt, Homo sapiens
  misc_RNA (1)...(19): siRNA sense strand
gacaguagccugcacuuuu

SEQ ID NO: 1659327 - RNA, 19 nt, Homo sapiens
  misc_RNA (1)...(19): siRNA sense strand
ggagggacaccugcuguau

SEQ ID NO: 1659328 - RNA, 19 nt, Homo sapiens
  misc_RNA (1)...(19): siRNA sense strand
cagcuaccaauucuacuuu

SEQ ID NO: 1659329 - RNA, 19 nt, Homo sapiens
  misc_RNA (1)...(19): siRNA sense strand
gggaggacauuggccuuuc

SEQ ID NO: 1659330 - RNA, 19 nt, Homo sapiens
  misc_RNA (1)...(19): siRNA sense strand
caucauccgguucaucauu

SEQ ID NO: 1659331 - RNA, 19 nt, Homo sapiens
  misc_RNA (1)...(19): siRNA sense strand
gaccaacgacccuaaagag

SEQ ID NO: 1659332 - RNA, 19 nt, Homo sapiens
  misc_RNA (1)...(19): siRNA sense strand
uaguggacaucaacuuguu

SEQ ID NO: 1659333 - RNA, 19 nt, Homo sapiens
  misc_RNA (1)...(19): siRNA sense strand
cauaguggacaucaacuug

SEQ ID NO: 1659334 - RNA, 19 nt, Homo sapiens
  misc_RNA (1)...(19): siRNA sense strand
guggcuggauuccggauga

SEQ ID NO: 1659335 - RNA, 19 nt, Homo sapiens
  misc_RNA (1)...(19): siRNA sense strand
guggcugacuucuguuuca

SEQ ID NO: 1659336 - RNA, 19 nt, Homo sapiens
  misc_RNA (1)...(19): siRNA sense strand
uggcucugcuccucacauu

SEQ ID NO: 1659337 - RNA, 19 nt, Homo sapiens
  misc_RNA (1)...(19): siRNA sense strand
ucagaauccgugaguuauu

SEQ ID NO: 1659338 - RNA, 19 nt, Homo sapiens
  misc_RNA (1)...(19): siRNA sense strand
cacauugccaguuaucauu

SEQ ID NO: 1659339 - RNA, 19 nt, Homo sapiens
  misc_RNA (1)...(19): siRNA sense strand
ggcaucauccgguucauca

SEQ ID NO: 1659340 - RNA, 19 nt, Homo sapiens
  misc_RNA (1)...(19): siRNA sense strand
uaucugguauuugcaguca

SEQ ID NO: 1659341 - RNA, 19 nt, Homo sapiens
  misc_RNA (1)...(19): siRNA sense strand
ccuuauagccacagucaga

SEQ ID NO: 1659342 - RNA, 19 nt, Homo sapiens
  misc_RNA (1)...(19): siRNA sense strand
ggaggacauuggccuuucg

SEQ ID NO: 1659343 - RNA, 19 nt, Homo sapiens
  misc_RNA (1)...(19): siRNA sense strand
gcuaccaauucuacuuuac

SEQ ID NO: 1659344 - RNA, 19 nt, Homo sapiens
  misc_RNA (1)...(19): siRNA sense strand
ccgugagccuggccaagaa

SEQ ID NO: 1659345 - RNA, 19 nt, Homo sapiens
  misc_RNA (1)...(19): siRNA sense strand
gaucuggguggcuggauuc

SEQ ID NO: 1659346 - RNA, 19 nt, Homo sapiens
  misc_RNA (1)...(19): siRNA sense strand
gggcaacgggcuugugauc

SEQ ID NO: 1659347 - RNA, 19 nt, Homo sapiens
  misc_RNA (1)...(19): siRNA sense strand
ucaggugguggcccuuaua

SEQ ID NO: 1659348 - RNA, 19 nt, Homo sapiens
  misc_RNA (1)...(19): siRNA sense strand
ugaucuggguggcuggauu

SEQ ID NO: 1659349 - RNA, 19 nt, Homo sapiens
  misc_RNA (1)...(19): siRNA sense strand
uuacggguccucuccuuug

SEQ ID NO: 1659350 - RNA, 19 nt, Homo sapiens
  misc_RNA (1)...(19): siRNA sense strand
agggacaccugcuguaucu

SEQ ID NO: 1659351 - RNA, 19 nt, Homo sapiens
  misc_RNA (1)...(19): siRNA sense strand
guccaucguugcugucagu

SEQ ID NO: 1659352 - RNA, 19 nt, Homo sapiens
  misc_RNA (1)...(19): siRNA sense strand
gggcuuauugccaccaaga

SEQ ID NO: 1659353 - RNA, 19 nt, Homo sapiens
  misc_RNA (1)...(19): siRNA sense strand
caauucuacuuuaccuucu

SEQ ID NO: 1659354 - RNA, 19 nt, Homo sapiens
  misc_RNA (1)...(19): siRNA sense strand
acacagcuaccaauucuac

SEQ ID NO: 1659355 - RNA, 19 nt, Homo sapiens
  misc_RNA (1)...(19): siRNA sense strand
gagggacaccugcuguauc

SEQ ID NO: 1659356 - RNA, 19 nt, Homo sapiens
  misc_RNA (1)...(19): siRNA sense strand
aggcauguacaaagaaauu

SEQ ID NO: 1659357 - RNA, 19 nt, Homo sapiens
  misc_RNA (1)...(19): siRNA sense strand
ucacauugccaguuaucau

SEQ ID NO: 1659358 - RNA, 19 nt, Homo sapiens
  misc_RNA (1)...(19): siRNA sense strand
accgaggacucaacccaaa

SEQ ID NO: 1659359 - RNA, 19 nt, Homo sapiens
  misc_RNA (1)...(19): siRNA sense strand
gcaguggaugugacaagug

SEQ ID NO: 1659360 - RNA, 19 nt, Homo sapiens
  misc_RNA (1)...(19): siRNA sense strand
ugucaguuaugggcuuauu

SEQ ID NO: 1659361 - RNA, 19 nt, Homo sapiens
  misc_RNA (1)...(19): siRNA sense strand
cagucaccaccaucaguua

SEQ ID NO: 1659362 - RNA, 19 nt, Homo sapiens
  misc_RNA (1)...(19): siRNA sense strand
uauuugcagucaccuuugu

SEQ ID NO: 1659363 - RNA, 19 nt, Homo sapiens
  misc_RNA (1)...(19): siRNA sense strand
gcucugcuccucacauugc

SEQ ID NO: 1659364 - RNA, 19 nt, Homo sapiens
  misc_RNA (1)...(19): siRNA sense strand
gcccuuauagccacaguca

SEQ ID NO: 1659365 - RNA, 19 nt, Homo sapiens
  misc_RNA (1)...(19): siRNA sense strand
ugcuguaucugcuggcuau

SEQ ID NO: 1659366 - RNA, 19 nt, Homo sapiens
  misc_RNA (1)...(19): siRNA sense strand
agcuaccaauucuacuuua

SEQ ID NO: 1659367 - RNA, 19 nt, Homo sapiens
  misc_RNA (1)...(19): siRNA sense strand
caaaccagugacacagcua

SEQ ID NO: 1659368 - RNA, 19 nt, Homo sapiens
  misc_RNA (1)...(19): siRNA sense strand
gcauguacaaagaaauugg

SEQ ID NO: 1659369 - RNA, 19 nt, Homo sapiens
  misc_RNA (1)...(19): siRNA sense strand
uaucaggugguggcccuua

SEQ ID NO: 1659370 - RNA, 19 nt, Homo sapiens
  misc_RNA (1)...(19): siRNA sense strand
ccaucguugcugucaguua

SEQ ID NO: 1659371 - RNA, 19 nt, Homo sapiens
  misc_RNA (1)...(19): siRNA sense strand
ucaccuccacuuugccauu

SEQ ID NO: 1659372 - RNA, 19 nt, Homo sapiens
  misc_RNA (1)...(19): siRNA sense strand
ccagugacacagcuaccaa

SEQ ID NO: 1659373 - RNA, 19 nt, Homo sapiens
  misc_RNA (1)...(19): siRNA sense strand
gguauugcaguggauguga

SEQ ID NO: 1659374 - RNA, 19 nt, Homo sapiens
  misc_RNA (1)...(19): siRNA sense strand
ccacuuugccauucuucau

SEQ ID NO: 1659375 - RNA, 19 nt, Homo sapiens
  misc_RNA (1)...(19): siRNA sense strand
caccuccacuuugccauuc

SEQ ID NO: 1659376 - RNA, 19 nt, Homo sapiens
  misc_RNA (1)...(19): siRNA sense strand
ggaaggagauucuuucuuu

SEQ ID NO: 1659377 - RNA, 19 nt, Homo sapiens
  misc_RNA (1)...(19): siRNA sense strand
gaauuuagcccgagauuua

SEQ ID NO: 1659378 - RNA, 19 nt, Homo sapiens
  misc_RNA (1)...(19): siRNA sense strand
gcacagacaacaccaagua

SEQ ID NO: 1659379 - RNA, 19 nt, Homo sapiens
  misc_RNA (1)...(19): siRNA sense strand
ucagugauguugcggauua

SEQ ID NO: 1659380 - RNA, 19 nt, Homo sapiens
  misc_RNA (1)...(19): siRNA sense strand
caaagacggucguuuagug

SEQ ID NO: 1659381 - RNA, 19 nt, Homo sapiens
  misc_RNA (1)...(19): siRNA sense strand
gagauucuuucuuugauga

SEQ ID NO: 1659382 - RNA, 19 nt, Homo sapiens
  misc_RNA (1)...(19): siRNA sense strand
gaaggagauucuuucuuug

SEQ ID NO: 1659383 - RNA, 19 nt, Homo sapiens
  misc_RNA (1)...(19): siRNA sense strand
gugaagagauagaagaaga

SEQ ID NO: 1659384 - RNA, 19 nt, Homo sapiens
  misc_RNA (1)...(19): siRNA sense strand
gaaggaaccuaggaagcaa

SEQ ID NO: 1659385 - RNA, 19 nt, Homo sapiens
  misc_RNA (1)...(19): siRNA sense strand
gagaagaugaugacuaugu

SEQ ID NO: 1659386 - RNA, 19 nt, Homo sapiens
  misc_RNA (1)...(19): siRNA sense strand
uggagaagaugaugacuau

SEQ ID NO: 1659387 - RNA, 19 nt, Homo sapiens
  misc_RNA (1)...(19): siRNA sense strand
uaccaaagacggucguuua

SEQ ID NO: 1659388 - RNA, 19 nt, Homo sapiens
  misc_RNA (1)...(19): siRNA sense strand
ggagauucuuucuuugaug

SEQ ID NO: 1659389 - RNA, 19 nt, Homo sapiens
  misc_RNA (1)...(19): siRNA sense strand
gguggacccuuauuauuag

SEQ ID NO: 1659390 - RNA, 19 nt, Homo sapiens
  misc_RNA (1)...(19): siRNA sense strand
ggaaggugcacuugaucua

SEQ ID NO: 1659391 - RNA, 19 nt, Homo sapiens
  misc_RNA (1)...(19): siRNA sense strand
cacaagaucugacuguauc

SEQ ID NO: 1659392 - RNA, 19 nt, Homo sapiens
  misc_RNA (1)...(19): siRNA sense strand
gaugaugacuauguugaug

SEQ ID NO: 1659393 - RNA, 19 nt, Homo sapiens
  misc_RNA (1)...(19): siRNA sense strand
agaugaagaugauauggaa

SEQ ID NO: 1659394 - RNA, 19 nt, Homo sapiens
  misc_RNA (1)...(19): siRNA sense strand
gaacuggagaagaugauga

SEQ ID NO: 1659395 - RNA, 19 nt, Homo sapiens
  misc_RNA (1)...(19): siRNA sense strand
ugagauaaguauuggugaa

SEQ ID NO: 1659396 - RNA, 19 nt, Homo sapiens
  misc_RNA (1)...(19): siRNA sense strand
caaaagcagccuucacuua

SEQ ID NO: 1659397 - RNA, 19 nt, Homo sapiens
  misc_RNA (1)...(19): siRNA sense strand
ggaaggaaccuaggaagca

SEQ ID NO: 1659398 - RNA, 19 nt, Homo sapiens
  misc_RNA (1)...(19): siRNA sense strand
agaagaugaugacuauguu

SEQ ID NO: 1659399 - RNA, 19 nt, Homo sapiens
  misc_RNA (1)...(19): siRNA sense strand
caaagucaccagagggaaa

SEQ ID NO: 1659400 - RNA, 19 nt, Homo sapiens
  misc_RNA (1)...(19): siRNA sense strand
gcacuugaucuaucugaug

SEQ ID NO: 1659401 - RNA, 19 nt, Homo sapiens
  misc_RNA (1)...(19): siRNA sense strand
aaguauuggugaagagaua

SEQ ID NO: 1659402 - RNA, 19 nt, Homo sapiens
  misc_RNA (1)...(19): siRNA sense strand
gaagaugaugacuauguug

SEQ ID NO: 1659403 - RNA, 19 nt, Homo sapiens
  misc_RNA (1)...(19): siRNA sense strand
uugaugaccucacacaaga

SEQ ID NO: 1659404 - RNA, 19 nt, Homo sapiens
  misc_RNA (1)...(19): siRNA sense strand
gaaggugcacuugaucuau

SEQ ID NO: 1659405 - RNA, 19 nt, Homo sapiens
  misc_RNA (1)...(19): siRNA sense strand
gauaaguauuggugaagag

SEQ ID NO: 1659406 - RNA, 19 nt, Homo sapiens
  misc_RNA (1)...(19): siRNA sense strand
gcccgagauuuagguauaa

SEQ ID NO: 1659407 - RNA, 19 nt, Homo sapiens
  misc_RNA (1)...(19): siRNA sense strand
caauaccagugauaagcuu

SEQ ID NO: 1659408 - RNA, 19 nt, Homo sapiens
  misc_RNA (1)...(19): siRNA sense strand
gaaggucgagagaauuuag

SEQ ID NO: 1659409 - RNA, 19 nt, Homo sapiens
  misc_RNA (1)...(19): siRNA sense strand
ucuggaagauguugcauag

SEQ ID NO: 1659410 - RNA, 19 nt, Homo sapiens
  misc_RNA (1)...(19): siRNA sense strand
gauguacauucuccaccaa

SEQ ID NO: 1659411 - RNA, 19 nt, Homo sapiens
  misc_RNA (1)...(19): siRNA sense strand
ccagugauaagcuugauga

SEQ ID NO: 1659412 - RNA, 19 nt, Homo sapiens
  misc_RNA (1)...(19): siRNA sense strand
aauuggaucacuuggauua

SEQ ID NO: 1659413 - RNA, 19 nt, Homo sapiens
  misc_RNA (1)...(19): siRNA sense strand
gcacuagaggagcaagaaa

SEQ ID NO: 1659414 - RNA, 19 nt, Homo sapiens
  misc_RNA (1)...(19): siRNA sense strand
ugaucuaucugauguacau

SEQ ID NO: 1659415 - RNA, 19 nt, Homo sapiens
  misc_RNA (1)...(19): siRNA sense strand
ucacuuggauuaggaacug

SEQ ID NO: 1659416 - RNA, 19 nt, Homo sapiens
  misc_RNA (1)...(19): siRNA sense strand
gacuuuacuuuggcuguuu

SEQ ID NO: 1659417 - RNA, 19 nt, Homo sapiens
  misc_RNA (1)...(19): siRNA sense strand
cgagauuuagguauaauug

SEQ ID NO: 1659418 - RNA, 19 nt, Homo sapiens
  misc_RNA (1)...(19): siRNA sense strand
gagaauuuagcccgagauu

SEQ ID NO: 1659419 - RNA, 19 nt, Homo sapiens
  misc_RNA (1)...(19): siRNA sense strand
gagaaaagugagauaagua

SEQ ID NO: 1659420 - RNA, 19 nt, Homo sapiens
  misc_RNA (1)...(19): siRNA sense strand
cacacaagaucugacugua

SEQ ID NO: 1659421 - RNA, 19 nt, Homo sapiens
  misc_RNA (1)...(19): siRNA sense strand
agcccgagauuuagguaua

SEQ ID NO: 1659422 - RNA, 19 nt, Homo sapiens
  misc_RNA (1)...(19): siRNA sense strand
aaagugagauaaguauugg

SEQ ID NO: 1659423 - RNA, 19 nt, Homo sapiens
  misc_RNA (1)...(19): siRNA sense strand
auuaggaacuggagaagau

SEQ ID NO: 1659424 - RNA, 19 nt, Homo sapiens
  misc_RNA (1)...(19): siRNA sense strand
gggagccccuucuuuaaaa

SEQ ID NO: 1659425 - RNA, 19 nt, Homo sapiens
  misc_RNA (1)...(19): siRNA sense strand
cagacaacaccaaguaaga

SEQ ID NO: 1659426 - RNA, 19 nt, Homo sapiens
  misc_RNA (1)...(19): siRNA sense strand
ucuaagcaacagaacuuua

SEQ ID NO: 1659427 - RNA, 19 nt, Homo sapiens
  misc_RNA (1)...(19): siRNA sense strand
uugaugaucccauuccuaa

SEQ ID NO: 1659428 - RNA, 19 nt, Homo sapiens
  misc_RNA (1)...(19): siRNA sense strand
ggacccuuauuauuagaag

SEQ ID NO: 1659429 - RNA, 19 nt, Homo sapiens
  misc_RNA (1)...(19): siRNA sense strand
uuuaguggcuagucuuguu

SEQ ID NO: 1659430 - RNA, 19 nt, Homo sapiens
  misc_RNA (1)...(19): siRNA sense strand
ugucagaacccaagagcaa

SEQ ID NO: 1659431 - RNA, 19 nt, Homo sapiens
  misc_RNA (1)...(19): siRNA sense strand
uaaccuugacuuuacuuug

SEQ ID NO: 1659432 - RNA, 19 nt, Homo sapiens
  misc_RNA (1)...(19): siRNA sense strand
ugacuuuacuuuggcuguu

SEQ ID NO: 1659433 - RNA, 19 nt, Homo sapiens
  misc_RNA (1)...(19): siRNA sense strand
agagauagaagaagaccuu

SEQ ID NO: 1659434 - RNA, 19 nt, Homo sapiens
  misc_RNA (1)...(19): siRNA sense strand
cacuugaucuaucugaugu

SEQ ID NO: 1659435 - RNA, 19 nt, Homo sapiens
  misc_RNA (1)...(19): siRNA sense strand
uaucccagcucagugaugu

SEQ ID NO: 1659436 - RNA, 19 nt, Homo sapiens
  misc_RNA (1)...(19): siRNA sense strand
acacaagaucugacuguau

SEQ ID NO: 1659437 - RNA, 19 nt, Homo sapiens
  misc_RNA (1)...(19): siRNA sense strand
gaugauauggaaggagauu

SEQ ID NO: 1659438 - RNA, 19 nt, Homo sapiens
  misc_RNA (1)...(19): siRNA sense strand
aaggagauucuuucuuuga

SEQ ID NO: 1659439 - RNA, 19 nt, Homo sapiens
  misc_RNA (1)...(19): siRNA sense strand
uaagcuugaugaccucaca

SEQ ID NO: 1659440 - RNA, 19 nt, Homo sapiens
  misc_RNA (1)...(19): siRNA sense strand
ggaaauacaguuuugaaag

SEQ ID NO: 1659441 - RNA, 19 nt, Homo sapiens
  misc_RNA (1)...(19): siRNA sense strand
aaccuugacuuuacuuugg

SEQ ID NO: 1659442 - RNA, 19 nt, Homo sapiens
  misc_RNA (1)...(19): siRNA sense strand
ugaagaugauauggaagga

SEQ ID NO: 1659443 - RNA, 19 nt, Homo sapiens
  misc_RNA (1)...(19): siRNA sense strand
ucacacaagaucugacugu

SEQ ID NO: 1659444 - RNA, 19 nt, Homo sapiens
  misc_RNA (1)...(19): siRNA sense strand
agauaaguauuggugaaga

SEQ ID NO: 1659445 - RNA, 19 nt, Homo sapiens
  misc_RNA (1)...(19): siRNA sense strand
ugaugacuauguugaugau

SEQ ID NO: 1659446 - RNA, 19 nt, Homo sapiens
  misc_RNA (1)...(19): siRNA sense strand
aaaauuggaucacuuggau

SEQ ID NO: 1659447 - RNA, 19 nt, Homo sapiens
  misc_RNA (1)...(19): siRNA sense strand
gauaaaauuggaucacuug

SEQ ID NO: 1659448 - RNA, 19 nt, Homo sapiens
  misc_RNA (1)...(19): siRNA sense strand
gaacuccgagcagcugugu

SEQ ID NO: 1659449 - RNA, 19 nt, Homo sapiens
  misc_RNA (1)...(19): siRNA sense strand
cgaaggucgagagaauuua

SEQ ID NO: 1659450 - RNA, 19 nt, Homo sapiens
  misc_RNA (1)...(19): siRNA sense strand
gagaguaaaaggggaaaua

SEQ ID NO: 1659451 - RNA, 19 nt, Homo sapiens
  misc_RNA (1)...(19): siRNA sense strand
cagaugaagaugauaugga

SEQ ID NO: 1659452 - RNA, 19 nt, Homo sapiens
  misc_RNA (1)...(19): siRNA sense strand
cacuuacugucccaugaaa

SEQ ID NO: 1659453 - RNA, 19 nt, Homo sapiens
  misc_RNA (1)...(19): siRNA sense strand
guacauucuccaccaaagu

SEQ ID NO: 1659454 - RNA, 19 nt, Homo sapiens
  misc_RNA (1)...(19): siRNA sense strand
gaugaccucacacaagauc

SEQ ID NO: 1659455 - RNA, 19 nt, Homo sapiens
  misc_RNA (1)...(19): siRNA sense strand
acuccgagcagcuguguuu

SEQ ID NO: 1659456 - RNA, 19 nt, Homo sapiens
  misc_RNA (1)...(19): siRNA sense strand
gaugaucccauuccuaagc

SEQ ID NO: 1659457 - RNA, 19 nt, Homo sapiens
  misc_RNA (1)...(19): siRNA sense strand
uagucuuguugcagaauuu

SEQ ID NO: 1659458 - RNA, 19 nt, Homo sapiens
  misc_RNA (1)...(19): siRNA sense strand
cuagucuuguugcagaauu

SEQ ID NO: 1659459 - RNA, 19 nt, Homo sapiens
  misc_RNA (1)...(19): siRNA sense strand
aaagcagccuucacuuacu

SEQ ID NO: 1659460 - RNA, 19 nt, Homo sapiens
  misc_RNA (1)...(19): siRNA sense strand
ucacuuacugucccaugaa

SEQ ID NO: 1659461 - RNA, 19 nt, Homo sapiens
  misc_RNA (1)...(19): siRNA sense strand
uggaucacuuggauuagga

SEQ ID NO: 1659462 - RNA, 19 nt, Homo sapiens
  misc_RNA (1)...(19): siRNA sense strand
agguauaauugaagcagaa

SEQ ID NO: 1659463 - RNA, 19 nt, Homo sapiens
  misc_RNA (1)...(19): siRNA sense strand
uuucuuugaugaucccauu

SEQ ID NO: 1659464 - RNA, 19 nt, Homo sapiens
  misc_RNA (1)...(19): siRNA sense strand
aaggugcacuugaucuauc

SEQ ID NO: 1659465 - RNA, 19 nt, Homo sapiens
  misc_RNA (1)...(19): siRNA sense strand
gagauaaguauuggugaag

SEQ ID NO: 1659466 - RNA, 19 nt, Homo sapiens
  misc_RNA (1)...(19): siRNA sense strand
aagaugaugacuauguuga

SEQ ID NO: 1659467 - RNA, 19 nt, Homo sapiens
  misc_RNA (1)...(19): siRNA sense strand
aagcagccuucacuuacug

SEQ ID NO: 1659468 - RNA, 19 nt, Homo sapiens
  misc_RNA (1)...(19): siRNA sense strand
cacagacaacaccaaguaa

SEQ ID NO: 1659469 - RNA, 19 nt, Homo sapiens
  misc_RNA (1)...(19): siRNA sense strand
ggcgggagccccuucuuua

SEQ ID NO: 1659470 - RNA, 19 nt, Homo sapiens
  misc_RNA (1)...(19): siRNA sense strand
ugaggaaggaaccuaggaa

SEQ ID NO: 1659471 - RNA, 19 nt, Homo sapiens
  misc_RNA (1)...(19): siRNA sense strand
gagauagaagaagaccuuu

SEQ ID NO: 1659472 - RNA, 19 nt, Homo sapiens
  misc_RNA (1)...(19): siRNA sense strand
ccaaagacggucguuuagu

SEQ ID NO: 1659473 - RNA, 19 nt, Homo sapiens
  misc_RNA (1)...(19): siRNA sense strand
gauuaggaacuggagaaga

SEQ ID NO: 1659474 - RNA, 19 nt, Homo sapiens
  misc_RNA (1)...(19): siRNA sense strand
aggagauucuuucuuugau

SEQ ID NO: 1659475 - RNA, 19 nt, Homo sapiens
  misc_RNA (1)...(19): siRNA sense strand
uauggaaggagauucuuuc

SEQ ID NO: 1659476 - RNA, 19 nt, Homo sapiens
  misc_RNA (1)...(19): siRNA sense strand
ggaaggagauucuuucuuu

SEQ ID NO: 1659477 - RNA, 19 nt, Homo sapiens
  misc_RNA (1)...(19): siRNA sense strand
gaauuuagcccgagauuua

SEQ ID NO: 1659478 - RNA, 19 nt, Homo sapiens
  misc_RNA (1)...(19): siRNA sense strand
gcacagacaacaccaagua

SEQ ID NO: 1659479 - RNA, 19 nt, Homo sapiens
  misc_RNA (1)...(19): siRNA sense strand
ucagugauguugcggauua

SEQ ID NO: 1659480 - RNA, 19 nt, Homo sapiens
  misc_RNA (1)...(19): siRNA sense strand
caaagacggucguuuagug

SEQ ID NO: 1659481 - RNA, 19 nt, Homo sapiens
  misc_RNA (1)...(19): siRNA sense strand
gagauucuuucuuugauga

SEQ ID NO: 1659482 - RNA, 19 nt, Homo sapiens
  misc_RNA (1)...(19): siRNA sense strand
gaaggagauucuuucuuug

SEQ ID NO: 1659483 - RNA, 19 nt, Homo sapiens
  misc_RNA (1)...(19): siRNA sense strand
gugaagagauagaagaaga

SEQ ID NO: 1659484 - RNA, 19 nt, Homo sapiens
  misc_RNA (1)...(19): siRNA sense strand
gaaggaaccuaggaagcaa

SEQ ID NO: 1659485 - RNA, 19 nt, Homo sapiens
  misc_RNA (1)...(19): siRNA sense strand
gagaagaugaugacuaugu

SEQ ID NO: 1659486 - RNA, 19 nt, Homo sapiens
  misc_RNA (1)...(19): siRNA sense strand
uggagaagaugaugacuau

SEQ ID NO: 1659487 - RNA, 19 nt, Homo sapiens
  misc_RNA (1)...(19): siRNA sense strand
uaccaaagacggucguuua

SEQ ID NO: 1659488 - RNA, 19 nt, Homo sapiens
  misc_RNA (1)...(19): siRNA sense strand
ggagauucuuucuuugaug

SEQ ID NO: 1659489 - RNA, 19 nt, Homo sapiens
  misc_RNA (1)...(19): siRNA sense strand
gguggacccuuauuauuag

SEQ ID NO: 1659490 - RNA, 19 nt, Homo sapiens
  misc_RNA (1)...(19): siRNA sense strand
ggaaggugcacuugaucua

SEQ ID NO: 1659491 - RNA, 19 nt, Homo sapiens
  misc_RNA (1)...(19): siRNA sense strand
cacaagaucugacuguauc

SEQ ID NO: 1659492 - RNA, 19 nt, Homo sapiens
  misc_RNA (1)...(19): siRNA sense strand
gaugaugacuauguugaug

SEQ ID NO: 1659493 - RNA, 19 nt, Homo sapiens
  misc_RNA (1)...(19): siRNA sense strand
agaugaagaugauauggaa

SEQ ID NO: 1659494 - RNA, 19 nt, Homo sapiens
  misc_RNA (1)...(19): siRNA sense strand
gaacuggagaagaugauga

SEQ ID NO: 1659495 - RNA, 19 nt, Homo sapiens
  misc_RNA (1)...(19): siRNA sense strand
ugagauaaguauuggugaa

SEQ ID NO: 1659496 - RNA, 19 nt, Homo sapiens
  misc_RNA (1)...(19): siRNA sense strand
caaaagcagccuucacuua

SEQ ID NO: 1659497 - RNA, 19 nt, Homo sapiens
  misc_RNA (1)...(19): siRNA sense strand
ggaaggaaccuaggaagca

SEQ ID NO: 1659498 - RNA, 19 nt, Homo sapiens
  misc_RNA (1)...(19): siRNA sense strand
agaagaugaugacuauguu

SEQ ID NO: 1659499 - RNA, 19 nt, Homo sapiens
  misc_RNA (1)...(19): siRNA sense strand
caaagucaccagagggaaa

SEQ ID NO: 1659500 - RNA, 19 nt, Homo sapiens
  misc_RNA (1)...(19): siRNA sense strand
gcacuugaucuaucugaug

SEQ ID NO: 1659501 - RNA, 19 nt, Homo sapiens
  misc_RNA (1)...(19): siRNA sense strand
aaguauuggugaagagaua

SEQ ID NO: 1659502 - RNA, 19 nt, Homo sapiens
  misc_RNA (1)...(19): siRNA sense strand
gaagaugaugacuauguug

SEQ ID NO: 1659503 - RNA, 19 nt, Homo sapiens
  misc_RNA (1)...(19): siRNA sense strand
uugaugaccucacacaaga

SEQ ID NO: 1659504 - RNA, 19 nt, Homo sapiens
  misc_RNA (1)...(19): siRNA sense strand
gaaggugcacuugaucuau

SEQ ID NO: 1659505 - RNA, 19 nt, Homo sapiens
  misc_RNA (1)...(19): siRNA sense strand
gauaaguauuggugaagag

SEQ ID NO: 1659506 - RNA, 19 nt, Homo sapiens
  misc_RNA (1)...(19): siRNA sense strand
gcccgagauuuagguauaa

SEQ ID NO: 1659507 - RNA, 19 nt, Homo sapiens
  misc_RNA (1)...(19): siRNA sense strand
caauaccagugauaagcuu

SEQ ID NO: 1659508 - RNA, 19 nt, Homo sapiens
  misc_RNA (1)...(19): siRNA sense strand
gaaggucgagagaauuuag

SEQ ID NO: 1659509 - RNA, 19 nt, Homo sapiens
  misc_RNA (1)...(19): siRNA sense strand
ucuggaagauguugcauag

SEQ ID NO: 1659510 - RNA, 19 nt, Homo sapiens
  misc_RNA (1)...(19): siRNA sense strand
gauguacauucuccaccaa

SEQ ID NO: 1659511 - RNA, 19 nt, Homo sapiens
  misc_RNA (1)...(19): siRNA sense strand
ccagugauaagcuugauga

SEQ ID NO: 1659512 - RNA, 19 nt, Homo sapiens
  misc_RNA (1)...(19): siRNA sense strand
aauuggaucacuuggauua

SEQ ID NO: 1659513 - RNA, 19 nt, Homo sapiens
  misc_RNA (1)...(19): siRNA sense strand
gcacuagaggagcaagaaa

SEQ ID NO: 1659514 - RNA, 19 nt, Homo sapiens
  misc_RNA (1)...(19): siRNA sense strand
ugaucuaucugauguacau

SEQ ID NO: 1659515 - RNA, 19 nt, Homo sapiens
  misc_RNA (1)...(19): siRNA sense strand
ucacuuggauuaggaacug

SEQ ID NO: 1659516 - RNA, 19 nt, Homo sapiens
  misc_RNA (1)...(19): siRNA sense strand
gacuuuacuuuggcuguuu

SEQ ID NO: 1659517 - RNA, 19 nt, Homo sapiens
  misc_RNA (1)...(19): siRNA sense strand
cgagauuuagguauaauug

SEQ ID NO: 1659518 - RNA, 19 nt, Homo sapiens
  misc_RNA (1)...(19): siRNA sense strand
gagaauuuagcccgagauu

SEQ ID NO: 1659519 - RNA, 19 nt, Homo sapiens
  misc_RNA (1)...(19): siRNA sense strand
gagaaaagugagauaagua

SEQ ID NO: 1659520 - RNA, 19 nt, Homo sapiens
  misc_RNA (1)...(19): siRNA sense strand
cacacaagaucugacugua

SEQ ID NO: 1659521 - RNA, 19 nt, Homo sapiens
  misc_RNA (1)...(19): siRNA sense strand
agcccgagauuuagguaua

SEQ ID NO: 1659522 - RNA, 19 nt, Homo sapiens
  misc_RNA (1)...(19): siRNA sense strand
aaagugagauaaguauugg

SEQ ID NO: 1659523 - RNA, 19 nt, Homo sapiens
  misc_RNA (1)...(19): siRNA sense strand
auuaggaacuggagaagau

SEQ ID NO: 1659524 - RNA, 19 nt, Homo sapiens
  misc_RNA (1)...(19): siRNA sense strand
gggagccccuucuuuaaaa

SEQ ID NO: 1659525 - RNA, 19 nt, Homo sapiens
  misc_RNA (1)...(19): siRNA sense strand
cagacaacaccaaguaaga

SEQ ID NO: 1659526 - RNA, 19 nt, Homo sapiens
  misc_RNA (1)...(19): siRNA sense strand
ucuaagcaacagaacuuua

SEQ ID NO: 1659527 - RNA, 19 nt, Homo sapiens
  misc_RNA (1)...(19): siRNA sense strand
uugaugaucccauuccuaa

SEQ ID NO: 1659528 - RNA, 19 nt, Homo sapiens
  misc_RNA (1)...(19): siRNA sense strand
ggacccuuauuauuagaag

SEQ ID NO: 1659529 - RNA, 19 nt, Homo sapiens
  misc_RNA (1)...(19): siRNA sense strand
uuuaguggcuagucuuguu

SEQ ID NO: 1659530 - RNA, 19 nt, Homo sapiens
  misc_RNA (1)...(19): siRNA sense strand
ugucagaacccaagagcaa

SEQ ID NO: 1659531 - RNA, 19 nt, Homo sapiens
  misc_RNA (1)...(19): siRNA sense strand
uaaccuugacuuuacuuug

SEQ ID NO: 1659532 - RNA, 19 nt, Homo sapiens
  misc_RNA (1)...(19): siRNA sense strand
ugacuuuacuuuggcuguu

SEQ ID NO: 1659533 - RNA, 19 nt, Homo sapiens
  misc_RNA (1)...(19): siRNA sense strand
agagauagaagaagaccuu

SEQ ID NO: 1659534 - RNA, 19 nt, Homo sapiens
  misc_RNA (1)...(19): siRNA sense strand
cacuugaucuaucugaugu

SEQ ID NO: 1659535 - RNA, 19 nt, Homo sapiens
  misc_RNA (1)...(19): siRNA sense strand
uaucccagcucagugaugu

SEQ ID NO: 1659536 - RNA, 19 nt, Homo sapiens
  misc_RNA (1)...(19): siRNA sense strand
acacaagaucugacuguau

SEQ ID NO: 1659537 - RNA, 19 nt, Homo sapiens
  misc_RNA (1)...(19): siRNA sense strand
gaugauauggaaggagauu

SEQ ID NO: 1659538 - RNA, 19 nt, Homo sapiens
  misc_RNA (1)...(19): siRNA sense strand
aaggagauucuuucuuuga

SEQ ID NO: 1659539 - RNA, 19 nt, Homo sapiens
  misc_RNA (1)...(19): siRNA sense strand
uaagcuugaugaccucaca

SEQ ID NO: 1659540 - RNA, 19 nt, Homo sapiens
  misc_RNA (1)...(19): siRNA sense strand
ggaaauacaguuuugaaag

SEQ ID NO: 1659541 - RNA, 19 nt, Homo sapiens
  misc_RNA (1)...(19): siRNA sense strand
aaccuugacuuuacuuugg

SEQ ID NO: 1659542 - RNA, 19 nt, Homo sapiens
  misc_RNA (1)...(19): siRNA sense strand
ugaagaugauauggaagga

SEQ ID NO: 1659543 - RNA, 19 nt, Homo sapiens
  misc_RNA (1)...(19): siRNA sense strand
ucacacaagaucugacugu

SEQ ID NO: 1659544 - RNA, 19 nt, Homo sapiens
  misc_RNA (1)...(19): siRNA sense strand
agauaaguauuggugaaga

SEQ ID NO: 1659545 - RNA, 19 nt, Homo sapiens
  misc_RNA (1)...(19): siRNA sense strand
ugaugacuauguugaugau

SEQ ID NO: 1659546 - RNA, 19 nt, Homo sapiens
  misc_RNA (1)...(19): siRNA sense strand
aaaauuggaucacuuggau

SEQ ID NO: 1659547 - RNA, 19 nt, Homo sapiens
  misc_RNA (1)...(19): siRNA sense strand
gauaaaauuggaucacuug

SEQ ID NO: 1659548 - RNA, 19 nt, Homo sapiens
  misc_RNA (1)...(19): siRNA sense strand
gaacuccgagcagcugugu

SEQ ID NO: 1659549 - RNA, 19 nt, Homo sapiens
  misc_RNA (1)...(19): siRNA sense strand
cgaaggucgagagaauuua

SEQ ID NO: 1659550 - RNA, 19 nt, Homo sapiens
  misc_RNA (1)...(19): siRNA sense strand
gagaguaaaaggggaaaua

SEQ ID NO: 1659551 - RNA, 19 nt, Homo sapiens
  misc_RNA (1)...(19): siRNA sense strand
cagaugaagaugauaugga

SEQ ID NO: 1659552 - RNA, 19 nt, Homo sapiens
  misc_RNA (1)...(19): siRNA sense strand
cacuuacugucccaugaaa

SEQ ID NO: 1659553 - RNA, 19 nt, Homo sapiens
  misc_RNA (1)...(19): siRNA sense strand
guacauucuccaccaaagu

SEQ ID NO: 1659554 - RNA, 19 nt, Homo sapiens
  misc_RNA (1)...(19): siRNA sense strand
gaugaccucacacaagauc

SEQ ID NO: 1659555 - RNA, 19 nt, Homo sapiens
  misc_RNA (1)...(19): siRNA sense strand
acuccgagcagcuguguuu

SEQ ID NO: 1659556 - RNA, 19 nt, Homo sapiens
  misc_RNA (1)...(19): siRNA sense strand
gaugaucccauuccuaagc

SEQ ID NO: 1659557 - RNA, 19 nt, Homo sapiens
  misc_RNA (1)...(19): siRNA sense strand
uagucuuguugcagaauuu

SEQ ID NO: 1659558 - RNA, 19 nt, Homo sapiens
  misc_RNA (1)...(19): siRNA sense strand
cuagucuuguugcagaauu

SEQ ID NO: 1659559 - RNA, 19 nt, Homo sapiens
  misc_RNA (1)...(19): siRNA sense strand
aaagcagccuucacuuacu

SEQ ID NO: 1659560 - RNA, 19 nt, Homo sapiens
  misc_RNA (1)...(19): siRNA sense strand
ucacuuacugucccaugaa

SEQ ID NO: 1659561 - RNA, 19 nt, Homo sapiens
  misc_RNA (1)...(19): siRNA sense strand
uggaucacuuggauuagga

SEQ ID NO: 1659562 - RNA, 19 nt, Homo sapiens
  misc_RNA (1)...(19): siRNA sense strand
agguauaauugaagcagaa

SEQ ID NO: 1659563 - RNA, 19 nt, Homo sapiens
  misc_RNA (1)...(19): siRNA sense strand
uuucuuugaugaucccauu

SEQ ID NO: 1659564 - RNA, 19 nt, Homo sapiens
  misc_RNA (1)...(19): siRNA sense strand
aaggugcacuugaucuauc

SEQ ID NO: 1659565 - RNA, 19 nt, Homo sapiens
  misc_RNA (1)...(19): siRNA sense strand
gagauaaguauuggugaag

SEQ ID NO: 1659566 - RNA, 19 nt, Homo sapiens
  misc_RNA (1)...(19): siRNA sense strand
aagaugaugacuauguuga

SEQ ID NO: 1659567 - RNA, 19 nt, Homo sapiens
  misc_RNA (1)...(19): siRNA sense strand
aagcagccuucacuuacug

SEQ ID NO: 1659568 - RNA, 19 nt, Homo sapiens
  misc_RNA (1)...(19): siRNA sense strand
cacagacaacaccaaguaa

SEQ ID NO: 1659569 - RNA, 19 nt, Homo sapiens
  misc_RNA (1)...(19): siRNA sense strand
ggcgggagccccuucuuua

SEQ ID NO: 1659570 - RNA, 19 nt, Homo sapiens
  misc_RNA (1)...(19): siRNA sense strand
ugaggaaggaaccuaggaa

SEQ ID NO: 1659571 - RNA, 19 nt, Homo sapiens
  misc_RNA (1)...(19): siRNA sense strand
gagauagaagaagaccuuu

SEQ ID NO: 1659572 - RNA, 19 nt, Homo sapiens
  misc_RNA (1)...(19): siRNA sense strand
ccaaagacggucguuuagu

SEQ ID NO: 1659573 - RNA, 19 nt, Homo sapiens
  misc_RNA (1)...(19): siRNA sense strand
gauuaggaacuggagaaga

SEQ ID NO: 1659574 - RNA, 19 nt, Homo sapiens
  misc_RNA (1)...(19): siRNA sense strand
aggagauucuuucuuugau

SEQ ID NO: 1659575 - RNA, 19 nt, Homo sapiens
  misc_RNA (1)...(19): siRNA sense strand
uauggaaggagauucuuuc

SEQ ID NO: 1659576 - RNA, 19 nt, Homo sapiens
  misc_RNA (1)...(19): siRNA sense strand
ggaaggagauucuuucuuu

SEQ ID NO: 1659577 - RNA, 19 nt, Homo sapiens
  misc_RNA (1)...(19): siRNA sense strand
gaauuuagcccgagauuua

SEQ ID NO: 1659578 - RNA, 19 nt, Homo sapiens
  misc_RNA (1)...(19): siRNA sense strand
gcacagacaacaccaagua

SEQ ID NO: 1659579 - RNA, 19 nt, Homo sapiens
  misc_RNA (1)...(19): siRNA sense strand
ucagugauguugcggauua

SEQ ID NO: 1659580 - RNA, 19 nt, Homo sapiens
  misc_RNA (1)...(19): siRNA sense strand
caaagacggucguuuagug

SEQ ID NO: 1659581 - RNA, 19 nt, Homo sapiens
  misc_RNA (1)...(19): siRNA sense strand
gagauucuuucuuugauga

SEQ ID NO: 1659582 - RNA, 19 nt, Homo sapiens
  misc_RNA (1)...(19): siRNA sense strand
gaaggagauucuuucuuug

SEQ ID NO: 1659583 - RNA, 19 nt, Homo sapiens
  misc_RNA (1)...(19): siRNA sense strand
gugaagagauagaagaaga

SEQ ID NO: 1659584 - RNA, 19 nt, Homo sapiens
  misc_RNA (1)...(19): siRNA sense strand
gaaggaaccuaggaagcaa

SEQ ID NO: 1659585 - RNA, 19 nt, Homo sapiens
  misc_RNA (1)...(19): siRNA sense strand
gagaagaugaugacuaugu

SEQ ID NO: 1659586 - RNA, 19 nt, Homo sapiens
  misc_RNA (1)...(19): siRNA sense strand
uggagaagaugaugacuau

SEQ ID NO: 1659587 - RNA, 19 nt, Homo sapiens
  misc_RNA (1)...(19): siRNA sense strand
uaccaaagacggucguuua

SEQ ID NO: 1659588 - RNA, 19 nt, Homo sapiens
  misc_RNA (1)...(19): siRNA sense strand
ggagauucuuucuuugaug

SEQ ID NO: 1659589 - RNA, 19 nt, Homo sapiens
  misc_RNA (1)...(19): siRNA sense strand
gguggacccuuauuauuag

SEQ ID NO: 1659590 - RNA, 19 nt, Homo sapiens
  misc_RNA (1)...(19): siRNA sense strand
ggaaggugcacuugaucua

SEQ ID NO: 1659591 - RNA, 19 nt, Homo sapiens
  misc_RNA (1)...(19): siRNA sense strand
cacaagaucugacuguauc

SEQ ID NO: 1659592 - RNA, 19 nt, Homo sapiens
  misc_RNA (1)...(19): siRNA sense strand
gaugaugacuauguugaug

SEQ ID NO: 1659593 - RNA, 19 nt, Homo sapiens
  misc_RNA (1)...(19): siRNA sense strand
agaugaagaugauauggaa

SEQ ID NO: 1659594 - RNA, 19 nt, Homo sapiens
  misc_RNA (1)...(19): siRNA sense strand
gaacuggagaagaugauga

SEQ ID NO: 1659595 - RNA, 19 nt, Homo sapiens
  misc_RNA (1)...(19): siRNA sense strand
ugagauaaguauuggugaa

SEQ ID NO: 1659596 - RNA, 19 nt, Homo sapiens
  misc_RNA (1)...(19): siRNA sense strand
caaaagcagccuucacuua

SEQ ID NO: 1659597 - RNA, 19 nt, Homo sapiens
  misc_RNA (1)...(19): siRNA sense strand
ggaaggaaccuaggaagca

SEQ ID NO: 1659598 - RNA, 19 nt, Homo sapiens
  misc_RNA (1)...(19): siRNA sense strand
agaagaugaugacuauguu

SEQ ID NO: 1659599 - RNA, 19 nt, Homo sapiens
  misc_RNA (1)...(19): siRNA sense strand
caaagucaccagagggaaa

SEQ ID NO: 1659600 - RNA, 19 nt, Homo sapiens
  misc_RNA (1)...(19): siRNA sense strand
gcacuugaucuaucugaug

SEQ ID NO: 1659601 - RNA, 19 nt, Homo sapiens
  misc_RNA (1)...(19): siRNA sense strand
aaguauuggugaagagaua

SEQ ID NO: 1659602 - RNA, 19 nt, Homo sapiens
  misc_RNA (1)...(19): siRNA sense strand
gaagaugaugacuauguug

SEQ ID NO: 1659603 - RNA, 19 nt, Homo sapiens
  misc_RNA (1)...(19): siRNA sense strand
uugaugaccucacacaaga

SEQ ID NO: 1659604 - RNA, 19 nt, Homo sapiens
  misc_RNA (1)...(19): siRNA sense strand
gaaggugcacuugaucuau

SEQ ID NO: 1659605 - RNA, 19 nt, Homo sapiens
  misc_RNA (1)...(19): siRNA sense strand
gauaaguauuggugaagag

SEQ ID NO: 1659606 - RNA, 19 nt, Homo sapiens
  misc_RNA (1)...(19): siRNA sense strand
gcccgagauuuagguauaa

SEQ ID NO: 1659607 - RNA, 19 nt, Homo sapiens
  misc_RNA (1)...(19): siRNA sense strand
caauaccagugauaagcuu

SEQ ID NO: 1659608 - RNA, 19 nt, Homo sapiens
  misc_RNA (1)...(19): siRNA sense strand
gaaggucgagagaauuuag

SEQ ID NO: 1659609 - RNA, 19 nt, Homo sapiens
  misc_RNA (1)...(19): siRNA sense strand
ucuggaagauguugcauag

SEQ ID NO: 1659610 - RNA, 19 nt, Homo sapiens
  misc_RNA (1)...(19): siRNA sense strand
gauguacauucuccaccaa

SEQ ID NO: 1659611 - RNA, 19 nt, Homo sapiens
  misc_RNA (1)...(19): siRNA sense strand
ccagugauaagcuugauga

SEQ ID NO: 1659612 - RNA, 19 nt, Homo sapiens
  misc_RNA (1)...(19): siRNA sense strand
aauuggaucacuuggauua

SEQ ID NO: 1659613 - RNA, 19 nt, Homo sapiens
  misc_RNA (1)...(19): siRNA sense strand
gcacuagaggagcaagaaa

SEQ ID NO: 1659614 - RNA, 19 nt, Homo sapiens
  misc_RNA (1)...(19): siRNA sense strand
ugaucuaucugauguacau

SEQ ID NO: 1659615 - RNA, 19 nt, Homo sapiens
  misc_RNA (1)...(19): siRNA sense strand
ucacuuggauuaggaacug

SEQ ID NO: 1659616 - RNA, 19 nt, Homo sapiens
  misc_RNA (1)...(19): siRNA sense strand
gacuuuacuuuggcuguuu

SEQ ID NO: 1659617 - RNA, 19 nt, Homo sapiens
  misc_RNA (1)...(19): siRNA sense strand
cgagauuuagguauaauug

SEQ ID NO: 1659618 - RNA, 19 nt, Homo sapiens
  misc_RNA (1)...(19): siRNA sense strand
gagaauuuagcccgagauu

SEQ ID NO: 1659619 - RNA, 19 nt, Homo sapiens
  misc_RNA (1)...(19): siRNA sense strand
gagaaaagugagauaagua

SEQ ID NO: 1659620 - RNA, 19 nt, Homo sapiens
  misc_RNA (1)...(19): siRNA sense strand
cacacaagaucugacugua

SEQ ID NO: 1659621 - RNA, 19 nt, Homo sapiens
  misc_RNA (1)...(19): siRNA sense strand
agcccgagauuuagguaua

SEQ ID NO: 1659622 - RNA, 19 nt, Homo sapiens
  misc_RNA (1)...(19): siRNA sense strand
aaagugagauaaguauugg

SEQ ID NO: 1659623 - RNA, 19 nt, Homo sapiens
  misc_RNA (1)...(19): siRNA sense strand
auuaggaacuggagaagau

SEQ ID NO: 1659624 - RNA, 19 nt, Homo sapiens
  misc_RNA (1)...(19): siRNA sense strand
gggagccccuucuuuaaaa

SEQ ID NO: 1659625 - RNA, 19 nt, Homo sapiens
  misc_RNA (1)...(19): siRNA sense strand
cagacaacaccaaguaaga

SEQ ID NO: 1659626 - RNA, 19 nt, Homo sapiens
  misc_RNA (1)...(19): siRNA sense strand
ucuaagcaacagaacuuua

SEQ ID NO: 1659627 - RNA, 19 nt, Homo sapiens
  misc_RNA (1)...(19): siRNA sense strand
uugaugaucccauuccuaa

SEQ ID NO: 1659628 - RNA, 19 nt, Homo sapiens
  misc_RNA (1)...(19): siRNA sense strand
ggacccuuauuauuagaag

SEQ ID NO: 1659629 - RNA, 19 nt, Homo sapiens
  misc_RNA (1)...(19): siRNA sense strand
uuuaguggcuagucuuguu

SEQ ID NO: 1659630 - RNA, 19 nt, Homo sapiens
  misc_RNA (1)...(19): siRNA sense strand
ugucagaacccaagagcaa

SEQ ID NO: 1659631 - RNA, 19 nt, Homo sapiens
  misc_RNA (1)...(19): siRNA sense strand
uaaccuugacuuuacuuug

SEQ ID NO: 1659632 - RNA, 19 nt, Homo sapiens
  misc_RNA (1)...(19): siRNA sense strand
ugacuuuacuuuggcuguu

SEQ ID NO: 1659633 - RNA, 19 nt, Homo sapiens
  misc_RNA (1)...(19): siRNA sense strand
agagauagaagaagaccuu

SEQ ID NO: 1659634 - RNA, 19 nt, Homo sapiens
  misc_RNA (1)...(19): siRNA sense strand
cacuugaucuaucugaugu

SEQ ID NO: 1659635 - RNA, 19 nt, Homo sapiens
  misc_RNA (1)...(19): siRNA sense strand
uaucccagcucagugaugu

SEQ ID NO: 1659636 - RNA, 19 nt, Homo sapiens
  misc_RNA (1)...(19): siRNA sense strand
acacaagaucugacuguau

SEQ ID NO: 1659637 - RNA, 19 nt, Homo sapiens
  misc_RNA (1)...(19): siRNA sense strand
gaugauauggaaggagauu

SEQ ID NO: 1659638 - RNA, 19 nt, Homo sapiens
  misc_RNA (1)...(19): siRNA sense strand
aaggagauucuuucuuuga

SEQ ID NO: 1659639 - RNA, 19 nt, Homo sapiens
  misc_RNA (1)...(19): siRNA sense strand
uaagcuugaugaccucaca

SEQ ID NO: 1659640 - RNA, 19 nt, Homo sapiens
  misc_RNA (1)...(19): siRNA sense strand
ggaaauacaguuuugaaag

SEQ ID NO: 1659641 - RNA, 19 nt, Homo sapiens
  misc_RNA (1)...(19): siRNA sense strand
aaccuugacuuuacuuugg

SEQ ID NO: 1659642 - RNA, 19 nt, Homo sapiens
  misc_RNA (1)...(19): siRNA sense strand
ugaagaugauauggaagga

SEQ ID NO: 1659643 - RNA, 19 nt, Homo sapiens
  misc_RNA (1)...(19): siRNA sense strand
ucacacaagaucugacugu

SEQ ID NO: 1659644 - RNA, 19 nt, Homo sapiens
  misc_RNA (1)...(19): siRNA sense strand
agauaaguauuggugaaga

SEQ ID NO: 1659645 - RNA, 19 nt, Homo sapiens
  misc_RNA (1)...(19): siRNA sense strand
ugaugacuauguugaugau

SEQ ID NO: 1659646 - RNA, 19 nt, Homo sapiens
  misc_RNA (1)...(19): siRNA sense strand
aaaauuggaucacuuggau

SEQ ID NO: 1659647 - RNA, 19 nt, Homo sapiens
  misc_RNA (1)...(19): siRNA sense strand
gauaaaauuggaucacuug

SEQ ID NO: 1659648 - RNA, 19 nt, Homo sapiens
  misc_RNA (1)...(19): siRNA sense strand
gaacuccgagcagcugugu

SEQ ID NO: 1659649 - RNA, 19 nt, Homo sapiens
  misc_RNA (1)...(19): siRNA sense strand
cgaaggucgagagaauuua

SEQ ID NO: 1659650 - RNA, 19 nt, Homo sapiens
  misc_RNA (1)...(19): siRNA sense strand
gagaguaaaaggggaaaua

SEQ ID NO: 1659651 - RNA, 19 nt, Homo sapiens
  misc_RNA (1)...(19): siRNA sense strand
cagaugaagaugauaugga

SEQ ID NO: 1659652 - RNA, 19 nt, Homo sapiens
  misc_RNA (1)...(19): siRNA sense strand
cacuuacugucccaugaaa

SEQ ID NO: 1659653 - RNA, 19 nt, Homo sapiens
  misc_RNA (1)...(19): siRNA sense strand
guacauucuccaccaaagu

SEQ ID NO: 1659654 - RNA, 19 nt, Homo sapiens
  misc_RNA (1)...(19): siRNA sense strand
gaugaccucacacaagauc

SEQ ID NO: 1659655 - RNA, 19 nt, Homo sapiens
  misc_RNA (1)...(19): siRNA sense strand
acuccgagcagcuguguuu

SEQ ID NO: 1659656 - RNA, 19 nt, Homo sapiens
  misc_RNA (1)...(19): siRNA sense strand
gaugaucccauuccuaagc

SEQ ID NO: 1659657 - RNA, 19 nt, Homo sapiens
  misc_RNA (1)...(19): siRNA sense strand
uagucuuguugcagaauuu

SEQ ID NO: 1659658 - RNA, 19 nt, Homo sapiens
  misc_RNA (1)...(19): siRNA sense strand
cuagucuuguugcagaauu

SEQ ID NO: 1659659 - RNA, 19 nt, Homo sapiens
  misc_RNA (1)...(19): siRNA sense strand
aaagcagccuucacuuacu

SEQ ID NO: 1659660 - RNA, 19 nt, Homo sapiens
  misc_RNA (1)...(19): siRNA sense strand
ucacuuacugucccaugaa

SEQ ID NO: 1659661 - RNA, 19 nt, Homo sapiens
  misc_RNA (1)...(19): siRNA sense strand
uggaucacuuggauuagga

SEQ ID NO: 1659662 - RNA, 19 nt, Homo sapiens
  misc_RNA (1)...(19): siRNA sense strand
agguauaauugaagcagaa

SEQ ID NO: 1659663 - RNA, 19 nt, Homo sapiens
  misc_RNA (1)...(19): siRNA sense strand
uuucuuugaugaucccauu

SEQ ID NO: 1659664 - RNA, 19 nt, Homo sapiens
  misc_RNA (1)...(19): siRNA sense strand
aaggugcacuugaucuauc

SEQ ID NO: 1659665 - RNA, 19 nt, Homo sapiens
  misc_RNA (1)...(19): siRNA sense strand
gagauaaguauuggugaag

SEQ ID NO: 1659666 - RNA, 19 nt, Homo sapiens
  misc_RNA (1)...(19): siRNA sense strand
aagaugaugacuauguuga

SEQ ID NO: 1659667 - RNA, 19 nt, Homo sapiens
  misc_RNA (1)...(19): siRNA sense strand
aagcagccuucacuuacug

SEQ ID NO: 1659668 - RNA, 19 nt, Homo sapiens
  misc_RNA (1)...(19): siRNA sense strand
cacagacaacaccaaguaa

SEQ ID NO: 1659669 - RNA, 19 nt, Homo sapiens
  misc_RNA (1)...(19): siRNA sense strand
ggcgggagccccuucuuua

SEQ ID NO: 1659670 - RNA, 19 nt, Homo sapiens
  misc_RNA (1)...(19): siRNA sense strand
ugaggaaggaaccuaggaa

SEQ ID NO: 1659671 - RNA, 19 nt, Homo sapiens
  misc_RNA (1)...(19): siRNA sense strand
gagauagaagaagaccuuu

SEQ ID NO: 1659672 - RNA, 19 nt, Homo sapiens
  misc_RNA (1)...(19): siRNA sense strand
ccaaagacggucguuuagu

SEQ ID NO: 1659673 - RNA, 19 nt, Homo sapiens
  misc_RNA (1)...(19): siRNA sense strand
gauuaggaacuggagaaga

SEQ ID NO: 1659674 - RNA, 19 nt, Homo sapiens
  misc_RNA (1)...(19): siRNA sense strand
aggagauucuuucuuugau

SEQ ID NO: 1659675 - RNA, 19 nt, Homo sapiens
  misc_RNA (1)...(19): siRNA sense strand
uauggaaggagauucuuuc

SEQ ID NO: 1659676 - RNA, 19 nt, Homo sapiens
  misc_RNA (1)...(19): siRNA sense strand
ggaaggagauucuuucuuu

SEQ ID NO: 1659677 - RNA, 19 nt, Homo sapiens
  misc_RNA (1)...(19): siRNA sense strand
gaauuuagcccgagauuua

SEQ ID NO: 1659678 - RNA, 19 nt, Homo sapiens
  misc_RNA (1)...(19): siRNA sense strand
gcacagacaacaccaagua

SEQ ID NO: 1659679 - RNA, 19 nt, Homo sapiens
  misc_RNA (1)...(19): siRNA sense strand
ucagugauguugcggauua

SEQ ID NO: 1659680 - RNA, 19 nt, Homo sapiens
  misc_RNA (1)...(19): siRNA sense strand
caaagacggucguuuagug

SEQ ID NO: 1659681 - RNA, 19 nt, Homo sapiens
  misc_RNA (1)...(19): siRNA sense strand
gagauucuuucuuugauga

SEQ ID NO: 1659682 - RNA, 19 nt, Homo sapiens
  misc_RNA (1)...(19): siRNA sense strand
gaaggagauucuuucuuug

SEQ ID NO: 1659683 - RNA, 19 nt, Homo sapiens
  misc_RNA (1)...(19): siRNA sense strand
gugaagagauagaagaaga

SEQ ID NO: 1659684 - RNA, 19 nt, Homo sapiens
  misc_RNA (1)...(19): siRNA sense strand
gaaggaaccuaggaagcaa

SEQ ID NO: 1659685 - RNA, 19 nt, Homo sapiens
  misc_RNA (1)...(19): siRNA sense strand
gagaagaugaugacuaugu

SEQ ID NO: 1659686 - RNA, 19 nt, Homo sapiens
  misc_RNA (1)...(19): siRNA sense strand
uggagaagaugaugacuau

SEQ ID NO: 1659687 - RNA, 19 nt, Homo sapiens
  misc_RNA (1)...(19): siRNA sense strand
uaccaaagacggucguuua

SEQ ID NO: 1659688 - RNA, 19 nt, Homo sapiens
  misc_RNA (1)...(19): siRNA sense strand
ggagauucuuucuuugaug

SEQ ID NO: 1659689 - RNA, 19 nt, Homo sapiens
  misc_RNA (1)...(19): siRNA sense strand
gguggacccuuauuauuag

SEQ ID NO: 1659690 - RNA, 19 nt, Homo sapiens
  misc_RNA (1)...(19): siRNA sense strand
ggaaggugcacuugaucua

SEQ ID NO: 1659691 - RNA, 19 nt, Homo sapiens
  misc_RNA (1)...(19): siRNA sense strand
cacaagaucugacuguauc

SEQ ID NO: 1659692 - RNA, 19 nt, Homo sapiens
  misc_RNA (1)...(19): siRNA sense strand
gaugaugacuauguugaug

SEQ ID NO: 1659693 - RNA, 19 nt, Homo sapiens
  misc_RNA (1)...(19): siRNA sense strand
agaugaagaugauauggaa

SEQ ID NO: 1659694 - RNA, 19 nt, Homo sapiens
  misc_RNA (1)...(19): siRNA sense strand
gaacuggagaagaugauga

SEQ ID NO: 1659695 - RNA, 19 nt, Homo sapiens
  misc_RNA (1)...(19): siRNA sense strand
ugagauaaguauuggugaa

SEQ ID NO: 1659696 - RNA, 19 nt, Homo sapiens
  misc_RNA (1)...(19): siRNA sense strand
caaaagcagccuucacuua

SEQ ID NO: 1659697 - RNA, 19 nt, Homo sapiens
  misc_RNA (1)...(19): siRNA sense strand
ggaaggaaccuaggaagca

SEQ ID NO: 1659698 - RNA, 19 nt, Homo sapiens
  misc_RNA (1)...(19): siRNA sense strand
agaagaugaugacuauguu

SEQ ID NO: 1659699 - RNA, 19 nt, Homo sapiens
  misc_RNA (1)...(19): siRNA sense strand
caaagucaccagagggaaa

SEQ ID NO: 1659700 - RNA, 19 nt, Homo sapiens
  misc_RNA (1)...(19): siRNA sense strand
gcacuugaucuaucugaug

SEQ ID NO: 1659701 - RNA, 19 nt, Homo sapiens
  misc_RNA (1)...(19): siRNA sense strand
aaguauuggugaagagaua

SEQ ID NO: 1659702 - RNA, 19 nt, Homo sapiens
  misc_RNA (1)...(19): siRNA sense strand
gaagaugaugacuauguug

SEQ ID NO: 1659703 - RNA, 19 nt, Homo sapiens
  misc_RNA (1)...(19): siRNA sense strand
uugaugaccucacacaaga

SEQ ID NO: 1659704 - RNA, 19 nt, Homo sapiens
  misc_RNA (1)...(19): siRNA sense strand
gaaggugcacuugaucuau

SEQ ID NO: 1659705 - RNA, 19 nt, Homo sapiens
  misc_RNA (1)...(19): siRNA sense strand
gauaaguauuggugaagag

SEQ ID NO: 1659706 - RNA, 19 nt, Homo sapiens
  misc_RNA (1)...(19): siRNA sense strand
gcccgagauuuagguauaa

SEQ ID NO: 1659707 - RNA, 19 nt, Homo sapiens
  misc_RNA (1)...(19): siRNA sense strand
caauaccagugauaagcuu

SEQ ID NO: 1659708 - RNA, 19 nt, Homo sapiens
  misc_RNA (1)...(19): siRNA sense strand
gaaggucgagagaauuuag

SEQ ID NO: 1659709 - RNA, 19 nt, Homo sapiens
  misc_RNA (1)...(19): siRNA sense strand
ucuggaagauguugcauag

SEQ ID NO: 1659710 - RNA, 19 nt, Homo sapiens
  misc_RNA (1)...(19): siRNA sense strand
gauguacauucuccaccaa

SEQ ID NO: 1659711 - RNA, 19 nt, Homo sapiens
  misc_RNA (1)...(19): siRNA sense strand
ccagugauaagcuugauga

SEQ ID NO: 1659712 - RNA, 19 nt, Homo sapiens
  misc_RNA (1)...(19): siRNA sense strand
aauuggaucacuuggauua

SEQ ID NO: 1659713 - RNA, 19 nt, Homo sapiens
  misc_RNA (1)...(19): siRNA sense strand
gcacuagaggagcaagaaa

SEQ ID NO: 1659714 - RNA, 19 nt, Homo sapiens
  misc_RNA (1)...(19): siRNA sense strand
ugaucuaucugauguacau

SEQ ID NO: 1659715 - RNA, 19 nt, Homo sapiens
  misc_RNA (1)...(19): siRNA sense strand
ucacuuggauuaggaacug

SEQ ID NO: 1659716 - RNA, 19 nt, Homo sapiens
  misc_RNA (1)...(19): siRNA sense strand
gacuuuacuuuggcuguuu

SEQ ID NO: 1659717 - RNA, 19 nt, Homo sapiens
  misc_RNA (1)...(19): siRNA sense strand
cgagauuuagguauaauug

SEQ ID NO: 1659718 - RNA, 19 nt, Homo sapiens
  misc_RNA (1)...(19): siRNA sense strand
gagaauuuagcccgagauu

SEQ ID NO: 1659719 - RNA, 19 nt, Homo sapiens
  misc_RNA (1)...(19): siRNA sense strand
gagaaaagugagauaagua

SEQ ID NO: 1659720 - RNA, 19 nt, Homo sapiens
  misc_RNA (1)...(19): siRNA sense strand
cacacaagaucugacugua

SEQ ID NO: 1659721 - RNA, 19 nt, Homo sapiens
  misc_RNA (1)...(19): siRNA sense strand
agcccgagauuuagguaua

SEQ ID NO: 1659722 - RNA, 19 nt, Homo sapiens
  misc_RNA (1)...(19): siRNA sense strand
aaagugagauaaguauugg

SEQ ID NO: 1659723 - RNA, 19 nt, Homo sapiens
  misc_RNA (1)...(19): siRNA sense strand
auuaggaacuggagaagau

SEQ ID NO: 1659724 - RNA, 19 nt, Homo sapiens
  misc_RNA (1)...(19): siRNA sense strand
gggagccccuucuuuaaaa

SEQ ID NO: 1659725 - RNA, 19 nt, Homo sapiens
  misc_RNA (1)...(19): siRNA sense strand
cagacaacaccaaguaaga

SEQ ID NO: 1659726 - RNA, 19 nt, Homo sapiens
  misc_RNA (1)...(19): siRNA sense strand
ucuaagcaacagaacuuua

SEQ ID NO: 1659727 - RNA, 19 nt, Homo sapiens
  misc_RNA (1)...(19): siRNA sense strand
uugaugaucccauuccuaa

SEQ ID NO: 1659728 - RNA, 19 nt, Homo sapiens
  misc_RNA (1)...(19): siRNA sense strand
ggacccuuauuauuagaag

SEQ ID NO: 1659729 - RNA, 19 nt, Homo sapiens
  misc_RNA (1)...(19): siRNA sense strand
uuuaguggcuagucuuguu

SEQ ID NO: 1659730 - RNA, 19 nt, Homo sapiens
  misc_RNA (1)...(19): siRNA sense strand
ugucagaacccaagagcaa

SEQ ID NO: 1659731 - RNA, 19 nt, Homo sapiens
  misc_RNA (1)...(19): siRNA sense strand
uaaccuugacuuuacuuug

SEQ ID NO: 1659732 - RNA, 19 nt, Homo sapiens
  misc_RNA (1)...(19): siRNA sense strand
ugacuuuacuuuggcuguu

SEQ ID NO: 1659733 - RNA, 19 nt, Homo sapiens
  misc_RNA (1)...(19): siRNA sense strand
agagauagaagaagaccuu

SEQ ID NO: 1659734 - RNA, 19 nt, Homo sapiens
  misc_RNA (1)...(19): siRNA sense strand
cacuugaucuaucugaugu

SEQ ID NO: 1659735 - RNA, 19 nt, Homo sapiens
  misc_RNA (1)...(19): siRNA sense strand
uaucccagcucagugaugu

SEQ ID NO: 1659736 - RNA, 19 nt, Homo sapiens
  misc_RNA (1)...(19): siRNA sense strand
acacaagaucugacuguau

SEQ ID NO: 1659737 - RNA, 19 nt, Homo sapiens
  misc_RNA (1)...(19): siRNA sense strand
gaugauauggaaggagauu

SEQ ID NO: 1659738 - RNA, 19 nt, Homo sapiens
  misc_RNA (1)...(19): siRNA sense strand
aaggagauucuuucuuuga

SEQ ID NO: 1659739 - RNA, 19 nt, Homo sapiens
  misc_RNA (1)...(19): siRNA sense strand
uaagcuugaugaccucaca

SEQ ID NO: 1659740 - RNA, 19 nt, Homo sapiens
  misc_RNA (1)...(19): siRNA sense strand
ggaaauacaguuuugaaag

SEQ ID NO: 1659741 - RNA, 19 nt, Homo sapiens
  misc_RNA (1)...(19): siRNA sense strand
aaccuugacuuuacuuugg

SEQ ID NO: 1659742 - RNA, 19 nt, Homo sapiens
  misc_RNA (1)...(19): siRNA sense strand
ugaagaugauauggaagga

SEQ ID NO: 1659743 - RNA, 19 nt, Homo sapiens
  misc_RNA (1)...(19): siRNA sense strand
ucacacaagaucugacugu

SEQ ID NO: 1659744 - RNA, 19 nt, Homo sapiens
  misc_RNA (1)...(19): siRNA sense strand
agauaaguauuggugaaga

SEQ ID NO: 1659745 - RNA, 19 nt, Homo sapiens
  misc_RNA (1)...(19): siRNA sense strand
ugaugacuauguugaugau

SEQ ID NO: 1659746 - RNA, 19 nt, Homo sapiens
  misc_RNA (1)...(19): siRNA sense strand
aaaauuggaucacuuggau

SEQ ID NO: 1659747 - RNA, 19 nt, Homo sapiens
  misc_RNA (1)...(19): siRNA sense strand
gauaaaauuggaucacuug

SEQ ID NO: 1659748 - RNA, 19 nt, Homo sapiens
  misc_RNA (1)...(19): siRNA sense strand
gaacuccgagcagcugugu

SEQ ID NO: 1659749 - RNA, 19 nt, Homo sapiens
  misc_RNA (1)...(19): siRNA sense strand
cgaaggucgagagaauuua

SEQ ID NO: 1659750 - RNA, 19 nt, Homo sapiens
  misc_RNA (1)...(19): siRNA sense strand
gagaguaaaaggggaaaua

SEQ ID NO: 1659751 - RNA, 19 nt, Homo sapiens
  misc_RNA (1)...(19): siRNA sense strand
cagaugaagaugauaugga

SEQ ID NO: 1659752 - RNA, 19 nt, Homo sapiens
  misc_RNA (1)...(19): siRNA sense strand
cacuuacugucccaugaaa

SEQ ID NO: 1659753 - RNA, 19 nt, Homo sapiens
  misc_RNA (1)...(19): siRNA sense strand
guacauucuccaccaaagu

SEQ ID NO: 1659754 - RNA, 19 nt, Homo sapiens
  misc_RNA (1)...(19): siRNA sense strand
gaugaccucacacaagauc

SEQ ID NO: 1659755 - RNA, 19 nt, Homo sapiens
  misc_RNA (1)...(19): siRNA sense strand
acuccgagcagcuguguuu

SEQ ID NO: 1659756 - RNA, 19 nt, Homo sapiens
  misc_RNA (1)...(19): siRNA sense strand
gaugaucccauuccuaagc

SEQ ID NO: 1659757 - RNA, 19 nt, Homo sapiens
  misc_RNA (1)...(19): siRNA sense strand
uagucuuguugcagaauuu

SEQ ID NO: 1659758 - RNA, 19 nt, Homo sapiens
  misc_RNA (1)...(19): siRNA sense strand
cuagucuuguugcagaauu

SEQ ID NO: 1659759 - RNA, 19 nt, Homo sapiens
  misc_RNA (1)...(19): siRNA sense strand
aaagcagccuucacuuacu

SEQ ID NO: 1659760 - RNA, 19 nt, Homo sapiens
  misc_RNA (1)...(19): siRNA sense strand
ucacuuacugucccaugaa

SEQ ID NO: 1659761 - RNA, 19 nt, Homo sapiens
  misc_RNA (1)...(19): siRNA sense strand
uggaucacuuggauuagga

SEQ ID NO: 1659762 - RNA, 19 nt, Homo sapiens
  misc_RNA (1)...(19): siRNA sense strand
agguauaauugaagcagaa

SEQ ID NO: 1659763 - RNA, 19 nt, Homo sapiens
  misc_RNA (1)...(19): siRNA sense strand
uuucuuugaugaucccauu

SEQ ID NO: 1659764 - RNA, 19 nt, Homo sapiens
  misc_RNA (1)...(19): siRNA sense strand
aaggugcacuugaucuauc

SEQ ID NO: 1659765 - RNA, 19 nt, Homo sapiens
  misc_RNA (1)...(19): siRNA sense strand
gagauaaguauuggugaag

SEQ ID NO: 1659766 - RNA, 19 nt, Homo sapiens
  misc_RNA (1)...(19): siRNA sense strand
aagaugaugacuauguuga

SEQ ID NO: 1659767 - RNA, 19 nt, Homo sapiens
  misc_RNA (1)...(19): siRNA sense strand
aagcagccuucacuuacug

SEQ ID NO: 1659768 - RNA, 19 nt, Homo sapiens
  misc_RNA (1)...(19): siRNA sense strand
cacagacaacaccaaguaa

SEQ ID NO: 1659769 - RNA, 19 nt, Homo sapiens
  misc_RNA (1)...(19): siRNA sense strand
ggcgggagccccuucuuua

SEQ ID NO: 1659770 - RNA, 19 nt, Homo sapiens
  misc_RNA (1)...(19): siRNA sense strand
ugaggaaggaaccuaggaa

SEQ ID NO: 1659771 - RNA, 19 nt, Homo sapiens
  misc_RNA (1)...(19): siRNA sense strand
gagauagaagaagaccuuu

SEQ ID NO: 1659772 - RNA, 19 nt, Homo sapiens
  misc_RNA (1)...(19): siRNA sense strand
ccaaagacggucguuuagu

SEQ ID NO: 1659773 - RNA, 19 nt, Homo sapiens
  misc_RNA (1)...(19): siRNA sense strand
gauuaggaacuggagaaga

SEQ ID NO: 1659774 - RNA, 19 nt, Homo sapiens
  misc_RNA (1)...(19): siRNA sense strand
aggagauucuuucuuugau

SEQ ID NO: 1659775 - RNA, 19 nt, Homo sapiens
  misc_RNA (1)...(19): siRNA sense strand
uauggaaggagauucuuuc

SEQ ID NO: 1659776 - RNA, 19 nt, Homo sapiens
  misc_RNA (1)...(19): siRNA sense strand
gaacaaagauagccuugag

SEQ ID NO: 1659777 - RNA, 19 nt, Homo sapiens
  misc_RNA (1)...(19): siRNA sense strand
gcaagaaggcagugaacaa

SEQ ID NO: 1659778 - RNA, 19 nt, Homo sapiens
  misc_RNA (1)...(19): siRNA sense strand
agaaggcagugaacaaaga

SEQ ID NO: 1659779 - RNA, 19 nt, Homo sapiens
  misc_RNA (1)...(19): siRNA sense strand
caagaaggcagugaacaaa

SEQ ID NO: 1659780 - RNA, 19 nt, Homo sapiens
  misc_RNA (1)...(19): siRNA sense strand
acaaagauagccuugagua

SEQ ID NO: 1659781 - RNA, 19 nt, Homo sapiens
  misc_RNA (1)...(19): siRNA sense strand
gagcaugaggccuccauug

SEQ ID NO: 1659782 - RNA, 19 nt, Homo sapiens
  misc_RNA (1)...(19): siRNA sense strand
uggaguacauggcagagaa

SEQ ID NO: 1659783 - RNA, 19 nt, Homo sapiens
  misc_RNA (1)...(19): siRNA sense strand
agaaggugcuggaguacau

SEQ ID NO: 1659784 - RNA, 19 nt, Homo sapiens
  misc_RNA (1)...(19): siRNA sense strand
ggaccuacuacgaguguga

SEQ ID NO: 1659785 - RNA, 19 nt, Homo sapiens
  misc_RNA (1)...(19): siRNA sense strand
gaaggcagugaacaaagau

SEQ ID NO: 1659786 - RNA, 19 nt, Homo sapiens
  misc_RNA (1)...(19): siRNA sense strand
gcuucucuccgaucucuuu

SEQ ID NO: 1659787 - RNA, 19 nt, Homo sapiens
  misc_RNA (1)...(19): siRNA sense strand
caaccucuuccgccagauu

SEQ ID NO: 1659788 - RNA, 19 nt, Homo sapiens
  misc_RNA (1)...(19): siRNA sense strand
cagcuucucuccgaucucu

SEQ ID NO: 1659789 - RNA, 19 nt, Homo sapiens
  misc_RNA (1)...(19): siRNA sense strand
caaagauagccuugaguac

SEQ ID NO: 1659790 - RNA, 19 nt, Homo sapiens
  misc_RNA (1)...(19): siRNA sense strand
gccagcagccacucgaguu

SEQ ID NO: 1659791 - RNA, 19 nt, Homo sapiens
  misc_RNA (1)...(19): siRNA sense strand
gcaugaggccuccauugac

SEQ ID NO: 1659792 - RNA, 19 nt, Homo sapiens
  misc_RNA (1)...(19): siRNA sense strand
gcuacaauccccugcagua

SEQ ID NO: 1659793 - RNA, 19 nt, Homo sapiens
  misc_RNA (1)...(19): siRNA sense strand
gcgcaagagccgagacaag

SEQ ID NO: 1659794 - RNA, 19 nt, Homo sapiens
  misc_RNA (1)...(19): siRNA sense strand
gcagaaaguugaacagaac

SEQ ID NO: 1659795 - RNA, 19 nt, Homo sapiens
  misc_RNA (1)...(19): siRNA sense strand
gguagucucugcuaguaau

SEQ ID NO: 1659796 - RNA, 19 nt, Homo sapiens
  misc_RNA (1)...(19): siRNA sense strand
cagguagucucugcuagua

SEQ ID NO: 1659797 - RNA, 19 nt, Homo sapiens
  misc_RNA (1)...(19): siRNA sense strand
acagagggauuucggaaug

SEQ ID NO: 1659798 - RNA, 19 nt, Homo sapiens
  misc_RNA (1)...(19): siRNA sense strand
gcacagacagcaggcauag

SEQ ID NO: 1659799 - RNA, 19 nt, Homo sapiens
  misc_RNA (1)...(19): siRNA sense strand
cauccgaguuguggugaaa

SEQ ID NO: 1659800 - RNA, 19 nt, Homo sapiens
  misc_RNA (1)...(19): siRNA sense strand
agcagaaaguugaacagaa

SEQ ID NO: 1659801 - RNA, 19 nt, Homo sapiens
  misc_RNA (1)...(19): siRNA sense strand
gcggcgagagcuaaacaaa

SEQ ID NO: 1659802 - RNA, 19 nt, Homo sapiens
  misc_RNA (1)...(19): siRNA sense strand
gccuggaagugaucucaau

SEQ ID NO: 1659803 - RNA, 19 nt, Homo sapiens
  misc_RNA (1)...(19): siRNA sense strand
ggcgagagcuaaacaaaag

SEQ ID NO: 1659804 - RNA, 19 nt, Homo sapiens
  misc_RNA (1)...(19): siRNA sense strand
cggccaagcagaaaguuga

SEQ ID NO: 1659805 - RNA, 19 nt, Homo sapiens
  misc_RNA (1)...(19): siRNA sense strand
gauuucggaaugccaagaa

SEQ ID NO: 1659806 - RNA, 19 nt, Homo sapiens
  misc_RNA (1)...(19): siRNA sense strand
ccaagcagaaaguugaaca

SEQ ID NO: 1659807 - RNA, 19 nt, Homo sapiens
  misc_RNA (1)...(19): siRNA sense strand
gccaugcacggacugauca

SEQ ID NO: 1659808 - RNA, 19 nt, Homo sapiens
  misc_RNA (1)...(19): siRNA sense strand
gcagaaaguugaacagaac

SEQ ID NO: 1659809 - RNA, 19 nt, Homo sapiens
  misc_RNA (1)...(19): siRNA sense strand
gguagucucugcuaguaau

SEQ ID NO: 1659810 - RNA, 19 nt, Homo sapiens
  misc_RNA (1)...(19): siRNA sense strand
cagguagucucugcuagua

SEQ ID NO: 1659811 - RNA, 19 nt, Homo sapiens
  misc_RNA (1)...(19): siRNA sense strand
acagagggauuucggaaug

SEQ ID NO: 1659812 - RNA, 19 nt, Homo sapiens
  misc_RNA (1)...(19): siRNA sense strand
gcacagacagcaggcauag

SEQ ID NO: 1659813 - RNA, 19 nt, Homo sapiens
  misc_RNA (1)...(19): siRNA sense strand
cauccgaguuguggugaaa

SEQ ID NO: 1659814 - RNA, 19 nt, Homo sapiens
  misc_RNA (1)...(19): siRNA sense strand
agcagaaaguugaacagaa

SEQ ID NO: 1659815 - RNA, 19 nt, Homo sapiens
  misc_RNA (1)...(19): siRNA sense strand
gcggcgagagcuaaacaaa

SEQ ID NO: 1659816 - RNA, 19 nt, Homo sapiens
  misc_RNA (1)...(19): siRNA sense strand
gccuggaagugaucucaau

SEQ ID NO: 1659817 - RNA, 19 nt, Homo sapiens
  misc_RNA (1)...(19): siRNA sense strand
ggcgagagcuaaacaaaag

SEQ ID NO: 1659818 - RNA, 19 nt, Homo sapiens
  misc_RNA (1)...(19): siRNA sense strand
cggccaagcagaaaguuga

SEQ ID NO: 1659819 - RNA, 19 nt, Homo sapiens
  misc_RNA (1)...(19): siRNA sense strand
gauuucggaaugccaagaa

SEQ ID NO: 1659820 - RNA, 19 nt, Homo sapiens
  misc_RNA (1)...(19): siRNA sense strand
ccaagcagaaaguugaaca

SEQ ID NO: 1659821 - RNA, 19 nt, Homo sapiens
  misc_RNA (1)...(19): siRNA sense strand
gccaugcacggacugauca

SEQ ID NO: 1659822 - RNA, 19 nt, Homo sapiens
  misc_RNA (1)...(19): siRNA sense strand
gaacaaguccucauugaaa

SEQ ID NO: 1659823 - RNA, 19 nt, Homo sapiens
  misc_RNA (1)...(19): siRNA sense strand
gaagccagauaccuuaaua

SEQ ID NO: 1659824 - RNA, 19 nt, Homo sapiens
  misc_RNA (1)...(19): siRNA sense strand
ugacaaaucuucuuaagga

SEQ ID NO: 1659825 - RNA, 19 nt, Homo sapiens
  misc_RNA (1)...(19): siRNA sense strand
cgacagcacucaaauuaaa

SEQ ID NO: 1659826 - RNA, 19 nt, Homo sapiens
  misc_RNA (1)...(19): siRNA sense strand
gagaagauuugauggauga

SEQ ID NO: 1659827 - RNA, 19 nt, Homo sapiens
  misc_RNA (1)...(19): siRNA sense strand
gcaaagggcccuacguuaa

SEQ ID NO: 1659828 - RNA, 19 nt, Homo sapiens
  misc_RNA (1)...(19): siRNA sense strand
gcaaagugcugaauggaau

SEQ ID NO: 1659829 - RNA, 19 nt, Homo sapiens
  misc_RNA (1)...(19): siRNA sense strand
gcauugacauucuaauuga

SEQ ID NO: 1659830 - RNA, 19 nt, Homo sapiens
  misc_RNA (1)...(19): siRNA sense strand
gcucuacacucauguuuau

SEQ ID NO: 1659831 - RNA, 19 nt, Homo sapiens
  misc_RNA (1)...(19): siRNA sense strand
ggacgcauguauaaucuug

SEQ ID NO: 1659832 - RNA, 19 nt, Homo sapiens
  misc_RNA (1)...(19): siRNA sense strand
ccagauauauggagcucua

SEQ ID NO: 1659833 - RNA, 19 nt, Homo sapiens
  misc_RNA (1)...(19): siRNA sense strand
caacgaagaguucagguuu

SEQ ID NO: 1659834 - RNA, 19 nt, Homo sapiens
  misc_RNA (1)...(19): siRNA sense strand
agacacacauucauaauca

SEQ ID NO: 1659835 - RNA, 19 nt, Homo sapiens
  misc_RNA (1)...(19): siRNA sense strand
ccagcagucuuguacauuu

SEQ ID NO: 1659836 - RNA, 19 nt, Homo sapiens
  misc_RNA (1)...(19): siRNA sense strand
gaguacaccucuaaacuuc

SEQ ID NO: 1659837 - RNA, 19 nt, Homo sapiens
  misc_RNA (1)...(19): siRNA sense strand
ggaugagaguguacugaaa

SEQ ID NO: 1659838 - RNA, 19 nt, Homo sapiens
  misc_RNA (1)...(19): siRNA sense strand
acaaagacguauuucagaa

SEQ ID NO: 1659839 - RNA, 19 nt, Homo sapiens
  misc_RNA (1)...(19): siRNA sense strand
ugaggaagguucugaaaca

SEQ ID NO: 1659840 - RNA, 19 nt, Homo sapiens
  misc_RNA (1)...(19): siRNA sense strand
gcaaggaaaugugaacaag

SEQ ID NO: 1659841 - RNA, 19 nt, Homo sapiens
  misc_RNA (1)...(19): siRNA sense strand
gaaguucuaugcgaagaug

SEQ ID NO: 1659842 - RNA, 19 nt, Homo sapiens
  misc_RNA (1)...(19): siRNA sense strand
gugaacaaguccucauuga

SEQ ID NO: 1659843 - RNA, 19 nt, Homo sapiens
  misc_RNA (1)...(19): siRNA sense strand
gaaauucuacacucaacaa

SEQ ID NO: 1659844 - RNA, 19 nt, Homo sapiens
  misc_RNA (1)...(19): siRNA sense strand
gaagaccgcaaacuacuga

SEQ ID NO: 1659845 - RNA, 19 nt, Homo sapiens
  misc_RNA (1)...(19): siRNA sense strand
gguuauaucaguugucuaa

SEQ ID NO: 1659846 - RNA, 19 nt, Homo sapiens
  misc_RNA (1)...(19): siRNA sense strand
agacuuggauuucagcauu

SEQ ID NO: 1659847 - RNA, 19 nt, Homo sapiens
  misc_RNA (1)...(19): siRNA sense strand
ccagagagaguacugaauu

SEQ ID NO: 1659848 - RNA, 19 nt, Homo sapiens
  misc_RNA (1)...(19): siRNA sense strand
guaacuaacugcuucaaaa

SEQ ID NO: 1659849 - RNA, 19 nt, Homo sapiens
  misc_RNA (1)...(19): siRNA sense strand
aaggagaauugguaacuaa

SEQ ID NO: 1659850 - RNA, 19 nt, Homo sapiens
  misc_RNA (1)...(19): siRNA sense strand
caacaaugacgcuggcuuu

SEQ ID NO: 1659851 - RNA, 19 nt, Homo sapiens
  misc_RNA (1)...(19): siRNA sense strand
caagaugaauuagcaagga

SEQ ID NO: 1659852 - RNA, 19 nt, Homo sapiens
  misc_RNA (1)...(19): siRNA sense strand
caaugacgcuggcuuugug

SEQ ID NO: 1659853 - RNA, 19 nt, Homo sapiens
  misc_RNA (1)...(19): siRNA sense strand
ccagauggcuauccugcuu

SEQ ID NO: 1659854 - RNA, 19 nt, Homo sapiens
  misc_RNA (1)...(19): siRNA sense strand
agagaguacugaauucuug

SEQ ID NO: 1659855 - RNA, 19 nt, Homo sapiens
  misc_RNA (1)...(19): siRNA sense strand
cgaggaagaccgcaaacua

SEQ ID NO: 1659856 - RNA, 19 nt, Homo sapiens
  misc_RNA (1)...(19): siRNA sense strand
gagaauugguaacuaacug

SEQ ID NO: 1659857 - RNA, 19 nt, Homo sapiens
  misc_RNA (1)...(19): siRNA sense strand
agacagugcuugauguuca

SEQ ID NO: 1659858 - RNA, 19 nt, Homo sapiens
  misc_RNA (1)...(19): siRNA sense strand
gaacaagaaaccacacaca

SEQ ID NO: 1659859 - RNA, 19 nt, Homo sapiens
  misc_RNA (1)...(19): siRNA sense strand
ggaaaggaauggugaaacc

SEQ ID NO: 1659860 - RNA, 19 nt, Homo sapiens
  misc_RNA (1)...(19): siRNA sense strand
cagcaugaucuccaaguua

SEQ ID NO: 1659861 - RNA, 19 nt, Homo sapiens
  misc_RNA (1)...(19): siRNA sense strand
cauagaagacaaagacgua

SEQ ID NO: 1659862 - RNA, 19 nt, Homo sapiens
  misc_RNA (1)...(19): siRNA sense strand
gaagacacacucaaucaag

SEQ ID NO: 1659863 - RNA, 19 nt, Homo sapiens
  misc_RNA (1)...(19): siRNA sense strand
ggugaaaccaucaauacaa

SEQ ID NO: 1659864 - RNA, 19 nt, Homo sapiens
  misc_RNA (1)...(19): siRNA sense strand
uaucagcgauucacagcuu

SEQ ID NO: 1659865 - RNA, 19 nt, Homo sapiens
  misc_RNA (1)...(19): siRNA sense strand
ucaaguacauagaagacaa

SEQ ID NO: 1659866 - RNA, 19 nt, Homo sapiens
  misc_RNA (1)...(19): siRNA sense strand
aagcacacaagaugaauua

SEQ ID NO: 1659867 - RNA, 19 nt, Homo sapiens
  misc_RNA (1)...(19): siRNA sense strand
caugaaagcacacaagaug

SEQ ID NO: 1659868 - RNA, 19 nt, Homo sapiens
  misc_RNA (1)...(19): siRNA sense strand
guacagacagugcuugaug

SEQ ID NO: 1659869 - RNA, 19 nt, Homo sapiens
  misc_RNA (1)...(19): siRNA sense strand
gacaaagacguauuucaga

SEQ ID NO: 1659870 - RNA, 19 nt, Homo sapiens
  misc_RNA (1)...(19): siRNA sense strand
agcaugaucuccaaguuaa

SEQ ID NO: 1659871 - RNA, 19 nt, Homo sapiens
  misc_RNA (1)...(19): siRNA sense strand
ucaguugucuaaaggagaa

SEQ ID NO: 1659872 - RNA, 19 nt, Homo sapiens
  misc_RNA (1)...(19): siRNA sense strand
uaaaugaccccaaaaugua

SEQ ID NO: 1659873 - RNA, 19 nt, Homo sapiens
  misc_RNA (1)...(19): siRNA sense strand
acaagaaaccacacacaaa

SEQ ID NO: 1659874 - RNA, 19 nt, Homo sapiens
  misc_RNA (1)...(19): siRNA sense strand
aaaggagaauugguaacua

SEQ ID NO: 1659875 - RNA, 19 nt, Homo sapiens
  misc_RNA (1)...(19): siRNA sense strand
gcacuugacaaacucagaa

SEQ ID NO: 1659876 - RNA, 19 nt, Homo sapiens
  misc_RNA (1)...(19): siRNA sense strand
cgaagaugcucgccaagag

SEQ ID NO: 1659877 - RNA, 19 nt, Homo sapiens
  misc_RNA (1)...(19): siRNA sense strand
guacauagaagacaaagac

SEQ ID NO: 1659878 - RNA, 19 nt, Homo sapiens
  misc_RNA (1)...(19): siRNA sense strand
ggauggagaagauuugaug

SEQ ID NO: 1659879 - RNA, 19 nt, Homo sapiens
  misc_RNA (1)...(19): siRNA sense strand
ggacaccuacaguuacuug

SEQ ID NO: 1659880 - RNA, 19 nt, Homo sapiens
  misc_RNA (1)...(19): siRNA sense strand
gaacagugcaagugacgau

SEQ ID NO: 1659881 - RNA, 19 nt, Homo sapiens
  misc_RNA (1)...(19): siRNA sense strand
ccacacagaauuucagaau

SEQ ID NO: 1659882 - RNA, 19 nt, Homo sapiens
  misc_RNA (1)...(19): siRNA sense strand
guggaguuguacagucuua

SEQ ID NO: 1659883 - RNA, 19 nt, Homo sapiens
  misc_RNA (1)...(19): siRNA sense strand
gaaaccaucaauacaagau

SEQ ID NO: 1659884 - RNA, 19 nt, Homo sapiens
  misc_RNA (1)...(19): siRNA sense strand
augggaagauuaucgauuu

SEQ ID NO: 1659885 - RNA, 19 nt, Homo sapiens
  misc_RNA (1)...(19): siRNA sense strand
gaugagaguguacugaaau

SEQ ID NO: 1659886 - RNA, 19 nt, Homo sapiens
  misc_RNA (1)...(19): siRNA sense strand
gaaaauugacgugguuaua

SEQ ID NO: 1659887 - RNA, 19 nt, Homo sapiens
  misc_RNA (1)...(19): siRNA sense strand
auauggagcucuacacuca

SEQ ID NO: 1659888 - RNA, 19 nt, Homo sapiens
  misc_RNA (1)...(19): siRNA sense strand
gauuugggacgcauguaua

SEQ ID NO: 1659889 - RNA, 19 nt, Homo sapiens
  misc_RNA (1)...(19): siRNA sense strand
ugaaagcacacaagaugaa

SEQ ID NO: 1659890 - RNA, 19 nt, Homo sapiens
  misc_RNA (1)...(19): siRNA sense strand
aacgaagaguucagguuua

SEQ ID NO: 1659891 - RNA, 19 nt, Homo sapiens
  misc_RNA (1)...(19): siRNA sense strand
uggaggagcucaguuuguu

SEQ ID NO: 1659892 - RNA, 19 nt, Homo sapiens
  misc_RNA (1)...(19): siRNA sense strand
gugaaaccaucaauacaag

SEQ ID NO: 1659893 - RNA, 19 nt, Homo sapiens
  misc_RNA (1)...(19): siRNA sense strand
agaguguacugaaauucua

SEQ ID NO: 1659894 - RNA, 19 nt, Homo sapiens
  misc_RNA (1)...(19): siRNA sense strand
gugccuaccucaauagaca

SEQ ID NO: 1659895 - RNA, 19 nt, Homo sapiens
  misc_RNA (1)...(19): siRNA sense strand
uugaugagguggaauugaa

SEQ ID NO: 1659896 - RNA, 19 nt, Homo sapiens
  misc_RNA (1)...(19): siRNA sense strand
ugacgugguuauaucaguu

SEQ ID NO: 1659897 - RNA, 19 nt, Homo sapiens
  misc_RNA (1)...(19): siRNA sense strand
uuuauuggaugcugacaaa

SEQ ID NO: 1659898 - RNA, 19 nt, Homo sapiens
  misc_RNA (1)...(19): siRNA sense strand
cagagagaguacugaauuc

SEQ ID NO: 1659899 - RNA, 19 nt, Homo sapiens
  misc_RNA (1)...(19): siRNA sense strand
cguuaacaguguauaaaga

SEQ ID NO: 1659900 - RNA, 19 nt, Homo sapiens
  misc_RNA (1)...(19): siRNA sense strand
gaugaggaagguucugaaa

SEQ ID NO: 1659901 - RNA, 19 nt, Homo sapiens
  misc_RNA (1)...(19): siRNA sense strand
gaacagaagcaggaacaag

SEQ ID NO: 1659902 - RNA, 19 nt, Homo sapiens
  misc_RNA (1)...(19): siRNA sense strand
gcacucaaauuaaaaugga

SEQ ID NO: 1659903 - RNA, 19 nt, Homo sapiens
  misc_RNA (1)...(19): siRNA sense strand
aaauugacgugguuauauc

SEQ ID NO: 1659904 - RNA, 19 nt, Homo sapiens
  misc_RNA (1)...(19): siRNA sense strand
gaacuagaagacacacuca

SEQ ID NO: 1659905 - RNA, 19 nt, Homo sapiens
  misc_RNA (1)...(19): siRNA sense strand
gcccaaucauccaguaaau

SEQ ID NO: 1659906 - RNA, 19 nt, Homo sapiens
  misc_RNA (1)...(19): siRNA sense strand
uguggucgcuucauaaaca

SEQ ID NO: 1659907 - RNA, 19 nt, Homo sapiens
  misc_RNA (1)...(19): siRNA sense strand
cacacaagaugaauuagca

SEQ ID NO: 1659908 - RNA, 19 nt, Homo sapiens
  misc_RNA (1)...(19): siRNA sense strand
gaaaaggacaccuacaguu

SEQ ID NO: 1659909 - RNA, 19 nt, Homo sapiens
  misc_RNA (1)...(19): siRNA sense strand
agaagacaaagacguauuu

SEQ ID NO: 1659910 - RNA, 19 nt, Homo sapiens
  misc_RNA (1)...(19): siRNA sense strand
cugaguugcuggcucgaua

SEQ ID NO: 1659911 - RNA, 19 nt, Homo sapiens
  misc_RNA (1)...(19): siRNA sense strand
ggagacacacauucauaau

SEQ ID NO: 1659912 - RNA, 19 nt, Homo sapiens
  misc_RNA (1)...(19): siRNA sense strand
aaggaaaugugaacaaguc

SEQ ID NO: 1659913 - RNA, 19 nt, Homo sapiens
  misc_RNA (1)...(19): siRNA sense strand
aaaaggacaccuacaguua

SEQ ID NO: 1659914 - RNA, 19 nt, Homo sapiens
  misc_RNA (1)...(19): siRNA sense strand
cagcagucuuguacauuug

SEQ ID NO: 1659915 - RNA, 19 nt, Homo sapiens
  misc_RNA (1)...(19): siRNA sense strand
cgaguacaccucuaaacuu

SEQ ID NO: 1659916 - RNA, 19 nt, Homo sapiens
  misc_RNA (1)...(19): siRNA sense strand
ugaugguugucuucaagua

SEQ ID NO: 1659917 - RNA, 19 nt, Homo sapiens
  misc_RNA (1)...(19): siRNA sense strand
acgcauguauaaucuugua

SEQ ID NO: 1659918 - RNA, 19 nt, Homo sapiens
  misc_RNA (1)...(19): siRNA sense strand
caacgcgguuaccaagaug

SEQ ID NO: 1659919 - RNA, 19 nt, Homo sapiens
  misc_RNA (1)...(19): siRNA sense strand
gcgcaaguuuuacagauuu

SEQ ID NO: 1659920 - RNA, 19 nt, Homo sapiens
  misc_RNA (1)...(19): siRNA sense strand
uggcuauccugcuucagua

SEQ ID NO: 1659921 - RNA, 19 nt, Homo sapiens
  misc_RNA (1)...(19): siRNA sense strand
ccagcaugaucuccaaguu

SEQ ID NO: 1659922 - RNA, 19 nt, Homo sapiens
  misc_RNA (1)...(19): siRNA sense strand
cggcugaacugcucaucau

SEQ ID NO: 1659923 - RNA, 19 nt, Homo sapiens
  misc_RNA (1)...(19): siRNA sense strand
gguacucccugcagaagcu

SEQ ID NO: 1659924 - RNA, 19 nt, Homo sapiens
  misc_RNA (1)...(19): siRNA sense strand
ugcagaagcuggcauacac

SEQ ID NO: 1659925 - RNA, 19 nt, Homo sapiens
  misc_RNA (1)...(19): siRNA sense strand
caucaucggcugguacauc

SEQ ID NO: 1659926 - RNA, 19 nt, Homo sapiens
  misc_RNA (1)...(19): siRNA sense strand
cggcugaacugcucaucau

SEQ ID NO: 1659927 - RNA, 19 nt, Homo sapiens
  misc_RNA (1)...(19): siRNA sense strand
gguacucccugcagaagcu

SEQ ID NO: 1659928 - RNA, 19 nt, Homo sapiens
  misc_RNA (1)...(19): siRNA sense strand
ugcagaagcuggcauacac

SEQ ID NO: 1659929 - RNA, 19 nt, Homo sapiens
  misc_RNA (1)...(19): siRNA sense strand
caucaucggcugguacauc

SEQ ID NO: 1659930 - RNA, 19 nt, Homo sapiens
  misc_RNA (1)...(19): siRNA sense strand
cggcugaacugcucaucau

SEQ ID NO: 1659931 - RNA, 19 nt, Homo sapiens
  misc_RNA (1)...(19): siRNA sense strand
gguacucccugcagaagcu

SEQ ID NO: 1659932 - RNA, 19 nt, Homo sapiens
  misc_RNA (1)...(19): siRNA sense strand
ugcagaagcuggcauacac

SEQ ID NO: 1659933 - RNA, 19 nt, Homo sapiens
  misc_RNA (1)...(19): siRNA sense strand
caucaucggcugguacauc

SEQ ID NO: 1659934 - RNA, 19 nt, Homo sapiens
  misc_RNA (1)...(19): siRNA sense strand
cggcugaacugcucaucau

SEQ ID NO: 1659935 - RNA, 19 nt, Homo sapiens
  misc_RNA (1)...(19): siRNA sense strand
gguacucccugcagaagcu

SEQ ID NO: 1659936 - RNA, 19 nt, Homo sapiens
  misc_RNA (1)...(19): siRNA sense strand
ugcagaagcuggcauacac

SEQ ID NO: 1659937 - RNA, 19 nt, Homo sapiens
  misc_RNA (1)...(19): siRNA sense strand
caucaucggcugguacauc

SEQ ID NO: 1659938 - RNA, 19 nt, Homo sapiens
  misc_RNA (1)...(19): siRNA sense strand
gcacagagaugaagaaagu

SEQ ID NO: 1659939 - RNA, 19 nt, Homo sapiens
  misc_RNA (1)...(19): siRNA sense strand
gaaaguggcucgucagcuu

SEQ ID NO: 1659940 - RNA, 19 nt, Homo sapiens
  misc_RNA (1)...(19): siRNA sense strand
cauaggcgcuuucagaaua

SEQ ID NO: 1659941 - RNA, 19 nt, Homo sapiens
  misc_RNA (1)...(19): siRNA sense strand
gcagugaccuagaagcauu

SEQ ID NO: 1659942 - RNA, 19 nt, Homo sapiens
  misc_RNA (1)...(19): siRNA sense strand
caaguggagugcagaagaa

SEQ ID NO: 1659943 - RNA, 19 nt, Homo sapiens
  misc_RNA (1)...(19): siRNA sense strand
aaacauaggcgcuuucaga

SEQ ID NO: 1659944 - RNA, 19 nt, Homo sapiens
  misc_RNA (1)...(19): siRNA sense strand
gagcaaacauaggcgcuuu

SEQ ID NO: 1659945 - RNA, 19 nt, Homo sapiens
  misc_RNA (1)...(19): siRNA sense strand
caacucagguagaacuaga

SEQ ID NO: 1659946 - RNA, 19 nt, Homo sapiens
  misc_RNA (1)...(19): siRNA sense strand
agaaugugcuugucaaaca

SEQ ID NO: 1659947 - RNA, 19 nt, Homo sapiens
  misc_RNA (1)...(19): siRNA sense strand
aagacucucugccaaagua

SEQ ID NO: 1659948 - RNA, 19 nt, Homo sapiens
  misc_RNA (1)...(19): siRNA sense strand
gaaaaucuguacugagaga

SEQ ID NO: 1659949 - RNA, 19 nt, Homo sapiens
  misc_RNA (1)...(19): siRNA sense strand
gaagaaugugcuugucaaa

SEQ ID NO: 1659950 - RNA, 19 nt, Homo sapiens
  misc_RNA (1)...(19): siRNA sense strand
ugaagaaugugcuugucaa

SEQ ID NO: 1659951 - RNA, 19 nt, Homo sapiens
  misc_RNA (1)...(19): siRNA sense strand
gaacaaguggagugcagaa

SEQ ID NO: 1659952 - RNA, 19 nt, Homo sapiens
  misc_RNA (1)...(19): siRNA sense strand
gaacuagaccagcuaaagg

SEQ ID NO: 1659953 - RNA, 19 nt, Homo sapiens
  misc_RNA (1)...(19): siRNA sense strand
gcaaaggcacagagaugaa

SEQ ID NO: 1659954 - RNA, 19 nt, Homo sapiens
  misc_RNA (1)...(19): siRNA sense strand
gaugggagcucggaauguc

SEQ ID NO: 1659955 - RNA, 19 nt, Homo sapiens
  misc_RNA (1)...(19): siRNA sense strand
ggaacuacuugcccauucu

SEQ ID NO: 1659956 - RNA, 19 nt, Homo sapiens
  misc_RNA (1)...(19): siRNA sense strand
agacaaggacucuggcuuu

SEQ ID NO: 1659957 - RNA, 19 nt, Homo sapiens
  misc_RNA (1)...(19): siRNA sense strand
ccacuguccgcuaauuaua

SEQ ID NO: 1659958 - RNA, 19 nt, Homo sapiens
  misc_RNA (1)...(19): siRNA sense strand
ggacaugcugagcgccuua

SEQ ID NO: 1659959 - RNA, 19 nt, Homo sapiens
  misc_RNA (1)...(19): siRNA sense strand
ucaggcaacucagguagaa

SEQ ID NO: 1659960 - RNA, 19 nt, Homo sapiens
  misc_RNA (1)...(19): siRNA sense strand
gagcaacucuccccuuuca

SEQ ID NO: 1659961 - RNA, 19 nt, Homo sapiens
  misc_RNA (1)...(19): siRNA sense strand
gggccuagcuugucuucca

SEQ ID NO: 1659962 - RNA, 19 nt, Homo sapiens
  misc_RNA (1)...(19): siRNA sense strand
gauggcugcugcugaguca

SEQ ID NO: 1659963 - RNA, 19 nt, Homo sapiens
  misc_RNA (1)...(19): siRNA sense strand
gaaucaggcaacucaggua

SEQ ID NO: 1659964 - RNA, 19 nt, Homo sapiens
  misc_RNA (1)...(19): siRNA sense strand
cuaauuauagcucaccuuu

SEQ ID NO: 1659965 - RNA, 19 nt, Homo sapiens
  misc_RNA (1)...(19): siRNA sense strand
gcacagccacagcucuuau

SEQ ID NO: 1659966 - RNA, 19 nt, Homo sapiens
  misc_RNA (1)...(19): siRNA sense strand
aagaaaaucuguacugaga

SEQ ID NO: 1659967 - RNA, 19 nt, Homo sapiens
  misc_RNA (1)...(19): siRNA sense strand
ucugaauucuuacaccaaa

SEQ ID NO: 1659968 - RNA, 19 nt, Homo sapiens
  misc_RNA (1)...(19): siRNA sense strand
gcagucacguggcuaaagc

SEQ ID NO: 1659969 - RNA, 19 nt, Homo sapiens
  misc_RNA (1)...(19): siRNA sense strand
ccgcagcccagauaucuuu

SEQ ID NO: 1659970 - RNA, 19 nt, Homo sapiens
  misc_RNA (1)...(19): siRNA sense strand
gaaugugcuugucaaacag

SEQ ID NO: 1659971 - RNA, 19 nt, Homo sapiens
  misc_RNA (1)...(19): siRNA sense strand
cuacauaaaucugguuugc

SEQ ID NO: 1659972 - RNA, 19 nt, Homo sapiens
  misc_RNA (1)...(19): siRNA sense strand
gcuaaagcucccagucuga

SEQ ID NO: 1659973 - RNA, 19 nt, Homo sapiens
  misc_RNA (1)...(19): siRNA sense strand
ccacccagcgccaaacuug

SEQ ID NO: 1659974 - RNA, 19 nt, Homo sapiens
  misc_RNA (1)...(19): siRNA sense strand
ucaccacuguccgcuaauu

SEQ ID NO: 1659975 - RNA, 19 nt, Homo sapiens
  misc_RNA (1)...(19): siRNA sense strand
uuucaccacuguccgcuaa

SEQ ID NO: 1659976 - RNA, 19 nt, Homo sapiens
  misc_RNA (1)...(19): siRNA sense strand
gcaaacauaggcgcuuuca

SEQ ID NO: 1659977 - RNA, 19 nt, Homo sapiens
  misc_RNA (1)...(19): siRNA sense strand
uacaggcagugaccuagaa

SEQ ID NO: 1659978 - RNA, 19 nt, Homo sapiens
  misc_RNA (1)...(19): siRNA sense strand
caagcugcaggcaucuuua

SEQ ID NO: 1659979 - RNA, 19 nt, Homo sapiens
  misc_RNA (1)...(19): siRNA sense strand
ccaagcugcaggcaucuuu

SEQ ID NO: 1659980 - RNA, 19 nt, Homo sapiens
  misc_RNA (1)...(19): siRNA sense strand
guccagcccuccuuugaag

SEQ ID NO: 1659981 - RNA, 19 nt, Homo sapiens
  misc_RNA (1)...(19): siRNA sense strand
gcccagauaucuuuucaga

SEQ ID NO: 1659982 - RNA, 19 nt, Homo sapiens
  misc_RNA (1)...(19): siRNA sense strand
caaggacucuggcuuuuca

SEQ ID NO: 1659983 - RNA, 19 nt, Homo sapiens
  misc_RNA (1)...(19): siRNA sense strand
ggcaaaggcacagagauga

SEQ ID NO: 1659984 - RNA, 19 nt, Homo sapiens
  misc_RNA (1)...(19): siRNA sense strand
uaauacaggcagugaccua

SEQ ID NO: 1659985 - RNA, 19 nt, Homo sapiens
  misc_RNA (1)...(19): siRNA sense strand
guagaacuagaccagcuaa

SEQ ID NO: 1659986 - RNA, 19 nt, Homo sapiens
  misc_RNA (1)...(19): siRNA sense strand
caccacuguccgcuaauua

SEQ ID NO: 1659987 - RNA, 19 nt, Homo sapiens
  misc_RNA (1)...(19): siRNA sense strand
gacaaggacucuggcuuuu

SEQ ID NO: 1659988 - RNA, 19 nt, Homo sapiens
  misc_RNA (1)...(19): siRNA sense strand
cagcggcagagcaaacaua

SEQ ID NO: 1659989 - RNA, 19 nt, Homo sapiens
  misc_RNA (1)...(19): siRNA sense strand
caaaauagccccacaucca

SEQ ID NO: 1659990 - RNA, 19 nt, Homo sapiens
  misc_RNA (1)...(19): siRNA sense strand
agaagacucucugccaaag

SEQ ID NO: 1659991 - RNA, 19 nt, Homo sapiens
  misc_RNA (1)...(19): siRNA sense strand
gguagaacuagaccagcua

SEQ ID NO: 1659992 - RNA, 19 nt, Homo sapiens
  misc_RNA (1)...(19): siRNA sense strand
gaacuacuugcccauucug

SEQ ID NO: 1659993 - RNA, 19 nt, Homo sapiens
  misc_RNA (1)...(19): siRNA sense strand
gaauacccuaguaguccua

SEQ ID NO: 1659994 - RNA, 19 nt, Homo sapiens
  misc_RNA (1)...(19): siRNA sense strand
ccuguaccaucuccuguca

SEQ ID NO: 1659995 - RNA, 19 nt, Homo sapiens
  misc_RNA (1)...(19): siRNA sense strand
agaagaaaaucuguacuga

SEQ ID NO: 1659996 - RNA, 19 nt, Homo sapiens
  misc_RNA (1)...(19): siRNA sense strand
acaaguggagugcagaaga

SEQ ID NO: 1659997 - RNA, 19 nt, Homo sapiens
  misc_RNA (1)...(19): siRNA sense strand
cagcacagccacagcucuu

SEQ ID NO: 1659998 - RNA, 19 nt, Homo sapiens
  misc_RNA (1)...(19): siRNA sense strand
cugaucacccagccauaua

SEQ ID NO: 1659999 - RNA, 19 nt, Homo sapiens
  misc_RNA (1)...(19): siRNA sense strand
gcugcaggcaucuuuaaca

SEQ ID NO: 1660000 - RNA, 19 nt, Homo sapiens
  misc_RNA (1)...(19): siRNA sense strand
gaagacucucugccaaagu

SEQ ID NO: 1660001 - RNA, 19 nt, Homo sapiens
  misc_RNA (1)...(19): siRNA sense strand
ugcuggagaucacuuugaa

SEQ ID NO: 1660002 - RNA, 19 nt, Homo sapiens
  misc_RNA (1)...(19): siRNA sense strand
ucagaauacccuaguaguc

SEQ ID NO: 1660003 - RNA, 19 nt, Homo sapiens
  misc_RNA (1)...(19): siRNA sense strand
caaacuugccgaggacuca

SEQ ID NO: 1660004 - RNA, 19 nt, Homo sapiens
  misc_RNA (1)...(19): siRNA sense strand
aaacagggcagcagcucau

SEQ ID NO: 1660005 - RNA, 19 nt, Homo sapiens
  misc_RNA (1)...(19): siRNA sense strand
gucagaaucaggcaacuca

SEQ ID NO: 1660006 - RNA, 19 nt, Homo sapiens
  misc_RNA (1)...(19): siRNA sense strand
cagagcagcggcagagcaa

SEQ ID NO: 1660007 - RNA, 19 nt, Homo sapiens
  misc_RNA (1)...(19): siRNA sense strand
guaggcaaaggcacagaga

SEQ ID NO: 1660008 - RNA, 19 nt, Homo sapiens
  misc_RNA (1)...(19): siRNA sense strand
ccaguaauacaggcaguga

SEQ ID NO: 1660009 - RNA, 19 nt, Homo sapiens
  misc_RNA (1)...(19): siRNA sense strand
gagcagcggcagagcaaac

SEQ ID NO: 1660010 - RNA, 19 nt, Homo sapiens
  misc_RNA (1)...(19): siRNA sense strand
ccagcagucacguggcuaa

SEQ ID NO: 1660011 - RNA, 19 nt, Homo sapiens
  misc_RNA (1)...(19): siRNA sense strand
caaaggcacagagaugaag

SEQ ID NO: 1660012 - RNA, 19 nt, Homo sapiens
  misc_RNA (1)...(19): siRNA sense strand
uguaccaucuccugucagu

SEQ ID NO: 1660013 - RNA, 19 nt, Homo sapiens
  misc_RNA (1)...(19): siRNA sense strand
aagcugcaggcaucuuuaa

SEQ ID NO: 1660014 - RNA, 19 nt, Homo sapiens
  misc_RNA (1)...(19): siRNA sense strand
cagaugggagcucggaaug

SEQ ID NO: 1660015 - RNA, 19 nt, Homo sapiens
  misc_RNA (1)...(19): siRNA sense strand
aggaacuacuugcccauuc

SEQ ID NO: 1660016 - RNA, 19 nt, Homo sapiens
  misc_RNA (1)...(19): siRNA sense strand
caugaagaaugugcuuguc

SEQ ID NO: 1660017 - RNA, 19 nt, Homo sapiens
  misc_RNA (1)...(19): siRNA sense strand
ggccgaggcagaacuccaa

SEQ ID NO: 1660018 - RNA, 19 nt, Homo sapiens
  misc_RNA (1)...(19): siRNA sense strand
aggcaaaggcacagagaug

SEQ ID NO: 1660019 - RNA, 19 nt, Homo sapiens
  misc_RNA (1)...(19): siRNA sense strand
aacauaggcgcuuucagaa

SEQ ID NO: 1660020 - RNA, 19 nt, Homo sapiens
  misc_RNA (1)...(19): siRNA sense strand
agacuugggccuagcuugu

SEQ ID NO: 1660021 - RNA, 19 nt, Homo sapiens
  misc_RNA (1)...(19): siRNA sense strand
ucauccaccuguaccaucu

SEQ ID NO: 1660022 - RNA, 19 nt, Homo sapiens
  misc_RNA (1)...(19): siRNA sense strand
cagcucuuauuccuucauc

SEQ ID NO: 1660023 - RNA, 19 nt, Homo sapiens
  misc_RNA (1)...(19): siRNA sense strand
ggacaaagauggccacaua

SEQ ID NO: 1660024 - RNA, 19 nt, Homo sapiens
  misc_RNA (1)...(19): siRNA sense strand
gaagacagauggcucauuc

SEQ ID NO: 1660025 - RNA, 19 nt, Homo sapiens
  misc_RNA (1)...(19): siRNA sense strand
ggaguaaacuggcaagaug

SEQ ID NO: 1660026 - RNA, 19 nt, Homo sapiens
  misc_RNA (1)...(19): siRNA sense strand
gaaagcagaguauuaaaga

SEQ ID NO: 1660027 - RNA, 19 nt, Homo sapiens
  misc_RNA (1)...(19): siRNA sense strand
ggcaagauguauaugauaa

SEQ ID NO: 1660028 - RNA, 19 nt, Homo sapiens
  misc_RNA (1)...(19): siRNA sense strand
gacauuaaauuuccucgaa

SEQ ID NO: 1660029 - RNA, 19 nt, Homo sapiens
  misc_RNA (1)...(19): siRNA sense strand
gaaauuaugagacacaguu

SEQ ID NO: 1660030 - RNA, 19 nt, Homo sapiens
  misc_RNA (1)...(19): siRNA sense strand
gaccaaagccaaacacauu

SEQ ID NO: 1660031 - RNA, 19 nt, Homo sapiens
  misc_RNA (1)...(19): siRNA sense strand
gaggagagaaugaauugua

SEQ ID NO: 1660032 - RNA, 19 nt, Homo sapiens
  misc_RNA (1)...(19): siRNA sense strand
acagauggcucauucauag

SEQ ID NO: 1660033 - RNA, 19 nt, Homo sapiens
  misc_RNA (1)...(19): siRNA sense strand
gcaaagaagggaucacaga

SEQ ID NO: 1660034 - RNA, 19 nt, Homo sapiens
  misc_RNA (1)...(19): siRNA sense strand
gaagaggagagaaugaauu

SEQ ID NO: 1660035 - RNA, 19 nt, Homo sapiens
  misc_RNA (1)...(19): siRNA sense strand
ccagagguguuagaagaua

SEQ ID NO: 1660036 - RNA, 19 nt, Homo sapiens
  misc_RNA (1)...(19): siRNA sense strand
gcacacacucuaacugaaa

SEQ ID NO: 1660037 - RNA, 19 nt, Homo sapiens
  misc_RNA (1)...(19): siRNA sense strand
agagaaaccucaagaugug

SEQ ID NO: 1660038 - RNA, 19 nt, Homo sapiens
  misc_RNA (1)...(19): siRNA sense strand
ugagacagauacuagauau

SEQ ID NO: 1660039 - RNA, 19 nt, Homo sapiens
  misc_RNA (1)...(19): siRNA sense strand
uuucagggcucuugauaaa

SEQ ID NO: 1660040 - RNA, 19 nt, Homo sapiens
  misc_RNA (1)...(19): siRNA sense strand
gaaagaagguuggguucag

SEQ ID NO: 1660041 - RNA, 19 nt, Homo sapiens
  misc_RNA (1)...(19): siRNA sense strand
gaaauauuccuuccagaca

SEQ ID NO: 1660042 - RNA, 19 nt, Homo sapiens
  misc_RNA (1)...(19): siRNA sense strand
cgaacacucucuucagaug

SEQ ID NO: 1660043 - RNA, 19 nt, Homo sapiens
  misc_RNA (1)...(19): siRNA sense strand
ccaaagccaaacacauuua

SEQ ID NO: 1660044 - RNA, 19 nt, Homo sapiens
  misc_RNA (1)...(19): siRNA sense strand
gcucauucauaggauauaa

SEQ ID NO: 1660045 - RNA, 19 nt, Homo sapiens
  misc_RNA (1)...(19): siRNA sense strand
gaauuuacagcucagacua

SEQ ID NO: 1660046 - RNA, 19 nt, Homo sapiens
  misc_RNA (1)...(19): siRNA sense strand
guaccgugaucucaaguug

SEQ ID NO: 1660047 - RNA, 19 nt, Homo sapiens
  misc_RNA (1)...(19): siRNA sense strand
gaaagaagucauuauugca

SEQ ID NO: 1660048 - RNA, 19 nt, Homo sapiens
  misc_RNA (1)...(19): siRNA sense strand
agaaagaagucauuauugc

SEQ ID NO: 1660049 - RNA, 19 nt, Homo sapiens
  misc_RNA (1)...(19): siRNA sense strand
gaagaggggagaauauaua

SEQ ID NO: 1660050 - RNA, 19 nt, Homo sapiens
  misc_RNA (1)...(19): siRNA sense strand
caaccaggaccaugagaaa

SEQ ID NO: 1660051 - RNA, 19 nt, Homo sapiens
  misc_RNA (1)...(19): siRNA sense strand
gacagauggcucauucaua

SEQ ID NO: 1660052 - RNA, 19 nt, Homo sapiens
  misc_RNA (1)...(19): siRNA sense strand
gcaagaagaggagagaaug

SEQ ID NO: 1660053 - RNA, 19 nt, Homo sapiens
  misc_RNA (1)...(19): siRNA sense strand
aaagagaaaccucaagaug

SEQ ID NO: 1660054 - RNA, 19 nt, Homo sapiens
  misc_RNA (1)...(19): siRNA sense strand
uaaacuggcaagauguaua

SEQ ID NO: 1660055 - RNA, 19 nt, Homo sapiens
  misc_RNA (1)...(19): siRNA sense strand
gcaaaaugccaguuaauga

SEQ ID NO: 1660056 - RNA, 19 nt, Homo sapiens
  misc_RNA (1)...(19): siRNA sense strand
agaaugaauuguaguccaa

SEQ ID NO: 1660057 - RNA, 19 nt, Homo sapiens
  misc_RNA (1)...(19): siRNA sense strand
acaauaacaccaccugaaa

SEQ ID NO: 1660058 - RNA, 19 nt, Homo sapiens
  misc_RNA (1)...(19): siRNA sense strand
gaacacuagacaucccuuu

SEQ ID NO: 1660059 - RNA, 19 nt, Homo sapiens
  misc_RNA (1)...(19): siRNA sense strand
ggaaaauacuaugcuauga

SEQ ID NO: 1660060 - RNA, 19 nt, Homo sapiens
  misc_RNA (1)...(19): siRNA sense strand
gaauuguaguccaacuuca

SEQ ID NO: 1660061 - RNA, 19 nt, Homo sapiens
  misc_RNA (1)...(19): siRNA sense strand
acaaagauggccacauaaa

SEQ ID NO: 1660062 - RNA, 19 nt, Homo sapiens
  misc_RNA (1)...(19): siRNA sense strand
caagaagaggagagaauga

SEQ ID NO: 1660063 - RNA, 19 nt, Homo sapiens
  misc_RNA (1)...(19): siRNA sense strand
cagagguguuagaagauaa

SEQ ID NO: 1660064 - RNA, 19 nt, Homo sapiens
  misc_RNA (1)...(19): siRNA sense strand
ggaccgcacacguuucuau

SEQ ID NO: 1660065 - RNA, 19 nt, Homo sapiens
  misc_RNA (1)...(19): siRNA sense strand
caagauacuuccuuuugaa

SEQ ID NO: 1660066 - RNA, 19 nt, Homo sapiens
  misc_RNA (1)...(19): siRNA sense strand
uaguccaacuucacaaauu

SEQ ID NO: 1660067 - RNA, 19 nt, Homo sapiens
  misc_RNA (1)...(19): siRNA sense strand
aaauauuccuuccagacaa

SEQ ID NO: 1660068 - RNA, 19 nt, Homo sapiens
  misc_RNA (1)...(19): siRNA sense strand
gauguggauuuaccuuauc

SEQ ID NO: 1660069 - RNA, 19 nt, Homo sapiens
  misc_RNA (1)...(19): siRNA sense strand
gaagguuggguucagaaga

SEQ ID NO: 1660070 - RNA, 19 nt, Homo sapiens
  misc_RNA (1)...(19): siRNA sense strand
ucagggcucuugauaaagg

SEQ ID NO: 1660071 - RNA, 19 nt, Homo sapiens
  misc_RNA (1)...(19): siRNA sense strand
cagccaccaugaagacauu

SEQ ID NO: 1660072 - RNA, 19 nt, Homo sapiens
  misc_RNA (1)...(19): siRNA sense strand
gcuaugaagauucugaaga

SEQ ID NO: 1660073 - RNA, 19 nt, Homo sapiens
  misc_RNA (1)...(19): siRNA sense strand
gccaaacacauuuauaauc

SEQ ID NO: 1660074 - RNA, 19 nt, Homo sapiens
  misc_RNA (1)...(19): siRNA sense strand
gaagaauggacagaagcua

SEQ ID NO: 1660075 - RNA, 19 nt, Homo sapiens
  misc_RNA (1)...(19): siRNA sense strand
aaagaagguuggguucaga

SEQ ID NO: 1660076 - RNA, 19 nt, Homo sapiens
  misc_RNA (1)...(19): siRNA sense strand
aaacuggcaagauguauau

SEQ ID NO: 1660077 - RNA, 19 nt, Homo sapiens
  misc_RNA (1)...(19): siRNA sense strand
uuaaagaacacuagacauc

SEQ ID NO: 1660078 - RNA, 19 nt, Homo sapiens
  misc_RNA (1)...(19): siRNA sense strand
gaaggcaaguggaaaauac

SEQ ID NO: 1660079 - RNA, 19 nt, Homo sapiens
  misc_RNA (1)...(19): siRNA sense strand
ucaaguaacaucugagaca

SEQ ID NO: 1660080 - RNA, 19 nt, Homo sapiens
  misc_RNA (1)...(19): siRNA sense strand
aaugaugugugggagguua

SEQ ID NO: 1660081 - RNA, 19 nt, Homo sapiens
  misc_RNA (1)...(19): siRNA sense strand
gacaaagauggccacauaa

SEQ ID NO: 1660082 - RNA, 19 nt, Homo sapiens
  misc_RNA (1)...(19): siRNA sense strand
caaguuggagaaucuaaug

SEQ ID NO: 1660083 - RNA, 19 nt, Homo sapiens
  misc_RNA (1)...(19): siRNA sense strand
aauauuccuuccagacaaa

SEQ ID NO: 1660084 - RNA, 19 nt, Homo sapiens
  misc_RNA (1)...(19): siRNA sense strand
agauguggauuuaccuuau

SEQ ID NO: 1660085 - RNA, 19 nt, Homo sapiens
  misc_RNA (1)...(19): siRNA sense strand
uaaaggauccaaauaaacg

SEQ ID NO: 1660086 - RNA, 19 nt, Homo sapiens
  misc_RNA (1)...(19): siRNA sense strand
caaagaagggaucacagau

SEQ ID NO: 1660087 - RNA, 19 nt, Homo sapiens
  misc_RNA (1)...(19): siRNA sense strand
gaacgaccaaagccaaaca

SEQ ID NO: 1660088 - RNA, 19 nt, Homo sapiens
  misc_RNA (1)...(19): siRNA sense strand
ccaagauacuuccuuuuga

SEQ ID NO: 1660089 - RNA, 19 nt, Homo sapiens
  misc_RNA (1)...(19): siRNA sense strand
cagcucagacuauuacaau

SEQ ID NO: 1660090 - RNA, 19 nt, Homo sapiens
  misc_RNA (1)...(19): siRNA sense strand
gcuuguaccuccuuuuaaa

SEQ ID NO: 1660091 - RNA, 19 nt, Homo sapiens
  misc_RNA (1)...(19): siRNA sense strand
cauuaaauuuccucgaaca

SEQ ID NO: 1660092 - RNA, 19 nt, Homo sapiens
  misc_RNA (1)...(19): siRNA sense strand
aagagaaaccucaagaugu

SEQ ID NO: 1660093 - RNA, 19 nt, Homo sapiens
  misc_RNA (1)...(19): siRNA sense strand
ggcacacacucuaacugaa

SEQ ID NO: 1660094 - RNA, 19 nt, Homo sapiens
  misc_RNA (1)...(19): siRNA sense strand
gagagaaggcaaguggaaa

SEQ ID NO: 1660095 - RNA, 19 nt, Homo sapiens
  misc_RNA (1)...(19): siRNA sense strand
caaagccaaacacauuuau

SEQ ID NO: 1660096 - RNA, 19 nt, Homo sapiens
  misc_RNA (1)...(19): siRNA sense strand
cgagagaaggcaaguggaa

SEQ ID NO: 1660097 - RNA, 19 nt, Homo sapiens
  misc_RNA (1)...(19): siRNA sense strand
ccucuacaacccaucauaa

SEQ ID NO: 1660098 - RNA, 19 nt, Homo sapiens
  misc_RNA (1)...(19): siRNA sense strand
gaggggagaauauauaaaa

SEQ ID NO: 1660099 - RNA, 19 nt, Homo sapiens
  misc_RNA (1)...(19): siRNA sense strand
aguccaacuucacaaauug

SEQ ID NO: 1660100 - RNA, 19 nt, Homo sapiens
  misc_RNA (1)...(19): siRNA sense strand
ugacuauggccgagcagua

SEQ ID NO: 1660101 - RNA, 19 nt, Homo sapiens
  misc_RNA (1)...(19): siRNA sense strand
uagaagauaaugacuaugg

SEQ ID NO: 1660102 - RNA, 19 nt, Homo sapiens
  misc_RNA (1)...(19): siRNA sense strand
aaagaagggaucacagaug

SEQ ID NO: 1660103 - RNA, 19 nt, Homo sapiens
  misc_RNA (1)...(19): siRNA sense strand
cuacauuccggaaagauug

SEQ ID NO: 1660104 - RNA, 19 nt, Homo sapiens
  misc_RNA (1)...(19): siRNA sense strand
gccuuggacuaucuacauu

SEQ ID NO: 1660105 - RNA, 19 nt, Homo sapiens
  misc_RNA (1)...(19): siRNA sense strand
acugaaagcagaguauuaa

SEQ ID NO: 1660106 - RNA, 19 nt, Homo sapiens
  misc_RNA (1)...(19): siRNA sense strand
uguagauacuccagaggaa

SEQ ID NO: 1660107 - RNA, 19 nt, Homo sapiens
  misc_RNA (1)...(19): siRNA sense strand
aggccaagauacuuccuuu

SEQ ID NO: 1660108 - RNA, 19 nt, Homo sapiens
  misc_RNA (1)...(19): siRNA sense strand
gcuuucagggcucuugaua

SEQ ID NO: 1660109 - RNA, 19 nt, Homo sapiens
  misc_RNA (1)...(19): siRNA sense strand
uaaagagaaaccucaagau

SEQ ID NO: 1660110 - RNA, 19 nt, Homo sapiens
  misc_RNA (1)...(19): siRNA sense strand
ugaaagcagaguauuaaag

SEQ ID NO: 1660111 - RNA, 19 nt, Homo sapiens
  misc_RNA (1)...(19): siRNA sense strand
uaacugaaagcagaguauu

SEQ ID NO: 1660112 - RNA, 19 nt, Homo sapiens
  misc_RNA (1)...(19): siRNA sense strand
caaaaugccaguuaaugaa

SEQ ID NO: 1660113 - RNA, 19 nt, Homo sapiens
  misc_RNA (1)...(19): siRNA sense strand
uauaggagaggaagagaug

SEQ ID NO: 1660114 - RNA, 19 nt, Homo sapiens
  misc_RNA (1)...(19): siRNA sense strand
aagaggagagaaugaauug

SEQ ID NO: 1660115 - RNA, 19 nt, Homo sapiens
  misc_RNA (1)...(19): siRNA sense strand
gaagcuauccaggcuguag

SEQ ID NO: 1660116 - RNA, 19 nt, Homo sapiens
  misc_RNA (1)...(19): siRNA sense strand
ccaggaccaugagaaacuu

SEQ ID NO: 1660117 - RNA, 19 nt, Homo sapiens
  misc_RNA (1)...(19): siRNA sense strand
gugauggaauauguuaaug

SEQ ID NO: 1660118 - RNA, 19 nt, Homo sapiens
  misc_RNA (1)...(19): siRNA sense strand
auagagagaacauuucaug

SEQ ID NO: 1660119 - RNA, 19 nt, Homo sapiens
  misc_RNA (1)...(19): siRNA sense strand
gagcgauguuaccauugug

SEQ ID NO: 1660120 - RNA, 19 nt, Homo sapiens
  misc_RNA (1)...(19): siRNA sense strand
gagagaaugaauuguaguc

SEQ ID NO: 1660121 - RNA, 19 nt, Homo sapiens
  misc_RNA (1)...(19): siRNA sense strand
guagauacuccagaggaaa

SEQ ID NO: 1660122 - RNA, 19 nt, Homo sapiens
  misc_RNA (1)...(19): siRNA sense strand
auaaagagaaaccucaaga

SEQ ID NO: 1660123 - RNA, 19 nt, Homo sapiens
  misc_RNA (1)...(19): siRNA sense strand
ggacaaagauggccacaua

SEQ ID NO: 1660124 - RNA, 19 nt, Homo sapiens
  misc_RNA (1)...(19): siRNA sense strand
gaagacagauggcucauuc

SEQ ID NO: 1660125 - RNA, 19 nt, Homo sapiens
  misc_RNA (1)...(19): siRNA sense strand
ggaguaaacuggcaagaug

SEQ ID NO: 1660126 - RNA, 19 nt, Homo sapiens
  misc_RNA (1)...(19): siRNA sense strand
gaaagcagaguauuaaaga

SEQ ID NO: 1660127 - RNA, 19 nt, Homo sapiens
  misc_RNA (1)...(19): siRNA sense strand
ggcaagauguauaugauaa

SEQ ID NO: 1660128 - RNA, 19 nt, Homo sapiens
  misc_RNA (1)...(19): siRNA sense strand
gacauuaaauuuccucgaa

SEQ ID NO: 1660129 - RNA, 19 nt, Homo sapiens
  misc_RNA (1)...(19): siRNA sense strand
gaaauuaugagacacaguu

SEQ ID NO: 1660130 - RNA, 19 nt, Homo sapiens
  misc_RNA (1)...(19): siRNA sense strand
gaccaaagccaaacacauu

SEQ ID NO: 1660131 - RNA, 19 nt, Homo sapiens
  misc_RNA (1)...(19): siRNA sense strand
gaggagagaaugaauugua

SEQ ID NO: 1660132 - RNA, 19 nt, Homo sapiens
  misc_RNA (1)...(19): siRNA sense strand
acagauggcucauucauag

SEQ ID NO: 1660133 - RNA, 19 nt, Homo sapiens
  misc_RNA (1)...(19): siRNA sense strand
gcaaagaagggaucacaga

SEQ ID NO: 1660134 - RNA, 19 nt, Homo sapiens
  misc_RNA (1)...(19): siRNA sense strand
gaagaggagagaaugaauu

SEQ ID NO: 1660135 - RNA, 19 nt, Homo sapiens
  misc_RNA (1)...(19): siRNA sense strand
ccagagguguuagaagaua

SEQ ID NO: 1660136 - RNA, 19 nt, Homo sapiens
  misc_RNA (1)...(19): siRNA sense strand
gcacacacucuaacugaaa

SEQ ID NO: 1660137 - RNA, 19 nt, Homo sapiens
  misc_RNA (1)...(19): siRNA sense strand
agagaaaccucaagaugug

SEQ ID NO: 1660138 - RNA, 19 nt, Homo sapiens
  misc_RNA (1)...(19): siRNA sense strand
ugagacagauacuagauau

SEQ ID NO: 1660139 - RNA, 19 nt, Homo sapiens
  misc_RNA (1)...(19): siRNA sense strand
uuucagggcucuugauaaa

SEQ ID NO: 1660140 - RNA, 19 nt, Homo sapiens
  misc_RNA (1)...(19): siRNA sense strand
gaaagaagguuggguucag

SEQ ID NO: 1660141 - RNA, 19 nt, Homo sapiens
  misc_RNA (1)...(19): siRNA sense strand
gaaauauuccuuccagaca

SEQ ID NO: 1660142 - RNA, 19 nt, Homo sapiens
  misc_RNA (1)...(19): siRNA sense strand
cgaacacucucuucagaug

SEQ ID NO: 1660143 - RNA, 19 nt, Homo sapiens
  misc_RNA (1)...(19): siRNA sense strand
ccaaagccaaacacauuua

SEQ ID NO: 1660144 - RNA, 19 nt, Homo sapiens
  misc_RNA (1)...(19): siRNA sense strand
gcucauucauaggauauaa

SEQ ID NO: 1660145 - RNA, 19 nt, Homo sapiens
  misc_RNA (1)...(19): siRNA sense strand
gaauuuacagcucagacua

SEQ ID NO: 1660146 - RNA, 19 nt, Homo sapiens
  misc_RNA (1)...(19): siRNA sense strand
guaccgugaucucaaguug

SEQ ID NO: 1660147 - RNA, 19 nt, Homo sapiens
  misc_RNA (1)...(19): siRNA sense strand
gaaagaagucauuauugca

SEQ ID NO: 1660148 - RNA, 19 nt, Homo sapiens
  misc_RNA (1)...(19): siRNA sense strand
agaaagaagucauuauugc

SEQ ID NO: 1660149 - RNA, 19 nt, Homo sapiens
  misc_RNA (1)...(19): siRNA sense strand
gaagaggggagaauauaua

SEQ ID NO: 1660150 - RNA, 19 nt, Homo sapiens
  misc_RNA (1)...(19): siRNA sense strand
caaccaggaccaugagaaa

SEQ ID NO: 1660151 - RNA, 19 nt, Homo sapiens
  misc_RNA (1)...(19): siRNA sense strand
gacagauggcucauucaua

SEQ ID NO: 1660152 - RNA, 19 nt, Homo sapiens
  misc_RNA (1)...(19): siRNA sense strand
gcaagaagaggagagaaug

SEQ ID NO: 1660153 - RNA, 19 nt, Homo sapiens
  misc_RNA (1)...(19): siRNA sense strand
aaagagaaaccucaagaug

SEQ ID NO: 1660154 - RNA, 19 nt, Homo sapiens
  misc_RNA (1)...(19): siRNA sense strand
uaaacuggcaagauguaua

SEQ ID NO: 1660155 - RNA, 19 nt, Homo sapiens
  misc_RNA (1)...(19): siRNA sense strand
gcaaaaugccaguuaauga

SEQ ID NO: 1660156 - RNA, 19 nt, Homo sapiens
  misc_RNA (1)...(19): siRNA sense strand
agaaugaauuguaguccaa

SEQ ID NO: 1660157 - RNA, 19 nt, Homo sapiens
  misc_RNA (1)...(19): siRNA sense strand
acaauaacaccaccugaaa

SEQ ID NO: 1660158 - RNA, 19 nt, Homo sapiens
  misc_RNA (1)...(19): siRNA sense strand
gaacacuagacaucccuuu

SEQ ID NO: 1660159 - RNA, 19 nt, Homo sapiens
  misc_RNA (1)...(19): siRNA sense strand
ggaaaauacuaugcuauga

SEQ ID NO: 1660160 - RNA, 19 nt, Homo sapiens
  misc_RNA (1)...(19): siRNA sense strand
gaauuguaguccaacuuca

SEQ ID NO: 1660161 - RNA, 19 nt, Homo sapiens
  misc_RNA (1)...(19): siRNA sense strand
acaaagauggccacauaaa

SEQ ID NO: 1660162 - RNA, 19 nt, Homo sapiens
  misc_RNA (1)...(19): siRNA sense strand
caagaagaggagagaauga

SEQ ID NO: 1660163 - RNA, 19 nt, Homo sapiens
  misc_RNA (1)...(19): siRNA sense strand
cagagguguuagaagauaa

SEQ ID NO: 1660164 - RNA, 19 nt, Homo sapiens
  misc_RNA (1)...(19): siRNA sense strand
ggaccgcacacguuucuau

SEQ ID NO: 1660165 - RNA, 19 nt, Homo sapiens
  misc_RNA (1)...(19): siRNA sense strand
caagauacuuccuuuugaa

SEQ ID NO: 1660166 - RNA, 19 nt, Homo sapiens
  misc_RNA (1)...(19): siRNA sense strand
uaguccaacuucacaaauu

SEQ ID NO: 1660167 - RNA, 19 nt, Homo sapiens
  misc_RNA (1)...(19): siRNA sense strand
aaauauuccuuccagacaa

SEQ ID NO: 1660168 - RNA, 19 nt, Homo sapiens
  misc_RNA (1)...(19): siRNA sense strand
gauguggauuuaccuuauc

SEQ ID NO: 1660169 - RNA, 19 nt, Homo sapiens
  misc_RNA (1)...(19): siRNA sense strand
gaagguuggguucagaaga

SEQ ID NO: 1660170 - RNA, 19 nt, Homo sapiens
  misc_RNA (1)...(19): siRNA sense strand
ucagggcucuugauaaagg

SEQ ID NO: 1660171 - RNA, 19 nt, Homo sapiens
  misc_RNA (1)...(19): siRNA sense strand
cagccaccaugaagacauu

SEQ ID NO: 1660172 - RNA, 19 nt, Homo sapiens
  misc_RNA (1)...(19): siRNA sense strand
gcuaugaagauucugaaga

SEQ ID NO: 1660173 - RNA, 19 nt, Homo sapiens
  misc_RNA (1)...(19): siRNA sense strand
gccaaacacauuuauaauc

SEQ ID NO: 1660174 - RNA, 19 nt, Homo sapiens
  misc_RNA (1)...(19): siRNA sense strand
gaagaauggacagaagcua

SEQ ID NO: 1660175 - RNA, 19 nt, Homo sapiens
  misc_RNA (1)...(19): siRNA sense strand
aaagaagguuggguucaga

SEQ ID NO: 1660176 - RNA, 19 nt, Homo sapiens
  misc_RNA (1)...(19): siRNA sense strand
aaacuggcaagauguauau

SEQ ID NO: 1660177 - RNA, 19 nt, Homo sapiens
  misc_RNA (1)...(19): siRNA sense strand
uuaaagaacacuagacauc

SEQ ID NO: 1660178 - RNA, 19 nt, Homo sapiens
  misc_RNA (1)...(19): siRNA sense strand
gaaggcaaguggaaaauac

SEQ ID NO: 1660179 - RNA, 19 nt, Homo sapiens
  misc_RNA (1)...(19): siRNA sense strand
ucaaguaacaucugagaca

SEQ ID NO: 1660180 - RNA, 19 nt, Homo sapiens
  misc_RNA (1)...(19): siRNA sense strand
aaugaugugugggagguua

SEQ ID NO: 1660181 - RNA, 19 nt, Homo sapiens
  misc_RNA (1)...(19): siRNA sense strand
gacaaagauggccacauaa

SEQ ID NO: 1660182 - RNA, 19 nt, Homo sapiens
  misc_RNA (1)...(19): siRNA sense strand
caaguuggagaaucuaaug

SEQ ID NO: 1660183 - RNA, 19 nt, Homo sapiens
  misc_RNA (1)...(19): siRNA sense strand
aauauuccuuccagacaaa

SEQ ID NO: 1660184 - RNA, 19 nt, Homo sapiens
  misc_RNA (1)...(19): siRNA sense strand
agauguggauuuaccuuau

SEQ ID NO: 1660185 - RNA, 19 nt, Homo sapiens
  misc_RNA (1)...(19): siRNA sense strand
uaaaggauccaaauaaacg

SEQ ID NO: 1660186 - RNA, 19 nt, Homo sapiens
  misc_RNA (1)...(19): siRNA sense strand
caaagaagggaucacagau

SEQ ID NO: 1660187 - RNA, 19 nt, Homo sapiens
  misc_RNA (1)...(19): siRNA sense strand
gaacgaccaaagccaaaca

SEQ ID NO: 1660188 - RNA, 19 nt, Homo sapiens
  misc_RNA (1)...(19): siRNA sense strand
ccaagauacuuccuuuuga

SEQ ID NO: 1660189 - RNA, 19 nt, Homo sapiens
  misc_RNA (1)...(19): siRNA sense strand
cagcucagacuauuacaau

SEQ ID NO: 1660190 - RNA, 19 nt, Homo sapiens
  misc_RNA (1)...(19): siRNA sense strand
gcuuguaccuccuuuuaaa

SEQ ID NO: 1660191 - RNA, 19 nt, Homo sapiens
  misc_RNA (1)...(19): siRNA sense strand
cauuaaauuuccucgaaca

SEQ ID NO: 1660192 - RNA, 19 nt, Homo sapiens
  misc_RNA (1)...(19): siRNA sense strand
aagagaaaccucaagaugu

SEQ ID NO: 1660193 - RNA, 19 nt, Homo sapiens
  misc_RNA (1)...(19): siRNA sense strand
ggcacacacucuaacugaa

SEQ ID NO: 1660194 - RNA, 19 nt, Homo sapiens
  misc_RNA (1)...(19): siRNA sense strand
gagagaaggcaaguggaaa

SEQ ID NO: 1660195 - RNA, 19 nt, Homo sapiens
  misc_RNA (1)...(19): siRNA sense strand
caaagccaaacacauuuau

SEQ ID NO: 1660196 - RNA, 19 nt, Homo sapiens
  misc_RNA (1)...(19): siRNA sense strand
cgagagaaggcaaguggaa

SEQ ID NO: 1660197 - RNA, 19 nt, Homo sapiens
  misc_RNA (1)...(19): siRNA sense strand
ccucuacaacccaucauaa

SEQ ID NO: 1660198 - RNA, 19 nt, Homo sapiens
  misc_RNA (1)...(19): siRNA sense strand
gaggggagaauauauaaaa

SEQ ID NO: 1660199 - RNA, 19 nt, Homo sapiens
  misc_RNA (1)...(19): siRNA sense strand
aguccaacuucacaaauug

SEQ ID NO: 1660200 - RNA, 19 nt, Homo sapiens
  misc_RNA (1)...(19): siRNA sense strand
ugacuauggccgagcagua

SEQ ID NO: 1660201 - RNA, 19 nt, Homo sapiens
  misc_RNA (1)...(19): siRNA sense strand
uagaagauaaugacuaugg

SEQ ID NO: 1660202 - RNA, 19 nt, Homo sapiens
  misc_RNA (1)...(19): siRNA sense strand
aaagaagggaucacagaug

SEQ ID NO: 1660203 - RNA, 19 nt, Homo sapiens
  misc_RNA (1)...(19): siRNA sense strand
cuacauuccggaaagauug

SEQ ID NO: 1660204 - RNA, 19 nt, Homo sapiens
  misc_RNA (1)...(19): siRNA sense strand
gccuuggacuaucuacauu

SEQ ID NO: 1660205 - RNA, 19 nt, Homo sapiens
  misc_RNA (1)...(19): siRNA sense strand
acugaaagcagaguauuaa

SEQ ID NO: 1660206 - RNA, 19 nt, Homo sapiens
  misc_RNA (1)...(19): siRNA sense strand
uguagauacuccagaggaa

SEQ ID NO: 1660207 - RNA, 19 nt, Homo sapiens
  misc_RNA (1)...(19): siRNA sense strand
aggccaagauacuuccuuu

SEQ ID NO: 1660208 - RNA, 19 nt, Homo sapiens
  misc_RNA (1)...(19): siRNA sense strand
gcuuucagggcucuugaua

SEQ ID NO: 1660209 - RNA, 19 nt, Homo sapiens
  misc_RNA (1)...(19): siRNA sense strand
uaaagagaaaccucaagau

SEQ ID NO: 1660210 - RNA, 19 nt, Homo sapiens
  misc_RNA (1)...(19): siRNA sense strand
ugaaagcagaguauuaaag

SEQ ID NO: 1660211 - RNA, 19 nt, Homo sapiens
  misc_RNA (1)...(19): siRNA sense strand
uaacugaaagcagaguauu

SEQ ID NO: 1660212 - RNA, 19 nt, Homo sapiens
  misc_RNA (1)...(19): siRNA sense strand
caaaaugccaguuaaugaa

SEQ ID NO: 1660213 - RNA, 19 nt, Homo sapiens
  misc_RNA (1)...(19): siRNA sense strand
uauaggagaggaagagaug

SEQ ID NO: 1660214 - RNA, 19 nt, Homo sapiens
  misc_RNA (1)...(19): siRNA sense strand
aagaggagagaaugaauug

SEQ ID NO: 1660215 - RNA, 19 nt, Homo sapiens
  misc_RNA (1)...(19): siRNA sense strand
gaagcuauccaggcuguag

SEQ ID NO: 1660216 - RNA, 19 nt, Homo sapiens
  misc_RNA (1)...(19): siRNA sense strand
ccaggaccaugagaaacuu

SEQ ID NO: 1660217 - RNA, 19 nt, Homo sapiens
  misc_RNA (1)...(19): siRNA sense strand
gugauggaauauguuaaug

SEQ ID NO: 1660218 - RNA, 19 nt, Homo sapiens
  misc_RNA (1)...(19): siRNA sense strand
auagagagaacauuucaug

SEQ ID NO: 1660219 - RNA, 19 nt, Homo sapiens
  misc_RNA (1)...(19): siRNA sense strand
gagcgauguuaccauugug

SEQ ID NO: 1660220 - RNA, 19 nt, Homo sapiens
  misc_RNA (1)...(19): siRNA sense strand
gagagaaugaauuguaguc

SEQ ID NO: 1660221 - RNA, 19 nt, Homo sapiens
  misc_RNA (1)...(19): siRNA sense strand
guagauacuccagaggaaa

SEQ ID NO: 1660222 - RNA, 19 nt, Homo sapiens
  misc_RNA (1)...(19): siRNA sense strand
auaaagagaaaccucaaga

SEQ ID NO: 1660223 - RNA, 19 nt, Homo sapiens
  misc_RNA (1)...(19): siRNA sense strand
ucaaugaggugcugaaaca

SEQ ID NO: 1660224 - RNA, 19 nt, Homo sapiens
  misc_RNA (1)...(19): siRNA sense strand
gaaccagggugacaucaag

SEQ ID NO: 1660225 - RNA, 19 nt, Homo sapiens
  misc_RNA (1)...(19): siRNA sense strand
gcagcagccuugccucuau

SEQ ID NO: 1660226 - RNA, 19 nt, Homo sapiens
  misc_RNA (1)...(19): siRNA sense strand
ucuaugagaucaaacaguu

SEQ ID NO: 1660227 - RNA, 19 nt, Homo sapiens
  misc_RNA (1)...(19): siRNA sense strand
cacauugggucacgccauu

SEQ ID NO: 1660228 - RNA, 19 nt, Homo sapiens
  misc_RNA (1)...(19): siRNA sense strand
aaacagugccgacuugcaa

SEQ ID NO: 1660229 - RNA, 19 nt, Homo sapiens
  misc_RNA (1)...(19): siRNA sense strand
cugaaacagugccgacuug

SEQ ID NO: 1660230 - RNA, 19 nt, Homo sapiens
  misc_RNA (1)...(19): siRNA sense strand
ggccugacaucacuuacca

SEQ ID NO: 1660231 - RNA, 19 nt, Homo sapiens
  misc_RNA (1)...(19): siRNA sense strand
cagcagccuugccucuaug

SEQ ID NO: 1660232 - RNA, 19 nt, Homo sapiens
  misc_RNA (1)...(19): siRNA sense strand
gaaacagugccgacuugca

SEQ ID NO: 1660233 - RNA, 19 nt, Homo sapiens
  misc_RNA (1)...(19): siRNA sense strand
ucugugaggguuucaauga

SEQ ID NO: 1660234 - RNA, 19 nt, Homo sapiens
  misc_RNA (1)...(19): siRNA sense strand
cgaggccugacaucacuua

SEQ ID NO: 1660235 - RNA, 19 nt, Homo sapiens
  misc_RNA (1)...(19): siRNA sense strand
caucugcaguuggcucuuc

SEQ ID NO: 1660236 - RNA, 19 nt, Homo sapiens
  misc_RNA (1)...(19): siRNA sense strand
gcugaaacagugccgacuu

SEQ ID NO: 1660237 - RNA, 19 nt, Homo sapiens
  misc_RNA (1)...(19): siRNA sense strand
cagccuugccucuaugaga

SEQ ID NO: 1660238 - RNA, 19 nt, Homo sapiens
  misc_RNA (1)...(19): siRNA sense strand
caagcucugugaggguuuc

SEQ ID NO: 1660239 - RNA, 19 nt, Homo sapiens
  misc_RNA (1)...(19): siRNA sense strand
gaggaagaauugacaaaua

SEQ ID NO: 1660240 - RNA, 19 nt, Homo sapiens
  misc_RNA (1)...(19): siRNA sense strand
ggauagagcuguugacuuc

SEQ ID NO: 1660241 - RNA, 19 nt, Homo sapiens
  misc_RNA (1)...(19): siRNA sense strand
gaacuucuccagcaauuua

SEQ ID NO: 1660242 - RNA, 19 nt, Homo sapiens
  misc_RNA (1)...(19): siRNA sense strand
ggaauaagguguguugguu

SEQ ID NO: 1660243 - RNA, 19 nt, Homo sapiens
  misc_RNA (1)...(19): siRNA sense strand
ggacuggccuaaccaauuc

SEQ ID NO: 1660244 - RNA, 19 nt, Homo sapiens
  misc_RNA (1)...(19): siRNA sense strand
gcagacagguauuaaagga

SEQ ID NO: 1660245 - RNA, 19 nt, Homo sapiens
  misc_RNA (1)...(19): siRNA sense strand
caaggcagauguaugauau

SEQ ID NO: 1660246 - RNA, 19 nt, Homo sapiens
  misc_RNA (1)...(19): siRNA sense strand
cauacgggcuccaaucaua

SEQ ID NO: 1660247 - RNA, 19 nt, Homo sapiens
  misc_RNA (1)...(19): siRNA sense strand
aaacaaggcagauguauga

SEQ ID NO: 1660248 - RNA, 19 nt, Homo sapiens
  misc_RNA (1)...(19): siRNA sense strand
gaaauucaccaccaaauag

SEQ ID NO: 1660249 - RNA, 19 nt, Homo sapiens
  misc_RNA (1)...(19): siRNA sense strand
guuccuagauaccguguua

SEQ ID NO: 1660250 - RNA, 19 nt, Homo sapiens
  misc_RNA (1)...(19): siRNA sense strand
gauauggugguaaagauua

SEQ ID NO: 1660251 - RNA, 19 nt, Homo sapiens
  misc_RNA (1)...(19): siRNA sense strand
ucaacaggcucccuucuga

SEQ ID NO: 1660252 - RNA, 19 nt, Homo sapiens
  misc_RNA (1)...(19): siRNA sense strand
gcuaaugagucuagaguuc

SEQ ID NO: 1660253 - RNA, 19 nt, Homo sapiens
  misc_RNA (1)...(19): siRNA sense strand
agaggcagcugcguauuua

SEQ ID NO: 1660254 - RNA, 19 nt, Homo sapiens
  misc_RNA (1)...(19): siRNA sense strand
ggagaacucagcauagaaa

SEQ ID NO: 1660255 - RNA, 19 nt, Homo sapiens
  misc_RNA (1)...(19): siRNA sense strand
ggacugacuuaccuaggaa

SEQ ID NO: 1660256 - RNA, 19 nt, Homo sapiens
  misc_RNA (1)...(19): siRNA sense strand
ggucaagcauuucauuuag

SEQ ID NO: 1660257 - RNA, 19 nt, Homo sapiens
  misc_RNA (1)...(19): siRNA sense strand
agauuuagguccugaauau

SEQ ID NO: 1660258 - RNA, 19 nt, Homo sapiens
  misc_RNA (1)...(19): siRNA sense strand
uguacgcgauuccuuaaua

SEQ ID NO: 1660259 - RNA, 19 nt, Homo sapiens
  misc_RNA (1)...(19): siRNA sense strand
gaagaaagucugggauaga

SEQ ID NO: 1660260 - RNA, 19 nt, Homo sapiens
  misc_RNA (1)...(19): siRNA sense strand
gaucaugaauguggcaguu

SEQ ID NO: 1660261 - RNA, 19 nt, Homo sapiens
  misc_RNA (1)...(19): siRNA sense strand
gaagaaauucaccaccaaa

SEQ ID NO: 1660262 - RNA, 19 nt, Homo sapiens
  misc_RNA (1)...(19): siRNA sense strand
gaauagguggugcagauuu

SEQ ID NO: 1660263 - RNA, 19 nt, Homo sapiens
  misc_RNA (1)...(19): siRNA sense strand
ggauggagaacucagcaua

SEQ ID NO: 1660264 - RNA, 19 nt, Homo sapiens
  misc_RNA (1)...(19): siRNA sense strand
gaaacaaggcagauguaug

SEQ ID NO: 1660265 - RNA, 19 nt, Homo sapiens
  misc_RNA (1)...(19): siRNA sense strand
gaauaagguguguugguuu

SEQ ID NO: 1660266 - RNA, 19 nt, Homo sapiens
  misc_RNA (1)...(19): siRNA sense strand
gaaaaccccuuuggugaaa

SEQ ID NO: 1660267 - RNA, 19 nt, Homo sapiens
  misc_RNA (1)...(19): siRNA sense strand
uggaaaagauguuggaaua

SEQ ID NO: 1660268 - RNA, 19 nt, Homo sapiens
  misc_RNA (1)...(19): siRNA sense strand
aagaauagguggugcagau

SEQ ID NO: 1660269 - RNA, 19 nt, Homo sapiens
  misc_RNA (1)...(19): siRNA sense strand
gauaccguguuaacgcuaa

SEQ ID NO: 1660270 - RNA, 19 nt, Homo sapiens
  misc_RNA (1)...(19): siRNA sense strand
agaaauucaccaccaaaua

SEQ ID NO: 1660271 - RNA, 19 nt, Homo sapiens
  misc_RNA (1)...(19): siRNA sense strand
gggacugacuuaccuagga

SEQ ID NO: 1660272 - RNA, 19 nt, Homo sapiens
  misc_RNA (1)...(19): siRNA sense strand
cuuaacugcugccugcuua

SEQ ID NO: 1660273 - RNA, 19 nt, Homo sapiens
  misc_RNA (1)...(19): siRNA sense strand
gaaaagauguuggaauaag

SEQ ID NO: 1660274 - RNA, 19 nt, Homo sapiens
  misc_RNA (1)...(19): siRNA sense strand
acaagacgcggaacaguaa

SEQ ID NO: 1660275 - RNA, 19 nt, Homo sapiens
  misc_RNA (1)...(19): siRNA sense strand
ucacauugcaguagacaaa

SEQ ID NO: 1660276 - RNA, 19 nt, Homo sapiens
  misc_RNA (1)...(19): siRNA sense strand
uguaugauauggugguaaa

SEQ ID NO: 1660277 - RNA, 19 nt, Homo sapiens
  misc_RNA (1)...(19): siRNA sense strand
ucucucagcuccgccguua

SEQ ID NO: 1660278 - RNA, 19 nt, Homo sapiens
  misc_RNA (1)...(19): siRNA sense strand
gcauuuggcaauucaagaa

SEQ ID NO: 1660279 - RNA, 19 nt, Homo sapiens
  misc_RNA (1)...(19): siRNA sense strand
uugcauggcucuugguuug

SEQ ID NO: 1660280 - RNA, 19 nt, Homo sapiens
  misc_RNA (1)...(19): siRNA sense strand
ugcaggagaucaugaaugu

SEQ ID NO: 1660281 - RNA, 19 nt, Homo sapiens
  misc_RNA (1)...(19): siRNA sense strand
gaauguggcaguucuaguc

SEQ ID NO: 1660282 - RNA, 19 nt, Homo sapiens
  misc_RNA (1)...(19): siRNA sense strand
gcggaacaguaauaacaau

SEQ ID NO: 1660283 - RNA, 19 nt, Homo sapiens
  misc_RNA (1)...(19): siRNA sense strand
ugaagaaagucugggauag

SEQ ID NO: 1660284 - RNA, 19 nt, Homo sapiens
  misc_RNA (1)...(19): siRNA sense strand
ggaaacaaggcagauguau

SEQ ID NO: 1660285 - RNA, 19 nt, Homo sapiens
  misc_RNA (1)...(19): siRNA sense strand
gaggguuguguauauguua

SEQ ID NO: 1660286 - RNA, 19 nt, Homo sapiens
  misc_RNA (1)...(19): siRNA sense strand
agaagaaauucaccaccaa

SEQ ID NO: 1660287 - RNA, 19 nt, Homo sapiens
  misc_RNA (1)...(19): siRNA sense strand
ugaaauaucgauggacaaa

SEQ ID NO: 1660288 - RNA, 19 nt, Homo sapiens
  misc_RNA (1)...(19): siRNA sense strand
gggcgaccucuccuacuua

SEQ ID NO: 1660289 - RNA, 19 nt, Homo sapiens
  misc_RNA (1)...(19): siRNA sense strand
gauguaugauaugguggua

SEQ ID NO: 1660290 - RNA, 19 nt, Homo sapiens
  misc_RNA (1)...(19): siRNA sense strand
ggaggagggugugaucaag

SEQ ID NO: 1660291 - RNA, 19 nt, Homo sapiens
  misc_RNA (1)...(19): siRNA sense strand
ccagacgaacccauaguaa

SEQ ID NO: 1660292 - RNA, 19 nt, Homo sapiens
  misc_RNA (1)...(19): siRNA sense strand
gccaucaaauaaacauaug

SEQ ID NO: 1660293 - RNA, 19 nt, Homo sapiens
  misc_RNA (1)...(19): siRNA sense strand
caaggucaagcauuucauu

SEQ ID NO: 1660294 - RNA, 19 nt, Homo sapiens
  misc_RNA (1)...(19): siRNA sense strand
cacggaaacacgaagaaua

SEQ ID NO: 1660295 - RNA, 19 nt, Homo sapiens
  misc_RNA (1)...(19): siRNA sense strand
acucacagauuauuguugu

SEQ ID NO: 1660296 - RNA, 19 nt, Homo sapiens
  misc_RNA (1)...(19): siRNA sense strand
ggaucaaucacgccaauca

SEQ ID NO: 1660297 - RNA, 19 nt, Homo sapiens
  misc_RNA (1)...(19): siRNA sense strand
ggaggacucgcgaugaaug

SEQ ID NO: 1660298 - RNA, 19 nt, Homo sapiens
  misc_RNA (1)...(19): siRNA sense strand
uaagcuucaugaucgauug

SEQ ID NO: 1660299 - RNA, 19 nt, Homo sapiens
  misc_RNA (1)...(19): siRNA sense strand
ccuaaccaauucucaagga

SEQ ID NO: 1660300 - RNA, 19 nt, Homo sapiens
  misc_RNA (1)...(19): siRNA sense strand
gucaagcauuucauuuaga

SEQ ID NO: 1660301 - RNA, 19 nt, Homo sapiens
  misc_RNA (1)...(19): siRNA sense strand
guacgcgauuccuuaauac

SEQ ID NO: 1660302 - RNA, 19 nt, Homo sapiens
  misc_RNA (1)...(19): siRNA sense strand
gaggaaacaaggcagaugu

SEQ ID NO: 1660303 - RNA, 19 nt, Homo sapiens
  misc_RNA (1)...(19): siRNA sense strand
cucagcagcucucggauga

SEQ ID NO: 1660304 - RNA, 19 nt, Homo sapiens
  misc_RNA (1)...(19): siRNA sense strand
gcauggcucuugguuugau

SEQ ID NO: 1660305 - RNA, 19 nt, Homo sapiens
  misc_RNA (1)...(19): siRNA sense strand
aaucauaccuaccugaaaa

SEQ ID NO: 1660306 - RNA, 19 nt, Homo sapiens
  misc_RNA (1)...(19): siRNA sense strand
acaaggcagauguaugaua

SEQ ID NO: 1660307 - RNA, 19 nt, Homo sapiens
  misc_RNA (1)...(19): siRNA sense strand
guaacucacagauuauugu

SEQ ID NO: 1660308 - RNA, 19 nt, Homo sapiens
  misc_RNA (1)...(19): siRNA sense strand
uggcaguucuagucaaaga

SEQ ID NO: 1660309 - RNA, 19 nt, Homo sapiens
  misc_RNA (1)...(19): siRNA sense strand
acauguacgcgauuccuua

SEQ ID NO: 1660310 - RNA, 19 nt, Homo sapiens
  misc_RNA (1)...(19): siRNA sense strand
caggaucaaucacgccaau

SEQ ID NO: 1660311 - RNA, 19 nt, Homo sapiens
  misc_RNA (1)...(19): siRNA sense strand
ucaguggcauuuggcaauu

SEQ ID NO: 1660312 - RNA, 19 nt, Homo sapiens
  misc_RNA (1)...(19): siRNA sense strand
uuacaugccuauuccacau

SEQ ID NO: 1660313 - RNA, 19 nt, Homo sapiens
  misc_RNA (1)...(19): siRNA sense strand
cagcagacagguauuaaag

SEQ ID NO: 1660314 - RNA, 19 nt, Homo sapiens
  misc_RNA (1)...(19): siRNA sense strand
augcuuagguguagugaug

SEQ ID NO: 1660315 - RNA, 19 nt, Homo sapiens
  misc_RNA (1)...(19): siRNA sense strand
caacaggcucccuucugaa

SEQ ID NO: 1660316 - RNA, 19 nt, Homo sapiens
  misc_RNA (1)...(19): siRNA sense strand
gaugggaaauugguuacag

SEQ ID NO: 1660317 - RNA, 19 nt, Homo sapiens
  misc_RNA (1)...(19): siRNA sense strand
guuguuaugcuuaggugua

SEQ ID NO: 1660318 - RNA, 19 nt, Homo sapiens
  misc_RNA (1)...(19): siRNA sense strand
ucaagaggcagcugcguau

SEQ ID NO: 1660319 - RNA, 19 nt, Homo sapiens
  misc_RNA (1)...(19): siRNA sense strand
gagagggacaggaguaucu

SEQ ID NO: 1660320 - RNA, 19 nt, Homo sapiens
  misc_RNA (1)...(19): siRNA sense strand
uuacugacauggacucaac

SEQ ID NO: 1660321 - RNA, 19 nt, Homo sapiens
  misc_RNA (1)...(19): siRNA sense strand
ccagcgaggugacuaacag

SEQ ID NO: 1660322 - RNA, 19 nt, Homo sapiens
  misc_RNA (1)...(19): siRNA sense strand
ugaggguuguguauauguu

SEQ ID NO: 1660323 - RNA, 19 nt, Homo sapiens
  misc_RNA (1)...(19): siRNA sense strand
cggaacaguaauaacaaua

SEQ ID NO: 1660324 - RNA, 19 nt, Homo sapiens
  misc_RNA (1)...(19): siRNA sense strand
ugauggcauuguucacauu

SEQ ID NO: 1660325 - RNA, 19 nt, Homo sapiens
  misc_RNA (1)...(19): siRNA sense strand
ggaaacacgaagaauaggu

SEQ ID NO: 1660326 - RNA, 19 nt, Homo sapiens
  misc_RNA (1)...(19): siRNA sense strand
gcacggaaacacgaagaau

SEQ ID NO: 1660327 - RNA, 19 nt, Homo sapiens
  misc_RNA (1)...(19): siRNA sense strand
caaccuuacaugccuauuc

SEQ ID NO: 1660328 - RNA, 19 nt, Homo sapiens
  misc_RNA (1)...(19): siRNA sense strand
guucugcguuacaugaaau

SEQ ID NO: 1660329 - RNA, 19 nt, Homo sapiens
  misc_RNA (1)...(19): siRNA sense strand
gcccacuacuugucgaugu

SEQ ID NO: 1660330 - RNA, 19 nt, Homo sapiens
  misc_RNA (1)...(19): siRNA sense strand
ccaaucauaccuaccugaa

SEQ ID NO: 1660331 - RNA, 19 nt, Homo sapiens
  misc_RNA (1)...(19): siRNA sense strand
caggauuuauucuaacagu

SEQ ID NO: 1660332 - RNA, 19 nt, Homo sapiens
  misc_RNA (1)...(19): siRNA sense strand
cuaaccaauucucaaggaa

SEQ ID NO: 1660333 - RNA, 19 nt, Homo sapiens
  misc_RNA (1)...(19): siRNA sense strand
uauguuugaucccguuaug

SEQ ID NO: 1660334 - RNA, 19 nt, Homo sapiens
  misc_RNA (1)...(19): siRNA sense strand
uaaaguauggcaaggucaa

SEQ ID NO: 1660335 - RNA, 19 nt, Homo sapiens
  misc_RNA (1)...(19): siRNA sense strand
gguccugaauaugaaggua

SEQ ID NO: 1660336 - RNA, 19 nt, Homo sapiens
  misc_RNA (1)...(19): siRNA sense strand
aagaggcagcugcguauuu

SEQ ID NO: 1660337 - RNA, 19 nt, Homo sapiens
  misc_RNA (1)...(19): siRNA sense strand
uguggcaguucuagucaaa

SEQ ID NO: 1660338 - RNA, 19 nt, Homo sapiens
  misc_RNA (1)...(19): siRNA sense strand
aacaagacgcggaacagua

SEQ ID NO: 1660339 - RNA, 19 nt, Homo sapiens
  misc_RNA (1)...(19): siRNA sense strand
gcaauggcgucaugaccaa

SEQ ID NO: 1660340 - RNA, 19 nt, Homo sapiens
  misc_RNA (1)...(19): siRNA sense strand
cuacguggccaccgaguuu

SEQ ID NO: 1660341 - RNA, 19 nt, Homo sapiens
  misc_RNA (1)...(19): siRNA sense strand
ggaccugggcaucuacuug

SEQ ID NO: 1660342 - RNA, 19 nt, Homo sapiens
  misc_RNA (1)...(19): siRNA sense strand
gcaggcgccuaacaacuac

SEQ ID NO: 1660343 - RNA, 19 nt, Homo sapiens
  misc_RNA (1)...(19): siRNA sense strand
cgcaggcgccuaacaacua

SEQ ID NO: 1660344 - RNA, 19 nt, Homo sapiens
  misc_RNA (1)...(19): siRNA sense strand
cagcgaaagcaaccacuug

SEQ ID NO: 1660345 - RNA, 19 nt, Homo sapiens
  misc_RNA (1)...(19): siRNA sense strand
cagcaccagccuaggaauu

SEQ ID NO: 1660346 - RNA, 19 nt, Homo sapiens
  misc_RNA (1)...(19): siRNA sense strand
cgaguuuguggcccuagua

SEQ ID NO: 1660347 - RNA, 19 nt, Homo sapiens
  misc_RNA (1)...(19): siRNA sense strand
ggaguuucccgagcacuuc

SEQ ID NO: 1660348 - RNA, 19 nt, Homo sapiens
  misc_RNA (1)...(19): siRNA sense strand
ccggcaggauguggaguuu

SEQ ID NO: 1660349 - RNA, 19 nt, Homo sapiens
  misc_RNA (1)...(19): siRNA sense strand
ggcaggauguggaguuucc

SEQ ID NO: 1660350 - RNA, 19 nt, Homo sapiens
  misc_RNA (1)...(19): siRNA sense strand
ggaaauaggucuaguacua

SEQ ID NO: 1660351 - RNA, 19 nt, Homo sapiens
  misc_RNA (1)...(19): siRNA sense strand
agaaguagaucucccauua

SEQ ID NO: 1660352 - RNA, 19 nt, Homo sapiens
  misc_RNA (1)...(19): siRNA sense strand
gaacagagaagaauccaaa

SEQ ID NO: 1660353 - RNA, 19 nt, Homo sapiens
  misc_RNA (1)...(19): siRNA sense strand
ggaaagaugccaaauaaga

SEQ ID NO: 1660354 - RNA, 19 nt, Homo sapiens
  misc_RNA (1)...(19): siRNA sense strand
gcaaaagacugguuuaaaa

SEQ ID NO: 1660355 - RNA, 19 nt, Homo sapiens
  misc_RNA (1)...(19): siRNA sense strand
aaacagagagccuugauua

SEQ ID NO: 1660356 - RNA, 19 nt, Homo sapiens
  misc_RNA (1)...(19): siRNA sense strand
aaggaaagaugccaaauaa

SEQ ID NO: 1660357 - RNA, 19 nt, Homo sapiens
  misc_RNA (1)...(19): siRNA sense strand
gcgaguagcugcugauguu

SEQ ID NO: 1660358 - RNA, 19 nt, Homo sapiens
  misc_RNA (1)...(19): siRNA sense strand
ggacccagcuaaacgaauu

SEQ ID NO: 1660359 - RNA, 19 nt, Homo sapiens
  misc_RNA (1)...(19): siRNA sense strand
ggagaaaguuacuguuaug

SEQ ID NO: 1660360 - RNA, 19 nt, Homo sapiens
  misc_RNA (1)...(19): siRNA sense strand
gaacuuacgagagguguua

SEQ ID NO: 1660361 - RNA, 19 nt, Homo sapiens
  misc_RNA (1)...(19): siRNA sense strand
caauggaucucaaaggaaa

SEQ ID NO: 1660362 - RNA, 19 nt, Homo sapiens
  misc_RNA (1)...(19): siRNA sense strand
ugaagaagcccuaauagaa

SEQ ID NO: 1660363 - RNA, 19 nt, Homo sapiens
  misc_RNA (1)...(19): siRNA sense strand
gauguuggucuucauauua

SEQ ID NO: 1660364 - RNA, 19 nt, Homo sapiens
  misc_RNA (1)...(19): siRNA sense strand
gagaugauauccucaguag

SEQ ID NO: 1660365 - RNA, 19 nt, Homo sapiens
  misc_RNA (1)...(19): siRNA sense strand
auaaauaccuugcugaaga

SEQ ID NO: 1660366 - RNA, 19 nt, Homo sapiens
  misc_RNA (1)...(19): siRNA sense strand
gaaaagguguguucaaaga

SEQ ID NO: 1660367 - RNA, 19 nt, Homo sapiens
  misc_RNA (1)...(19): siRNA sense strand
ggaagaugcuaauucugaa

SEQ ID NO: 1660368 - RNA, 19 nt, Homo sapiens
  misc_RNA (1)...(19): siRNA sense strand
ccaauuaaaucucccucua

SEQ ID NO: 1660369 - RNA, 19 nt, Homo sapiens
  misc_RNA (1)...(19): siRNA sense strand
gaagcaaaguaaaggaaga

SEQ ID NO: 1660370 - RNA, 19 nt, Homo sapiens
  misc_RNA (1)...(19): siRNA sense strand
guaaagaucaucagaaaca

SEQ ID NO: 1660371 - RNA, 19 nt, Homo sapiens
  misc_RNA (1)...(19): siRNA sense strand
caagguguauucaguaaug

SEQ ID NO: 1660372 - RNA, 19 nt, Homo sapiens
  misc_RNA (1)...(19): siRNA sense strand
gaaguaagucucaagauca

SEQ ID NO: 1660373 - RNA, 19 nt, Homo sapiens
  misc_RNA (1)...(19): siRNA sense strand
agaagcaggucuccacuuu

SEQ ID NO: 1660374 - RNA, 19 nt, Homo sapiens
  misc_RNA (1)...(19): siRNA sense strand
gggagaaaguuacuguuau

SEQ ID NO: 1660375 - RNA, 19 nt, Homo sapiens
  misc_RNA (1)...(19): siRNA sense strand
acaauauccugguuaauga

SEQ ID NO: 1660376 - RNA, 19 nt, Homo sapiens
  misc_RNA (1)...(19): siRNA sense strand
gauaaacguuacaaugugu

SEQ ID NO: 1660377 - RNA, 19 nt, Homo sapiens
  misc_RNA (1)...(19): siRNA sense strand
gauggaagaugcuaauucu

SEQ ID NO: 1660378 - RNA, 19 nt, Homo sapiens
  misc_RNA (1)...(19): siRNA sense strand
gcaggcaauuguucagaaa

SEQ ID NO: 1660379 - RNA, 19 nt, Homo sapiens
  misc_RNA (1)...(19): siRNA sense strand
gaaagaugccaaauaagau

SEQ ID NO: 1660380 - RNA, 19 nt, Homo sapiens
  misc_RNA (1)...(19): siRNA sense strand
gcaaaguaaaggaagauaa

SEQ ID NO: 1660381 - RNA, 19 nt, Homo sapiens
  misc_RNA (1)...(19): siRNA sense strand
caaauuucauugucugaga

SEQ ID NO: 1660382 - RNA, 19 nt, Homo sapiens
  misc_RNA (1)...(19): siRNA sense strand
guuggcaccugauauguuu

SEQ ID NO: 1660383 - RNA, 19 nt, Homo sapiens
  misc_RNA (1)...(19): siRNA sense strand
gagccgauccuuagaaaga

SEQ ID NO: 1660384 - RNA, 19 nt, Homo sapiens
  misc_RNA (1)...(19): siRNA sense strand
gcuguaagauccuauaguc

SEQ ID NO: 1660385 - RNA, 19 nt, Homo sapiens
  misc_RNA (1)...(19): siRNA sense strand
gaacacgaccucgagauga

SEQ ID NO: 1660386 - RNA, 19 nt, Homo sapiens
  misc_RNA (1)...(19): siRNA sense strand
gaaggucacgguccaaaga

SEQ ID NO: 1660387 - RNA, 19 nt, Homo sapiens
  misc_RNA (1)...(19): siRNA sense strand
gacaauauccugguuaaug

SEQ ID NO: 1660388 - RNA, 19 nt, Homo sapiens
  misc_RNA (1)...(19): siRNA sense strand
cagacaauauccugguuaa

SEQ ID NO: 1660389 - RNA, 19 nt, Homo sapiens
  misc_RNA (1)...(19): siRNA sense strand
agaaguggcuguaaagauc

SEQ ID NO: 1660390 - RNA, 19 nt, Homo sapiens
  misc_RNA (1)...(19): siRNA sense strand
uagcaggucuccaagaaga

SEQ ID NO: 1660391 - RNA, 19 nt, Homo sapiens
  misc_RNA (1)...(19): siRNA sense strand
ggcaagguguauucaguaa

SEQ ID NO: 1660392 - RNA, 19 nt, Homo sapiens
  misc_RNA (1)...(19): siRNA sense strand
ggucugaaacugauaaaga

SEQ ID NO: 1660393 - RNA, 19 nt, Homo sapiens
  misc_RNA (1)...(19): siRNA sense strand
aaaggaaagaugccaaaua

SEQ ID NO: 1660394 - RNA, 19 nt, Homo sapiens
  misc_RNA (1)...(19): siRNA sense strand
caccuuaucuugucaguag

SEQ ID NO: 1660395 - RNA, 19 nt, Homo sapiens
  misc_RNA (1)...(19): siRNA sense strand
caacaugucugugccaucu

SEQ ID NO: 1660396 - RNA, 19 nt, Homo sapiens
  misc_RNA (1)...(19): siRNA sense strand
gaagaagcccuaauagaac

SEQ ID NO: 1660397 - RNA, 19 nt, Homo sapiens
  misc_RNA (1)...(19): siRNA sense strand
ccagagaggagacgacuuu

SEQ ID NO: 1660398 - RNA, 19 nt, Homo sapiens
  misc_RNA (1)...(19): siRNA sense strand
cagaagaagacaaggauaa

SEQ ID NO: 1660399 - RNA, 19 nt, Homo sapiens
  misc_RNA (1)...(19): siRNA sense strand
ccuguuggcugacuugauu

SEQ ID NO: 1660400 - RNA, 19 nt, Homo sapiens
  misc_RNA (1)...(19): siRNA sense strand
uaacagagagggagaaagu

SEQ ID NO: 1660401 - RNA, 19 nt, Homo sapiens
  misc_RNA (1)...(19): siRNA sense strand
ccaaauaagaugauucgaa

SEQ ID NO: 1660402 - RNA, 19 nt, Homo sapiens
  misc_RNA (1)...(19): siRNA sense strand
ccaguugauuuaagaggua

SEQ ID NO: 1660403 - RNA, 19 nt, Homo sapiens
  misc_RNA (1)...(19): siRNA sense strand
ccagaucuccuacugauga

SEQ ID NO: 1660404 - RNA, 19 nt, Homo sapiens
  misc_RNA (1)...(19): siRNA sense strand
caacuaggagcaagucaaa

SEQ ID NO: 1660405 - RNA, 19 nt, Homo sapiens
  misc_RNA (1)...(19): siRNA sense strand
aaagaacggacuagacaua

SEQ ID NO: 1660406 - RNA, 19 nt, Homo sapiens
  misc_RNA (1)...(19): siRNA sense strand
gaaaguacaccagcuaaag

SEQ ID NO: 1660407 - RNA, 19 nt, Homo sapiens
  misc_RNA (1)...(19): siRNA sense strand
ugaagaaaauggagaagua

SEQ ID NO: 1660408 - RNA, 19 nt, Homo sapiens
  misc_RNA (1)...(19): siRNA sense strand
gaggguaugucuccagcaa

SEQ ID NO: 1660409 - RNA, 19 nt, Homo sapiens
  misc_RNA (1)...(19): siRNA sense strand
gauaaugacauaacaccuu

SEQ ID NO: 1660410 - RNA, 19 nt, Homo sapiens
  misc_RNA (1)...(19): siRNA sense strand
cugcugauguuaaagagua

SEQ ID NO: 1660411 - RNA, 19 nt, Homo sapiens
  misc_RNA (1)...(19): siRNA sense strand
uuaaaucucccucuaaaga

SEQ ID NO: 1660412 - RNA, 19 nt, Homo sapiens
  misc_RNA (1)...(19): siRNA sense strand
aggccgaacuugauaauga

SEQ ID NO: 1660413 - RNA, 19 nt, Homo sapiens
  misc_RNA (1)...(19): siRNA sense strand
ccugauauguuuacagaau

SEQ ID NO: 1660414 - RNA, 19 nt, Homo sapiens
  misc_RNA (1)...(19): siRNA sense strand
caccugauauguuuacaga

SEQ ID NO: 1660415 - RNA, 19 nt, Homo sapiens
  misc_RNA (1)...(19): siRNA sense strand
uaaauaccuugcugaagau

SEQ ID NO: 1660416 - RNA, 19 nt, Homo sapiens
  misc_RNA (1)...(19): siRNA sense strand
aggcaauuguucagaaaua

SEQ ID NO: 1660417 - RNA, 19 nt, Homo sapiens
  misc_RNA (1)...(19): siRNA sense strand
gcaggaaucuucgucugau

SEQ ID NO: 1660418 - RNA, 19 nt, Homo sapiens
  misc_RNA (1)...(19): siRNA sense strand
gagaggagacgacuuucuu

SEQ ID NO: 1660419 - RNA, 19 nt, Homo sapiens
  misc_RNA (1)...(19): siRNA sense strand
acauaaacauuccucagaa

SEQ ID NO: 1660420 - RNA, 19 nt, Homo sapiens
  misc_RNA (1)...(19): siRNA sense strand
agaagaaguuugucuccaa

SEQ ID NO: 1660421 - RNA, 19 nt, Homo sapiens
  misc_RNA (1)...(19): siRNA sense strand
agaaguaagucucaagauc

SEQ ID NO: 1660422 - RNA, 19 nt, Homo sapiens
  misc_RNA (1)...(19): siRNA sense strand
acagagagggagaaaguua

SEQ ID NO: 1660423 - RNA, 19 nt, Homo sapiens
  misc_RNA (1)...(19): siRNA sense strand
cuucacauguugcggauaa

SEQ ID NO: 1660424 - RNA, 19 nt, Homo sapiens
  misc_RNA (1)...(19): siRNA sense strand
cuguaaagaucaucagaaa

SEQ ID NO: 1660425 - RNA, 19 nt, Homo sapiens
  misc_RNA (1)...(19): siRNA sense strand
ugauaaccuugaagacuuu

SEQ ID NO: 1660426 - RNA, 19 nt, Homo sapiens
  misc_RNA (1)...(19): siRNA sense strand
ggaagucuuucugaaggaa

SEQ ID NO: 1660427 - RNA, 19 nt, Homo sapiens
  misc_RNA (1)...(19): siRNA sense strand
gaucuccuacugaugauaa

SEQ ID NO: 1660428 - RNA, 19 nt, Homo sapiens
  misc_RNA (1)...(19): siRNA sense strand
ggccagaucuccuacugau

SEQ ID NO: 1660429 - RNA, 19 nt, Homo sapiens
  misc_RNA (1)...(19): siRNA sense strand
gucugaaacugauaaagaa

SEQ ID NO: 1660430 - RNA, 19 nt, Homo sapiens
  misc_RNA (1)...(19): siRNA sense strand
gcauaaacacagaaguaaa

SEQ ID NO: 1660431 - RNA, 19 nt, Homo sapiens
  misc_RNA (1)...(19): siRNA sense strand
ccugaaaucauuauaggua

SEQ ID NO: 1660432 - RNA, 19 nt, Homo sapiens
  misc_RNA (1)...(19): siRNA sense strand
aaagaagcauaaacacaga

SEQ ID NO: 1660433 - RNA, 19 nt, Homo sapiens
  misc_RNA (1)...(19): siRNA sense strand
gauaucaagccagacaaua

SEQ ID NO: 1660434 - RNA, 19 nt, Homo sapiens
  misc_RNA (1)...(19): siRNA sense strand
aauaaugguucaucucaga

SEQ ID NO: 1660435 - RNA, 19 nt, Homo sapiens
  misc_RNA (1)...(19): siRNA sense strand
gaaagccaagcauaaucua

SEQ ID NO: 1660436 - RNA, 19 nt, Homo sapiens
  misc_RNA (1)...(19): siRNA sense strand
cguagcaggucuccaagaa

SEQ ID NO: 1660437 - RNA, 19 nt, Homo sapiens
  misc_RNA (1)...(19): siRNA sense strand
gaucuaagcagagcaaauc

SEQ ID NO: 1660438 - RNA, 19 nt, Homo sapiens
  misc_RNA (1)...(19): siRNA sense strand
caauuaaaucucccucuaa

SEQ ID NO: 1660439 - RNA, 19 nt, Homo sapiens
  misc_RNA (1)...(19): siRNA sense strand
ccaaagaacggacuagaca

SEQ ID NO: 1660440 - RNA, 19 nt, Homo sapiens
  misc_RNA (1)...(19): siRNA sense strand
uaacuggaccgaugcagaa

SEQ ID NO: 1660441 - RNA, 19 nt, Homo sapiens
  misc_RNA (1)...(19): siRNA sense strand
aaguagaucucccauuaga

SEQ ID NO: 1660442 - RNA, 19 nt, Homo sapiens
  misc_RNA (1)...(19): siRNA sense strand
gaugauauccucaguagac

SEQ ID NO: 1660443 - RNA, 19 nt, Homo sapiens
  misc_RNA (1)...(19): siRNA sense strand
uaagaaaguacaccagcua

SEQ ID NO: 1660444 - RNA, 19 nt, Homo sapiens
  misc_RNA (1)...(19): siRNA sense strand
guuaugagcaccauuaauc

SEQ ID NO: 1660445 - RNA, 19 nt, Homo sapiens
  misc_RNA (1)...(19): siRNA sense strand
ccaauaaccauaugcugaa

SEQ ID NO: 1660446 - RNA, 19 nt, Homo sapiens
  misc_RNA (1)...(19): siRNA sense strand
guauagauauguggucugu

SEQ ID NO: 1660447 - RNA, 19 nt, Homo sapiens
  misc_RNA (1)...(19): siRNA sense strand
uaagcacagucgucacaaa

SEQ ID NO: 1660448 - RNA, 19 nt, Homo sapiens
  misc_RNA (1)...(19): siRNA sense strand
uaaugacaguugaacagaa

SEQ ID NO: 1660449 - RNA, 19 nt, Homo sapiens
  misc_RNA (1)...(19): siRNA sense strand
gagcagaagcaaaguaaag

SEQ ID NO: 1660450 - RNA, 19 nt, Homo sapiens
  misc_RNA (1)...(19): siRNA sense strand
ggaaauaggucuaguacua

SEQ ID NO: 1660451 - RNA, 19 nt, Homo sapiens
  misc_RNA (1)...(19): siRNA sense strand
agaaguagaucucccauua

SEQ ID NO: 1660452 - RNA, 19 nt, Homo sapiens
  misc_RNA (1)...(19): siRNA sense strand
gaacagagaagaauccaaa

SEQ ID NO: 1660453 - RNA, 19 nt, Homo sapiens
  misc_RNA (1)...(19): siRNA sense strand
ggaaagaugccaaauaaga

SEQ ID NO: 1660454 - RNA, 19 nt, Homo sapiens
  misc_RNA (1)...(19): siRNA sense strand
gcaaaagacugguuuaaaa

SEQ ID NO: 1660455 - RNA, 19 nt, Homo sapiens
  misc_RNA (1)...(19): siRNA sense strand
aaacagagagccuugauua

SEQ ID NO: 1660456 - RNA, 19 nt, Homo sapiens
  misc_RNA (1)...(19): siRNA sense strand
aaggaaagaugccaaauaa

SEQ ID NO: 1660457 - RNA, 19 nt, Homo sapiens
  misc_RNA (1)...(19): siRNA sense strand
gcgaguagcugcugauguu

SEQ ID NO: 1660458 - RNA, 19 nt, Homo sapiens
  misc_RNA (1)...(19): siRNA sense strand
ggacccagcuaaacgaauu

SEQ ID NO: 1660459 - RNA, 19 nt, Homo sapiens
  misc_RNA (1)...(19): siRNA sense strand
ggagaaaguuacuguuaug

SEQ ID NO: 1660460 - RNA, 19 nt, Homo sapiens
  misc_RNA (1)...(19): siRNA sense strand
gaacuuacgagagguguua

SEQ ID NO: 1660461 - RNA, 19 nt, Homo sapiens
  misc_RNA (1)...(19): siRNA sense strand
caauggaucucaaaggaaa

SEQ ID NO: 1660462 - RNA, 19 nt, Homo sapiens
  misc_RNA (1)...(19): siRNA sense strand
ugaagaagcccuaauagaa

SEQ ID NO: 1660463 - RNA, 19 nt, Homo sapiens
  misc_RNA (1)...(19): siRNA sense strand
gauguuggucuucauauua

SEQ ID NO: 1660464 - RNA, 19 nt, Homo sapiens
  misc_RNA (1)...(19): siRNA sense strand
gagaugauauccucaguag

SEQ ID NO: 1660465 - RNA, 19 nt, Homo sapiens
  misc_RNA (1)...(19): siRNA sense strand
auaaauaccuugcugaaga

SEQ ID NO: 1660466 - RNA, 19 nt, Homo sapiens
  misc_RNA (1)...(19): siRNA sense strand
gaaaagguguguucaaaga

SEQ ID NO: 1660467 - RNA, 19 nt, Homo sapiens
  misc_RNA (1)...(19): siRNA sense strand
ggaagaugcuaauucugaa

SEQ ID NO: 1660468 - RNA, 19 nt, Homo sapiens
  misc_RNA (1)...(19): siRNA sense strand
ccaauuaaaucucccucua

SEQ ID NO: 1660469 - RNA, 19 nt, Homo sapiens
  misc_RNA (1)...(19): siRNA sense strand
gaagcaaaguaaaggaaga

SEQ ID NO: 1660470 - RNA, 19 nt, Homo sapiens
  misc_RNA (1)...(19): siRNA sense strand
guaaagaucaucagaaaca

SEQ ID NO: 1660471 - RNA, 19 nt, Homo sapiens
  misc_RNA (1)...(19): siRNA sense strand
caagguguauucaguaaug

SEQ ID NO: 1660472 - RNA, 19 nt, Homo sapiens
  misc_RNA (1)...(19): siRNA sense strand
gaaguaagucucaagauca

SEQ ID NO: 1660473 - RNA, 19 nt, Homo sapiens
  misc_RNA (1)...(19): siRNA sense strand
agaagcaggucuccacuuu

SEQ ID NO: 1660474 - RNA, 19 nt, Homo sapiens
  misc_RNA (1)...(19): siRNA sense strand
gggagaaaguuacuguuau

SEQ ID NO: 1660475 - RNA, 19 nt, Homo sapiens
  misc_RNA (1)...(19): siRNA sense strand
acaauauccugguuaauga

SEQ ID NO: 1660476 - RNA, 19 nt, Homo sapiens
  misc_RNA (1)...(19): siRNA sense strand
gauaaacguuacaaugugu

SEQ ID NO: 1660477 - RNA, 19 nt, Homo sapiens
  misc_RNA (1)...(19): siRNA sense strand
gauggaagaugcuaauucu

SEQ ID NO: 1660478 - RNA, 19 nt, Homo sapiens
  misc_RNA (1)...(19): siRNA sense strand
gcaggcaauuguucagaaa

SEQ ID NO: 1660479 - RNA, 19 nt, Homo sapiens
  misc_RNA (1)...(19): siRNA sense strand
gaaagaugccaaauaagau

SEQ ID NO: 1660480 - RNA, 19 nt, Homo sapiens
  misc_RNA (1)...(19): siRNA sense strand
gcaaaguaaaggaagauaa

SEQ ID NO: 1660481 - RNA, 19 nt, Homo sapiens
  misc_RNA (1)...(19): siRNA sense strand
caaauuucauugucugaga

SEQ ID NO: 1660482 - RNA, 19 nt, Homo sapiens
  misc_RNA (1)...(19): siRNA sense strand
guuggcaccugauauguuu

SEQ ID NO: 1660483 - RNA, 19 nt, Homo sapiens
  misc_RNA (1)...(19): siRNA sense strand
gagccgauccuuagaaaga

SEQ ID NO: 1660484 - RNA, 19 nt, Homo sapiens
  misc_RNA (1)...(19): siRNA sense strand
gcuguaagauccuauaguc

SEQ ID NO: 1660485 - RNA, 19 nt, Homo sapiens
  misc_RNA (1)...(19): siRNA sense strand
gaacacgaccucgagauga

SEQ ID NO: 1660486 - RNA, 19 nt, Homo sapiens
  misc_RNA (1)...(19): siRNA sense strand
gaaggucacgguccaaaga

SEQ ID NO: 1660487 - RNA, 19 nt, Homo sapiens
  misc_RNA (1)...(19): siRNA sense strand
gacaauauccugguuaaug

SEQ ID NO: 1660488 - RNA, 19 nt, Homo sapiens
  misc_RNA (1)...(19): siRNA sense strand
cagacaauauccugguuaa

SEQ ID NO: 1660489 - RNA, 19 nt, Homo sapiens
  misc_RNA (1)...(19): siRNA sense strand
agaaguggcuguaaagauc

SEQ ID NO: 1660490 - RNA, 19 nt, Homo sapiens
  misc_RNA (1)...(19): siRNA sense strand
uagcaggucuccaagaaga

SEQ ID NO: 1660491 - RNA, 19 nt, Homo sapiens
  misc_RNA (1)...(19): siRNA sense strand
ggcaagguguauucaguaa

SEQ ID NO: 1660492 - RNA, 19 nt, Homo sapiens
  misc_RNA (1)...(19): siRNA sense strand
ggucugaaacugauaaaga

SEQ ID NO: 1660493 - RNA, 19 nt, Homo sapiens
  misc_RNA (1)...(19): siRNA sense strand
aaaggaaagaugccaaaua

SEQ ID NO: 1660494 - RNA, 19 nt, Homo sapiens
  misc_RNA (1)...(19): siRNA sense strand
caccuuaucuugucaguag

SEQ ID NO: 1660495 - RNA, 19 nt, Homo sapiens
  misc_RNA (1)...(19): siRNA sense strand
caacaugucugugccaucu

SEQ ID NO: 1660496 - RNA, 19 nt, Homo sapiens
  misc_RNA (1)...(19): siRNA sense strand
gaagaagcccuaauagaac

SEQ ID NO: 1660497 - RNA, 19 nt, Homo sapiens
  misc_RNA (1)...(19): siRNA sense strand
ccagagaggagacgacuuu

SEQ ID NO: 1660498 - RNA, 19 nt, Homo sapiens
  misc_RNA (1)...(19): siRNA sense strand
cagaagaagacaaggauaa

SEQ ID NO: 1660499 - RNA, 19 nt, Homo sapiens
  misc_RNA (1)...(19): siRNA sense strand
ccuguuggcugacuugauu

SEQ ID NO: 1660500 - RNA, 19 nt, Homo sapiens
  misc_RNA (1)...(19): siRNA sense strand
uaacagagagggagaaagu

SEQ ID NO: 1660501 - RNA, 19 nt, Homo sapiens
  misc_RNA (1)...(19): siRNA sense strand
ccaaauaagaugauucgaa

SEQ ID NO: 1660502 - RNA, 19 nt, Homo sapiens
  misc_RNA (1)...(19): siRNA sense strand
ccaguugauuuaagaggua

SEQ ID NO: 1660503 - RNA, 19 nt, Homo sapiens
  misc_RNA (1)...(19): siRNA sense strand
ccagaucuccuacugauga

SEQ ID NO: 1660504 - RNA, 19 nt, Homo sapiens
  misc_RNA (1)...(19): siRNA sense strand
caacuaggagcaagucaaa

SEQ ID NO: 1660505 - RNA, 19 nt, Homo sapiens
  misc_RNA (1)...(19): siRNA sense strand
aaagaacggacuagacaua

SEQ ID NO: 1660506 - RNA, 19 nt, Homo sapiens
  misc_RNA (1)...(19): siRNA sense strand
gaaaguacaccagcuaaag

SEQ ID NO: 1660507 - RNA, 19 nt, Homo sapiens
  misc_RNA (1)...(19): siRNA sense strand
ugaagaaaauggagaagua

SEQ ID NO: 1660508 - RNA, 19 nt, Homo sapiens
  misc_RNA (1)...(19): siRNA sense strand
gaggguaugucuccagcaa

SEQ ID NO: 1660509 - RNA, 19 nt, Homo sapiens
  misc_RNA (1)...(19): siRNA sense strand
gauaaugacauaacaccuu

SEQ ID NO: 1660510 - RNA, 19 nt, Homo sapiens
  misc_RNA (1)...(19): siRNA sense strand
cugcugauguuaaagagua

SEQ ID NO: 1660511 - RNA, 19 nt, Homo sapiens
  misc_RNA (1)...(19): siRNA sense strand
uuaaaucucccucuaaaga

SEQ ID NO: 1660512 - RNA, 19 nt, Homo sapiens
  misc_RNA (1)...(19): siRNA sense strand
aggccgaacuugauaauga

SEQ ID NO: 1660513 - RNA, 19 nt, Homo sapiens
  misc_RNA (1)...(19): siRNA sense strand
ccugauauguuuacagaau

SEQ ID NO: 1660514 - RNA, 19 nt, Homo sapiens
  misc_RNA (1)...(19): siRNA sense strand
caccugauauguuuacaga

SEQ ID NO: 1660515 - RNA, 19 nt, Homo sapiens
  misc_RNA (1)...(19): siRNA sense strand
uaaauaccuugcugaagau

SEQ ID NO: 1660516 - RNA, 19 nt, Homo sapiens
  misc_RNA (1)...(19): siRNA sense strand
aggcaauuguucagaaaua

SEQ ID NO: 1660517 - RNA, 19 nt, Homo sapiens
  misc_RNA (1)...(19): siRNA sense strand
gcaggaaucuucgucugau

SEQ ID NO: 1660518 - RNA, 19 nt, Homo sapiens
  misc_RNA (1)...(19): siRNA sense strand
gagaggagacgacuuucuu

SEQ ID NO: 1660519 - RNA, 19 nt, Homo sapiens
  misc_RNA (1)...(19): siRNA sense strand
acauaaacauuccucagaa

SEQ ID NO: 1660520 - RNA, 19 nt, Homo sapiens
  misc_RNA (1)...(19): siRNA sense strand
agaagaaguuugucuccaa

SEQ ID NO: 1660521 - RNA, 19 nt, Homo sapiens
  misc_RNA (1)...(19): siRNA sense strand
agaaguaagucucaagauc

SEQ ID NO: 1660522 - RNA, 19 nt, Homo sapiens
  misc_RNA (1)...(19): siRNA sense strand
acagagagggagaaaguua

SEQ ID NO: 1660523 - RNA, 19 nt, Homo sapiens
  misc_RNA (1)...(19): siRNA sense strand
cuucacauguugcggauaa

SEQ ID NO: 1660524 - RNA, 19 nt, Homo sapiens
  misc_RNA (1)...(19): siRNA sense strand
cuguaaagaucaucagaaa

SEQ ID NO: 1660525 - RNA, 19 nt, Homo sapiens
  misc_RNA (1)...(19): siRNA sense strand
ugauaaccuugaagacuuu

SEQ ID NO: 1660526 - RNA, 19 nt, Homo sapiens
  misc_RNA (1)...(19): siRNA sense strand
ggaagucuuucugaaggaa

SEQ ID NO: 1660527 - RNA, 19 nt, Homo sapiens
  misc_RNA (1)...(19): siRNA sense strand
gaucuccuacugaugauaa

SEQ ID NO: 1660528 - RNA, 19 nt, Homo sapiens
  misc_RNA (1)...(19): siRNA sense strand
ggccagaucuccuacugau

SEQ ID NO: 1660529 - RNA, 19 nt, Homo sapiens
  misc_RNA (1)...(19): siRNA sense strand
gucugaaacugauaaagaa

SEQ ID NO: 1660530 - RNA, 19 nt, Homo sapiens
  misc_RNA (1)...(19): siRNA sense strand
gcauaaacacagaaguaaa

SEQ ID NO: 1660531 - RNA, 19 nt, Homo sapiens
  misc_RNA (1)...(19): siRNA sense strand
ccugaaaucauuauaggua

SEQ ID NO: 1660532 - RNA, 19 nt, Homo sapiens
  misc_RNA (1)...(19): siRNA sense strand
aaagaagcauaaacacaga

SEQ ID NO: 1660533 - RNA, 19 nt, Homo sapiens
  misc_RNA (1)...(19): siRNA sense strand
gauaucaagccagacaaua

SEQ ID NO: 1660534 - RNA, 19 nt, Homo sapiens
  misc_RNA (1)...(19): siRNA sense strand
aauaaugguucaucucaga

SEQ ID NO: 1660535 - RNA, 19 nt, Homo sapiens
  misc_RNA (1)...(19): siRNA sense strand
gaaagccaagcauaaucua

SEQ ID NO: 1660536 - RNA, 19 nt, Homo sapiens
  misc_RNA (1)...(19): siRNA sense strand
cguagcaggucuccaagaa

SEQ ID NO: 1660537 - RNA, 19 nt, Homo sapiens
  misc_RNA (1)...(19): siRNA sense strand
gaucuaagcagagcaaauc

SEQ ID NO: 1660538 - RNA, 19 nt, Homo sapiens
  misc_RNA (1)...(19): siRNA sense strand
caauuaaaucucccucuaa

SEQ ID NO: 1660539 - RNA, 19 nt, Homo sapiens
  misc_RNA (1)...(19): siRNA sense strand
ccaaagaacggacuagaca

SEQ ID NO: 1660540 - RNA, 19 nt, Homo sapiens
  misc_RNA (1)...(19): siRNA sense strand
uaacuggaccgaugcagaa

SEQ ID NO: 1660541 - RNA, 19 nt, Homo sapiens
  misc_RNA (1)...(19): siRNA sense strand
aaguagaucucccauuaga

SEQ ID NO: 1660542 - RNA, 19 nt, Homo sapiens
  misc_RNA (1)...(19): siRNA sense strand
gaugauauccucaguagac

SEQ ID NO: 1660543 - RNA, 19 nt, Homo sapiens
  misc_RNA (1)...(19): siRNA sense strand
uaagaaaguacaccagcua

SEQ ID NO: 1660544 - RNA, 19 nt, Homo sapiens
  misc_RNA (1)...(19): siRNA sense strand
guuaugagcaccauuaauc

SEQ ID NO: 1660545 - RNA, 19 nt, Homo sapiens
  misc_RNA (1)...(19): siRNA sense strand
ccaauaaccauaugcugaa

SEQ ID NO: 1660546 - RNA, 19 nt, Homo sapiens
  misc_RNA (1)...(19): siRNA sense strand
guauagauauguggucugu

SEQ ID NO: 1660547 - RNA, 19 nt, Homo sapiens
  misc_RNA (1)...(19): siRNA sense strand
uaagcacagucgucacaaa

SEQ ID NO: 1660548 - RNA, 19 nt, Homo sapiens
  misc_RNA (1)...(19): siRNA sense strand
uaaugacaguugaacagaa

SEQ ID NO: 1660549 - RNA, 19 nt, Homo sapiens
  misc_RNA (1)...(19): siRNA sense strand
gagcagaagcaaaguaaag

SEQ ID NO: 1660550 - RNA, 19 nt, Homo sapiens
  misc_RNA (1)...(19): siRNA sense strand
cagcuuaucuacaaucaua

SEQ ID NO: 1660551 - RNA, 19 nt, Homo sapiens
  misc_RNA (1)...(19): siRNA sense strand
gcacucggcuucccaaugu

SEQ ID NO: 1660552 - RNA, 19 nt, Homo sapiens
  misc_RNA (1)...(19): siRNA sense strand
ggucucagcuuaucuacaa

SEQ ID NO: 1660553 - RNA, 19 nt, Homo sapiens
  misc_RNA (1)...(19): siRNA sense strand
gcagggagguggagaggaa

SEQ ID NO: 1660554 - RNA, 19 nt, Homo sapiens
  misc_RNA (1)...(19): siRNA sense strand
uaaagaggauggacauaga

SEQ ID NO: 1660555 - RNA, 19 nt, Homo sapiens
  misc_RNA (1)...(19): siRNA sense strand
caaaggagagaaguuauua

SEQ ID NO: 1660556 - RNA, 19 nt, Homo sapiens
  misc_RNA (1)...(19): siRNA sense strand
gaacauggcaccagaccuu

SEQ ID NO: 1660557 - RNA, 19 nt, Homo sapiens
  misc_RNA (1)...(19): siRNA sense strand
gagaaguuauuacggugua

SEQ ID NO: 1660558 - RNA, 19 nt, Homo sapiens
  misc_RNA (1)...(19): siRNA sense strand
ugacaaaggagagaaguua

SEQ ID NO: 1660559 - RNA, 19 nt, Homo sapiens
  misc_RNA (1)...(19): siRNA sense strand
gaacaacccagaguacuug

SEQ ID NO: 1660560 - RNA, 19 nt, Homo sapiens
  misc_RNA (1)...(19): siRNA sense strand
gaggaggccuucuauuaca

SEQ ID NO: 1660561 - RNA, 19 nt, Homo sapiens
  misc_RNA (1)...(19): siRNA sense strand
ccacaggccuauuggcauu

SEQ ID NO: 1660562 - RNA, 19 nt, Homo sapiens
  misc_RNA (1)...(19): siRNA sense strand
ccacgaauguaccaaaugu

SEQ ID NO: 1660563 - RNA, 19 nt, Homo sapiens
  misc_RNA (1)...(19): siRNA sense strand
gaagaggguguccaugauu

SEQ ID NO: 1660564 - RNA, 19 nt, Homo sapiens
  misc_RNA (1)...(19): siRNA sense strand
ggacgaggcuagagaacag

SEQ ID NO: 1660565 - RNA, 19 nt, Homo sapiens
  misc_RNA (1)...(19): siRNA sense strand
ugucacagguuacuccuuu

SEQ ID NO: 1660566 - RNA, 19 nt, Homo sapiens
  misc_RNA (1)...(19): siRNA sense strand
aaacaugagucuugguaug

SEQ ID NO: 1660567 - RNA, 19 nt, Homo sapiens
  misc_RNA (1)...(19): siRNA sense strand
uacagcagauugcagauuu

SEQ ID NO: 1660568 - RNA, 19 nt, Homo sapiens
  misc_RNA (1)...(19): siRNA sense strand
acaaggagauauaguagau

SEQ ID NO: 1660569 - RNA, 19 nt, Homo sapiens
  misc_RNA (1)...(19): siRNA sense strand
gauccgagagcagaauuua

SEQ ID NO: 1660570 - RNA, 19 nt, Homo sapiens
  misc_RNA (1)...(19): siRNA sense strand
ugaagaagagcaagaagaa

SEQ ID NO: 1660571 - RNA, 19 nt, Homo sapiens
  misc_RNA (1)...(19): siRNA sense strand
aaugaaauguggccucuug

SEQ ID NO: 1660572 - RNA, 19 nt, Homo sapiens
  misc_RNA (1)...(19): siRNA sense strand
uugaggaggccuucuauua

SEQ ID NO: 1660573 - RNA, 19 nt, Homo sapiens
  misc_RNA (1)...(19): siRNA sense strand
cgccaggacuucaacauga

SEQ ID NO: 1660574 - RNA, 19 nt, Homo sapiens
  misc_RNA (1)...(19): siRNA sense strand
gaagcagucccaagucgaa

SEQ ID NO: 1660575 - RNA, 19 nt, Homo sapiens
  misc_RNA (1)...(19): siRNA sense strand
caaaagagguccaggagau

SEQ ID NO: 1660576 - RNA, 19 nt, Homo sapiens
  misc_RNA (1)...(19): siRNA sense strand
uaaccuguuuguuccauug

SEQ ID NO: 1660577 - RNA, 19 nt, Homo sapiens
  misc_RNA (1)...(19): siRNA sense strand
uagacuagcagaucucuuu

SEQ ID NO: 1660578 - RNA, 19 nt, Homo sapiens
  misc_RNA (1)...(19): siRNA sense strand
gaccacgaauguaccaaau

SEQ ID NO: 1660579 - RNA, 19 nt, Homo sapiens
  misc_RNA (1)...(19): siRNA sense strand
aaagcaagguucuuauucu

SEQ ID NO: 1660580 - RNA, 19 nt, Homo sapiens
  misc_RNA (1)...(19): siRNA sense strand
cugauucuauugcguauga

SEQ ID NO: 1660581 - RNA, 19 nt, Homo sapiens
  misc_RNA (1)...(19): siRNA sense strand
cugcuagugucacagguua

SEQ ID NO: 1660582 - RNA, 19 nt, Homo sapiens
  misc_RNA (1)...(19): siRNA sense strand
ccaguuugguuaagaucaa

SEQ ID NO: 1660583 - RNA, 19 nt, Homo sapiens
  misc_RNA (1)...(19): siRNA sense strand
ucaugcggaugcucgauaa

SEQ ID NO: 1660584 - RNA, 19 nt, Homo sapiens
  misc_RNA (1)...(19): siRNA sense strand
gcauucugguugaugaaga

SEQ ID NO: 1660585 - RNA, 19 nt, Homo sapiens
  misc_RNA (1)...(19): siRNA sense strand
gggcugcggucucugcaau

SEQ ID NO: 1660586 - RNA, 19 nt, Homo sapiens
  misc_RNA (1)...(19): siRNA sense strand
gaggauggacauagaacuu

SEQ ID NO: 1660587 - RNA, 19 nt, Homo sapiens
  misc_RNA (1)...(19): siRNA sense strand
ugauacaggagcaauuuaa

SEQ ID NO: 1660588 - RNA, 19 nt, Homo sapiens
  misc_RNA (1)...(19): siRNA sense strand
accgugagcuggaggagua

SEQ ID NO: 1660589 - RNA, 19 nt, Homo sapiens
  misc_RNA (1)...(19): siRNA sense strand
gaauuuacaggacauuaag

SEQ ID NO: 1660590 - RNA, 19 nt, Homo sapiens
  misc_RNA (1)...(19): siRNA sense strand
aggaggaccagacaacuua

SEQ ID NO: 1660591 - RNA, 19 nt, Homo sapiens
  misc_RNA (1)...(19): siRNA sense strand
aagaagaggguguccauga

SEQ ID NO: 1660592 - RNA, 19 nt, Homo sapiens
  misc_RNA (1)...(19): siRNA sense strand
acagguuacuccuuugcua

SEQ ID NO: 1660593 - RNA, 19 nt, Homo sapiens
  misc_RNA (1)...(19): siRNA sense strand
gaucguggaagcacuaauc

SEQ ID NO: 1660594 - RNA, 19 nt, Homo sapiens
  misc_RNA (1)...(19): siRNA sense strand
agaagaggguguccaugau

SEQ ID NO: 1660595 - RNA, 19 nt, Homo sapiens
  misc_RNA (1)...(19): siRNA sense strand
gaauguaccaaaugucuac

SEQ ID NO: 1660596 - RNA, 19 nt, Homo sapiens
  misc_RNA (1)...(19): siRNA sense strand
aagaagagcaagaagaaga

SEQ ID NO: 1660597 - RNA, 19 nt, Homo sapiens
  misc_RNA (1)...(19): siRNA sense strand
cagugaugcugccaccuuu

SEQ ID NO: 1660598 - RNA, 19 nt, Homo sapiens
  misc_RNA (1)...(19): siRNA sense strand
ucgauacccugcucugaga

SEQ ID NO: 1660599 - RNA, 19 nt, Homo sapiens
  misc_RNA (1)...(19): siRNA sense strand
caacuuaguccugcugaau

SEQ ID NO: 1660600 - RNA, 19 nt, Homo sapiens
  misc_RNA (1)...(19): siRNA sense strand
gcugcggucucugcaauga

SEQ ID NO: 1660601 - RNA, 19 nt, Homo sapiens
  misc_RNA (1)...(19): siRNA sense strand
gcauccaguuugguuaaga

SEQ ID NO: 1660602 - RNA, 19 nt, Homo sapiens
  misc_RNA (1)...(19): siRNA sense strand
cuuacacucugcaauuuau

SEQ ID NO: 1660603 - RNA, 19 nt, Homo sapiens
  misc_RNA (1)...(19): siRNA sense strand
uuaaacaugagucuuggua

SEQ ID NO: 1660604 - RNA, 19 nt, Homo sapiens
  misc_RNA (1)...(19): siRNA sense strand
ucuacaaggagauauagua

SEQ ID NO: 1660605 - RNA, 19 nt, Homo sapiens
  misc_RNA (1)...(19): siRNA sense strand
uacaggagcaauuuaagaa

SEQ ID NO: 1660606 - RNA, 19 nt, Homo sapiens
  misc_RNA (1)...(19): siRNA sense strand
gcuagagaacagaaagaaa

SEQ ID NO: 1660607 - RNA, 19 nt, Homo sapiens
  misc_RNA (1)...(19): siRNA sense strand
guagaucguggaagcacua

SEQ ID NO: 1660608 - RNA, 19 nt, Homo sapiens
  misc_RNA (1)...(19): siRNA sense strand
acaaaggagagaaguuauu

SEQ ID NO: 1660609 - RNA, 19 nt, Homo sapiens
  misc_RNA (1)...(19): siRNA sense strand
caccuuacacucugcaauu

SEQ ID NO: 1660610 - RNA, 19 nt, Homo sapiens
  misc_RNA (1)...(19): siRNA sense strand
gugaugcugccaccuuuaa

SEQ ID NO: 1660611 - RNA, 19 nt, Homo sapiens
  misc_RNA (1)...(19): siRNA sense strand
ccaaggccaucauugaaaa

SEQ ID NO: 1660612 - RNA, 19 nt, Homo sapiens
  misc_RNA (1)...(19): siRNA sense strand
ugacuaccauggcauucug

SEQ ID NO: 1660613 - RNA, 19 nt, Homo sapiens
  misc_RNA (1)...(19): siRNA sense strand
auacagcgauguggagguu

SEQ ID NO: 1660614 - RNA, 19 nt, Homo sapiens
  misc_RNA (1)...(19): siRNA sense strand
agaacuggcuacccuuauc

SEQ ID NO: 1660615 - RNA, 19 nt, Homo sapiens
  misc_RNA (1)...(19): siRNA sense strand
uuacauccauaaccuugug

SEQ ID NO: 1660616 - RNA, 19 nt, Homo sapiens
  misc_RNA (1)...(19): siRNA sense strand
gagggauggcugccuuaaa

SEQ ID NO: 1660617 - RNA, 19 nt, Homo sapiens
  misc_RNA (1)...(19): siRNA sense strand
guuacuccuuugcuaguga

SEQ ID NO: 1660618 - RNA, 19 nt, Homo sapiens
  misc_RNA (1)...(19): siRNA sense strand
gaugagaacaacccagagu

SEQ ID NO: 1660619 - RNA, 19 nt, Homo sapiens
  misc_RNA (1)...(19): siRNA sense strand
acagaacuggcuacccuua

SEQ ID NO: 1660620 - RNA, 19 nt, Homo sapiens
  misc_RNA (1)...(19): siRNA sense strand
ggagggauggcugccuuaa

SEQ ID NO: 1660621 - RNA, 19 nt, Homo sapiens
  misc_RNA (1)...(19): siRNA sense strand
gccaggacuucaacaugau

SEQ ID NO: 1660622 - RNA, 19 nt, Homo sapiens
  misc_RNA (1)...(19): siRNA sense strand
aagaggguguccaugauuc

SEQ ID NO: 1660623 - RNA, 19 nt, Homo sapiens
  misc_RNA (1)...(19): siRNA sense strand
gacaaaggagagaaguuau

SEQ ID NO: 1660624 - RNA, 19 nt, Homo sapiens
  misc_RNA (1)...(19): siRNA sense strand
gauggcugccuuaaacaug

SEQ ID NO: 1660625 - RNA, 19 nt, Homo sapiens
  misc_RNA (1)...(19): siRNA sense strand
ccuccaaggccaucauuga

SEQ ID NO: 1660626 - RNA, 19 nt, Homo sapiens
  misc_RNA (1)...(19): siRNA sense strand
cagaauuuacaggacauua

SEQ ID NO: 1660627 - RNA, 19 nt, Homo sapiens
  misc_RNA (1)...(19): siRNA sense strand
uggcuacccuuaucgauac

SEQ ID NO: 1660628 - RNA, 19 nt, Homo sapiens
  misc_RNA (1)...(19): siRNA sense strand
gaaccaugggcucguguca

SEQ ID NO: 1660629 - RNA, 19 nt, Homo sapiens
  misc_RNA (1)...(19): siRNA sense strand
agggauggcugccuuaaac

SEQ ID NO: 1660630 - RNA, 19 nt, Homo sapiens
  misc_RNA (1)...(19): siRNA sense strand
ggcccucagucccagguuu

SEQ ID NO: 1660631 - RNA, 19 nt, Homo sapiens
  misc_RNA (1)...(19): siRNA sense strand
ugaggaggccuucuauuac

SEQ ID NO: 1660632 - RNA, 19 nt, Homo sapiens
  misc_RNA (1)...(19): siRNA sense strand
ugcggucucugcaaugaaa

SEQ ID NO: 1660633 - RNA, 19 nt, Homo sapiens
  misc_RNA (1)...(19): siRNA sense strand
gauauaguagaucguggaa

SEQ ID NO: 1660634 - RNA, 19 nt, Homo sapiens
  misc_RNA (1)...(19): siRNA sense strand
gguggucucagcuuaucua

SEQ ID NO: 1660635 - RNA, 19 nt, Homo sapiens
  misc_RNA (1)...(19): siRNA sense strand
gguauggugacuccuguga

SEQ ID NO: 1660636 - RNA, 19 nt, Homo sapiens
  misc_RNA (1)...(19): siRNA sense strand
cuaaagaggauggacauag

SEQ ID NO: 1660637 - RNA, 19 nt, Homo sapiens
  misc_RNA (1)...(19): siRNA sense strand
aaugauacaggagcaauuu

SEQ ID NO: 1660638 - RNA, 19 nt, Homo sapiens
  misc_RNA (1)...(19): siRNA sense strand
cgaauguaccaaaugucua

SEQ ID NO: 1660639 - RNA, 19 nt, Homo sapiens
  misc_RNA (1)...(19): siRNA sense strand
gaagaagagcaagaagaag

SEQ ID NO: 1660640 - RNA, 19 nt, Homo sapiens
  misc_RNA (1)...(19): siRNA sense strand
caggagaugaggaacaaga

SEQ ID NO: 1660641 - RNA, 19 nt, Homo sapiens
  misc_RNA (1)...(19): siRNA sense strand
ccaccucugcugucccuaa

SEQ ID NO: 1660642 - RNA, 19 nt, Homo sapiens
  misc_RNA (1)...(19): siRNA sense strand
ccucccaaguggcagauug

SEQ ID NO: 1660643 - RNA, 19 nt, Homo sapiens
  misc_RNA (1)...(19): siRNA sense strand
ggccuucuauuacauccau

SEQ ID NO: 1660644 - RNA, 19 nt, Homo sapiens
  misc_RNA (1)...(19): siRNA sense strand
caaugauacaggagcaauu

SEQ ID NO: 1660645 - RNA, 19 nt, Homo sapiens
  misc_RNA (1)...(19): siRNA sense strand
ggaggcgcuuucccuugga

SEQ ID NO: 1660646 - RNA, 19 nt, Homo sapiens
  misc_RNA (1)...(19): siRNA sense strand
ccuuacacucugcaauuua

SEQ ID NO: 1660647 - RNA, 19 nt, Homo sapiens
  misc_RNA (1)...(19): siRNA sense strand
cauccaguuugguuaagau

SEQ ID NO: 1660648 - RNA, 19 nt, Homo sapiens
  misc_RNA (1)...(19): siRNA sense strand
aaagaggauggacauagaa

SEQ ID NO: 1660649 - RNA, 19 nt, Homo sapiens
  misc_RNA (1)...(19): siRNA sense strand
ggagccgacuacuggagau

SEQ ID NO: 1660650 - RNA, 19 nt, Homo sapiens
  misc_RNA (1)...(19): siRNA sense strand
cagcuuaucuacaaucaua

SEQ ID NO: 1660651 - RNA, 19 nt, Homo sapiens
  misc_RNA (1)...(19): siRNA sense strand
gcacucggcuucccaaugu

SEQ ID NO: 1660652 - RNA, 19 nt, Homo sapiens
  misc_RNA (1)...(19): siRNA sense strand
ggucucagcuuaucuacaa

SEQ ID NO: 1660653 - RNA, 19 nt, Homo sapiens
  misc_RNA (1)...(19): siRNA sense strand
gcagggagguggagaggaa

SEQ ID NO: 1660654 - RNA, 19 nt, Homo sapiens
  misc_RNA (1)...(19): siRNA sense strand
uaaagaggauggacauaga

SEQ ID NO: 1660655 - RNA, 19 nt, Homo sapiens
  misc_RNA (1)...(19): siRNA sense strand
caaaggagagaaguuauua

SEQ ID NO: 1660656 - RNA, 19 nt, Homo sapiens
  misc_RNA (1)...(19): siRNA sense strand
gaacauggcaccagaccuu

SEQ ID NO: 1660657 - RNA, 19 nt, Homo sapiens
  misc_RNA (1)...(19): siRNA sense strand
gagaaguuauuacggugua

SEQ ID NO: 1660658 - RNA, 19 nt, Homo sapiens
  misc_RNA (1)...(19): siRNA sense strand
ugacaaaggagagaaguua

SEQ ID NO: 1660659 - RNA, 19 nt, Homo sapiens
  misc_RNA (1)...(19): siRNA sense strand
gaacaacccagaguacuug

SEQ ID NO: 1660660 - RNA, 19 nt, Homo sapiens
  misc_RNA (1)...(19): siRNA sense strand
gaggaggccuucuauuaca

SEQ ID NO: 1660661 - RNA, 19 nt, Homo sapiens
  misc_RNA (1)...(19): siRNA sense strand
ccacaggccuauuggcauu

SEQ ID NO: 1660662 - RNA, 19 nt, Homo sapiens
  misc_RNA (1)...(19): siRNA sense strand
ccacgaauguaccaaaugu

SEQ ID NO: 1660663 - RNA, 19 nt, Homo sapiens
  misc_RNA (1)...(19): siRNA sense strand
gaagaggguguccaugauu

SEQ ID NO: 1660664 - RNA, 19 nt, Homo sapiens
  misc_RNA (1)...(19): siRNA sense strand
ggacgaggcuagagaacag

SEQ ID NO: 1660665 - RNA, 19 nt, Homo sapiens
  misc_RNA (1)...(19): siRNA sense strand
ugucacagguuacuccuuu

SEQ ID NO: 1660666 - RNA, 19 nt, Homo sapiens
  misc_RNA (1)...(19): siRNA sense strand
aaacaugagucuugguaug

SEQ ID NO: 1660667 - RNA, 19 nt, Homo sapiens
  misc_RNA (1)...(19): siRNA sense strand
uacagcagauugcagauuu

SEQ ID NO: 1660668 - RNA, 19 nt, Homo sapiens
  misc_RNA (1)...(19): siRNA sense strand
acaaggagauauaguagau

SEQ ID NO: 1660669 - RNA, 19 nt, Homo sapiens
  misc_RNA (1)...(19): siRNA sense strand
gauccgagagcagaauuua

SEQ ID NO: 1660670 - RNA, 19 nt, Homo sapiens
  misc_RNA (1)...(19): siRNA sense strand
ugaagaagagcaagaagaa

SEQ ID NO: 1660671 - RNA, 19 nt, Homo sapiens
  misc_RNA (1)...(19): siRNA sense strand
aaugaaauguggccucuug

SEQ ID NO: 1660672 - RNA, 19 nt, Homo sapiens
  misc_RNA (1)...(19): siRNA sense strand
uugaggaggccuucuauua

SEQ ID NO: 1660673 - RNA, 19 nt, Homo sapiens
  misc_RNA (1)...(19): siRNA sense strand
cgccaggacuucaacauga

SEQ ID NO: 1660674 - RNA, 19 nt, Homo sapiens
  misc_RNA (1)...(19): siRNA sense strand
gaagcagucccaagucgaa

SEQ ID NO: 1660675 - RNA, 19 nt, Homo sapiens
  misc_RNA (1)...(19): siRNA sense strand
caaaagagguccaggagau

SEQ ID NO: 1660676 - RNA, 19 nt, Homo sapiens
  misc_RNA (1)...(19): siRNA sense strand
uaaccuguuuguuccauug

SEQ ID NO: 1660677 - RNA, 19 nt, Homo sapiens
  misc_RNA (1)...(19): siRNA sense strand
uagacuagcagaucucuuu

SEQ ID NO: 1660678 - RNA, 19 nt, Homo sapiens
  misc_RNA (1)...(19): siRNA sense strand
gaccacgaauguaccaaau

SEQ ID NO: 1660679 - RNA, 19 nt, Homo sapiens
  misc_RNA (1)...(19): siRNA sense strand
aaagcaagguucuuauucu

SEQ ID NO: 1660680 - RNA, 19 nt, Homo sapiens
  misc_RNA (1)...(19): siRNA sense strand
cugauucuauugcguauga

SEQ ID NO: 1660681 - RNA, 19 nt, Homo sapiens
  misc_RNA (1)...(19): siRNA sense strand
cugcuagugucacagguua

SEQ ID NO: 1660682 - RNA, 19 nt, Homo sapiens
  misc_RNA (1)...(19): siRNA sense strand
ccaguuugguuaagaucaa

SEQ ID NO: 1660683 - RNA, 19 nt, Homo sapiens
  misc_RNA (1)...(19): siRNA sense strand
ucaugcggaugcucgauaa

SEQ ID NO: 1660684 - RNA, 19 nt, Homo sapiens
  misc_RNA (1)...(19): siRNA sense strand
gcauucugguugaugaaga

SEQ ID NO: 1660685 - RNA, 19 nt, Homo sapiens
  misc_RNA (1)...(19): siRNA sense strand
gggcugcggucucugcaau

SEQ ID NO: 1660686 - RNA, 19 nt, Homo sapiens
  misc_RNA (1)...(19): siRNA sense strand
gaggauggacauagaacuu

SEQ ID NO: 1660687 - RNA, 19 nt, Homo sapiens
  misc_RNA (1)...(19): siRNA sense strand
ugauacaggagcaauuuaa

SEQ ID NO: 1660688 - RNA, 19 nt, Homo sapiens
  misc_RNA (1)...(19): siRNA sense strand
accgugagcuggaggagua

SEQ ID NO: 1660689 - RNA, 19 nt, Homo sapiens
  misc_RNA (1)...(19): siRNA sense strand
gaauuuacaggacauuaag

SEQ ID NO: 1660690 - RNA, 19 nt, Homo sapiens
  misc_RNA (1)...(19): siRNA sense strand
aggaggaccagacaacuua

SEQ ID NO: 1660691 - RNA, 19 nt, Homo sapiens
  misc_RNA (1)...(19): siRNA sense strand
aagaagaggguguccauga

SEQ ID NO: 1660692 - RNA, 19 nt, Homo sapiens
  misc_RNA (1)...(19): siRNA sense strand
acagguuacuccuuugcua

SEQ ID NO: 1660693 - RNA, 19 nt, Homo sapiens
  misc_RNA (1)...(19): siRNA sense strand
gaucguggaagcacuaauc

SEQ ID NO: 1660694 - RNA, 19 nt, Homo sapiens
  misc_RNA (1)...(19): siRNA sense strand
agaagaggguguccaugau

SEQ ID NO: 1660695 - RNA, 19 nt, Homo sapiens
  misc_RNA (1)...(19): siRNA sense strand
gaauguaccaaaugucuac

SEQ ID NO: 1660696 - RNA, 19 nt, Homo sapiens
  misc_RNA (1)...(19): siRNA sense strand
aagaagagcaagaagaaga

SEQ ID NO: 1660697 - RNA, 19 nt, Homo sapiens
  misc_RNA (1)...(19): siRNA sense strand
cagugaugcugccaccuuu

SEQ ID NO: 1660698 - RNA, 19 nt, Homo sapiens
  misc_RNA (1)...(19): siRNA sense strand
ucgauacccugcucugaga

SEQ ID NO: 1660699 - RNA, 19 nt, Homo sapiens
  misc_RNA (1)...(19): siRNA sense strand
caacuuaguccugcugaau

SEQ ID NO: 1660700 - RNA, 19 nt, Homo sapiens
  misc_RNA (1)...(19): siRNA sense strand
gcugcggucucugcaauga

SEQ ID NO: 1660701 - RNA, 19 nt, Homo sapiens
  misc_RNA (1)...(19): siRNA sense strand
gcauccaguuugguuaaga

SEQ ID NO: 1660702 - RNA, 19 nt, Homo sapiens
  misc_RNA (1)...(19): siRNA sense strand
cuuacacucugcaauuuau

SEQ ID NO: 1660703 - RNA, 19 nt, Homo sapiens
  misc_RNA (1)...(19): siRNA sense strand
uuaaacaugagucuuggua

SEQ ID NO: 1660704 - RNA, 19 nt, Homo sapiens
  misc_RNA (1)...(19): siRNA sense strand
ucuacaaggagauauagua

SEQ ID NO: 1660705 - RNA, 19 nt, Homo sapiens
  misc_RNA (1)...(19): siRNA sense strand
uacaggagcaauuuaagaa

SEQ ID NO: 1660706 - RNA, 19 nt, Homo sapiens
  misc_RNA (1)...(19): siRNA sense strand
gcuagagaacagaaagaaa

SEQ ID NO: 1660707 - RNA, 19 nt, Homo sapiens
  misc_RNA (1)...(19): siRNA sense strand
guagaucguggaagcacua

SEQ ID NO: 1660708 - RNA, 19 nt, Homo sapiens
  misc_RNA (1)...(19): siRNA sense strand
acaaaggagagaaguuauu

SEQ ID NO: 1660709 - RNA, 19 nt, Homo sapiens
  misc_RNA (1)...(19): siRNA sense strand
caccuuacacucugcaauu

SEQ ID NO: 1660710 - RNA, 19 nt, Homo sapiens
  misc_RNA (1)...(19): siRNA sense strand
gugaugcugccaccuuuaa

SEQ ID NO: 1660711 - RNA, 19 nt, Homo sapiens
  misc_RNA (1)...(19): siRNA sense strand
ccaaggccaucauugaaaa

SEQ ID NO: 1660712 - RNA, 19 nt, Homo sapiens
  misc_RNA (1)...(19): siRNA sense strand
ugacuaccauggcauucug

SEQ ID NO: 1660713 - RNA, 19 nt, Homo sapiens
  misc_RNA (1)...(19): siRNA sense strand
auacagcgauguggagguu

SEQ ID NO: 1660714 - RNA, 19 nt, Homo sapiens
  misc_RNA (1)...(19): siRNA sense strand
agaacuggcuacccuuauc

SEQ ID NO: 1660715 - RNA, 19 nt, Homo sapiens
  misc_RNA (1)...(19): siRNA sense strand
uuacauccauaaccuugug

SEQ ID NO: 1660716 - RNA, 19 nt, Homo sapiens
  misc_RNA (1)...(19): siRNA sense strand
gagggauggcugccuuaaa

SEQ ID NO: 1660717 - RNA, 19 nt, Homo sapiens
  misc_RNA (1)...(19): siRNA sense strand
guuacuccuuugcuaguga

SEQ ID NO: 1660718 - RNA, 19 nt, Homo sapiens
  misc_RNA (1)...(19): siRNA sense strand
gaugagaacaacccagagu

SEQ ID NO: 1660719 - RNA, 19 nt, Homo sapiens
  misc_RNA (1)...(19): siRNA sense strand
acagaacuggcuacccuua

SEQ ID NO: 1660720 - RNA, 19 nt, Homo sapiens
  misc_RNA (1)...(19): siRNA sense strand
ggagggauggcugccuuaa

SEQ ID NO: 1660721 - RNA, 19 nt, Homo sapiens
  misc_RNA (1)...(19): siRNA sense strand
gccaggacuucaacaugau

SEQ ID NO: 1660722 - RNA, 19 nt, Homo sapiens
  misc_RNA (1)...(19): siRNA sense strand
aagaggguguccaugauuc

SEQ ID NO: 1660723 - RNA, 19 nt, Homo sapiens
  misc_RNA (1)...(19): siRNA sense strand
gacaaaggagagaaguuau

SEQ ID NO: 1660724 - RNA, 19 nt, Homo sapiens
  misc_RNA (1)...(19): siRNA sense strand
gauggcugccuuaaacaug

SEQ ID NO: 1660725 - RNA, 19 nt, Homo sapiens
  misc_RNA (1)...(19): siRNA sense strand
ccuccaaggccaucauuga

SEQ ID NO: 1660726 - RNA, 19 nt, Homo sapiens
  misc_RNA (1)...(19): siRNA sense strand
cagaauuuacaggacauua

SEQ ID NO: 1660727 - RNA, 19 nt, Homo sapiens
  misc_RNA (1)...(19): siRNA sense strand
uggcuacccuuaucgauac

SEQ ID NO: 1660728 - RNA, 19 nt, Homo sapiens
  misc_RNA (1)...(19): siRNA sense strand
gaaccaugggcucguguca

SEQ ID NO: 1660729 - RNA, 19 nt, Homo sapiens
  misc_RNA (1)...(19): siRNA sense strand
agggauggcugccuuaaac

SEQ ID NO: 1660730 - RNA, 19 nt, Homo sapiens
  misc_RNA (1)...(19): siRNA sense strand
ggcccucagucccagguuu

SEQ ID NO: 1660731 - RNA, 19 nt, Homo sapiens
  misc_RNA (1)...(19): siRNA sense strand
ugaggaggccuucuauuac

SEQ ID NO: 1660732 - RNA, 19 nt, Homo sapiens
  misc_RNA (1)...(19): siRNA sense strand
ugcggucucugcaaugaaa

SEQ ID NO: 1660733 - RNA, 19 nt, Homo sapiens
  misc_RNA (1)...(19): siRNA sense strand
gauauaguagaucguggaa

SEQ ID NO: 1660734 - RNA, 19 nt, Homo sapiens
  misc_RNA (1)...(19): siRNA sense strand
gguggucucagcuuaucua

SEQ ID NO: 1660735 - RNA, 19 nt, Homo sapiens
  misc_RNA (1)...(19): siRNA sense strand
gguauggugacuccuguga

SEQ ID NO: 1660736 - RNA, 19 nt, Homo sapiens
  misc_RNA (1)...(19): siRNA sense strand
cuaaagaggauggacauag

SEQ ID NO: 1660737 - RNA, 19 nt, Homo sapiens
  misc_RNA (1)...(19): siRNA sense strand
aaugauacaggagcaauuu

SEQ ID NO: 1660738 - RNA, 19 nt, Homo sapiens
  misc_RNA (1)...(19): siRNA sense strand
cgaauguaccaaaugucua

SEQ ID NO: 1660739 - RNA, 19 nt, Homo sapiens
  misc_RNA (1)...(19): siRNA sense strand
gaagaagagcaagaagaag

SEQ ID NO: 1660740 - RNA, 19 nt, Homo sapiens
  misc_RNA (1)...(19): siRNA sense strand
caggagaugaggaacaaga

SEQ ID NO: 1660741 - RNA, 19 nt, Homo sapiens
  misc_RNA (1)...(19): siRNA sense strand
ccaccucugcugucccuaa

SEQ ID NO: 1660742 - RNA, 19 nt, Homo sapiens
  misc_RNA (1)...(19): siRNA sense strand
ccucccaaguggcagauug

SEQ ID NO: 1660743 - RNA, 19 nt, Homo sapiens
  misc_RNA (1)...(19): siRNA sense strand
ggccuucuauuacauccau

SEQ ID NO: 1660744 - RNA, 19 nt, Homo sapiens
  misc_RNA (1)...(19): siRNA sense strand
caaugauacaggagcaauu

SEQ ID NO: 1660745 - RNA, 19 nt, Homo sapiens
  misc_RNA (1)...(19): siRNA sense strand
ggaggcgcuuucccuugga

SEQ ID NO: 1660746 - RNA, 19 nt, Homo sapiens
  misc_RNA (1)...(19): siRNA sense strand
ccuuacacucugcaauuua

SEQ ID NO: 1660747 - RNA, 19 nt, Homo sapiens
  misc_RNA (1)...(19): siRNA sense strand
cauccaguuugguuaagau

SEQ ID NO: 1660748 - RNA, 19 nt, Homo sapiens
  misc_RNA (1)...(19): siRNA sense strand
aaagaggauggacauagaa

SEQ ID NO: 1660749 - RNA, 19 nt, Homo sapiens
  misc_RNA (1)...(19): siRNA sense strand
ggagccgacuacuggagau

SEQ ID NO: 1660750 - RNA, 19 nt, Homo sapiens
  misc_RNA (1)...(19): siRNA sense strand
cagcuuaucuacaaucaua

SEQ ID NO: 1660751 - RNA, 19 nt, Homo sapiens
  misc_RNA (1)...(19): siRNA sense strand
ggucucagcuuaucuacaa

SEQ ID NO: 1660752 - RNA, 19 nt, Homo sapiens
  misc_RNA (1)...(19): siRNA sense strand
gcagggagguggagaggaa

SEQ ID NO: 1660753 - RNA, 19 nt, Homo sapiens
  misc_RNA (1)...(19): siRNA sense strand
uaaagaggauggacauaga

SEQ ID NO: 1660754 - RNA, 19 nt, Homo sapiens
  misc_RNA (1)...(19): siRNA sense strand
caaaggagagaaguuauua

SEQ ID NO: 1660755 - RNA, 19 nt, Homo sapiens
  misc_RNA (1)...(19): siRNA sense strand
gaacauggcaccagaccuu

SEQ ID NO: 1660756 - RNA, 19 nt, Homo sapiens
  misc_RNA (1)...(19): siRNA sense strand
gagaaguuauuacggugua

SEQ ID NO: 1660757 - RNA, 19 nt, Homo sapiens
  misc_RNA (1)...(19): siRNA sense strand
ugacaaaggagagaaguua

SEQ ID NO: 1660758 - RNA, 19 nt, Homo sapiens
  misc_RNA (1)...(19): siRNA sense strand
gaacaacccagaguacuug

SEQ ID NO: 1660759 - RNA, 19 nt, Homo sapiens
  misc_RNA (1)...(19): siRNA sense strand
gaggaggccuucuauuaca

SEQ ID NO: 1660760 - RNA, 19 nt, Homo sapiens
  misc_RNA (1)...(19): siRNA sense strand
ccacaggccuauuggcauu

SEQ ID NO: 1660761 - RNA, 19 nt, Homo sapiens
  misc_RNA (1)...(19): siRNA sense strand
ccacgaauguaccaaaugu

SEQ ID NO: 1660762 - RNA, 19 nt, Homo sapiens
  misc_RNA (1)...(19): siRNA sense strand
gaagaggguguccaugauu

SEQ ID NO: 1660763 - RNA, 19 nt, Homo sapiens
  misc_RNA (1)...(19): siRNA sense strand
ggacgaggcuagagaacag

SEQ ID NO: 1660764 - RNA, 19 nt, Homo sapiens
  misc_RNA (1)...(19): siRNA sense strand
ugucacagguuacuccuuu

SEQ ID NO: 1660765 - RNA, 19 nt, Homo sapiens
  misc_RNA (1)...(19): siRNA sense strand
aaacaugagucuugguaug

SEQ ID NO: 1660766 - RNA, 19 nt, Homo sapiens
  misc_RNA (1)...(19): siRNA sense strand
uacagcagauugcagauuu

SEQ ID NO: 1660767 - RNA, 19 nt, Homo sapiens
  misc_RNA (1)...(19): siRNA sense strand
acaaggagauauaguagau

SEQ ID NO: 1660768 - RNA, 19 nt, Homo sapiens
  misc_RNA (1)...(19): siRNA sense strand
gauccgagagcagaauuua

SEQ ID NO: 1660769 - RNA, 19 nt, Homo sapiens
  misc_RNA (1)...(19): siRNA sense strand
aaugaaauguggccucuug

SEQ ID NO: 1660770 - RNA, 19 nt, Homo sapiens
  misc_RNA (1)...(19): siRNA sense strand
uugaggaggccuucuauua

SEQ ID NO: 1660771 - RNA, 19 nt, Homo sapiens
  misc_RNA (1)...(19): siRNA sense strand
cgccaggacuucaacauga

SEQ ID NO: 1660772 - RNA, 19 nt, Homo sapiens
  misc_RNA (1)...(19): siRNA sense strand
gaagcagucccaagucgaa

SEQ ID NO: 1660773 - RNA, 19 nt, Homo sapiens
  misc_RNA (1)...(19): siRNA sense strand
caaaagagguccaggagau

SEQ ID NO: 1660774 - RNA, 19 nt, Homo sapiens
  misc_RNA (1)...(19): siRNA sense strand
uaaccuguuuguuccauug

SEQ ID NO: 1660775 - RNA, 19 nt, Homo sapiens
  misc_RNA (1)...(19): siRNA sense strand
uagacuagcagaucucuuu

SEQ ID NO: 1660776 - RNA, 19 nt, Homo sapiens
  misc_RNA (1)...(19): siRNA sense strand
gaccacgaauguaccaaau

SEQ ID NO: 1660777 - RNA, 19 nt, Homo sapiens
  misc_RNA (1)...(19): siRNA sense strand
aaagcaagguucuuauucu

SEQ ID NO: 1660778 - RNA, 19 nt, Homo sapiens
  misc_RNA (1)...(19): siRNA sense strand
cugauucuauugcguauga

SEQ ID NO: 1660779 - RNA, 19 nt, Homo sapiens
  misc_RNA (1)...(19): siRNA sense strand
cugcuagugucacagguua

SEQ ID NO: 1660780 - RNA, 19 nt, Homo sapiens
  misc_RNA (1)...(19): siRNA sense strand
ccaguuugguuaagaucaa

SEQ ID NO: 1660781 - RNA, 19 nt, Homo sapiens
  misc_RNA (1)...(19): siRNA sense strand
ucaugcggaugcucgauaa

SEQ ID NO: 1660782 - RNA, 19 nt, Homo sapiens
  misc_RNA (1)...(19): siRNA sense strand
gcauucugguugaugaaga

SEQ ID NO: 1660783 - RNA, 19 nt, Homo sapiens
  misc_RNA (1)...(19): siRNA sense strand
gggcugcggucucugcaau

SEQ ID NO: 1660784 - RNA, 19 nt, Homo sapiens
  misc_RNA (1)...(19): siRNA sense strand
gaggauggacauagaacuu

SEQ ID NO: 1660785 - RNA, 19 nt, Homo sapiens
  misc_RNA (1)...(19): siRNA sense strand
ugauacaggagcaauuuaa

SEQ ID NO: 1660786 - RNA, 19 nt, Homo sapiens
  misc_RNA (1)...(19): siRNA sense strand
accgugagcuggaggagua

SEQ ID NO: 1660787 - RNA, 19 nt, Homo sapiens
  misc_RNA (1)...(19): siRNA sense strand
gaauuuacaggacauuaag

SEQ ID NO: 1660788 - RNA, 19 nt, Homo sapiens
  misc_RNA (1)...(19): siRNA sense strand
aggaggaccagacaacuua

SEQ ID NO: 1660789 - RNA, 19 nt, Homo sapiens
  misc_RNA (1)...(19): siRNA sense strand
aagaagaggguguccauga

SEQ ID NO: 1660790 - RNA, 19 nt, Homo sapiens
  misc_RNA (1)...(19): siRNA sense strand
acagguuacuccuuugcua

SEQ ID NO: 1660791 - RNA, 19 nt, Homo sapiens
  misc_RNA (1)...(19): siRNA sense strand
gaucguggaagcacuaauc

SEQ ID NO: 1660792 - RNA, 19 nt, Homo sapiens
  misc_RNA (1)...(19): siRNA sense strand
agaagaggguguccaugau

SEQ ID NO: 1660793 - RNA, 19 nt, Homo sapiens
  misc_RNA (1)...(19): siRNA sense strand
gaauguaccaaaugucuac

SEQ ID NO: 1660794 - RNA, 19 nt, Homo sapiens
  misc_RNA (1)...(19): siRNA sense strand
ucgauacccugcucugaga

SEQ ID NO: 1660795 - RNA, 19 nt, Homo sapiens
  misc_RNA (1)...(19): siRNA sense strand
caacuuaguccugcugaau

SEQ ID NO: 1660796 - RNA, 19 nt, Homo sapiens
  misc_RNA (1)...(19): siRNA sense strand
gcugcggucucugcaauga

SEQ ID NO: 1660797 - RNA, 19 nt, Homo sapiens
  misc_RNA (1)...(19): siRNA sense strand
gcauccaguuugguuaaga

SEQ ID NO: 1660798 - RNA, 19 nt, Homo sapiens
  misc_RNA (1)...(19): siRNA sense strand
cuuacacucugcaauuuau

SEQ ID NO: 1660799 - RNA, 19 nt, Homo sapiens
  misc_RNA (1)...(19): siRNA sense strand
uuaaacaugagucuuggua

SEQ ID NO: 1660800 - RNA, 19 nt, Homo sapiens
  misc_RNA (1)...(19): siRNA sense strand
ucuacaaggagauauagua

SEQ ID NO: 1660801 - RNA, 19 nt, Homo sapiens
  misc_RNA (1)...(19): siRNA sense strand
uacaggagcaauuuaagaa

SEQ ID NO: 1660802 - RNA, 19 nt, Homo sapiens
  misc_RNA (1)...(19): siRNA sense strand
gcuagagaacagaaagaaa

SEQ ID NO: 1660803 - RNA, 19 nt, Homo sapiens
  misc_RNA (1)...(19): siRNA sense strand
guagaucguggaagcacua

SEQ ID NO: 1660804 - RNA, 19 nt, Homo sapiens
  misc_RNA (1)...(19): siRNA sense strand
acaaaggagagaaguuauu

SEQ ID NO: 1660805 - RNA, 19 nt, Homo sapiens
  misc_RNA (1)...(19): siRNA sense strand
caccuuacacucugcaauu

SEQ ID NO: 1660806 - RNA, 19 nt, Homo sapiens
  misc_RNA (1)...(19): siRNA sense strand
ccaaggccaucauugaaaa

SEQ ID NO: 1660807 - RNA, 19 nt, Homo sapiens
  misc_RNA (1)...(19): siRNA sense strand
ugacuaccauggcauucug

SEQ ID NO: 1660808 - RNA, 19 nt, Homo sapiens
  misc_RNA (1)...(19): siRNA sense strand
auacagcgauguggagguu

SEQ ID NO: 1660809 - RNA, 19 nt, Homo sapiens
  misc_RNA (1)...(19): siRNA sense strand
agaacuggcuacccuuauc

SEQ ID NO: 1660810 - RNA, 19 nt, Homo sapiens
  misc_RNA (1)...(19): siRNA sense strand
uuacauccauaaccuugug

SEQ ID NO: 1660811 - RNA, 19 nt, Homo sapiens
  misc_RNA (1)...(19): siRNA sense strand
gagggauggcugccuuaaa

SEQ ID NO: 1660812 - RNA, 19 nt, Homo sapiens
  misc_RNA (1)...(19): siRNA sense strand
guuacuccuuugcuaguga

SEQ ID NO: 1660813 - RNA, 19 nt, Homo sapiens
  misc_RNA (1)...(19): siRNA sense strand
acagaacuggcuacccuua

SEQ ID NO: 1660814 - RNA, 19 nt, Homo sapiens
  misc_RNA (1)...(19): siRNA sense strand
gaugagaacaacccagagu

SEQ ID NO: 1660815 - RNA, 19 nt, Homo sapiens
  misc_RNA (1)...(19): siRNA sense strand
ggagggauggcugccuuaa

SEQ ID NO: 1660816 - RNA, 19 nt, Homo sapiens
  misc_RNA (1)...(19): siRNA sense strand
gccaggacuucaacaugau

SEQ ID NO: 1660817 - RNA, 19 nt, Homo sapiens
  misc_RNA (1)...(19): siRNA sense strand
aagaggguguccaugauuc

SEQ ID NO: 1660818 - RNA, 19 nt, Homo sapiens
  misc_RNA (1)...(19): siRNA sense strand
gacaaaggagagaaguuau

SEQ ID NO: 1660819 - RNA, 19 nt, Homo sapiens
  misc_RNA (1)...(19): siRNA sense strand
gauggcugccuuaaacaug

SEQ ID NO: 1660820 - RNA, 19 nt, Homo sapiens
  misc_RNA (1)...(19): siRNA sense strand
ccuccaaggccaucauuga

SEQ ID NO: 1660821 - RNA, 19 nt, Homo sapiens
  misc_RNA (1)...(19): siRNA sense strand
cagaauuuacaggacauua

SEQ ID NO: 1660822 - RNA, 19 nt, Homo sapiens
  misc_RNA (1)...(19): siRNA sense strand
uggcuacccuuaucgauac

SEQ ID NO: 1660823 - RNA, 19 nt, Homo sapiens
  misc_RNA (1)...(19): siRNA sense strand
gaaccaugggcucguguca

SEQ ID NO: 1660824 - RNA, 19 nt, Homo sapiens
  misc_RNA (1)...(19): siRNA sense strand
agggauggcugccuuaaac

SEQ ID NO: 1660825 - RNA, 19 nt, Homo sapiens
  misc_RNA (1)...(19): siRNA sense strand
ggcccucagucccagguuu

SEQ ID NO: 1660826 - RNA, 19 nt, Homo sapiens
  misc_RNA (1)...(19): siRNA sense strand
ugaggaggccuucuauuac

SEQ ID NO: 1660827 - RNA, 19 nt, Homo sapiens
  misc_RNA (1)...(19): siRNA sense strand
ugcggucucugcaaugaaa

SEQ ID NO: 1660828 - RNA, 19 nt, Homo sapiens
  misc_RNA (1)...(19): siRNA sense strand
gauauaguagaucguggaa

SEQ ID NO: 1660829 - RNA, 19 nt, Homo sapiens
  misc_RNA (1)...(19): siRNA sense strand
gguggucucagcuuaucua

SEQ ID NO: 1660830 - RNA, 19 nt, Homo sapiens
  misc_RNA (1)...(19): siRNA sense strand
gguauggugacuccuguga

SEQ ID NO: 1660831 - RNA, 19 nt, Homo sapiens
  misc_RNA (1)...(19): siRNA sense strand
cuaaagaggauggacauag

SEQ ID NO: 1660832 - RNA, 19 nt, Homo sapiens
  misc_RNA (1)...(19): siRNA sense strand
aaugauacaggagcaauuu

SEQ ID NO: 1660833 - RNA, 19 nt, Homo sapiens
  misc_RNA (1)...(19): siRNA sense strand
cgaauguaccaaaugucua

SEQ ID NO: 1660834 - RNA, 19 nt, Homo sapiens
  misc_RNA (1)...(19): siRNA sense strand
caaugauacaggagcaauu

SEQ ID NO: 1660835 - RNA, 19 nt, Homo sapiens
  misc_RNA (1)...(19): siRNA sense strand
caggagaugaggaacaaga

SEQ ID NO: 1660836 - RNA, 19 nt, Homo sapiens
  misc_RNA (1)...(19): siRNA sense strand
ccaccucugcugucccuaa

SEQ ID NO: 1660837 - RNA, 19 nt, Homo sapiens
  misc_RNA (1)...(19): siRNA sense strand
ccucccaaguggcagauug

SEQ ID NO: 1660838 - RNA, 19 nt, Homo sapiens
  misc_RNA (1)...(19): siRNA sense strand
ggccuucuauuacauccau

SEQ ID NO: 1660839 - RNA, 19 nt, Homo sapiens
  misc_RNA (1)...(19): siRNA sense strand
ggaggcgcuuucccuugga

SEQ ID NO: 1660840 - RNA, 19 nt, Homo sapiens
  misc_RNA (1)...(19): siRNA sense strand
ccuuacacucugcaauuua

SEQ ID NO: 1660841 - RNA, 19 nt, Homo sapiens
  misc_RNA (1)...(19): siRNA sense strand
cauccaguuugguuaagau

SEQ ID NO: 1660842 - RNA, 19 nt, Homo sapiens
  misc_RNA (1)...(19): siRNA sense strand
gccuuaaacaugagucuug

SEQ ID NO: 1660843 - RNA, 19 nt, Homo sapiens
  misc_RNA (1)...(19): siRNA sense strand
gauacaggagcaauuuaag

SEQ ID NO: 1660844 - RNA, 19 nt, Homo sapiens
  misc_RNA (1)...(19): siRNA sense strand
aaagaggauggacauagaa

SEQ ID NO: 1660845 - RNA, 19 nt, Homo sapiens
  misc_RNA (1)...(19): siRNA sense strand
gcugaauccugagaaguac

SEQ ID NO: 1660846 - RNA, 19 nt, Homo sapiens
  misc_RNA (1)...(19): siRNA sense strand
aaagagguccaggagauga

SEQ ID NO: 1660847 - RNA, 19 nt, Homo sapiens
  misc_RNA (1)...(19): siRNA sense strand
auacaggagcaauuuaaga

SEQ ID NO: 1660848 - RNA, 19 nt, Homo sapiens
  misc_RNA (1)...(19): siRNA sense strand
agaacaacccagaguacuu

SEQ ID NO: 1660849 - RNA, 19 nt, Homo sapiens
  misc_RNA (1)...(19): siRNA sense strand
ggagaugaggaacaagauc

SEQ ID NO: 1660850 - RNA, 19 nt, Homo sapiens
  misc_RNA (1)...(19): siRNA sense strand
cagcuuaucuacaaucaua

SEQ ID NO: 1660851 - RNA, 19 nt, Homo sapiens
  misc_RNA (1)...(19): siRNA sense strand
ggucucagcuuaucuacaa

SEQ ID NO: 1660852 - RNA, 19 nt, Homo sapiens
  misc_RNA (1)...(19): siRNA sense strand
gcagggagguggagaggaa

SEQ ID NO: 1660853 - RNA, 19 nt, Homo sapiens
  misc_RNA (1)...(19): siRNA sense strand
uaaagaggauggacauaga

SEQ ID NO: 1660854 - RNA, 19 nt, Homo sapiens
  misc_RNA (1)...(19): siRNA sense strand
caaaggagagaaguuauua

SEQ ID NO: 1660855 - RNA, 19 nt, Homo sapiens
  misc_RNA (1)...(19): siRNA sense strand
gaacauggcaccagaccuu

SEQ ID NO: 1660856 - RNA, 19 nt, Homo sapiens
  misc_RNA (1)...(19): siRNA sense strand
gagaaguuauuacggugua

SEQ ID NO: 1660857 - RNA, 19 nt, Homo sapiens
  misc_RNA (1)...(19): siRNA sense strand
ugacaaaggagagaaguua

SEQ ID NO: 1660858 - RNA, 19 nt, Homo sapiens
  misc_RNA (1)...(19): siRNA sense strand
gaacaacccagaguacuug

SEQ ID NO: 1660859 - RNA, 19 nt, Homo sapiens
  misc_RNA (1)...(19): siRNA sense strand
gaggaggccuucuauuaca

SEQ ID NO: 1660860 - RNA, 19 nt, Homo sapiens
  misc_RNA (1)...(19): siRNA sense strand
ccacaggccuauuggcauu

SEQ ID NO: 1660861 - RNA, 19 nt, Homo sapiens
  misc_RNA (1)...(19): siRNA sense strand
ccacgaauguaccaaaugu

SEQ ID NO: 1660862 - RNA, 19 nt, Homo sapiens
  misc_RNA (1)...(19): siRNA sense strand
gaagaggguguccaugauu

SEQ ID NO: 1660863 - RNA, 19 nt, Homo sapiens
  misc_RNA (1)...(19): siRNA sense strand
ggacgaggcuagagaacag

SEQ ID NO: 1660864 - RNA, 19 nt, Homo sapiens
  misc_RNA (1)...(19): siRNA sense strand
ugucacagguuacuccuuu

SEQ ID NO: 1660865 - RNA, 19 nt, Homo sapiens
  misc_RNA (1)...(19): siRNA sense strand
aaacaugagucuugguaug

SEQ ID NO: 1660866 - RNA, 19 nt, Homo sapiens
  misc_RNA (1)...(19): siRNA sense strand
uacagcagauugcagauuu

SEQ ID NO: 1660867 - RNA, 19 nt, Homo sapiens
  misc_RNA (1)...(19): siRNA sense strand
acaaggagauauaguagau

SEQ ID NO: 1660868 - RNA, 19 nt, Homo sapiens
  misc_RNA (1)...(19): siRNA sense strand
aaugaaauguggccucuug

SEQ ID NO: 1660869 - RNA, 19 nt, Homo sapiens
  misc_RNA (1)...(19): siRNA sense strand
uugaggaggccuucuauua

SEQ ID NO: 1660870 - RNA, 19 nt, Homo sapiens
  misc_RNA (1)...(19): siRNA sense strand
cgccaggacuucaacauga

SEQ ID NO: 1660871 - RNA, 19 nt, Homo sapiens
  misc_RNA (1)...(19): siRNA sense strand
gaagcagucccaagucgaa

SEQ ID NO: 1660872 - RNA, 19 nt, Homo sapiens
  misc_RNA (1)...(19): siRNA sense strand
caaaagagguccaggagau

SEQ ID NO: 1660873 - RNA, 19 nt, Homo sapiens
  misc_RNA (1)...(19): siRNA sense strand
uaaccuguuuguuccauug

SEQ ID NO: 1660874 - RNA, 19 nt, Homo sapiens
  misc_RNA (1)...(19): siRNA sense strand
uagacuagcagaucucuuu

SEQ ID NO: 1660875 - RNA, 19 nt, Homo sapiens
  misc_RNA (1)...(19): siRNA sense strand
gaccacgaauguaccaaau

SEQ ID NO: 1660876 - RNA, 19 nt, Homo sapiens
  misc_RNA (1)...(19): siRNA sense strand
aaagcaagguucuuauucu

SEQ ID NO: 1660877 - RNA, 19 nt, Homo sapiens
  misc_RNA (1)...(19): siRNA sense strand
cugauucuauugcguauga

SEQ ID NO: 1660878 - RNA, 19 nt, Homo sapiens
  misc_RNA (1)...(19): siRNA sense strand
cugcuagugucacagguua

SEQ ID NO: 1660879 - RNA, 19 nt, Homo sapiens
  misc_RNA (1)...(19): siRNA sense strand
ccaguuugguuaagaucaa

SEQ ID NO: 1660880 - RNA, 19 nt, Homo sapiens
  misc_RNA (1)...(19): siRNA sense strand
ucaugcggaugcucgauaa

SEQ ID NO: 1660881 - RNA, 19 nt, Homo sapiens
  misc_RNA (1)...(19): siRNA sense strand
gcauucugguugaugaaga

SEQ ID NO: 1660882 - RNA, 19 nt, Homo sapiens
  misc_RNA (1)...(19): siRNA sense strand
gggcugcggucucugcaau

SEQ ID NO: 1660883 - RNA, 19 nt, Homo sapiens
  misc_RNA (1)...(19): siRNA sense strand
gaggauggacauagaacuu

SEQ ID NO: 1660884 - RNA, 19 nt, Homo sapiens
  misc_RNA (1)...(19): siRNA sense strand
ugauacaggagcaauuuaa

SEQ ID NO: 1660885 - RNA, 19 nt, Homo sapiens
  misc_RNA (1)...(19): siRNA sense strand
accgugagcuggaggagua

SEQ ID NO: 1660886 - RNA, 19 nt, Homo sapiens
  misc_RNA (1)...(19): siRNA sense strand
aggaggaccagacaacuua

SEQ ID NO: 1660887 - RNA, 19 nt, Homo sapiens
  misc_RNA (1)...(19): siRNA sense strand
aagaagaggguguccauga

SEQ ID NO: 1660888 - RNA, 19 nt, Homo sapiens
  misc_RNA (1)...(19): siRNA sense strand
acagguuacuccuuugcua

SEQ ID NO: 1660889 - RNA, 19 nt, Homo sapiens
  misc_RNA (1)...(19): siRNA sense strand
gaucguggaagcacuaauc

SEQ ID NO: 1660890 - RNA, 19 nt, Homo sapiens
  misc_RNA (1)...(19): siRNA sense strand
agaagaggguguccaugau

SEQ ID NO: 1660891 - RNA, 19 nt, Homo sapiens
  misc_RNA (1)...(19): siRNA sense strand
gaauguaccaaaugucuac

SEQ ID NO: 1660892 - RNA, 19 nt, Homo sapiens
  misc_RNA (1)...(19): siRNA sense strand
ucgauacccugcucugaga

SEQ ID NO: 1660893 - RNA, 19 nt, Homo sapiens
  misc_RNA (1)...(19): siRNA sense strand
caacuuaguccugcugaau

SEQ ID NO: 1660894 - RNA, 19 nt, Homo sapiens
  misc_RNA (1)...(19): siRNA sense strand
gcugcggucucugcaauga

SEQ ID NO: 1660895 - RNA, 19 nt, Homo sapiens
  misc_RNA (1)...(19): siRNA sense strand
gcauccaguuugguuaaga

SEQ ID NO: 1660896 - RNA, 19 nt, Homo sapiens
  misc_RNA (1)...(19): siRNA sense strand
cuuacacucugcaauuuau

SEQ ID NO: 1660897 - RNA, 19 nt, Homo sapiens
  misc_RNA (1)...(19): siRNA sense strand
uuaaacaugagucuuggua

SEQ ID NO: 1660898 - RNA, 19 nt, Homo sapiens
  misc_RNA (1)...(19): siRNA sense strand
ucuacaaggagauauagua

SEQ ID NO: 1660899 - RNA, 19 nt, Homo sapiens
  misc_RNA (1)...(19): siRNA sense strand
uacaggagcaauuuaagaa

SEQ ID NO: 1660900 - RNA, 19 nt, Homo sapiens
  misc_RNA (1)...(19): siRNA sense strand
gcuagagaacagaaagaaa

SEQ ID NO: 1660901 - RNA, 19 nt, Homo sapiens
  misc_RNA (1)...(19): siRNA sense strand
guagaucguggaagcacua

SEQ ID NO: 1660902 - RNA, 19 nt, Homo sapiens
  misc_RNA (1)...(19): siRNA sense strand
acaaaggagagaaguuauu

SEQ ID NO: 1660903 - RNA, 19 nt, Homo sapiens
  misc_RNA (1)...(19): siRNA sense strand
caccuuacacucugcaauu

SEQ ID NO: 1660904 - RNA, 19 nt, Homo sapiens
  misc_RNA (1)...(19): siRNA sense strand
ccaaggccaucauugaaaa

SEQ ID NO: 1660905 - RNA, 19 nt, Homo sapiens
  misc_RNA (1)...(19): siRNA sense strand
ugacuaccauggcauucug

SEQ ID NO: 1660906 - RNA, 19 nt, Homo sapiens
  misc_RNA (1)...(19): siRNA sense strand
auacagcgauguggagguu

SEQ ID NO: 1660907 - RNA, 19 nt, Homo sapiens
  misc_RNA (1)...(19): siRNA sense strand
agaacuggcuacccuuauc

SEQ ID NO: 1660908 - RNA, 19 nt, Homo sapiens
  misc_RNA (1)...(19): siRNA sense strand
uuacauccauaaccuugug

SEQ ID NO: 1660909 - RNA, 19 nt, Homo sapiens
  misc_RNA (1)...(19): siRNA sense strand
gagggauggcugccuuaaa

SEQ ID NO: 1660910 - RNA, 19 nt, Homo sapiens
  misc_RNA (1)...(19): siRNA sense strand
guuacuccuuugcuaguga

SEQ ID NO: 1660911 - RNA, 19 nt, Homo sapiens
  misc_RNA (1)...(19): siRNA sense strand
acagaacuggcuacccuua

SEQ ID NO: 1660912 - RNA, 19 nt, Homo sapiens
  misc_RNA (1)...(19): siRNA sense strand
gaugagaacaacccagagu

SEQ ID NO: 1660913 - RNA, 19 nt, Homo sapiens
  misc_RNA (1)...(19): siRNA sense strand
gccaggacuucaacaugau

SEQ ID NO: 1660914 - RNA, 19 nt, Homo sapiens
  misc_RNA (1)...(19): siRNA sense strand
gacaaaggagagaaguuau

SEQ ID NO: 1660915 - RNA, 19 nt, Homo sapiens
  misc_RNA (1)...(19): siRNA sense strand
ggagggauggcugccuuaa

SEQ ID NO: 1660916 - RNA, 19 nt, Homo sapiens
  misc_RNA (1)...(19): siRNA sense strand
aagaggguguccaugauuc

SEQ ID NO: 1660917 - RNA, 19 nt, Homo sapiens
  misc_RNA (1)...(19): siRNA sense strand
gauggcugccuuaaacaug

SEQ ID NO: 1660918 - RNA, 19 nt, Homo sapiens
  misc_RNA (1)...(19): siRNA sense strand
ccuccaaggccaucauuga

SEQ ID NO: 1660919 - RNA, 19 nt, Homo sapiens
  misc_RNA (1)...(19): siRNA sense strand
uggcuacccuuaucgauac

SEQ ID NO: 1660920 - RNA, 19 nt, Homo sapiens
  misc_RNA (1)...(19): siRNA sense strand
gaaccaugggcucguguca

SEQ ID NO: 1660921 - RNA, 19 nt, Homo sapiens
  misc_RNA (1)...(19): siRNA sense strand
agggauggcugccuuaaac

SEQ ID NO: 1660922 - RNA, 19 nt, Homo sapiens
  misc_RNA (1)...(19): siRNA sense strand
ggcccucagucccagguuu

SEQ ID NO: 1660923 - RNA, 19 nt, Homo sapiens
  misc_RNA (1)...(19): siRNA sense strand
ugaggaggccuucuauuac

SEQ ID NO: 1660924 - RNA, 19 nt, Homo sapiens
  misc_RNA (1)...(19): siRNA sense strand
ugcggucucugcaaugaaa

SEQ ID NO: 1660925 - RNA, 19 nt, Homo sapiens
  misc_RNA (1)...(19): siRNA sense strand
gauauaguagaucguggaa

SEQ ID NO: 1660926 - RNA, 19 nt, Homo sapiens
  misc_RNA (1)...(19): siRNA sense strand
gguggucucagcuuaucua

SEQ ID NO: 1660927 - RNA, 19 nt, Homo sapiens
  misc_RNA (1)...(19): siRNA sense strand
gguauggugacuccuguga

SEQ ID NO: 1660928 - RNA, 19 nt, Homo sapiens
  misc_RNA (1)...(19): siRNA sense strand
cuaaagaggauggacauag

SEQ ID NO: 1660929 - RNA, 19 nt, Homo sapiens
  misc_RNA (1)...(19): siRNA sense strand
aaugauacaggagcaauuu

SEQ ID NO: 1660930 - RNA, 19 nt, Homo sapiens
  misc_RNA (1)...(19): siRNA sense strand
cgaauguaccaaaugucua

SEQ ID NO: 1660931 - RNA, 19 nt, Homo sapiens
  misc_RNA (1)...(19): siRNA sense strand
caaugauacaggagcaauu

SEQ ID NO: 1660932 - RNA, 19 nt, Homo sapiens
  misc_RNA (1)...(19): siRNA sense strand
caggagaugaggaacaaga

SEQ ID NO: 1660933 - RNA, 19 nt, Homo sapiens
  misc_RNA (1)...(19): siRNA sense strand
ccaccucugcugucccuaa

SEQ ID NO: 1660934 - RNA, 19 nt, Homo sapiens
  misc_RNA (1)...(19): siRNA sense strand
ccucccaaguggcagauug

SEQ ID NO: 1660935 - RNA, 19 nt, Homo sapiens
  misc_RNA (1)...(19): siRNA sense strand
ggccuucuauuacauccau

SEQ ID NO: 1660936 - RNA, 19 nt, Homo sapiens
  misc_RNA (1)...(19): siRNA sense strand
ggaggcgcuuucccuugga

SEQ ID NO: 1660937 - RNA, 19 nt, Homo sapiens
  misc_RNA (1)...(19): siRNA sense strand
ccuuacacucugcaauuua

SEQ ID NO: 1660938 - RNA, 19 nt, Homo sapiens
  misc_RNA (1)...(19): siRNA sense strand
cauccaguuugguuaagau

SEQ ID NO: 1660939 - RNA, 19 nt, Homo sapiens
  misc_RNA (1)...(19): siRNA sense strand
gccuuaaacaugagucuug

SEQ ID NO: 1660940 - RNA, 19 nt, Homo sapiens
  misc_RNA (1)...(19): siRNA sense strand
aaagaggauggacauagaa

SEQ ID NO: 1660941 - RNA, 19 nt, Homo sapiens
  misc_RNA (1)...(19): siRNA sense strand
gcugaauccugagaaguac

SEQ ID NO: 1660942 - RNA, 19 nt, Homo sapiens
  misc_RNA (1)...(19): siRNA sense strand
gauacaggagcaauuuaag

SEQ ID NO: 1660943 - RNA, 19 nt, Homo sapiens
  misc_RNA (1)...(19): siRNA sense strand
ugacuccugugaacgaucu

SEQ ID NO: 1660944 - RNA, 19 nt, Homo sapiens
  misc_RNA (1)...(19): siRNA sense strand
ggagaugaggaacaagauc

SEQ ID NO: 1660945 - RNA, 19 nt, Homo sapiens
  misc_RNA (1)...(19): siRNA sense strand
aaagagguccaggagauga

SEQ ID NO: 1660946 - RNA, 19 nt, Homo sapiens
  misc_RNA (1)...(19): siRNA sense strand
gauguggagguuccugcua

SEQ ID NO: 1660947 - RNA, 19 nt, Homo sapiens
  misc_RNA (1)...(19): siRNA sense strand
gaacuggcuacccuuaucg

SEQ ID NO: 1660948 - RNA, 19 nt, Homo sapiens
  misc_RNA (1)...(19): siRNA sense strand
agaacaacccagaguacuu

SEQ ID NO: 1660949 - RNA, 19 nt, Homo sapiens
  misc_RNA (1)...(19): siRNA sense strand
uuuggguggucucagcuua

SEQ ID NO: 1660950 - RNA, 19 nt, Homo sapiens
  misc_RNA (1)...(19): siRNA sense strand
gaacauuccuuugguauca

SEQ ID NO: 1660951 - RNA, 19 nt, Homo sapiens
  misc_RNA (1)...(19): siRNA sense strand
ccacggagaucauugcuuu

SEQ ID NO: 1660952 - RNA, 19 nt, Homo sapiens
  misc_RNA (1)...(19): siRNA sense strand
gauggucaguuuaaagaua

SEQ ID NO: 1660953 - RNA, 19 nt, Homo sapiens
  misc_RNA (1)...(19): siRNA sense strand
aaacucaacugccaaguga

SEQ ID NO: 1660954 - RNA, 19 nt, Homo sapiens
  misc_RNA (1)...(19): siRNA sense strand
guaaaugaccucccuguug

SEQ ID NO: 1660955 - RNA, 19 nt, Homo sapiens
  misc_RNA (1)...(19): siRNA sense strand
gcagaagaauuuaagaaac

SEQ ID NO: 1660956 - RNA, 19 nt, Homo sapiens
  misc_RNA (1)...(19): siRNA sense strand
gaugagacuuugagacuag

SEQ ID NO: 1660957 - RNA, 19 nt, Homo sapiens
  misc_RNA (1)...(19): siRNA sense strand
gcagaucacuguaaaugac

SEQ ID NO: 1660958 - RNA, 19 nt, Homo sapiens
  misc_RNA (1)...(19): siRNA sense strand
ggaugagacuuugagacua

SEQ ID NO: 1660959 - RNA, 19 nt, Homo sapiens
  misc_RNA (1)...(19): siRNA sense strand
ugauagggcagaagaauuu

SEQ ID NO: 1660960 - RNA, 19 nt, Homo sapiens
  misc_RNA (1)...(19): siRNA sense strand
ggagaucauugcuuucagu

SEQ ID NO: 1660961 - RNA, 19 nt, Homo sapiens
  misc_RNA (1)...(19): siRNA sense strand
cagccugucugacuacaaa

SEQ ID NO: 1660962 - RNA, 19 nt, Homo sapiens
  misc_RNA (1)...(19): siRNA sense strand
gcaccauugcucaggauua

SEQ ID NO: 1660963 - RNA, 19 nt, Homo sapiens
  misc_RNA (1)...(19): siRNA sense strand
caugaacauuccuuuggua

SEQ ID NO: 1660964 - RNA, 19 nt, Homo sapiens
  misc_RNA (1)...(19): siRNA sense strand
caucuagcaugggucaaua

SEQ ID NO: 1660965 - RNA, 19 nt, Homo sapiens
  misc_RNA (1)...(19): siRNA sense strand
ggcagaagaauuuaagaaa

SEQ ID NO: 1660966 - RNA, 19 nt, Homo sapiens
  misc_RNA (1)...(19): siRNA sense strand
guucaggccuuccaguuca

SEQ ID NO: 1660967 - RNA, 19 nt, Homo sapiens
  misc_RNA (1)...(19): siRNA sense strand
gaugauaaggguauucuuc

SEQ ID NO: 1660968 - RNA, 19 nt, Homo sapiens
  misc_RNA (1)...(19): siRNA sense strand
caauacaccuaagaaacaa

SEQ ID NO: 1660969 - RNA, 19 nt, Homo sapiens
  misc_RNA (1)...(19): siRNA sense strand
gaaacucaacugccaagug

SEQ ID NO: 1660970 - RNA, 19 nt, Homo sapiens
  misc_RNA (1)...(19): siRNA sense strand
ccucuugacuucaccuuug

SEQ ID NO: 1660971 - RNA, 19 nt, Homo sapiens
  misc_RNA (1)...(19): siRNA sense strand
ucaauacaccuaagaaaca

SEQ ID NO: 1660972 - RNA, 19 nt, Homo sapiens
  misc_RNA (1)...(19): siRNA sense strand
gggcagaagaauuuaagaa

SEQ ID NO: 1660973 - RNA, 19 nt, Homo sapiens
  misc_RNA (1)...(19): siRNA sense strand
uaugccagauggucaguuu

SEQ ID NO: 1660974 - RNA, 19 nt, Homo sapiens
  misc_RNA (1)...(19): siRNA sense strand
ggucaauacaccuaagaaa

SEQ ID NO: 1660975 - RNA, 19 nt, Homo sapiens
  misc_RNA (1)...(19): siRNA sense strand
ucacuucugucaucuagca

SEQ ID NO: 1660976 - RNA, 19 nt, Homo sapiens
  misc_RNA (1)...(19): siRNA sense strand
caccauugcucaggauuau

SEQ ID NO: 1660977 - RNA, 19 nt, Homo sapiens
  misc_RNA (1)...(19): siRNA sense strand
cagauggucaguuuaaaga

SEQ ID NO: 1660978 - RNA, 19 nt, Homo sapiens
  misc_RNA (1)...(19): siRNA sense strand
gauuggugcuucuguggau

SEQ ID NO: 1660979 - RNA, 19 nt, Homo sapiens
  misc_RNA (1)...(19): siRNA sense strand
gugcuucuguggauucuca

SEQ ID NO: 1660980 - RNA, 19 nt, Homo sapiens
  misc_RNA (1)...(19): siRNA sense strand
gauucucacuucugucauc

SEQ ID NO: 1660981 - RNA, 19 nt, Homo sapiens
  misc_RNA (1)...(19): siRNA sense strand
gauagggcagaagaauuua

SEQ ID NO: 1660982 - RNA, 19 nt, Homo sapiens
  misc_RNA (1)...(19): siRNA sense strand
ggucuuaaaggcugaugaa

SEQ ID NO: 1660983 - RNA, 19 nt, Homo sapiens
  misc_RNA (1)...(19): siRNA sense strand
caaagccacagcuguuaug

SEQ ID NO: 1660984 - RNA, 19 nt, Homo sapiens
  misc_RNA (1)...(19): siRNA sense strand
gccagauggucaguuuaaa

SEQ ID NO: 1660985 - RNA, 19 nt, Homo sapiens
  misc_RNA (1)...(19): siRNA sense strand
gcuggaaaccuggcaguga

SEQ ID NO: 1660986 - RNA, 19 nt, Homo sapiens
  misc_RNA (1)...(19): siRNA sense strand
gcucuguggaugagacuuu

SEQ ID NO: 1660987 - RNA, 19 nt, Homo sapiens
  misc_RNA (1)...(19): siRNA sense strand
ccaugaacauuccuuuggu

SEQ ID NO: 1660988 - RNA, 19 nt, Homo sapiens
  misc_RNA (1)...(19): siRNA sense strand
gugauagggcagaagaauu

SEQ ID NO: 1660989 - RNA, 19 nt, Homo sapiens
  misc_RNA (1)...(19): siRNA sense strand
cggcagaucacuguaaaug

SEQ ID NO: 1660990 - RNA, 19 nt, Homo sapiens
  misc_RNA (1)...(19): siRNA sense strand
gcaugggucaauacaccua

SEQ ID NO: 1660991 - RNA, 19 nt, Homo sapiens
  misc_RNA (1)...(19): siRNA sense strand
gacccgaagcgcaccauug

SEQ ID NO: 1660992 - RNA, 19 nt, Homo sapiens
  misc_RNA (1)...(19): siRNA sense strand
cuucaaagccacagcuguu

SEQ ID NO: 1660993 - RNA, 19 nt, Homo sapiens
  misc_RNA (1)...(19): siRNA sense strand
ggcagaucacuguaaauga

SEQ ID NO: 1660994 - RNA, 19 nt, Homo sapiens
  misc_RNA (1)...(19): siRNA sense strand
ucucacuucugucaucuag

SEQ ID NO: 1660995 - RNA, 19 nt, Homo sapiens
  misc_RNA (1)...(19): siRNA sense strand
cuggaaaccuggcagugau

SEQ ID NO: 1660996 - RNA, 19 nt, Homo sapiens
  misc_RNA (1)...(19): siRNA sense strand
ugccagauggucaguuuaa

SEQ ID NO: 1660997 - RNA, 19 nt, Homo sapiens
  misc_RNA (1)...(19): siRNA sense strand
ucaaagccacagcuguuau

SEQ ID NO: 1660998 - RNA, 19 nt, Homo sapiens
  misc_RNA (1)...(19): siRNA sense strand
ccagauggucaguuuaaag

SEQ ID NO: 1660999 - RNA, 19 nt, Homo sapiens
  misc_RNA (1)...(19): siRNA sense strand
gcgcaccauugcucaggau

SEQ ID NO: 1661000 - RNA, 19 nt, Homo sapiens
  misc_RNA (1)...(19): siRNA sense strand
ucagugauagggcagaaga

SEQ ID NO: 1661001 - RNA, 19 nt, Homo sapiens
  misc_RNA (1)...(19): siRNA sense strand
gguauucuucggcagauca

SEQ ID NO: 1661002 - RNA, 19 nt, Homo sapiens
  misc_RNA (1)...(19): siRNA sense strand
acucaacugccaagugauu

SEQ ID NO: 1661003 - RNA, 19 nt, Homo sapiens
  misc_RNA (1)...(19): siRNA sense strand
ccaaaagagcaaagaauau

SEQ ID NO: 1661004 - RNA, 19 nt, Homo sapiens
  misc_RNA (1)...(19): siRNA sense strand
ugacaaacauggggaagug

SEQ ID NO: 1661005 - RNA, 19 nt, Homo sapiens
  misc_RNA (1)...(19): siRNA sense strand
uguggauucucacuucugu

SEQ ID NO: 1661006 - RNA, 19 nt, Homo sapiens
  misc_RNA (1)...(19): siRNA sense strand
aggaaaauauguuguguuc

SEQ ID NO: 1661007 - RNA, 19 nt, Homo sapiens
  misc_RNA (1)...(19): siRNA sense strand
gucaauacaccuaagaaac

SEQ ID NO: 1661008 - RNA, 19 nt, Homo sapiens
  misc_RNA (1)...(19): siRNA sense strand
uggaaaccuggcagugaua

SEQ ID NO: 1661009 - RNA, 19 nt, Homo sapiens
  misc_RNA (1)...(19): siRNA sense strand
gacccaugaacauuccuuu

SEQ ID NO: 1661010 - RNA, 19 nt, Homo sapiens
  misc_RNA (1)...(19): siRNA sense strand
gaacauuccuuugguauca

SEQ ID NO: 1661011 - RNA, 19 nt, Homo sapiens
  misc_RNA (1)...(19): siRNA sense strand
ccacggagaucauugcuuu

SEQ ID NO: 1661012 - RNA, 19 nt, Homo sapiens
  misc_RNA (1)...(19): siRNA sense strand
gauggucaguuuaaagaua

SEQ ID NO: 1661013 - RNA, 19 nt, Homo sapiens
  misc_RNA (1)...(19): siRNA sense strand
aaacucaacugccaaguga

SEQ ID NO: 1661014 - RNA, 19 nt, Homo sapiens
  misc_RNA (1)...(19): siRNA sense strand
guaaaugaccucccuguug

SEQ ID NO: 1661015 - RNA, 19 nt, Homo sapiens
  misc_RNA (1)...(19): siRNA sense strand
gcagaagaauuuaagaaac

SEQ ID NO: 1661016 - RNA, 19 nt, Homo sapiens
  misc_RNA (1)...(19): siRNA sense strand
gaugagacuuugagacuag

SEQ ID NO: 1661017 - RNA, 19 nt, Homo sapiens
  misc_RNA (1)...(19): siRNA sense strand
gcagaucacuguaaaugac

SEQ ID NO: 1661018 - RNA, 19 nt, Homo sapiens
  misc_RNA (1)...(19): siRNA sense strand
ggaugagacuuugagacua

SEQ ID NO: 1661019 - RNA, 19 nt, Homo sapiens
  misc_RNA (1)...(19): siRNA sense strand
ugauagggcagaagaauuu

SEQ ID NO: 1661020 - RNA, 19 nt, Homo sapiens
  misc_RNA (1)...(19): siRNA sense strand
ggagaucauugcuuucagu

SEQ ID NO: 1661021 - RNA, 19 nt, Homo sapiens
  misc_RNA (1)...(19): siRNA sense strand
cagccugucugacuacaaa

SEQ ID NO: 1661022 - RNA, 19 nt, Homo sapiens
  misc_RNA (1)...(19): siRNA sense strand
gcaccauugcucaggauua

SEQ ID NO: 1661023 - RNA, 19 nt, Homo sapiens
  misc_RNA (1)...(19): siRNA sense strand
caugaacauuccuuuggua

SEQ ID NO: 1661024 - RNA, 19 nt, Homo sapiens
  misc_RNA (1)...(19): siRNA sense strand
caucuagcaugggucaaua

SEQ ID NO: 1661025 - RNA, 19 nt, Homo sapiens
  misc_RNA (1)...(19): siRNA sense strand
ggcagaagaauuuaagaaa

SEQ ID NO: 1661026 - RNA, 19 nt, Homo sapiens
  misc_RNA (1)...(19): siRNA sense strand
guucaggccuuccaguuca

SEQ ID NO: 1661027 - RNA, 19 nt, Homo sapiens
  misc_RNA (1)...(19): siRNA sense strand
gaugauaaggguauucuuc

SEQ ID NO: 1661028 - RNA, 19 nt, Homo sapiens
  misc_RNA (1)...(19): siRNA sense strand
caauacaccuaagaaacaa

SEQ ID NO: 1661029 - RNA, 19 nt, Homo sapiens
  misc_RNA (1)...(19): siRNA sense strand
gaaacucaacugccaagug

SEQ ID NO: 1661030 - RNA, 19 nt, Homo sapiens
  misc_RNA (1)...(19): siRNA sense strand
ccucuugacuucaccuuug

SEQ ID NO: 1661031 - RNA, 19 nt, Homo sapiens
  misc_RNA (1)...(19): siRNA sense strand
ucaauacaccuaagaaaca

SEQ ID NO: 1661032 - RNA, 19 nt, Homo sapiens
  misc_RNA (1)...(19): siRNA sense strand
gggcagaagaauuuaagaa

SEQ ID NO: 1661033 - RNA, 19 nt, Homo sapiens
  misc_RNA (1)...(19): siRNA sense strand
uaugccagauggucaguuu

SEQ ID NO: 1661034 - RNA, 19 nt, Homo sapiens
  misc_RNA (1)...(19): siRNA sense strand
ggucaauacaccuaagaaa

SEQ ID NO: 1661035 - RNA, 19 nt, Homo sapiens
  misc_RNA (1)...(19): siRNA sense strand
ucacuucugucaucuagca

SEQ ID NO: 1661036 - RNA, 19 nt, Homo sapiens
  misc_RNA (1)...(19): siRNA sense strand
caccauugcucaggauuau

SEQ ID NO: 1661037 - RNA, 19 nt, Homo sapiens
  misc_RNA (1)...(19): siRNA sense strand
cagauggucaguuuaaaga

SEQ ID NO: 1661038 - RNA, 19 nt, Homo sapiens
  misc_RNA (1)...(19): siRNA sense strand
gauuggugcuucuguggau

SEQ ID NO: 1661039 - RNA, 19 nt, Homo sapiens
  misc_RNA (1)...(19): siRNA sense strand
gugcuucuguggauucuca

SEQ ID NO: 1661040 - RNA, 19 nt, Homo sapiens
  misc_RNA (1)...(19): siRNA sense strand
gauucucacuucugucauc

SEQ ID NO: 1661041 - RNA, 19 nt, Homo sapiens
  misc_RNA (1)...(19): siRNA sense strand
gauagggcagaagaauuua

SEQ ID NO: 1661042 - RNA, 19 nt, Homo sapiens
  misc_RNA (1)...(19): siRNA sense strand
ggucuuaaaggcugaugaa

SEQ ID NO: 1661043 - RNA, 19 nt, Homo sapiens
  misc_RNA (1)...(19): siRNA sense strand
caaagccacagcuguuaug

SEQ ID NO: 1661044 - RNA, 19 nt, Homo sapiens
  misc_RNA (1)...(19): siRNA sense strand
gccagauggucaguuuaaa

SEQ ID NO: 1661045 - RNA, 19 nt, Homo sapiens
  misc_RNA (1)...(19): siRNA sense strand
gcuggaaaccuggcaguga

SEQ ID NO: 1661046 - RNA, 19 nt, Homo sapiens
  misc_RNA (1)...(19): siRNA sense strand
gcucuguggaugagacuuu

SEQ ID NO: 1661047 - RNA, 19 nt, Homo sapiens
  misc_RNA (1)...(19): siRNA sense strand
ccaugaacauuccuuuggu

SEQ ID NO: 1661048 - RNA, 19 nt, Homo sapiens
  misc_RNA (1)...(19): siRNA sense strand
gugauagggcagaagaauu

SEQ ID NO: 1661049 - RNA, 19 nt, Homo sapiens
  misc_RNA (1)...(19): siRNA sense strand
cggcagaucacuguaaaug

SEQ ID NO: 1661050 - RNA, 19 nt, Homo sapiens
  misc_RNA (1)...(19): siRNA sense strand
gcaugggucaauacaccua

SEQ ID NO: 1661051 - RNA, 19 nt, Homo sapiens
  misc_RNA (1)...(19): siRNA sense strand
gacccgaagcgcaccauug

SEQ ID NO: 1661052 - RNA, 19 nt, Homo sapiens
  misc_RNA (1)...(19): siRNA sense strand
cuucaaagccacagcuguu

SEQ ID NO: 1661053 - RNA, 19 nt, Homo sapiens
  misc_RNA (1)...(19): siRNA sense strand
ggcagaucacuguaaauga

SEQ ID NO: 1661054 - RNA, 19 nt, Homo sapiens
  misc_RNA (1)...(19): siRNA sense strand
ucucacuucugucaucuag

SEQ ID NO: 1661055 - RNA, 19 nt, Homo sapiens
  misc_RNA (1)...(19): siRNA sense strand
cuggaaaccuggcagugau

SEQ ID NO: 1661056 - RNA, 19 nt, Homo sapiens
  misc_RNA (1)...(19): siRNA sense strand
ugccagauggucaguuuaa

SEQ ID NO: 1661057 - RNA, 19 nt, Homo sapiens
  misc_RNA (1)...(19): siRNA sense strand
ucaaagccacagcuguuau

SEQ ID NO: 1661058 - RNA, 19 nt, Homo sapiens
  misc_RNA (1)...(19): siRNA sense strand
ccagauggucaguuuaaag

SEQ ID NO: 1661059 - RNA, 19 nt, Homo sapiens
  misc_RNA (1)...(19): siRNA sense strand
gcgcaccauugcucaggau

SEQ ID NO: 1661060 - RNA, 19 nt, Homo sapiens
  misc_RNA (1)...(19): siRNA sense strand
ucagugauagggcagaaga

SEQ ID NO: 1661061 - RNA, 19 nt, Homo sapiens
  misc_RNA (1)...(19): siRNA sense strand
gguauucuucggcagauca

SEQ ID NO: 1661062 - RNA, 19 nt, Homo sapiens
  misc_RNA (1)...(19): siRNA sense strand
acucaacugccaagugauu

SEQ ID NO: 1661063 - RNA, 19 nt, Homo sapiens
  misc_RNA (1)...(19): siRNA sense strand
ccaaaagagcaaagaauau

SEQ ID NO: 1661064 - RNA, 19 nt, Homo sapiens
  misc_RNA (1)...(19): siRNA sense strand
ugacaaacauggggaagug

SEQ ID NO: 1661065 - RNA, 19 nt, Homo sapiens
  misc_RNA (1)...(19): siRNA sense strand
uguggauucucacuucugu

SEQ ID NO: 1661066 - RNA, 19 nt, Homo sapiens
  misc_RNA (1)...(19): siRNA sense strand
aggaaaauauguuguguuc

SEQ ID NO: 1661067 - RNA, 19 nt, Homo sapiens
  misc_RNA (1)...(19): siRNA sense strand
gucaauacaccuaagaaac

SEQ ID NO: 1661068 - RNA, 19 nt, Homo sapiens
  misc_RNA (1)...(19): siRNA sense strand
uggaaaccuggcagugaua

SEQ ID NO: 1661069 - RNA, 19 nt, Homo sapiens
  misc_RNA (1)...(19): siRNA sense strand
gacccaugaacauuccuuu

SEQ ID NO: 1661070 - RNA, 19 nt, Homo sapiens
  misc_RNA (1)...(19): siRNA sense strand
gaacauuccuuugguauca

SEQ ID NO: 1661071 - RNA, 19 nt, Homo sapiens
  misc_RNA (1)...(19): siRNA sense strand
ccacggagaucauugcuuu

SEQ ID NO: 1661072 - RNA, 19 nt, Homo sapiens
  misc_RNA (1)...(19): siRNA sense strand
gauggucaguuuaaagaua

SEQ ID NO: 1661073 - RNA, 19 nt, Homo sapiens
  misc_RNA (1)...(19): siRNA sense strand
aaacucaacugccaaguga

SEQ ID NO: 1661074 - RNA, 19 nt, Homo sapiens
  misc_RNA (1)...(19): siRNA sense strand
guaaaugaccucccuguug

SEQ ID NO: 1661075 - RNA, 19 nt, Homo sapiens
  misc_RNA (1)...(19): siRNA sense strand
gcagaagaauuuaagaaac

SEQ ID NO: 1661076 - RNA, 19 nt, Homo sapiens
  misc_RNA (1)...(19): siRNA sense strand
gaugagacuuugagacuag

SEQ ID NO: 1661077 - RNA, 19 nt, Homo sapiens
  misc_RNA (1)...(19): siRNA sense strand
gcagaucacuguaaaugac

SEQ ID NO: 1661078 - RNA, 19 nt, Homo sapiens
  misc_RNA (1)...(19): siRNA sense strand
ggaugagacuuugagacua

SEQ ID NO: 1661079 - RNA, 19 nt, Homo sapiens
  misc_RNA (1)...(19): siRNA sense strand
ugauagggcagaagaauuu

SEQ ID NO: 1661080 - RNA, 19 nt, Homo sapiens
  misc_RNA (1)...(19): siRNA sense strand
ggagaucauugcuuucagu

SEQ ID NO: 1661081 - RNA, 19 nt, Homo sapiens
  misc_RNA (1)...(19): siRNA sense strand
cagccugucugacuacaaa

SEQ ID NO: 1661082 - RNA, 19 nt, Homo sapiens
  misc_RNA (1)...(19): siRNA sense strand
gcaccauugcucaggauua

SEQ ID NO: 1661083 - RNA, 19 nt, Homo sapiens
  misc_RNA (1)...(19): siRNA sense strand
caugaacauuccuuuggua

SEQ ID NO: 1661084 - RNA, 19 nt, Homo sapiens
  misc_RNA (1)...(19): siRNA sense strand
caucuagcaugggucaaua

SEQ ID NO: 1661085 - RNA, 19 nt, Homo sapiens
  misc_RNA (1)...(19): siRNA sense strand
ggcagaagaauuuaagaaa

SEQ ID NO: 1661086 - RNA, 19 nt, Homo sapiens
  misc_RNA (1)...(19): siRNA sense strand
guucaggccuuccaguuca

SEQ ID NO: 1661087 - RNA, 19 nt, Homo sapiens
  misc_RNA (1)...(19): siRNA sense strand
gaugauaaggguauucuuc

SEQ ID NO: 1661088 - RNA, 19 nt, Homo sapiens
  misc_RNA (1)...(19): siRNA sense strand
caauacaccuaagaaacaa

SEQ ID NO: 1661089 - RNA, 19 nt, Homo sapiens
  misc_RNA (1)...(19): siRNA sense strand
gaaacucaacugccaagug

SEQ ID NO: 1661090 - RNA, 19 nt, Homo sapiens
  misc_RNA (1)...(19): siRNA sense strand
ccucuugacuucaccuuug

SEQ ID NO: 1661091 - RNA, 19 nt, Homo sapiens
  misc_RNA (1)...(19): siRNA sense strand
ucaauacaccuaagaaaca

SEQ ID NO: 1661092 - RNA, 19 nt, Homo sapiens
  misc_RNA (1)...(19): siRNA sense strand
gggcagaagaauuuaagaa

SEQ ID NO: 1661093 - RNA, 19 nt, Homo sapiens
  misc_RNA (1)...(19): siRNA sense strand
uaugccagauggucaguuu

SEQ ID NO: 1661094 - RNA, 19 nt, Homo sapiens
  misc_RNA (1)...(19): siRNA sense strand
ggucaauacaccuaagaaa

SEQ ID NO: 1661095 - RNA, 19 nt, Homo sapiens
  misc_RNA (1)...(19): siRNA sense strand
ucacuucugucaucuagca

SEQ ID NO: 1661096 - RNA, 19 nt, Homo sapiens
  misc_RNA (1)...(19): siRNA sense strand
caccauugcucaggauuau

SEQ ID NO: 1661097 - RNA, 19 nt, Homo sapiens
  misc_RNA (1)...(19): siRNA sense strand
cagauggucaguuuaaaga

SEQ ID NO: 1661098 - RNA, 19 nt, Homo sapiens
  misc_RNA (1)...(19): siRNA sense strand
gauuggugcuucuguggau

SEQ ID NO: 1661099 - RNA, 19 nt, Homo sapiens
  misc_RNA (1)...(19): siRNA sense strand
gugcuucuguggauucuca

SEQ ID NO: 1661100 - RNA, 19 nt, Homo sapiens
  misc_RNA (1)...(19): siRNA sense strand
gauucucacuucugucauc

SEQ ID NO: 1661101 - RNA, 19 nt, Homo sapiens
  misc_RNA (1)...(19): siRNA sense strand
gauagggcagaagaauuua

SEQ ID NO: 1661102 - RNA, 19 nt, Homo sapiens
  misc_RNA (1)...(19): siRNA sense strand
ggucuuaaaggcugaugaa

SEQ ID NO: 1661103 - RNA, 19 nt, Homo sapiens
  misc_RNA (1)...(19): siRNA sense strand
caaagccacagcuguuaug

SEQ ID NO: 1661104 - RNA, 19 nt, Homo sapiens
  misc_RNA (1)...(19): siRNA sense strand
gccagauggucaguuuaaa

SEQ ID NO: 1661105 - RNA, 19 nt, Homo sapiens
  misc_RNA (1)...(19): siRNA sense strand
gcuggaaaccuggcaguga

SEQ ID NO: 1661106 - RNA, 19 nt, Homo sapiens
  misc_RNA (1)...(19): siRNA sense strand
gcucuguggaugagacuuu

SEQ ID NO: 1661107 - RNA, 19 nt, Homo sapiens
  misc_RNA (1)...(19): siRNA sense strand
ccaugaacauuccuuuggu

SEQ ID NO: 1661108 - RNA, 19 nt, Homo sapiens
  misc_RNA (1)...(19): siRNA sense strand
gugauagggcagaagaauu

SEQ ID NO: 1661109 - RNA, 19 nt, Homo sapiens
  misc_RNA (1)...(19): siRNA sense strand
cggcagaucacuguaaaug

SEQ ID NO: 1661110 - RNA, 19 nt, Homo sapiens
  misc_RNA (1)...(19): siRNA sense strand
gcaugggucaauacaccua

SEQ ID NO: 1661111 - RNA, 19 nt, Homo sapiens
  misc_RNA (1)...(19): siRNA sense strand
gacccgaagcgcaccauug

SEQ ID NO: 1661112 - RNA, 19 nt, Homo sapiens
  misc_RNA (1)...(19): siRNA sense strand
cuucaaagccacagcuguu

SEQ ID NO: 1661113 - RNA, 19 nt, Homo sapiens
  misc_RNA (1)...(19): siRNA sense strand
ggcagaucacuguaaauga

SEQ ID NO: 1661114 - RNA, 19 nt, Homo sapiens
  misc_RNA (1)...(19): siRNA sense strand
ucucacuucugucaucuag

SEQ ID NO: 1661115 - RNA, 19 nt, Homo sapiens
  misc_RNA (1)...(19): siRNA sense strand
cuggaaaccuggcagugau

SEQ ID NO: 1661116 - RNA, 19 nt, Homo sapiens
  misc_RNA (1)...(19): siRNA sense strand
ugccagauggucaguuuaa

SEQ ID NO: 1661117 - RNA, 19 nt, Homo sapiens
  misc_RNA (1)...(19): siRNA sense strand
ucaaagccacagcuguuau

SEQ ID NO: 1661118 - RNA, 19 nt, Homo sapiens
  misc_RNA (1)...(19): siRNA sense strand
ccagauggucaguuuaaag

SEQ ID NO: 1661119 - RNA, 19 nt, Homo sapiens
  misc_RNA (1)...(19): siRNA sense strand
gcgcaccauugcucaggau

SEQ ID NO: 1661120 - RNA, 19 nt, Homo sapiens
  misc_RNA (1)...(19): siRNA sense strand
ucagugauagggcagaaga

SEQ ID NO: 1661121 - RNA, 19 nt, Homo sapiens
  misc_RNA (1)...(19): siRNA sense strand
gguauucuucggcagauca

SEQ ID NO: 1661122 - RNA, 19 nt, Homo sapiens
  misc_RNA (1)...(19): siRNA sense strand
acucaacugccaagugauu

SEQ ID NO: 1661123 - RNA, 19 nt, Homo sapiens
  misc_RNA (1)...(19): siRNA sense strand
ccaaaagagcaaagaauau

SEQ ID NO: 1661124 - RNA, 19 nt, Homo sapiens
  misc_RNA (1)...(19): siRNA sense strand
ugacaaacauggggaagug

SEQ ID NO: 1661125 - RNA, 19 nt, Homo sapiens
  misc_RNA (1)...(19): siRNA sense strand
uguggauucucacuucugu

SEQ ID NO: 1661126 - RNA, 19 nt, Homo sapiens
  misc_RNA (1)...(19): siRNA sense strand
aggaaaauauguuguguuc

SEQ ID NO: 1661127 - RNA, 19 nt, Homo sapiens
  misc_RNA (1)...(19): siRNA sense strand
gucaauacaccuaagaaac

SEQ ID NO: 1661128 - RNA, 19 nt, Homo sapiens
  misc_RNA (1)...(19): siRNA sense strand
uggaaaccuggcagugaua

SEQ ID NO: 1661129 - RNA, 19 nt, Homo sapiens
  misc_RNA (1)...(19): siRNA sense strand
gacccaugaacauuccuuu

SEQ ID NO: 1661130 - RNA, 19 nt, Homo sapiens
  misc_RNA (1)...(19): siRNA sense strand
gaacauuccuuugguauca

SEQ ID NO: 1661131 - RNA, 19 nt, Homo sapiens
  misc_RNA (1)...(19): siRNA sense strand
ccacggagaucauugcuuu

SEQ ID NO: 1661132 - RNA, 19 nt, Homo sapiens
  misc_RNA (1)...(19): siRNA sense strand
gauggucaguuuaaagaua

SEQ ID NO: 1661133 - RNA, 19 nt, Homo sapiens
  misc_RNA (1)...(19): siRNA sense strand
aaacucaacugccaaguga

SEQ ID NO: 1661134 - RNA, 19 nt, Homo sapiens
  misc_RNA (1)...(19): siRNA sense strand
guaaaugaccucccuguug

SEQ ID NO: 1661135 - RNA, 19 nt, Homo sapiens
  misc_RNA (1)...(19): siRNA sense strand
gcagaagaauuuaagaaac

SEQ ID NO: 1661136 - RNA, 19 nt, Homo sapiens
  misc_RNA (1)...(19): siRNA sense strand
gaugagacuuugagacuag

SEQ ID NO: 1661137 - RNA, 19 nt, Homo sapiens
  misc_RNA (1)...(19): siRNA sense strand
gcagaucacuguaaaugac

SEQ ID NO: 1661138 - RNA, 19 nt, Homo sapiens
  misc_RNA (1)...(19): siRNA sense strand
ggaugagacuuugagacua

SEQ ID NO: 1661139 - RNA, 19 nt, Homo sapiens
  misc_RNA (1)...(19): siRNA sense strand
ugauagggcagaagaauuu

SEQ ID NO: 1661140 - RNA, 19 nt, Homo sapiens
  misc_RNA (1)...(19): siRNA sense strand
ggagaucauugcuuucagu

SEQ ID NO: 1661141 - RNA, 19 nt, Homo sapiens
  misc_RNA (1)...(19): siRNA sense strand
cagccugucugacuacaaa

SEQ ID NO: 1661142 - RNA, 19 nt, Homo sapiens
  misc_RNA (1)...(19): siRNA sense strand
gcaccauugcucaggauua

SEQ ID NO: 1661143 - RNA, 19 nt, Homo sapiens
  misc_RNA (1)...(19): siRNA sense strand
caugaacauuccuuuggua

SEQ ID NO: 1661144 - RNA, 19 nt, Homo sapiens
  misc_RNA (1)...(19): siRNA sense strand
caucuagcaugggucaaua

SEQ ID NO: 1661145 - RNA, 19 nt, Homo sapiens
  misc_RNA (1)...(19): siRNA sense strand
ggcagaagaauuuaagaaa

SEQ ID NO: 1661146 - RNA, 19 nt, Homo sapiens
  misc_RNA (1)...(19): siRNA sense strand
guucaggccuuccaguuca

SEQ ID NO: 1661147 - RNA, 19 nt, Homo sapiens
  misc_RNA (1)...(19): siRNA sense strand
gaugauaaggguauucuuc

SEQ ID NO: 1661148 - RNA, 19 nt, Homo sapiens
  misc_RNA (1)...(19): siRNA sense strand
caauacaccuaagaaacaa

SEQ ID NO: 1661149 - RNA, 19 nt, Homo sapiens
  misc_RNA (1)...(19): siRNA sense strand
gaaacucaacugccaagug

SEQ ID NO: 1661150 - RNA, 19 nt, Homo sapiens
  misc_RNA (1)...(19): siRNA sense strand
ccucuugacuucaccuuug

SEQ ID NO: 1661151 - RNA, 19 nt, Homo sapiens
  misc_RNA (1)...(19): siRNA sense strand
ucaauacaccuaagaaaca

SEQ ID NO: 1661152 - RNA, 19 nt, Homo sapiens
  misc_RNA (1)...(19): siRNA sense strand
gggcagaagaauuuaagaa

SEQ ID NO: 1661153 - RNA, 19 nt, Homo sapiens
  misc_RNA (1)...(19): siRNA sense strand
uaugccagauggucaguuu

SEQ ID NO: 1661154 - RNA, 19 nt, Homo sapiens
  misc_RNA (1)...(19): siRNA sense strand
ggucaauacaccuaagaaa

SEQ ID NO: 1661155 - RNA, 19 nt, Homo sapiens
  misc_RNA (1)...(19): siRNA sense strand
ucacuucugucaucuagca

SEQ ID NO: 1661156 - RNA, 19 nt, Homo sapiens
  misc_RNA (1)...(19): siRNA sense strand
caccauugcucaggauuau

SEQ ID NO: 1661157 - RNA, 19 nt, Homo sapiens
  misc_RNA (1)...(19): siRNA sense strand
cagauggucaguuuaaaga

SEQ ID NO: 1661158 - RNA, 19 nt, Homo sapiens
  misc_RNA (1)...(19): siRNA sense strand
gauuggugcuucuguggau

SEQ ID NO: 1661159 - RNA, 19 nt, Homo sapiens
  misc_RNA (1)...(19): siRNA sense strand
gugcuucuguggauucuca

SEQ ID NO: 1661160 - RNA, 19 nt, Homo sapiens
  misc_RNA (1)...(19): siRNA sense strand
gauucucacuucugucauc

SEQ ID NO: 1661161 - RNA, 19 nt, Homo sapiens
  misc_RNA (1)...(19): siRNA sense strand
gauagggcagaagaauuua

SEQ ID NO: 1661162 - RNA, 19 nt, Homo sapiens
  misc_RNA (1)...(19): siRNA sense strand
ggucuuaaaggcugaugaa

SEQ ID NO: 1661163 - RNA, 19 nt, Homo sapiens
  misc_RNA (1)...(19): siRNA sense strand
caaagccacagcuguuaug

SEQ ID NO: 1661164 - RNA, 19 nt, Homo sapiens
  misc_RNA (1)...(19): siRNA sense strand
gccagauggucaguuuaaa

SEQ ID NO: 1661165 - RNA, 19 nt, Homo sapiens
  misc_RNA (1)...(19): siRNA sense strand
gcuggaaaccuggcaguga

SEQ ID NO: 1661166 - RNA, 19 nt, Homo sapiens
  misc_RNA (1)...(19): siRNA sense strand
gcucuguggaugagacuuu

SEQ ID NO: 1661167 - RNA, 19 nt, Homo sapiens
  misc_RNA (1)...(19): siRNA sense strand
ccaugaacauuccuuuggu

SEQ ID NO: 1661168 - RNA, 19 nt, Homo sapiens
  misc_RNA (1)...(19): siRNA sense strand
gugauagggcagaagaauu

SEQ ID NO: 1661169 - RNA, 19 nt, Homo sapiens
  misc_RNA (1)...(19): siRNA sense strand
cggcagaucacuguaaaug

SEQ ID NO: 1661170 - RNA, 19 nt, Homo sapiens
  misc_RNA (1)...(19): siRNA sense strand
gcaugggucaauacaccua

SEQ ID NO: 1661171 - RNA, 19 nt, Homo sapiens
  misc_RNA (1)...(19): siRNA sense strand
gacccgaagcgcaccauug

SEQ ID NO: 1661172 - RNA, 19 nt, Homo sapiens
  misc_RNA (1)...(19): siRNA sense strand
cuucaaagccacagcuguu

SEQ ID NO: 1661173 - RNA, 19 nt, Homo sapiens
  misc_RNA (1)...(19): siRNA sense strand
ggcagaucacuguaaauga

SEQ ID NO: 1661174 - RNA, 19 nt, Homo sapiens
  misc_RNA (1)...(19): siRNA sense strand
ucucacuucugucaucuag

SEQ ID NO: 1661175 - RNA, 19 nt, Homo sapiens
  misc_RNA (1)...(19): siRNA sense strand
cuggaaaccuggcagugau

SEQ ID NO: 1661176 - RNA, 19 nt, Homo sapiens
  misc_RNA (1)...(19): siRNA sense strand
ugccagauggucaguuuaa

SEQ ID NO: 1661177 - RNA, 19 nt, Homo sapiens
  misc_RNA (1)...(19): siRNA sense strand
ucaaagccacagcuguuau

SEQ ID NO: 1661178 - RNA, 19 nt, Homo sapiens
  misc_RNA (1)...(19): siRNA sense strand
ccagauggucaguuuaaag

SEQ ID NO: 1661179 - RNA, 19 nt, Homo sapiens
  misc_RNA (1)...(19): siRNA sense strand
gcgcaccauugcucaggau

SEQ ID NO: 1661180 - RNA, 19 nt, Homo sapiens
  misc_RNA (1)...(19): siRNA sense strand
ucagugauagggcagaaga

SEQ ID NO: 1661181 - RNA, 19 nt, Homo sapiens
  misc_RNA (1)...(19): siRNA sense strand
gguauucuucggcagauca

SEQ ID NO: 1661182 - RNA, 19 nt, Homo sapiens
  misc_RNA (1)...(19): siRNA sense strand
acucaacugccaagugauu

SEQ ID NO: 1661183 - RNA, 19 nt, Homo sapiens
  misc_RNA (1)...(19): siRNA sense strand
ccaaaagagcaaagaauau

SEQ ID NO: 1661184 - RNA, 19 nt, Homo sapiens
  misc_RNA (1)...(19): siRNA sense strand
ugacaaacauggggaagug

SEQ ID NO: 1661185 - RNA, 19 nt, Homo sapiens
  misc_RNA (1)...(19): siRNA sense strand
uguggauucucacuucugu

SEQ ID NO: 1661186 - RNA, 19 nt, Homo sapiens
  misc_RNA (1)...(19): siRNA sense strand
aggaaaauauguuguguuc

SEQ ID NO: 1661187 - RNA, 19 nt, Homo sapiens
  misc_RNA (1)...(19): siRNA sense strand
gucaauacaccuaagaaac

SEQ ID NO: 1661188 - RNA, 19 nt, Homo sapiens
  misc_RNA (1)...(19): siRNA sense strand
uggaaaccuggcagugaua

SEQ ID NO: 1661189 - RNA, 19 nt, Homo sapiens
  misc_RNA (1)...(19): siRNA sense strand
gacccaugaacauuccuuu

SEQ ID NO: 1661190 - RNA, 19 nt, Homo sapiens
  misc_RNA (1)...(19): siRNA sense strand
gaacauuccuuugguauca

SEQ ID NO: 1661191 - RNA, 19 nt, Homo sapiens
  misc_RNA (1)...(19): siRNA sense strand
ccacggagaucauugcuuu

SEQ ID NO: 1661192 - RNA, 19 nt, Homo sapiens
  misc_RNA (1)...(19): siRNA sense strand
gauggucaguuuaaagaua

SEQ ID NO: 1661193 - RNA, 19 nt, Homo sapiens
  misc_RNA (1)...(19): siRNA sense strand
aaacucaacugccaaguga

SEQ ID NO: 1661194 - RNA, 19 nt, Homo sapiens
  misc_RNA (1)...(19): siRNA sense strand
guaaaugaccucccuguug

SEQ ID NO: 1661195 - RNA, 19 nt, Homo sapiens
  misc_RNA (1)...(19): siRNA sense strand
gcagaagaauuuaagaaac

SEQ ID NO: 1661196 - RNA, 19 nt, Homo sapiens
  misc_RNA (1)...(19): siRNA sense strand
gaugagacuuugagacuag

SEQ ID NO: 1661197 - RNA, 19 nt, Homo sapiens
  misc_RNA (1)...(19): siRNA sense strand
gcagaucacuguaaaugac

SEQ ID NO: 1661198 - RNA, 19 nt, Homo sapiens
  misc_RNA (1)...(19): siRNA sense strand
ggaugagacuuugagacua

SEQ ID NO: 1661199 - RNA, 19 nt, Homo sapiens
  misc_RNA (1)...(19): siRNA sense strand
ugauagggcagaagaauuu

SEQ ID NO: 1661200 - RNA, 19 nt, Homo sapiens
  misc_RNA (1)...(19): siRNA sense strand
ggagaucauugcuuucagu

SEQ ID NO: 1661201 - RNA, 19 nt, Homo sapiens
  misc_RNA (1)...(19): siRNA sense strand
cagccugucugacuacaaa

SEQ ID NO: 1661202 - RNA, 19 nt, Homo sapiens
  misc_RNA (1)...(19): siRNA sense strand
gcaccauugcucaggauua

SEQ ID NO: 1661203 - RNA, 19 nt, Homo sapiens
  misc_RNA (1)...(19): siRNA sense strand
caugaacauuccuuuggua

SEQ ID NO: 1661204 - RNA, 19 nt, Homo sapiens
  misc_RNA (1)...(19): siRNA sense strand
caucuagcaugggucaaua

SEQ ID NO: 1661205 - RNA, 19 nt, Homo sapiens
  misc_RNA (1)...(19): siRNA sense strand
ggcagaagaauuuaagaaa

SEQ ID NO: 1661206 - RNA, 19 nt, Homo sapiens
  misc_RNA (1)...(19): siRNA sense strand
guucaggccuuccaguuca

SEQ ID NO: 1661207 - RNA, 19 nt, Homo sapiens
  misc_RNA (1)...(19): siRNA sense strand
gaugauaaggguauucuuc

SEQ ID NO: 1661208 - RNA, 19 nt, Homo sapiens
  misc_RNA (1)...(19): siRNA sense strand
caauacaccuaagaaacaa

SEQ ID NO: 1661209 - RNA, 19 nt, Homo sapiens
  misc_RNA (1)...(19): siRNA sense strand
gaaacucaacugccaagug

SEQ ID NO: 1661210 - RNA, 19 nt, Homo sapiens
  misc_RNA (1)...(19): siRNA sense strand
ccucuugacuucaccuuug

SEQ ID NO: 1661211 - RNA, 19 nt, Homo sapiens
  misc_RNA (1)...(19): siRNA sense strand
ucaauacaccuaagaaaca

SEQ ID NO: 1661212 - RNA, 19 nt, Homo sapiens
  misc_RNA (1)...(19): siRNA sense strand
gggcagaagaauuuaagaa

SEQ ID NO: 1661213 - RNA, 19 nt, Homo sapiens
  misc_RNA (1)...(19): siRNA sense strand
uaugccagauggucaguuu

SEQ ID NO: 1661214 - RNA, 19 nt, Homo sapiens
  misc_RNA (1)...(19): siRNA sense strand
ggucaauacaccuaagaaa

SEQ ID NO: 1661215 - RNA, 19 nt, Homo sapiens
  misc_RNA (1)...(19): siRNA sense strand
ucacuucugucaucuagca

SEQ ID NO: 1661216 - RNA, 19 nt, Homo sapiens
  misc_RNA (1)...(19): siRNA sense strand
caccauugcucaggauuau

SEQ ID NO: 1661217 - RNA, 19 nt, Homo sapiens
  misc_RNA (1)...(19): siRNA sense strand
cagauggucaguuuaaaga

SEQ ID NO: 1661218 - RNA, 19 nt, Homo sapiens
  misc_RNA (1)...(19): siRNA sense strand
gauuggugcuucuguggau

SEQ ID NO: 1661219 - RNA, 19 nt, Homo sapiens
  misc_RNA (1)...(19): siRNA sense strand
gugcuucuguggauucuca

SEQ ID NO: 1661220 - RNA, 19 nt, Homo sapiens
  misc_RNA (1)...(19): siRNA sense strand
gauucucacuucugucauc

SEQ ID NO: 1661221 - RNA, 19 nt, Homo sapiens
  misc_RNA (1)...(19): siRNA sense strand
gauagggcagaagaauuua

SEQ ID NO: 1661222 - RNA, 19 nt, Homo sapiens
  misc_RNA (1)...(19): siRNA sense strand
ggucuuaaaggcugaugaa

SEQ ID NO: 1661223 - RNA, 19 nt, Homo sapiens
  misc_RNA (1)...(19): siRNA sense strand
caaagccacagcuguuaug

SEQ ID NO: 1661224 - RNA, 19 nt, Homo sapiens
  misc_RNA (1)...(19): siRNA sense strand
gccagauggucaguuuaaa

SEQ ID NO: 1661225 - RNA, 19 nt, Homo sapiens
  misc_RNA (1)...(19): siRNA sense strand
gcuggaaaccuggcaguga

SEQ ID NO: 1661226 - RNA, 19 nt, Homo sapiens
  misc_RNA (1)...(19): siRNA sense strand
gcucuguggaugagacuuu

SEQ ID NO: 1661227 - RNA, 19 nt, Homo sapiens
  misc_RNA (1)...(19): siRNA sense strand
ccaugaacauuccuuuggu

SEQ ID NO: 1661228 - RNA, 19 nt, Homo sapiens
  misc_RNA (1)...(19): siRNA sense strand
gugauagggcagaagaauu

SEQ ID NO: 1661229 - RNA, 19 nt, Homo sapiens
  misc_RNA (1)...(19): siRNA sense strand
cggcagaucacuguaaaug

SEQ ID NO: 1661230 - RNA, 19 nt, Homo sapiens
  misc_RNA (1)...(19): siRNA sense strand
gcaugggucaauacaccua

SEQ ID NO: 1661231 - RNA, 19 nt, Homo sapiens
  misc_RNA (1)...(19): siRNA sense strand
gacccgaagcgcaccauug

SEQ ID NO: 1661232 - RNA, 19 nt, Homo sapiens
  misc_RNA (1)...(19): siRNA sense strand
cuucaaagccacagcuguu

SEQ ID NO: 1661233 - RNA, 19 nt, Homo sapiens
  misc_RNA (1)...(19): siRNA sense strand
ggcagaucacuguaaauga

SEQ ID NO: 1661234 - RNA, 19 nt, Homo sapiens
  misc_RNA (1)...(19): siRNA sense strand
ucucacuucugucaucuag

SEQ ID NO: 1661235 - RNA, 19 nt, Homo sapiens
  misc_RNA (1)...(19): siRNA sense strand
cuggaaaccuggcagugau

SEQ ID NO: 1661236 - RNA, 19 nt, Homo sapiens
  misc_RNA (1)...(19): siRNA sense strand
ugccagauggucaguuuaa

SEQ ID NO: 1661237 - RNA, 19 nt, Homo sapiens
  misc_RNA (1)...(19): siRNA sense strand
ucaaagccacagcuguuau

SEQ ID NO: 1661238 - RNA, 19 nt, Homo sapiens
  misc_RNA (1)...(19): siRNA sense strand
ccagauggucaguuuaaag

SEQ ID NO: 1661239 - RNA, 19 nt, Homo sapiens
  misc_RNA (1)...(19): siRNA sense strand
gcgcaccauugcucaggau

SEQ ID NO: 1661240 - RNA, 19 nt, Homo sapiens
  misc_RNA (1)...(19): siRNA sense strand
ucagugauagggcagaaga

SEQ ID NO: 1661241 - RNA, 19 nt, Homo sapiens
  misc_RNA (1)...(19): siRNA sense strand
gguauucuucggcagauca

SEQ ID NO: 1661242 - RNA, 19 nt, Homo sapiens
  misc_RNA (1)...(19): siRNA sense strand
acucaacugccaagugauu

SEQ ID NO: 1661243 - RNA, 19 nt, Homo sapiens
  misc_RNA (1)...(19): siRNA sense strand
ccaaaagagcaaagaauau

SEQ ID NO: 1661244 - RNA, 19 nt, Homo sapiens
  misc_RNA (1)...(19): siRNA sense strand
ugacaaacauggggaagug

SEQ ID NO: 1661245 - RNA, 19 nt, Homo sapiens
  misc_RNA (1)...(19): siRNA sense strand
uguggauucucacuucugu

SEQ ID NO: 1661246 - RNA, 19 nt, Homo sapiens
  misc_RNA (1)...(19): siRNA sense strand
aggaaaauauguuguguuc

SEQ ID NO: 1661247 - RNA, 19 nt, Homo sapiens
  misc_RNA (1)...(19): siRNA sense strand
gucaauacaccuaagaaac

SEQ ID NO: 1661248 - RNA, 19 nt, Homo sapiens
  misc_RNA (1)...(19): siRNA sense strand
uggaaaccuggcagugaua

SEQ ID NO: 1661249 - RNA, 19 nt, Homo sapiens
  misc_RNA (1)...(19): siRNA sense strand
gacccaugaacauuccuuu

SEQ ID NO: 1661250 - RNA, 19 nt, Homo sapiens
  misc_RNA (1)...(19): siRNA sense strand
gaacauuccuuugguauca

SEQ ID NO: 1661251 - RNA, 19 nt, Homo sapiens
  misc_RNA (1)...(19): siRNA sense strand
ccacggagaucauugcuuu

SEQ ID NO: 1661252 - RNA, 19 nt, Homo sapiens
  misc_RNA (1)...(19): siRNA sense strand
gauggucaguuuaaagaua

SEQ ID NO: 1661253 - RNA, 19 nt, Homo sapiens
  misc_RNA (1)...(19): siRNA sense strand
aaacucaacugccaaguga

SEQ ID NO: 1661254 - RNA, 19 nt, Homo sapiens
  misc_RNA (1)...(19): siRNA sense strand
guaaaugaccucccuguug

SEQ ID NO: 1661255 - RNA, 19 nt, Homo sapiens
  misc_RNA (1)...(19): siRNA sense strand
gcagaagaauuuaagaaac

SEQ ID NO: 1661256 - RNA, 19 nt, Homo sapiens
  misc_RNA (1)...(19): siRNA sense strand
gaugagacuuugagacuag

SEQ ID NO: 1661257 - RNA, 19 nt, Homo sapiens
  misc_RNA (1)...(19): siRNA sense strand
gcagaucacuguaaaugac

SEQ ID NO: 1661258 - RNA, 19 nt, Homo sapiens
  misc_RNA (1)...(19): siRNA sense strand
ggaugagacuuugagacua

SEQ ID NO: 1661259 - RNA, 19 nt, Homo sapiens
  misc_RNA (1)...(19): siRNA sense strand
ugauagggcagaagaauuu

SEQ ID NO: 1661260 - RNA, 19 nt, Homo sapiens
  misc_RNA (1)...(19): siRNA sense strand
ggagaucauugcuuucagu

SEQ ID NO: 1661261 - RNA, 19 nt, Homo sapiens
  misc_RNA (1)...(19): siRNA sense strand
cagccugucugacuacaaa

SEQ ID NO: 1661262 - RNA, 19 nt, Homo sapiens
  misc_RNA (1)...(19): siRNA sense strand
gcaccauugcucaggauua

SEQ ID NO: 1661263 - RNA, 19 nt, Homo sapiens
  misc_RNA (1)...(19): siRNA sense strand
caugaacauuccuuuggua

SEQ ID NO: 1661264 - RNA, 19 nt, Homo sapiens
  misc_RNA (1)...(19): siRNA sense strand
caucuagcaugggucaaua

SEQ ID NO: 1661265 - RNA, 19 nt, Homo sapiens
  misc_RNA (1)...(19): siRNA sense strand
ggcagaagaauuuaagaaa

SEQ ID NO: 1661266 - RNA, 19 nt, Homo sapiens
  misc_RNA (1)...(19): siRNA sense strand
guucaggccuuccaguuca

SEQ ID NO: 1661267 - RNA, 19 nt, Homo sapiens
  misc_RNA (1)...(19): siRNA sense strand
gaugauaaggguauucuuc

SEQ ID NO: 1661268 - RNA, 19 nt, Homo sapiens
  misc_RNA (1)...(19): siRNA sense strand
caauacaccuaagaaacaa

SEQ ID NO: 1661269 - RNA, 19 nt, Homo sapiens
  misc_RNA (1)...(19): siRNA sense strand
gaaacucaacugccaagug

SEQ ID NO: 1661270 - RNA, 19 nt, Homo sapiens
  misc_RNA (1)...(19): siRNA sense strand
ccucuugacuucaccuuug

SEQ ID NO: 1661271 - RNA, 19 nt, Homo sapiens
  misc_RNA (1)...(19): siRNA sense strand
ucaauacaccuaagaaaca

SEQ ID NO: 1661272 - RNA, 19 nt, Homo sapiens
  misc_RNA (1)...(19): siRNA sense strand
gggcagaagaauuuaagaa

SEQ ID NO: 1661273 - RNA, 19 nt, Homo sapiens
  misc_RNA (1)...(19): siRNA sense strand
uaugccagauggucaguuu

SEQ ID NO: 1661274 - RNA, 19 nt, Homo sapiens
  misc_RNA (1)...(19): siRNA sense strand
ggucaauacaccuaagaaa

SEQ ID NO: 1661275 - RNA, 19 nt, Homo sapiens
  misc_RNA (1)...(19): siRNA sense strand
ucacuucugucaucuagca

SEQ ID NO: 1661276 - RNA, 19 nt, Homo sapiens
  misc_RNA (1)...(19): siRNA sense strand
caccauugcucaggauuau

SEQ ID NO: 1661277 - RNA, 19 nt, Homo sapiens
  misc_RNA (1)...(19): siRNA sense strand
cagauggucaguuuaaaga

SEQ ID NO: 1661278 - RNA, 19 nt, Homo sapiens
  misc_RNA (1)...(19): siRNA sense strand
gauuggugcuucuguggau

SEQ ID NO: 1661279 - RNA, 19 nt, Homo sapiens
  misc_RNA (1)...(19): siRNA sense strand
gugcuucuguggauucuca

SEQ ID NO: 1661280 - RNA, 19 nt, Homo sapiens
  misc_RNA (1)...(19): siRNA sense strand
gauucucacuucugucauc

SEQ ID NO: 1661281 - RNA, 19 nt, Homo sapiens
  misc_RNA (1)...(19): siRNA sense strand
gauagggcagaagaauuua

SEQ ID NO: 1661282 - RNA, 19 nt, Homo sapiens
  misc_RNA (1)...(19): siRNA sense strand
ggucuuaaaggcugaugaa

SEQ ID NO: 1661283 - RNA, 19 nt, Homo sapiens
  misc_RNA (1)...(19): siRNA sense strand
caaagccacagcuguuaug

SEQ ID NO: 1661284 - RNA, 19 nt, Homo sapiens
  misc_RNA (1)...(19): siRNA sense strand
gccagauggucaguuuaaa

SEQ ID NO: 1661285 - RNA, 19 nt, Homo sapiens
  misc_RNA (1)...(19): siRNA sense strand
gcuggaaaccuggcaguga

SEQ ID NO: 1661286 - RNA, 19 nt, Homo sapiens
  misc_RNA (1)...(19): siRNA sense strand
gcucuguggaugagacuuu

SEQ ID NO: 1661287 - RNA, 19 nt, Homo sapiens
  misc_RNA (1)...(19): siRNA sense strand
ccaugaacauuccuuuggu

SEQ ID NO: 1661288 - RNA, 19 nt, Homo sapiens
  misc_RNA (1)...(19): siRNA sense strand
gugauagggcagaagaauu

SEQ ID NO: 1661289 - RNA, 19 nt, Homo sapiens
  misc_RNA (1)...(19): siRNA sense strand
cggcagaucacuguaaaug

SEQ ID NO: 1661290 - RNA, 19 nt, Homo sapiens
  misc_RNA (1)...(19): siRNA sense strand
gcaugggucaauacaccua

SEQ ID NO: 1661291 - RNA, 19 nt, Homo sapiens
  misc_RNA (1)...(19): siRNA sense strand
gacccgaagcgcaccauug

SEQ ID NO: 1661292 - RNA, 19 nt, Homo sapiens
  misc_RNA (1)...(19): siRNA sense strand
cuucaaagccacagcuguu

SEQ ID NO: 1661293 - RNA, 19 nt, Homo sapiens
  misc_RNA (1)...(19): siRNA sense strand
ggcagaucacuguaaauga

SEQ ID NO: 1661294 - RNA, 19 nt, Homo sapiens
  misc_RNA (1)...(19): siRNA sense strand
ucucacuucugucaucuag

SEQ ID NO: 1661295 - RNA, 19 nt, Homo sapiens
  misc_RNA (1)...(19): siRNA sense strand
cuggaaaccuggcagugau

SEQ ID NO: 1661296 - RNA, 19 nt, Homo sapiens
  misc_RNA (1)...(19): siRNA sense strand
ugccagauggucaguuuaa

SEQ ID NO: 1661297 - RNA, 19 nt, Homo sapiens
  misc_RNA (1)...(19): siRNA sense strand
ucaaagccacagcuguuau

SEQ ID NO: 1661298 - RNA, 19 nt, Homo sapiens
  misc_RNA (1)...(19): siRNA sense strand
ccagauggucaguuuaaag

SEQ ID NO: 1661299 - RNA, 19 nt, Homo sapiens
  misc_RNA (1)...(19): siRNA sense strand
gcgcaccauugcucaggau

SEQ ID NO: 1661300 - RNA, 19 nt, Homo sapiens
  misc_RNA (1)...(19): siRNA sense strand
ucagugauagggcagaaga

SEQ ID NO: 1661301 - RNA, 19 nt, Homo sapiens
  misc_RNA (1)...(19): siRNA sense strand
gguauucuucggcagauca

SEQ ID NO: 1661302 - RNA, 19 nt, Homo sapiens
  misc_RNA (1)...(19): siRNA sense strand
acucaacugccaagugauu

SEQ ID NO: 1661303 - RNA, 19 nt, Homo sapiens
  misc_RNA (1)...(19): siRNA sense strand
ccaaaagagcaaagaauau

SEQ ID NO: 1661304 - RNA, 19 nt, Homo sapiens
  misc_RNA (1)...(19): siRNA sense strand
ugacaaacauggggaagug

SEQ ID NO: 1661305 - RNA, 19 nt, Homo sapiens
  misc_RNA (1)...(19): siRNA sense strand
uguggauucucacuucugu

SEQ ID NO: 1661306 - RNA, 19 nt, Homo sapiens
  misc_RNA (1)...(19): siRNA sense strand
aggaaaauauguuguguuc

SEQ ID NO: 1661307 - RNA, 19 nt, Homo sapiens
  misc_RNA (1)...(19): siRNA sense strand
gucaauacaccuaagaaac

SEQ ID NO: 1661308 - RNA, 19 nt, Homo sapiens
  misc_RNA (1)...(19): siRNA sense strand
uggaaaccuggcagugaua

SEQ ID NO: 1661309 - RNA, 19 nt, Homo sapiens
  misc_RNA (1)...(19): siRNA sense strand
gacccaugaacauuccuuu

SEQ ID NO: 1661310 - RNA, 19 nt, Homo sapiens
  misc_RNA (1)...(19): siRNA sense strand
gaaguuaggucaagaugaa

SEQ ID NO: 1661311 - RNA, 19 nt, Homo sapiens
  misc_RNA (1)...(19): siRNA sense strand
ggaaauaacuacuaagcaa

SEQ ID NO: 1661312 - RNA, 19 nt, Homo sapiens
  misc_RNA (1)...(19): siRNA sense strand
gaagauagagagaccauaa

SEQ ID NO: 1661313 - RNA, 19 nt, Homo sapiens
  misc_RNA (1)...(19): siRNA sense strand
gaagugaauuguugccauu

SEQ ID NO: 1661314 - RNA, 19 nt, Homo sapiens
  misc_RNA (1)...(19): siRNA sense strand
gaacaucuucuaccucuuu

SEQ ID NO: 1661315 - RNA, 19 nt, Homo sapiens
  misc_RNA (1)...(19): siRNA sense strand
ggugagaacuugcccauug

SEQ ID NO: 1661316 - RNA, 19 nt, Homo sapiens
  misc_RNA (1)...(19): siRNA sense strand
gaaaggacccgaagugaau

SEQ ID NO: 1661317 - RNA, 19 nt, Homo sapiens
  misc_RNA (1)...(19): siRNA sense strand
ggaauuagacagugugaaa

SEQ ID NO: 1661318 - RNA, 19 nt, Homo sapiens
  misc_RNA (1)...(19): siRNA sense strand
gauagagagaccauaauua

SEQ ID NO: 1661319 - RNA, 19 nt, Homo sapiens
  misc_RNA (1)...(19): siRNA sense strand
uaugguggcugacagauuu

SEQ ID NO: 1661320 - RNA, 19 nt, Homo sapiens
  misc_RNA (1)...(19): siRNA sense strand
gcucuagcuucuguaauua

SEQ ID NO: 1661321 - RNA, 19 nt, Homo sapiens
  misc_RNA (1)...(19): siRNA sense strand
gaauuguugccauuucuua

SEQ ID NO: 1661322 - RNA, 19 nt, Homo sapiens
  misc_RNA (1)...(19): siRNA sense strand
gaaccuacuuaaagacugu

SEQ ID NO: 1661323 - RNA, 19 nt, Homo sapiens
  misc_RNA (1)...(19): siRNA sense strand
aggaugaccuugagacuuu

SEQ ID NO: 1661324 - RNA, 19 nt, Homo sapiens
  misc_RNA (1)...(19): siRNA sense strand
gauccuaauuacuugcaua

SEQ ID NO: 1661325 - RNA, 19 nt, Homo sapiens
  misc_RNA (1)...(19): siRNA sense strand
ccuaauuacuugcauagaa

SEQ ID NO: 1661326 - RNA, 19 nt, Homo sapiens
  misc_RNA (1)...(19): siRNA sense strand
gaacuugcccauugaagau

SEQ ID NO: 1661327 - RNA, 19 nt, Homo sapiens
  misc_RNA (1)...(19): siRNA sense strand
uggcaaaugauccuaauua

SEQ ID NO: 1661328 - RNA, 19 nt, Homo sapiens
  misc_RNA (1)...(19): siRNA sense strand
ggcucuagcuucuguaauu

SEQ ID NO: 1661329 - RNA, 19 nt, Homo sapiens
  misc_RNA (1)...(19): siRNA sense strand
gacccgaagugaauuguug

SEQ ID NO: 1661330 - RNA, 19 nt, Homo sapiens
  misc_RNA (1)...(19): siRNA sense strand
ggaagagacuguuguucgu

SEQ ID NO: 1661331 - RNA, 19 nt, Homo sapiens
  misc_RNA (1)...(19): siRNA sense strand
ugaagaugagguacuauua

SEQ ID NO: 1661332 - RNA, 19 nt, Homo sapiens
  misc_RNA (1)...(19): siRNA sense strand
uaaagacugugaagcugaa

SEQ ID NO: 1661333 - RNA, 19 nt, Homo sapiens
  misc_RNA (1)...(19): siRNA sense strand
ccaacaaccucaugaaacu

SEQ ID NO: 1661334 - RNA, 19 nt, Homo sapiens
  misc_RNA (1)...(19): siRNA sense strand
gugaaacgcuuagcaagug

SEQ ID NO: 1661335 - RNA, 19 nt, Homo sapiens
  misc_RNA (1)...(19): siRNA sense strand
gaauaucaucuccaauuug

SEQ ID NO: 1661336 - RNA, 19 nt, Homo sapiens
  misc_RNA (1)...(19): siRNA sense strand
caaaucggcucuagcuucu

SEQ ID NO: 1661337 - RNA, 19 nt, Homo sapiens
  misc_RNA (1)...(19): siRNA sense strand
gucaggaaauaacuacuaa

SEQ ID NO: 1661338 - RNA, 19 nt, Homo sapiens
  misc_RNA (1)...(19): siRNA sense strand
gaagaugagguacuauuag

SEQ ID NO: 1661339 - RNA, 19 nt, Homo sapiens
  misc_RNA (1)...(19): siRNA sense strand
gcaaauguucgcuucaaug

SEQ ID NO: 1661340 - RNA, 19 nt, Homo sapiens
  misc_RNA (1)...(19): siRNA sense strand
gcugaauucuuuauguaug

SEQ ID NO: 1661341 - RNA, 19 nt, Homo sapiens
  misc_RNA (1)...(19): siRNA sense strand
gacguucguuugaauauca

SEQ ID NO: 1661342 - RNA, 19 nt, Homo sapiens
  misc_RNA (1)...(19): siRNA sense strand
cgacucaacaguauuaaga

SEQ ID NO: 1661343 - RNA, 19 nt, Homo sapiens
  misc_RNA (1)...(19): siRNA sense strand
gcacaggaagcuauaagug

SEQ ID NO: 1661344 - RNA, 19 nt, Homo sapiens
  misc_RNA (1)...(19): siRNA sense strand
uaaaagaacuuggugagaa

SEQ ID NO: 1661345 - RNA, 19 nt, Homo sapiens
  misc_RNA (1)...(19): siRNA sense strand
cugagcagcugggaaauuu

SEQ ID NO: 1661346 - RNA, 19 nt, Homo sapiens
  misc_RNA (1)...(19): siRNA sense strand
ugaugaagaugagguacua

SEQ ID NO: 1661347 - RNA, 19 nt, Homo sapiens
  misc_RNA (1)...(19): siRNA sense strand
ugaaauuguuccacuguuc

SEQ ID NO: 1661348 - RNA, 19 nt, Homo sapiens
  misc_RNA (1)...(19): siRNA sense strand
gcaaaugcugcccaucgua

SEQ ID NO: 1661349 - RNA, 19 nt, Homo sapiens
  misc_RNA (1)...(19): siRNA sense strand
guaaaugaagugauuggaa

SEQ ID NO: 1661350 - RNA, 19 nt, Homo sapiens
  misc_RNA (1)...(19): siRNA sense strand
ggaagcuugugucaguauu

SEQ ID NO: 1661351 - RNA, 19 nt, Homo sapiens
  misc_RNA (1)...(19): siRNA sense strand
gugagaacuugcccauuga

SEQ ID NO: 1661352 - RNA, 19 nt, Homo sapiens
  misc_RNA (1)...(19): siRNA sense strand
ggaugaguguccugacguu

SEQ ID NO: 1661353 - RNA, 19 nt, Homo sapiens
  misc_RNA (1)...(19): siRNA sense strand
gagguacuauuagcucuug

SEQ ID NO: 1661354 - RNA, 19 nt, Homo sapiens
  misc_RNA (1)...(19): siRNA sense strand
ggucaggaaauaacuacua

SEQ ID NO: 1661355 - RNA, 19 nt, Homo sapiens
  misc_RNA (1)...(19): siRNA sense strand
uaguggagcuggcagaaga

SEQ ID NO: 1661356 - RNA, 19 nt, Homo sapiens
  misc_RNA (1)...(19): siRNA sense strand
guaauuaugggauugucua

SEQ ID NO: 1661357 - RNA, 19 nt, Homo sapiens
  misc_RNA (1)...(19): siRNA sense strand
gaaauuguuccacuguuca

SEQ ID NO: 1661358 - RNA, 19 nt, Homo sapiens
  misc_RNA (1)...(19): siRNA sense strand
guagaaaggacccgaagug

SEQ ID NO: 1661359 - RNA, 19 nt, Homo sapiens
  misc_RNA (1)...(19): siRNA sense strand
gaccaauucuagauaccaa

SEQ ID NO: 1661360 - RNA, 19 nt, Homo sapiens
  misc_RNA (1)...(19): siRNA sense strand
gcauagaaugaccacuuua

SEQ ID NO: 1661361 - RNA, 19 nt, Homo sapiens
  misc_RNA (1)...(19): siRNA sense strand
gguguggaauucuuugaug

SEQ ID NO: 1661362 - RNA, 19 nt, Homo sapiens
  misc_RNA (1)...(19): siRNA sense strand
gacaagcagcagaagauaa

SEQ ID NO: 1661363 - RNA, 19 nt, Homo sapiens
  misc_RNA (1)...(19): siRNA sense strand
gagaccaaguagcaaaugu

SEQ ID NO: 1661364 - RNA, 19 nt, Homo sapiens
  misc_RNA (1)...(19): siRNA sense strand
gagaagcugccaccaacaa

SEQ ID NO: 1661365 - RNA, 19 nt, Homo sapiens
  misc_RNA (1)...(19): siRNA sense strand
gcaaagaaaauaccauuga

SEQ ID NO: 1661366 - RNA, 19 nt, Homo sapiens
  misc_RNA (1)...(19): siRNA sense strand
acaagcagcagaagauaaa

SEQ ID NO: 1661367 - RNA, 19 nt, Homo sapiens
  misc_RNA (1)...(19): siRNA sense strand
agugggagguccugacuuu

SEQ ID NO: 1661368 - RNA, 19 nt, Homo sapiens
  misc_RNA (1)...(19): siRNA sense strand
ucgacgagcuccgcaauga

SEQ ID NO: 1661369 - RNA, 19 nt, Homo sapiens
  misc_RNA (1)...(19): siRNA sense strand
caaauguucgcuucaaugu

SEQ ID NO: 1661370 - RNA, 19 nt, Homo sapiens
  misc_RNA (1)...(19): siRNA sense strand
agaaagccauggguccuaa

SEQ ID NO: 1661371 - RNA, 19 nt, Homo sapiens
  misc_RNA (1)...(19): siRNA sense strand
ugucaguauugcccaguua

SEQ ID NO: 1661372 - RNA, 19 nt, Homo sapiens
  misc_RNA (1)...(19): siRNA sense strand
ccaaucaacaugucaaauc

SEQ ID NO: 1661373 - RNA, 19 nt, Homo sapiens
  misc_RNA (1)...(19): siRNA sense strand
uguggaagcuugugucagu

SEQ ID NO: 1661374 - RNA, 19 nt, Homo sapiens
  misc_RNA (1)...(19): siRNA sense strand
ccacuuuauucugcauuaa

SEQ ID NO: 1661375 - RNA, 19 nt, Homo sapiens
  misc_RNA (1)...(19): siRNA sense strand
ggcaaaugauccuaauuac

SEQ ID NO: 1661376 - RNA, 19 nt, Homo sapiens
  misc_RNA (1)...(19): siRNA sense strand
guggaauucuuugaugaaa

SEQ ID NO: 1661377 - RNA, 19 nt, Homo sapiens
  misc_RNA (1)...(19): siRNA sense strand
uagcucaguuaaaggauga

SEQ ID NO: 1661378 - RNA, 19 nt, Homo sapiens
  misc_RNA (1)...(19): siRNA sense strand
ucuggaagcuuauuuugua

SEQ ID NO: 1661379 - RNA, 19 nt, Homo sapiens
  misc_RNA (1)...(19): siRNA sense strand
cuacagaaguuaggucaag

SEQ ID NO: 1661380 - RNA, 19 nt, Homo sapiens
  misc_RNA (1)...(19): siRNA sense strand
uagcaaauguucgcuucaa

SEQ ID NO: 1661381 - RNA, 19 nt, Homo sapiens
  misc_RNA (1)...(19): siRNA sense strand
caaaugcugcccaucguau

SEQ ID NO: 1661382 - RNA, 19 nt, Homo sapiens
  misc_RNA (1)...(19): siRNA sense strand
auuaugggauugucuacua

SEQ ID NO: 1661383 - RNA, 19 nt, Homo sapiens
  misc_RNA (1)...(19): siRNA sense strand
uuucuuagcucaguuaaag

SEQ ID NO: 1661384 - RNA, 19 nt, Homo sapiens
  misc_RNA (1)...(19): siRNA sense strand
ggccaaaucucuacaaaag

SEQ ID NO: 1661385 - RNA, 19 nt, Homo sapiens
  misc_RNA (1)...(19): siRNA sense strand
gagcagcugggaaauuuca

SEQ ID NO: 1661386 - RNA, 19 nt, Homo sapiens
  misc_RNA (1)...(19): siRNA sense strand
ugcauagaaugaccacuuu

SEQ ID NO: 1661387 - RNA, 19 nt, Homo sapiens
  misc_RNA (1)...(19): siRNA sense strand
gcaaaugauccuaauuacu

SEQ ID NO: 1661388 - RNA, 19 nt, Homo sapiens
  misc_RNA (1)...(19): siRNA sense strand
ggguggagauggagaugau

SEQ ID NO: 1661389 - RNA, 19 nt, Homo sapiens
  misc_RNA (1)...(19): siRNA sense strand
gcacuuggaguagaaagga

SEQ ID NO: 1661390 - RNA, 19 nt, Homo sapiens
  misc_RNA (1)...(19): siRNA sense strand
caaucaacaugucaaaucg

SEQ ID NO: 1661391 - RNA, 19 nt, Homo sapiens
  misc_RNA (1)...(19): siRNA sense strand
cgacaagcagcagaagaua

SEQ ID NO: 1661392 - RNA, 19 nt, Homo sapiens
  misc_RNA (1)...(19): siRNA sense strand
guguggaauucuuugauga

SEQ ID NO: 1661393 - RNA, 19 nt, Homo sapiens
  misc_RNA (1)...(19): siRNA sense strand
cauagaaugaccacuuuau

SEQ ID NO: 1661394 - RNA, 19 nt, Homo sapiens
  misc_RNA (1)...(19): siRNA sense strand
cuguugcucuggaagcuua

SEQ ID NO: 1661395 - RNA, 19 nt, Homo sapiens
  misc_RNA (1)...(19): siRNA sense strand
gaagugaagccaguacuac

SEQ ID NO: 1661396 - RNA, 19 nt, Homo sapiens
  misc_RNA (1)...(19): siRNA sense strand
gaaaauaccauugaacauc

SEQ ID NO: 1661397 - RNA, 19 nt, Homo sapiens
  misc_RNA (1)...(19): siRNA sense strand
ggugaugccuacacuucga

SEQ ID NO: 1661398 - RNA, 19 nt, Homo sapiens
  misc_RNA (1)...(19): siRNA sense strand
gaagcuugugucaguauug

SEQ ID NO: 1661399 - RNA, 19 nt, Homo sapiens
  misc_RNA (1)...(19): siRNA sense strand
gugaaauuguuccacuguu

SEQ ID NO: 1661400 - RNA, 19 nt, Homo sapiens
  misc_RNA (1)...(19): siRNA sense strand
caauguggccaaaucucua

SEQ ID NO: 1661401 - RNA, 19 nt, Homo sapiens
  misc_RNA (1)...(19): siRNA sense strand
agaaaggacccgaagugaa

SEQ ID NO: 1661402 - RNA, 19 nt, Homo sapiens
  misc_RNA (1)...(19): siRNA sense strand
guuugaauaucaucuccaa

SEQ ID NO: 1661403 - RNA, 19 nt, Homo sapiens
  misc_RNA (1)...(19): siRNA sense strand
uucagaaccuacuuaaaga

SEQ ID NO: 1661404 - RNA, 19 nt, Homo sapiens
  misc_RNA (1)...(19): siRNA sense strand
guucaccucucgcacaucu

SEQ ID NO: 1661405 - RNA, 19 nt, Homo sapiens
  misc_RNA (1)...(19): siRNA sense strand
caacaaccucaugaaacua

SEQ ID NO: 1661406 - RNA, 19 nt, Homo sapiens
  misc_RNA (1)...(19): siRNA sense strand
gcucguggaccauguauac

SEQ ID NO: 1661407 - RNA, 19 nt, Homo sapiens
  misc_RNA (1)...(19): siRNA sense strand
ccuagcacuuggaguagaa

SEQ ID NO: 1661408 - RNA, 19 nt, Homo sapiens
  misc_RNA (1)...(19): siRNA sense strand
gggauugucuacuauuuug

SEQ ID NO: 1661409 - RNA, 19 nt, Homo sapiens
  misc_RNA (1)...(19): siRNA sense strand
agauagagagaccauaauu

SEQ ID NO: 1661410 - RNA, 19 nt, Homo sapiens
  misc_RNA (1)...(19): siRNA sense strand
gaaguuaggucaagaugaa

SEQ ID NO: 1661411 - RNA, 19 nt, Homo sapiens
  misc_RNA (1)...(19): siRNA sense strand
ggaaauaacuacuaagcaa

SEQ ID NO: 1661412 - RNA, 19 nt, Homo sapiens
  misc_RNA (1)...(19): siRNA sense strand
gaagauagagagaccauaa

SEQ ID NO: 1661413 - RNA, 19 nt, Homo sapiens
  misc_RNA (1)...(19): siRNA sense strand
gaagugaauuguugccauu

SEQ ID NO: 1661414 - RNA, 19 nt, Homo sapiens
  misc_RNA (1)...(19): siRNA sense strand
gaacaucuucuaccucuuu

SEQ ID NO: 1661415 - RNA, 19 nt, Homo sapiens
  misc_RNA (1)...(19): siRNA sense strand
ggugagaacuugcccauug

SEQ ID NO: 1661416 - RNA, 19 nt, Homo sapiens
  misc_RNA (1)...(19): siRNA sense strand
gaaaggacccgaagugaau

SEQ ID NO: 1661417 - RNA, 19 nt, Homo sapiens
  misc_RNA (1)...(19): siRNA sense strand
ggaauuagacagugugaaa

SEQ ID NO: 1661418 - RNA, 19 nt, Homo sapiens
  misc_RNA (1)...(19): siRNA sense strand
gauagagagaccauaauua

SEQ ID NO: 1661419 - RNA, 19 nt, Homo sapiens
  misc_RNA (1)...(19): siRNA sense strand
uaugguggcugacagauuu

SEQ ID NO: 1661420 - RNA, 19 nt, Homo sapiens
  misc_RNA (1)...(19): siRNA sense strand
gcucuagcuucuguaauua

SEQ ID NO: 1661421 - RNA, 19 nt, Homo sapiens
  misc_RNA (1)...(19): siRNA sense strand
gaauuguugccauuucuua

SEQ ID NO: 1661422 - RNA, 19 nt, Homo sapiens
  misc_RNA (1)...(19): siRNA sense strand
gaaccuacuuaaagacugu

SEQ ID NO: 1661423 - RNA, 19 nt, Homo sapiens
  misc_RNA (1)...(19): siRNA sense strand
aggaugaccuugagacuuu

SEQ ID NO: 1661424 - RNA, 19 nt, Homo sapiens
  misc_RNA (1)...(19): siRNA sense strand
gauccuaauuacuugcaua

SEQ ID NO: 1661425 - RNA, 19 nt, Homo sapiens
  misc_RNA (1)...(19): siRNA sense strand
ccuaauuacuugcauagaa

SEQ ID NO: 1661426 - RNA, 19 nt, Homo sapiens
  misc_RNA (1)...(19): siRNA sense strand
gaacuugcccauugaagau

SEQ ID NO: 1661427 - RNA, 19 nt, Homo sapiens
  misc_RNA (1)...(19): siRNA sense strand
uggcaaaugauccuaauua

SEQ ID NO: 1661428 - RNA, 19 nt, Homo sapiens
  misc_RNA (1)...(19): siRNA sense strand
ggcucuagcuucuguaauu

SEQ ID NO: 1661429 - RNA, 19 nt, Homo sapiens
  misc_RNA (1)...(19): siRNA sense strand
gacccgaagugaauuguug

SEQ ID NO: 1661430 - RNA, 19 nt, Homo sapiens
  misc_RNA (1)...(19): siRNA sense strand
ggaagagacuguuguucgu

SEQ ID NO: 1661431 - RNA, 19 nt, Homo sapiens
  misc_RNA (1)...(19): siRNA sense strand
ugaagaugagguacuauua

SEQ ID NO: 1661432 - RNA, 19 nt, Homo sapiens
  misc_RNA (1)...(19): siRNA sense strand
uaaagacugugaagcugaa

SEQ ID NO: 1661433 - RNA, 19 nt, Homo sapiens
  misc_RNA (1)...(19): siRNA sense strand
ccaacaaccucaugaaacu

SEQ ID NO: 1661434 - RNA, 19 nt, Homo sapiens
  misc_RNA (1)...(19): siRNA sense strand
gugaaacgcuuagcaagug

SEQ ID NO: 1661435 - RNA, 19 nt, Homo sapiens
  misc_RNA (1)...(19): siRNA sense strand
gaauaucaucuccaauuug

SEQ ID NO: 1661436 - RNA, 19 nt, Homo sapiens
  misc_RNA (1)...(19): siRNA sense strand
caaaucggcucuagcuucu

SEQ ID NO: 1661437 - RNA, 19 nt, Homo sapiens
  misc_RNA (1)...(19): siRNA sense strand
gucaggaaauaacuacuaa

SEQ ID NO: 1661438 - RNA, 19 nt, Homo sapiens
  misc_RNA (1)...(19): siRNA sense strand
gaagaugagguacuauuag

SEQ ID NO: 1661439 - RNA, 19 nt, Homo sapiens
  misc_RNA (1)...(19): siRNA sense strand
gcaaauguucgcuucaaug

SEQ ID NO: 1661440 - RNA, 19 nt, Homo sapiens
  misc_RNA (1)...(19): siRNA sense strand
gcugaauucuuuauguaug

SEQ ID NO: 1661441 - RNA, 19 nt, Homo sapiens
  misc_RNA (1)...(19): siRNA sense strand
gacguucguuugaauauca

SEQ ID NO: 1661442 - RNA, 19 nt, Homo sapiens
  misc_RNA (1)...(19): siRNA sense strand
cgacucaacaguauuaaga

SEQ ID NO: 1661443 - RNA, 19 nt, Homo sapiens
  misc_RNA (1)...(19): siRNA sense strand
gcacaggaagcuauaagug

SEQ ID NO: 1661444 - RNA, 19 nt, Homo sapiens
  misc_RNA (1)...(19): siRNA sense strand
uaaaagaacuuggugagaa

SEQ ID NO: 1661445 - RNA, 19 nt, Homo sapiens
  misc_RNA (1)...(19): siRNA sense strand
cugagcagcugggaaauuu

SEQ ID NO: 1661446 - RNA, 19 nt, Homo sapiens
  misc_RNA (1)...(19): siRNA sense strand
ugaugaagaugagguacua

SEQ ID NO: 1661447 - RNA, 19 nt, Homo sapiens
  misc_RNA (1)...(19): siRNA sense strand
ugaaauuguuccacuguuc

SEQ ID NO: 1661448 - RNA, 19 nt, Homo sapiens
  misc_RNA (1)...(19): siRNA sense strand
gcaaaugcugcccaucgua

SEQ ID NO: 1661449 - RNA, 19 nt, Homo sapiens
  misc_RNA (1)...(19): siRNA sense strand
guaaaugaagugauuggaa

SEQ ID NO: 1661450 - RNA, 19 nt, Homo sapiens
  misc_RNA (1)...(19): siRNA sense strand
ggaagcuugugucaguauu

SEQ ID NO: 1661451 - RNA, 19 nt, Homo sapiens
  misc_RNA (1)...(19): siRNA sense strand
gugagaacuugcccauuga

SEQ ID NO: 1661452 - RNA, 19 nt, Homo sapiens
  misc_RNA (1)...(19): siRNA sense strand
ggaugaguguccugacguu

SEQ ID NO: 1661453 - RNA, 19 nt, Homo sapiens
  misc_RNA (1)...(19): siRNA sense strand
gagguacuauuagcucuug

SEQ ID NO: 1661454 - RNA, 19 nt, Homo sapiens
  misc_RNA (1)...(19): siRNA sense strand
ggucaggaaauaacuacua

SEQ ID NO: 1661455 - RNA, 19 nt, Homo sapiens
  misc_RNA (1)...(19): siRNA sense strand
uaguggagcuggcagaaga

SEQ ID NO: 1661456 - RNA, 19 nt, Homo sapiens
  misc_RNA (1)...(19): siRNA sense strand
guaauuaugggauugucua

SEQ ID NO: 1661457 - RNA, 19 nt, Homo sapiens
  misc_RNA (1)...(19): siRNA sense strand
gaaauuguuccacuguuca

SEQ ID NO: 1661458 - RNA, 19 nt, Homo sapiens
  misc_RNA (1)...(19): siRNA sense strand
guagaaaggacccgaagug

SEQ ID NO: 1661459 - RNA, 19 nt, Homo sapiens
  misc_RNA (1)...(19): siRNA sense strand
gaccaauucuagauaccaa

SEQ ID NO: 1661460 - RNA, 19 nt, Homo sapiens
  misc_RNA (1)...(19): siRNA sense strand
gcauagaaugaccacuuua

SEQ ID NO: 1661461 - RNA, 19 nt, Homo sapiens
  misc_RNA (1)...(19): siRNA sense strand
gguguggaauucuuugaug

SEQ ID NO: 1661462 - RNA, 19 nt, Homo sapiens
  misc_RNA (1)...(19): siRNA sense strand
gacaagcagcagaagauaa

SEQ ID NO: 1661463 - RNA, 19 nt, Homo sapiens
  misc_RNA (1)...(19): siRNA sense strand
gagaccaaguagcaaaugu

SEQ ID NO: 1661464 - RNA, 19 nt, Homo sapiens
  misc_RNA (1)...(19): siRNA sense strand
gagaagcugccaccaacaa

SEQ ID NO: 1661465 - RNA, 19 nt, Homo sapiens
  misc_RNA (1)...(19): siRNA sense strand
gcaaagaaaauaccauuga

SEQ ID NO: 1661466 - RNA, 19 nt, Homo sapiens
  misc_RNA (1)...(19): siRNA sense strand
acaagcagcagaagauaaa

SEQ ID NO: 1661467 - RNA, 19 nt, Homo sapiens
  misc_RNA (1)...(19): siRNA sense strand
agugggagguccugacuuu

SEQ ID NO: 1661468 - RNA, 19 nt, Homo sapiens
  misc_RNA (1)...(19): siRNA sense strand
ucgacgagcuccgcaauga

SEQ ID NO: 1661469 - RNA, 19 nt, Homo sapiens
  misc_RNA (1)...(19): siRNA sense strand
caaauguucgcuucaaugu

SEQ ID NO: 1661470 - RNA, 19 nt, Homo sapiens
  misc_RNA (1)...(19): siRNA sense strand
agaaagccauggguccuaa

SEQ ID NO: 1661471 - RNA, 19 nt, Homo sapiens
  misc_RNA (1)...(19): siRNA sense strand
ugucaguauugcccaguua

SEQ ID NO: 1661472 - RNA, 19 nt, Homo sapiens
  misc_RNA (1)...(19): siRNA sense strand
ccaaucaacaugucaaauc

SEQ ID NO: 1661473 - RNA, 19 nt, Homo sapiens
  misc_RNA (1)...(19): siRNA sense strand
uguggaagcuugugucagu

SEQ ID NO: 1661474 - RNA, 19 nt, Homo sapiens
  misc_RNA (1)...(19): siRNA sense strand
ccacuuuauucugcauuaa

SEQ ID NO: 1661475 - RNA, 19 nt, Homo sapiens
  misc_RNA (1)...(19): siRNA sense strand
ggcaaaugauccuaauuac

SEQ ID NO: 1661476 - RNA, 19 nt, Homo sapiens
  misc_RNA (1)...(19): siRNA sense strand
guggaauucuuugaugaaa

SEQ ID NO: 1661477 - RNA, 19 nt, Homo sapiens
  misc_RNA (1)...(19): siRNA sense strand
uagcucaguuaaaggauga

SEQ ID NO: 1661478 - RNA, 19 nt, Homo sapiens
  misc_RNA (1)...(19): siRNA sense strand
ucuggaagcuuauuuugua

SEQ ID NO: 1661479 - RNA, 19 nt, Homo sapiens
  misc_RNA (1)...(19): siRNA sense strand
cuacagaaguuaggucaag

SEQ ID NO: 1661480 - RNA, 19 nt, Homo sapiens
  misc_RNA (1)...(19): siRNA sense strand
uagcaaauguucgcuucaa

SEQ ID NO: 1661481 - RNA, 19 nt, Homo sapiens
  misc_RNA (1)...(19): siRNA sense strand
caaaugcugcccaucguau

SEQ ID NO: 1661482 - RNA, 19 nt, Homo sapiens
  misc_RNA (1)...(19): siRNA sense strand
auuaugggauugucuacua

SEQ ID NO: 1661483 - RNA, 19 nt, Homo sapiens
  misc_RNA (1)...(19): siRNA sense strand
uuucuuagcucaguuaaag

SEQ ID NO: 1661484 - RNA, 19 nt, Homo sapiens
  misc_RNA (1)...(19): siRNA sense strand
ggccaaaucucuacaaaag

SEQ ID NO: 1661485 - RNA, 19 nt, Homo sapiens
  misc_RNA (1)...(19): siRNA sense strand
gagcagcugggaaauuuca

SEQ ID NO: 1661486 - RNA, 19 nt, Homo sapiens
  misc_RNA (1)...(19): siRNA sense strand
ugcauagaaugaccacuuu

SEQ ID NO: 1661487 - RNA, 19 nt, Homo sapiens
  misc_RNA (1)...(19): siRNA sense strand
gcaaaugauccuaauuacu

SEQ ID NO: 1661488 - RNA, 19 nt, Homo sapiens
  misc_RNA (1)...(19): siRNA sense strand
ggguggagauggagaugau

SEQ ID NO: 1661489 - RNA, 19 nt, Homo sapiens
  misc_RNA (1)...(19): siRNA sense strand
gcacuuggaguagaaagga

SEQ ID NO: 1661490 - RNA, 19 nt, Homo sapiens
  misc_RNA (1)...(19): siRNA sense strand
caaucaacaugucaaaucg

SEQ ID NO: 1661491 - RNA, 19 nt, Homo sapiens
  misc_RNA (1)...(19): siRNA sense strand
cgacaagcagcagaagaua

SEQ ID NO: 1661492 - RNA, 19 nt, Homo sapiens
  misc_RNA (1)...(19): siRNA sense strand
guguggaauucuuugauga

SEQ ID NO: 1661493 - RNA, 19 nt, Homo sapiens
  misc_RNA (1)...(19): siRNA sense strand
cauagaaugaccacuuuau

SEQ ID NO: 1661494 - RNA, 19 nt, Homo sapiens
  misc_RNA (1)...(19): siRNA sense strand
cuguugcucuggaagcuua

SEQ ID NO: 1661495 - RNA, 19 nt, Homo sapiens
  misc_RNA (1)...(19): siRNA sense strand
gaagugaagccaguacuac

SEQ ID NO: 1661496 - RNA, 19 nt, Homo sapiens
  misc_RNA (1)...(19): siRNA sense strand
gaaaauaccauugaacauc

SEQ ID NO: 1661497 - RNA, 19 nt, Homo sapiens
  misc_RNA (1)...(19): siRNA sense strand
ggugaugccuacacuucga

SEQ ID NO: 1661498 - RNA, 19 nt, Homo sapiens
  misc_RNA (1)...(19): siRNA sense strand
gaagcuugugucaguauug

SEQ ID NO: 1661499 - RNA, 19 nt, Homo sapiens
  misc_RNA (1)...(19): siRNA sense strand
gugaaauuguuccacuguu

SEQ ID NO: 1661500 - RNA, 19 nt, Homo sapiens
  misc_RNA (1)...(19): siRNA sense strand
caauguggccaaaucucua

SEQ ID NO: 1661501 - RNA, 19 nt, Homo sapiens
  misc_RNA (1)...(19): siRNA sense strand
agaaaggacccgaagugaa

SEQ ID NO: 1661502 - RNA, 19 nt, Homo sapiens
  misc_RNA (1)...(19): siRNA sense strand
guuugaauaucaucuccaa

SEQ ID NO: 1661503 - RNA, 19 nt, Homo sapiens
  misc_RNA (1)...(19): siRNA sense strand
uucagaaccuacuuaaaga

SEQ ID NO: 1661504 - RNA, 19 nt, Homo sapiens
  misc_RNA (1)...(19): siRNA sense strand
guucaccucucgcacaucu

SEQ ID NO: 1661505 - RNA, 19 nt, Homo sapiens
  misc_RNA (1)...(19): siRNA sense strand
caacaaccucaugaaacua

SEQ ID NO: 1661506 - RNA, 19 nt, Homo sapiens
  misc_RNA (1)...(19): siRNA sense strand
gcucguggaccauguauac

SEQ ID NO: 1661507 - RNA, 19 nt, Homo sapiens
  misc_RNA (1)...(19): siRNA sense strand
ccuagcacuuggaguagaa

SEQ ID NO: 1661508 - RNA, 19 nt, Homo sapiens
  misc_RNA (1)...(19): siRNA sense strand
gggauugucuacuauuuug

SEQ ID NO: 1661509 - RNA, 19 nt, Homo sapiens
  misc_RNA (1)...(19): siRNA sense strand
agauagagagaccauaauu

SEQ ID NO: 1661510 - RNA, 19 nt, Homo sapiens
  misc_RNA (1)...(19): siRNA sense strand
gaagaaaccuccuaugaga

SEQ ID NO: 1661511 - RNA, 19 nt, Homo sapiens
  misc_RNA (1)...(19): siRNA sense strand
gaagggaacugauggagua

SEQ ID NO: 1661512 - RNA, 19 nt, Homo sapiens
  misc_RNA (1)...(19): siRNA sense strand
gggaagagauguucaagaa

SEQ ID NO: 1661513 - RNA, 19 nt, Homo sapiens
  misc_RNA (1)...(19): siRNA sense strand
gaagagauguucaagaauc

SEQ ID NO: 1661514 - RNA, 19 nt, Homo sapiens
  misc_RNA (1)...(19): siRNA sense strand
gaagaaugauccugagauu

SEQ ID NO: 1661515 - RNA, 19 nt, Homo sapiens
  misc_RNA (1)...(19): siRNA sense strand
ggauaacccuucuuacauu

SEQ ID NO: 1661516 - RNA, 19 nt, Homo sapiens
  misc_RNA (1)...(19): siRNA sense strand
uaaagaagccagaauauga

SEQ ID NO: 1661517 - RNA, 19 nt, Homo sapiens
  misc_RNA (1)...(19): siRNA sense strand
gcaaaucauuggucaguug

SEQ ID NO: 1661518 - RNA, 19 nt, Homo sapiens
  misc_RNA (1)...(19): siRNA sense strand
ggacacuaaugcagucaua

SEQ ID NO: 1661519 - RNA, 19 nt, Homo sapiens
  misc_RNA (1)...(19): siRNA sense strand
gaagaaguccucgaucaua

SEQ ID NO: 1661520 - RNA, 19 nt, Homo sapiens
  misc_RNA (1)...(19): siRNA sense strand
gagaagagccagcaaauca

SEQ ID NO: 1661521 - RNA, 19 nt, Homo sapiens
  misc_RNA (1)...(19): siRNA sense strand
gaacaaagaagggaacuga

SEQ ID NO: 1661522 - RNA, 19 nt, Homo sapiens
  misc_RNA (1)...(19): siRNA sense strand
cagcuagacuggauaguaa

SEQ ID NO: 1661523 - RNA, 19 nt, Homo sapiens
  misc_RNA (1)...(19): siRNA sense strand
gaucagaacuauguggaaa

SEQ ID NO: 1661524 - RNA, 19 nt, Homo sapiens
  misc_RNA (1)...(19): siRNA sense strand
gauaaacguuccucaaagu

SEQ ID NO: 1661525 - RNA, 19 nt, Homo sapiens
  misc_RNA (1)...(19): siRNA sense strand
gaaccacuaugcugcaaga

SEQ ID NO: 1661526 - RNA, 19 nt, Homo sapiens
  misc_RNA (1)...(19): siRNA sense strand
gagcuaaauugaagaagga

SEQ ID NO: 1661527 - RNA, 19 nt, Homo sapiens
  misc_RNA (1)...(19): siRNA sense strand
ccacuuagcucccuuacuc

SEQ ID NO: 1661528 - RNA, 19 nt, Homo sapiens
  misc_RNA (1)...(19): siRNA sense strand
gaaauuaugggaagagaug

SEQ ID NO: 1661529 - RNA, 19 nt, Homo sapiens
  misc_RNA (1)...(19): siRNA sense strand
gcagucauauucagccaaa

SEQ ID NO: 1661530 - RNA, 19 nt, Homo sapiens
  misc_RNA (1)...(19): siRNA sense strand
aaagagagcuaaacuggau

SEQ ID NO: 1661531 - RNA, 19 nt, Homo sapiens
  misc_RNA (1)...(19): siRNA sense strand
gaacugauggaguagagua

SEQ ID NO: 1661532 - RNA, 19 nt, Homo sapiens
  misc_RNA (1)...(19): siRNA sense strand
gaacauugacugauuucuu

SEQ ID NO: 1661533 - RNA, 19 nt, Homo sapiens
  misc_RNA (1)...(19): siRNA sense strand
auaaauggaugcugcaauu

SEQ ID NO: 1661534 - RNA, 19 nt, Homo sapiens
  misc_RNA (1)...(19): siRNA sense strand
ccacuaugcugcaagauuc

SEQ ID NO: 1661535 - RNA, 19 nt, Homo sapiens
  misc_RNA (1)...(19): siRNA sense strand
gaaggaggagcuaaauuga

SEQ ID NO: 1661536 - RNA, 19 nt, Homo sapiens
  misc_RNA (1)...(19): siRNA sense strand
gauaacccuucuuacauug

SEQ ID NO: 1661537 - RNA, 19 nt, Homo sapiens
  misc_RNA (1)...(19): siRNA sense strand
cagaagaaguccucgauca

SEQ ID NO: 1661538 - RNA, 19 nt, Homo sapiens
  misc_RNA (1)...(19): siRNA sense strand
gaagagccagcaaaucauu

SEQ ID NO: 1661539 - RNA, 19 nt, Homo sapiens
  misc_RNA (1)...(19): siRNA sense strand
gaacacugcagaagcuaaa

SEQ ID NO: 1661540 - RNA, 19 nt, Homo sapiens
  misc_RNA (1)...(19): siRNA sense strand
gagaugaugauguucuuaa

SEQ ID NO: 1661541 - RNA, 19 nt, Homo sapiens
  misc_RNA (1)...(19): siRNA sense strand
gagauuuacuagaaagguu

SEQ ID NO: 1661542 - RNA, 19 nt, Homo sapiens
  misc_RNA (1)...(19): siRNA sense strand
gguucaacauugugcuuua

SEQ ID NO: 1661543 - RNA, 19 nt, Homo sapiens
  misc_RNA (1)...(19): siRNA sense strand
ugucaucaauggcuucuuu

SEQ ID NO: 1661544 - RNA, 19 nt, Homo sapiens
  misc_RNA (1)...(19): siRNA sense strand
ucagaacuauguggaaauu

SEQ ID NO: 1661545 - RNA, 19 nt, Homo sapiens
  misc_RNA (1)...(19): siRNA sense strand
gaagccagaauaugauuug

SEQ ID NO: 1661546 - RNA, 19 nt, Homo sapiens
  misc_RNA (1)...(19): siRNA sense strand
gaagaacaaugacaaaagu

SEQ ID NO: 1661547 - RNA, 19 nt, Homo sapiens
  misc_RNA (1)...(19): siRNA sense strand
gaccacaagcuuauaagaa

SEQ ID NO: 1661548 - RNA, 19 nt, Homo sapiens
  misc_RNA (1)...(19): siRNA sense strand
caccuuggguucaacauug

SEQ ID NO: 1661549 - RNA, 19 nt, Homo sapiens
  misc_RNA (1)...(19): siRNA sense strand
ggagagaagagccagcaaa

SEQ ID NO: 1661550 - RNA, 19 nt, Homo sapiens
  misc_RNA (1)...(19): siRNA sense strand
uuaacuggcucugguauga

SEQ ID NO: 1661551 - RNA, 19 nt, Homo sapiens
  misc_RNA (1)...(19): siRNA sense strand
ccucaaugcuccucucaug

SEQ ID NO: 1661552 - RNA, 19 nt, Homo sapiens
  misc_RNA (1)...(19): siRNA sense strand
agaaggaggagcuaaauug

SEQ ID NO: 1661553 - RNA, 19 nt, Homo sapiens
  misc_RNA (1)...(19): siRNA sense strand
aacauugacugauuucuug

SEQ ID NO: 1661554 - RNA, 19 nt, Homo sapiens
  misc_RNA (1)...(19): siRNA sense strand
cgauaaacguuccucaaag

SEQ ID NO: 1661555 - RNA, 19 nt, Homo sapiens
  misc_RNA (1)...(19): siRNA sense strand
gaguaaaccagaauuaaag

SEQ ID NO: 1661556 - RNA, 19 nt, Homo sapiens
  misc_RNA (1)...(19): siRNA sense strand
gagagaagagccagcaaau

SEQ ID NO: 1661557 - RNA, 19 nt, Homo sapiens
  misc_RNA (1)...(19): siRNA sense strand
aagaaguccucgaucauau

SEQ ID NO: 1661558 - RNA, 19 nt, Homo sapiens
  misc_RNA (1)...(19): siRNA sense strand
acauugugcuuuaugguuu

SEQ ID NO: 1661559 - RNA, 19 nt, Homo sapiens
  misc_RNA (1)...(19): siRNA sense strand
caacucagaggaugaugaa

SEQ ID NO: 1661560 - RNA, 19 nt, Homo sapiens
  misc_RNA (1)...(19): siRNA sense strand
gaacuauguggaaauuaug

SEQ ID NO: 1661561 - RNA, 19 nt, Homo sapiens
  misc_RNA (1)...(19): siRNA sense strand
caauuuggauagccagaug

SEQ ID NO: 1661562 - RNA, 19 nt, Homo sapiens
  misc_RNA (1)...(19): siRNA sense strand
gaaucagugugaaaucagu

SEQ ID NO: 1661563 - RNA, 19 nt, Homo sapiens
  misc_RNA (1)...(19): siRNA sense strand
ggaagaagaggaggcuuga

SEQ ID NO: 1661564 - RNA, 19 nt, Homo sapiens
  misc_RNA (1)...(19): siRNA sense strand
gagaaggaggagcuaaauu

SEQ ID NO: 1661565 - RNA, 19 nt, Homo sapiens
  misc_RNA (1)...(19): siRNA sense strand
uaaauggaugcugcaauua

SEQ ID NO: 1661566 - RNA, 19 nt, Homo sapiens
  misc_RNA (1)...(19): siRNA sense strand
cugaaaagauggcuaaauu

SEQ ID NO: 1661567 - RNA, 19 nt, Homo sapiens
  misc_RNA (1)...(19): siRNA sense strand
gggagaugaugauguucuu

SEQ ID NO: 1661568 - RNA, 19 nt, Homo sapiens
  misc_RNA (1)...(19): siRNA sense strand
caagggccauucugcuuca

SEQ ID NO: 1661569 - RNA, 19 nt, Homo sapiens
  misc_RNA (1)...(19): siRNA sense strand
aauaugauuuggaggaaga

SEQ ID NO: 1661570 - RNA, 19 nt, Homo sapiens
  misc_RNA (1)...(19): siRNA sense strand
ggaccacaagcuuauaaga

SEQ ID NO: 1661571 - RNA, 19 nt, Homo sapiens
  misc_RNA (1)...(19): siRNA sense strand
gcaagauuccauucacguu

SEQ ID NO: 1661572 - RNA, 19 nt, Homo sapiens
  misc_RNA (1)...(19): siRNA sense strand
ugugggagaugaugauguu

SEQ ID NO: 1661573 - RNA, 19 nt, Homo sapiens
  misc_RNA (1)...(19): siRNA sense strand
gauccugagauuacgauaa

SEQ ID NO: 1661574 - RNA, 19 nt, Homo sapiens
  misc_RNA (1)...(19): siRNA sense strand
ccacaagcuuauaagaaca

SEQ ID NO: 1661575 - RNA, 19 nt, Homo sapiens
  misc_RNA (1)...(19): siRNA sense strand
cugaagaaaccuccuauga

SEQ ID NO: 1661576 - RNA, 19 nt, Homo sapiens
  misc_RNA (1)...(19): siRNA sense strand
acaagaugcuggagguuca

SEQ ID NO: 1661577 - RNA, 19 nt, Homo sapiens
  misc_RNA (1)...(19): siRNA sense strand
gaacaugaagaggacacua

SEQ ID NO: 1661578 - RNA, 19 nt, Homo sapiens
  misc_RNA (1)...(19): siRNA sense strand
caaaguagcaagggccauu

SEQ ID NO: 1661579 - RNA, 19 nt, Homo sapiens
  misc_RNA (1)...(19): siRNA sense strand
cugauggaguagaguauuu

SEQ ID NO: 1661580 - RNA, 19 nt, Homo sapiens
  misc_RNA (1)...(19): siRNA sense strand
caggauaacccuucuuaca

SEQ ID NO: 1661581 - RNA, 19 nt, Homo sapiens
  misc_RNA (1)...(19): siRNA sense strand
ggagaugaugauguucuua

SEQ ID NO: 1661582 - RNA, 19 nt, Homo sapiens
  misc_RNA (1)...(19): siRNA sense strand
agaaugauccugagauuac

SEQ ID NO: 1661583 - RNA, 19 nt, Homo sapiens
  misc_RNA (1)...(19): siRNA sense strand
gcgaauauucugcuuccaa

SEQ ID NO: 1661584 - RNA, 19 nt, Homo sapiens
  misc_RNA (1)...(19): siRNA sense strand
gcaccucguagucuaagaa

SEQ ID NO: 1661585 - RNA, 19 nt, Homo sapiens
  misc_RNA (1)...(19): siRNA sense strand
gcucagaauagaguaguuu

SEQ ID NO: 1661586 - RNA, 19 nt, Homo sapiens
  misc_RNA (1)...(19): siRNA sense strand
ucacagcaguucaaaaguu

SEQ ID NO: 1661587 - RNA, 19 nt, Homo sapiens
  misc_RNA (1)...(19): siRNA sense strand
uacaggugguggaaauaaa

SEQ ID NO: 1661588 - RNA, 19 nt, Homo sapiens
  misc_RNA (1)...(19): siRNA sense strand
gaugcuggagguucacuuu

SEQ ID NO: 1661589 - RNA, 19 nt, Homo sapiens
  misc_RNA (1)...(19): siRNA sense strand
cuacauacaguccuuauac

SEQ ID NO: 1661590 - RNA, 19 nt, Homo sapiens
  misc_RNA (1)...(19): siRNA sense strand
aggaggagcuaaauugaag

SEQ ID NO: 1661591 - RNA, 19 nt, Homo sapiens
  misc_RNA (1)...(19): siRNA sense strand
guucaacauugugcuuuau

SEQ ID NO: 1661592 - RNA, 19 nt, Homo sapiens
  misc_RNA (1)...(19): siRNA sense strand
caacuaaaucaacaguaug

SEQ ID NO: 1661593 - RNA, 19 nt, Homo sapiens
  misc_RNA (1)...(19): siRNA sense strand
acacuaaugcagucauauu

SEQ ID NO: 1661594 - RNA, 19 nt, Homo sapiens
  misc_RNA (1)...(19): siRNA sense strand
auccugagauuacgauaaa

SEQ ID NO: 1661595 - RNA, 19 nt, Homo sapiens
  misc_RNA (1)...(19): siRNA sense strand
ggaagagauguucaagaau

SEQ ID NO: 1661596 - RNA, 19 nt, Homo sapiens
  misc_RNA (1)...(19): siRNA sense strand
acaaagaagggaacugaug

SEQ ID NO: 1661597 - RNA, 19 nt, Homo sapiens
  misc_RNA (1)...(19): siRNA sense strand
ugaagaaaccuccuaugag

SEQ ID NO: 1661598 - RNA, 19 nt, Homo sapiens
  misc_RNA (1)...(19): siRNA sense strand
uagacuggauaguaaacaa

SEQ ID NO: 1661599 - RNA, 19 nt, Homo sapiens
  misc_RNA (1)...(19): siRNA sense strand
ucagcuagacuggauagua

SEQ ID NO: 1661600 - RNA, 19 nt, Homo sapiens
  misc_RNA (1)...(19): siRNA sense strand
gaagcucacagcaguucaa

SEQ ID NO: 1661601 - RNA, 19 nt, Homo sapiens
  misc_RNA (1)...(19): siRNA sense strand
guuccaaggucucauucug

SEQ ID NO: 1661602 - RNA, 19 nt, Homo sapiens
  misc_RNA (1)...(19): siRNA sense strand
gagauguucaagaaucauu

SEQ ID NO: 1661603 - RNA, 19 nt, Homo sapiens
  misc_RNA (1)...(19): siRNA sense strand
aaagugaauuucugucaac

SEQ ID NO: 1661604 - RNA, 19 nt, Homo sapiens
  misc_RNA (1)...(19): siRNA sense strand
ucgaucauauggguacuuu

SEQ ID NO: 1661605 - RNA, 19 nt, Homo sapiens
  misc_RNA (1)...(19): siRNA sense strand
uggaaucagugugaaauca

SEQ ID NO: 1661606 - RNA, 19 nt, Homo sapiens
  misc_RNA (1)...(19): siRNA sense strand
gaggagcuaaauugaagaa

SEQ ID NO: 1661607 - RNA, 19 nt, Homo sapiens
  misc_RNA (1)...(19): siRNA sense strand
gugacuuaguagaagaaua

SEQ ID NO: 1661608 - RNA, 19 nt, Homo sapiens
  misc_RNA (1)...(19): siRNA sense strand
agaauaugauuuggaggaa

SEQ ID NO: 1661609 - RNA, 19 nt, Homo sapiens
  misc_RNA (1)...(19): siRNA sense strand
uaauuccuguugauaaugg

SEQ ID NO: 1661610 - RNA, 19 nt, Homo sapiens
  misc_RNA (1)...(19): siRNA sense strand
gaacaggaauuacaguuug

SEQ ID NO: 1661611 - RNA, 19 nt, Homo sapiens
  misc_RNA (1)...(19): siRNA sense strand
gcagugagaucgauagcaa

SEQ ID NO: 1661612 - RNA, 19 nt, Homo sapiens
  misc_RNA (1)...(19): siRNA sense strand
gaacugaacuaugaaacga

SEQ ID NO: 1661613 - RNA, 19 nt, Homo sapiens
  misc_RNA (1)...(19): siRNA sense strand
gaaagaucccagagaauuu

SEQ ID NO: 1661614 - RNA, 19 nt, Homo sapiens
  misc_RNA (1)...(19): siRNA sense strand
gcaaggccaugucggauga

SEQ ID NO: 1661615 - RNA, 19 nt, Homo sapiens
  misc_RNA (1)...(19): siRNA sense strand
ucagaaagaucccagagaa

SEQ ID NO: 1661616 - RNA, 19 nt, Homo sapiens
  misc_RNA (1)...(19): siRNA sense strand
ggccaacgaugauaacaaa

SEQ ID NO: 1661617 - RNA, 19 nt, Homo sapiens
  misc_RNA (1)...(19): siRNA sense strand
caucacaggugcugcguaa

SEQ ID NO: 1661618 - RNA, 19 nt, Homo sapiens
  misc_RNA (1)...(19): siRNA sense strand
ugagaaaccugguguaugg

SEQ ID NO: 1661619 - RNA, 19 nt, Homo sapiens
  misc_RNA (1)...(19): siRNA sense strand
caaaggagauaaacacucu

SEQ ID NO: 1661620 - RNA, 19 nt, Homo sapiens
  misc_RNA (1)...(19): siRNA sense strand
ugaagggucuuuccaguau

SEQ ID NO: 1661621 - RNA, 19 nt, Homo sapiens
  misc_RNA (1)...(19): siRNA sense strand
gaaaugaucagccucaaag

SEQ ID NO: 1661622 - RNA, 19 nt, Homo sapiens
  misc_RNA (1)...(19): siRNA sense strand
acacuggaauuucaacuuu

SEQ ID NO: 1661623 - RNA, 19 nt, Homo sapiens
  misc_RNA (1)...(19): siRNA sense strand
cugguggacuccuguauua

SEQ ID NO: 1661624 - RNA, 19 nt, Homo sapiens
  misc_RNA (1)...(19): siRNA sense strand
gaaauuacgaugaguccuu

SEQ ID NO: 1661625 - RNA, 19 nt, Homo sapiens
  misc_RNA (1)...(19): siRNA sense strand
ggagaacgccaaggccuua

SEQ ID NO: 1661626 - RNA, 19 nt, Homo sapiens
  misc_RNA (1)...(19): siRNA sense strand
aaauacagcugcauucauc

SEQ ID NO: 1661627 - RNA, 19 nt, Homo sapiens
  misc_RNA (1)...(19): siRNA sense strand
ggaagugauucagauguug

SEQ ID NO: 1661628 - RNA, 19 nt, Homo sapiens
  misc_RNA (1)...(19): siRNA sense strand
ggaaggccaacgaugauaa

SEQ ID NO: 1661629 - RNA, 19 nt, Homo sapiens
  misc_RNA (1)...(19): siRNA sense strand
caggaaagaugccaugaca

SEQ ID NO: 1661630 - RNA, 19 nt, Homo sapiens
  misc_RNA (1)...(19): siRNA sense strand
ggaaguggucaguauauau

SEQ ID NO: 1661631 - RNA, 19 nt, Homo sapiens
  misc_RNA (1)...(19): siRNA sense strand
cagcaugaguucagcagaa

SEQ ID NO: 1661632 - RNA, 19 nt, Homo sapiens
  misc_RNA (1)...(19): siRNA sense strand
uaacaaaauugcccugaaa

SEQ ID NO: 1661633 - RNA, 19 nt, Homo sapiens
  misc_RNA (1)...(19): siRNA sense strand
gauaaacacucuccaaaag

SEQ ID NO: 1661634 - RNA, 19 nt, Homo sapiens
  misc_RNA (1)...(19): siRNA sense strand
gaaguggucaguauauauc

SEQ ID NO: 1661635 - RNA, 19 nt, Homo sapiens
  misc_RNA (1)...(19): siRNA sense strand
agaaagaucccagagaauu

SEQ ID NO: 1661636 - RNA, 19 nt, Homo sapiens
  misc_RNA (1)...(19): siRNA sense strand
ggaaaugaucagccucaaa

SEQ ID NO: 1661637 - RNA, 19 nt, Homo sapiens
  misc_RNA (1)...(19): siRNA sense strand
ucaaagaacaggaauuaca

SEQ ID NO: 1661638 - RNA, 19 nt, Homo sapiens
  misc_RNA (1)...(19): siRNA sense strand
ccacaagaaauuacgauga

SEQ ID NO: 1661639 - RNA, 19 nt, Homo sapiens
  misc_RNA (1)...(19): siRNA sense strand
ggaauuacaguuugaaagg

SEQ ID NO: 1661640 - RNA, 19 nt, Homo sapiens
  misc_RNA (1)...(19): siRNA sense strand
agucaaagaacaggaauua

SEQ ID NO: 1661641 - RNA, 19 nt, Homo sapiens
  misc_RNA (1)...(19): siRNA sense strand
uaccagccauuucagaauu

SEQ ID NO: 1661642 - RNA, 19 nt, Homo sapiens
  misc_RNA (1)...(19): siRNA sense strand
ggaacugccggaagugauu

SEQ ID NO: 1661643 - RNA, 19 nt, Homo sapiens
  misc_RNA (1)...(19): siRNA sense strand
ucagugggauggaguagga

SEQ ID NO: 1661644 - RNA, 19 nt, Homo sapiens
  misc_RNA (1)...(19): siRNA sense strand
gaagaugagcuuacaacag

SEQ ID NO: 1661645 - RNA, 19 nt, Homo sapiens
  misc_RNA (1)...(19): siRNA sense strand
accgacagcugcaguauug

SEQ ID NO: 1661646 - RNA, 19 nt, Homo sapiens
  misc_RNA (1)...(19): siRNA sense strand
uuucagaauuccacaagaa

SEQ ID NO: 1661647 - RNA, 19 nt, Homo sapiens
  misc_RNA (1)...(19): siRNA sense strand
cugaagacaucaaacacaa

SEQ ID NO: 1661648 - RNA, 19 nt, Homo sapiens
  misc_RNA (1)...(19): siRNA sense strand
ucaaaacacuggaauuuca

SEQ ID NO: 1661649 - RNA, 19 nt, Homo sapiens
  misc_RNA (1)...(19): siRNA sense strand
cggaagugauucagauguu

SEQ ID NO: 1661650 - RNA, 19 nt, Homo sapiens
  misc_RNA (1)...(19): siRNA sense strand
gcaguauugucccucuguu

SEQ ID NO: 1661651 - RNA, 19 nt, Homo sapiens
  misc_RNA (1)...(19): siRNA sense strand
uggaaguggucaguauaua

SEQ ID NO: 1661652 - RNA, 19 nt, Homo sapiens
  misc_RNA (1)...(19): siRNA sense strand
gcacccaucaauagucaaa

SEQ ID NO: 1661653 - RNA, 19 nt, Homo sapiens
  misc_RNA (1)...(19): siRNA sense strand
acgaagugauuaccaagaa

SEQ ID NO: 1661654 - RNA, 19 nt, Homo sapiens
  misc_RNA (1)...(19): siRNA sense strand
cacaagaaauuacgaugag

SEQ ID NO: 1661655 - RNA, 19 nt, Homo sapiens
  misc_RNA (1)...(19): siRNA sense strand
ggauuauucuacaggugaa

SEQ ID NO: 1661656 - RNA, 19 nt, Homo sapiens
  misc_RNA (1)...(19): siRNA sense strand
gaagugauuaccaagaaca

SEQ ID NO: 1661657 - RNA, 19 nt, Homo sapiens
  misc_RNA (1)...(19): siRNA sense strand
ccacugcgcugcggaacau

SEQ ID NO: 1661658 - RNA, 19 nt, Homo sapiens
  misc_RNA (1)...(19): siRNA sense strand
ccaggaugcccuagcagua

SEQ ID NO: 1661659 - RNA, 19 nt, Homo sapiens
  misc_RNA (1)...(19): siRNA sense strand
uaucgaagaugagcuuaca

SEQ ID NO: 1661660 - RNA, 19 nt, Homo sapiens
  misc_RNA (1)...(19): siRNA sense strand
aaggauggauggucacaau

SEQ ID NO: 1661661 - RNA, 19 nt, Homo sapiens
  misc_RNA (1)...(19): siRNA sense strand
ucugaggagucucuacaaa

SEQ ID NO: 1661662 - RNA, 19 nt, Homo sapiens
  misc_RNA (1)...(19): siRNA sense strand
cauccucgccucagucaaa

SEQ ID NO: 1661663 - RNA, 19 nt, Homo sapiens
  misc_RNA (1)...(19): siRNA sense strand
uaacgcggcagccuacuug

SEQ ID NO: 1661664 - RNA, 19 nt, Homo sapiens
  misc_RNA (1)...(19): siRNA sense strand
gaaaagauuacgagaccua

SEQ ID NO: 1661665 - RNA, 19 nt, Homo sapiens
  misc_RNA (1)...(19): siRNA sense strand
caacaaccgcucagcaagu

SEQ ID NO: 1661666 - RNA, 19 nt, Homo sapiens
  misc_RNA (1)...(19): siRNA sense strand
gcuguggcacccaucaaua

SEQ ID NO: 1661667 - RNA, 19 nt, Homo sapiens
  misc_RNA (1)...(19): siRNA sense strand
gauguugcagcaccaguuu

SEQ ID NO: 1661668 - RNA, 19 nt, Homo sapiens
  misc_RNA (1)...(19): siRNA sense strand
ccuuggacgucagaaauaa

SEQ ID NO: 1661669 - RNA, 19 nt, Homo sapiens
  misc_RNA (1)...(19): siRNA sense strand
gaaggaugagagaguguga

SEQ ID NO: 1661670 - RNA, 19 nt, Homo sapiens
  misc_RNA (1)...(19): siRNA sense strand
cuacaggaaucaggaauac

SEQ ID NO: 1661671 - RNA, 19 nt, Homo sapiens
  misc_RNA (1)...(19): siRNA sense strand
gcgcgugucucccaacaac

SEQ ID NO: 1661672 - RNA, 19 nt, Homo sapiens
  misc_RNA (1)...(19): siRNA sense strand
gcuggaaguggucaguaua

SEQ ID NO: 1661673 - RNA, 19 nt, Homo sapiens
  misc_RNA (1)...(19): siRNA sense strand
gaucugaggagucucuaca

SEQ ID NO: 1661674 - RNA, 19 nt, Homo sapiens
  misc_RNA (1)...(19): siRNA sense strand
ccacaggagcccagcagaa

SEQ ID NO: 1661675 - RNA, 19 nt, Homo sapiens
  misc_RNA (1)...(19): siRNA sense strand
gcuaaaggcgaacacacuu

SEQ ID NO: 1661676 - RNA, 19 nt, Homo sapiens
  misc_RNA (1)...(19): siRNA sense strand
gaagggucuuuccaguauc

SEQ ID NO: 1661677 - RNA, 19 nt, Homo sapiens
  misc_RNA (1)...(19): siRNA sense strand
ucaacagcauguggcagua

SEQ ID NO: 1661678 - RNA, 19 nt, Homo sapiens
  misc_RNA (1)...(19): siRNA sense strand
agaacaggaauuacaguuu

SEQ ID NO: 1661679 - RNA, 19 nt, Homo sapiens
  misc_RNA (1)...(19): siRNA sense strand
uugauagcauucagaaaga

SEQ ID NO: 1661680 - RNA, 19 nt, Homo sapiens
  misc_RNA (1)...(19): siRNA sense strand
caaagaacaggaauuacag

SEQ ID NO: 1661681 - RNA, 19 nt, Homo sapiens
  misc_RNA (1)...(19): siRNA sense strand
cagcacggcccacagaaug

SEQ ID NO: 1661682 - RNA, 19 nt, Homo sapiens
  misc_RNA (1)...(19): siRNA sense strand
cacuucagcucaauuccaa

SEQ ID NO: 1661683 - RNA, 19 nt, Homo sapiens
  misc_RNA (1)...(19): siRNA sense strand
gcucaaaacacuggaauuu

SEQ ID NO: 1661684 - RNA, 19 nt, Homo sapiens
  misc_RNA (1)...(19): siRNA sense strand
caucucagguccucaacag

SEQ ID NO: 1661685 - RNA, 19 nt, Homo sapiens
  misc_RNA (1)...(19): siRNA sense strand
aaagaaaucccaagaucag

SEQ ID NO: 1661686 - RNA, 19 nt, Homo sapiens
  misc_RNA (1)...(19): siRNA sense strand
ccucagagaagacgaguuc

SEQ ID NO: 1661687 - RNA, 19 nt, Homo sapiens
  misc_RNA (1)...(19): siRNA sense strand
cacaggagcccagcagaaa

SEQ ID NO: 1661688 - RNA, 19 nt, Homo sapiens
  misc_RNA (1)...(19): siRNA sense strand
cagcagaagagcaguuuca

SEQ ID NO: 1661689 - RNA, 19 nt, Homo sapiens
  misc_RNA (1)...(19): siRNA sense strand
gcaagaccguugaaaacug

SEQ ID NO: 1661690 - RNA, 19 nt, Homo sapiens
  misc_RNA (1)...(19): siRNA sense strand
gggaaggccaacgaugaua

SEQ ID NO: 1661691 - RNA, 19 nt, Homo sapiens
  misc_RNA (1)...(19): siRNA sense strand
acaggaaucaggaauacuu

SEQ ID NO: 1661692 - RNA, 19 nt, Homo sapiens
  misc_RNA (1)...(19): siRNA sense strand
uuacggaugccuugcugua

SEQ ID NO: 1661693 - RNA, 19 nt, Homo sapiens
  misc_RNA (1)...(19): siRNA sense strand
cucaugcgaugcacucaaa

SEQ ID NO: 1661694 - RNA, 19 nt, Homo sapiens
  misc_RNA (1)...(19): siRNA sense strand
uuuggaaccucuccucaug

SEQ ID NO: 1661695 - RNA, 19 nt, Homo sapiens
  misc_RNA (1)...(19): siRNA sense strand
agagugcacuucagcucaa

SEQ ID NO: 1661696 - RNA, 19 nt, Homo sapiens
  misc_RNA (1)...(19): siRNA sense strand
aaagaucccagagaauuug

SEQ ID NO: 1661697 - RNA, 19 nt, Homo sapiens
  misc_RNA (1)...(19): siRNA sense strand
ggauggauggucacaauac

SEQ ID NO: 1661698 - RNA, 19 nt, Homo sapiens
  misc_RNA (1)...(19): siRNA sense strand
gccuuggacgucagaaaua

SEQ ID NO: 1661699 - RNA, 19 nt, Homo sapiens
  misc_RNA (1)...(19): siRNA sense strand
gcagaagagcaguuucagu

SEQ ID NO: 1661700 - RNA, 19 nt, Homo sapiens
  misc_RNA (1)...(19): siRNA sense strand
ugaccaacgcggugauuau

SEQ ID NO: 1661701 - RNA, 19 nt, Homo sapiens
  misc_RNA (1)...(19): siRNA sense strand
gcugguggacuccuguauu

SEQ ID NO: 1661702 - RNA, 19 nt, Homo sapiens
  misc_RNA (1)...(19): siRNA sense strand
gcugaagacaucaaacaca

SEQ ID NO: 1661703 - RNA, 19 nt, Homo sapiens
  misc_RNA (1)...(19): siRNA sense strand
gggaaaugaucagccucaa

SEQ ID NO: 1661704 - RNA, 19 nt, Homo sapiens
  misc_RNA (1)...(19): siRNA sense strand
caacggggauggcucugaa

SEQ ID NO: 1661705 - RNA, 19 nt, Homo sapiens
  misc_RNA (1)...(19): siRNA sense strand
ccagaacaccacauagauc

SEQ ID NO: 1661706 - RNA, 19 nt, Homo sapiens
  misc_RNA (1)...(19): siRNA sense strand
gcuccaccaucggcacgua

SEQ ID NO: 1661707 - RNA, 19 nt, Homo sapiens
  misc_RNA (1)...(19): siRNA sense strand
ccacaggauuauucuacag

SEQ ID NO: 1661708 - RNA, 19 nt, Homo sapiens
  misc_RNA (1)...(19): siRNA sense strand
gaaaauacagcugcauuca

SEQ ID NO: 1661709 - RNA, 19 nt, Homo sapiens
  misc_RNA (1)...(19): siRNA sense strand
ccgguggcaucgagaaguu

SEQ ID NO: 1661710 - RNA, 19 nt, Homo sapiens
  misc_RNA (1)...(19): siRNA sense strand
gaacaaugcuuccucguua

SEQ ID NO: 1661711 - RNA, 19 nt, Homo sapiens
  misc_RNA (1)...(19): siRNA sense strand
gagcucaacuucuagauua

SEQ ID NO: 1661712 - RNA, 19 nt, Homo sapiens
  misc_RNA (1)...(19): siRNA sense strand
aaacgaaccugcuuuauga

SEQ ID NO: 1661713 - RNA, 19 nt, Homo sapiens
  misc_RNA (1)...(19): siRNA sense strand
gaagaauacuuugcuauga

SEQ ID NO: 1661714 - RNA, 19 nt, Homo sapiens
  misc_RNA (1)...(19): siRNA sense strand
gaacuacacucuugagcaa

SEQ ID NO: 1661715 - RNA, 19 nt, Homo sapiens
  misc_RNA (1)...(19): siRNA sense strand
gcaaaugcgugaccaaaug

SEQ ID NO: 1661716 - RNA, 19 nt, Homo sapiens
  misc_RNA (1)...(19): siRNA sense strand
gaagauguauuaccuguuc

SEQ ID NO: 1661717 - RNA, 19 nt, Homo sapiens
  misc_RNA (1)...(19): siRNA sense strand
ggcaagagcucaacuucua

SEQ ID NO: 1661718 - RNA, 19 nt, Homo sapiens
  misc_RNA (1)...(19): siRNA sense strand
ggaagaacauggccuggaa

SEQ ID NO: 1661719 - RNA, 19 nt, Homo sapiens
  misc_RNA (1)...(19): siRNA sense strand
gaugauaaauggacucgaa

SEQ ID NO: 1661720 - RNA, 19 nt, Homo sapiens
  misc_RNA (1)...(19): siRNA sense strand
caacagauauacacucaau

SEQ ID NO: 1661721 - RNA, 19 nt, Homo sapiens
  misc_RNA (1)...(19): siRNA sense strand
ggugguggguguaggauua

SEQ ID NO: 1661722 - RNA, 19 nt, Homo sapiens
  misc_RNA (1)...(19): siRNA sense strand
gugcaagucuuauugauga

SEQ ID NO: 1661723 - RNA, 19 nt, Homo sapiens
  misc_RNA (1)...(19): siRNA sense strand
gaaacgaaccugcuuuaug

SEQ ID NO: 1661724 - RNA, 19 nt, Homo sapiens
  misc_RNA (1)...(19): siRNA sense strand
gagaguaauuucagcugua

SEQ ID NO: 1661725 - RNA, 19 nt, Homo sapiens
  misc_RNA (1)...(19): siRNA sense strand
gagaaacgaaccugcuuua

SEQ ID NO: 1661726 - RNA, 19 nt, Homo sapiens
  misc_RNA (1)...(19): siRNA sense strand
cuacagcgcucuccuugaa

SEQ ID NO: 1661727 - RNA, 19 nt, Homo sapiens
  misc_RNA (1)...(19): siRNA sense strand
gaaacagacuggcaaaugc

SEQ ID NO: 1661728 - RNA, 19 nt, Homo sapiens
  misc_RNA (1)...(19): siRNA sense strand
caagcaguguguuauuuaa

SEQ ID NO: 1661729 - RNA, 19 nt, Homo sapiens
  misc_RNA (1)...(19): siRNA sense strand
gcagaucgugcaagucuua

SEQ ID NO: 1661730 - RNA, 19 nt, Homo sapiens
  misc_RNA (1)...(19): siRNA sense strand
gaaauauugugaccaugga

SEQ ID NO: 1661731 - RNA, 19 nt, Homo sapiens
  misc_RNA (1)...(19): siRNA sense strand
caucagugguuuggaaaua

SEQ ID NO: 1661732 - RNA, 19 nt, Homo sapiens
  misc_RNA (1)...(19): siRNA sense strand
ucaagaacaucacacagaa

SEQ ID NO: 1661733 - RNA, 19 nt, Homo sapiens
  misc_RNA (1)...(19): siRNA sense strand
gaagacuuguggcuaaaug

SEQ ID NO: 1661734 - RNA, 19 nt, Homo sapiens
  misc_RNA (1)...(19): siRNA sense strand
gaccaaauguuacuugaag

SEQ ID NO: 1661735 - RNA, 19 nt, Homo sapiens
  misc_RNA (1)...(19): siRNA sense strand
uaagguggcuuugaacuug

SEQ ID NO: 1661736 - RNA, 19 nt, Homo sapiens
  misc_RNA (1)...(19): siRNA sense strand
gaaagaagagucaguggau

SEQ ID NO: 1661737 - RNA, 19 nt, Homo sapiens
  misc_RNA (1)...(19): siRNA sense strand
gauauacacucaauaacag

SEQ ID NO: 1661738 - RNA, 19 nt, Homo sapiens
  misc_RNA (1)...(19): siRNA sense strand
aaagagcuauauccuauga

SEQ ID NO: 1661739 - RNA, 19 nt, Homo sapiens
  misc_RNA (1)...(19): siRNA sense strand
ggaauuggauacaacucaa

SEQ ID NO: 1661740 - RNA, 19 nt, Homo sapiens
  misc_RNA (1)...(19): siRNA sense strand
ggacacgaaccuuauuaaa

SEQ ID NO: 1661741 - RNA, 19 nt, Homo sapiens
  misc_RNA (1)...(19): siRNA sense strand
gauggaauauccuauagca

SEQ ID NO: 1661742 - RNA, 19 nt, Homo sapiens
  misc_RNA (1)...(19): siRNA sense strand
gaacauggccuggaauugg

SEQ ID NO: 1661743 - RNA, 19 nt, Homo sapiens
  misc_RNA (1)...(19): siRNA sense strand
cauggaauaucccaguuaa

SEQ ID NO: 1661744 - RNA, 19 nt, Homo sapiens
  misc_RNA (1)...(19): siRNA sense strand
gagaccaugucacaaaguu

SEQ ID NO: 1661745 - RNA, 19 nt, Homo sapiens
  misc_RNA (1)...(19): siRNA sense strand
caauuugacucuguaaaga

SEQ ID NO: 1661746 - RNA, 19 nt, Homo sapiens
  misc_RNA (1)...(19): siRNA sense strand
ggaccagacagauggguua

SEQ ID NO: 1661747 - RNA, 19 nt, Homo sapiens
  misc_RNA (1)...(19): siRNA sense strand
gaugucagauguacuugga

SEQ ID NO: 1661748 - RNA, 19 nt, Homo sapiens
  misc_RNA (1)...(19): siRNA sense strand
caagggaucuucuauuuug

SEQ ID NO: 1661749 - RNA, 19 nt, Homo sapiens
  misc_RNA (1)...(19): siRNA sense strand
gauacugcauucaaacgaa

SEQ ID NO: 1661750 - RNA, 19 nt, Homo sapiens
  misc_RNA (1)...(19): siRNA sense strand
gaaacaccaucagagaaug

SEQ ID NO: 1661751 - RNA, 19 nt, Homo sapiens
  misc_RNA (1)...(19): siRNA sense strand
caacauagaaacaccauca

SEQ ID NO: 1661752 - RNA, 19 nt, Homo sapiens
  misc_RNA (1)...(19): siRNA sense strand
agcaagggaucuucuauuu

SEQ ID NO: 1661753 - RNA, 19 nt, Homo sapiens
  misc_RNA (1)...(19): siRNA sense strand
agagaagccuugaacaaug

SEQ ID NO: 1661754 - RNA, 19 nt, Homo sapiens
  misc_RNA (1)...(19): siRNA sense strand
gacaaccccugaugaaaua

SEQ ID NO: 1661755 - RNA, 19 nt, Homo sapiens
  misc_RNA (1)...(19): siRNA sense strand
gaacuccucuaauccuagu

SEQ ID NO: 1661756 - RNA, 19 nt, Homo sapiens
  misc_RNA (1)...(19): siRNA sense strand
uaaauggacucgaacaacu

SEQ ID NO: 1661757 - RNA, 19 nt, Homo sapiens
  misc_RNA (1)...(19): siRNA sense strand
gaauaucccaguuaaaugg

SEQ ID NO: 1661758 - RNA, 19 nt, Homo sapiens
  misc_RNA (1)...(19): siRNA sense strand
gaggaugauucuuugaugu

SEQ ID NO: 1661759 - RNA, 19 nt, Homo sapiens
  misc_RNA (1)...(19): siRNA sense strand
aggauuugcuucuuucuuu

SEQ ID NO: 1661760 - RNA, 19 nt, Homo sapiens
  misc_RNA (1)...(19): siRNA sense strand
ggaaucagccucaucaaac

SEQ ID NO: 1661761 - RNA, 19 nt, Homo sapiens
  misc_RNA (1)...(19): siRNA sense strand
ggagguguuucgaguacaa

SEQ ID NO: 1661762 - RNA, 19 nt, Homo sapiens
  misc_RNA (1)...(19): siRNA sense strand
ucuaagagauacugcauuc

SEQ ID NO: 1661763 - RNA, 19 nt, Homo sapiens
  misc_RNA (1)...(19): siRNA sense strand
gaucaugaaccaacagaug

SEQ ID NO: 1661764 - RNA, 19 nt, Homo sapiens
  misc_RNA (1)...(19): siRNA sense strand
gaacguuacucuuuuguca

SEQ ID NO: 1661765 - RNA, 19 nt, Homo sapiens
  misc_RNA (1)...(19): siRNA sense strand
ggaauaucccaguuaaaug

SEQ ID NO: 1661766 - RNA, 19 nt, Homo sapiens
  misc_RNA (1)...(19): siRNA sense strand
aagagucaguggaugauaa

SEQ ID NO: 1661767 - RNA, 19 nt, Homo sapiens
  misc_RNA (1)...(19): siRNA sense strand
gaaugaugcuggagaccau

SEQ ID NO: 1661768 - RNA, 19 nt, Homo sapiens
  misc_RNA (1)...(19): siRNA sense strand
ucauggaacuacacucuug

SEQ ID NO: 1661769 - RNA, 19 nt, Homo sapiens
  misc_RNA (1)...(19): siRNA sense strand
ucacccaucccaaagaaua

SEQ ID NO: 1661770 - RNA, 19 nt, Homo sapiens
  misc_RNA (1)...(19): siRNA sense strand
cagaaaccuuggccgaauu

SEQ ID NO: 1661771 - RNA, 19 nt, Homo sapiens
  misc_RNA (1)...(19): siRNA sense strand
gaaggaaucacuuugaacu

SEQ ID NO: 1661772 - RNA, 19 nt, Homo sapiens
  misc_RNA (1)...(19): siRNA sense strand
gaucuugguuauacaugga

SEQ ID NO: 1661773 - RNA, 19 nt, Homo sapiens
  misc_RNA (1)...(19): siRNA sense strand
ggauaaaaccagagaauuu

SEQ ID NO: 1661774 - RNA, 19 nt, Homo sapiens
  misc_RNA (1)...(19): siRNA sense strand
ggaguaaaccaugcagaaa

SEQ ID NO: 1661775 - RNA, 19 nt, Homo sapiens
  misc_RNA (1)...(19): siRNA sense strand
gugcaucagugguuuggaa

SEQ ID NO: 1661776 - RNA, 19 nt, Homo sapiens
  misc_RNA (1)...(19): siRNA sense strand
cgaaacauguggccauucu

SEQ ID NO: 1661777 - RNA, 19 nt, Homo sapiens
  misc_RNA (1)...(19): siRNA sense strand
gcacacagccgaauaugcu

SEQ ID NO: 1661778 - RNA, 19 nt, Homo sapiens
  misc_RNA (1)...(19): siRNA sense strand
acggagcacuuucaaauau

SEQ ID NO: 1661779 - RNA, 19 nt, Homo sapiens
  misc_RNA (1)...(19): siRNA sense strand
caaagaauacggagcacuu

SEQ ID NO: 1661780 - RNA, 19 nt, Homo sapiens
  misc_RNA (1)...(19): siRNA sense strand
uaagagauacugcauucaa

SEQ ID NO: 1661781 - RNA, 19 nt, Homo sapiens
  misc_RNA (1)...(19): siRNA sense strand
uauaacagcuaugggaaga

SEQ ID NO: 1661782 - RNA, 19 nt, Homo sapiens
  misc_RNA (1)...(19): siRNA sense strand
gagaagccuugaacaaugc

SEQ ID NO: 1661783 - RNA, 19 nt, Homo sapiens
  misc_RNA (1)...(19): siRNA sense strand
agagcuauauccuaugauu

SEQ ID NO: 1661784 - RNA, 19 nt, Homo sapiens
  misc_RNA (1)...(19): siRNA sense strand
aagaaggaaucacuuugaa

SEQ ID NO: 1661785 - RNA, 19 nt, Homo sapiens
  misc_RNA (1)...(19): siRNA sense strand
ggauuugcuucuuucuuug

SEQ ID NO: 1661786 - RNA, 19 nt, Homo sapiens
  misc_RNA (1)...(19): siRNA sense strand
ugggaagacuuguggcuaa

SEQ ID NO: 1661787 - RNA, 19 nt, Homo sapiens
  misc_RNA (1)...(19): siRNA sense strand
ggaaaaccucuuacaauuu

SEQ ID NO: 1661788 - RNA, 19 nt, Homo sapiens
  misc_RNA (1)...(19): siRNA sense strand
acuacacucuugagcaaua

SEQ ID NO: 1661789 - RNA, 19 nt, Homo sapiens
  misc_RNA (1)...(19): siRNA sense strand
ugaagaugauaaagagcua

SEQ ID NO: 1661790 - RNA, 19 nt, Homo sapiens
  misc_RNA (1)...(19): siRNA sense strand
uaaccuacaucauuagcau

SEQ ID NO: 1661791 - RNA, 19 nt, Homo sapiens
  misc_RNA (1)...(19): siRNA sense strand
gaucgugcaagucuuauug

SEQ ID NO: 1661792 - RNA, 19 nt, Homo sapiens
  misc_RNA (1)...(19): siRNA sense strand
caacagaugccaggaaauc

SEQ ID NO: 1661793 - RNA, 19 nt, Homo sapiens
  misc_RNA (1)...(19): siRNA sense strand
caggauguguuuacaguca

SEQ ID NO: 1661794 - RNA, 19 nt, Homo sapiens
  misc_RNA (1)...(19): siRNA sense strand
aagagauacugcauucaaa

SEQ ID NO: 1661795 - RNA, 19 nt, Homo sapiens
  misc_RNA (1)...(19): siRNA sense strand
acaagcaguguguuauuua

SEQ ID NO: 1661796 - RNA, 19 nt, Homo sapiens
  misc_RNA (1)...(19): siRNA sense strand
uguauuaccuguucaagag

SEQ ID NO: 1661797 - RNA, 19 nt, Homo sapiens
  misc_RNA (1)...(19): siRNA sense strand
gggaagacuuguggcuaaa

SEQ ID NO: 1661798 - RNA, 19 nt, Homo sapiens
  misc_RNA (1)...(19): siRNA sense strand
cccaugaacuugugcauca

SEQ ID NO: 1661799 - RNA, 19 nt, Homo sapiens
  misc_RNA (1)...(19): siRNA sense strand
caguggagauggccuguau

SEQ ID NO: 1661800 - RNA, 19 nt, Homo sapiens
  misc_RNA (1)...(19): siRNA sense strand
caacucaacugggacuauc

SEQ ID NO: 1661801 - RNA, 19 nt, Homo sapiens
  misc_RNA (1)...(19): siRNA sense strand
uaucacccaucccaaagaa

SEQ ID NO: 1661802 - RNA, 19 nt, Homo sapiens
  misc_RNA (1)...(19): siRNA sense strand
gaagagucaguggaugaua

SEQ ID NO: 1661803 - RNA, 19 nt, Homo sapiens
  misc_RNA (1)...(19): siRNA sense strand
ggauguguuuacagucauu

SEQ ID NO: 1661804 - RNA, 19 nt, Homo sapiens
  misc_RNA (1)...(19): siRNA sense strand
gaacucuggcaaugagauu

SEQ ID NO: 1661805 - RNA, 19 nt, Homo sapiens
  misc_RNA (1)...(19): siRNA sense strand
caagaugggagacagagaa

SEQ ID NO: 1661806 - RNA, 19 nt, Homo sapiens
  misc_RNA (1)...(19): siRNA sense strand
ugucagauguacuuggaaa

SEQ ID NO: 1661807 - RNA, 19 nt, Homo sapiens
  misc_RNA (1)...(19): siRNA sense strand
ucagugguuuggaaauauu

SEQ ID NO: 1661808 - RNA, 19 nt, Homo sapiens
  misc_RNA (1)...(19): siRNA sense strand
gugcuuugcuguacaucaa

SEQ ID NO: 1661809 - RNA, 19 nt, Homo sapiens
  misc_RNA (1)...(19): siRNA sense strand
gguaugggaugcagaacuc

SEQ ID NO: 1661810 - RNA, 19 nt, Homo sapiens
  misc_RNA (1)...(19): siRNA sense strand
gaaagaagcucagaaagga

SEQ ID NO: 1661811 - RNA, 19 nt, Homo sapiens
  misc_RNA (1)...(19): siRNA sense strand
gguaaagacugaagggaaa

SEQ ID NO: 1661812 - RNA, 19 nt, Homo sapiens
  misc_RNA (1)...(19): siRNA sense strand
uaaaggagauguaaucagu

SEQ ID NO: 1661813 - RNA, 19 nt, Homo sapiens
  misc_RNA (1)...(19): siRNA sense strand
gcaacaggcuggccaacaa

SEQ ID NO: 1661814 - RNA, 19 nt, Homo sapiens
  misc_RNA (1)...(19): siRNA sense strand
gcaaucuugugucguuaua

SEQ ID NO: 1661815 - RNA, 19 nt, Homo sapiens
  misc_RNA (1)...(19): siRNA sense strand
uuacucggguuucauauuu

SEQ ID NO: 1661816 - RNA, 19 nt, Homo sapiens
  misc_RNA (1)...(19): siRNA sense strand
ggaaaggagcaaagagaaa

SEQ ID NO: 1661817 - RNA, 19 nt, Homo sapiens
  misc_RNA (1)...(19): siRNA sense strand
ggaaagaagcucagaaagg

SEQ ID NO: 1661818 - RNA, 19 nt, Homo sapiens
  misc_RNA (1)...(19): siRNA sense strand
gugaagagcuuguggaaaa

SEQ ID NO: 1661819 - RNA, 19 nt, Homo sapiens
  misc_RNA (1)...(19): siRNA sense strand
gaugaagaguuccuuaaac

SEQ ID NO: 1661820 - RNA, 19 nt, Homo sapiens
  misc_RNA (1)...(19): siRNA sense strand
uguaaucaguguagagaaa

SEQ ID NO: 1661821 - RNA, 19 nt, Homo sapiens
  misc_RNA (1)...(19): siRNA sense strand
gaagaguuccuuaaacaag

SEQ ID NO: 1661822 - RNA, 19 nt, Homo sapiens
  misc_RNA (1)...(19): siRNA sense strand
gaauggcagugaagagcuu

SEQ ID NO: 1661823 - RNA, 19 nt, Homo sapiens
  misc_RNA (1)...(19): siRNA sense strand
gcauacugaugaagaguuc

SEQ ID NO: 1661824 - RNA, 19 nt, Homo sapiens
  misc_RNA (1)...(19): siRNA sense strand
ugauggacauggaggaauu

SEQ ID NO: 1661825 - RNA, 19 nt, Homo sapiens
  misc_RNA (1)...(19): siRNA sense strand
gugaugggcucuucaaggu

SEQ ID NO: 1661826 - RNA, 19 nt, Homo sapiens
  misc_RNA (1)...(19): siRNA sense strand
ccacaucaauaucccagau

SEQ ID NO: 1661827 - RNA, 19 nt, Homo sapiens
  misc_RNA (1)...(19): siRNA sense strand
gaagagcggaugaggauac

SEQ ID NO: 1661828 - RNA, 19 nt, Homo sapiens
  misc_RNA (1)...(19): siRNA sense strand
gaagggaaaggagcaaaga

SEQ ID NO: 1661829 - RNA, 19 nt, Homo sapiens
  misc_RNA (1)...(19): siRNA sense strand
gggaaaggagcaaagagaa

SEQ ID NO: 1661830 - RNA, 19 nt, Homo sapiens
  misc_RNA (1)...(19): siRNA sense strand
cagaagaagccgugaacuu

SEQ ID NO: 1661831 - RNA, 19 nt, Homo sapiens
  misc_RNA (1)...(19): siRNA sense strand
gagcauaauccaacucagu

SEQ ID NO: 1661832 - RNA, 19 nt, Homo sapiens
  misc_RNA (1)...(19): siRNA sense strand
gggcaaucuugugucguua

SEQ ID NO: 1661833 - RNA, 19 nt, Homo sapiens
  misc_RNA (1)...(19): siRNA sense strand
caauaucccagaugguaaa

SEQ ID NO: 1661834 - RNA, 19 nt, Homo sapiens
  misc_RNA (1)...(19): siRNA sense strand
acagaaggcuggaggaaac

SEQ ID NO: 1661835 - RNA, 19 nt, Homo sapiens
  misc_RNA (1)...(19): siRNA sense strand
ggagauguaaucaguguag

SEQ ID NO: 1661836 - RNA, 19 nt, Homo sapiens
  misc_RNA (1)...(19): siRNA sense strand
caaagagcauaauccaacu

SEQ ID NO: 1661837 - RNA, 19 nt, Homo sapiens
  misc_RNA (1)...(19): siRNA sense strand
gagcggaugaggauacaga

SEQ ID NO: 1661838 - RNA, 19 nt, Homo sapiens
  misc_RNA (1)...(19): siRNA sense strand
gaaaggagcaaagagaaaa

SEQ ID NO: 1661839 - RNA, 19 nt, Homo sapiens
  misc_RNA (1)...(19): siRNA sense strand
agagaagaauggcagugaa

SEQ ID NO: 1661840 - RNA, 19 nt, Homo sapiens
  misc_RNA (1)...(19): siRNA sense strand
cagguucucuugccacauc

SEQ ID NO: 1661841 - RNA, 19 nt, Homo sapiens
  misc_RNA (1)...(19): siRNA sense strand
augaagaguuccuuaaaca

SEQ ID NO: 1661842 - RNA, 19 nt, Homo sapiens
  misc_RNA (1)...(19): siRNA sense strand
gauguaaucaguguagaga

SEQ ID NO: 1661843 - RNA, 19 nt, Homo sapiens
  misc_RNA (1)...(19): siRNA sense strand
ucggugaucuuuggucuga

SEQ ID NO: 1661844 - RNA, 19 nt, Homo sapiens
  misc_RNA (1)...(19): siRNA sense strand
cgggcaaucuugugucguu

SEQ ID NO: 1661845 - RNA, 19 nt, Homo sapiens
  misc_RNA (1)...(19): siRNA sense strand
ugaugaagaguuccuuaaa

SEQ ID NO: 1661846 - RNA, 19 nt, Homo sapiens
  misc_RNA (1)...(19): siRNA sense strand
caagcauacugaugaagag

SEQ ID NO: 1661847 - RNA, 19 nt, Homo sapiens
  misc_RNA (1)...(19): siRNA sense strand
ucauuacucggguuucaua

SEQ ID NO: 1661848 - RNA, 19 nt, Homo sapiens
  misc_RNA (1)...(19): siRNA sense strand
gaagaauggcagugaagag

SEQ ID NO: 1661849 - RNA, 19 nt, Homo sapiens
  misc_RNA (1)...(19): siRNA sense strand
gcuguagacaacauucuuu

SEQ ID NO: 1661850 - RNA, 19 nt, Homo sapiens
  misc_RNA (1)...(19): siRNA sense strand
ucaagcauacugaugaaga

SEQ ID NO: 1661851 - RNA, 19 nt, Homo sapiens
  misc_RNA (1)...(19): siRNA sense strand
cgggaaagaagcucagaaa

SEQ ID NO: 1661852 - RNA, 19 nt, Homo sapiens
  misc_RNA (1)...(19): siRNA sense strand
uacaagcgcugcgguguca

SEQ ID NO: 1661853 - RNA, 19 nt, Homo sapiens
  misc_RNA (1)...(19): siRNA sense strand
aaggagauguaaucagugu

SEQ ID NO: 1661854 - RNA, 19 nt, Homo sapiens
  misc_RNA (1)...(19): siRNA sense strand
gagauguaaucaguguaga

SEQ ID NO: 1661855 - RNA, 19 nt, Homo sapiens
  misc_RNA (1)...(19): siRNA sense strand
uaauccaacucaguaugaa

SEQ ID NO: 1661856 - RNA, 19 nt, Homo sapiens
  misc_RNA (1)...(19): siRNA sense strand
ccucuucggugaucuuugg

SEQ ID NO: 1661857 - RNA, 19 nt, Homo sapiens
  misc_RNA (1)...(19): siRNA sense strand
ggccagcaguacugacuca

SEQ ID NO: 1661858 - RNA, 19 nt, Homo sapiens
  misc_RNA (1)...(19): siRNA sense strand
aaaauuugcugcacagaau

SEQ ID NO: 1661859 - RNA, 19 nt, Homo sapiens
  misc_RNA (1)...(19): siRNA sense strand
ggugaucuuuggucugaag

SEQ ID NO: 1661860 - RNA, 19 nt, Homo sapiens
  misc_RNA (1)...(19): siRNA sense strand
gagaagaauggcagugaag

SEQ ID NO: 1661861 - RNA, 19 nt, Homo sapiens
  misc_RNA (1)...(19): siRNA sense strand
gauagucgggcaaucuugu

SEQ ID NO: 1661862 - RNA, 19 nt, Homo sapiens
  misc_RNA (1)...(19): siRNA sense strand
ucaauaucccagaugguaa

SEQ ID NO: 1661863 - RNA, 19 nt, Homo sapiens
  misc_RNA (1)...(19): siRNA sense strand
cgacaucaccgaggagugu

SEQ ID NO: 1661864 - RNA, 19 nt, Homo sapiens
  misc_RNA (1)...(19): siRNA sense strand
ccuuaagccucagcaaaga

SEQ ID NO: 1661865 - RNA, 19 nt, Homo sapiens
  misc_RNA (1)...(19): siRNA sense strand
aagccugccuggaaagaug

SEQ ID NO: 1661866 - RNA, 19 nt, Homo sapiens
  misc_RNA (1)...(19): siRNA sense strand
gcauaauccaacucaguau

SEQ ID NO: 1661867 - RNA, 19 nt, Homo sapiens
  misc_RNA (1)...(19): siRNA sense strand
ugaagaguuccuuaaacaa

SEQ ID NO: 1661868 - RNA, 19 nt, Homo sapiens
  misc_RNA (1)...(19): siRNA sense strand
ccucauuacucggguuuca

SEQ ID NO: 1661869 - RNA, 19 nt, Homo sapiens
  misc_RNA (1)...(19): siRNA sense strand
guuauaaugaggagaguca

SEQ ID NO: 1661870 - RNA, 19 nt, Homo sapiens
  misc_RNA (1)...(19): siRNA sense strand
ucucuugccacaucaauau

SEQ ID NO: 1661871 - RNA, 19 nt, Homo sapiens
  misc_RNA (1)...(19): siRNA sense strand
gugaagagaugccuuuugg

SEQ ID NO: 1661872 - RNA, 19 nt, Homo sapiens
  misc_RNA (1)...(19): siRNA sense strand
ggaauucgagccucaaaau

SEQ ID NO: 1661873 - RNA, 19 nt, Homo sapiens
  misc_RNA (1)...(19): siRNA sense strand
uuggacacuuucaagcaua

SEQ ID NO: 1661874 - RNA, 19 nt, Homo sapiens
  misc_RNA (1)...(19): siRNA sense strand
cagcaaagagcauaaucca

SEQ ID NO: 1661875 - RNA, 19 nt, Homo sapiens
  misc_RNA (1)...(19): siRNA sense strand
gagaaaaccgugaagagau

SEQ ID NO: 1661876 - RNA, 19 nt, Homo sapiens
  misc_RNA (1)...(19): siRNA sense strand
auaauccaacucaguauga

SEQ ID NO: 1661877 - RNA, 19 nt, Homo sapiens
  misc_RNA (1)...(19): siRNA sense strand
uauaaugaggagagucaaa

SEQ ID NO: 1661878 - RNA, 19 nt, Homo sapiens
  misc_RNA (1)...(19): siRNA sense strand
cuguagacaacauucuuua

SEQ ID NO: 1661879 - RNA, 19 nt, Homo sapiens
  misc_RNA (1)...(19): siRNA sense strand
cgucagggaugggcguguu

SEQ ID NO: 1661880 - RNA, 19 nt, Homo sapiens
  misc_RNA (1)...(19): siRNA sense strand
uaucccagaugguaaagac

SEQ ID NO: 1661881 - RNA, 19 nt, Homo sapiens
  misc_RNA (1)...(19): siRNA sense strand
agcauaauccaacucagua

SEQ ID NO: 1661882 - RNA, 19 nt, Homo sapiens
  misc_RNA (1)...(19): siRNA sense strand
gggaaagaagcucagaaag

SEQ ID NO: 1661883 - RNA, 19 nt, Homo sapiens
  misc_RNA (1)...(19): siRNA sense strand
agaaaaccgugaagagaug

SEQ ID NO: 1661884 - RNA, 19 nt, Homo sapiens
  misc_RNA (1)...(19): siRNA sense strand
gccuuaagccucagcaaag

SEQ ID NO: 1661885 - RNA, 19 nt, Homo sapiens
  misc_RNA (1)...(19): siRNA sense strand
gaggugucacgcuccauug

SEQ ID NO: 1661886 - RNA, 19 nt, Homo sapiens
  misc_RNA (1)...(19): siRNA sense strand
cccagaugguaaagacuga

SEQ ID NO: 1661887 - RNA, 19 nt, Homo sapiens
  misc_RNA (1)...(19): siRNA sense strand
cugaugaagaguuccuuaa

SEQ ID NO: 1661888 - RNA, 19 nt, Homo sapiens
  misc_RNA (1)...(19): siRNA sense strand
aagagaagaauggcaguga

SEQ ID NO: 1661889 - RNA, 19 nt, Homo sapiens
  misc_RNA (1)...(19): siRNA sense strand
cagugaagagcuuguggaa

SEQ ID NO: 1661890 - RNA, 19 nt, Homo sapiens
  misc_RNA (1)...(19): siRNA sense strand
cguguguucuggcuguaga

SEQ ID NO: 1661891 - RNA, 19 nt, Homo sapiens
  misc_RNA (1)...(19): siRNA sense strand
caacaggcuggccaacaag

SEQ ID NO: 1661892 - RNA, 19 nt, Homo sapiens
  misc_RNA (1)...(19): siRNA sense strand
ucuugugucguuauaauga

SEQ ID NO: 1661893 - RNA, 19 nt, Homo sapiens
  misc_RNA (1)...(19): siRNA sense strand
gaaagaagcucagaaagga

SEQ ID NO: 1661894 - RNA, 19 nt, Homo sapiens
  misc_RNA (1)...(19): siRNA sense strand
ggaaagaagcucagaaagg

SEQ ID NO: 1661895 - RNA, 19 nt, Homo sapiens
  misc_RNA (1)...(19): siRNA sense strand
cgggaaagaagcucagaaa

SEQ ID NO: 1661896 - RNA, 19 nt, Homo sapiens
  misc_RNA (1)...(19): siRNA sense strand
ggccagcaguacugacuca

SEQ ID NO: 1661897 - RNA, 19 nt, Homo sapiens
  misc_RNA (1)...(19): siRNA sense strand
gggaaagaagcucagaaag

SEQ ID NO: 1661898 - RNA, 19 nt, Homo sapiens
  misc_RNA (1)...(19): siRNA sense strand
gaaagaagcucagaaagga

SEQ ID NO: 1661899 - RNA, 19 nt, Homo sapiens
  misc_RNA (1)...(19): siRNA sense strand
gguaaagacugaagggaaa

SEQ ID NO: 1661900 - RNA, 19 nt, Homo sapiens
  misc_RNA (1)...(19): siRNA sense strand
uaaaggagauguaaucagu

SEQ ID NO: 1661901 - RNA, 19 nt, Homo sapiens
  misc_RNA (1)...(19): siRNA sense strand
gcaacaggcuggccaacaa

SEQ ID NO: 1661902 - RNA, 19 nt, Homo sapiens
  misc_RNA (1)...(19): siRNA sense strand
gcaaucuugugucguuaua

SEQ ID NO: 1661903 - RNA, 19 nt, Homo sapiens
  misc_RNA (1)...(19): siRNA sense strand
uuacucggguuucauauuu

SEQ ID NO: 1661904 - RNA, 19 nt, Homo sapiens
  misc_RNA (1)...(19): siRNA sense strand
ggaaaggagcaaagagaaa

SEQ ID NO: 1661905 - RNA, 19 nt, Homo sapiens
  misc_RNA (1)...(19): siRNA sense strand
ggaaagaagcucagaaagg

SEQ ID NO: 1661906 - RNA, 19 nt, Homo sapiens
  misc_RNA (1)...(19): siRNA sense strand
gugaagagcuuguggaaaa

SEQ ID NO: 1661907 - RNA, 19 nt, Homo sapiens
  misc_RNA (1)...(19): siRNA sense strand
gaugaagaguuccuuaaac

SEQ ID NO: 1661908 - RNA, 19 nt, Homo sapiens
  misc_RNA (1)...(19): siRNA sense strand
uguaaucaguguagagaaa

SEQ ID NO: 1661909 - RNA, 19 nt, Homo sapiens
  misc_RNA (1)...(19): siRNA sense strand
gaagaguuccuuaaacaag

SEQ ID NO: 1661910 - RNA, 19 nt, Homo sapiens
  misc_RNA (1)...(19): siRNA sense strand
gaauggcagugaagagcuu

SEQ ID NO: 1661911 - RNA, 19 nt, Homo sapiens
  misc_RNA (1)...(19): siRNA sense strand
gcauacugaugaagaguuc

SEQ ID NO: 1661912 - RNA, 19 nt, Homo sapiens
  misc_RNA (1)...(19): siRNA sense strand
ugauggacauggaggaauu

SEQ ID NO: 1661913 - RNA, 19 nt, Homo sapiens
  misc_RNA (1)...(19): siRNA sense strand
gugaugggcucuucaaggu

SEQ ID NO: 1661914 - RNA, 19 nt, Homo sapiens
  misc_RNA (1)...(19): siRNA sense strand
ccacaucaauaucccagau

SEQ ID NO: 1661915 - RNA, 19 nt, Homo sapiens
  misc_RNA (1)...(19): siRNA sense strand
gaagagcggaugaggauac

SEQ ID NO: 1661916 - RNA, 19 nt, Homo sapiens
  misc_RNA (1)...(19): siRNA sense strand
gaagggaaaggagcaaaga

SEQ ID NO: 1661917 - RNA, 19 nt, Homo sapiens
  misc_RNA (1)...(19): siRNA sense strand
gggaaaggagcaaagagaa

SEQ ID NO: 1661918 - RNA, 19 nt, Homo sapiens
  misc_RNA (1)...(19): siRNA sense strand
cagaagaagccgugaacuu

SEQ ID NO: 1661919 - RNA, 19 nt, Homo sapiens
  misc_RNA (1)...(19): siRNA sense strand
gagcauaauccaacucagu

SEQ ID NO: 1661920 - RNA, 19 nt, Homo sapiens
  misc_RNA (1)...(19): siRNA sense strand
gggcaaucuugugucguua

SEQ ID NO: 1661921 - RNA, 19 nt, Homo sapiens
  misc_RNA (1)...(19): siRNA sense strand
caauaucccagaugguaaa

SEQ ID NO: 1661922 - RNA, 19 nt, Homo sapiens
  misc_RNA (1)...(19): siRNA sense strand
acagaaggcuggaggaaac

SEQ ID NO: 1661923 - RNA, 19 nt, Homo sapiens
  misc_RNA (1)...(19): siRNA sense strand
ggagauguaaucaguguag

SEQ ID NO: 1661924 - RNA, 19 nt, Homo sapiens
  misc_RNA (1)...(19): siRNA sense strand
caaagagcauaauccaacu

SEQ ID NO: 1661925 - RNA, 19 nt, Homo sapiens
  misc_RNA (1)...(19): siRNA sense strand
gagcggaugaggauacaga

SEQ ID NO: 1661926 - RNA, 19 nt, Homo sapiens
  misc_RNA (1)...(19): siRNA sense strand
gaaaggagcaaagagaaaa

SEQ ID NO: 1661927 - RNA, 19 nt, Homo sapiens
  misc_RNA (1)...(19): siRNA sense strand
agagaagaauggcagugaa

SEQ ID NO: 1661928 - RNA, 19 nt, Homo sapiens
  misc_RNA (1)...(19): siRNA sense strand
cagguucucuugccacauc

SEQ ID NO: 1661929 - RNA, 19 nt, Homo sapiens
  misc_RNA (1)...(19): siRNA sense strand
augaagaguuccuuaaaca

SEQ ID NO: 1661930 - RNA, 19 nt, Homo sapiens
  misc_RNA (1)...(19): siRNA sense strand
gauguaaucaguguagaga

SEQ ID NO: 1661931 - RNA, 19 nt, Homo sapiens
  misc_RNA (1)...(19): siRNA sense strand
ucggugaucuuuggucuga

SEQ ID NO: 1661932 - RNA, 19 nt, Homo sapiens
  misc_RNA (1)...(19): siRNA sense strand
cgggcaaucuugugucguu

SEQ ID NO: 1661933 - RNA, 19 nt, Homo sapiens
  misc_RNA (1)...(19): siRNA sense strand
ugaugaagaguuccuuaaa

SEQ ID NO: 1661934 - RNA, 19 nt, Homo sapiens
  misc_RNA (1)...(19): siRNA sense strand
caagcauacugaugaagag

SEQ ID NO: 1661935 - RNA, 19 nt, Homo sapiens
  misc_RNA (1)...(19): siRNA sense strand
ucauuacucggguuucaua

SEQ ID NO: 1661936 - RNA, 19 nt, Homo sapiens
  misc_RNA (1)...(19): siRNA sense strand
gaagaauggcagugaagag

SEQ ID NO: 1661937 - RNA, 19 nt, Homo sapiens
  misc_RNA (1)...(19): siRNA sense strand
gcuguagacaacauucuuu

SEQ ID NO: 1661938 - RNA, 19 nt, Homo sapiens
  misc_RNA (1)...(19): siRNA sense strand
ucaagcauacugaugaaga

SEQ ID NO: 1661939 - RNA, 19 nt, Homo sapiens
  misc_RNA (1)...(19): siRNA sense strand
cgggaaagaagcucagaaa

SEQ ID NO: 1661940 - RNA, 19 nt, Homo sapiens
  misc_RNA (1)...(19): siRNA sense strand
uacaagcgcugcgguguca

SEQ ID NO: 1661941 - RNA, 19 nt, Homo sapiens
  misc_RNA (1)...(19): siRNA sense strand
aaggagauguaaucagugu

SEQ ID NO: 1661942 - RNA, 19 nt, Homo sapiens
  misc_RNA (1)...(19): siRNA sense strand
gagauguaaucaguguaga

SEQ ID NO: 1661943 - RNA, 19 nt, Homo sapiens
  misc_RNA (1)...(19): siRNA sense strand
uaauccaacucaguaugaa

SEQ ID NO: 1661944 - RNA, 19 nt, Homo sapiens
  misc_RNA (1)...(19): siRNA sense strand
ccucuucggugaucuuugg

SEQ ID NO: 1661945 - RNA, 19 nt, Homo sapiens
  misc_RNA (1)...(19): siRNA sense strand
ggccagcaguacugacuca

SEQ ID NO: 1661946 - RNA, 19 nt, Homo sapiens
  misc_RNA (1)...(19): siRNA sense strand
aaaauuugcugcacagaau

SEQ ID NO: 1661947 - RNA, 19 nt, Homo sapiens
  misc_RNA (1)...(19): siRNA sense strand
ggugaucuuuggucugaag

SEQ ID NO: 1661948 - RNA, 19 nt, Homo sapiens
  misc_RNA (1)...(19): siRNA sense strand
gagaagaauggcagugaag

SEQ ID NO: 1661949 - RNA, 19 nt, Homo sapiens
  misc_RNA (1)...(19): siRNA sense strand
gauagucgggcaaucuugu

SEQ ID NO: 1661950 - RNA, 19 nt, Homo sapiens
  misc_RNA (1)...(19): siRNA sense strand
ucaauaucccagaugguaa

SEQ ID NO: 1661951 - RNA, 19 nt, Homo sapiens
  misc_RNA (1)...(19): siRNA sense strand
cgacaucaccgaggagugu

SEQ ID NO: 1661952 - RNA, 19 nt, Homo sapiens
  misc_RNA (1)...(19): siRNA sense strand
ccuuaagccucagcaaaga

SEQ ID NO: 1661953 - RNA, 19 nt, Homo sapiens
  misc_RNA (1)...(19): siRNA sense strand
aagccugccuggaaagaug

SEQ ID NO: 1661954 - RNA, 19 nt, Homo sapiens
  misc_RNA (1)...(19): siRNA sense strand
gcauaauccaacucaguau

SEQ ID NO: 1661955 - RNA, 19 nt, Homo sapiens
  misc_RNA (1)...(19): siRNA sense strand
ugaagaguuccuuaaacaa

SEQ ID NO: 1661956 - RNA, 19 nt, Homo sapiens
  misc_RNA (1)...(19): siRNA sense strand
ccucauuacucggguuuca

SEQ ID NO: 1661957 - RNA, 19 nt, Homo sapiens
  misc_RNA (1)...(19): siRNA sense strand
guuauaaugaggagaguca

SEQ ID NO: 1661958 - RNA, 19 nt, Homo sapiens
  misc_RNA (1)...(19): siRNA sense strand
ucucuugccacaucaauau

SEQ ID NO: 1661959 - RNA, 19 nt, Homo sapiens
  misc_RNA (1)...(19): siRNA sense strand
gugaagagaugccuuuugg

SEQ ID NO: 1661960 - RNA, 19 nt, Homo sapiens
  misc_RNA (1)...(19): siRNA sense strand
ggaauucgagccucaaaau

SEQ ID NO: 1661961 - RNA, 19 nt, Homo sapiens
  misc_RNA (1)...(19): siRNA sense strand
uuggacacuuucaagcaua

SEQ ID NO: 1661962 - RNA, 19 nt, Homo sapiens
  misc_RNA (1)...(19): siRNA sense strand
cagcaaagagcauaaucca

SEQ ID NO: 1661963 - RNA, 19 nt, Homo sapiens
  misc_RNA (1)...(19): siRNA sense strand
gagaaaaccgugaagagau

SEQ ID NO: 1661964 - RNA, 19 nt, Homo sapiens
  misc_RNA (1)...(19): siRNA sense strand
auaauccaacucaguauga

SEQ ID NO: 1661965 - RNA, 19 nt, Homo sapiens
  misc_RNA (1)...(19): siRNA sense strand
uauaaugaggagagucaaa

SEQ ID NO: 1661966 - RNA, 19 nt, Homo sapiens
  misc_RNA (1)...(19): siRNA sense strand
cuguagacaacauucuuua

SEQ ID NO: 1661967 - RNA, 19 nt, Homo sapiens
  misc_RNA (1)...(19): siRNA sense strand
cgucagggaugggcguguu

SEQ ID NO: 1661968 - RNA, 19 nt, Homo sapiens
  misc_RNA (1)...(19): siRNA sense strand
uaucccagaugguaaagac

SEQ ID NO: 1661969 - RNA, 19 nt, Homo sapiens
  misc_RNA (1)...(19): siRNA sense strand
agcauaauccaacucagua

SEQ ID NO: 1661970 - RNA, 19 nt, Homo sapiens
  misc_RNA (1)...(19): siRNA sense strand
gggaaagaagcucagaaag

SEQ ID NO: 1661971 - RNA, 19 nt, Homo sapiens
  misc_RNA (1)...(19): siRNA sense strand
agaaaaccgugaagagaug

SEQ ID NO: 1661972 - RNA, 19 nt, Homo sapiens
  misc_RNA (1)...(19): siRNA sense strand
gccuuaagccucagcaaag

SEQ ID NO: 1661973 - RNA, 19 nt, Homo sapiens
  misc_RNA (1)...(19): siRNA sense strand
gaggugucacgcuccauug

SEQ ID NO: 1661974 - RNA, 19 nt, Homo sapiens
  misc_RNA (1)...(19): siRNA sense strand
cccagaugguaaagacuga

SEQ ID NO: 1661975 - RNA, 19 nt, Homo sapiens
  misc_RNA (1)...(19): siRNA sense strand
cugaugaagaguuccuuaa

SEQ ID NO: 1661976 - RNA, 19 nt, Homo sapiens
  misc_RNA (1)...(19): siRNA sense strand
aagagaagaauggcaguga

SEQ ID NO: 1661977 - RNA, 19 nt, Homo sapiens
  misc_RNA (1)...(19): siRNA sense strand
cagugaagagcuuguggaa

SEQ ID NO: 1661978 - RNA, 19 nt, Homo sapiens
  misc_RNA (1)...(19): siRNA sense strand
cguguguucuggcuguaga

SEQ ID NO: 1661979 - RNA, 19 nt, Homo sapiens
  misc_RNA (1)...(19): siRNA sense strand
caacaggcuggccaacaag

SEQ ID NO: 1661980 - RNA, 19 nt, Homo sapiens
  misc_RNA (1)...(19): siRNA sense strand
ucuugugucguuauaauga

SEQ ID NO: 1661981 - RNA, 19 nt, Homo sapiens
  misc_RNA (1)...(19): siRNA sense strand
gaaagaagcucagaaagga

SEQ ID NO: 1661982 - RNA, 19 nt, Homo sapiens
  misc_RNA (1)...(19): siRNA sense strand
ggaaagaagcucagaaagg

SEQ ID NO: 1661983 - RNA, 19 nt, Homo sapiens
  misc_RNA (1)...(19): siRNA sense strand
cgggaaagaagcucagaaa

SEQ ID NO: 1661984 - RNA, 19 nt, Homo sapiens
  misc_RNA (1)...(19): siRNA sense strand
ggccagcaguacugacuca

SEQ ID NO: 1661985 - RNA, 19 nt, Homo sapiens
  misc_RNA (1)...(19): siRNA sense strand
gggaaagaagcucagaaag

SEQ ID NO: 1661986 - RNA, 19 nt, Homo sapiens
  misc_RNA (1)...(19): siRNA sense strand
ggaaagagguuaagcugaa

SEQ ID NO: 1661987 - RNA, 19 nt, Homo sapiens
  misc_RNA (1)...(19): siRNA sense strand
gaacugaucaacauaauuc

SEQ ID NO: 1661988 - RNA, 19 nt, Homo sapiens
  misc_RNA (1)...(19): siRNA sense strand
gagauaccauguccuguuu

SEQ ID NO: 1661989 - RNA, 19 nt, Homo sapiens
  misc_RNA (1)...(19): siRNA sense strand
cagaugauguugucacuuu

SEQ ID NO: 1661990 - RNA, 19 nt, Homo sapiens
  misc_RNA (1)...(19): siRNA sense strand
caagaagcuuugaguguuu

SEQ ID NO: 1661991 - RNA, 19 nt, Homo sapiens
  misc_RNA (1)...(19): siRNA sense strand
uaaaggcccucaucaauag

SEQ ID NO: 1661992 - RNA, 19 nt, Homo sapiens
  misc_RNA (1)...(19): siRNA sense strand
gcucgaauauguccuaaug

SEQ ID NO: 1661993 - RNA, 19 nt, Homo sapiens
  misc_RNA (1)...(19): siRNA sense strand
gaaccuauguuuguagaug

SEQ ID NO: 1661994 - RNA, 19 nt, Homo sapiens
  misc_RNA (1)...(19): siRNA sense strand
ccaaggaguucccagauga

SEQ ID NO: 1661995 - RNA, 19 nt, Homo sapiens
  misc_RNA (1)...(19): siRNA sense strand
gaaacacacuuugaugaau

SEQ ID NO: 1661996 - RNA, 19 nt, Homo sapiens
  misc_RNA (1)...(19): siRNA sense strand
gaaacccacugacucaaug

SEQ ID NO: 1661997 - RNA, 19 nt, Homo sapiens
  misc_RNA (1)...(19): siRNA sense strand
gcagaugauuaaccaauau

SEQ ID NO: 1661998 - RNA, 19 nt, Homo sapiens
  misc_RNA (1)...(19): siRNA sense strand
cagcugaaauugugcagua

SEQ ID NO: 1661999 - RNA, 19 nt, Homo sapiens
  misc_RNA (1)...(19): siRNA sense strand
caagaccucugaauacuuc

SEQ ID NO: 1662000 - RNA, 19 nt, Homo sapiens
  misc_RNA (1)...(19): siRNA sense strand
gcacgaaacagauucauuc

SEQ ID NO: 1662001 - RNA, 19 nt, Homo sapiens
  misc_RNA (1)...(19): siRNA sense strand
gaacuuuguccguguaauu

SEQ ID NO: 1662002 - RNA, 19 nt, Homo sapiens
  misc_RNA (1)...(19): siRNA sense strand
caaaugaugcuaaggugua

SEQ ID NO: 1662003 - RNA, 19 nt, Homo sapiens
  misc_RNA (1)...(19): siRNA sense strand
uaagcugaaugaacgaaua

SEQ ID NO: 1662004 - RNA, 19 nt, Homo sapiens
  misc_RNA (1)...(19): siRNA sense strand
aaaccaagaccucugaaua

SEQ ID NO: 1662005 - RNA, 19 nt, Homo sapiens
  misc_RNA (1)...(19): siRNA sense strand
uaagaaucaugcuccuaua

SEQ ID NO: 1662006 - RNA, 19 nt, Homo sapiens
  misc_RNA (1)...(19): siRNA sense strand
caugauugcucgaauaugu

SEQ ID NO: 1662007 - RNA, 19 nt, Homo sapiens
  misc_RNA (1)...(19): siRNA sense strand
ucagaaaugcagaugauua

SEQ ID NO: 1662008 - RNA, 19 nt, Homo sapiens
  misc_RNA (1)...(19): siRNA sense strand
gaaucaugcuccuauaaca

SEQ ID NO: 1662009 - RNA, 19 nt, Homo sapiens
  misc_RNA (1)...(19): siRNA sense strand
ggaaccauccucucaugua

SEQ ID NO: 1662010 - RNA, 19 nt, Homo sapiens
  misc_RNA (1)...(19): siRNA sense strand
ugaauuagaggauguguuu

SEQ ID NO: 1662011 - RNA, 19 nt, Homo sapiens
  misc_RNA (1)...(19): siRNA sense strand
cgaaacagauucauuccau

SEQ ID NO: 1662012 - RNA, 19 nt, Homo sapiens
  misc_RNA (1)...(19): siRNA sense strand
gaaaugcagcugaaauugu

SEQ ID NO: 1662013 - RNA, 19 nt, Homo sapiens
  misc_RNA (1)...(19): siRNA sense strand
caaaauggcuggcaaagau

SEQ ID NO: 1662014 - RNA, 19 nt, Homo sapiens
  misc_RNA (1)...(19): siRNA sense strand
uuaaaggcccucaucaaua

SEQ ID NO: 1662015 - RNA, 19 nt, Homo sapiens
  misc_RNA (1)...(19): siRNA sense strand
ccaagcaagaguuuauuua

SEQ ID NO: 1662016 - RNA, 19 nt, Homo sapiens
  misc_RNA (1)...(19): siRNA sense strand
gaucaggaccggauauaug

SEQ ID NO: 1662017 - RNA, 19 nt, Homo sapiens
  misc_RNA (1)...(19): siRNA sense strand
gaaccauccucucauguac

SEQ ID NO: 1662018 - RNA, 19 nt, Homo sapiens
  misc_RNA (1)...(19): siRNA sense strand
aaagauagcuguggaucga

SEQ ID NO: 1662019 - RNA, 19 nt, Homo sapiens
  misc_RNA (1)...(19): siRNA sense strand
gaaagagguuaagcugaau

SEQ ID NO: 1662020 - RNA, 19 nt, Homo sapiens
  misc_RNA (1)...(19): siRNA sense strand
ggagauaccauguccuguu

SEQ ID NO: 1662021 - RNA, 19 nt, Homo sapiens
  misc_RNA (1)...(19): siRNA sense strand
uaagugaaccuauguuugu

SEQ ID NO: 1662022 - RNA, 19 nt, Homo sapiens
  misc_RNA (1)...(19): siRNA sense strand
cagaaaugcagaugauuaa

SEQ ID NO: 1662023 - RNA, 19 nt, Homo sapiens
  misc_RNA (1)...(19): siRNA sense strand
gaucagccgugugugugua

SEQ ID NO: 1662024 - RNA, 19 nt, Homo sapiens
  misc_RNA (1)...(19): siRNA sense strand
ggacagaugcugcuauuuu

SEQ ID NO: 1662025 - RNA, 19 nt, Homo sapiens
  misc_RNA (1)...(19): siRNA sense strand
gaacuucgagaaaccaaga

SEQ ID NO: 1662026 - RNA, 19 nt, Homo sapiens
  misc_RNA (1)...(19): siRNA sense strand
ggauauaugugggaagcaa

SEQ ID NO: 1662027 - RNA, 19 nt, Homo sapiens
  misc_RNA (1)...(19): siRNA sense strand
gaaacaggaggaaucaguu

SEQ ID NO: 1662028 - RNA, 19 nt, Homo sapiens
  misc_RNA (1)...(19): siRNA sense strand
ggagaugaaucacagaaaa

SEQ ID NO: 1662029 - RNA, 19 nt, Homo sapiens
  misc_RNA (1)...(19): siRNA sense strand
gcugaaugaacgaauaaua

SEQ ID NO: 1662030 - RNA, 19 nt, Homo sapiens
  misc_RNA (1)...(19): siRNA sense strand
gccagcaucuacaaucaaa

SEQ ID NO: 1662031 - RNA, 19 nt, Homo sapiens
  misc_RNA (1)...(19): siRNA sense strand
caauauaagucaagaagcu

SEQ ID NO: 1662032 - RNA, 19 nt, Homo sapiens
  misc_RNA (1)...(19): siRNA sense strand
ggaccaaguuuucaugauu

SEQ ID NO: 1662033 - RNA, 19 nt, Homo sapiens
  misc_RNA (1)...(19): siRNA sense strand
cguguugguuggaguauuu

SEQ ID NO: 1662034 - RNA, 19 nt, Homo sapiens
  misc_RNA (1)...(19): siRNA sense strand
caaagacacucggcagcaa

SEQ ID NO: 1662035 - RNA, 19 nt, Homo sapiens
  misc_RNA (1)...(19): siRNA sense strand
aaaugcagcugaaauugug

SEQ ID NO: 1662036 - RNA, 19 nt, Homo sapiens
  misc_RNA (1)...(19): siRNA sense strand
cagaaaugcagcugaaauu

SEQ ID NO: 1662037 - RNA, 19 nt, Homo sapiens
  misc_RNA (1)...(19): siRNA sense strand
gaacagagggaggagauca

SEQ ID NO: 1662038 - RNA, 19 nt, Homo sapiens
  misc_RNA (1)...(19): siRNA sense strand
gcauucagccacucagaaa

SEQ ID NO: 1662039 - RNA, 19 nt, Homo sapiens
  misc_RNA (1)...(19): siRNA sense strand
caaaggaucagccgugugu

SEQ ID NO: 1662040 - RNA, 19 nt, Homo sapiens
  misc_RNA (1)...(19): siRNA sense strand
cagaaacacacuuugauga

SEQ ID NO: 1662041 - RNA, 19 nt, Homo sapiens
  misc_RNA (1)...(19): siRNA sense strand
auacagaaaugcagcugaa

SEQ ID NO: 1662042 - RNA, 19 nt, Homo sapiens
  misc_RNA (1)...(19): siRNA sense strand
guuaaaggcccucaucaau

SEQ ID NO: 1662043 - RNA, 19 nt, Homo sapiens
  misc_RNA (1)...(19): siRNA sense strand
gagaucagaggaccaaguu

SEQ ID NO: 1662044 - RNA, 19 nt, Homo sapiens
  misc_RNA (1)...(19): siRNA sense strand
uaaccaauauugcaaagac

SEQ ID NO: 1662045 - RNA, 19 nt, Homo sapiens
  misc_RNA (1)...(19): siRNA sense strand
gaugaagacggcccagaaa

SEQ ID NO: 1662046 - RNA, 19 nt, Homo sapiens
  misc_RNA (1)...(19): siRNA sense strand
gcuaagugaaccuauguuu

SEQ ID NO: 1662047 - RNA, 19 nt, Homo sapiens
  misc_RNA (1)...(19): siRNA sense strand
gagaaaccaagaccucuga

SEQ ID NO: 1662048 - RNA, 19 nt, Homo sapiens
  misc_RNA (1)...(19): siRNA sense strand
caagaggaaugcggucaga

SEQ ID NO: 1662049 - RNA, 19 nt, Homo sapiens
  misc_RNA (1)...(19): siRNA sense strand
guaugugaguuccaaugaa

SEQ ID NO: 1662050 - RNA, 19 nt, Homo sapiens
  misc_RNA (1)...(19): siRNA sense strand
gaaguuuaaccaagaggaa

SEQ ID NO: 1662051 - RNA, 19 nt, Homo sapiens
  misc_RNA (1)...(19): siRNA sense strand
uagccaagaucaacuucaa

SEQ ID NO: 1662052 - RNA, 19 nt, Homo sapiens
  misc_RNA (1)...(19): siRNA sense strand
gacuacaaguauacaaaga

SEQ ID NO: 1662053 - RNA, 19 nt, Homo sapiens
  misc_RNA (1)...(19): siRNA sense strand
ggcacugacuacaaguaua

SEQ ID NO: 1662054 - RNA, 19 nt, Homo sapiens
  misc_RNA (1)...(19): siRNA sense strand
gaagacaagaugugagaca

SEQ ID NO: 1662055 - RNA, 19 nt, Homo sapiens
  misc_RNA (1)...(19): siRNA sense strand
gaaaugguggcuguuguga

SEQ ID NO: 1662056 - RNA, 19 nt, Homo sapiens
  misc_RNA (1)...(19): siRNA sense strand
gaacgaauaauagccacuu

SEQ ID NO: 1662057 - RNA, 19 nt, Homo sapiens
  misc_RNA (1)...(19): siRNA sense strand
ggaaacccacugacucaau

SEQ ID NO: 1662058 - RNA, 19 nt, Homo sapiens
  misc_RNA (1)...(19): siRNA sense strand
cagaacugaucaacauaau

SEQ ID NO: 1662059 - RNA, 19 nt, Homo sapiens
  misc_RNA (1)...(19): siRNA sense strand
gaagaucaggaccggauau

SEQ ID NO: 1662060 - RNA, 19 nt, Homo sapiens
  misc_RNA (1)...(19): siRNA sense strand
gcuccuauaacaacaauga

SEQ ID NO: 1662061 - RNA, 19 nt, Homo sapiens
  misc_RNA (1)...(19): siRNA sense strand
ggaguucccagaugauguu

SEQ ID NO: 1662062 - RNA, 19 nt, Homo sapiens
  misc_RNA (1)...(19): siRNA sense strand
ucaguccugucuguacuua

SEQ ID NO: 1662063 - RNA, 19 nt, Homo sapiens
  misc_RNA (1)...(19): siRNA sense strand
ugcagaugauuaaccaaua

SEQ ID NO: 1662064 - RNA, 19 nt, Homo sapiens
  misc_RNA (1)...(19): siRNA sense strand
ucacugcauugcuacagaa

SEQ ID NO: 1662065 - RNA, 19 nt, Homo sapiens
  misc_RNA (1)...(19): siRNA sense strand
uggaggagcuggaagucuu

SEQ ID NO: 1662066 - RNA, 19 nt, Homo sapiens
  misc_RNA (1)...(19): siRNA sense strand
caaaguugaagaaugcaaa

SEQ ID NO: 1662067 - RNA, 19 nt, Homo sapiens
  misc_RNA (1)...(19): siRNA sense strand
gcacugacuacaaguauac

SEQ ID NO: 1662068 - RNA, 19 nt, Homo sapiens
  misc_RNA (1)...(19): siRNA sense strand
gagcauuuacacccaauau

SEQ ID NO: 1662069 - RNA, 19 nt, Homo sapiens
  misc_RNA (1)...(19): siRNA sense strand
ugucuguuaugaucaauga

SEQ ID NO: 1662070 - RNA, 19 nt, Homo sapiens
  misc_RNA (1)...(19): siRNA sense strand
gggaagcaaagaucacauu

SEQ ID NO: 1662071 - RNA, 19 nt, Homo sapiens
  misc_RNA (1)...(19): siRNA sense strand
agaaacacacuuugaugaa

SEQ ID NO: 1662072 - RNA, 19 nt, Homo sapiens
  misc_RNA (1)...(19): siRNA sense strand
cagaaaugguggcuguugu

SEQ ID NO: 1662073 - RNA, 19 nt, Homo sapiens
  misc_RNA (1)...(19): siRNA sense strand
gauaccauguccuguuucu

SEQ ID NO: 1662074 - RNA, 19 nt, Homo sapiens
  misc_RNA (1)...(19): siRNA sense strand
aagaagggcccaaucauca

SEQ ID NO: 1662075 - RNA, 19 nt, Homo sapiens
  misc_RNA (1)...(19): siRNA sense strand
ucucuggaauguauauaga

SEQ ID NO: 1662076 - RNA, 19 nt, Homo sapiens
  misc_RNA (1)...(19): siRNA sense strand
ccucaucaauagucggaaa

SEQ ID NO: 1662077 - RNA, 19 nt, Homo sapiens
  misc_RNA (1)...(19): siRNA sense strand
gaaaccaagaccucugaau

SEQ ID NO: 1662078 - RNA, 19 nt, Homo sapiens
  misc_RNA (1)...(19): siRNA sense strand
ggccuuugauuguucguau

SEQ ID NO: 1662079 - RNA, 19 nt, Homo sapiens
  misc_RNA (1)...(19): siRNA sense strand
ccagaaacacacuuugaug

SEQ ID NO: 1662080 - RNA, 19 nt, Homo sapiens
  misc_RNA (1)...(19): siRNA sense strand
gugaaccuauguuuguaga

SEQ ID NO: 1662081 - RNA, 19 nt, Homo sapiens
  misc_RNA (1)...(19): siRNA sense strand
uuucgaaguuuaaccaaga

SEQ ID NO: 1662082 - RNA, 19 nt, Homo sapiens
  misc_RNA (1)...(19): siRNA sense strand
ccuuuagacuacaggauuu

SEQ ID NO: 1662083 - RNA, 19 nt, Homo sapiens
  misc_RNA (1)...(19): siRNA sense strand
acaaagaagggcccaauca

SEQ ID NO: 1662084 - RNA, 19 nt, Homo sapiens
  misc_RNA (1)...(19): siRNA sense strand
gcaccgcugccacaucuau

SEQ ID NO: 1662085 - RNA, 19 nt, Homo sapiens
  misc_RNA (1)...(19): siRNA sense strand
acaauuccaucuacccaau

SEQ ID NO: 1662086 - RNA, 19 nt, Homo sapiens
  misc_RNA (1)...(19): siRNA sense strand
gaagauacauaugaacgaa

SEQ ID NO: 1662087 - RNA, 19 nt, Homo sapiens
  misc_RNA (1)...(19): siRNA sense strand
gggagaagauacauaugaa

SEQ ID NO: 1662088 - RNA, 19 nt, Homo sapiens
  misc_RNA (1)...(19): siRNA sense strand
gaggacauucccauaauuu

SEQ ID NO: 1662089 - RNA, 19 nt, Homo sapiens
  misc_RNA (1)...(19): siRNA sense strand
ggaaagugcaacgauuaua

SEQ ID NO: 1662090 - RNA, 19 nt, Homo sapiens
  misc_RNA (1)...(19): siRNA sense strand
acgcauaccugauugucua

SEQ ID NO: 1662091 - RNA, 19 nt, Homo sapiens
  misc_RNA (1)...(19): siRNA sense strand
cagaggacauucccauaau

SEQ ID NO: 1662092 - RNA, 19 nt, Homo sapiens
  misc_RNA (1)...(19): siRNA sense strand
gaaagugcaacgauuauac

SEQ ID NO: 1662093 - RNA, 19 nt, Homo sapiens
  misc_RNA (1)...(19): siRNA sense strand
acaagaauauggccuucaa

SEQ ID NO: 1662094 - RNA, 19 nt, Homo sapiens
  misc_RNA (1)...(19): siRNA sense strand
ugaccucucuguacucuag

SEQ ID NO: 1662095 - RNA, 19 nt, Homo sapiens
  misc_RNA (1)...(19): siRNA sense strand
cgauuauacuccuggauau

SEQ ID NO: 1662096 - RNA, 19 nt, Homo sapiens
  misc_RNA (1)...(19): siRNA sense strand
agaggacauucccauaauu

SEQ ID NO: 1662097 - RNA, 19 nt, Homo sapiens
  misc_RNA (1)...(19): siRNA sense strand
acagaggacauucccauaa

SEQ ID NO: 1662098 - RNA, 19 nt, Homo sapiens
  misc_RNA (1)...(19): siRNA sense strand
gcugggagaagauacauau

SEQ ID NO: 1662099 - RNA, 19 nt, Homo sapiens
  misc_RNA (1)...(19): siRNA sense strand
gacagaggacauucccaua

SEQ ID NO: 1662100 - RNA, 19 nt, Homo sapiens
  misc_RNA (1)...(19): siRNA sense strand
agaaagagccccaccagua

SEQ ID NO: 1662101 - RNA, 19 nt, Homo sapiens
  misc_RNA (1)...(19): siRNA sense strand
gcgaggugcugggagaaga

SEQ ID NO: 1662102 - RNA, 19 nt, Homo sapiens
  misc_RNA (1)...(19): siRNA sense strand
gggaaagugcaacgauuau

SEQ ID NO: 1662103 - RNA, 19 nt, Homo sapiens
  misc_RNA (1)...(19): siRNA sense strand
caucugagcugcgaaucca

SEQ ID NO: 1662104 - RNA, 19 nt, Homo sapiens
  misc_RNA (1)...(19): siRNA sense strand
gccgagaagugucuguauc

SEQ ID NO: 1662105 - RNA, 19 nt, Homo sapiens
  misc_RNA (1)...(19): siRNA sense strand
caacgugaaggagcuguuu

SEQ ID NO: 1662106 - RNA, 19 nt, Homo sapiens
  misc_RNA (1)...(19): siRNA sense strand
gccaugaccucucuguacu

SEQ ID NO: 1662107 - RNA, 19 nt, Homo sapiens
  misc_RNA (1)...(19): siRNA sense strand
ccugugcagugguguuuga

SEQ ID NO: 1662108 - RNA, 19 nt, Homo sapiens
  misc_RNA (1)...(19): siRNA sense strand
ccuucaagcucaaguccaa

SEQ ID NO: 1662109 - RNA, 19 nt, Homo sapiens
  misc_RNA (1)...(19): siRNA sense strand
ggacagcaaggagaagaau

SEQ ID NO: 1662110 - RNA, 19 nt, Homo sapiens
  misc_RNA (1)...(19): siRNA sense strand
ugggagaagauacauauga

SEQ ID NO: 1662111 - RNA, 19 nt, Homo sapiens
  misc_RNA (1)...(19): siRNA sense strand
acagcaaggagaagaauga

SEQ ID NO: 1662112 - RNA, 19 nt, Homo sapiens
  misc_RNA (1)...(19): siRNA sense strand
acgauuauacuccuggaua

SEQ ID NO: 1662113 - RNA, 19 nt, Homo sapiens
  misc_RNA (1)...(19): siRNA sense strand
ggacauucccauaauuuug

SEQ ID NO: 1662114 - RNA, 19 nt, Homo sapiens
  misc_RNA (1)...(19): siRNA sense strand
ggggaaagugcaacgauua

SEQ ID NO: 1662115 - RNA, 19 nt, Homo sapiens
  misc_RNA (1)...(19): siRNA sense strand
ggagagcaugcccaggaaa

SEQ ID NO: 1662116 - RNA, 19 nt, Homo sapiens
  misc_RNA (1)...(19): siRNA sense strand
guguuugacugcaaguuca

SEQ ID NO: 1662117 - RNA, 19 nt, Homo sapiens
  misc_RNA (1)...(19): siRNA sense strand
ucacagaccgagcgagcuu

SEQ ID NO: 1662118 - RNA, 19 nt, Homo sapiens
  misc_RNA (1)...(19): siRNA sense strand
ggagcuguuugagggcauu

SEQ ID NO: 1662119 - RNA, 19 nt, Homo sapiens
  misc_RNA (1)...(19): siRNA sense strand
gaggugcugggagaagaua

SEQ ID NO: 1662120 - RNA, 19 nt, Homo sapiens
  misc_RNA (1)...(19): siRNA sense strand
gagagcaugcccaggaaag

SEQ ID NO: 1662121 - RNA, 19 nt, Homo sapiens
  misc_RNA (1)...(19): siRNA sense strand
ccgagaagugucuguauca

SEQ ID NO: 1662122 - RNA, 19 nt, Homo sapiens
  misc_RNA (1)...(19): siRNA sense strand
gaaagagccccaccaguac

SEQ ID NO: 1662123 - RNA, 19 nt, Homo sapiens
  misc_RNA (1)...(19): siRNA sense strand
gauuauacuccuggauaug

SEQ ID NO: 1662124 - RNA, 19 nt, Homo sapiens
  misc_RNA (1)...(19): siRNA sense strand
agucagggaacaccuacua

SEQ ID NO: 1662125 - RNA, 19 nt, Homo sapiens
  misc_RNA (1)...(19): siRNA sense strand
agucaucuccucugaguca

SEQ ID NO: 1662126 - RNA, 19 nt, Homo sapiens
  misc_RNA (1)...(19): siRNA sense strand
ggagaagauacauaugaac

SEQ ID NO: 1662127 - RNA, 19 nt, Homo sapiens
  misc_RNA (1)...(19): siRNA sense strand
gguguuugacugcaaguuc

SEQ ID NO: 1662128 - RNA, 19 nt, Homo sapiens
  misc_RNA (1)...(19): siRNA sense strand
uuagugcggugccgagaag

SEQ ID NO: 1662129 - RNA, 19 nt, Homo sapiens
  misc_RNA (1)...(19): siRNA sense strand
cuggauaugugggaaaaua

SEQ ID NO: 1662130 - RNA, 19 nt, Homo sapiens
  misc_RNA (1)...(19): siRNA sense strand
ggacgcauaccugauuguc

SEQ ID NO: 1662131 - RNA, 19 nt, Homo sapiens
  misc_RNA (1)...(19): siRNA sense strand
caugaccucucuguacucu

SEQ ID NO: 1662132 - RNA, 19 nt, Homo sapiens
  misc_RNA (1)...(19): siRNA sense strand
aggagagcaugcccaggaa

SEQ ID NO: 1662133 - RNA, 19 nt, Homo sapiens
  misc_RNA (1)...(19): siRNA sense strand
gaagauacauaugaacgaa

SEQ ID NO: 1662134 - RNA, 19 nt, Homo sapiens
  misc_RNA (1)...(19): siRNA sense strand
gggagaagauacauaugaa

SEQ ID NO: 1662135 - RNA, 19 nt, Homo sapiens
  misc_RNA (1)...(19): siRNA sense strand
gaggacauucccauaauuu

SEQ ID NO: 1662136 - RNA, 19 nt, Homo sapiens
  misc_RNA (1)...(19): siRNA sense strand
ggaaagugcaacgauuaua

SEQ ID NO: 1662137 - RNA, 19 nt, Homo sapiens
  misc_RNA (1)...(19): siRNA sense strand
acgcauaccugauugucua

SEQ ID NO: 1662138 - RNA, 19 nt, Homo sapiens
  misc_RNA (1)...(19): siRNA sense strand
cagaggacauucccauaau

SEQ ID NO: 1662139 - RNA, 19 nt, Homo sapiens
  misc_RNA (1)...(19): siRNA sense strand
gaaagugcaacgauuauac

SEQ ID NO: 1662140 - RNA, 19 nt, Homo sapiens
  misc_RNA (1)...(19): siRNA sense strand
acaagaauauggccuucaa

SEQ ID NO: 1662141 - RNA, 19 nt, Homo sapiens
  misc_RNA (1)...(19): siRNA sense strand
ugaccucucuguacucuag

SEQ ID NO: 1662142 - RNA, 19 nt, Homo sapiens
  misc_RNA (1)...(19): siRNA sense strand
cgauuauacuccuggauau

SEQ ID NO: 1662143 - RNA, 19 nt, Homo sapiens
  misc_RNA (1)...(19): siRNA sense strand
agaggacauucccauaauu

SEQ ID NO: 1662144 - RNA, 19 nt, Homo sapiens
  misc_RNA (1)...(19): siRNA sense strand
acagaggacauucccauaa

SEQ ID NO: 1662145 - RNA, 19 nt, Homo sapiens
  misc_RNA (1)...(19): siRNA sense strand
gcugggagaagauacauau

SEQ ID NO: 1662146 - RNA, 19 nt, Homo sapiens
  misc_RNA (1)...(19): siRNA sense strand
gacagaggacauucccaua

SEQ ID NO: 1662147 - RNA, 19 nt, Homo sapiens
  misc_RNA (1)...(19): siRNA sense strand
agaaagagccccaccagua

SEQ ID NO: 1662148 - RNA, 19 nt, Homo sapiens
  misc_RNA (1)...(19): siRNA sense strand
gcgaggugcugggagaaga

SEQ ID NO: 1662149 - RNA, 19 nt, Homo sapiens
  misc_RNA (1)...(19): siRNA sense strand
gggaaagugcaacgauuau

SEQ ID NO: 1662150 - RNA, 19 nt, Homo sapiens
  misc_RNA (1)...(19): siRNA sense strand
caucugagcugcgaaucca

SEQ ID NO: 1662151 - RNA, 19 nt, Homo sapiens
  misc_RNA (1)...(19): siRNA sense strand
gccgagaagugucuguauc

SEQ ID NO: 1662152 - RNA, 19 nt, Homo sapiens
  misc_RNA (1)...(19): siRNA sense strand
caacgugaaggagcuguuu

SEQ ID NO: 1662153 - RNA, 19 nt, Homo sapiens
  misc_RNA (1)...(19): siRNA sense strand
gccaugaccucucuguacu

SEQ ID NO: 1662154 - RNA, 19 nt, Homo sapiens
  misc_RNA (1)...(19): siRNA sense strand
ccugugcagugguguuuga

SEQ ID NO: 1662155 - RNA, 19 nt, Homo sapiens
  misc_RNA (1)...(19): siRNA sense strand
ccuucaagcucaaguccaa

SEQ ID NO: 1662156 - RNA, 19 nt, Homo sapiens
  misc_RNA (1)...(19): siRNA sense strand
ggacagcaaggagaagaau

SEQ ID NO: 1662157 - RNA, 19 nt, Homo sapiens
  misc_RNA (1)...(19): siRNA sense strand
ugggagaagauacauauga

SEQ ID NO: 1662158 - RNA, 19 nt, Homo sapiens
  misc_RNA (1)...(19): siRNA sense strand
acagcaaggagaagaauga

SEQ ID NO: 1662159 - RNA, 19 nt, Homo sapiens
  misc_RNA (1)...(19): siRNA sense strand
acgauuauacuccuggaua

SEQ ID NO: 1662160 - RNA, 19 nt, Homo sapiens
  misc_RNA (1)...(19): siRNA sense strand
ggacauucccauaauuuug

SEQ ID NO: 1662161 - RNA, 19 nt, Homo sapiens
  misc_RNA (1)...(19): siRNA sense strand
ggggaaagugcaacgauua

SEQ ID NO: 1662162 - RNA, 19 nt, Homo sapiens
  misc_RNA (1)...(19): siRNA sense strand
ggagagcaugcccaggaaa

SEQ ID NO: 1662163 - RNA, 19 nt, Homo sapiens
  misc_RNA (1)...(19): siRNA sense strand
guguuugacugcaaguuca

SEQ ID NO: 1662164 - RNA, 19 nt, Homo sapiens
  misc_RNA (1)...(19): siRNA sense strand
ucacagaccgagcgagcuu

SEQ ID NO: 1662165 - RNA, 19 nt, Homo sapiens
  misc_RNA (1)...(19): siRNA sense strand
ggagcuguuugagggcauu

SEQ ID NO: 1662166 - RNA, 19 nt, Homo sapiens
  misc_RNA (1)...(19): siRNA sense strand
gaggugcugggagaagaua

SEQ ID NO: 1662167 - RNA, 19 nt, Homo sapiens
  misc_RNA (1)...(19): siRNA sense strand
gagagcaugcccaggaaag

SEQ ID NO: 1662168 - RNA, 19 nt, Homo sapiens
  misc_RNA (1)...(19): siRNA sense strand
ccgagaagugucuguauca

SEQ ID NO: 1662169 - RNA, 19 nt, Homo sapiens
  misc_RNA (1)...(19): siRNA sense strand
gaaagagccccaccaguac

SEQ ID NO: 1662170 - RNA, 19 nt, Homo sapiens
  misc_RNA (1)...(19): siRNA sense strand
gauuauacuccuggauaug

SEQ ID NO: 1662171 - RNA, 19 nt, Homo sapiens
  misc_RNA (1)...(19): siRNA sense strand
agucagggaacaccuacua

SEQ ID NO: 1662172 - RNA, 19 nt, Homo sapiens
  misc_RNA (1)...(19): siRNA sense strand
agucaucuccucugaguca

SEQ ID NO: 1662173 - RNA, 19 nt, Homo sapiens
  misc_RNA (1)...(19): siRNA sense strand
ggagaagauacauaugaac

SEQ ID NO: 1662174 - RNA, 19 nt, Homo sapiens
  misc_RNA (1)...(19): siRNA sense strand
gguguuugacugcaaguuc

SEQ ID NO: 1662175 - RNA, 19 nt, Homo sapiens
  misc_RNA (1)...(19): siRNA sense strand
uuagugcggugccgagaag

SEQ ID NO: 1662176 - RNA, 19 nt, Homo sapiens
  misc_RNA (1)...(19): siRNA sense strand
cuggauaugugggaaaaua

SEQ ID NO: 1662177 - RNA, 19 nt, Homo sapiens
  misc_RNA (1)...(19): siRNA sense strand
ggacgcauaccugauuguc

SEQ ID NO: 1662178 - RNA, 19 nt, Homo sapiens
  misc_RNA (1)...(19): siRNA sense strand
caugaccucucuguacucu

SEQ ID NO: 1662179 - RNA, 19 nt, Homo sapiens
  misc_RNA (1)...(19): siRNA sense strand
aggagagcaugcccaggaa

SEQ ID NO: 1662180 - RNA, 19 nt, Homo sapiens
  misc_RNA (1)...(19): siRNA sense strand
gagacggacaggugaacua

SEQ ID NO: 1662181 - RNA, 19 nt, Homo sapiens
  misc_RNA (1)...(19): siRNA sense strand
aggagcaggucacagaauu

SEQ ID NO: 1662182 - RNA, 19 nt, Homo sapiens
  misc_RNA (1)...(19): siRNA sense strand
gagcaggucacagaauuca

SEQ ID NO: 1662183 - RNA, 19 nt, Homo sapiens
  misc_RNA (1)...(19): siRNA sense strand
gcaggucacagaauucaag

SEQ ID NO: 1662184 - RNA, 19 nt, Homo sapiens
  misc_RNA (1)...(19): siRNA sense strand
gagcugcgggacaugauga

SEQ ID NO: 1662185 - RNA, 19 nt, Homo sapiens
  misc_RNA (1)...(19): siRNA sense strand
ggacaacgaggaggagauc

SEQ ID NO: 1662186 - RNA, 19 nt, Homo sapiens
  misc_RNA (1)...(19): siRNA sense strand
ugaaggacacggacaacga

SEQ ID NO: 1662187 - RNA, 19 nt, Homo sapiens
  misc_RNA (1)...(19): siRNA sense strand
ugcgggacaugaugaguga

SEQ ID NO: 1662188 - RNA, 19 nt, Homo sapiens
  misc_RNA (1)...(19): siRNA sense strand
acgaggagguggacgagau

SEQ ID NO: 1662189 - RNA, 19 nt, Homo sapiens
  misc_RNA (1)...(19): siRNA sense strand
gaggagcaggucacagaau

SEQ ID NO: 1662190 - RNA, 19 nt, Homo sapiens
  misc_RNA (1)...(19): siRNA sense strand
ggagcaggucacagaauuc

SEQ ID NO: 1662191 - RNA, 19 nt, Homo sapiens
  misc_RNA (1)...(19): siRNA sense strand
ggacaugaugagugagauc

SEQ ID NO: 1662192 - RNA, 19 nt, Homo sapiens
  misc_RNA (1)...(19): siRNA sense strand
ggagguggacgagaugauc

SEQ ID NO: 1662193 - RNA, 19 nt, Homo sapiens
  misc_RNA (1)...(19): siRNA sense strand
gaggccuucucccuguuug

SEQ ID NO: 1662194 - RNA, 19 nt, Homo sapiens
  misc_RNA (1)...(19): siRNA sense strand
acggacaggugaacuacga

SEQ ID NO: 1662195 - RNA, 19 nt, Homo sapiens
  misc_RNA (1)...(19): siRNA sense strand
cugaggagcaggucacaga

SEQ ID NO: 1662196 - RNA, 19 nt, Homo sapiens
  misc_RNA (1)...(19): siRNA sense strand
ggcaugauggccaggaaga

SEQ ID NO: 1662197 - RNA, 19 nt, Homo sapiens
  misc_RNA (1)...(19): siRNA sense strand
caugauggccaggaagaug

SEQ ID NO: 1662198 - RNA, 19 nt, Homo sapiens
  misc_RNA (1)...(19): siRNA sense strand
cacaugagcuccuacagaa

SEQ ID NO: 1662199 - RNA, 19 nt, Homo sapiens
  misc_RNA (1)...(19): siRNA sense strand
ccacaggcauccagcguaa

SEQ ID NO: 1662200 - RNA, 19 nt, Homo sapiens
  misc_RNA (1)...(19): siRNA sense strand
ggugguggcugcugccuuu

SEQ ID NO: 1662201 - RNA, 19 nt, Homo sapiens
  misc_RNA (1)...(19): siRNA sense strand
cugaacaucugugucauua

SEQ ID NO: 1662202 - RNA, 19 nt, Homo sapiens
  misc_RNA (1)...(19): siRNA sense strand
ggugaucacuggcccuuug

SEQ ID NO: 1662203 - RNA, 19 nt, Homo sapiens
  misc_RNA (1)...(19): siRNA sense strand
gaacaucugugucauuacc

SEQ ID NO: 1662204 - RNA, 19 nt, Homo sapiens
  misc_RNA (1)...(19): siRNA sense strand
uaaccgcacugucugcuau

SEQ ID NO: 1662205 - RNA, 19 nt, Homo sapiens
  misc_RNA (1)...(19): siRNA sense strand
gaaacucacagccaaaugg

SEQ ID NO: 1662206 - RNA, 19 nt, Homo sapiens
  misc_RNA (1)...(19): siRNA sense strand
cuacaacuaugcccaaggu

SEQ ID NO: 1662207 - RNA, 19 nt, Homo sapiens
  misc_RNA (1)...(19): siRNA sense strand
ccacaugagcuccuacaga

SEQ ID NO: 1662208 - RNA, 19 nt, Homo sapiens
  misc_RNA (1)...(19): siRNA sense strand
uggcugaccugcuauaugc

SEQ ID NO: 1662209 - RNA, 19 nt, Homo sapiens
  misc_RNA (1)...(19): siRNA sense strand
gcauggcucucacugucau

SEQ ID NO: 1662210 - RNA, 19 nt, Homo sapiens
  misc_RNA (1)...(19): siRNA sense strand
caacuaugcccaaggugau

SEQ ID NO: 1662211 - RNA, 19 nt, Homo sapiens
  misc_RNA (1)...(19): siRNA sense strand
gcgagaacuucaagcaacu

SEQ ID NO: 1662212 - RNA, 19 nt, Homo sapiens
  misc_RNA (1)...(19): siRNA sense strand
gcugaacaucugugucauu

SEQ ID NO: 1662213 - RNA, 19 nt, Homo sapiens
  misc_RNA (1)...(19): siRNA sense strand
gcacggcagcauccucuuc

SEQ ID NO: 1662214 - RNA, 19 nt, Homo sapiens
  misc_RNA (1)...(19): siRNA sense strand
cagcguaaccgcacugucu

SEQ ID NO: 1662215 - RNA, 19 nt, Homo sapiens
  misc_RNA (1)...(19): siRNA sense strand
ccgcugaacaucuguguca

SEQ ID NO: 1662216 - RNA, 19 nt, Homo sapiens
  misc_RNA (1)...(19): siRNA sense strand
gcgaccacaugagcuccua

SEQ ID NO: 1662217 - RNA, 19 nt, Homo sapiens
  misc_RNA (1)...(19): siRNA sense strand
gcccuggccacccacuaua

SEQ ID NO: 1662218 - RNA, 19 nt, Homo sapiens
  misc_RNA (1)...(19): siRNA sense strand
gcugcugccuuugccauca

SEQ ID NO: 1662219 - RNA, 19 nt, Homo sapiens
  misc_RNA (1)...(19): siRNA sense strand
cugcucaucuacaacuaug

SEQ ID NO: 1662220 - RNA, 19 nt, Homo sapiens
  misc_RNA (1)...(19): siRNA sense strand
ccaucagcuuccugccuuu

SEQ ID NO: 1662221 - RNA, 19 nt, Homo sapiens
  misc_RNA (1)...(19): siRNA sense strand
guaaccgcacugucugcua

SEQ ID NO: 1662222 - RNA, 19 nt, Homo sapiens
  misc_RNA (1)...(19): siRNA sense strand
cagaaacucacagccaaau

SEQ ID NO: 1662223 - RNA, 19 nt, Homo sapiens
  misc_RNA (1)...(19): siRNA sense strand
cccacuauaugcccuaugg

SEQ ID NO: 1662224 - RNA, 19 nt, Homo sapiens
  misc_RNA (1)...(19): siRNA sense strand
cccauccucuucuacuuca

SEQ ID NO: 1662225 - RNA, 19 nt, Homo sapiens
  misc_RNA (1)...(19): siRNA sense strand
gagcuccuacagaaacuca

SEQ ID NO: 1662226 - RNA, 19 nt, Homo sapiens
  misc_RNA (1)...(19): siRNA sense strand
caugagcuccuacagaaac

SEQ ID NO: 1662227 - RNA, 19 nt, Homo sapiens
  misc_RNA (1)...(19): siRNA sense strand
cacaugagcuccuacagaa

SEQ ID NO: 1662228 - RNA, 19 nt, Homo sapiens
  misc_RNA (1)...(19): siRNA sense strand
ccacaggcauccagcguaa

SEQ ID NO: 1662229 - RNA, 19 nt, Homo sapiens
  misc_RNA (1)...(19): siRNA sense strand
ggugguggcugcugccuuu

SEQ ID NO: 1662230 - RNA, 19 nt, Homo sapiens
  misc_RNA (1)...(19): siRNA sense strand
cugaacaucugugucauua

SEQ ID NO: 1662231 - RNA, 19 nt, Homo sapiens
  misc_RNA (1)...(19): siRNA sense strand
ggugaucacuggcccuuug

SEQ ID NO: 1662232 - RNA, 19 nt, Homo sapiens
  misc_RNA (1)...(19): siRNA sense strand
gaacaucugugucauuacc

SEQ ID NO: 1662233 - RNA, 19 nt, Homo sapiens
  misc_RNA (1)...(19): siRNA sense strand
uaaccgcacugucugcuau

SEQ ID NO: 1662234 - RNA, 19 nt, Homo sapiens
  misc_RNA (1)...(19): siRNA sense strand
gaaacucacagccaaaugg

SEQ ID NO: 1662235 - RNA, 19 nt, Homo sapiens
  misc_RNA (1)...(19): siRNA sense strand
cuacaacuaugcccaaggu

SEQ ID NO: 1662236 - RNA, 19 nt, Homo sapiens
  misc_RNA (1)...(19): siRNA sense strand
ccacaugagcuccuacaga

SEQ ID NO: 1662237 - RNA, 19 nt, Homo sapiens
  misc_RNA (1)...(19): siRNA sense strand
uggcugaccugcuauaugc

SEQ ID NO: 1662238 - RNA, 19 nt, Homo sapiens
  misc_RNA (1)...(19): siRNA sense strand
gcauggcucucacugucau

SEQ ID NO: 1662239 - RNA, 19 nt, Homo sapiens
  misc_RNA (1)...(19): siRNA sense strand
caacuaugcccaaggugau

SEQ ID NO: 1662240 - RNA, 19 nt, Homo sapiens
  misc_RNA (1)...(19): siRNA sense strand
gcgagaacuucaagcaacu

SEQ ID NO: 1662241 - RNA, 19 nt, Homo sapiens
  misc_RNA (1)...(19): siRNA sense strand
gcugaacaucugugucauu

SEQ ID NO: 1662242 - RNA, 19 nt, Homo sapiens
  misc_RNA (1)...(19): siRNA sense strand
gcacggcagcauccucuuc

SEQ ID NO: 1662243 - RNA, 19 nt, Homo sapiens
  misc_RNA (1)...(19): siRNA sense strand
cagcguaaccgcacugucu

SEQ ID NO: 1662244 - RNA, 19 nt, Homo sapiens
  misc_RNA (1)...(19): siRNA sense strand
ccgcugaacaucuguguca

SEQ ID NO: 1662245 - RNA, 19 nt, Homo sapiens
  misc_RNA (1)...(19): siRNA sense strand
gcgaccacaugagcuccua

SEQ ID NO: 1662246 - RNA, 19 nt, Homo sapiens
  misc_RNA (1)...(19): siRNA sense strand
gcccuggccacccacuaua

SEQ ID NO: 1662247 - RNA, 19 nt, Homo sapiens
  misc_RNA (1)...(19): siRNA sense strand
gcugcugccuuugccauca

SEQ ID NO: 1662248 - RNA, 19 nt, Homo sapiens
  misc_RNA (1)...(19): siRNA sense strand
cugcucaucuacaacuaug

SEQ ID NO: 1662249 - RNA, 19 nt, Homo sapiens
  misc_RNA (1)...(19): siRNA sense strand
ccaucagcuuccugccuuu

SEQ ID NO: 1662250 - RNA, 19 nt, Homo sapiens
  misc_RNA (1)...(19): siRNA sense strand
guaaccgcacugucugcua

SEQ ID NO: 1662251 - RNA, 19 nt, Homo sapiens
  misc_RNA (1)...(19): siRNA sense strand
cagaaacucacagccaaau

SEQ ID NO: 1662252 - RNA, 19 nt, Homo sapiens
  misc_RNA (1)...(19): siRNA sense strand
cccacuauaugcccuaugg

SEQ ID NO: 1662253 - RNA, 19 nt, Homo sapiens
  misc_RNA (1)...(19): siRNA sense strand
cccauccucuucuacuuca

SEQ ID NO: 1662254 - RNA, 19 nt, Homo sapiens
  misc_RNA (1)...(19): siRNA sense strand
gagcuccuacagaaacuca

SEQ ID NO: 1662255 - RNA, 19 nt, Homo sapiens
  misc_RNA (1)...(19): siRNA sense strand
caugagcuccuacagaaac

SEQ ID NO: 1662256 - RNA, 19 nt, Homo sapiens
  misc_RNA (1)...(19): siRNA sense strand
cacaugagcuccuacagaa

SEQ ID NO: 1662257 - RNA, 19 nt, Homo sapiens
  misc_RNA (1)...(19): siRNA sense strand
ccacaggcauccagcguaa

SEQ ID NO: 1662258 - RNA, 19 nt, Homo sapiens
  misc_RNA (1)...(19): siRNA sense strand
ggugguggcugcugccuuu

SEQ ID NO: 1662259 - RNA, 19 nt, Homo sapiens
  misc_RNA (1)...(19): siRNA sense strand
cugaacaucugugucauua

SEQ ID NO: 1662260 - RNA, 19 nt, Homo sapiens
  misc_RNA (1)...(19): siRNA sense strand
ggugaucacuggcccuuug

SEQ ID NO: 1662261 - RNA, 19 nt, Homo sapiens
  misc_RNA (1)...(19): siRNA sense strand
gaacaucugugucauuacc

SEQ ID NO: 1662262 - RNA, 19 nt, Homo sapiens
  misc_RNA (1)...(19): siRNA sense strand
uaaccgcacugucugcuau

SEQ ID NO: 1662263 - RNA, 19 nt, Homo sapiens
  misc_RNA (1)...(19): siRNA sense strand
gaaacucacagccaaaugg

SEQ ID NO: 1662264 - RNA, 19 nt, Homo sapiens
  misc_RNA (1)...(19): siRNA sense strand
cuacaacuaugcccaaggu

SEQ ID NO: 1662265 - RNA, 19 nt, Homo sapiens
  misc_RNA (1)...(19): siRNA sense strand
ccacaugagcuccuacaga

SEQ ID NO: 1662266 - RNA, 19 nt, Homo sapiens
  misc_RNA (1)...(19): siRNA sense strand
uggcugaccugcuauaugc

SEQ ID NO: 1662267 - RNA, 19 nt, Homo sapiens
  misc_RNA (1)...(19): siRNA sense strand
gcauggcucucacugucau

SEQ ID NO: 1662268 - RNA, 19 nt, Homo sapiens
  misc_RNA (1)...(19): siRNA sense strand
caacuaugcccaaggugau

SEQ ID NO: 1662269 - RNA, 19 nt, Homo sapiens
  misc_RNA (1)...(19): siRNA sense strand
gcgagaacuucaagcaacu

SEQ ID NO: 1662270 - RNA, 19 nt, Homo sapiens
  misc_RNA (1)...(19): siRNA sense strand
gcugaacaucugugucauu

SEQ ID NO: 1662271 - RNA, 19 nt, Homo sapiens
  misc_RNA (1)...(19): siRNA sense strand
gcacggcagcauccucuuc

SEQ ID NO: 1662272 - RNA, 19 nt, Homo sapiens
  misc_RNA (1)...(19): siRNA sense strand
cagcguaaccgcacugucu

SEQ ID NO: 1662273 - RNA, 19 nt, Homo sapiens
  misc_RNA (1)...(19): siRNA sense strand
ccgcugaacaucuguguca

SEQ ID NO: 1662274 - RNA, 19 nt, Homo sapiens
  misc_RNA (1)...(19): siRNA sense strand
gcgaccacaugagcuccua

SEQ ID NO: 1662275 - RNA, 19 nt, Homo sapiens
  misc_RNA (1)...(19): siRNA sense strand
gcccuggccacccacuaua

SEQ ID NO: 1662276 - RNA, 19 nt, Homo sapiens
  misc_RNA (1)...(19): siRNA sense strand
gcugcugccuuugccauca

SEQ ID NO: 1662277 - RNA, 19 nt, Homo sapiens
  misc_RNA (1)...(19): siRNA sense strand
cugcucaucuacaacuaug

SEQ ID NO: 1662278 - RNA, 19 nt, Homo sapiens
  misc_RNA (1)...(19): siRNA sense strand
ccaucagcuuccugccuuu

SEQ ID NO: 1662279 - RNA, 19 nt, Homo sapiens
  misc_RNA (1)...(19): siRNA sense strand
guaaccgcacugucugcua

SEQ ID NO: 1662280 - RNA, 19 nt, Homo sapiens
  misc_RNA (1)...(19): siRNA sense strand
cagaaacucacagccaaau

SEQ ID NO: 1662281 - RNA, 19 nt, Homo sapiens
  misc_RNA (1)...(19): siRNA sense strand
cccacuauaugcccuaugg

SEQ ID NO: 1662282 - RNA, 19 nt, Homo sapiens
  misc_RNA (1)...(19): siRNA sense strand
cccauccucuucuacuuca

SEQ ID NO: 1662283 - RNA, 19 nt, Homo sapiens
  misc_RNA (1)...(19): siRNA sense strand
gagcuccuacagaaacuca

SEQ ID NO: 1662284 - RNA, 19 nt, Homo sapiens
  misc_RNA (1)...(19): siRNA sense strand
caugagcuccuacagaaac

SEQ ID NO: 1662285 - RNA, 19 nt, Homo sapiens
  misc_RNA (1)...(19): siRNA sense strand
cacaugagcuccuacagaa

SEQ ID NO: 1662286 - RNA, 19 nt, Homo sapiens
  misc_RNA (1)...(19): siRNA sense strand
ccacaggcauccagcguaa

SEQ ID NO: 1662287 - RNA, 19 nt, Homo sapiens
  misc_RNA (1)...(19): siRNA sense strand
ggugguggcugcugccuuu

SEQ ID NO: 1662288 - RNA, 19 nt, Homo sapiens
  misc_RNA (1)...(19): siRNA sense strand
cugaacaucugugucauua

SEQ ID NO: 1662289 - RNA, 19 nt, Homo sapiens
  misc_RNA (1)...(19): siRNA sense strand
ggugaucacuggcccuuug

SEQ ID NO: 1662290 - RNA, 19 nt, Homo sapiens
  misc_RNA (1)...(19): siRNA sense strand
gaacaucugugucauuacc

SEQ ID NO: 1662291 - RNA, 19 nt, Homo sapiens
  misc_RNA (1)...(19): siRNA sense strand
uaaccgcacugucugcuau

SEQ ID NO: 1662292 - RNA, 19 nt, Homo sapiens
  misc_RNA (1)...(19): siRNA sense strand
gaaacucacagccaaaugg

SEQ ID NO: 1662293 - RNA, 19 nt, Homo sapiens
  misc_RNA (1)...(19): siRNA sense strand
cuacaacuaugcccaaggu

SEQ ID NO: 1662294 - RNA, 19 nt, Homo sapiens
  misc_RNA (1)...(19): siRNA sense strand
ccacaugagcuccuacaga

SEQ ID NO: 1662295 - RNA, 19 nt, Homo sapiens
  misc_RNA (1)...(19): siRNA sense strand
uggcugaccugcuauaugc

SEQ ID NO: 1662296 - RNA, 19 nt, Homo sapiens
  misc_RNA (1)...(19): siRNA sense strand
gcauggcucucacugucau

SEQ ID NO: 1662297 - RNA, 19 nt, Homo sapiens
  misc_RNA (1)...(19): siRNA sense strand
caacuaugcccaaggugau

SEQ ID NO: 1662298 - RNA, 19 nt, Homo sapiens
  misc_RNA (1)...(19): siRNA sense strand
gcgagaacuucaagcaacu

SEQ ID NO: 1662299 - RNA, 19 nt, Homo sapiens
  misc_RNA (1)...(19): siRNA sense strand
gcugaacaucugugucauu

SEQ ID NO: 1662300 - RNA, 19 nt, Homo sapiens
  misc_RNA (1)...(19): siRNA sense strand
gcacggcagcauccucuuc

SEQ ID NO: 1662301 - RNA, 19 nt, Homo sapiens
  misc_RNA (1)...(19): siRNA sense strand
cagcguaaccgcacugucu

SEQ ID NO: 1662302 - RNA, 19 nt, Homo sapiens
  misc_RNA (1)...(19): siRNA sense strand
ccgcugaacaucuguguca

SEQ ID NO: 1662303 - RNA, 19 nt, Homo sapiens
  misc_RNA (1)...(19): siRNA sense strand
gcgaccacaugagcuccua

SEQ ID NO: 1662304 - RNA, 19 nt, Homo sapiens
  misc_RNA (1)...(19): siRNA sense strand
gcccuggccacccacuaua

SEQ ID NO: 1662305 - RNA, 19 nt, Homo sapiens
  misc_RNA (1)...(19): siRNA sense strand
gcugcugccuuugccauca

SEQ ID NO: 1662306 - RNA, 19 nt, Homo sapiens
  misc_RNA (1)...(19): siRNA sense strand
cugcucaucuacaacuaug

SEQ ID NO: 1662307 - RNA, 19 nt, Homo sapiens
  misc_RNA (1)...(19): siRNA sense strand
ccaucagcuuccugccuuu

SEQ ID NO: 1662308 - RNA, 19 nt, Homo sapiens
  misc_RNA (1)...(19): siRNA sense strand
guaaccgcacugucugcua

SEQ ID NO: 1662309 - RNA, 19 nt, Homo sapiens
  misc_RNA (1)...(19): siRNA sense strand
cagaaacucacagccaaau

SEQ ID NO: 1662310 - RNA, 19 nt, Homo sapiens
  misc_RNA (1)...(19): siRNA sense strand
cccacuauaugcccuaugg

SEQ ID NO: 1662311 - RNA, 19 nt, Homo sapiens
  misc_RNA (1)...(19): siRNA sense strand
cccauccucuucuacuuca

SEQ ID NO: 1662312 - RNA, 19 nt, Homo sapiens
  misc_RNA (1)...(19): siRNA sense strand
gagcuccuacagaaacuca

SEQ ID NO: 1662313 - RNA, 19 nt, Homo sapiens
  misc_RNA (1)...(19): siRNA sense strand
caugagcuccuacagaaac

SEQ ID NO: 1662314 - RNA, 19 nt, Homo sapiens
  misc_RNA (1)...(19): siRNA sense strand
cacaugagcuccuacagaa

SEQ ID NO: 1662315 - RNA, 19 nt, Homo sapiens
  misc_RNA (1)...(19): siRNA sense strand
ccacaggcauccagcguaa

SEQ ID NO: 1662316 - RNA, 19 nt, Homo sapiens
  misc_RNA (1)...(19): siRNA sense strand
ggugguggcugcugccuuu

SEQ ID NO: 1662317 - RNA, 19 nt, Homo sapiens
  misc_RNA (1)...(19): siRNA sense strand
cugaacaucugugucauua

SEQ ID NO: 1662318 - RNA, 19 nt, Homo sapiens
  misc_RNA (1)...(19): siRNA sense strand
ggugaucacuggcccuuug

SEQ ID NO: 1662319 - RNA, 19 nt, Homo sapiens
  misc_RNA (1)...(19): siRNA sense strand
gaacaucugugucauuacc

SEQ ID NO: 1662320 - RNA, 19 nt, Homo sapiens
  misc_RNA (1)...(19): siRNA sense strand
uaaccgcacugucugcuau

SEQ ID NO: 1662321 - RNA, 19 nt, Homo sapiens
  misc_RNA (1)...(19): siRNA sense strand
gaaacucacagccaaaugg

SEQ ID NO: 1662322 - RNA, 19 nt, Homo sapiens
  misc_RNA (1)...(19): siRNA sense strand
cuacaacuaugcccaaggu

SEQ ID NO: 1662323 - RNA, 19 nt, Homo sapiens
  misc_RNA (1)...(19): siRNA sense strand
ccacaugagcuccuacaga

SEQ ID NO: 1662324 - RNA, 19 nt, Homo sapiens
  misc_RNA (1)...(19): siRNA sense strand
uggcugaccugcuauaugc

SEQ ID NO: 1662325 - RNA, 19 nt, Homo sapiens
  misc_RNA (1)...(19): siRNA sense strand
gcauggcucucacugucau

SEQ ID NO: 1662326 - RNA, 19 nt, Homo sapiens
  misc_RNA (1)...(19): siRNA sense strand
caacuaugcccaaggugau

SEQ ID NO: 1662327 - RNA, 19 nt, Homo sapiens
  misc_RNA (1)...(19): siRNA sense strand
gcgagaacuucaagcaacu

SEQ ID NO: 1662328 - RNA, 19 nt, Homo sapiens
  misc_RNA (1)...(19): siRNA sense strand
gcugaacaucugugucauu

SEQ ID NO: 1662329 - RNA, 19 nt, Homo sapiens
  misc_RNA (1)...(19): siRNA sense strand
gcacggcagcauccucuuc

SEQ ID NO: 1662330 - RNA, 19 nt, Homo sapiens
  misc_RNA (1)...(19): siRNA sense strand
cagcguaaccgcacugucu

SEQ ID NO: 1662331 - RNA, 19 nt, Homo sapiens
  misc_RNA (1)...(19): siRNA sense strand
ccgcugaacaucuguguca

SEQ ID NO: 1662332 - RNA, 19 nt, Homo sapiens
  misc_RNA (1)...(19): siRNA sense strand
gcgaccacaugagcuccua

SEQ ID NO: 1662333 - RNA, 19 nt, Homo sapiens
  misc_RNA (1)...(19): siRNA sense strand
gcccuggccacccacuaua

SEQ ID NO: 1662334 - RNA, 19 nt, Homo sapiens
  misc_RNA (1)...(19): siRNA sense strand
gcugcugccuuugccauca

SEQ ID NO: 1662335 - RNA, 19 nt, Homo sapiens
  misc_RNA (1)...(19): siRNA sense strand
cugcucaucuacaacuaug

SEQ ID NO: 1662336 - RNA, 19 nt, Homo sapiens
  misc_RNA (1)...(19): siRNA sense strand
ccaucagcuuccugccuuu

SEQ ID NO: 1662337 - RNA, 19 nt, Homo sapiens
  misc_RNA (1)...(19): siRNA sense strand
guaaccgcacugucugcua

SEQ ID NO: 1662338 - RNA, 19 nt, Homo sapiens
  misc_RNA (1)...(19): siRNA sense strand
cagaaacucacagccaaau

SEQ ID NO: 1662339 - RNA, 19 nt, Homo sapiens
  misc_RNA (1)...(19): siRNA sense strand
cccacuauaugcccuaugg

SEQ ID NO: 1662340 - RNA, 19 nt, Homo sapiens
  misc_RNA (1)...(19): siRNA sense strand
cccauccucuucuacuuca

SEQ ID NO: 1662341 - RNA, 19 nt, Homo sapiens
  misc_RNA (1)...(19): siRNA sense strand
gagcuccuacagaaacuca

SEQ ID NO: 1662342 - RNA, 19 nt, Homo sapiens
  misc_RNA (1)...(19): siRNA sense strand
caugagcuccuacagaaac

SEQ ID NO: 1662343 - RNA, 19 nt, Homo sapiens
  misc_RNA (1)...(19): siRNA sense strand
cacaugagcuccuacagaa

SEQ ID NO: 1662344 - RNA, 19 nt, Homo sapiens
  misc_RNA (1)...(19): siRNA sense strand
ccacaggcauccagcguaa

SEQ ID NO: 1662345 - RNA, 19 nt, Homo sapiens
  misc_RNA (1)...(19): siRNA sense strand
ggugguggcugcugccuuu

SEQ ID NO: 1662346 - RNA, 19 nt, Homo sapiens
  misc_RNA (1)...(19): siRNA sense strand
cugaacaucugugucauua

SEQ ID NO: 1662347 - RNA, 19 nt, Homo sapiens
  misc_RNA (1)...(19): siRNA sense strand
ggugaucacuggcccuuug

SEQ ID NO: 1662348 - RNA, 19 nt, Homo sapiens
  misc_RNA (1)...(19): siRNA sense strand
gaacaucugugucauuacc

SEQ ID NO: 1662349 - RNA, 19 nt, Homo sapiens
  misc_RNA (1)...(19): siRNA sense strand
uaaccgcacugucugcuau

SEQ ID NO: 1662350 - RNA, 19 nt, Homo sapiens
  misc_RNA (1)...(19): siRNA sense strand
gaaacucacagccaaaugg

SEQ ID NO: 1662351 - RNA, 19 nt, Homo sapiens
  misc_RNA (1)...(19): siRNA sense strand
cuacaacuaugcccaaggu

SEQ ID NO: 1662352 - RNA, 19 nt, Homo sapiens
  misc_RNA (1)...(19): siRNA sense strand
ccacaugagcuccuacaga

SEQ ID NO: 1662353 - RNA, 19 nt, Homo sapiens
  misc_RNA (1)...(19): siRNA sense strand
uggcugaccugcuauaugc

SEQ ID NO: 1662354 - RNA, 19 nt, Homo sapiens
  misc_RNA (1)...(19): siRNA sense strand
gcauggcucucacugucau

SEQ ID NO: 1662355 - RNA, 19 nt, Homo sapiens
  misc_RNA (1)...(19): siRNA sense strand
caacuaugcccaaggugau

SEQ ID NO: 1662356 - RNA, 19 nt, Homo sapiens
  misc_RNA (1)...(19): siRNA sense strand
gcgagaacuucaagcaacu

SEQ ID NO: 1662357 - RNA, 19 nt, Homo sapiens
  misc_RNA (1)...(19): siRNA sense strand
gcugaacaucugugucauu

SEQ ID NO: 1662358 - RNA, 19 nt, Homo sapiens
  misc_RNA (1)...(19): siRNA sense strand
gcacggcagcauccucuuc

SEQ ID NO: 1662359 - RNA, 19 nt, Homo sapiens
  misc_RNA (1)...(19): siRNA sense strand
cagcguaaccgcacugucu

SEQ ID NO: 1662360 - RNA, 19 nt, Homo sapiens
  misc_RNA (1)...(19): siRNA sense strand
ccgcugaacaucuguguca

SEQ ID NO: 1662361 - RNA, 19 nt, Homo sapiens
  misc_RNA (1)...(19): siRNA sense strand
gcgaccacaugagcuccua

SEQ ID NO: 1662362 - RNA, 19 nt, Homo sapiens
  misc_RNA (1)...(19): siRNA sense strand
gcccuggccacccacuaua

SEQ ID NO: 1662363 - RNA, 19 nt, Homo sapiens
  misc_RNA (1)...(19): siRNA sense strand
gcugcugccuuugccauca

SEQ ID NO: 1662364 - RNA, 19 nt, Homo sapiens
  misc_RNA (1)...(19): siRNA sense strand
cugcucaucuacaacuaug

SEQ ID NO: 1662365 - RNA, 19 nt, Homo sapiens
  misc_RNA (1)...(19): siRNA sense strand
ccaucagcuuccugccuuu

SEQ ID NO: 1662366 - RNA, 19 nt, Homo sapiens
  misc_RNA (1)...(19): siRNA sense strand
guaaccgcacugucugcua

SEQ ID NO: 1662367 - RNA, 19 nt, Homo sapiens
  misc_RNA (1)...(19): siRNA sense strand
cagaaacucacagccaaau

SEQ ID NO: 1662368 - RNA, 19 nt, Homo sapiens
  misc_RNA (1)...(19): siRNA sense strand
cccacuauaugcccuaugg

SEQ ID NO: 1662369 - RNA, 19 nt, Homo sapiens
  misc_RNA (1)...(19): siRNA sense strand
cccauccucuucuacuuca

SEQ ID NO: 1662370 - RNA, 19 nt, Homo sapiens
  misc_RNA (1)...(19): siRNA sense strand
gagcuccuacagaaacuca

SEQ ID NO: 1662371 - RNA, 19 nt, Homo sapiens
  misc_RNA (1)...(19): siRNA sense strand
caugagcuccuacagaaac

SEQ ID NO: 1662372 - RNA, 19 nt, Homo sapiens
  misc_RNA (1)...(19): siRNA sense strand
cacaugagcuccuacagaa

SEQ ID NO: 1662373 - RNA, 19 nt, Homo sapiens
  misc_RNA (1)...(19): siRNA sense strand
ccacaggcauccagcguaa

SEQ ID NO: 1662374 - RNA, 19 nt, Homo sapiens
  misc_RNA (1)...(19): siRNA sense strand
ggugguggcugcugccuuu

SEQ ID NO: 1662375 - RNA, 19 nt, Homo sapiens
  misc_RNA (1)...(19): siRNA sense strand
cugaacaucugugucauua

SEQ ID NO: 1662376 - RNA, 19 nt, Homo sapiens
  misc_RNA (1)...(19): siRNA sense strand
ggugaucacuggcccuuug

SEQ ID NO: 1662377 - RNA, 19 nt, Homo sapiens
  misc_RNA (1)...(19): siRNA sense strand
gaacaucugugucauuacc

SEQ ID NO: 1662378 - RNA, 19 nt, Homo sapiens
  misc_RNA (1)...(19): siRNA sense strand
uaaccgcacugucugcuau

SEQ ID NO: 1662379 - RNA, 19 nt, Homo sapiens
  misc_RNA (1)...(19): siRNA sense strand
gaaacucacagccaaaugg

SEQ ID NO: 1662380 - RNA, 19 nt, Homo sapiens
  misc_RNA (1)...(19): siRNA sense strand
cuacaacuaugcccaaggu

SEQ ID NO: 1662381 - RNA, 19 nt, Homo sapiens
  misc_RNA (1)...(19): siRNA sense strand
ccacaugagcuccuacaga

SEQ ID NO: 1662382 - RNA, 19 nt, Homo sapiens
  misc_RNA (1)...(19): siRNA sense strand
uggcugaccugcuauaugc

SEQ ID NO: 1662383 - RNA, 19 nt, Homo sapiens
  misc_RNA (1)...(19): siRNA sense strand
gcauggcucucacugucau

SEQ ID NO: 1662384 - RNA, 19 nt, Homo sapiens
  misc_RNA (1)...(19): siRNA sense strand
caacuaugcccaaggugau

SEQ ID NO: 1662385 - RNA, 19 nt, Homo sapiens
  misc_RNA (1)...(19): siRNA sense strand
gcgagaacuucaagcaacu

SEQ ID NO: 1662386 - RNA, 19 nt, Homo sapiens
  misc_RNA (1)...(19): siRNA sense strand
gcugaacaucugugucauu

SEQ ID NO: 1662387 - RNA, 19 nt, Homo sapiens
  misc_RNA (1)...(19): siRNA sense strand
gcacggcagcauccucuuc

SEQ ID NO: 1662388 - RNA, 19 nt, Homo sapiens
  misc_RNA (1)...(19): siRNA sense strand
cagcguaaccgcacugucu

SEQ ID NO: 1662389 - RNA, 19 nt, Homo sapiens
  misc_RNA (1)...(19): siRNA sense strand
ccgcugaacaucuguguca

SEQ ID NO: 1662390 - RNA, 19 nt, Homo sapiens
  misc_RNA (1)...(19): siRNA sense strand
gcgaccacaugagcuccua

SEQ ID NO: 1662391 - RNA, 19 nt, Homo sapiens
  misc_RNA (1)...(19): siRNA sense strand
gcccuggccacccacuaua

SEQ ID NO: 1662392 - RNA, 19 nt, Homo sapiens
  misc_RNA (1)...(19): siRNA sense strand
gcugcugccuuugccauca

SEQ ID NO: 1662393 - RNA, 19 nt, Homo sapiens
  misc_RNA (1)...(19): siRNA sense strand
cugcucaucuacaacuaug

SEQ ID NO: 1662394 - RNA, 19 nt, Homo sapiens
  misc_RNA (1)...(19): siRNA sense strand
ccaucagcuuccugccuuu

SEQ ID NO: 1662395 - RNA, 19 nt, Homo sapiens
  misc_RNA (1)...(19): siRNA sense strand
guaaccgcacugucugcua

SEQ ID NO: 1662396 - RNA, 19 nt, Homo sapiens
  misc_RNA (1)...(19): siRNA sense strand
cagaaacucacagccaaau

SEQ ID NO: 1662397 - RNA, 19 nt, Homo sapiens
  misc_RNA (1)...(19): siRNA sense strand
cccacuauaugcccuaugg

SEQ ID NO: 1662398 - RNA, 19 nt, Homo sapiens
  misc_RNA (1)...(19): siRNA sense strand
cccauccucuucuacuuca

SEQ ID NO: 1662399 - RNA, 19 nt, Homo sapiens
  misc_RNA (1)...(19): siRNA sense strand
gagcuccuacagaaacuca

SEQ ID NO: 1662400 - RNA, 19 nt, Homo sapiens
  misc_RNA (1)...(19): siRNA sense strand
caugagcuccuacagaaac

SEQ ID NO: 1662401 - RNA, 19 nt, Homo sapiens
  misc_RNA (1)...(19): siRNA sense strand
cacaugagcuccuacagaa

SEQ ID NO: 1662402 - RNA, 19 nt, Homo sapiens
  misc_RNA (1)...(19): siRNA sense strand
ccacaggcauccagcguaa

SEQ ID NO: 1662403 - RNA, 19 nt, Homo sapiens
  misc_RNA (1)...(19): siRNA sense strand
ggugguggcugcugccuuu

SEQ ID NO: 1662404 - RNA, 19 nt, Homo sapiens
  misc_RNA (1)...(19): siRNA sense strand
cugaacaucugugucauua

SEQ ID NO: 1662405 - RNA, 19 nt, Homo sapiens
  misc_RNA (1)...(19): siRNA sense strand
ggugaucacuggcccuuug

SEQ ID NO: 1662406 - RNA, 19 nt, Homo sapiens
  misc_RNA (1)...(19): siRNA sense strand
gaacaucugugucauuacc

SEQ ID NO: 1662407 - RNA, 19 nt, Homo sapiens
  misc_RNA (1)...(19): siRNA sense strand
uaaccgcacugucugcuau

SEQ ID NO: 1662408 - RNA, 19 nt, Homo sapiens
  misc_RNA (1)...(19): siRNA sense strand
gaaacucacagccaaaugg

SEQ ID NO: 1662409 - RNA, 19 nt, Homo sapiens
  misc_RNA (1)...(19): siRNA sense strand
cuacaacuaugcccaaggu

SEQ ID NO: 1662410 - RNA, 19 nt, Homo sapiens
  misc_RNA (1)...(19): siRNA sense strand
ccacaugagcuccuacaga

SEQ ID NO: 1662411 - RNA, 19 nt, Homo sapiens
  misc_RNA (1)...(19): siRNA sense strand
uggcugaccugcuauaugc

SEQ ID NO: 1662412 - RNA, 19 nt, Homo sapiens
  misc_RNA (1)...(19): siRNA sense strand
gcauggcucucacugucau

SEQ ID NO: 1662413 - RNA, 19 nt, Homo sapiens
  misc_RNA (1)...(19): siRNA sense strand
caacuaugcccaaggugau

SEQ ID NO: 1662414 - RNA, 19 nt, Homo sapiens
  misc_RNA (1)...(19): siRNA sense strand
gcgagaacuucaagcaacu

SEQ ID NO: 1662415 - RNA, 19 nt, Homo sapiens
  misc_RNA (1)...(19): siRNA sense strand
gcugaacaucugugucauu

SEQ ID NO: 1662416 - RNA, 19 nt, Homo sapiens
  misc_RNA (1)...(19): siRNA sense strand
gcacggcagcauccucuuc

SEQ ID NO: 1662417 - RNA, 19 nt, Homo sapiens
  misc_RNA (1)...(19): siRNA sense strand
cagcguaaccgcacugucu

SEQ ID NO: 1662418 - RNA, 19 nt, Homo sapiens
  misc_RNA (1)...(19): siRNA sense strand
ccgcugaacaucuguguca

SEQ ID NO: 1662419 - RNA, 19 nt, Homo sapiens
  misc_RNA (1)...(19): siRNA sense strand
gcgaccacaugagcuccua

SEQ ID NO: 1662420 - RNA, 19 nt, Homo sapiens
  misc_RNA (1)...(19): siRNA sense strand
gcccuggccacccacuaua

SEQ ID NO: 1662421 - RNA, 19 nt, Homo sapiens
  misc_RNA (1)...(19): siRNA sense strand
gcugcugccuuugccauca

SEQ ID NO: 1662422 - RNA, 19 nt, Homo sapiens
  misc_RNA (1)...(19): siRNA sense strand
cugcucaucuacaacuaug

SEQ ID NO: 1662423 - RNA, 19 nt, Homo sapiens
  misc_RNA (1)...(19): siRNA sense strand
ccaucagcuuccugccuuu

SEQ ID NO: 1662424 - RNA, 19 nt, Homo sapiens
  misc_RNA (1)...(19): siRNA sense strand
guaaccgcacugucugcua

SEQ ID NO: 1662425 - RNA, 19 nt, Homo sapiens
  misc_RNA (1)...(19): siRNA sense strand
cagaaacucacagccaaau

SEQ ID NO: 1662426 - RNA, 19 nt, Homo sapiens
  misc_RNA (1)...(19): siRNA sense strand
cccacuauaugcccuaugg

SEQ ID NO: 1662427 - RNA, 19 nt, Homo sapiens
  misc_RNA (1)...(19): siRNA sense strand
cccauccucuucuacuuca

SEQ ID NO: 1662428 - RNA, 19 nt, Homo sapiens
  misc_RNA (1)...(19): siRNA sense strand
gagcuccuacagaaacuca

SEQ ID NO: 1662429 - RNA, 19 nt, Homo sapiens
  misc_RNA (1)...(19): siRNA sense strand
caugagcuccuacagaaac

SEQ ID NO: 1662430 - RNA, 19 nt, Homo sapiens
  misc_RNA (1)...(19): siRNA sense strand
ggaagggaauggaaggauu

SEQ ID NO: 1662431 - RNA, 19 nt, Homo sapiens
  misc_RNA (1)...(19): siRNA sense strand
gcacucugcucaacaccua

SEQ ID NO: 1662432 - RNA, 19 nt, Homo sapiens
  misc_RNA (1)...(19): siRNA sense strand
gacaagcgacgucuuagua

SEQ ID NO: 1662433 - RNA, 19 nt, Homo sapiens
  misc_RNA (1)...(19): siRNA sense strand
gggaugagcaggcugauuu

SEQ ID NO: 1662434 - RNA, 19 nt, Homo sapiens
  misc_RNA (1)...(19): siRNA sense strand
gcacugucccuccuccuua

SEQ ID NO: 1662435 - RNA, 19 nt, Homo sapiens
  misc_RNA (1)...(19): siRNA sense strand
ucacuguccucuucauauu

SEQ ID NO: 1662436 - RNA, 19 nt, Homo sapiens
  misc_RNA (1)...(19): siRNA sense strand
aauauggccucccaacaaa

SEQ ID NO: 1662437 - RNA, 19 nt, Homo sapiens
  misc_RNA (1)...(19): siRNA sense strand
gaagaucagacagcgauuu

SEQ ID NO: 1662438 - RNA, 19 nt, Homo sapiens
  misc_RNA (1)...(19): siRNA sense strand
gaagggaauggaaggauug

SEQ ID NO: 1662439 - RNA, 19 nt, Homo sapiens
  misc_RNA (1)...(19): siRNA sense strand
uucaaucccuucagcaaua

SEQ ID NO: 1662440 - RNA, 19 nt, Homo sapiens
  misc_RNA (1)...(19): siRNA sense strand
caccugggcuggaagaaga

SEQ ID NO: 1662441 - RNA, 19 nt, Homo sapiens
  misc_RNA (1)...(19): siRNA sense strand
uaauauggccucccaacaa

SEQ ID NO: 1662442 - RNA, 19 nt, Homo sapiens
  misc_RNA (1)...(19): siRNA sense strand
gcugauuuccggugugaua

SEQ ID NO: 1662443 - RNA, 19 nt, Homo sapiens
  misc_RNA (1)...(19): siRNA sense strand
gcaaggcaaggucagauga

SEQ ID NO: 1662444 - RNA, 19 nt, Homo sapiens
  misc_RNA (1)...(19): siRNA sense strand
ggucaacuguuacguaucc

SEQ ID NO: 1662445 - RNA, 19 nt, Homo sapiens
  misc_RNA (1)...(19): siRNA sense strand
ucaaucccuucagcaauaa

SEQ ID NO: 1662446 - RNA, 19 nt, Homo sapiens
  misc_RNA (1)...(19): siRNA sense strand
ucagaugaccuaucagugu

SEQ ID NO: 1662447 - RNA, 19 nt, Homo sapiens
  misc_RNA (1)...(19): siRNA sense strand
ggaggugggcuucauugug

SEQ ID NO: 1662448 - RNA, 19 nt, Homo sapiens
  misc_RNA (1)...(19): siRNA sense strand
ccggucaacuguuacguau

SEQ ID NO: 1662449 - RNA, 19 nt, Homo sapiens
  misc_RNA (1)...(19): siRNA sense strand
ggcagcacauggcuaagug

SEQ ID NO: 1662450 - RNA, 19 nt, Homo sapiens
  misc_RNA (1)...(19): siRNA sense strand
gcucacuguccucuucaua

SEQ ID NO: 1662451 - RNA, 19 nt, Homo sapiens
  misc_RNA (1)...(19): siRNA sense strand
gcuacugggugcugcagau

SEQ ID NO: 1662452 - RNA, 19 nt, Homo sapiens
  misc_RNA (1)...(19): siRNA sense strand
cccacccggucaacuguua

SEQ ID NO: 1662453 - RNA, 19 nt, Homo sapiens
  misc_RNA (1)...(19): siRNA sense strand
gcaggagaagcgcaagcua

SEQ ID NO: 1662454 - RNA, 19 nt, Homo sapiens
  misc_RNA (1)...(19): siRNA sense strand
acaagcgacgucuuaguaa

SEQ ID NO: 1662455 - RNA, 19 nt, Homo sapiens
  misc_RNA (1)...(19): siRNA sense strand
gcagagaaggcagaacugu

SEQ ID NO: 1662456 - RNA, 19 nt, Homo sapiens
  misc_RNA (1)...(19): siRNA sense strand
ugucuucauugucuuuaug

SEQ ID NO: 1662457 - RNA, 19 nt, Homo sapiens
  misc_RNA (1)...(19): siRNA sense strand
agugacaagcgacgucuua

SEQ ID NO: 1662458 - RNA, 19 nt, Homo sapiens
  misc_RNA (1)...(19): siRNA sense strand
guacuucaucuacggaauc

SEQ ID NO: 1662459 - RNA, 19 nt, Homo sapiens
  misc_RNA (1)...(19): siRNA sense strand
gcuggaagaagaucagaca

SEQ ID NO: 1662460 - RNA, 19 nt, Homo sapiens
  misc_RNA (1)...(19): siRNA sense strand
caagcacucgaccguggua

SEQ ID NO: 1662461 - RNA, 19 nt, Homo sapiens
  misc_RNA (1)...(19): siRNA sense strand
gcagcaaggcaaggucaga

SEQ ID NO: 1662462 - RNA, 19 nt, Homo sapiens
  misc_RNA (1)...(19): siRNA sense strand
uggaggaaguacacaagca

SEQ ID NO: 1662463 - RNA, 19 nt, Homo sapiens
  misc_RNA (1)...(19): siRNA sense strand
gcuaagugccagcuuucug

SEQ ID NO: 1662464 - RNA, 19 nt, Homo sapiens
  misc_RNA (1)...(19): siRNA sense strand
gauuuccggugugauacga

SEQ ID NO: 1662465 - RNA, 19 nt, Homo sapiens
  misc_RNA (1)...(19): siRNA sense strand
agccugaggugcccaaugg

SEQ ID NO: 1662466 - RNA, 19 nt, Homo sapiens
  misc_RNA (1)...(19): siRNA sense strand
aagaucagacagcgauuug

SEQ ID NO: 1662467 - RNA, 19 nt, Homo sapiens
  misc_RNA (1)...(19): siRNA sense strand
ggaugagcaggcugauuuc

SEQ ID NO: 1662468 - RNA, 19 nt, Homo sapiens
  misc_RNA (1)...(19): siRNA sense strand
gccacgccaugcacacugu

SEQ ID NO: 1662469 - RNA, 19 nt, Homo sapiens
  misc_RNA (1)...(19): siRNA sense strand
ggaagguuucauccagguu

SEQ ID NO: 1662470 - RNA, 19 nt, Homo sapiens
  misc_RNA (1)...(19): siRNA sense strand
ggucaccgagcaaguacga

SEQ ID NO: 1662471 - RNA, 19 nt, Homo sapiens
  misc_RNA (1)...(19): siRNA sense strand
ggaagggaauggaaggauu

SEQ ID NO: 1662472 - RNA, 19 nt, Homo sapiens
  misc_RNA (1)...(19): siRNA sense strand
gcacucugcucaacaccua

SEQ ID NO: 1662473 - RNA, 19 nt, Homo sapiens
  misc_RNA (1)...(19): siRNA sense strand
gacaagcgacgucuuagua

SEQ ID NO: 1662474 - RNA, 19 nt, Homo sapiens
  misc_RNA (1)...(19): siRNA sense strand
gggaugagcaggcugauuu

SEQ ID NO: 1662475 - RNA, 19 nt, Homo sapiens
  misc_RNA (1)...(19): siRNA sense strand
gcacugucccuccuccuua

SEQ ID NO: 1662476 - RNA, 19 nt, Homo sapiens
  misc_RNA (1)...(19): siRNA sense strand
ucacuguccucuucauauu

SEQ ID NO: 1662477 - RNA, 19 nt, Homo sapiens
  misc_RNA (1)...(19): siRNA sense strand
aauauggccucccaacaaa

SEQ ID NO: 1662478 - RNA, 19 nt, Homo sapiens
  misc_RNA (1)...(19): siRNA sense strand
gaagaucagacagcgauuu

SEQ ID NO: 1662479 - RNA, 19 nt, Homo sapiens
  misc_RNA (1)...(19): siRNA sense strand
gaagggaauggaaggauug

SEQ ID NO: 1662480 - RNA, 19 nt, Homo sapiens
  misc_RNA (1)...(19): siRNA sense strand
uucaaucccuucagcaaua

SEQ ID NO: 1662481 - RNA, 19 nt, Homo sapiens
  misc_RNA (1)...(19): siRNA sense strand
caccugggcuggaagaaga

SEQ ID NO: 1662482 - RNA, 19 nt, Homo sapiens
  misc_RNA (1)...(19): siRNA sense strand
uaauauggccucccaacaa

SEQ ID NO: 1662483 - RNA, 19 nt, Homo sapiens
  misc_RNA (1)...(19): siRNA sense strand
gcugauuuccggugugaua

SEQ ID NO: 1662484 - RNA, 19 nt, Homo sapiens
  misc_RNA (1)...(19): siRNA sense strand
gcaaggcaaggucagauga

SEQ ID NO: 1662485 - RNA, 19 nt, Homo sapiens
  misc_RNA (1)...(19): siRNA sense strand
ggucaacuguuacguaucc

SEQ ID NO: 1662486 - RNA, 19 nt, Homo sapiens
  misc_RNA (1)...(19): siRNA sense strand
ucaaucccuucagcaauaa

SEQ ID NO: 1662487 - RNA, 19 nt, Homo sapiens
  misc_RNA (1)...(19): siRNA sense strand
ucagaugaccuaucagugu

SEQ ID NO: 1662488 - RNA, 19 nt, Homo sapiens
  misc_RNA (1)...(19): siRNA sense strand
ggaggugggcuucauugug

SEQ ID NO: 1662489 - RNA, 19 nt, Homo sapiens
  misc_RNA (1)...(19): siRNA sense strand
ccggucaacuguuacguau

SEQ ID NO: 1662490 - RNA, 19 nt, Homo sapiens
  misc_RNA (1)...(19): siRNA sense strand
ggcagcacauggcuaagug

SEQ ID NO: 1662491 - RNA, 19 nt, Homo sapiens
  misc_RNA (1)...(19): siRNA sense strand
gcucacuguccucuucaua

SEQ ID NO: 1662492 - RNA, 19 nt, Homo sapiens
  misc_RNA (1)...(19): siRNA sense strand
gcuacugggugcugcagau

SEQ ID NO: 1662493 - RNA, 19 nt, Homo sapiens
  misc_RNA (1)...(19): siRNA sense strand
cccacccggucaacuguua

SEQ ID NO: 1662494 - RNA, 19 nt, Homo sapiens
  misc_RNA (1)...(19): siRNA sense strand
gcaggagaagcgcaagcua

SEQ ID NO: 1662495 - RNA, 19 nt, Homo sapiens
  misc_RNA (1)...(19): siRNA sense strand
acaagcgacgucuuaguaa

SEQ ID NO: 1662496 - RNA, 19 nt, Homo sapiens
  misc_RNA (1)...(19): siRNA sense strand
gcagagaaggcagaacugu

SEQ ID NO: 1662497 - RNA, 19 nt, Homo sapiens
  misc_RNA (1)...(19): siRNA sense strand
ugucuucauugucuuuaug

SEQ ID NO: 1662498 - RNA, 19 nt, Homo sapiens
  misc_RNA (1)...(19): siRNA sense strand
agugacaagcgacgucuua

SEQ ID NO: 1662499 - RNA, 19 nt, Homo sapiens
  misc_RNA (1)...(19): siRNA sense strand
guacuucaucuacggaauc

SEQ ID NO: 1662500 - RNA, 19 nt, Homo sapiens
  misc_RNA (1)...(19): siRNA sense strand
gcuggaagaagaucagaca

SEQ ID NO: 1662501 - RNA, 19 nt, Homo sapiens
  misc_RNA (1)...(19): siRNA sense strand
caagcacucgaccguggua

SEQ ID NO: 1662502 - RNA, 19 nt, Homo sapiens
  misc_RNA (1)...(19): siRNA sense strand
gcagcaaggcaaggucaga

SEQ ID NO: 1662503 - RNA, 19 nt, Homo sapiens
  misc_RNA (1)...(19): siRNA sense strand
uggaggaaguacacaagca

SEQ ID NO: 1662504 - RNA, 19 nt, Homo sapiens
  misc_RNA (1)...(19): siRNA sense strand
gcuaagugccagcuuucug

SEQ ID NO: 1662505 - RNA, 19 nt, Homo sapiens
  misc_RNA (1)...(19): siRNA sense strand
gauuuccggugugauacga

SEQ ID NO: 1662506 - RNA, 19 nt, Homo sapiens
  misc_RNA (1)...(19): siRNA sense strand
agccugaggugcccaaugg

SEQ ID NO: 1662507 - RNA, 19 nt, Homo sapiens
  misc_RNA (1)...(19): siRNA sense strand
aagaucagacagcgauuug

SEQ ID NO: 1662508 - RNA, 19 nt, Homo sapiens
  misc_RNA (1)...(19): siRNA sense strand
ggaugagcaggcugauuuc

SEQ ID NO: 1662509 - RNA, 19 nt, Homo sapiens
  misc_RNA (1)...(19): siRNA sense strand
gccacgccaugcacacugu

SEQ ID NO: 1662510 - RNA, 19 nt, Homo sapiens
  misc_RNA (1)...(19): siRNA sense strand
ggaagguuucauccagguu

SEQ ID NO: 1662511 - RNA, 19 nt, Homo sapiens
  misc_RNA (1)...(19): siRNA sense strand
ggucaccgagcaaguacga

SEQ ID NO: 1662512 - RNA, 19 nt, Homo sapiens
  misc_RNA (1)...(19): siRNA sense strand
gaagcugucggacuacaaa

SEQ ID NO: 1662513 - RNA, 19 nt, Homo sapiens
  misc_RNA (1)...(19): siRNA sense strand
aggugaagcugucggacua

SEQ ID NO: 1662514 - RNA, 19 nt, Homo sapiens
  misc_RNA (1)...(19): siRNA sense strand
gaagcugucggacuacaaa

SEQ ID NO: 1662515 - RNA, 19 nt, Homo sapiens
  misc_RNA (1)...(19): siRNA sense strand
aggugaagcugucggacua

SEQ ID NO: 1662516 - RNA, 19 nt, Homo sapiens
  misc_RNA (1)...(19): siRNA sense strand
gaagcugucggacuacaaa

SEQ ID NO: 1662517 - RNA, 19 nt, Homo sapiens
  misc_RNA (1)...(19): siRNA sense strand
aggugaagcugucggacua

SEQ ID NO: 1662518 - RNA, 19 nt, Homo sapiens
  misc_RNA (1)...(19): siRNA sense strand
gcaggaagguugucauuaa

SEQ ID NO: 1662519 - RNA, 19 nt, Homo sapiens
  misc_RNA (1)...(19): siRNA sense strand
gaagaaacauaaccucaaa

SEQ ID NO: 1662520 - RNA, 19 nt, Homo sapiens
  misc_RNA (1)...(19): siRNA sense strand
ccaaagaggugguguauag

SEQ ID NO: 1662521 - RNA, 19 nt, Homo sapiens
  misc_RNA (1)...(19): siRNA sense strand
gcagagaggcugugacuuu

SEQ ID NO: 1662522 - RNA, 19 nt, Homo sapiens
  misc_RNA (1)...(19): siRNA sense strand
gugcaaugcugacaacuuu

SEQ ID NO: 1662523 - RNA, 19 nt, Homo sapiens
  misc_RNA (1)...(19): siRNA sense strand
gaacuugccauugaagaua

SEQ ID NO: 1662524 - RNA, 19 nt, Homo sapiens
  misc_RNA (1)...(19): siRNA sense strand
aaacauaaccucaaacuag

SEQ ID NO: 1662525 - RNA, 19 nt, Homo sapiens
  misc_RNA (1)...(19): siRNA sense strand
gauugaaacugacaagaca

SEQ ID NO: 1662526 - RNA, 19 nt, Homo sapiens
  misc_RNA (1)...(19): siRNA sense strand
uaacaacagugucuucagu

SEQ ID NO: 1662527 - RNA, 19 nt, Homo sapiens
  misc_RNA (1)...(19): siRNA sense strand
caagacaucugugcagguu

SEQ ID NO: 1662528 - RNA, 19 nt, Homo sapiens
  misc_RNA (1)...(19): siRNA sense strand
ugaagugguuugugagauu

SEQ ID NO: 1662529 - RNA, 19 nt, Homo sapiens
  misc_RNA (1)...(19): siRNA sense strand
gauugaagcucuuuuggua

SEQ ID NO: 1662530 - RNA, 19 nt, Homo sapiens
  misc_RNA (1)...(19): siRNA sense strand
gaagugguuugugagauug

SEQ ID NO: 1662531 - RNA, 19 nt, Homo sapiens
  misc_RNA (1)...(19): siRNA sense strand
gagaaggcccgaaagaaug

SEQ ID NO: 1662532 - RNA, 19 nt, Homo sapiens
  misc_RNA (1)...(19): siRNA sense strand
aagaugaagugguuuguga

SEQ ID NO: 1662533 - RNA, 19 nt, Homo sapiens
  misc_RNA (1)...(19): siRNA sense strand
ucacugaacugggagagaa

SEQ ID NO: 1662534 - RNA, 19 nt, Homo sapiens
  misc_RNA (1)...(19): siRNA sense strand
gaaacauaaccucaaacua

SEQ ID NO: 1662535 - RNA, 19 nt, Homo sapiens
  misc_RNA (1)...(19): siRNA sense strand
ggagagaaggcccgaaaga

SEQ ID NO: 1662536 - RNA, 19 nt, Homo sapiens
  misc_RNA (1)...(19): siRNA sense strand
gagacacaguugcagaaga

SEQ ID NO: 1662537 - RNA, 19 nt, Homo sapiens
  misc_RNA (1)...(19): siRNA sense strand
gaacggaccaucacugaac

SEQ ID NO: 1662538 - RNA, 19 nt, Homo sapiens
  misc_RNA (1)...(19): siRNA sense strand
ucaggaauguggaagcuau

SEQ ID NO: 1662539 - RNA, 19 nt, Homo sapiens
  misc_RNA (1)...(19): siRNA sense strand
gagagaaggcccgaaagaa

SEQ ID NO: 1662540 - RNA, 19 nt, Homo sapiens
  misc_RNA (1)...(19): siRNA sense strand
agacacaguugcagaagau

SEQ ID NO: 1662541 - RNA, 19 nt, Homo sapiens
  misc_RNA (1)...(19): siRNA sense strand
gaaagcuguuggagacaca

SEQ ID NO: 1662542 - RNA, 19 nt, Homo sapiens
  misc_RNA (1)...(19): siRNA sense strand
uuaaugagauugacaugag

SEQ ID NO: 1662543 - RNA, 19 nt, Homo sapiens
  misc_RNA (1)...(19): siRNA sense strand
uuugugagauugaaacuga

SEQ ID NO: 1662544 - RNA, 19 nt, Homo sapiens
  misc_RNA (1)...(19): siRNA sense strand
gagauugacaugaguaaca

SEQ ID NO: 1662545 - RNA, 19 nt, Homo sapiens
  misc_RNA (1)...(19): siRNA sense strand
gaacaucgggagaaaauga

SEQ ID NO: 1662546 - RNA, 19 nt, Homo sapiens
  misc_RNA (1)...(19): siRNA sense strand
gaaggaggcccagaauaca

SEQ ID NO: 1662547 - RNA, 19 nt, Homo sapiens
  misc_RNA (1)...(19): siRNA sense strand
gggauuauauugacaucag

SEQ ID NO: 1662548 - RNA, 19 nt, Homo sapiens
  misc_RNA (1)...(19): siRNA sense strand
aaaccugugucugcaguaa

SEQ ID NO: 1662549 - RNA, 19 nt, Homo sapiens
  misc_RNA (1)...(19): siRNA sense strand
gauauugaacggaccauca

SEQ ID NO: 1662550 - RNA, 19 nt, Homo sapiens
  misc_RNA (1)...(19): siRNA sense strand
gaauguggaagcuaugaau

SEQ ID NO: 1662551 - RNA, 19 nt, Homo sapiens
  misc_RNA (1)...(19): siRNA sense strand
ugcagaagaugaagugguu

SEQ ID NO: 1662552 - RNA, 19 nt, Homo sapiens
  misc_RNA (1)...(19): siRNA sense strand
gaggugguguauagggauu

SEQ ID NO: 1662553 - RNA, 19 nt, Homo sapiens
  misc_RNA (1)...(19): siRNA sense strand
cagaauacaugugcaaugc

SEQ ID NO: 1662554 - RNA, 19 nt, Homo sapiens
  misc_RNA (1)...(19): siRNA sense strand
ugaaggaggcccagaauac

SEQ ID NO: 1662555 - RNA, 19 nt, Homo sapiens
  misc_RNA (1)...(19): siRNA sense strand
cagagaggcugugacuuuc

SEQ ID NO: 1662556 - RNA, 19 nt, Homo sapiens
  misc_RNA (1)...(19): siRNA sense strand
gcaaugcugacaacuuuua

SEQ ID NO: 1662557 - RNA, 19 nt, Homo sapiens
  misc_RNA (1)...(19): siRNA sense strand
agagaaggcccgaaagaau

SEQ ID NO: 1662558 - RNA, 19 nt, Homo sapiens
  misc_RNA (1)...(19): siRNA sense strand
gaugaagugguuugugaga

SEQ ID NO: 1662559 - RNA, 19 nt, Homo sapiens
  misc_RNA (1)...(19): siRNA sense strand
uauauugacaucaguguug

SEQ ID NO: 1662560 - RNA, 19 nt, Homo sapiens
  misc_RNA (1)...(19): siRNA sense strand
uguuguaaaugcagugauu

SEQ ID NO: 1662561 - RNA, 19 nt, Homo sapiens
  misc_RNA (1)...(19): siRNA sense strand
ugaagaaacauaaccucaa

SEQ ID NO: 1662562 - RNA, 19 nt, Homo sapiens
  misc_RNA (1)...(19): siRNA sense strand
gcacccauacccacucaga

SEQ ID NO: 1662563 - RNA, 19 nt, Homo sapiens
  misc_RNA (1)...(19): siRNA sense strand
aaacugacaagacaucugu

SEQ ID NO: 1662564 - RNA, 19 nt, Homo sapiens
  misc_RNA (1)...(19): siRNA sense strand
gcuaugaauuuugcagaua

SEQ ID NO: 1662565 - RNA, 19 nt, Homo sapiens
  misc_RNA (1)...(19): siRNA sense strand
gaugucaggugggagaaag

SEQ ID NO: 1662566 - RNA, 19 nt, Homo sapiens
  misc_RNA (1)...(19): siRNA sense strand
gaagaugaagugguuugug

SEQ ID NO: 1662567 - RNA, 19 nt, Homo sapiens
  misc_RNA (1)...(19): siRNA sense strand
cagcaggaagguugucauu

SEQ ID NO: 1662568 - RNA, 19 nt, Homo sapiens
  misc_RNA (1)...(19): siRNA sense strand
caaggcagcgguagaggau

SEQ ID NO: 1662569 - RNA, 19 nt, Homo sapiens
  misc_RNA (1)...(19): siRNA sense strand
acaacagugucuucagugu

SEQ ID NO: 1662570 - RNA, 19 nt, Homo sapiens
  misc_RNA (1)...(19): siRNA sense strand
ggaauguggaagcuaugaa

SEQ ID NO: 1662571 - RNA, 19 nt, Homo sapiens
  misc_RNA (1)...(19): siRNA sense strand
uggcaaaggucugcguuca

SEQ ID NO: 1662572 - RNA, 19 nt, Homo sapiens
  misc_RNA (1)...(19): siRNA sense strand
ggcuauaggaggcaaggua

SEQ ID NO: 1662573 - RNA, 19 nt, Homo sapiens
  misc_RNA (1)...(19): siRNA sense strand
guacguggcacugaccuau

SEQ ID NO: 1662574 - RNA, 19 nt, Homo sapiens
  misc_RNA (1)...(19): siRNA sense strand
gaaacugacaagacaucug

SEQ ID NO: 1662575 - RNA, 19 nt, Homo sapiens
  misc_RNA (1)...(19): siRNA sense strand
caggaagguugucauuaac

SEQ ID NO: 1662576 - RNA, 19 nt, Homo sapiens
  misc_RNA (1)...(19): siRNA sense strand
agaaggcccgaaagaauga

SEQ ID NO: 1662577 - RNA, 19 nt, Homo sapiens
  misc_RNA (1)...(19): siRNA sense strand
ggauuauauugacaucagu

SEQ ID NO: 1662578 - RNA, 19 nt, Homo sapiens
  misc_RNA (1)...(19): siRNA sense strand
ccagaauacaugugcaaug

SEQ ID NO: 1662579 - RNA, 19 nt, Homo sapiens
  misc_RNA (1)...(19): siRNA sense strand
cagguuccaucaccagcaa

SEQ ID NO: 1662580 - RNA, 19 nt, Homo sapiens
  misc_RNA (1)...(19): siRNA sense strand
acguggcacugaccuauga

SEQ ID NO: 1662581 - RNA, 19 nt, Homo sapiens
  misc_RNA (1)...(19): siRNA sense strand
cagaagaugaagugguuug

SEQ ID NO: 1662582 - RNA, 19 nt, Homo sapiens
  misc_RNA (1)...(19): siRNA sense strand
uaaugagauugacaugagu

SEQ ID NO: 1662583 - RNA, 19 nt, Homo sapiens
  misc_RNA (1)...(19): siRNA sense strand
cagcacccauacccacuca

SEQ ID NO: 1662584 - RNA, 19 nt, Homo sapiens
  misc_RNA (1)...(19): siRNA sense strand
gauugacgacacaaccaaa

SEQ ID NO: 1662585 - RNA, 19 nt, Homo sapiens
  misc_RNA (1)...(19): siRNA sense strand
gagauugaaacugacaaga

SEQ ID NO: 1662586 - RNA, 19 nt, Homo sapiens
  misc_RNA (1)...(19): siRNA sense strand
ggugguguauagggauuau

SEQ ID NO: 1662587 - RNA, 19 nt, Homo sapiens
  misc_RNA (1)...(19): siRNA sense strand
ugagggcucggcacaaaga

SEQ ID NO: 1662588 - RNA, 19 nt, Homo sapiens
  misc_RNA (1)...(19): siRNA sense strand
gggagaaaaugaacaggau

SEQ ID NO: 1662589 - RNA, 19 nt, Homo sapiens
  misc_RNA (1)...(19): siRNA sense strand
gagaggcugugacuuuccu

SEQ ID NO: 1662590 - RNA, 19 nt, Homo sapiens
  misc_RNA (1)...(19): siRNA sense strand
gcacuccacuuuucacacu

SEQ ID NO: 1662591 - RNA, 19 nt, Homo sapiens
  misc_RNA (1)...(19): siRNA sense strand
gcugacaacuuuuaaugag

SEQ ID NO: 1662592 - RNA, 19 nt, Homo sapiens
  misc_RNA (1)...(19): siRNA sense strand
cugaaggaggcccagaaua

SEQ ID NO: 1662593 - RNA, 19 nt, Homo sapiens
  misc_RNA (1)...(19): siRNA sense strand
caugugcaaugcugacaac

SEQ ID NO: 1662594 - RNA, 19 nt, Homo sapiens
  misc_RNA (1)...(19): siRNA sense strand
gcagaagaugaagugguuu

SEQ ID NO: 1662595 - RNA, 19 nt, Homo sapiens
  misc_RNA (1)...(19): siRNA sense strand
acacaguugcagaagauga

SEQ ID NO: 1662596 - RNA, 19 nt, Homo sapiens
  misc_RNA (1)...(19): siRNA sense strand
caucaggaauguggaagcu

SEQ ID NO: 1662597 - RNA, 19 nt, Homo sapiens
  misc_RNA (1)...(19): siRNA sense strand
uguggaagcuaugaauuuu

SEQ ID NO: 1662598 - RNA, 19 nt, Homo sapiens
  misc_RNA (1)...(19): siRNA sense strand
ugaacuugccauugaagau

SEQ ID NO: 1662599 - RNA, 19 nt, Homo sapiens
  misc_RNA (1)...(19): siRNA sense strand
ggacagagaacuacacuua

SEQ ID NO: 1662600 - RNA, 19 nt, Homo sapiens
  misc_RNA (1)...(19): siRNA sense strand
ccaaagagcuguugaacuu

SEQ ID NO: 1662601 - RNA, 19 nt, Homo sapiens
  misc_RNA (1)...(19): siRNA sense strand
gaauagaucuuucuggaau

SEQ ID NO: 1662602 - RNA, 19 nt, Homo sapiens
  misc_RNA (1)...(19): siRNA sense strand
gaagagagauccuguuucu

SEQ ID NO: 1662603 - RNA, 19 nt, Homo sapiens
  misc_RNA (1)...(19): siRNA sense strand
caaagaccauccaguuaua

SEQ ID NO: 1662604 - RNA, 19 nt, Homo sapiens
  misc_RNA (1)...(19): siRNA sense strand
gcaacaaacucuucgaugu

SEQ ID NO: 1662605 - RNA, 19 nt, Homo sapiens
  misc_RNA (1)...(19): siRNA sense strand
gagaagaaauguggcagua

SEQ ID NO: 1662606 - RNA, 19 nt, Homo sapiens
  misc_RNA (1)...(19): siRNA sense strand
ugaaggagcuacaagguuu

SEQ ID NO: 1662607 - RNA, 19 nt, Homo sapiens
  misc_RNA (1)...(19): siRNA sense strand
cuacagaccucuauguuga

SEQ ID NO: 1662608 - RNA, 19 nt, Homo sapiens
  misc_RNA (1)...(19): siRNA sense strand
gaacagcucuucagguuuu

SEQ ID NO: 1662609 - RNA, 19 nt, Homo sapiens
  misc_RNA (1)...(19): siRNA sense strand
caacagugcauuagacaua

SEQ ID NO: 1662610 - RNA, 19 nt, Homo sapiens
  misc_RNA (1)...(19): siRNA sense strand
gaagaaauguggcaguagu

SEQ ID NO: 1662611 - RNA, 19 nt, Homo sapiens
  misc_RNA (1)...(19): siRNA sense strand
caacugggauugagucguu

SEQ ID NO: 1662612 - RNA, 19 nt, Homo sapiens
  misc_RNA (1)...(19): siRNA sense strand
gcaaagaccauccaguuau

SEQ ID NO: 1662613 - RNA, 19 nt, Homo sapiens
  misc_RNA (1)...(19): siRNA sense strand
aaacgaagacuuugaugua

SEQ ID NO: 1662614 - RNA, 19 nt, Homo sapiens
  misc_RNA (1)...(19): siRNA sense strand
gaaggagaauacccuaaau

SEQ ID NO: 1662615 - RNA, 19 nt, Homo sapiens
  misc_RNA (1)...(19): siRNA sense strand
ggaagaugaugcacaagau

SEQ ID NO: 1662616 - RNA, 19 nt, Homo sapiens
  misc_RNA (1)...(19): siRNA sense strand
uguaauugcugaacaacua

SEQ ID NO: 1662617 - RNA, 19 nt, Homo sapiens
  misc_RNA (1)...(19): siRNA sense strand
gaagaugaugcacaagaua

SEQ ID NO: 1662618 - RNA, 19 nt, Homo sapiens
  misc_RNA (1)...(19): siRNA sense strand
gcaagugaacuaaauguug

SEQ ID NO: 1662619 - RNA, 19 nt, Homo sapiens
  misc_RNA (1)...(19): siRNA sense strand
cggaacagcucuucagguu

SEQ ID NO: 1662620 - RNA, 19 nt, Homo sapiens
  misc_RNA (1)...(19): siRNA sense strand
ggagaauacccuaaauuau

SEQ ID NO: 1662621 - RNA, 19 nt, Homo sapiens
  misc_RNA (1)...(19): siRNA sense strand
ggaccaauauggagaaacu

SEQ ID NO: 1662622 - RNA, 19 nt, Homo sapiens
  misc_RNA (1)...(19): siRNA sense strand
gauccuguuucucacauuu

SEQ ID NO: 1662623 - RNA, 19 nt, Homo sapiens
  misc_RNA (1)...(19): siRNA sense strand
ggaauagaagugauagaaa

SEQ ID NO: 1662624 - RNA, 19 nt, Homo sapiens
  misc_RNA (1)...(19): siRNA sense strand
ggaagcuuauguucaauca

SEQ ID NO: 1662625 - RNA, 19 nt, Homo sapiens
  misc_RNA (1)...(19): siRNA sense strand
caacaauacagucagcaua

SEQ ID NO: 1662626 - RNA, 19 nt, Homo sapiens
  misc_RNA (1)...(19): siRNA sense strand
gaacuuugaaggauacuau

SEQ ID NO: 1662627 - RNA, 19 nt, Homo sapiens
  misc_RNA (1)...(19): siRNA sense strand
ggaaguagagagauaacaa

SEQ ID NO: 1662628 - RNA, 19 nt, Homo sapiens
  misc_RNA (1)...(19): siRNA sense strand
guagacgaguaucugauuu

SEQ ID NO: 1662629 - RNA, 19 nt, Homo sapiens
  misc_RNA (1)...(19): siRNA sense strand
gaaguagagagauaacaaa

SEQ ID NO: 1662630 - RNA, 19 nt, Homo sapiens
  misc_RNA (1)...(19): siRNA sense strand
ccaggcaagugaacaugua

SEQ ID NO: 1662631 - RNA, 19 nt, Homo sapiens
  misc_RNA (1)...(19): siRNA sense strand
uggagaaacuuauggauca

SEQ ID NO: 1662632 - RNA, 19 nt, Homo sapiens
  misc_RNA (1)...(19): siRNA sense strand
uagagaaggcaaagaauuu

SEQ ID NO: 1662633 - RNA, 19 nt, Homo sapiens
  misc_RNA (1)...(19): siRNA sense strand
cagcaucauuauucaguuu

SEQ ID NO: 1662634 - RNA, 19 nt, Homo sapiens
  misc_RNA (1)...(19): siRNA sense strand
ggcaaagaccauccaguua

SEQ ID NO: 1662635 - RNA, 19 nt, Homo sapiens
  misc_RNA (1)...(19): siRNA sense strand
gaacuacagaccucuaugu

SEQ ID NO: 1662636 - RNA, 19 nt, Homo sapiens
  misc_RNA (1)...(19): siRNA sense strand
ggcacuuucuucucaauuu

SEQ ID NO: 1662637 - RNA, 19 nt, Homo sapiens
  misc_RNA (1)...(19): siRNA sense strand
ugacaacacugaggcuauu

SEQ ID NO: 1662638 - RNA, 19 nt, Homo sapiens
  misc_RNA (1)...(19): siRNA sense strand
ccuggaagcuuauguucaa

SEQ ID NO: 1662639 - RNA, 19 nt, Homo sapiens
  misc_RNA (1)...(19): siRNA sense strand
gcacuuucuucucaauuuc

SEQ ID NO: 1662640 - RNA, 19 nt, Homo sapiens
  misc_RNA (1)...(19): siRNA sense strand
guagagaaggcaaagaauu

SEQ ID NO: 1662641 - RNA, 19 nt, Homo sapiens
  misc_RNA (1)...(19): siRNA sense strand
gauacaaaccucacauuag

SEQ ID NO: 1662642 - RNA, 19 nt, Homo sapiens
  misc_RNA (1)...(19): siRNA sense strand
aggagaauacccuaaauua

SEQ ID NO: 1662643 - RNA, 19 nt, Homo sapiens
  misc_RNA (1)...(19): siRNA sense strand
gcaggcauuugaaggagaa

SEQ ID NO: 1662644 - RNA, 19 nt, Homo sapiens
  misc_RNA (1)...(19): siRNA sense strand
gaagcaggcauuugaagga

SEQ ID NO: 1662645 - RNA, 19 nt, Homo sapiens
  misc_RNA (1)...(19): siRNA sense strand
gugcaacccuuacucacuu

SEQ ID NO: 1662646 - RNA, 19 nt, Homo sapiens
  misc_RNA (1)...(19): siRNA sense strand
cauggaagaugaugcacaa

SEQ ID NO: 1662647 - RNA, 19 nt, Homo sapiens
  misc_RNA (1)...(19): siRNA sense strand
gaggauuauucguaucuug

SEQ ID NO: 1662648 - RNA, 19 nt, Homo sapiens
  misc_RNA (1)...(19): siRNA sense strand
gaacauguagccaguaguc

SEQ ID NO: 1662649 - RNA, 19 nt, Homo sapiens
  misc_RNA (1)...(19): siRNA sense strand
acgaguaucugauuuagga

SEQ ID NO: 1662650 - RNA, 19 nt, Homo sapiens
  misc_RNA (1)...(19): siRNA sense strand
ugauacaaaccucacauua

SEQ ID NO: 1662651 - RNA, 19 nt, Homo sapiens
  misc_RNA (1)...(19): siRNA sense strand
cuaugaggcugcuuaucua

SEQ ID NO: 1662652 - RNA, 19 nt, Homo sapiens
  misc_RNA (1)...(19): siRNA sense strand
gcacaacuagcaagacuuc

SEQ ID NO: 1662653 - RNA, 19 nt, Homo sapiens
  misc_RNA (1)...(19): siRNA sense strand
gaaggacagagaagaaaug

SEQ ID NO: 1662654 - RNA, 19 nt, Homo sapiens
  misc_RNA (1)...(19): siRNA sense strand
gauuaucuuucucaaggaa

SEQ ID NO: 1662655 - RNA, 19 nt, Homo sapiens
  misc_RNA (1)...(19): siRNA sense strand
acagagaacuacacuuaca

SEQ ID NO: 1662656 - RNA, 19 nt, Homo sapiens
  misc_RNA (1)...(19): siRNA sense strand
cugaugaacuugaugguau

SEQ ID NO: 1662657 - RNA, 19 nt, Homo sapiens
  misc_RNA (1)...(19): siRNA sense strand
uacaacacauggaagauga

SEQ ID NO: 1662658 - RNA, 19 nt, Homo sapiens
  misc_RNA (1)...(19): siRNA sense strand
gauauugugcuacuuuaga

SEQ ID NO: 1662659 - RNA, 19 nt, Homo sapiens
  misc_RNA (1)...(19): siRNA sense strand
ggaauagaucuuucuggaa

SEQ ID NO: 1662660 - RNA, 19 nt, Homo sapiens
  misc_RNA (1)...(19): siRNA sense strand
guaauccuccuuccucuga

SEQ ID NO: 1662661 - RNA, 19 nt, Homo sapiens
  misc_RNA (1)...(19): siRNA sense strand
uaugucugcucuucaguaa

SEQ ID NO: 1662662 - RNA, 19 nt, Homo sapiens
  misc_RNA (1)...(19): siRNA sense strand
guugaaccauacaauaaga

SEQ ID NO: 1662663 - RNA, 19 nt, Homo sapiens
  misc_RNA (1)...(19): siRNA sense strand
gauugggccucuuacugaa

SEQ ID NO: 1662664 - RNA, 19 nt, Homo sapiens
  misc_RNA (1)...(19): siRNA sense strand
guggauggauauugugcua

SEQ ID NO: 1662665 - RNA, 19 nt, Homo sapiens
  misc_RNA (1)...(19): siRNA sense strand
gaacuugauuaucuuucuc

SEQ ID NO: 1662666 - RNA, 19 nt, Homo sapiens
  misc_RNA (1)...(19): siRNA sense strand
guaaagacuuauacuucuc

SEQ ID NO: 1662667 - RNA, 19 nt, Homo sapiens
  misc_RNA (1)...(19): siRNA sense strand
gcaccaaucaguaacaaag

SEQ ID NO: 1662668 - RNA, 19 nt, Homo sapiens
  misc_RNA (1)...(19): siRNA sense strand
uaaguugcaccaaucagua

SEQ ID NO: 1662669 - RNA, 19 nt, Homo sapiens
  misc_RNA (1)...(19): siRNA sense strand
gauccuaucaacuugguuu

SEQ ID NO: 1662670 - RNA, 19 nt, Homo sapiens
  misc_RNA (1)...(19): siRNA sense strand
ugaggcugcuuaucuauca

SEQ ID NO: 1662671 - RNA, 19 nt, Homo sapiens
  misc_RNA (1)...(19): siRNA sense strand
caggaaauacugcagcuuu

SEQ ID NO: 1662672 - RNA, 19 nt, Homo sapiens
  misc_RNA (1)...(19): siRNA sense strand
ccaguguuguggauggaua

SEQ ID NO: 1662673 - RNA, 19 nt, Homo sapiens
  misc_RNA (1)...(19): siRNA sense strand
ucucacauuuguuucauug

SEQ ID NO: 1662674 - RNA, 19 nt, Homo sapiens
  misc_RNA (1)...(19): siRNA sense strand
ugaaggagaauacccuaaa

SEQ ID NO: 1662675 - RNA, 19 nt, Homo sapiens
  misc_RNA (1)...(19): siRNA sense strand
uggauauugugcuacuuua

SEQ ID NO: 1662676 - RNA, 19 nt, Homo sapiens
  misc_RNA (1)...(19): siRNA sense strand
cagcuucucuccacacaag

SEQ ID NO: 1662677 - RNA, 19 nt, Homo sapiens
  misc_RNA (1)...(19): siRNA sense strand
gagcuacaagguuucauug

SEQ ID NO: 1662678 - RNA, 19 nt, Homo sapiens
  misc_RNA (1)...(19): siRNA sense strand
ggagcuacaagguuucauu

SEQ ID NO: 1662679 - RNA, 19 nt, Homo sapiens
  misc_RNA (1)...(19): siRNA sense strand
gauguuccuuguucucugu

SEQ ID NO: 1662680 - RNA, 19 nt, Homo sapiens
  misc_RNA (1)...(19): siRNA sense strand
gaaauguggcaguagugaa

SEQ ID NO: 1662681 - RNA, 19 nt, Homo sapiens
  misc_RNA (1)...(19): siRNA sense strand
acgaagacuuugauguaaa

SEQ ID NO: 1662682 - RNA, 19 nt, Homo sapiens
  misc_RNA (1)...(19): siRNA sense strand
ggggagcccuggaagcuua

SEQ ID NO: 1662683 - RNA, 19 nt, Homo sapiens
  misc_RNA (1)...(19): siRNA sense strand
uagacgaguaucugauuua

SEQ ID NO: 1662684 - RNA, 19 nt, Homo sapiens
  misc_RNA (1)...(19): siRNA sense strand
aacgaagacuuugauguaa

SEQ ID NO: 1662685 - RNA, 19 nt, Homo sapiens
  misc_RNA (1)...(19): siRNA sense strand
auacaaaccucacauuagc

SEQ ID NO: 1662686 - RNA, 19 nt, Homo sapiens
  misc_RNA (1)...(19): siRNA sense strand
gaacaacuagcaaaacuug

SEQ ID NO: 1662687 - RNA, 19 nt, Homo sapiens
  misc_RNA (1)...(19): siRNA sense strand
gggagcuguugauaggaua

SEQ ID NO: 1662688 - RNA, 19 nt, Homo sapiens
  misc_RNA (1)...(19): siRNA sense strand
aagcuuauguucaaucagu

SEQ ID NO: 1662689 - RNA, 19 nt, Homo sapiens
  misc_RNA (1)...(19): siRNA sense strand
caggacggguguuauagug

SEQ ID NO: 1662690 - RNA, 19 nt, Homo sapiens
  misc_RNA (1)...(19): siRNA sense strand
gauggacaaccggaaauuu

SEQ ID NO: 1662691 - RNA, 19 nt, Homo sapiens
  misc_RNA (1)...(19): siRNA sense strand
aagaagagagauccuguuu

SEQ ID NO: 1662692 - RNA, 19 nt, Homo sapiens
  misc_RNA (1)...(19): siRNA sense strand
ucagucaguuggacagaga

SEQ ID NO: 1662693 - RNA, 19 nt, Homo sapiens
  misc_RNA (1)...(19): siRNA sense strand
gauuugcuucggaggauua

SEQ ID NO: 1662694 - RNA, 19 nt, Homo sapiens
  misc_RNA (1)...(19): siRNA sense strand
cagcauauccaagggaauu

SEQ ID NO: 1662695 - RNA, 19 nt, Homo sapiens
  misc_RNA (1)...(19): siRNA sense strand
gcacaagcaacugggauug

SEQ ID NO: 1662696 - RNA, 19 nt, Homo sapiens
  misc_RNA (1)...(19): siRNA sense strand
gaguuaugagugacuauuu

SEQ ID NO: 1662697 - RNA, 19 nt, Homo sapiens
  misc_RNA (1)...(19): siRNA sense strand
gcacaagauauauucauac

SEQ ID NO: 1662698 - RNA, 19 nt, Homo sapiens
  misc_RNA (1)...(19): siRNA sense strand
uguauaaguugcaccaauc

SEQ ID NO: 1662699 - RNA, 19 nt, Homo sapiens
  misc_RNA (1)...(19): siRNA sense strand
ggacagagaacuacacuua

SEQ ID NO: 1662700 - RNA, 19 nt, Homo sapiens
  misc_RNA (1)...(19): siRNA sense strand
ccaaagagcuguugaacuu

SEQ ID NO: 1662701 - RNA, 19 nt, Homo sapiens
  misc_RNA (1)...(19): siRNA sense strand
gaauagaucuuucuggaau

SEQ ID NO: 1662702 - RNA, 19 nt, Homo sapiens
  misc_RNA (1)...(19): siRNA sense strand
gaagagagauccuguuucu

SEQ ID NO: 1662703 - RNA, 19 nt, Homo sapiens
  misc_RNA (1)...(19): siRNA sense strand
caaagaccauccaguuaua

SEQ ID NO: 1662704 - RNA, 19 nt, Homo sapiens
  misc_RNA (1)...(19): siRNA sense strand
gcaacaaacucuucgaugu

SEQ ID NO: 1662705 - RNA, 19 nt, Homo sapiens
  misc_RNA (1)...(19): siRNA sense strand
gagaagaaauguggcagua

SEQ ID NO: 1662706 - RNA, 19 nt, Homo sapiens
  misc_RNA (1)...(19): siRNA sense strand
ugaaggagcuacaagguuu

SEQ ID NO: 1662707 - RNA, 19 nt, Homo sapiens
  misc_RNA (1)...(19): siRNA sense strand
cuacagaccucuauguuga

SEQ ID NO: 1662708 - RNA, 19 nt, Homo sapiens
  misc_RNA (1)...(19): siRNA sense strand
gaacagcucuucagguuuu

SEQ ID NO: 1662709 - RNA, 19 nt, Homo sapiens
  misc_RNA (1)...(19): siRNA sense strand
caacagugcauuagacaua

SEQ ID NO: 1662710 - RNA, 19 nt, Homo sapiens
  misc_RNA (1)...(19): siRNA sense strand
gaagaaauguggcaguagu

SEQ ID NO: 1662711 - RNA, 19 nt, Homo sapiens
  misc_RNA (1)...(19): siRNA sense strand
caacugggauugagucguu

SEQ ID NO: 1662712 - RNA, 19 nt, Homo sapiens
  misc_RNA (1)...(19): siRNA sense strand
gcaaagaccauccaguuau

SEQ ID NO: 1662713 - RNA, 19 nt, Homo sapiens
  misc_RNA (1)...(19): siRNA sense strand
aaacgaagacuuugaugua

SEQ ID NO: 1662714 - RNA, 19 nt, Homo sapiens
  misc_RNA (1)...(19): siRNA sense strand
gaaggagaauacccuaaau

SEQ ID NO: 1662715 - RNA, 19 nt, Homo sapiens
  misc_RNA (1)...(19): siRNA sense strand
ggaagaugaugcacaagau

SEQ ID NO: 1662716 - RNA, 19 nt, Homo sapiens
  misc_RNA (1)...(19): siRNA sense strand
uguaauugcugaacaacua

SEQ ID NO: 1662717 - RNA, 19 nt, Homo sapiens
  misc_RNA (1)...(19): siRNA sense strand
gaagaugaugcacaagaua

SEQ ID NO: 1662718 - RNA, 19 nt, Homo sapiens
  misc_RNA (1)...(19): siRNA sense strand
gcaagugaacuaaauguug

SEQ ID NO: 1662719 - RNA, 19 nt, Homo sapiens
  misc_RNA (1)...(19): siRNA sense strand
cggaacagcucuucagguu

SEQ ID NO: 1662720 - RNA, 19 nt, Homo sapiens
  misc_RNA (1)...(19): siRNA sense strand
ggagaauacccuaaauuau

SEQ ID NO: 1662721 - RNA, 19 nt, Homo sapiens
  misc_RNA (1)...(19): siRNA sense strand
ggaccaauauggagaaacu

SEQ ID NO: 1662722 - RNA, 19 nt, Homo sapiens
  misc_RNA (1)...(19): siRNA sense strand
gauccuguuucucacauuu

SEQ ID NO: 1662723 - RNA, 19 nt, Homo sapiens
  misc_RNA (1)...(19): siRNA sense strand
ggaauagaagugauagaaa

SEQ ID NO: 1662724 - RNA, 19 nt, Homo sapiens
  misc_RNA (1)...(19): siRNA sense strand
ggaagcuuauguucaauca

SEQ ID NO: 1662725 - RNA, 19 nt, Homo sapiens
  misc_RNA (1)...(19): siRNA sense strand
caacaauacagucagcaua

SEQ ID NO: 1662726 - RNA, 19 nt, Homo sapiens
  misc_RNA (1)...(19): siRNA sense strand
gaacuuugaaggauacuau

SEQ ID NO: 1662727 - RNA, 19 nt, Homo sapiens
  misc_RNA (1)...(19): siRNA sense strand
ggaaguagagagauaacaa

SEQ ID NO: 1662728 - RNA, 19 nt, Homo sapiens
  misc_RNA (1)...(19): siRNA sense strand
guagacgaguaucugauuu

SEQ ID NO: 1662729 - RNA, 19 nt, Homo sapiens
  misc_RNA (1)...(19): siRNA sense strand
gaaguagagagauaacaaa

SEQ ID NO: 1662730 - RNA, 19 nt, Homo sapiens
  misc_RNA (1)...(19): siRNA sense strand
ccaggcaagugaacaugua

SEQ ID NO: 1662731 - RNA, 19 nt, Homo sapiens
  misc_RNA (1)...(19): siRNA sense strand
uggagaaacuuauggauca

SEQ ID NO: 1662732 - RNA, 19 nt, Homo sapiens
  misc_RNA (1)...(19): siRNA sense strand
uagagaaggcaaagaauuu

SEQ ID NO: 1662733 - RNA, 19 nt, Homo sapiens
  misc_RNA (1)...(19): siRNA sense strand
cagcaucauuauucaguuu

SEQ ID NO: 1662734 - RNA, 19 nt, Homo sapiens
  misc_RNA (1)...(19): siRNA sense strand
ggcaaagaccauccaguua

SEQ ID NO: 1662735 - RNA, 19 nt, Homo sapiens
  misc_RNA (1)...(19): siRNA sense strand
gaacuacagaccucuaugu

SEQ ID NO: 1662736 - RNA, 19 nt, Homo sapiens
  misc_RNA (1)...(19): siRNA sense strand
ggcacuuucuucucaauuu

SEQ ID NO: 1662737 - RNA, 19 nt, Homo sapiens
  misc_RNA (1)...(19): siRNA sense strand
ugacaacacugaggcuauu

SEQ ID NO: 1662738 - RNA, 19 nt, Homo sapiens
  misc_RNA (1)...(19): siRNA sense strand
ccuggaagcuuauguucaa

SEQ ID NO: 1662739 - RNA, 19 nt, Homo sapiens
  misc_RNA (1)...(19): siRNA sense strand
gcacuuucuucucaauuuc

SEQ ID NO: 1662740 - RNA, 19 nt, Homo sapiens
  misc_RNA (1)...(19): siRNA sense strand
guagagaaggcaaagaauu

SEQ ID NO: 1662741 - RNA, 19 nt, Homo sapiens
  misc_RNA (1)...(19): siRNA sense strand
gauacaaaccucacauuag

SEQ ID NO: 1662742 - RNA, 19 nt, Homo sapiens
  misc_RNA (1)...(19): siRNA sense strand
aggagaauacccuaaauua

SEQ ID NO: 1662743 - RNA, 19 nt, Homo sapiens
  misc_RNA (1)...(19): siRNA sense strand
gcaggcauuugaaggagaa

SEQ ID NO: 1662744 - RNA, 19 nt, Homo sapiens
  misc_RNA (1)...(19): siRNA sense strand
gaagcaggcauuugaagga

SEQ ID NO: 1662745 - RNA, 19 nt, Homo sapiens
  misc_RNA (1)...(19): siRNA sense strand
gugcaacccuuacucacuu

SEQ ID NO: 1662746 - RNA, 19 nt, Homo sapiens
  misc_RNA (1)...(19): siRNA sense strand
cauggaagaugaugcacaa

SEQ ID NO: 1662747 - RNA, 19 nt, Homo sapiens
  misc_RNA (1)...(19): siRNA sense strand
gaggauuauucguaucuug

SEQ ID NO: 1662748 - RNA, 19 nt, Homo sapiens
  misc_RNA (1)...(19): siRNA sense strand
gaacauguagccaguaguc

SEQ ID NO: 1662749 - RNA, 19 nt, Homo sapiens
  misc_RNA (1)...(19): siRNA sense strand
acgaguaucugauuuagga

SEQ ID NO: 1662750 - RNA, 19 nt, Homo sapiens
  misc_RNA (1)...(19): siRNA sense strand
ugauacaaaccucacauua

SEQ ID NO: 1662751 - RNA, 19 nt, Homo sapiens
  misc_RNA (1)...(19): siRNA sense strand
cuaugaggcugcuuaucua

SEQ ID NO: 1662752 - RNA, 19 nt, Homo sapiens
  misc_RNA (1)...(19): siRNA sense strand
gcacaacuagcaagacuuc

SEQ ID NO: 1662753 - RNA, 19 nt, Homo sapiens
  misc_RNA (1)...(19): siRNA sense strand
gaaggacagagaagaaaug

SEQ ID NO: 1662754 - RNA, 19 nt, Homo sapiens
  misc_RNA (1)...(19): siRNA sense strand
gauuaucuuucucaaggaa

SEQ ID NO: 1662755 - RNA, 19 nt, Homo sapiens
  misc_RNA (1)...(19): siRNA sense strand
acagagaacuacacuuaca

SEQ ID NO: 1662756 - RNA, 19 nt, Homo sapiens
  misc_RNA (1)...(19): siRNA sense strand
cugaugaacuugaugguau

SEQ ID NO: 1662757 - RNA, 19 nt, Homo sapiens
  misc_RNA (1)...(19): siRNA sense strand
uacaacacauggaagauga

SEQ ID NO: 1662758 - RNA, 19 nt, Homo sapiens
  misc_RNA (1)...(19): siRNA sense strand
gauauugugcuacuuuaga

SEQ ID NO: 1662759 - RNA, 19 nt, Homo sapiens
  misc_RNA (1)...(19): siRNA sense strand
ggaauagaucuuucuggaa

SEQ ID NO: 1662760 - RNA, 19 nt, Homo sapiens
  misc_RNA (1)...(19): siRNA sense strand
guaauccuccuuccucuga

SEQ ID NO: 1662761 - RNA, 19 nt, Homo sapiens
  misc_RNA (1)...(19): siRNA sense strand
uaugucugcucuucaguaa

SEQ ID NO: 1662762 - RNA, 19 nt, Homo sapiens
  misc_RNA (1)...(19): siRNA sense strand
guugaaccauacaauaaga

SEQ ID NO: 1662763 - RNA, 19 nt, Homo sapiens
  misc_RNA (1)...(19): siRNA sense strand
gauugggccucuuacugaa

SEQ ID NO: 1662764 - RNA, 19 nt, Homo sapiens
  misc_RNA (1)...(19): siRNA sense strand
guggauggauauugugcua

SEQ ID NO: 1662765 - RNA, 19 nt, Homo sapiens
  misc_RNA (1)...(19): siRNA sense strand
gaacuugauuaucuuucuc

SEQ ID NO: 1662766 - RNA, 19 nt, Homo sapiens
  misc_RNA (1)...(19): siRNA sense strand
guaaagacuuauacuucuc

SEQ ID NO: 1662767 - RNA, 19 nt, Homo sapiens
  misc_RNA (1)...(19): siRNA sense strand
gcaccaaucaguaacaaag

SEQ ID NO: 1662768 - RNA, 19 nt, Homo sapiens
  misc_RNA (1)...(19): siRNA sense strand
uaaguugcaccaaucagua

SEQ ID NO: 1662769 - RNA, 19 nt, Homo sapiens
  misc_RNA (1)...(19): siRNA sense strand
gauccuaucaacuugguuu

SEQ ID NO: 1662770 - RNA, 19 nt, Homo sapiens
  misc_RNA (1)...(19): siRNA sense strand
ugaggcugcuuaucuauca

SEQ ID NO: 1662771 - RNA, 19 nt, Homo sapiens
  misc_RNA (1)...(19): siRNA sense strand
caggaaauacugcagcuuu

SEQ ID NO: 1662772 - RNA, 19 nt, Homo sapiens
  misc_RNA (1)...(19): siRNA sense strand
ccaguguuguggauggaua

SEQ ID NO: 1662773 - RNA, 19 nt, Homo sapiens
  misc_RNA (1)...(19): siRNA sense strand
ucucacauuuguuucauug

SEQ ID NO: 1662774 - RNA, 19 nt, Homo sapiens
  misc_RNA (1)...(19): siRNA sense strand
ugaaggagaauacccuaaa

SEQ ID NO: 1662775 - RNA, 19 nt, Homo sapiens
  misc_RNA (1)...(19): siRNA sense strand
uggauauugugcuacuuua

SEQ ID NO: 1662776 - RNA, 19 nt, Homo sapiens
  misc_RNA (1)...(19): siRNA sense strand
cagcuucucuccacacaag

SEQ ID NO: 1662777 - RNA, 19 nt, Homo sapiens
  misc_RNA (1)...(19): siRNA sense strand
gagcuacaagguuucauug

SEQ ID NO: 1662778 - RNA, 19 nt, Homo sapiens
  misc_RNA (1)...(19): siRNA sense strand
ggagcuacaagguuucauu

SEQ ID NO: 1662779 - RNA, 19 nt, Homo sapiens
  misc_RNA (1)...(19): siRNA sense strand
gauguuccuuguucucugu

SEQ ID NO: 1662780 - RNA, 19 nt, Homo sapiens
  misc_RNA (1)...(19): siRNA sense strand
gaaauguggcaguagugaa

SEQ ID NO: 1662781 - RNA, 19 nt, Homo sapiens
  misc_RNA (1)...(19): siRNA sense strand
acgaagacuuugauguaaa

SEQ ID NO: 1662782 - RNA, 19 nt, Homo sapiens
  misc_RNA (1)...(19): siRNA sense strand
ggggagcccuggaagcuua

SEQ ID NO: 1662783 - RNA, 19 nt, Homo sapiens
  misc_RNA (1)...(19): siRNA sense strand
uagacgaguaucugauuua

SEQ ID NO: 1662784 - RNA, 19 nt, Homo sapiens
  misc_RNA (1)...(19): siRNA sense strand
aacgaagacuuugauguaa

SEQ ID NO: 1662785 - RNA, 19 nt, Homo sapiens
  misc_RNA (1)...(19): siRNA sense strand
auacaaaccucacauuagc

SEQ ID NO: 1662786 - RNA, 19 nt, Homo sapiens
  misc_RNA (1)...(19): siRNA sense strand
gaacaacuagcaaaacuug

SEQ ID NO: 1662787 - RNA, 19 nt, Homo sapiens
  misc_RNA (1)...(19): siRNA sense strand
gggagcuguugauaggaua

SEQ ID NO: 1662788 - RNA, 19 nt, Homo sapiens
  misc_RNA (1)...(19): siRNA sense strand
aagcuuauguucaaucagu

SEQ ID NO: 1662789 - RNA, 19 nt, Homo sapiens
  misc_RNA (1)...(19): siRNA sense strand
caggacggguguuauagug

SEQ ID NO: 1662790 - RNA, 19 nt, Homo sapiens
  misc_RNA (1)...(19): siRNA sense strand
gauggacaaccggaaauuu

SEQ ID NO: 1662791 - RNA, 19 nt, Homo sapiens
  misc_RNA (1)...(19): siRNA sense strand
aagaagagagauccuguuu

SEQ ID NO: 1662792 - RNA, 19 nt, Homo sapiens
  misc_RNA (1)...(19): siRNA sense strand
ucagucaguuggacagaga

SEQ ID NO: 1662793 - RNA, 19 nt, Homo sapiens
  misc_RNA (1)...(19): siRNA sense strand
gauuugcuucggaggauua

SEQ ID NO: 1662794 - RNA, 19 nt, Homo sapiens
  misc_RNA (1)...(19): siRNA sense strand
cagcauauccaagggaauu

SEQ ID NO: 1662795 - RNA, 19 nt, Homo sapiens
  misc_RNA (1)...(19): siRNA sense strand
gcacaagcaacugggauug

SEQ ID NO: 1662796 - RNA, 19 nt, Homo sapiens
  misc_RNA (1)...(19): siRNA sense strand
gaguuaugagugacuauuu

SEQ ID NO: 1662797 - RNA, 19 nt, Homo sapiens
  misc_RNA (1)...(19): siRNA sense strand
gcacaagauauauucauac

SEQ ID NO: 1662798 - RNA, 19 nt, Homo sapiens
  misc_RNA (1)...(19): siRNA sense strand
uguauaaguugcaccaauc

SEQ ID NO: 1662799 - RNA, 19 nt, Homo sapiens
  misc_RNA (1)...(19): siRNA sense strand
ggacagagaacuacacuua

SEQ ID NO: 1662800 - RNA, 19 nt, Homo sapiens
  misc_RNA (1)...(19): siRNA sense strand
ccaaagagcuguugaacuu

SEQ ID NO: 1662801 - RNA, 19 nt, Homo sapiens
  misc_RNA (1)...(19): siRNA sense strand
gaauagaucuuucuggaau

SEQ ID NO: 1662802 - RNA, 19 nt, Homo sapiens
  misc_RNA (1)...(19): siRNA sense strand
gaagagagauccuguuucu

SEQ ID NO: 1662803 - RNA, 19 nt, Homo sapiens
  misc_RNA (1)...(19): siRNA sense strand
caaagaccauccaguuaua

SEQ ID NO: 1662804 - RNA, 19 nt, Homo sapiens
  misc_RNA (1)...(19): siRNA sense strand
gcaacaaacucuucgaugu

SEQ ID NO: 1662805 - RNA, 19 nt, Homo sapiens
  misc_RNA (1)...(19): siRNA sense strand
gagaagaaauguggcagua

SEQ ID NO: 1662806 - RNA, 19 nt, Homo sapiens
  misc_RNA (1)...(19): siRNA sense strand
ugaaggagcuacaagguuu

SEQ ID NO: 1662807 - RNA, 19 nt, Homo sapiens
  misc_RNA (1)...(19): siRNA sense strand
cuacagaccucuauguuga

SEQ ID NO: 1662808 - RNA, 19 nt, Homo sapiens
  misc_RNA (1)...(19): siRNA sense strand
gaacagcucuucagguuuu

SEQ ID NO: 1662809 - RNA, 19 nt, Homo sapiens
  misc_RNA (1)...(19): siRNA sense strand
caacagugcauuagacaua

SEQ ID NO: 1662810 - RNA, 19 nt, Homo sapiens
  misc_RNA (1)...(19): siRNA sense strand
gaagaaauguggcaguagu

SEQ ID NO: 1662811 - RNA, 19 nt, Homo sapiens
  misc_RNA (1)...(19): siRNA sense strand
caacugggauugagucguu

SEQ ID NO: 1662812 - RNA, 19 nt, Homo sapiens
  misc_RNA (1)...(19): siRNA sense strand
gcaaagaccauccaguuau

SEQ ID NO: 1662813 - RNA, 19 nt, Homo sapiens
  misc_RNA (1)...(19): siRNA sense strand
aaacgaagacuuugaugua

SEQ ID NO: 1662814 - RNA, 19 nt, Homo sapiens
  misc_RNA (1)...(19): siRNA sense strand
gaaggagaauacccuaaau

SEQ ID NO: 1662815 - RNA, 19 nt, Homo sapiens
  misc_RNA (1)...(19): siRNA sense strand
ggaagaugaugcacaagau

SEQ ID NO: 1662816 - RNA, 19 nt, Homo sapiens
  misc_RNA (1)...(19): siRNA sense strand
uguaauugcugaacaacua

SEQ ID NO: 1662817 - RNA, 19 nt, Homo sapiens
  misc_RNA (1)...(19): siRNA sense strand
gaagaugaugcacaagaua

SEQ ID NO: 1662818 - RNA, 19 nt, Homo sapiens
  misc_RNA (1)...(19): siRNA sense strand
gcaagugaacuaaauguug

SEQ ID NO: 1662819 - RNA, 19 nt, Homo sapiens
  misc_RNA (1)...(19): siRNA sense strand
cggaacagcucuucagguu

SEQ ID NO: 1662820 - RNA, 19 nt, Homo sapiens
  misc_RNA (1)...(19): siRNA sense strand
ggagaauacccuaaauuau

SEQ ID NO: 1662821 - RNA, 19 nt, Homo sapiens
  misc_RNA (1)...(19): siRNA sense strand
ggaccaauauggagaaacu

SEQ ID NO: 1662822 - RNA, 19 nt, Homo sapiens
  misc_RNA (1)...(19): siRNA sense strand
gauccuguuucucacauuu

SEQ ID NO: 1662823 - RNA, 19 nt, Homo sapiens
  misc_RNA (1)...(19): siRNA sense strand
ggaauagaagugauagaaa

SEQ ID NO: 1662824 - RNA, 19 nt, Homo sapiens
  misc_RNA (1)...(19): siRNA sense strand
ggaagcuuauguucaauca

SEQ ID NO: 1662825 - RNA, 19 nt, Homo sapiens
  misc_RNA (1)...(19): siRNA sense strand
caacaauacagucagcaua

SEQ ID NO: 1662826 - RNA, 19 nt, Homo sapiens
  misc_RNA (1)...(19): siRNA sense strand
gaacuuugaaggauacuau

SEQ ID NO: 1662827 - RNA, 19 nt, Homo sapiens
  misc_RNA (1)...(19): siRNA sense strand
ggaaguagagagauaacaa

SEQ ID NO: 1662828 - RNA, 19 nt, Homo sapiens
  misc_RNA (1)...(19): siRNA sense strand
guagacgaguaucugauuu

SEQ ID NO: 1662829 - RNA, 19 nt, Homo sapiens
  misc_RNA (1)...(19): siRNA sense strand
gaaguagagagauaacaaa

SEQ ID NO: 1662830 - RNA, 19 nt, Homo sapiens
  misc_RNA (1)...(19): siRNA sense strand
ccaggcaagugaacaugua

SEQ ID NO: 1662831 - RNA, 19 nt, Homo sapiens
  misc_RNA (1)...(19): siRNA sense strand
uggagaaacuuauggauca

SEQ ID NO: 1662832 - RNA, 19 nt, Homo sapiens
  misc_RNA (1)...(19): siRNA sense strand
uagagaaggcaaagaauuu

SEQ ID NO: 1662833 - RNA, 19 nt, Homo sapiens
  misc_RNA (1)...(19): siRNA sense strand
cagcaucauuauucaguuu

SEQ ID NO: 1662834 - RNA, 19 nt, Homo sapiens
  misc_RNA (1)...(19): siRNA sense strand
ggcaaagaccauccaguua

SEQ ID NO: 1662835 - RNA, 19 nt, Homo sapiens
  misc_RNA (1)...(19): siRNA sense strand
gaacuacagaccucuaugu

SEQ ID NO: 1662836 - RNA, 19 nt, Homo sapiens
  misc_RNA (1)...(19): siRNA sense strand
ggcacuuucuucucaauuu

SEQ ID NO: 1662837 - RNA, 19 nt, Homo sapiens
  misc_RNA (1)...(19): siRNA sense strand
ugacaacacugaggcuauu

SEQ ID NO: 1662838 - RNA, 19 nt, Homo sapiens
  misc_RNA (1)...(19): siRNA sense strand
ccuggaagcuuauguucaa

SEQ ID NO: 1662839 - RNA, 19 nt, Homo sapiens
  misc_RNA (1)...(19): siRNA sense strand
gcacuuucuucucaauuuc

SEQ ID NO: 1662840 - RNA, 19 nt, Homo sapiens
  misc_RNA (1)...(19): siRNA sense strand
guagagaaggcaaagaauu

SEQ ID NO: 1662841 - RNA, 19 nt, Homo sapiens
  misc_RNA (1)...(19): siRNA sense strand
gauacaaaccucacauuag

SEQ ID NO: 1662842 - RNA, 19 nt, Homo sapiens
  misc_RNA (1)...(19): siRNA sense strand
aggagaauacccuaaauua

SEQ ID NO: 1662843 - RNA, 19 nt, Homo sapiens
  misc_RNA (1)...(19): siRNA sense strand
gcaggcauuugaaggagaa

SEQ ID NO: 1662844 - RNA, 19 nt, Homo sapiens
  misc_RNA (1)...(19): siRNA sense strand
gaagcaggcauuugaagga

SEQ ID NO: 1662845 - RNA, 19 nt, Homo sapiens
  misc_RNA (1)...(19): siRNA sense strand
gugcaacccuuacucacuu

SEQ ID NO: 1662846 - RNA, 19 nt, Homo sapiens
  misc_RNA (1)...(19): siRNA sense strand
cauggaagaugaugcacaa

SEQ ID NO: 1662847 - RNA, 19 nt, Homo sapiens
  misc_RNA (1)...(19): siRNA sense strand
gaggauuauucguaucuug

SEQ ID NO: 1662848 - RNA, 19 nt, Homo sapiens
  misc_RNA (1)...(19): siRNA sense strand
gaacauguagccaguaguc

SEQ ID NO: 1662849 - RNA, 19 nt, Homo sapiens
  misc_RNA (1)...(19): siRNA sense strand
acgaguaucugauuuagga

SEQ ID NO: 1662850 - RNA, 19 nt, Homo sapiens
  misc_RNA (1)...(19): siRNA sense strand
ugauacaaaccucacauua

SEQ ID NO: 1662851 - RNA, 19 nt, Homo sapiens
  misc_RNA (1)...(19): siRNA sense strand
cuaugaggcugcuuaucua

SEQ ID NO: 1662852 - RNA, 19 nt, Homo sapiens
  misc_RNA (1)...(19): siRNA sense strand
gcacaacuagcaagacuuc

SEQ ID NO: 1662853 - RNA, 19 nt, Homo sapiens
  misc_RNA (1)...(19): siRNA sense strand
gaaggacagagaagaaaug

SEQ ID NO: 1662854 - RNA, 19 nt, Homo sapiens
  misc_RNA (1)...(19): siRNA sense strand
gauuaucuuucucaaggaa

SEQ ID NO: 1662855 - RNA, 19 nt, Homo sapiens
  misc_RNA (1)...(19): siRNA sense strand
acagagaacuacacuuaca

SEQ ID NO: 1662856 - RNA, 19 nt, Homo sapiens
  misc_RNA (1)...(19): siRNA sense strand
cugaugaacuugaugguau

SEQ ID NO: 1662857 - RNA, 19 nt, Homo sapiens
  misc_RNA (1)...(19): siRNA sense strand
uacaacacauggaagauga

SEQ ID NO: 1662858 - RNA, 19 nt, Homo sapiens
  misc_RNA (1)...(19): siRNA sense strand
gauauugugcuacuuuaga

SEQ ID NO: 1662859 - RNA, 19 nt, Homo sapiens
  misc_RNA (1)...(19): siRNA sense strand
ggaauagaucuuucuggaa

SEQ ID NO: 1662860 - RNA, 19 nt, Homo sapiens
  misc_RNA (1)...(19): siRNA sense strand
guaauccuccuuccucuga

SEQ ID NO: 1662861 - RNA, 19 nt, Homo sapiens
  misc_RNA (1)...(19): siRNA sense strand
uaugucugcucuucaguaa

SEQ ID NO: 1662862 - RNA, 19 nt, Homo sapiens
  misc_RNA (1)...(19): siRNA sense strand
guugaaccauacaauaaga

SEQ ID NO: 1662863 - RNA, 19 nt, Homo sapiens
  misc_RNA (1)...(19): siRNA sense strand
gauugggccucuuacugaa

SEQ ID NO: 1662864 - RNA, 19 nt, Homo sapiens
  misc_RNA (1)...(19): siRNA sense strand
guggauggauauugugcua

SEQ ID NO: 1662865 - RNA, 19 nt, Homo sapiens
  misc_RNA (1)...(19): siRNA sense strand
gaacuugauuaucuuucuc

SEQ ID NO: 1662866 - RNA, 19 nt, Homo sapiens
  misc_RNA (1)...(19): siRNA sense strand
guaaagacuuauacuucuc

SEQ ID NO: 1662867 - RNA, 19 nt, Homo sapiens
  misc_RNA (1)...(19): siRNA sense strand
gcaccaaucaguaacaaag

SEQ ID NO: 1662868 - RNA, 19 nt, Homo sapiens
  misc_RNA (1)...(19): siRNA sense strand
uaaguugcaccaaucagua

SEQ ID NO: 1662869 - RNA, 19 nt, Homo sapiens
  misc_RNA (1)...(19): siRNA sense strand
gauccuaucaacuugguuu

SEQ ID NO: 1662870 - RNA, 19 nt, Homo sapiens
  misc_RNA (1)...(19): siRNA sense strand
ugaggcugcuuaucuauca

SEQ ID NO: 1662871 - RNA, 19 nt, Homo sapiens
  misc_RNA (1)...(19): siRNA sense strand
caggaaauacugcagcuuu

SEQ ID NO: 1662872 - RNA, 19 nt, Homo sapiens
  misc_RNA (1)...(19): siRNA sense strand
ccaguguuguggauggaua

SEQ ID NO: 1662873 - RNA, 19 nt, Homo sapiens
  misc_RNA (1)...(19): siRNA sense strand
ucucacauuuguuucauug

SEQ ID NO: 1662874 - RNA, 19 nt, Homo sapiens
  misc_RNA (1)...(19): siRNA sense strand
ugaaggagaauacccuaaa

SEQ ID NO: 1662875 - RNA, 19 nt, Homo sapiens
  misc_RNA (1)...(19): siRNA sense strand
uggauauugugcuacuuua

SEQ ID NO: 1662876 - RNA, 19 nt, Homo sapiens
  misc_RNA (1)...(19): siRNA sense strand
cagcuucucuccacacaag

SEQ ID NO: 1662877 - RNA, 19 nt, Homo sapiens
  misc_RNA (1)...(19): siRNA sense strand
gagcuacaagguuucauug

SEQ ID NO: 1662878 - RNA, 19 nt, Homo sapiens
  misc_RNA (1)...(19): siRNA sense strand
ggagcuacaagguuucauu

SEQ ID NO: 1662879 - RNA, 19 nt, Homo sapiens
  misc_RNA (1)...(19): siRNA sense strand
gauguuccuuguucucugu

SEQ ID NO: 1662880 - RNA, 19 nt, Homo sapiens
  misc_RNA (1)...(19): siRNA sense strand
gaaauguggcaguagugaa

SEQ ID NO: 1662881 - RNA, 19 nt, Homo sapiens
  misc_RNA (1)...(19): siRNA sense strand
acgaagacuuugauguaaa

SEQ ID NO: 1662882 - RNA, 19 nt, Homo sapiens
  misc_RNA (1)...(19): siRNA sense strand
ggggagcccuggaagcuua

SEQ ID NO: 1662883 - RNA, 19 nt, Homo sapiens
  misc_RNA (1)...(19): siRNA sense strand
uagacgaguaucugauuua

SEQ ID NO: 1662884 - RNA, 19 nt, Homo sapiens
  misc_RNA (1)...(19): siRNA sense strand
aacgaagacuuugauguaa

SEQ ID NO: 1662885 - RNA, 19 nt, Homo sapiens
  misc_RNA (1)...(19): siRNA sense strand
auacaaaccucacauuagc

SEQ ID NO: 1662886 - RNA, 19 nt, Homo sapiens
  misc_RNA (1)...(19): siRNA sense strand
gaacaacuagcaaaacuug

SEQ ID NO: 1662887 - RNA, 19 nt, Homo sapiens
  misc_RNA (1)...(19): siRNA sense strand
gggagcuguugauaggaua

SEQ ID NO: 1662888 - RNA, 19 nt, Homo sapiens
  misc_RNA (1)...(19): siRNA sense strand
aagcuuauguucaaucagu

SEQ ID NO: 1662889 - RNA, 19 nt, Homo sapiens
  misc_RNA (1)...(19): siRNA sense strand
caggacggguguuauagug

SEQ ID NO: 1662890 - RNA, 19 nt, Homo sapiens
  misc_RNA (1)...(19): siRNA sense strand
gauggacaaccggaaauuu

SEQ ID NO: 1662891 - RNA, 19 nt, Homo sapiens
  misc_RNA (1)...(19): siRNA sense strand
aagaagagagauccuguuu

SEQ ID NO: 1662892 - RNA, 19 nt, Homo sapiens
  misc_RNA (1)...(19): siRNA sense strand
ucagucaguuggacagaga

SEQ ID NO: 1662893 - RNA, 19 nt, Homo sapiens
  misc_RNA (1)...(19): siRNA sense strand
gauuugcuucggaggauua

SEQ ID NO: 1662894 - RNA, 19 nt, Homo sapiens
  misc_RNA (1)...(19): siRNA sense strand
cagcauauccaagggaauu

SEQ ID NO: 1662895 - RNA, 19 nt, Homo sapiens
  misc_RNA (1)...(19): siRNA sense strand
gcacaagcaacugggauug

SEQ ID NO: 1662896 - RNA, 19 nt, Homo sapiens
  misc_RNA (1)...(19): siRNA sense strand
gaguuaugagugacuauuu

SEQ ID NO: 1662897 - RNA, 19 nt, Homo sapiens
  misc_RNA (1)...(19): siRNA sense strand
gcacaagauauauucauac

SEQ ID NO: 1662898 - RNA, 19 nt, Homo sapiens
  misc_RNA (1)...(19): siRNA sense strand
uguauaaguugcaccaauc

SEQ ID NO: 1662899 - RNA, 19 nt, Homo sapiens
  misc_RNA (1)...(19): siRNA sense strand
ggacagagaacuacacuua

SEQ ID NO: 1662900 - RNA, 19 nt, Homo sapiens
  misc_RNA (1)...(19): siRNA sense strand
ccaaagagcuguugaacuu

SEQ ID NO: 1662901 - RNA, 19 nt, Homo sapiens
  misc_RNA (1)...(19): siRNA sense strand
gaauagaucuuucuggaau

SEQ ID NO: 1662902 - RNA, 19 nt, Homo sapiens
  misc_RNA (1)...(19): siRNA sense strand
gaagagagauccuguuucu

SEQ ID NO: 1662903 - RNA, 19 nt, Homo sapiens
  misc_RNA (1)...(19): siRNA sense strand
caaagaccauccaguuaua

SEQ ID NO: 1662904 - RNA, 19 nt, Homo sapiens
  misc_RNA (1)...(19): siRNA sense strand
gcaacaaacucuucgaugu

SEQ ID NO: 1662905 - RNA, 19 nt, Homo sapiens
  misc_RNA (1)...(19): siRNA sense strand
gagaagaaauguggcagua

SEQ ID NO: 1662906 - RNA, 19 nt, Homo sapiens
  misc_RNA (1)...(19): siRNA sense strand
ugaaggagcuacaagguuu

SEQ ID NO: 1662907 - RNA, 19 nt, Homo sapiens
  misc_RNA (1)...(19): siRNA sense strand
cuacagaccucuauguuga

SEQ ID NO: 1662908 - RNA, 19 nt, Homo sapiens
  misc_RNA (1)...(19): siRNA sense strand
gaacagcucuucagguuuu

SEQ ID NO: 1662909 - RNA, 19 nt, Homo sapiens
  misc_RNA (1)...(19): siRNA sense strand
caacagugcauuagacaua

SEQ ID NO: 1662910 - RNA, 19 nt, Homo sapiens
  misc_RNA (1)...(19): siRNA sense strand
gaagaaauguggcaguagu

SEQ ID NO: 1662911 - RNA, 19 nt, Homo sapiens
  misc_RNA (1)...(19): siRNA sense strand
caacugggauugagucguu

SEQ ID NO: 1662912 - RNA, 19 nt, Homo sapiens
  misc_RNA (1)...(19): siRNA sense strand
gcaaagaccauccaguuau

SEQ ID NO: 1662913 - RNA, 19 nt, Homo sapiens
  misc_RNA (1)...(19): siRNA sense strand
aaacgaagacuuugaugua

SEQ ID NO: 1662914 - RNA, 19 nt, Homo sapiens
  misc_RNA (1)...(19): siRNA sense strand
gaaggagaauacccuaaau

SEQ ID NO: 1662915 - RNA, 19 nt, Homo sapiens
  misc_RNA (1)...(19): siRNA sense strand
ggaagaugaugcacaagau

SEQ ID NO: 1662916 - RNA, 19 nt, Homo sapiens
  misc_RNA (1)...(19): siRNA sense strand
uguaauugcugaacaacua

SEQ ID NO: 1662917 - RNA, 19 nt, Homo sapiens
  misc_RNA (1)...(19): siRNA sense strand
gaagaugaugcacaagaua

SEQ ID NO: 1662918 - RNA, 19 nt, Homo sapiens
  misc_RNA (1)...(19): siRNA sense strand
gcaagugaacuaaauguug

SEQ ID NO: 1662919 - RNA, 19 nt, Homo sapiens
  misc_RNA (1)...(19): siRNA sense strand
cggaacagcucuucagguu

SEQ ID NO: 1662920 - RNA, 19 nt, Homo sapiens
  misc_RNA (1)...(19): siRNA sense strand
ggagaauacccuaaauuau

SEQ ID NO: 1662921 - RNA, 19 nt, Homo sapiens
  misc_RNA (1)...(19): siRNA sense strand
ggaccaauauggagaaacu

SEQ ID NO: 1662922 - RNA, 19 nt, Homo sapiens
  misc_RNA (1)...(19): siRNA sense strand
gauccuguuucucacauuu

SEQ ID NO: 1662923 - RNA, 19 nt, Homo sapiens
  misc_RNA (1)...(19): siRNA sense strand
ggaauagaagugauagaaa

SEQ ID NO: 1662924 - RNA, 19 nt, Homo sapiens
  misc_RNA (1)...(19): siRNA sense strand
ggaagcuuauguucaauca

SEQ ID NO: 1662925 - RNA, 19 nt, Homo sapiens
  misc_RNA (1)...(19): siRNA sense strand
caacaauacagucagcaua

SEQ ID NO: 1662926 - RNA, 19 nt, Homo sapiens
  misc_RNA (1)...(19): siRNA sense strand
gaacuuugaaggauacuau

SEQ ID NO: 1662927 - RNA, 19 nt, Homo sapiens
  misc_RNA (1)...(19): siRNA sense strand
ggaaguagagagauaacaa

SEQ ID NO: 1662928 - RNA, 19 nt, Homo sapiens
  misc_RNA (1)...(19): siRNA sense strand
guagacgaguaucugauuu

SEQ ID NO: 1662929 - RNA, 19 nt, Homo sapiens
  misc_RNA (1)...(19): siRNA sense strand
gaaguagagagauaacaaa

SEQ ID NO: 1662930 - RNA, 19 nt, Homo sapiens
  misc_RNA (1)...(19): siRNA sense strand
ccaggcaagugaacaugua

SEQ ID NO: 1662931 - RNA, 19 nt, Homo sapiens
  misc_RNA (1)...(19): siRNA sense strand
uggagaaacuuauggauca

SEQ ID NO: 1662932 - RNA, 19 nt, Homo sapiens
  misc_RNA (1)...(19): siRNA sense strand
uagagaaggcaaagaauuu

SEQ ID NO: 1662933 - RNA, 19 nt, Homo sapiens
  misc_RNA (1)...(19): siRNA sense strand
cagcaucauuauucaguuu

SEQ ID NO: 1662934 - RNA, 19 nt, Homo sapiens
  misc_RNA (1)...(19): siRNA sense strand
ggcaaagaccauccaguua

SEQ ID NO: 1662935 - RNA, 19 nt, Homo sapiens
  misc_RNA (1)...(19): siRNA sense strand
gaacuacagaccucuaugu

SEQ ID NO: 1662936 - RNA, 19 nt, Homo sapiens
  misc_RNA (1)...(19): siRNA sense strand
ggcacuuucuucucaauuu

SEQ ID NO: 1662937 - RNA, 19 nt, Homo sapiens
  misc_RNA (1)...(19): siRNA sense strand
ugacaacacugaggcuauu

SEQ ID NO: 1662938 - RNA, 19 nt, Homo sapiens
  misc_RNA (1)...(19): siRNA sense strand
ccuggaagcuuauguucaa

SEQ ID NO: 1662939 - RNA, 19 nt, Homo sapiens
  misc_RNA (1)...(19): siRNA sense strand
gcacuuucuucucaauuuc

SEQ ID NO: 1662940 - RNA, 19 nt, Homo sapiens
  misc_RNA (1)...(19): siRNA sense strand
guagagaaggcaaagaauu

SEQ ID NO: 1662941 - RNA, 19 nt, Homo sapiens
  misc_RNA (1)...(19): siRNA sense strand
gauacaaaccucacauuag

SEQ ID NO: 1662942 - RNA, 19 nt, Homo sapiens
  misc_RNA (1)...(19): siRNA sense strand
aggagaauacccuaaauua

SEQ ID NO: 1662943 - RNA, 19 nt, Homo sapiens
  misc_RNA (1)...(19): siRNA sense strand
gcaggcauuugaaggagaa

SEQ ID NO: 1662944 - RNA, 19 nt, Homo sapiens
  misc_RNA (1)...(19): siRNA sense strand
gaagcaggcauuugaagga

SEQ ID NO: 1662945 - RNA, 19 nt, Homo sapiens
  misc_RNA (1)...(19): siRNA sense strand
gugcaacccuuacucacuu

SEQ ID NO: 1662946 - RNA, 19 nt, Homo sapiens
  misc_RNA (1)...(19): siRNA sense strand
cauggaagaugaugcacaa

SEQ ID NO: 1662947 - RNA, 19 nt, Homo sapiens
  misc_RNA (1)...(19): siRNA sense strand
gaggauuauucguaucuug

SEQ ID NO: 1662948 - RNA, 19 nt, Homo sapiens
  misc_RNA (1)...(19): siRNA sense strand
gaacauguagccaguaguc

SEQ ID NO: 1662949 - RNA, 19 nt, Homo sapiens
  misc_RNA (1)...(19): siRNA sense strand
acgaguaucugauuuagga

SEQ ID NO: 1662950 - RNA, 19 nt, Homo sapiens
  misc_RNA (1)...(19): siRNA sense strand
ugauacaaaccucacauua

SEQ ID NO: 1662951 - RNA, 19 nt, Homo sapiens
  misc_RNA (1)...(19): siRNA sense strand
cuaugaggcugcuuaucua

SEQ ID NO: 1662952 - RNA, 19 nt, Homo sapiens
  misc_RNA (1)...(19): siRNA sense strand
gcacaacuagcaagacuuc

SEQ ID NO: 1662953 - RNA, 19 nt, Homo sapiens
  misc_RNA (1)...(19): siRNA sense strand
gaaggacagagaagaaaug

SEQ ID NO: 1662954 - RNA, 19 nt, Homo sapiens
  misc_RNA (1)...(19): siRNA sense strand
gauuaucuuucucaaggaa

SEQ ID NO: 1662955 - RNA, 19 nt, Homo sapiens
  misc_RNA (1)...(19): siRNA sense strand
acagagaacuacacuuaca

SEQ ID NO: 1662956 - RNA, 19 nt, Homo sapiens
  misc_RNA (1)...(19): siRNA sense strand
cugaugaacuugaugguau

SEQ ID NO: 1662957 - RNA, 19 nt, Homo sapiens
  misc_RNA (1)...(19): siRNA sense strand
uacaacacauggaagauga

SEQ ID NO: 1662958 - RNA, 19 nt, Homo sapiens
  misc_RNA (1)...(19): siRNA sense strand
gauauugugcuacuuuaga

SEQ ID NO: 1662959 - RNA, 19 nt, Homo sapiens
  misc_RNA (1)...(19): siRNA sense strand
ggaauagaucuuucuggaa

SEQ ID NO: 1662960 - RNA, 19 nt, Homo sapiens
  misc_RNA (1)...(19): siRNA sense strand
guaauccuccuuccucuga

SEQ ID NO: 1662961 - RNA, 19 nt, Homo sapiens
  misc_RNA (1)...(19): siRNA sense strand
uaugucugcucuucaguaa

SEQ ID NO: 1662962 - RNA, 19 nt, Homo sapiens
  misc_RNA (1)...(19): siRNA sense strand
guugaaccauacaauaaga

SEQ ID NO: 1662963 - RNA, 19 nt, Homo sapiens
  misc_RNA (1)...(19): siRNA sense strand
gauugggccucuuacugaa

SEQ ID NO: 1662964 - RNA, 19 nt, Homo sapiens
  misc_RNA (1)...(19): siRNA sense strand
guggauggauauugugcua

SEQ ID NO: 1662965 - RNA, 19 nt, Homo sapiens
  misc_RNA (1)...(19): siRNA sense strand
gaacuugauuaucuuucuc

SEQ ID NO: 1662966 - RNA, 19 nt, Homo sapiens
  misc_RNA (1)...(19): siRNA sense strand
guaaagacuuauacuucuc

SEQ ID NO: 1662967 - RNA, 19 nt, Homo sapiens
  misc_RNA (1)...(19): siRNA sense strand
gcaccaaucaguaacaaag

SEQ ID NO: 1662968 - RNA, 19 nt, Homo sapiens
  misc_RNA (1)...(19): siRNA sense strand
uaaguugcaccaaucagua

SEQ ID NO: 1662969 - RNA, 19 nt, Homo sapiens
  misc_RNA (1)...(19): siRNA sense strand
gauccuaucaacuugguuu

SEQ ID NO: 1662970 - RNA, 19 nt, Homo sapiens
  misc_RNA (1)...(19): siRNA sense strand
ugaggcugcuuaucuauca

SEQ ID NO: 1662971 - RNA, 19 nt, Homo sapiens
  misc_RNA (1)...(19): siRNA sense strand
caggaaauacugcagcuuu

SEQ ID NO: 1662972 - RNA, 19 nt, Homo sapiens
  misc_RNA (1)...(19): siRNA sense strand
ccaguguuguggauggaua

SEQ ID NO: 1662973 - RNA, 19 nt, Homo sapiens
  misc_RNA (1)...(19): siRNA sense strand
ucucacauuuguuucauug

SEQ ID NO: 1662974 - RNA, 19 nt, Homo sapiens
  misc_RNA (1)...(19): siRNA sense strand
ugaaggagaauacccuaaa

SEQ ID NO: 1662975 - RNA, 19 nt, Homo sapiens
  misc_RNA (1)...(19): siRNA sense strand
uggauauugugcuacuuua

SEQ ID NO: 1662976 - RNA, 19 nt, Homo sapiens
  misc_RNA (1)...(19): siRNA sense strand
cagcuucucuccacacaag

SEQ ID NO: 1662977 - RNA, 19 nt, Homo sapiens
  misc_RNA (1)...(19): siRNA sense strand
gagcuacaagguuucauug

SEQ ID NO: 1662978 - RNA, 19 nt, Homo sapiens
  misc_RNA (1)...(19): siRNA sense strand
ggagcuacaagguuucauu

SEQ ID NO: 1662979 - RNA, 19 nt, Homo sapiens
  misc_RNA (1)...(19): siRNA sense strand
gauguuccuuguucucugu

SEQ ID NO: 1662980 - RNA, 19 nt, Homo sapiens
  misc_RNA (1)...(19): siRNA sense strand
gaaauguggcaguagugaa

SEQ ID NO: 1662981 - RNA, 19 nt, Homo sapiens
  misc_RNA (1)...(19): siRNA sense strand
acgaagacuuugauguaaa

SEQ ID NO: 1662982 - RNA, 19 nt, Homo sapiens
  misc_RNA (1)...(19): siRNA sense strand
ggggagcccuggaagcuua

SEQ ID NO: 1662983 - RNA, 19 nt, Homo sapiens
  misc_RNA (1)...(19): siRNA sense strand
uagacgaguaucugauuua

SEQ ID NO: 1662984 - RNA, 19 nt, Homo sapiens
  misc_RNA (1)...(19): siRNA sense strand
aacgaagacuuugauguaa

SEQ ID NO: 1662985 - RNA, 19 nt, Homo sapiens
  misc_RNA (1)...(19): siRNA sense strand
auacaaaccucacauuagc

SEQ ID NO: 1662986 - RNA, 19 nt, Homo sapiens
  misc_RNA (1)...(19): siRNA sense strand
gaacaacuagcaaaacuug

SEQ ID NO: 1662987 - RNA, 19 nt, Homo sapiens
  misc_RNA (1)...(19): siRNA sense strand
gggagcuguugauaggaua

SEQ ID NO: 1662988 - RNA, 19 nt, Homo sapiens
  misc_RNA (1)...(19): siRNA sense strand
aagcuuauguucaaucagu

SEQ ID NO: 1662989 - RNA, 19 nt, Homo sapiens
  misc_RNA (1)...(19): siRNA sense strand
caggacggguguuauagug

SEQ ID NO: 1662990 - RNA, 19 nt, Homo sapiens
  misc_RNA (1)...(19): siRNA sense strand
gauggacaaccggaaauuu

SEQ ID NO: 1662991 - RNA, 19 nt, Homo sapiens
  misc_RNA (1)...(19): siRNA sense strand
aagaagagagauccuguuu

SEQ ID NO: 1662992 - RNA, 19 nt, Homo sapiens
  misc_RNA (1)...(19): siRNA sense strand
ucagucaguuggacagaga

SEQ ID NO: 1662993 - RNA, 19 nt, Homo sapiens
  misc_RNA (1)...(19): siRNA sense strand
gauuugcuucggaggauua

SEQ ID NO: 1662994 - RNA, 19 nt, Homo sapiens
  misc_RNA (1)...(19): siRNA sense strand
cagcauauccaagggaauu

SEQ ID NO: 1662995 - RNA, 19 nt, Homo sapiens
  misc_RNA (1)...(19): siRNA sense strand
gcacaagcaacugggauug

SEQ ID NO: 1662996 - RNA, 19 nt, Homo sapiens
  misc_RNA (1)...(19): siRNA sense strand
gaguuaugagugacuauuu

SEQ ID NO: 1662997 - RNA, 19 nt, Homo sapiens
  misc_RNA (1)...(19): siRNA sense strand
gcacaagauauauucauac

SEQ ID NO: 1662998 - RNA, 19 nt, Homo sapiens
  misc_RNA (1)...(19): siRNA sense strand
uguauaaguugcaccaauc

SEQ ID NO: 1662999 - RNA, 19 nt, Homo sapiens
  misc_RNA (1)...(19): siRNA sense strand
gcaaggagggcgagaagaa

SEQ ID NO: 1663000 - RNA, 19 nt, Homo sapiens
  misc_RNA (1)...(19): siRNA sense strand
ggaaagaggugaaaaugau

SEQ ID NO: 1663001 - RNA, 19 nt, Homo sapiens
  misc_RNA (1)...(19): siRNA sense strand
ggacaugggagauaggaaa

SEQ ID NO: 1663002 - RNA, 19 nt, Homo sapiens
  misc_RNA (1)...(19): siRNA sense strand
gggacugucugauuauuuc

SEQ ID NO: 1663003 - RNA, 19 nt, Homo sapiens
  misc_RNA (1)...(19): siRNA sense strand
gaagaagaacggcaaguac

SEQ ID NO: 1663004 - RNA, 19 nt, Homo sapiens
  misc_RNA (1)...(19): siRNA sense strand
gacccucuuugccaaguuu

SEQ ID NO: 1663005 - RNA, 19 nt, Homo sapiens
  misc_RNA (1)...(19): siRNA sense strand
cuacaacgcgcucaucaug

SEQ ID NO: 1663006 - RNA, 19 nt, Homo sapiens
  misc_RNA (1)...(19): siRNA sense strand
ccagcagcacuuugaguua

SEQ ID NO: 1663007 - RNA, 19 nt, Homo sapiens
  misc_RNA (1)...(19): siRNA sense strand
agaagaagaacggcaagua

SEQ ID NO: 1663008 - RNA, 19 nt, Homo sapiens
  misc_RNA (1)...(19): siRNA sense strand
cagagcagcacguccauga

SEQ ID NO: 1663009 - RNA, 19 nt, Homo sapiens
  misc_RNA (1)...(19): siRNA sense strand
gaacggcaaguacgagaag

SEQ ID NO: 1663010 - RNA, 19 nt, Homo sapiens
  misc_RNA (1)...(19): siRNA sense strand
ucaacggcaucuacgaguu

SEQ ID NO: 1663011 - RNA, 19 nt, Homo sapiens
  misc_RNA (1)...(19): siRNA sense strand
gccacaaucugucccucaa

SEQ ID NO: 1663012 - RNA, 19 nt, Homo sapiens
  misc_RNA (1)...(19): siRNA sense strand
aagcagggcuggcagaacu

SEQ ID NO: 1663013 - RNA, 19 nt, Homo sapiens
  misc_RNA (1)...(19): siRNA sense strand
agaacucgcugggcaacaa

SEQ ID NO: 1663014 - RNA, 19 nt, Homo sapiens
  misc_RNA (1)...(19): siRNA sense strand
cacaaucugucccucaaca

SEQ ID NO: 1663015 - RNA, 19 nt, Homo sapiens
  misc_RNA (1)...(19): siRNA sense strand
gggccagaccaguuacuuu

SEQ ID NO: 1663016 - RNA, 19 nt, Homo sapiens
  misc_RNA (1)...(19): siRNA sense strand
gaacuccauccgccacaau

SEQ ID NO: 1663017 - RNA, 19 nt, Homo sapiens
  misc_RNA (1)...(19): siRNA sense strand
cagcagcacuuugaguuac

SEQ ID NO: 1663018 - RNA, 19 nt, Homo sapiens
  misc_RNA (1)...(19): siRNA sense strand
caacggcaucuacgaguuc

SEQ ID NO: 1663019 - RNA, 19 nt, Homo sapiens
  misc_RNA (1)...(19): siRNA sense strand
gcagcacuuugaguuacaa

SEQ ID NO: 1663020 - RNA, 19 nt, Homo sapiens
  misc_RNA (1)...(19): siRNA sense strand
gccagcagcacuuugaguu

SEQ ID NO: 1663021 - RNA, 19 nt, Homo sapiens
  misc_RNA (1)...(19): siRNA sense strand
ggucuucuuccaacccuuu

SEQ ID NO: 1663022 - RNA, 19 nt, Homo sapiens
  misc_RNA (1)...(19): siRNA sense strand
caucuacgaguucaucaug

SEQ ID NO: 1663023 - RNA, 19 nt, Homo sapiens
  misc_RNA (1)...(19): siRNA sense strand
gcaagggcaacuacuggau

SEQ ID NO: 1663024 - RNA, 19 nt, Homo sapiens
  misc_RNA (1)...(19): siRNA sense strand
gcaacaaccacuccuucuc

SEQ ID NO: 1663025 - RNA, 19 nt, Homo sapiens
  misc_RNA (1)...(19): siRNA sense strand
ccaccggccucaccuucau

SEQ ID NO: 1663026 - RNA, 19 nt, Homo sapiens
  misc_RNA (1)...(19): siRNA sense strand
gagauaggaaagaggugaa

SEQ ID NO: 1663027 - RNA, 19 nt, Homo sapiens
  misc_RNA (1)...(19): siRNA sense strand
gcuccguguugacucagaa

SEQ ID NO: 1663028 - RNA, 19 nt, Homo sapiens
  misc_RNA (1)...(19): siRNA sense strand
uuccaacccuuuaauacau

SEQ ID NO: 1663029 - RNA, 19 nt, Homo sapiens
  misc_RNA (1)...(19): siRNA sense strand
uccaacccuuuaauacauu

SEQ ID NO: 1663030 - RNA, 19 nt, Homo sapiens
  misc_RNA (1)...(19): siRNA sense strand
gagcgacgacguguucauc

SEQ ID NO: 1663031 - RNA, 19 nt, Homo sapiens
  misc_RNA (1)...(19): siRNA sense strand
caugggagauaggaaagag

SEQ ID NO: 1663032 - RNA, 19 nt, Homo sapiens
  misc_RNA (1)...(19): siRNA sense strand
gcccuacagcuccguguug

SEQ ID NO: 1663033 - RNA, 19 nt, Homo sapiens
  misc_RNA (1)...(19): siRNA sense strand
acagcuccguguugacuca

SEQ ID NO: 1663034 - RNA, 19 nt, Homo sapiens
  misc_RNA (1)...(19): siRNA sense strand
agaagaacggcaaguacga

SEQ ID NO: 1663035 - RNA, 19 nt, Homo sapiens
  misc_RNA (1)...(19): siRNA sense strand
ggccagaccaguuacuuuu

SEQ ID NO: 1663036 - RNA, 19 nt, Homo sapiens
  misc_RNA (1)...(19): siRNA sense strand
ugaaaaugauccccaaguc

SEQ ID NO: 1663037 - RNA, 19 nt, Homo sapiens
  misc_RNA (1)...(19): siRNA sense strand
gcaaagaccuccuuaaugg

SEQ ID NO: 1663038 - RNA, 19 nt, Homo sapiens
  misc_RNA (1)...(19): siRNA sense strand
gguggaagcugucggagaa

SEQ ID NO: 1663039 - RNA, 19 nt, Homo sapiens
  misc_RNA (1)...(19): siRNA sense strand
gcaccgcuaugauguauuc

SEQ ID NO: 1663040 - RNA, 19 nt, Homo sapiens
  misc_RNA (1)...(19): siRNA sense strand
gcuaugauguauucugcuu

SEQ ID NO: 1663041 - RNA, 19 nt, Homo sapiens
  misc_RNA (1)...(19): siRNA sense strand
ggcaaagaccuccuuaaug

SEQ ID NO: 1663042 - RNA, 19 nt, Homo sapiens
  misc_RNA (1)...(19): siRNA sense strand
aggcaacggucauggcaaa

SEQ ID NO: 1663043 - RNA, 19 nt, Homo sapiens
  misc_RNA (1)...(19): siRNA sense strand
uggcaaagaccuccuuaau

SEQ ID NO: 1663044 - RNA, 19 nt, Homo sapiens
  misc_RNA (1)...(19): siRNA sense strand
aggagacccuguucaccua

SEQ ID NO: 1663045 - RNA, 19 nt, Homo sapiens
  misc_RNA (1)...(19): siRNA sense strand
ccuacggacugcccuucua

SEQ ID NO: 1663046 - RNA, 19 nt, Homo sapiens
  misc_RNA (1)...(19): siRNA sense strand
gcaacggucauggcaaaga

SEQ ID NO: 1663047 - RNA, 19 nt, Homo sapiens
  misc_RNA (1)...(19): siRNA sense strand
cuacaacggcuucuacuac

SEQ ID NO: 1663048 - RNA, 19 nt, Homo sapiens
  misc_RNA (1)...(19): siRNA sense strand
caaggugggacagcucuuu

SEQ ID NO: 1663049 - RNA, 19 nt, Homo sapiens
  misc_RNA (1)...(19): siRNA sense strand
caaagaccuccuuaaugga

SEQ ID NO: 1663050 - RNA, 19 nt, Homo sapiens
  misc_RNA (1)...(19): siRNA sense strand
gaaccuaggcaacggucau

SEQ ID NO: 1663051 - RNA, 19 nt, Homo sapiens
  misc_RNA (1)...(19): siRNA sense strand
uugacgggcuggaggauga

SEQ ID NO: 1663052 - RNA, 19 nt, Homo sapiens
  misc_RNA (1)...(19): siRNA sense strand
gcugaggcaccgcuccuuu

SEQ ID NO: 1663053 - RNA, 19 nt, Homo sapiens
  misc_RNA (1)...(19): siRNA sense strand
caacggucauggcaaagac

SEQ ID NO: 1663054 - RNA, 19 nt, Homo sapiens
  misc_RNA (1)...(19): siRNA sense strand
uguacgguguuuacugcua

SEQ ID NO: 1663055 - RNA, 19 nt, Homo sapiens
  misc_RNA (1)...(19): siRNA sense strand
gggguguggucuuuccuua

SEQ ID NO: 1663056 - RNA, 19 nt, Homo sapiens
  misc_RNA (1)...(19): siRNA sense strand
gcgugugcgugucaaaugg

SEQ ID NO: 1663057 - RNA, 19 nt, Homo sapiens
  misc_RNA (1)...(19): siRNA sense strand
ggaggacuaugggcguuac

SEQ ID NO: 1663058 - RNA, 19 nt, Homo sapiens
  misc_RNA (1)...(19): siRNA sense strand
uacaacggcuucuacuacu

SEQ ID NO: 1663059 - RNA, 19 nt, Homo sapiens
  misc_RNA (1)...(19): siRNA sense strand
gugguucacccgcauccua

SEQ ID NO: 1663060 - RNA, 19 nt, Homo sapiens
  misc_RNA (1)...(19): siRNA sense strand
cugcaccgcuaugauguau

SEQ ID NO: 1663061 - RNA, 19 nt, Homo sapiens
  misc_RNA (1)...(19): siRNA sense strand
ucacccgcauccuaacugu

SEQ ID NO: 1663062 - RNA, 19 nt, Homo sapiens
  misc_RNA (1)...(19): siRNA sense strand
ggcaggacaaagagcauga

SEQ ID NO: 1663063 - RNA, 19 nt, Homo sapiens
  misc_RNA (1)...(19): siRNA sense strand
ggugguggccuccuuugag

SEQ ID NO: 1663064 - RNA, 19 nt, Homo sapiens
  misc_RNA (1)...(19): siRNA sense strand
gguguggucuuuccuuacc

SEQ ID NO: 1663065 - RNA, 19 nt, Homo sapiens
  misc_RNA (1)...(19): siRNA sense strand
uuaccgcugugaggucauu

SEQ ID NO: 1663066 - RNA, 19 nt, Homo sapiens
  misc_RNA (1)...(19): siRNA sense strand
gaagcugucggacuacaaa

SEQ ID NO: 1663067 - RNA, 19 nt, Homo sapiens
  misc_RNA (1)...(19): siRNA sense strand
aggugaagcugucggacua

SEQ ID NO: 1663068 - RNA, 19 nt, Homo sapiens
  misc_RNA (1)...(19): siRNA sense strand
gaagcugucggacuacaaa

SEQ ID NO: 1663069 - RNA, 19 nt, Homo sapiens
  misc_RNA (1)...(19): siRNA sense strand
aggugaagcugucggacua

SEQ ID NO: 1663070 - RNA, 19 nt, Homo sapiens
  misc_RNA (1)...(19): siRNA sense strand
gaagcugucggacuacaaa

SEQ ID NO: 1663071 - RNA, 19 nt, Homo sapiens
  misc_RNA (1)...(19): siRNA sense strand
aggugaagcugucggacua

SEQ ID NO: 1663072 - RNA, 19 nt, Homo sapiens
  misc_RNA (1)...(19): siRNA sense strand
gcaagucggucgaggagau

SEQ ID NO: 1663073 - RNA, 19 nt, Homo sapiens
  misc_RNA (1)...(19): siRNA sense strand
ccagaguaguggccgaaua

SEQ ID NO: 1663074 - RNA, 19 nt, Homo sapiens
  misc_RNA (1)...(19): siRNA sense strand
ccaacaagccgaccacguu

SEQ ID NO: 1663075 - RNA, 19 nt, Homo sapiens
  misc_RNA (1)...(19): siRNA sense strand
ucucgacgcuggugcagaa

SEQ ID NO: 1663076 - RNA, 19 nt, Homo sapiens
  misc_RNA (1)...(19): siRNA sense strand
guaguggccgaauaccuua

SEQ ID NO: 1663077 - RNA, 19 nt, Homo sapiens
  misc_RNA (1)...(19): siRNA sense strand
cgacuucgcccgacggaau

SEQ ID NO: 1663078 - RNA, 19 nt, Homo sapiens
  misc_RNA (1)...(19): siRNA sense strand
gagagcauccacugcaagu

SEQ ID NO: 1663079 - RNA, 19 nt, Homo sapiens
  misc_RNA (1)...(19): siRNA sense strand
caacggacugggucgcuau

SEQ ID NO: 1663080 - RNA, 19 nt, Homo sapiens
  misc_RNA (1)...(19): siRNA sense strand
gaauccaggggucguaaua

SEQ ID NO: 1663081 - RNA, 19 nt, Homo sapiens
  misc_RNA (1)...(19): siRNA sense strand
ggccagcguucuccacaac

SEQ ID NO: 1663082 - RNA, 19 nt, Homo sapiens
  misc_RNA (1)...(19): siRNA sense strand
ggucguaauauauguaaac

SEQ ID NO: 1663083 - RNA, 19 nt, Homo sapiens
  misc_RNA (1)...(19): siRNA sense strand
cagaguaguggccgaauac

SEQ ID NO: 1663084 - RNA, 19 nt, Homo sapiens
  misc_RNA (1)...(19): siRNA sense strand
cggacugggucgcuaugug

SEQ ID NO: 1663085 - RNA, 19 nt, Homo sapiens
  misc_RNA (1)...(19): siRNA sense strand
gcaagucggucgaggagau

SEQ ID NO: 1663086 - RNA, 19 nt, Homo sapiens
  misc_RNA (1)...(19): siRNA sense strand
ccagaguaguggccgaaua

SEQ ID NO: 1663087 - RNA, 19 nt, Homo sapiens
  misc_RNA (1)...(19): siRNA sense strand
ccaacaagccgaccacguu

SEQ ID NO: 1663088 - RNA, 19 nt, Homo sapiens
  misc_RNA (1)...(19): siRNA sense strand
ucucgacgcuggugcagaa

SEQ ID NO: 1663089 - RNA, 19 nt, Homo sapiens
  misc_RNA (1)...(19): siRNA sense strand
guaguggccgaauaccuua

SEQ ID NO: 1663090 - RNA, 19 nt, Homo sapiens
  misc_RNA (1)...(19): siRNA sense strand
cgacuucgcccgacggaau

SEQ ID NO: 1663091 - RNA, 19 nt, Homo sapiens
  misc_RNA (1)...(19): siRNA sense strand
gagagcauccacugcaagu

SEQ ID NO: 1663092 - RNA, 19 nt, Homo sapiens
  misc_RNA (1)...(19): siRNA sense strand
caacggacugggucgcuau

SEQ ID NO: 1663093 - RNA, 19 nt, Homo sapiens
  misc_RNA (1)...(19): siRNA sense strand
gaauccaggggucguaaua

SEQ ID NO: 1663094 - RNA, 19 nt, Homo sapiens
  misc_RNA (1)...(19): siRNA sense strand
ggccagcguucuccacaac

SEQ ID NO: 1663095 - RNA, 19 nt, Homo sapiens
  misc_RNA (1)...(19): siRNA sense strand
ggucguaauauauguaaac

SEQ ID NO: 1663096 - RNA, 19 nt, Homo sapiens
  misc_RNA (1)...(19): siRNA sense strand
cagaguaguggccgaauac

SEQ ID NO: 1663097 - RNA, 19 nt, Homo sapiens
  misc_RNA (1)...(19): siRNA sense strand
cggacugggucgcuaugug

SEQ ID NO: 1663098 - RNA, 19 nt, Homo sapiens
  misc_RNA (1)...(19): siRNA sense strand
gcaagucggucgaggagau

SEQ ID NO: 1663099 - RNA, 19 nt, Homo sapiens
  misc_RNA (1)...(19): siRNA sense strand
ccagaguaguggccgaaua

SEQ ID NO: 1663100 - RNA, 19 nt, Homo sapiens
  misc_RNA (1)...(19): siRNA sense strand
ccaacaagccgaccacguu

SEQ ID NO: 1663101 - RNA, 19 nt, Homo sapiens
  misc_RNA (1)...(19): siRNA sense strand
ucucgacgcuggugcagaa

SEQ ID NO: 1663102 - RNA, 19 nt, Homo sapiens
  misc_RNA (1)...(19): siRNA sense strand
guaguggccgaauaccuua

SEQ ID NO: 1663103 - RNA, 19 nt, Homo sapiens
  misc_RNA (1)...(19): siRNA sense strand
cgacuucgcccgacggaau

SEQ ID NO: 1663104 - RNA, 19 nt, Homo sapiens
  misc_RNA (1)...(19): siRNA sense strand
gagagcauccacugcaagu

SEQ ID NO: 1663105 - RNA, 19 nt, Homo sapiens
  misc_RNA (1)...(19): siRNA sense strand
caacggacugggucgcuau

SEQ ID NO: 1663106 - RNA, 19 nt, Homo sapiens
  misc_RNA (1)...(19): siRNA sense strand
gaauccaggggucguaaua

SEQ ID NO: 1663107 - RNA, 19 nt, Homo sapiens
  misc_RNA (1)...(19): siRNA sense strand
ggccagcguucuccacaac

SEQ ID NO: 1663108 - RNA, 19 nt, Homo sapiens
  misc_RNA (1)...(19): siRNA sense strand
ggucguaauauauguaaac

SEQ ID NO: 1663109 - RNA, 19 nt, Homo sapiens
  misc_RNA (1)...(19): siRNA sense strand
cagaguaguggccgaauac

SEQ ID NO: 1663110 - RNA, 19 nt, Homo sapiens
  misc_RNA (1)...(19): siRNA sense strand
cggacugggucgcuaugug

SEQ ID NO: 1663111 - RNA, 19 nt, Homo sapiens
  misc_RNA (1)...(19): siRNA sense strand
gcaagucggucgaggagau

SEQ ID NO: 1663112 - RNA, 19 nt, Homo sapiens
  misc_RNA (1)...(19): siRNA sense strand
ccagaguaguggccgaaua

SEQ ID NO: 1663113 - RNA, 19 nt, Homo sapiens
  misc_RNA (1)...(19): siRNA sense strand
ccaacaagccgaccacguu

SEQ ID NO: 1663114 - RNA, 19 nt, Homo sapiens
  misc_RNA (1)...(19): siRNA sense strand
ucucgacgcuggugcagaa

SEQ ID NO: 1663115 - RNA, 19 nt, Homo sapiens
  misc_RNA (1)...(19): siRNA sense strand
guaguggccgaauaccuua

SEQ ID NO: 1663116 - RNA, 19 nt, Homo sapiens
  misc_RNA (1)...(19): siRNA sense strand
cgacuucgcccgacggaau

SEQ ID NO: 1663117 - RNA, 19 nt, Homo sapiens
  misc_RNA (1)...(19): siRNA sense strand
gagagcauccacugcaagu

SEQ ID NO: 1663118 - RNA, 19 nt, Homo sapiens
  misc_RNA (1)...(19): siRNA sense strand
caacggacugggucgcuau

SEQ ID NO: 1663119 - RNA, 19 nt, Homo sapiens
  misc_RNA (1)...(19): siRNA sense strand
gaauccaggggucguaaua

SEQ ID NO: 1663120 - RNA, 19 nt, Homo sapiens
  misc_RNA (1)...(19): siRNA sense strand
ggccagcguucuccacaac

SEQ ID NO: 1663121 - RNA, 19 nt, Homo sapiens
  misc_RNA (1)...(19): siRNA sense strand
ggucguaauauauguaaac

SEQ ID NO: 1663122 - RNA, 19 nt, Homo sapiens
  misc_RNA (1)...(19): siRNA sense strand
cagaguaguggccgaauac

SEQ ID NO: 1663123 - RNA, 19 nt, Homo sapiens
  misc_RNA (1)...(19): siRNA sense strand
cggacugggucgcuaugug

SEQ ID NO: 1663124 - RNA, 19 nt, Homo sapiens
  misc_RNA (1)...(19): siRNA sense strand
cacaugagcuccuacagaa

SEQ ID NO: 1663125 - RNA, 19 nt, Homo sapiens
  misc_RNA (1)...(19): siRNA sense strand
ccacaggcauccagcguaa

SEQ ID NO: 1663126 - RNA, 19 nt, Homo sapiens
  misc_RNA (1)...(19): siRNA sense strand
ggugguggcugcugccuuu

SEQ ID NO: 1663127 - RNA, 19 nt, Homo sapiens
  misc_RNA (1)...(19): siRNA sense strand
cugaacaucugugucauua

SEQ ID NO: 1663128 - RNA, 19 nt, Homo sapiens
  misc_RNA (1)...(19): siRNA sense strand
ggugaucacuggcccuuug

SEQ ID NO: 1663129 - RNA, 19 nt, Homo sapiens
  misc_RNA (1)...(19): siRNA sense strand
gaacaucugugucauuacc

SEQ ID NO: 1663130 - RNA, 19 nt, Homo sapiens
  misc_RNA (1)...(19): siRNA sense strand
uaaccgcacugucugcuau

SEQ ID NO: 1663131 - RNA, 19 nt, Homo sapiens
  misc_RNA (1)...(19): siRNA sense strand
gaaacucacagccaaaugg

SEQ ID NO: 1663132 - RNA, 19 nt, Homo sapiens
  misc_RNA (1)...(19): siRNA sense strand
cuacaacuaugcccaaggu

SEQ ID NO: 1663133 - RNA, 19 nt, Homo sapiens
  misc_RNA (1)...(19): siRNA sense strand
ccacaugagcuccuacaga

SEQ ID NO: 1663134 - RNA, 19 nt, Homo sapiens
  misc_RNA (1)...(19): siRNA sense strand
uggcugaccugcuauaugc

SEQ ID NO: 1663135 - RNA, 19 nt, Homo sapiens
  misc_RNA (1)...(19): siRNA sense strand
gcauggcucucacugucau

SEQ ID NO: 1663136 - RNA, 19 nt, Homo sapiens
  misc_RNA (1)...(19): siRNA sense strand
caacuaugcccaaggugau

SEQ ID NO: 1663137 - RNA, 19 nt, Homo sapiens
  misc_RNA (1)...(19): siRNA sense strand
gcgagaacuucaagcaacu

SEQ ID NO: 1663138 - RNA, 19 nt, Homo sapiens
  misc_RNA (1)...(19): siRNA sense strand
gcugaacaucugugucauu

SEQ ID NO: 1663139 - RNA, 19 nt, Homo sapiens
  misc_RNA (1)...(19): siRNA sense strand
gcacggcagcauccucuuc

SEQ ID NO: 1663140 - RNA, 19 nt, Homo sapiens
  misc_RNA (1)...(19): siRNA sense strand
cagcguaaccgcacugucu

SEQ ID NO: 1663141 - RNA, 19 nt, Homo sapiens
  misc_RNA (1)...(19): siRNA sense strand
ccgcugaacaucuguguca

SEQ ID NO: 1663142 - RNA, 19 nt, Homo sapiens
  misc_RNA (1)...(19): siRNA sense strand
gcgaccacaugagcuccua

SEQ ID NO: 1663143 - RNA, 19 nt, Homo sapiens
  misc_RNA (1)...(19): siRNA sense strand
gcccuggccacccacuaua

SEQ ID NO: 1663144 - RNA, 19 nt, Homo sapiens
  misc_RNA (1)...(19): siRNA sense strand
gcugcugccuuugccauca

SEQ ID NO: 1663145 - RNA, 19 nt, Homo sapiens
  misc_RNA (1)...(19): siRNA sense strand
cugcucaucuacaacuaug

SEQ ID NO: 1663146 - RNA, 19 nt, Homo sapiens
  misc_RNA (1)...(19): siRNA sense strand
ccaucagcuuccugccuuu

SEQ ID NO: 1663147 - RNA, 19 nt, Homo sapiens
  misc_RNA (1)...(19): siRNA sense strand
guaaccgcacugucugcua

SEQ ID NO: 1663148 - RNA, 19 nt, Homo sapiens
  misc_RNA (1)...(19): siRNA sense strand
cagaaacucacagccaaau

SEQ ID NO: 1663149 - RNA, 19 nt, Homo sapiens
  misc_RNA (1)...(19): siRNA sense strand
cccacuauaugcccuaugg

SEQ ID NO: 1663150 - RNA, 19 nt, Homo sapiens
  misc_RNA (1)...(19): siRNA sense strand
cccauccucuucuacuuca

SEQ ID NO: 1663151 - RNA, 19 nt, Homo sapiens
  misc_RNA (1)...(19): siRNA sense strand
gagcuccuacagaaacuca

SEQ ID NO: 1663152 - RNA, 19 nt, Homo sapiens
  misc_RNA (1)...(19): siRNA sense strand
caugagcuccuacagaaac

SEQ ID NO: 1663153 - RNA, 19 nt, Homo sapiens
  misc_RNA (1)...(19): siRNA sense strand
cacaugagcuccuacagaa

SEQ ID NO: 1663154 - RNA, 19 nt, Homo sapiens
  misc_RNA (1)...(19): siRNA sense strand
ccacaggcauccagcguaa

SEQ ID NO: 1663155 - RNA, 19 nt, Homo sapiens
  misc_RNA (1)...(19): siRNA sense strand
ggugguggcugcugccuuu

SEQ ID NO: 1663156 - RNA, 19 nt, Homo sapiens
  misc_RNA (1)...(19): siRNA sense strand
cugaacaucugugucauua

SEQ ID NO: 1663157 - RNA, 19 nt, Homo sapiens
  misc_RNA (1)...(19): siRNA sense strand
ggugaucacuggcccuuug

SEQ ID NO: 1663158 - RNA, 19 nt, Homo sapiens
  misc_RNA (1)...(19): siRNA sense strand
gaacaucugugucauuacc

SEQ ID NO: 1663159 - RNA, 19 nt, Homo sapiens
  misc_RNA (1)...(19): siRNA sense strand
uaaccgcacugucugcuau

SEQ ID NO: 1663160 - RNA, 19 nt, Homo sapiens
  misc_RNA (1)...(19): siRNA sense strand
gaaacucacagccaaaugg

SEQ ID NO: 1663161 - RNA, 19 nt, Homo sapiens
  misc_RNA (1)...(19): siRNA sense strand
cuacaacuaugcccaaggu

SEQ ID NO: 1663162 - RNA, 19 nt, Homo sapiens
  misc_RNA (1)...(19): siRNA sense strand
ccacaugagcuccuacaga

SEQ ID NO: 1663163 - RNA, 19 nt, Homo sapiens
  misc_RNA (1)...(19): siRNA sense strand
uggcugaccugcuauaugc

SEQ ID NO: 1663164 - RNA, 19 nt, Homo sapiens
  misc_RNA (1)...(19): siRNA sense strand
gcauggcucucacugucau

SEQ ID NO: 1663165 - RNA, 19 nt, Homo sapiens
  misc_RNA (1)...(19): siRNA sense strand
caacuaugcccaaggugau

SEQ ID NO: 1663166 - RNA, 19 nt, Homo sapiens
  misc_RNA (1)...(19): siRNA sense strand
gcgagaacuucaagcaacu

SEQ ID NO: 1663167 - RNA, 19 nt, Homo sapiens
  misc_RNA (1)...(19): siRNA sense strand
gcugaacaucugugucauu

SEQ ID NO: 1663168 - RNA, 19 nt, Homo sapiens
  misc_RNA (1)...(19): siRNA sense strand
gcacggcagcauccucuuc

SEQ ID NO: 1663169 - RNA, 19 nt, Homo sapiens
  misc_RNA (1)...(19): siRNA sense strand
cagcguaaccgcacugucu

SEQ ID NO: 1663170 - RNA, 19 nt, Homo sapiens
  misc_RNA (1)...(19): siRNA sense strand
ccgcugaacaucuguguca

SEQ ID NO: 1663171 - RNA, 19 nt, Homo sapiens
  misc_RNA (1)...(19): siRNA sense strand
gcgaccacaugagcuccua

SEQ ID NO: 1663172 - RNA, 19 nt, Homo sapiens
  misc_RNA (1)...(19): siRNA sense strand
gcccuggccacccacuaua

SEQ ID NO: 1663173 - RNA, 19 nt, Homo sapiens
  misc_RNA (1)...(19): siRNA sense strand
gcugcugccuuugccauca

SEQ ID NO: 1663174 - RNA, 19 nt, Homo sapiens
  misc_RNA (1)...(19): siRNA sense strand
cugcucaucuacaacuaug

SEQ ID NO: 1663175 - RNA, 19 nt, Homo sapiens
  misc_RNA (1)...(19): siRNA sense strand
ccaucagcuuccugccuuu

SEQ ID NO: 1663176 - RNA, 19 nt, Homo sapiens
  misc_RNA (1)...(19): siRNA sense strand
guaaccgcacugucugcua

SEQ ID NO: 1663177 - RNA, 19 nt, Homo sapiens
  misc_RNA (1)...(19): siRNA sense strand
cagaaacucacagccaaau

SEQ ID NO: 1663178 - RNA, 19 nt, Homo sapiens
  misc_RNA (1)...(19): siRNA sense strand
cccacuauaugcccuaugg

SEQ ID NO: 1663179 - RNA, 19 nt, Homo sapiens
  misc_RNA (1)...(19): siRNA sense strand
cccauccucuucuacuuca

SEQ ID NO: 1663180 - RNA, 19 nt, Homo sapiens
  misc_RNA (1)...(19): siRNA sense strand
gagcuccuacagaaacuca

SEQ ID NO: 1663181 - RNA, 19 nt, Homo sapiens
  misc_RNA (1)...(19): siRNA sense strand
caugagcuccuacagaaac

SEQ ID NO: 1663182 - RNA, 19 nt, Homo sapiens
  misc_RNA (1)...(19): siRNA sense strand
cacaugagcuccuacagaa

SEQ ID NO: 1663183 - RNA, 19 nt, Homo sapiens
  misc_RNA (1)...(19): siRNA sense strand
ccacaggcauccagcguaa

SEQ ID NO: 1663184 - RNA, 19 nt, Homo sapiens
  misc_RNA (1)...(19): siRNA sense strand
ggugguggcugcugccuuu

SEQ ID NO: 1663185 - RNA, 19 nt, Homo sapiens
  misc_RNA (1)...(19): siRNA sense strand
cugaacaucugugucauua

SEQ ID NO: 1663186 - RNA, 19 nt, Homo sapiens
  misc_RNA (1)...(19): siRNA sense strand
ggugaucacuggcccuuug

SEQ ID NO: 1663187 - RNA, 19 nt, Homo sapiens
  misc_RNA (1)...(19): siRNA sense strand
gaacaucugugucauuacc

SEQ ID NO: 1663188 - RNA, 19 nt, Homo sapiens
  misc_RNA (1)...(19): siRNA sense strand
uaaccgcacugucugcuau

SEQ ID NO: 1663189 - RNA, 19 nt, Homo sapiens
  misc_RNA (1)...(19): siRNA sense strand
gaaacucacagccaaaugg

SEQ ID NO: 1663190 - RNA, 19 nt, Homo sapiens
  misc_RNA (1)...(19): siRNA sense strand
cuacaacuaugcccaaggu

SEQ ID NO: 1663191 - RNA, 19 nt, Homo sapiens
  misc_RNA (1)...(19): siRNA sense strand
ccacaugagcuccuacaga

SEQ ID NO: 1663192 - RNA, 19 nt, Homo sapiens
  misc_RNA (1)...(19): siRNA sense strand
uggcugaccugcuauaugc

SEQ ID NO: 1663193 - RNA, 19 nt, Homo sapiens
  misc_RNA (1)...(19): siRNA sense strand
gcauggcucucacugucau

SEQ ID NO: 1663194 - RNA, 19 nt, Homo sapiens
  misc_RNA (1)...(19): siRNA sense strand
caacuaugcccaaggugau

SEQ ID NO: 1663195 - RNA, 19 nt, Homo sapiens
  misc_RNA (1)...(19): siRNA sense strand
gcgagaacuucaagcaacu

SEQ ID NO: 1663196 - RNA, 19 nt, Homo sapiens
  misc_RNA (1)...(19): siRNA sense strand
gcugaacaucugugucauu

SEQ ID NO: 1663197 - RNA, 19 nt, Homo sapiens
  misc_RNA (1)...(19): siRNA sense strand
gcacggcagcauccucuuc

SEQ ID NO: 1663198 - RNA, 19 nt, Homo sapiens
  misc_RNA (1)...(19): siRNA sense strand
cagcguaaccgcacugucu

SEQ ID NO: 1663199 - RNA, 19 nt, Homo sapiens
  misc_RNA (1)...(19): siRNA sense strand
ccgcugaacaucuguguca

SEQ ID NO: 1663200 - RNA, 19 nt, Homo sapiens
  misc_RNA (1)...(19): siRNA sense strand
gcgaccacaugagcuccua

SEQ ID NO: 1663201 - RNA, 19 nt, Homo sapiens
  misc_RNA (1)...(19): siRNA sense strand
gcccuggccacccacuaua

SEQ ID NO: 1663202 - RNA, 19 nt, Homo sapiens
  misc_RNA (1)...(19): siRNA sense strand
gcugcugccuuugccauca

SEQ ID NO: 1663203 - RNA, 19 nt, Homo sapiens
  misc_RNA (1)...(19): siRNA sense strand
cugcucaucuacaacuaug

SEQ ID NO: 1663204 - RNA, 19 nt, Homo sapiens
  misc_RNA (1)...(19): siRNA sense strand
ccaucagcuuccugccuuu

SEQ ID NO: 1663205 - RNA, 19 nt, Homo sapiens
  misc_RNA (1)...(19): siRNA sense strand
guaaccgcacugucugcua

SEQ ID NO: 1663206 - RNA, 19 nt, Homo sapiens
  misc_RNA (1)...(19): siRNA sense strand
cagaaacucacagccaaau

SEQ ID NO: 1663207 - RNA, 19 nt, Homo sapiens
  misc_RNA (1)...(19): siRNA sense strand
cccacuauaugcccuaugg

SEQ ID NO: 1663208 - RNA, 19 nt, Homo sapiens
  misc_RNA (1)...(19): siRNA sense strand
cccauccucuucuacuuca

SEQ ID NO: 1663209 - RNA, 19 nt, Homo sapiens
  misc_RNA (1)...(19): siRNA sense strand
gagcuccuacagaaacuca

SEQ ID NO: 1663210 - RNA, 19 nt, Homo sapiens
  misc_RNA (1)...(19): siRNA sense strand
caugagcuccuacagaaac

SEQ ID NO: 1663211 - RNA, 19 nt, Homo sapiens
  misc_RNA (1)...(19): siRNA sense strand
cacaugagcuccuacagaa

SEQ ID NO: 1663212 - RNA, 19 nt, Homo sapiens
  misc_RNA (1)...(19): siRNA sense strand
ccacaggcauccagcguaa

SEQ ID NO: 1663213 - RNA, 19 nt, Homo sapiens
  misc_RNA (1)...(19): siRNA sense strand
ggugguggcugcugccuuu

SEQ ID NO: 1663214 - RNA, 19 nt, Homo sapiens
  misc_RNA (1)...(19): siRNA sense strand
cugaacaucugugucauua

SEQ ID NO: 1663215 - RNA, 19 nt, Homo sapiens
  misc_RNA (1)...(19): siRNA sense strand
ggugaucacuggcccuuug

SEQ ID NO: 1663216 - RNA, 19 nt, Homo sapiens
  misc_RNA (1)...(19): siRNA sense strand
gaacaucugugucauuacc

SEQ ID NO: 1663217 - RNA, 19 nt, Homo sapiens
  misc_RNA (1)...(19): siRNA sense strand
uaaccgcacugucugcuau

SEQ ID NO: 1663218 - RNA, 19 nt, Homo sapiens
  misc_RNA (1)...(19): siRNA sense strand
gaaacucacagccaaaugg

SEQ ID NO: 1663219 - RNA, 19 nt, Homo sapiens
  misc_RNA (1)...(19): siRNA sense strand
cuacaacuaugcccaaggu

SEQ ID NO: 1663220 - RNA, 19 nt, Homo sapiens
  misc_RNA (1)...(19): siRNA sense strand
ccacaugagcuccuacaga

SEQ ID NO: 1663221 - RNA, 19 nt, Homo sapiens
  misc_RNA (1)...(19): siRNA sense strand
uggcugaccugcuauaugc

SEQ ID NO: 1663222 - RNA, 19 nt, Homo sapiens
  misc_RNA (1)...(19): siRNA sense strand
gcauggcucucacugucau

SEQ ID NO: 1663223 - RNA, 19 nt, Homo sapiens
  misc_RNA (1)...(19): siRNA sense strand
caacuaugcccaaggugau

SEQ ID NO: 1663224 - RNA, 19 nt, Homo sapiens
  misc_RNA (1)...(19): siRNA sense strand
gcgagaacuucaagcaacu

SEQ ID NO: 1663225 - RNA, 19 nt, Homo sapiens
  misc_RNA (1)...(19): siRNA sense strand
gcugaacaucugugucauu

SEQ ID NO: 1663226 - RNA, 19 nt, Homo sapiens
  misc_RNA (1)...(19): siRNA sense strand
gcacggcagcauccucuuc

SEQ ID NO: 1663227 - RNA, 19 nt, Homo sapiens
  misc_RNA (1)...(19): siRNA sense strand
cagcguaaccgcacugucu

SEQ ID NO: 1663228 - RNA, 19 nt, Homo sapiens
  misc_RNA (1)...(19): siRNA sense strand
ccgcugaacaucuguguca

SEQ ID NO: 1663229 - RNA, 19 nt, Homo sapiens
  misc_RNA (1)...(19): siRNA sense strand
gcgaccacaugagcuccua

SEQ ID NO: 1663230 - RNA, 19 nt, Homo sapiens
  misc_RNA (1)...(19): siRNA sense strand
gcccuggccacccacuaua

SEQ ID NO: 1663231 - RNA, 19 nt, Homo sapiens
  misc_RNA (1)...(19): siRNA sense strand
gcugcugccuuugccauca

SEQ ID NO: 1663232 - RNA, 19 nt, Homo sapiens
  misc_RNA (1)...(19): siRNA sense strand
cugcucaucuacaacuaug

SEQ ID NO: 1663233 - RNA, 19 nt, Homo sapiens
  misc_RNA (1)...(19): siRNA sense strand
ccaucagcuuccugccuuu

SEQ ID NO: 1663234 - RNA, 19 nt, Homo sapiens
  misc_RNA (1)...(19): siRNA sense strand
guaaccgcacugucugcua

SEQ ID NO: 1663235 - RNA, 19 nt, Homo sapiens
  misc_RNA (1)...(19): siRNA sense strand
cagaaacucacagccaaau

SEQ ID NO: 1663236 - RNA, 19 nt, Homo sapiens
  misc_RNA (1)...(19): siRNA sense strand
cccacuauaugcccuaugg

SEQ ID NO: 1663237 - RNA, 19 nt, Homo sapiens
  misc_RNA (1)...(19): siRNA sense strand
cccauccucuucuacuuca

SEQ ID NO: 1663238 - RNA, 19 nt, Homo sapiens
  misc_RNA (1)...(19): siRNA sense strand
gagcuccuacagaaacuca

SEQ ID NO: 1663239 - RNA, 19 nt, Homo sapiens
  misc_RNA (1)...(19): siRNA sense strand
caugagcuccuacagaaac

SEQ ID NO: 1663240 - RNA, 19 nt, Homo sapiens
  misc_RNA (1)...(19): siRNA sense strand
gaagcugucggacuacaaa

SEQ ID NO: 1663241 - RNA, 19 nt, Homo sapiens
  misc_RNA (1)...(19): siRNA sense strand
aggugaagcugucggacua

SEQ ID NO: 1663242 - RNA, 19 nt, Homo sapiens
  misc_RNA (1)...(19): siRNA sense strand
gaagcugucggacuacaaa

SEQ ID NO: 1663243 - RNA, 19 nt, Homo sapiens
  misc_RNA (1)...(19): siRNA sense strand
aggugaagcugucggacua

SEQ ID NO: 1663244 - RNA, 19 nt, Homo sapiens
  misc_RNA (1)...(19): siRNA sense strand
gaagcugucggacuacaaa

SEQ ID NO: 1663245 - RNA, 19 nt, Homo sapiens
  misc_RNA (1)...(19): siRNA sense strand
aggugaagcugucggacua

SEQ ID NO: 1663246 - RNA, 19 nt, Homo sapiens
  misc_RNA (1)...(19): siRNA sense strand
gcaagucccugaacaagga

SEQ ID NO: 1663247 - RNA, 19 nt, Homo sapiens
  misc_RNA (1)...(19): siRNA sense strand
gcgcaucccugcacucuga

SEQ ID NO: 1663248 - RNA, 19 nt, Homo sapiens
  misc_RNA (1)...(19): siRNA sense strand
gaaccugggugcccugaug

SEQ ID NO: 1663249 - RNA, 19 nt, Homo sapiens
  misc_RNA (1)...(19): siRNA sense strand
ccaaagaggaggugaauga

SEQ ID NO: 1663250 - RNA, 19 nt, Homo sapiens
  misc_RNA (1)...(19): siRNA sense strand
guaguggccuugcgaaaga

SEQ ID NO: 1663251 - RNA, 19 nt, Homo sapiens
  misc_RNA (1)...(19): siRNA sense strand
gcagaggagucguuugaau

SEQ ID NO: 1663252 - RNA, 19 nt, Homo sapiens
  misc_RNA (1)...(19): siRNA sense strand
gcaagucacugcccaacuc

SEQ ID NO: 1663253 - RNA, 19 nt, Homo sapiens
  misc_RNA (1)...(19): siRNA sense strand
ggacguggcccagaaggua

SEQ ID NO: 1663254 - RNA, 19 nt, Homo sapiens
  misc_RNA (1)...(19): siRNA sense strand
ggagaaggaacgcuggaua

SEQ ID NO: 1663255 - RNA, 19 nt, Homo sapiens
  misc_RNA (1)...(19): siRNA sense strand
gcaaugcccucgccaacag

SEQ ID NO: 1663256 - RNA, 19 nt, Homo sapiens
  misc_RNA (1)...(19): siRNA sense strand
ggaagaagcaccggaggaa

SEQ ID NO: 1663257 - RNA, 19 nt, Homo sapiens
  misc_RNA (1)...(19): siRNA sense strand
acaacgggcugcucaccua

SEQ ID NO: 1663258 - RNA, 19 nt, Homo sapiens
  misc_RNA (1)...(19): siRNA sense strand
gagcugcaccguaguccua

SEQ ID NO: 1663259 - RNA, 19 nt, Homo sapiens
  misc_RNA (1)...(19): siRNA sense strand
caacagagagccugccaau

SEQ ID NO: 1663260 - RNA, 19 nt, Homo sapiens
  misc_RNA (1)...(19): siRNA sense strand
cgacugcgaugcacccaau

SEQ ID NO: 1663261 - RNA, 19 nt, Homo sapiens
  misc_RNA (1)...(19): siRNA sense strand
ucacgcagcugcucaucug

SEQ ID NO: 1663262 - RNA, 19 nt, Homo sapiens
  misc_RNA (1)...(19): siRNA sense strand
ggagugugcagacaucuug

SEQ ID NO: 1663263 - RNA, 19 nt, Homo sapiens
  misc_RNA (1)...(19): siRNA sense strand
cagaggagucguuugaauu

SEQ ID NO: 1663264 - RNA, 19 nt, Homo sapiens
  misc_RNA (1)...(19): siRNA sense strand
gaacaaggaguggaagaag

SEQ ID NO: 1663265 - RNA, 19 nt, Homo sapiens
  misc_RNA (1)...(19): siRNA sense strand
acagagagccugccaaugg

SEQ ID NO: 1663266 - RNA, 19 nt, Homo sapiens
  misc_RNA (1)...(19): siRNA sense strand
gaagaagcaccggaggaaa

SEQ ID NO: 1663267 - RNA, 19 nt, Homo sapiens
  misc_RNA (1)...(19): siRNA sense strand
gaggagucguuugaauuug

SEQ ID NO: 1663268 - RNA, 19 nt, Homo sapiens
  misc_RNA (1)...(19): siRNA sense strand
agaggagucguuugaauuu

SEQ ID NO: 1663269 - RNA, 19 nt, Homo sapiens
  misc_RNA (1)...(19): siRNA sense strand
gcagugguguuuguguuca

SEQ ID NO: 1663270 - RNA, 19 nt, Homo sapiens
  misc_RNA (1)...(19): siRNA sense strand
ggccaaguaugaacagaag

SEQ ID NO: 1663271 - RNA, 19 nt, Homo sapiens
  misc_RNA (1)...(19): siRNA sense strand
uccagacgguguacaacua

SEQ ID NO: 1663272 - RNA, 19 nt, Homo sapiens
  misc_RNA (1)...(19): siRNA sense strand
gcccugaugugcauugagu

SEQ ID NO: 1663273 - RNA, 19 nt, Homo sapiens
  misc_RNA (1)...(19): siRNA sense strand
ggagucguuugaauuugug

SEQ ID NO: 1663274 - RNA, 19 nt, Homo sapiens
  misc_RNA (1)...(19): siRNA sense strand
agaguuaccugcugcugau

SEQ ID NO: 1663275 - RNA, 19 nt, Homo sapiens
  misc_RNA (1)...(19): siRNA sense strand
gggccgugguggaagauga

SEQ ID NO: 1663276 - RNA, 19 nt, Homo sapiens
  misc_RNA (1)...(19): siRNA sense strand
gaaggagauugugguggau

SEQ ID NO: 1663277 - RNA, 19 nt, Homo sapiens
  misc_RNA (1)...(19): siRNA sense strand
gugcagacaucuugaucca

SEQ ID NO: 1663278 - RNA, 19 nt, Homo sapiens
  misc_RNA (1)...(19): siRNA sense strand
gagaaggaacgcuggauac

SEQ ID NO: 1663279 - RNA, 19 nt, Homo sapiens
  misc_RNA (1)...(19): siRNA sense strand
ugacuccacuggcauaugc

SEQ ID NO: 1663280 - RNA, 19 nt, Homo sapiens
  misc_RNA (1)...(19): siRNA sense strand
acaaggaguggaagaagaa

SEQ ID NO: 1663281 - RNA, 19 nt, Homo sapiens
  misc_RNA (1)...(19): siRNA sense strand
aacaaggaguggaagaaga

SEQ ID NO: 1663282 - RNA, 19 nt, Homo sapiens
  misc_RNA (1)...(19): siRNA sense strand
ccaggagugugcagacauc

SEQ ID NO: 1663283 - RNA, 19 nt, Homo sapiens
  misc_RNA (1)...(19): siRNA sense strand
cgcaagcucuccacagauc

SEQ ID NO: 1663284 - RNA, 19 nt, Homo sapiens
  misc_RNA (1)...(19): siRNA sense strand
cagcgcuccugcuccguuu

SEQ ID NO: 1663285 - RNA, 19 nt, Homo sapiens
  misc_RNA (1)...(19): siRNA sense strand
gcggacggcucuacaucuc

SEQ ID NO: 1663286 - RNA, 19 nt, Homo sapiens
  misc_RNA (1)...(19): siRNA sense strand
cccgcaagcucuccacaga

SEQ ID NO: 1663287 - RNA, 19 nt, Homo sapiens
  misc_RNA (1)...(19): siRNA sense strand
gaagcggugcaccuacuau

SEQ ID NO: 1663288 - RNA, 19 nt, Homo sapiens
  misc_RNA (1)...(19): siRNA sense strand
cgcagcugcucaucuggua

SEQ ID NO: 1663289 - RNA, 19 nt, Homo sapiens
  misc_RNA (1)...(19): siRNA sense strand
gcugcuggcugucaugacu

SEQ ID NO: 1663290 - RNA, 19 nt, Homo sapiens
  misc_RNA (1)...(19): siRNA sense strand
aagaugaccugcggcuguu

SEQ ID NO: 1663291 - RNA, 19 nt, Homo sapiens
  misc_RNA (1)...(19): siRNA sense strand
ccuggaggaugaaaucagu

SEQ ID NO: 1663292 - RNA, 19 nt, Homo sapiens
  misc_RNA (1)...(19): siRNA sense strand
ggcaacagcuuuuguaucg

SEQ ID NO: 1663293 - RNA, 19 nt, Homo sapiens
  misc_RNA (1)...(19): siRNA sense strand
gguuuaagaaggagauugu

SEQ ID NO: 1663294 - RNA, 19 nt, Homo sapiens
  misc_RNA (1)...(19): siRNA sense strand
caauaucuacgccaucuac

SEQ ID NO: 1663295 - RNA, 19 nt, Homo sapiens
  misc_RNA (1)...(19): siRNA sense strand
aaagaggaggugaaugaga

SEQ ID NO: 1663296 - RNA, 19 nt, Homo sapiens
  misc_RNA (1)...(19): siRNA sense strand
gcuggauacgggccaagua

SEQ ID NO: 1663297 - RNA, 19 nt, Homo sapiens
  misc_RNA (1)...(19): siRNA sense strand
aggcagaggagucguuuga

SEQ ID NO: 1663298 - RNA, 19 nt, Homo sapiens
  misc_RNA (1)...(19): siRNA sense strand
uggaugcagugguguuugu

SEQ ID NO: 1663299 - RNA, 19 nt, Homo sapiens
  misc_RNA (1)...(19): siRNA sense strand
aggagucguuugaauuugu

SEQ ID NO: 1663300 - RNA, 19 nt, Homo sapiens
  misc_RNA (1)...(19): siRNA sense strand
gagcuuaaagugggcauag

SEQ ID NO: 1663301 - RNA, 19 nt, Homo sapiens
  misc_RNA (1)...(19): siRNA sense strand
cgaccuacgggcucaaugu

SEQ ID NO: 1663302 - RNA, 19 nt, Homo sapiens
  misc_RNA (1)...(19): siRNA sense strand
gggccaaguaugaacagaa

SEQ ID NO: 1663303 - RNA, 19 nt, Homo sapiens
  misc_RNA (1)...(19): siRNA sense strand
aggaguggaagaagaagua

SEQ ID NO: 1663304 - RNA, 19 nt, Homo sapiens
  misc_RNA (1)...(19): siRNA sense strand
gcuuaaagugggcauagug

SEQ ID NO: 1663305 - RNA, 19 nt, Homo sapiens
  misc_RNA (1)...(19): siRNA sense strand
ugaacaaggaguggaagaa

SEQ ID NO: 1663306 - RNA, 19 nt, Homo sapiens
  misc_RNA (1)...(19): siRNA sense strand
ccacacccauccgaaagca

SEQ ID NO: 1663307 - RNA, 19 nt, Homo sapiens
  misc_RNA (1)...(19): siRNA sense strand
caauguggagcgugucuuc

SEQ ID NO: 1663308 - RNA, 19 nt, Homo sapiens
  misc_RNA (1)...(19): siRNA sense strand
guaguccuagccuccuaua

SEQ ID NO: 1663309 - RNA, 19 nt, Homo sapiens
  misc_RNA (1)...(19): siRNA sense strand
ccuggcacauggcuccaaa

SEQ ID NO: 1663310 - RNA, 19 nt, Homo sapiens
  misc_RNA (1)...(19): siRNA sense strand
uggaagaagaaguauguga

SEQ ID NO: 1663311 - RNA, 19 nt, Homo sapiens
  misc_RNA (1)...(19): siRNA sense strand
gcagcgccuucagcgacua

SEQ ID NO: 1663312 - RNA, 19 nt, Homo sapiens
  misc_RNA (1)...(19): siRNA sense strand
gguaguggccuugcgaaag

SEQ ID NO: 1663313 - RNA, 19 nt, Homo sapiens
  misc_RNA (1)...(19): siRNA sense strand
gcugauccgagaugaagga

SEQ ID NO: 1663314 - RNA, 19 nt, Homo sapiens
  misc_RNA (1)...(19): siRNA sense strand
uccaggacguggcccagaa

SEQ ID NO: 1663315 - RNA, 19 nt, Homo sapiens
  misc_RNA (1)...(19): siRNA sense strand
uggaggaugaaaucaguuu

SEQ ID NO: 1663316 - RNA, 19 nt, Homo sapiens
  misc_RNA (1)...(19): siRNA sense strand
ccagugccauggccaacgu

SEQ ID NO: 1663317 - RNA, 19 nt, Homo sapiens
  misc_RNA (1)...(19): siRNA sense strand
ccacugccaagcucagaug

SEQ ID NO: 1663318 - RNA, 19 nt, Homo sapiens
  misc_RNA (1)...(19): siRNA sense strand
gagcugcuggcugucauga

SEQ ID NO: 1663319 - RNA, 19 nt, Homo sapiens
  misc_RNA (1)...(19): siRNA sense strand
augauuacaugcagaacau

SEQ ID NO: 1663320 - RNA, 19 nt, Homo sapiens
  misc_RNA (1)...(19): siRNA sense strand
gguggaugcagugguguuu

SEQ ID NO: 1663321 - RNA, 19 nt, Homo sapiens
  misc_RNA (1)...(19): siRNA sense strand
cccaauaucuacgccaucu

SEQ ID NO: 1663322 - RNA, 19 nt, Homo sapiens
  misc_RNA (1)...(19): siRNA sense strand
gaccuggaccgggagaaga

SEQ ID NO: 1663323 - RNA, 19 nt, Homo sapiens
  misc_RNA (1)...(19): siRNA sense strand
guccgugcaucccaauauc

SEQ ID NO: 1663324 - RNA, 19 nt, Homo sapiens
  misc_RNA (1)...(19): siRNA sense strand
gaccuacgggcucaaugug

SEQ ID NO: 1663325 - RNA, 19 nt, Homo sapiens
  misc_RNA (1)...(19): siRNA sense strand
gcggcaagucccugaacaa

SEQ ID NO: 1663326 - RNA, 19 nt, Homo sapiens
  misc_RNA (1)...(19): siRNA sense strand
ucaaccaggccacgaaugg

SEQ ID NO: 1663327 - RNA, 19 nt, Homo sapiens
  misc_RNA (1)...(19): siRNA sense strand
ccuggguccuucaguauua

SEQ ID NO: 1663328 - RNA, 19 nt, Homo sapiens
  misc_RNA (1)...(19): siRNA sense strand
gcagaaacaggaacacuca

SEQ ID NO: 1663329 - RNA, 19 nt, Homo sapiens
  misc_RNA (1)...(19): siRNA sense strand
gauguugguucgccagcuu

SEQ ID NO: 1663330 - RNA, 19 nt, Homo sapiens
  misc_RNA (1)...(19): siRNA sense strand
cuggagcugugcauucuuu

SEQ ID NO: 1663331 - RNA, 19 nt, Homo sapiens
  misc_RNA (1)...(19): siRNA sense strand
ggauguacuucaggccauu

SEQ ID NO: 1663332 - RNA, 19 nt, Homo sapiens
  misc_RNA (1)...(19): siRNA sense strand
gaagugcucccuguguguu

SEQ ID NO: 1663333 - RNA, 19 nt, Homo sapiens
  misc_RNA (1)...(19): siRNA sense strand
ucuccuggguccuucagua

SEQ ID NO: 1663334 - RNA, 19 nt, Homo sapiens
  misc_RNA (1)...(19): siRNA sense strand
ucaaaaccuuccagaauau

SEQ ID NO: 1663335 - RNA, 19 nt, Homo sapiens
  misc_RNA (1)...(19): siRNA sense strand
caagacccagccaaucaaa

SEQ ID NO: 1663336 - RNA, 19 nt, Homo sapiens
  misc_RNA (1)...(19): siRNA sense strand
gauccggaaggcugcauuu

SEQ ID NO: 1663337 - RNA, 19 nt, Homo sapiens
  misc_RNA (1)...(19): siRNA sense strand
cgaggcagcagcagaaaca

SEQ ID NO: 1663338 - RNA, 19 nt, Homo sapiens
  misc_RNA (1)...(19): siRNA sense strand
cagcgaggcagcagcagaa

SEQ ID NO: 1663339 - RNA, 19 nt, Homo sapiens
  misc_RNA (1)...(19): siRNA sense strand
ccaagacccagccaaucaa

SEQ ID NO: 1663340 - RNA, 19 nt, Homo sapiens
  misc_RNA (1)...(19): siRNA sense strand
aucaaaaccuuccagaaua

SEQ ID NO: 1663341 - RNA, 19 nt, Homo sapiens
  misc_RNA (1)...(19): siRNA sense strand
ucuccuggcugccuugauc

SEQ ID NO: 1663342 - RNA, 19 nt, Homo sapiens
  misc_RNA (1)...(19): siRNA sense strand
gcuccaagacccagccaau

SEQ ID NO: 1663343 - RNA, 19 nt, Homo sapiens
  misc_RNA (1)...(19): siRNA sense strand
ccacaaguuccugucacua

SEQ ID NO: 1663344 - RNA, 19 nt, Homo sapiens
  misc_RNA (1)...(19): siRNA sense strand
ggugaagugcucccugugu

SEQ ID NO: 1663345 - RNA, 19 nt, Homo sapiens
  misc_RNA (1)...(19): siRNA sense strand
guacuucaggccauucaca

SEQ ID NO: 1663346 - RNA, 19 nt, Homo sapiens
  misc_RNA (1)...(19): siRNA sense strand
gcgacuggauguacuucag

SEQ ID NO: 1663347 - RNA, 19 nt, Homo sapiens
  misc_RNA (1)...(19): siRNA sense strand
uauggagccuuggcagaau

SEQ ID NO: 1663348 - RNA, 19 nt, Homo sapiens
  misc_RNA (1)...(19): siRNA sense strand
uccaagacccagccaauca

SEQ ID NO: 1663349 - RNA, 19 nt, Homo sapiens
  misc_RNA (1)...(19): siRNA sense strand
gccuggagcugugcuggau

SEQ ID NO: 1663350 - RNA, 19 nt, Homo sapiens
  misc_RNA (1)...(19): siRNA sense strand
ggagcugugcauucuuuua

SEQ ID NO: 1663351 - RNA, 19 nt, Homo sapiens
  misc_RNA (1)...(19): siRNA sense strand
gcagcaagcuuaguuauaa

SEQ ID NO: 1663352 - RNA, 19 nt, Homo sapiens
  misc_RNA (1)...(19): siRNA sense strand
gaaaccaucuugcaugcua

SEQ ID NO: 1663353 - RNA, 19 nt, Homo sapiens
  misc_RNA (1)...(19): siRNA sense strand
aaaggaaggucaucauauu

SEQ ID NO: 1663354 - RNA, 19 nt, Homo sapiens
  misc_RNA (1)...(19): siRNA sense strand
guuauuaccuggccuauuc

SEQ ID NO: 1663355 - RNA, 19 nt, Homo sapiens
  misc_RNA (1)...(19): siRNA sense strand
caaccugaaugugaacuua

SEQ ID NO: 1663356 - RNA, 19 nt, Homo sapiens
  misc_RNA (1)...(19): siRNA sense strand
gaugagcgguuccagagaa

SEQ ID NO: 1663357 - RNA, 19 nt, Homo sapiens
  misc_RNA (1)...(19): siRNA sense strand
caaaggagcaguacagaga

SEQ ID NO: 1663358 - RNA, 19 nt, Homo sapiens
  misc_RNA (1)...(19): siRNA sense strand
gaagaccucugucguggau

SEQ ID NO: 1663359 - RNA, 19 nt, Homo sapiens
  misc_RNA (1)...(19): siRNA sense strand
guaaugcuccuucaguuaa

SEQ ID NO: 1663360 - RNA, 19 nt, Homo sapiens
  misc_RNA (1)...(19): siRNA sense strand
cagccaaagucgauucuaa

SEQ ID NO: 1663361 - RNA, 19 nt, Homo sapiens
  misc_RNA (1)...(19): siRNA sense strand
gcaccuguguguuugaaga

SEQ ID NO: 1663362 - RNA, 19 nt, Homo sapiens
  misc_RNA (1)...(19): siRNA sense strand
uaaagcaguuccugacuca

SEQ ID NO: 1663363 - RNA, 19 nt, Homo sapiens
  misc_RNA (1)...(19): siRNA sense strand
gcuucuauauuuccaauug

SEQ ID NO: 1663364 - RNA, 19 nt, Homo sapiens
  misc_RNA (1)...(19): siRNA sense strand
gaauccaccugaaguuaca

SEQ ID NO: 1663365 - RNA, 19 nt, Homo sapiens
  misc_RNA (1)...(19): siRNA sense strand
aaaccgaguuccaugcaaa

SEQ ID NO: 1663366 - RNA, 19 nt, Homo sapiens
  misc_RNA (1)...(19): siRNA sense strand
uuaaguaauuccuggauug

SEQ ID NO: 1663367 - RNA, 19 nt, Homo sapiens
  misc_RNA (1)...(19): siRNA sense strand
gcaaacaccugugguaucc

SEQ ID NO: 1663368 - RNA, 19 nt, Homo sapiens
  misc_RNA (1)...(19): siRNA sense strand
ugacagccaugauuacauc

SEQ ID NO: 1663369 - RNA, 19 nt, Homo sapiens
  misc_RNA (1)...(19): siRNA sense strand
gaaaaugacagccaugauu

SEQ ID NO: 1663370 - RNA, 19 nt, Homo sapiens
  misc_RNA (1)...(19): siRNA sense strand
aaaagugccuucucuguaa

SEQ ID NO: 1663371 - RNA, 19 nt, Homo sapiens
  misc_RNA (1)...(19): siRNA sense strand
gaugacaacccggauauug

SEQ ID NO: 1663372 - RNA, 19 nt, Homo sapiens
  misc_RNA (1)...(19): siRNA sense strand
cagccaugauuacaucuuu

SEQ ID NO: 1663373 - RNA, 19 nt, Homo sapiens
  misc_RNA (1)...(19): siRNA sense strand
gaagaccaacucucagaug

SEQ ID NO: 1663374 - RNA, 19 nt, Homo sapiens
  misc_RNA (1)...(19): siRNA sense strand
gaucaagauuguucuacag

SEQ ID NO: 1663375 - RNA, 19 nt, Homo sapiens
  misc_RNA (1)...(19): siRNA sense strand
aaagauucauguucacaga

SEQ ID NO: 1663376 - RNA, 19 nt, Homo sapiens
  misc_RNA (1)...(19): siRNA sense strand
gagccacacuugaaaauga

SEQ ID NO: 1663377 - RNA, 19 nt, Homo sapiens
  misc_RNA (1)...(19): siRNA sense strand
cagaauccaccugaaguua

SEQ ID NO: 1663378 - RNA, 19 nt, Homo sapiens
  misc_RNA (1)...(19): siRNA sense strand
ccuuagagcagcaagcuua

SEQ ID NO: 1663379 - RNA, 19 nt, Homo sapiens
  misc_RNA (1)...(19): siRNA sense strand
gagaaaagauaaccuuaag

SEQ ID NO: 1663380 - RNA, 19 nt, Homo sapiens
  misc_RNA (1)...(19): siRNA sense strand
aagaccaacucucagauga

SEQ ID NO: 1663381 - RNA, 19 nt, Homo sapiens
  misc_RNA (1)...(19): siRNA sense strand
gcaagcuuaguuauaauga

SEQ ID NO: 1663382 - RNA, 19 nt, Homo sapiens
  misc_RNA (1)...(19): siRNA sense strand
gaucugugccugccuuaau

SEQ ID NO: 1663383 - RNA, 19 nt, Homo sapiens
  misc_RNA (1)...(19): siRNA sense strand
ccaaagucgauucuaaauu

SEQ ID NO: 1663384 - RNA, 19 nt, Homo sapiens
  misc_RNA (1)...(19): siRNA sense strand
gagcgguuccagagaagua

SEQ ID NO: 1663385 - RNA, 19 nt, Homo sapiens
  misc_RNA (1)...(19): siRNA sense strand
caucagcccaucucuguug

SEQ ID NO: 1663386 - RNA, 19 nt, Homo sapiens
  misc_RNA (1)...(19): siRNA sense strand
gagcagcaagcuuaguuau

SEQ ID NO: 1663387 - RNA, 19 nt, Homo sapiens
  misc_RNA (1)...(19): siRNA sense strand
ggcuuuagcuaaugcuguu

SEQ ID NO: 1663388 - RNA, 19 nt, Homo sapiens
  misc_RNA (1)...(19): siRNA sense strand
ugauguguuuccuggauuu

SEQ ID NO: 1663389 - RNA, 19 nt, Homo sapiens
  misc_RNA (1)...(19): siRNA sense strand
agauucauguucacagaaa

SEQ ID NO: 1663390 - RNA, 19 nt, Homo sapiens
  misc_RNA (1)...(19): siRNA sense strand
caacccggauauugucugu

SEQ ID NO: 1663391 - RNA, 19 nt, Homo sapiens
  misc_RNA (1)...(19): siRNA sense strand
caugcuggcuuuagcuaau

SEQ ID NO: 1663392 - RNA, 19 nt, Homo sapiens
  misc_RNA (1)...(19): siRNA sense strand
aaagugccuucucuguaaa

SEQ ID NO: 1663393 - RNA, 19 nt, Homo sapiens
  misc_RNA (1)...(19): siRNA sense strand
caucuugcaugcuagaagu

SEQ ID NO: 1663394 - RNA, 19 nt, Homo sapiens
  misc_RNA (1)...(19): siRNA sense strand
cagcaagcuuaguuauaau

SEQ ID NO: 1663395 - RNA, 19 nt, Homo sapiens
  misc_RNA (1)...(19): siRNA sense strand
aaaaugacagccaugauua

SEQ ID NO: 1663396 - RNA, 19 nt, Homo sapiens
  misc_RNA (1)...(19): siRNA sense strand
ggucaucauauuccucaaa

SEQ ID NO: 1663397 - RNA, 19 nt, Homo sapiens
  misc_RNA (1)...(19): siRNA sense strand
guaauuccuggauugcuuu

SEQ ID NO: 1663398 - RNA, 19 nt, Homo sapiens
  misc_RNA (1)...(19): siRNA sense strand
aaguaaugcuccuucaguu

SEQ ID NO: 1663399 - RNA, 19 nt, Homo sapiens
  misc_RNA (1)...(19): siRNA sense strand
ucaguuaacagugaucaaa

SEQ ID NO: 1663400 - RNA, 19 nt, Homo sapiens
  misc_RNA (1)...(19): siRNA sense strand
uacugccucuggacucuua

SEQ ID NO: 1663401 - RNA, 19 nt, Homo sapiens
  misc_RNA (1)...(19): siRNA sense strand
caacccagcaguuucagau

SEQ ID NO: 1663402 - RNA, 19 nt, Homo sapiens
  misc_RNA (1)...(19): siRNA sense strand
ggcaucagcccaucucugu

SEQ ID NO: 1663403 - RNA, 19 nt, Homo sapiens
  misc_RNA (1)...(19): siRNA sense strand
aguaaugcuccuucaguua

SEQ ID NO: 1663404 - RNA, 19 nt, Homo sapiens
  misc_RNA (1)...(19): siRNA sense strand
uaaaaggaaggucaucaua

SEQ ID NO: 1663405 - RNA, 19 nt, Homo sapiens
  misc_RNA (1)...(19): siRNA sense strand
gccaaagucgauucuaaau

SEQ ID NO: 1663406 - RNA, 19 nt, Homo sapiens
  misc_RNA (1)...(19): siRNA sense strand
ccagaauccaccugaaguu

SEQ ID NO: 1663407 - RNA, 19 nt, Homo sapiens
  misc_RNA (1)...(19): siRNA sense strand
uaucucaacccagcaguuu

SEQ ID NO: 1663408 - RNA, 19 nt, Homo sapiens
  misc_RNA (1)...(19): siRNA sense strand
acagccaccuccuuagaau

SEQ ID NO: 1663409 - RNA, 19 nt, Homo sapiens
  misc_RNA (1)...(19): siRNA sense strand
acaauuccuuauucucuca

SEQ ID NO: 1663410 - RNA, 19 nt, Homo sapiens
  misc_RNA (1)...(19): siRNA sense strand
cuuaaguaauuccuggauu

SEQ ID NO: 1663411 - RNA, 19 nt, Homo sapiens
  misc_RNA (1)...(19): siRNA sense strand
gggcaaacaccugugguau

SEQ ID NO: 1663412 - RNA, 19 nt, Homo sapiens
  misc_RNA (1)...(19): siRNA sense strand
gagagaaaagauaaccuua

SEQ ID NO: 1663413 - RNA, 19 nt, Homo sapiens
  misc_RNA (1)...(19): siRNA sense strand
gaaauccuuagaaaucaag

SEQ ID NO: 1663414 - RNA, 19 nt, Homo sapiens
  misc_RNA (1)...(19): siRNA sense strand
cuacagccaccuccuuaga

SEQ ID NO: 1663415 - RNA, 19 nt, Homo sapiens
  misc_RNA (1)...(19): siRNA sense strand
ucacuaguccagaucaugu

SEQ ID NO: 1663416 - RNA, 19 nt, Homo sapiens
  misc_RNA (1)...(19): siRNA sense strand
cgguggacaugcuggcuuu

SEQ ID NO: 1663417 - RNA, 19 nt, Homo sapiens
  misc_RNA (1)...(19): siRNA sense strand
aguaauuccuggauugcuu

SEQ ID NO: 1663418 - RNA, 19 nt, Homo sapiens
  misc_RNA (1)...(19): siRNA sense strand
aagcaguuccugacucauu

SEQ ID NO: 1663419 - RNA, 19 nt, Homo sapiens
  misc_RNA (1)...(19): siRNA sense strand
uagagcagcaagcuuaguu

SEQ ID NO: 1663420 - RNA, 19 nt, Homo sapiens
  misc_RNA (1)...(19): siRNA sense strand
ucucaucgccuccagaauc

SEQ ID NO: 1663421 - RNA, 19 nt, Homo sapiens
  misc_RNA (1)...(19): siRNA sense strand
agcaguuccugacucauuu

SEQ ID NO: 1663422 - RNA, 19 nt, Homo sapiens
  misc_RNA (1)...(19): siRNA sense strand
ucucuuagaaucagccaaa

SEQ ID NO: 1663423 - RNA, 19 nt, Homo sapiens
  misc_RNA (1)...(19): siRNA sense strand
gccuugcauugcuucuaua

SEQ ID NO: 1663424 - RNA, 19 nt, Homo sapiens
  misc_RNA (1)...(19): siRNA sense strand
uguagcaccuguguguuug

SEQ ID NO: 1663425 - RNA, 19 nt, Homo sapiens
  misc_RNA (1)...(19): siRNA sense strand
gacaugcuggcuuuagcua

SEQ ID NO: 1663426 - RNA, 19 nt, Homo sapiens
  misc_RNA (1)...(19): siRNA sense strand
ccugauguguuuccuggau

SEQ ID NO: 1663427 - RNA, 19 nt, Homo sapiens
  misc_RNA (1)...(19): siRNA sense strand
ccgggauacuucuaaaaua

SEQ ID NO: 1663428 - RNA, 19 nt, Homo sapiens
  misc_RNA (1)...(19): siRNA sense strand
agaucaagauuguucuaca

SEQ ID NO: 1663429 - RNA, 19 nt, Homo sapiens
  misc_RNA (1)...(19): siRNA sense strand
cuccuucaguuaacaguga

SEQ ID NO: 1663430 - RNA, 19 nt, Homo sapiens
  misc_RNA (1)...(19): siRNA sense strand
gugaugacaacccggauau

SEQ ID NO: 1663431 - RNA, 19 nt, Homo sapiens
  misc_RNA (1)...(19): siRNA sense strand
ucuggacucuuacagcaau

SEQ ID NO: 1663432 - RNA, 19 nt, Homo sapiens
  misc_RNA (1)...(19): siRNA sense strand
ugccuugcauugcuucuau

SEQ ID NO: 1663433 - RNA, 19 nt, Homo sapiens
  misc_RNA (1)...(19): siRNA sense strand
agaaucagccaaagucgau

SEQ ID NO: 1663434 - RNA, 19 nt, Homo sapiens
  misc_RNA (1)...(19): siRNA sense strand
uagcaccuguguguuugaa

SEQ ID NO: 1663435 - RNA, 19 nt, Homo sapiens
  misc_RNA (1)...(19): siRNA sense strand
ugacucauuucgacaccau

SEQ ID NO: 1663436 - RNA, 19 nt, Homo sapiens
  misc_RNA (1)...(19): siRNA sense strand
gacucuuacagcaauaaua

SEQ ID NO: 1663437 - RNA, 19 nt, Homo sapiens
  misc_RNA (1)...(19): siRNA sense strand
gcaguuucagaucaagauu

SEQ ID NO: 1663438 - RNA, 19 nt, Homo sapiens
  misc_RNA (1)...(19): siRNA sense strand
ggcaaacaccugugguauc

SEQ ID NO: 1663439 - RNA, 19 nt, Homo sapiens
  misc_RNA (1)...(19): siRNA sense strand
guuugaagaccaacucuca

SEQ ID NO: 1663440 - RNA, 19 nt, Homo sapiens
  misc_RNA (1)...(19): siRNA sense strand
uuugaaaacugccgggaua

SEQ ID NO: 1663441 - RNA, 19 nt, Homo sapiens
  misc_RNA (1)...(19): siRNA sense strand
acccggauauugucuguca

SEQ ID NO: 1663442 - RNA, 19 nt, Homo sapiens
  misc_RNA (1)...(19): siRNA sense strand
agagcagcaagcuuaguua

SEQ ID NO: 1663443 - RNA, 19 nt, Homo sapiens
  misc_RNA (1)...(19): siRNA sense strand
ucagaucaagauuguucua

SEQ ID NO: 1663444 - RNA, 19 nt, Homo sapiens
  misc_RNA (1)...(19): siRNA sense strand
ccaauugagagaaaagaua

SEQ ID NO: 1663445 - RNA, 19 nt, Homo sapiens
  misc_RNA (1)...(19): siRNA sense strand
aaggagcaguacagagaug

SEQ ID NO: 1663446 - RNA, 19 nt, Homo sapiens
  misc_RNA (1)...(19): siRNA sense strand
ucuguaaagugggugaaga

SEQ ID NO: 1663447 - RNA, 19 nt, Homo sapiens
  misc_RNA (1)...(19): siRNA sense strand
uggauuugcuugagcuucu

SEQ ID NO: 1663448 - RNA, 19 nt, Homo sapiens
  misc_RNA (1)...(19): siRNA sense strand
agaguuauacaagaaggua

SEQ ID NO: 1663449 - RNA, 19 nt, Homo sapiens
  misc_RNA (1)...(19): siRNA sense strand
acccagcaguuucagauca

SEQ ID NO: 1663450 - RNA, 19 nt, Homo sapiens
  misc_RNA (1)...(19): siRNA sense strand
cuguagcaccuguguguuu

SEQ ID NO: 1663451 - RNA, 19 nt, Homo sapiens
  misc_RNA (1)...(19): siRNA sense strand
gcagcaagcuuaguuauaa

SEQ ID NO: 1663452 - RNA, 19 nt, Homo sapiens
  misc_RNA (1)...(19): siRNA sense strand
gaaaccaucuugcaugcua

SEQ ID NO: 1663453 - RNA, 19 nt, Homo sapiens
  misc_RNA (1)...(19): siRNA sense strand
aaaggaaggucaucauauu

SEQ ID NO: 1663454 - RNA, 19 nt, Homo sapiens
  misc_RNA (1)...(19): siRNA sense strand
guuauuaccuggccuauuc

SEQ ID NO: 1663455 - RNA, 19 nt, Homo sapiens
  misc_RNA (1)...(19): siRNA sense strand
caaccugaaugugaacuua

SEQ ID NO: 1663456 - RNA, 19 nt, Homo sapiens
  misc_RNA (1)...(19): siRNA sense strand
gaugagcgguuccagagaa

SEQ ID NO: 1663457 - RNA, 19 nt, Homo sapiens
  misc_RNA (1)...(19): siRNA sense strand
caaaggagcaguacagaga

SEQ ID NO: 1663458 - RNA, 19 nt, Homo sapiens
  misc_RNA (1)...(19): siRNA sense strand
gaagaccucugucguggau

SEQ ID NO: 1663459 - RNA, 19 nt, Homo sapiens
  misc_RNA (1)...(19): siRNA sense strand
guaaugcuccuucaguuaa

SEQ ID NO: 1663460 - RNA, 19 nt, Homo sapiens
  misc_RNA (1)...(19): siRNA sense strand
cagccaaagucgauucuaa

SEQ ID NO: 1663461 - RNA, 19 nt, Homo sapiens
  misc_RNA (1)...(19): siRNA sense strand
gcaccuguguguuugaaga

SEQ ID NO: 1663462 - RNA, 19 nt, Homo sapiens
  misc_RNA (1)...(19): siRNA sense strand
uaaagcaguuccugacuca

SEQ ID NO: 1663463 - RNA, 19 nt, Homo sapiens
  misc_RNA (1)...(19): siRNA sense strand
gcuucuauauuuccaauug

SEQ ID NO: 1663464 - RNA, 19 nt, Homo sapiens
  misc_RNA (1)...(19): siRNA sense strand
gaauccaccugaaguuaca

SEQ ID NO: 1663465 - RNA, 19 nt, Homo sapiens
  misc_RNA (1)...(19): siRNA sense strand
aaaccgaguuccaugcaaa

SEQ ID NO: 1663466 - RNA, 19 nt, Homo sapiens
  misc_RNA (1)...(19): siRNA sense strand
uuaaguaauuccuggauug

SEQ ID NO: 1663467 - RNA, 19 nt, Homo sapiens
  misc_RNA (1)...(19): siRNA sense strand
gcaaacaccugugguaucc

SEQ ID NO: 1663468 - RNA, 19 nt, Homo sapiens
  misc_RNA (1)...(19): siRNA sense strand
ugacagccaugauuacauc

SEQ ID NO: 1663469 - RNA, 19 nt, Homo sapiens
  misc_RNA (1)...(19): siRNA sense strand
gaaaaugacagccaugauu

SEQ ID NO: 1663470 - RNA, 19 nt, Homo sapiens
  misc_RNA (1)...(19): siRNA sense strand
aaaagugccuucucuguaa

SEQ ID NO: 1663471 - RNA, 19 nt, Homo sapiens
  misc_RNA (1)...(19): siRNA sense strand
gaugacaacccggauauug

SEQ ID NO: 1663472 - RNA, 19 nt, Homo sapiens
  misc_RNA (1)...(19): siRNA sense strand
cagccaugauuacaucuuu

SEQ ID NO: 1663473 - RNA, 19 nt, Homo sapiens
  misc_RNA (1)...(19): siRNA sense strand
gaagaccaacucucagaug

SEQ ID NO: 1663474 - RNA, 19 nt, Homo sapiens
  misc_RNA (1)...(19): siRNA sense strand
gaucaagauuguucuacag

SEQ ID NO: 1663475 - RNA, 19 nt, Homo sapiens
  misc_RNA (1)...(19): siRNA sense strand
aaagauucauguucacaga

SEQ ID NO: 1663476 - RNA, 19 nt, Homo sapiens
  misc_RNA (1)...(19): siRNA sense strand
gagccacacuugaaaauga

SEQ ID NO: 1663477 - RNA, 19 nt, Homo sapiens
  misc_RNA (1)...(19): siRNA sense strand
cagaauccaccugaaguua

SEQ ID NO: 1663478 - RNA, 19 nt, Homo sapiens
  misc_RNA (1)...(19): siRNA sense strand
ccuuagagcagcaagcuua

SEQ ID NO: 1663479 - RNA, 19 nt, Homo sapiens
  misc_RNA (1)...(19): siRNA sense strand
gagaaaagauaaccuuaag

SEQ ID NO: 1663480 - RNA, 19 nt, Homo sapiens
  misc_RNA (1)...(19): siRNA sense strand
aagaccaacucucagauga

SEQ ID NO: 1663481 - RNA, 19 nt, Homo sapiens
  misc_RNA (1)...(19): siRNA sense strand
gcaagcuuaguuauaauga

SEQ ID NO: 1663482 - RNA, 19 nt, Homo sapiens
  misc_RNA (1)...(19): siRNA sense strand
gaucugugccugccuuaau

SEQ ID NO: 1663483 - RNA, 19 nt, Homo sapiens
  misc_RNA (1)...(19): siRNA sense strand
ccaaagucgauucuaaauu

SEQ ID NO: 1663484 - RNA, 19 nt, Homo sapiens
  misc_RNA (1)...(19): siRNA sense strand
gagcgguuccagagaagua

SEQ ID NO: 1663485 - RNA, 19 nt, Homo sapiens
  misc_RNA (1)...(19): siRNA sense strand
caucagcccaucucuguug

SEQ ID NO: 1663486 - RNA, 19 nt, Homo sapiens
  misc_RNA (1)...(19): siRNA sense strand
gagcagcaagcuuaguuau

SEQ ID NO: 1663487 - RNA, 19 nt, Homo sapiens
  misc_RNA (1)...(19): siRNA sense strand
ggcuuuagcuaaugcuguu

SEQ ID NO: 1663488 - RNA, 19 nt, Homo sapiens
  misc_RNA (1)...(19): siRNA sense strand
ugauguguuuccuggauuu

SEQ ID NO: 1663489 - RNA, 19 nt, Homo sapiens
  misc_RNA (1)...(19): siRNA sense strand
agauucauguucacagaaa

SEQ ID NO: 1663490 - RNA, 19 nt, Homo sapiens
  misc_RNA (1)...(19): siRNA sense strand
caacccggauauugucugu

SEQ ID NO: 1663491 - RNA, 19 nt, Homo sapiens
  misc_RNA (1)...(19): siRNA sense strand
caugcuggcuuuagcuaau

SEQ ID NO: 1663492 - RNA, 19 nt, Homo sapiens
  misc_RNA (1)...(19): siRNA sense strand
aaagugccuucucuguaaa

SEQ ID NO: 1663493 - RNA, 19 nt, Homo sapiens
  misc_RNA (1)...(19): siRNA sense strand
caucuugcaugcuagaagu

SEQ ID NO: 1663494 - RNA, 19 nt, Homo sapiens
  misc_RNA (1)...(19): siRNA sense strand
cagcaagcuuaguuauaau

SEQ ID NO: 1663495 - RNA, 19 nt, Homo sapiens
  misc_RNA (1)...(19): siRNA sense strand
aaaaugacagccaugauua

SEQ ID NO: 1663496 - RNA, 19 nt, Homo sapiens
  misc_RNA (1)...(19): siRNA sense strand
ggucaucauauuccucaaa

SEQ ID NO: 1663497 - RNA, 19 nt, Homo sapiens
  misc_RNA (1)...(19): siRNA sense strand
guaauuccuggauugcuuu

SEQ ID NO: 1663498 - RNA, 19 nt, Homo sapiens
  misc_RNA (1)...(19): siRNA sense strand
aaguaaugcuccuucaguu

SEQ ID NO: 1663499 - RNA, 19 nt, Homo sapiens
  misc_RNA (1)...(19): siRNA sense strand
ucaguuaacagugaucaaa

SEQ ID NO: 1663500 - RNA, 19 nt, Homo sapiens
  misc_RNA (1)...(19): siRNA sense strand
uacugccucuggacucuua

SEQ ID NO: 1663501 - RNA, 19 nt, Homo sapiens
  misc_RNA (1)...(19): siRNA sense strand
caacccagcaguuucagau

SEQ ID NO: 1663502 - RNA, 19 nt, Homo sapiens
  misc_RNA (1)...(19): siRNA sense strand
ggcaucagcccaucucugu

SEQ ID NO: 1663503 - RNA, 19 nt, Homo sapiens
  misc_RNA (1)...(19): siRNA sense strand
aguaaugcuccuucaguua

SEQ ID NO: 1663504 - RNA, 19 nt, Homo sapiens
  misc_RNA (1)...(19): siRNA sense strand
uaaaaggaaggucaucaua

SEQ ID NO: 1663505 - RNA, 19 nt, Homo sapiens
  misc_RNA (1)...(19): siRNA sense strand
gccaaagucgauucuaaau

SEQ ID NO: 1663506 - RNA, 19 nt, Homo sapiens
  misc_RNA (1)...(19): siRNA sense strand
ccagaauccaccugaaguu

SEQ ID NO: 1663507 - RNA, 19 nt, Homo sapiens
  misc_RNA (1)...(19): siRNA sense strand
uaucucaacccagcaguuu

SEQ ID NO: 1663508 - RNA, 19 nt, Homo sapiens
  misc_RNA (1)...(19): siRNA sense strand
acagccaccuccuuagaau

SEQ ID NO: 1663509 - RNA, 19 nt, Homo sapiens
  misc_RNA (1)...(19): siRNA sense strand
acaauuccuuauucucuca

SEQ ID NO: 1663510 - RNA, 19 nt, Homo sapiens
  misc_RNA (1)...(19): siRNA sense strand
cuuaaguaauuccuggauu

SEQ ID NO: 1663511 - RNA, 19 nt, Homo sapiens
  misc_RNA (1)...(19): siRNA sense strand
gggcaaacaccugugguau

SEQ ID NO: 1663512 - RNA, 19 nt, Homo sapiens
  misc_RNA (1)...(19): siRNA sense strand
gagagaaaagauaaccuua

SEQ ID NO: 1663513 - RNA, 19 nt, Homo sapiens
  misc_RNA (1)...(19): siRNA sense strand
gaaauccuuagaaaucaag

SEQ ID NO: 1663514 - RNA, 19 nt, Homo sapiens
  misc_RNA (1)...(19): siRNA sense strand
cuacagccaccuccuuaga

SEQ ID NO: 1663515 - RNA, 19 nt, Homo sapiens
  misc_RNA (1)...(19): siRNA sense strand
ucacuaguccagaucaugu

SEQ ID NO: 1663516 - RNA, 19 nt, Homo sapiens
  misc_RNA (1)...(19): siRNA sense strand
cgguggacaugcuggcuuu

SEQ ID NO: 1663517 - RNA, 19 nt, Homo sapiens
  misc_RNA (1)...(19): siRNA sense strand
aguaauuccuggauugcuu

SEQ ID NO: 1663518 - RNA, 19 nt, Homo sapiens
  misc_RNA (1)...(19): siRNA sense strand
aagcaguuccugacucauu

SEQ ID NO: 1663519 - RNA, 19 nt, Homo sapiens
  misc_RNA (1)...(19): siRNA sense strand
uagagcagcaagcuuaguu

SEQ ID NO: 1663520 - RNA, 19 nt, Homo sapiens
  misc_RNA (1)...(19): siRNA sense strand
ucucaucgccuccagaauc

SEQ ID NO: 1663521 - RNA, 19 nt, Homo sapiens
  misc_RNA (1)...(19): siRNA sense strand
agcaguuccugacucauuu

SEQ ID NO: 1663522 - RNA, 19 nt, Homo sapiens
  misc_RNA (1)...(19): siRNA sense strand
ucucuuagaaucagccaaa

SEQ ID NO: 1663523 - RNA, 19 nt, Homo sapiens
  misc_RNA (1)...(19): siRNA sense strand
gccuugcauugcuucuaua

SEQ ID NO: 1663524 - RNA, 19 nt, Homo sapiens
  misc_RNA (1)...(19): siRNA sense strand
uguagcaccuguguguuug

SEQ ID NO: 1663525 - RNA, 19 nt, Homo sapiens
  misc_RNA (1)...(19): siRNA sense strand
gacaugcuggcuuuagcua

SEQ ID NO: 1663526 - RNA, 19 nt, Homo sapiens
  misc_RNA (1)...(19): siRNA sense strand
ccugauguguuuccuggau

SEQ ID NO: 1663527 - RNA, 19 nt, Homo sapiens
  misc_RNA (1)...(19): siRNA sense strand
ccgggauacuucuaaaaua

SEQ ID NO: 1663528 - RNA, 19 nt, Homo sapiens
  misc_RNA (1)...(19): siRNA sense strand
agaucaagauuguucuaca

SEQ ID NO: 1663529 - RNA, 19 nt, Homo sapiens
  misc_RNA (1)...(19): siRNA sense strand
cuccuucaguuaacaguga

SEQ ID NO: 1663530 - RNA, 19 nt, Homo sapiens
  misc_RNA (1)...(19): siRNA sense strand
gugaugacaacccggauau

SEQ ID NO: 1663531 - RNA, 19 nt, Homo sapiens
  misc_RNA (1)...(19): siRNA sense strand
ucuggacucuuacagcaau

SEQ ID NO: 1663532 - RNA, 19 nt, Homo sapiens
  misc_RNA (1)...(19): siRNA sense strand
ugccuugcauugcuucuau

SEQ ID NO: 1663533 - RNA, 19 nt, Homo sapiens
  misc_RNA (1)...(19): siRNA sense strand
agaaucagccaaagucgau

SEQ ID NO: 1663534 - RNA, 19 nt, Homo sapiens
  misc_RNA (1)...(19): siRNA sense strand
uagcaccuguguguuugaa

SEQ ID NO: 1663535 - RNA, 19 nt, Homo sapiens
  misc_RNA (1)...(19): siRNA sense strand
ugacucauuucgacaccau

SEQ ID NO: 1663536 - RNA, 19 nt, Homo sapiens
  misc_RNA (1)...(19): siRNA sense strand
gacucuuacagcaauaaua

SEQ ID NO: 1663537 - RNA, 19 nt, Homo sapiens
  misc_RNA (1)...(19): siRNA sense strand
gcaguuucagaucaagauu

SEQ ID NO: 1663538 - RNA, 19 nt, Homo sapiens
  misc_RNA (1)...(19): siRNA sense strand
ggcaaacaccugugguauc

SEQ ID NO: 1663539 - RNA, 19 nt, Homo sapiens
  misc_RNA (1)...(19): siRNA sense strand
guuugaagaccaacucuca

SEQ ID NO: 1663540 - RNA, 19 nt, Homo sapiens
  misc_RNA (1)...(19): siRNA sense strand
uuugaaaacugccgggaua

SEQ ID NO: 1663541 - RNA, 19 nt, Homo sapiens
  misc_RNA (1)...(19): siRNA sense strand
acccggauauugucuguca

SEQ ID NO: 1663542 - RNA, 19 nt, Homo sapiens
  misc_RNA (1)...(19): siRNA sense strand
agagcagcaagcuuaguua

SEQ ID NO: 1663543 - RNA, 19 nt, Homo sapiens
  misc_RNA (1)...(19): siRNA sense strand
ucagaucaagauuguucua

SEQ ID NO: 1663544 - RNA, 19 nt, Homo sapiens
  misc_RNA (1)...(19): siRNA sense strand
ccaauugagagaaaagaua

SEQ ID NO: 1663545 - RNA, 19 nt, Homo sapiens
  misc_RNA (1)...(19): siRNA sense strand
aaggagcaguacagagaug

SEQ ID NO: 1663546 - RNA, 19 nt, Homo sapiens
  misc_RNA (1)...(19): siRNA sense strand
ucuguaaagugggugaaga

SEQ ID NO: 1663547 - RNA, 19 nt, Homo sapiens
  misc_RNA (1)...(19): siRNA sense strand
uggauuugcuugagcuucu

SEQ ID NO: 1663548 - RNA, 19 nt, Homo sapiens
  misc_RNA (1)...(19): siRNA sense strand
agaguuauacaagaaggua

SEQ ID NO: 1663549 - RNA, 19 nt, Homo sapiens
  misc_RNA (1)...(19): siRNA sense strand
acccagcaguuucagauca

SEQ ID NO: 1663550 - RNA, 19 nt, Homo sapiens
  misc_RNA (1)...(19): siRNA sense strand
cuguagcaccuguguguuu

SEQ ID NO: 1663551 - RNA, 19 nt, Homo sapiens
  misc_RNA (1)...(19): siRNA sense strand
gcagcaagcuuaguuauaa

SEQ ID NO: 1663552 - RNA, 19 nt, Homo sapiens
  misc_RNA (1)...(19): siRNA sense strand
gaaaccaucuugcaugcua

SEQ ID NO: 1663553 - RNA, 19 nt, Homo sapiens
  misc_RNA (1)...(19): siRNA sense strand
aaaggaaggucaucauauu

SEQ ID NO: 1663554 - RNA, 19 nt, Homo sapiens
  misc_RNA (1)...(19): siRNA sense strand
guuauuaccuggccuauuc

SEQ ID NO: 1663555 - RNA, 19 nt, Homo sapiens
  misc_RNA (1)...(19): siRNA sense strand
caaccugaaugugaacuua

SEQ ID NO: 1663556 - RNA, 19 nt, Homo sapiens
  misc_RNA (1)...(19): siRNA sense strand
gaugagcgguuccagagaa

SEQ ID NO: 1663557 - RNA, 19 nt, Homo sapiens
  misc_RNA (1)...(19): siRNA sense strand
caaaggagcaguacagaga

SEQ ID NO: 1663558 - RNA, 19 nt, Homo sapiens
  misc_RNA (1)...(19): siRNA sense strand
gaagaccucugucguggau

SEQ ID NO: 1663559 - RNA, 19 nt, Homo sapiens
  misc_RNA (1)...(19): siRNA sense strand
guaaugcuccuucaguuaa

SEQ ID NO: 1663560 - RNA, 19 nt, Homo sapiens
  misc_RNA (1)...(19): siRNA sense strand
cagccaaagucgauucuaa

SEQ ID NO: 1663561 - RNA, 19 nt, Homo sapiens
  misc_RNA (1)...(19): siRNA sense strand
gcaccuguguguuugaaga

SEQ ID NO: 1663562 - RNA, 19 nt, Homo sapiens
  misc_RNA (1)...(19): siRNA sense strand
uaaagcaguuccugacuca

SEQ ID NO: 1663563 - RNA, 19 nt, Homo sapiens
  misc_RNA (1)...(19): siRNA sense strand
gcuucuauauuuccaauug

SEQ ID NO: 1663564 - RNA, 19 nt, Homo sapiens
  misc_RNA (1)...(19): siRNA sense strand
gaauccaccugaaguuaca

SEQ ID NO: 1663565 - RNA, 19 nt, Homo sapiens
  misc_RNA (1)...(19): siRNA sense strand
aaaccgaguuccaugcaaa

SEQ ID NO: 1663566 - RNA, 19 nt, Homo sapiens
  misc_RNA (1)...(19): siRNA sense strand
uuaaguaauuccuggauug

SEQ ID NO: 1663567 - RNA, 19 nt, Homo sapiens
  misc_RNA (1)...(19): siRNA sense strand
gcaaacaccugugguaucc

SEQ ID NO: 1663568 - RNA, 19 nt, Homo sapiens
  misc_RNA (1)...(19): siRNA sense strand
ugacagccaugauuacauc

SEQ ID NO: 1663569 - RNA, 19 nt, Homo sapiens
  misc_RNA (1)...(19): siRNA sense strand
gaaaaugacagccaugauu

SEQ ID NO: 1663570 - RNA, 19 nt, Homo sapiens
  misc_RNA (1)...(19): siRNA sense strand
aaaagugccuucucuguaa

SEQ ID NO: 1663571 - RNA, 19 nt, Homo sapiens
  misc_RNA (1)...(19): siRNA sense strand
gaugacaacccggauauug

SEQ ID NO: 1663572 - RNA, 19 nt, Homo sapiens
  misc_RNA (1)...(19): siRNA sense strand
cagccaugauuacaucuuu

SEQ ID NO: 1663573 - RNA, 19 nt, Homo sapiens
  misc_RNA (1)...(19): siRNA sense strand
gaagaccaacucucagaug

SEQ ID NO: 1663574 - RNA, 19 nt, Homo sapiens
  misc_RNA (1)...(19): siRNA sense strand
gaucaagauuguucuacag

SEQ ID NO: 1663575 - RNA, 19 nt, Homo sapiens
  misc_RNA (1)...(19): siRNA sense strand
aaagauucauguucacaga

SEQ ID NO: 1663576 - RNA, 19 nt, Homo sapiens
  misc_RNA (1)...(19): siRNA sense strand
gagccacacuugaaaauga

SEQ ID NO: 1663577 - RNA, 19 nt, Homo sapiens
  misc_RNA (1)...(19): siRNA sense strand
cagaauccaccugaaguua

SEQ ID NO: 1663578 - RNA, 19 nt, Homo sapiens
  misc_RNA (1)...(19): siRNA sense strand
ccuuagagcagcaagcuua

SEQ ID NO: 1663579 - RNA, 19 nt, Homo sapiens
  misc_RNA (1)...(19): siRNA sense strand
gagaaaagauaaccuuaag

SEQ ID NO: 1663580 - RNA, 19 nt, Homo sapiens
  misc_RNA (1)...(19): siRNA sense strand
aagaccaacucucagauga

SEQ ID NO: 1663581 - RNA, 19 nt, Homo sapiens
  misc_RNA (1)...(19): siRNA sense strand
gcaagcuuaguuauaauga

SEQ ID NO: 1663582 - RNA, 19 nt, Homo sapiens
  misc_RNA (1)...(19): siRNA sense strand
gaucugugccugccuuaau

SEQ ID NO: 1663583 - RNA, 19 nt, Homo sapiens
  misc_RNA (1)...(19): siRNA sense strand
ccaaagucgauucuaaauu

SEQ ID NO: 1663584 - RNA, 19 nt, Homo sapiens
  misc_RNA (1)...(19): siRNA sense strand
gagcgguuccagagaagua

SEQ ID NO: 1663585 - RNA, 19 nt, Homo sapiens
  misc_RNA (1)...(19): siRNA sense strand
caucagcccaucucuguug

SEQ ID NO: 1663586 - RNA, 19 nt, Homo sapiens
  misc_RNA (1)...(19): siRNA sense strand
gagcagcaagcuuaguuau

SEQ ID NO: 1663587 - RNA, 19 nt, Homo sapiens
  misc_RNA (1)...(19): siRNA sense strand
ggcuuuagcuaaugcuguu

SEQ ID NO: 1663588 - RNA, 19 nt, Homo sapiens
  misc_RNA (1)...(19): siRNA sense strand
ugauguguuuccuggauuu

SEQ ID NO: 1663589 - RNA, 19 nt, Homo sapiens
  misc_RNA (1)...(19): siRNA sense strand
agauucauguucacagaaa

SEQ ID NO: 1663590 - RNA, 19 nt, Homo sapiens
  misc_RNA (1)...(19): siRNA sense strand
caacccggauauugucugu

SEQ ID NO: 1663591 - RNA, 19 nt, Homo sapiens
  misc_RNA (1)...(19): siRNA sense strand
caugcuggcuuuagcuaau

SEQ ID NO: 1663592 - RNA, 19 nt, Homo sapiens
  misc_RNA (1)...(19): siRNA sense strand
aaagugccuucucuguaaa

SEQ ID NO: 1663593 - RNA, 19 nt, Homo sapiens
  misc_RNA (1)...(19): siRNA sense strand
caucuugcaugcuagaagu

SEQ ID NO: 1663594 - RNA, 19 nt, Homo sapiens
  misc_RNA (1)...(19): siRNA sense strand
cagcaagcuuaguuauaau

SEQ ID NO: 1663595 - RNA, 19 nt, Homo sapiens
  misc_RNA (1)...(19): siRNA sense strand
aaaaugacagccaugauua

SEQ ID NO: 1663596 - RNA, 19 nt, Homo sapiens
  misc_RNA (1)...(19): siRNA sense strand
ggucaucauauuccucaaa

SEQ ID NO: 1663597 - RNA, 19 nt, Homo sapiens
  misc_RNA (1)...(19): siRNA sense strand
guaauuccuggauugcuuu

SEQ ID NO: 1663598 - RNA, 19 nt, Homo sapiens
  misc_RNA (1)...(19): siRNA sense strand
aaguaaugcuccuucaguu

SEQ ID NO: 1663599 - RNA, 19 nt, Homo sapiens
  misc_RNA (1)...(19): siRNA sense strand
ucaguuaacagugaucaaa

SEQ ID NO: 1663600 - RNA, 19 nt, Homo sapiens
  misc_RNA (1)...(19): siRNA sense strand
uacugccucuggacucuua

SEQ ID NO: 1663601 - RNA, 19 nt, Homo sapiens
  misc_RNA (1)...(19): siRNA sense strand
caacccagcaguuucagau

SEQ ID NO: 1663602 - RNA, 19 nt, Homo sapiens
  misc_RNA (1)...(19): siRNA sense strand
ggcaucagcccaucucugu

SEQ ID NO: 1663603 - RNA, 19 nt, Homo sapiens
  misc_RNA (1)...(19): siRNA sense strand
aguaaugcuccuucaguua

SEQ ID NO: 1663604 - RNA, 19 nt, Homo sapiens
  misc_RNA (1)...(19): siRNA sense strand
uaaaaggaaggucaucaua

SEQ ID NO: 1663605 - RNA, 19 nt, Homo sapiens
  misc_RNA (1)...(19): siRNA sense strand
gccaaagucgauucuaaau

SEQ ID NO: 1663606 - RNA, 19 nt, Homo sapiens
  misc_RNA (1)...(19): siRNA sense strand
ccagaauccaccugaaguu

SEQ ID NO: 1663607 - RNA, 19 nt, Homo sapiens
  misc_RNA (1)...(19): siRNA sense strand
uaucucaacccagcaguuu

SEQ ID NO: 1663608 - RNA, 19 nt, Homo sapiens
  misc_RNA (1)...(19): siRNA sense strand
acagccaccuccuuagaau

SEQ ID NO: 1663609 - RNA, 19 nt, Homo sapiens
  misc_RNA (1)...(19): siRNA sense strand
acaauuccuuauucucuca

SEQ ID NO: 1663610 - RNA, 19 nt, Homo sapiens
  misc_RNA (1)...(19): siRNA sense strand
cuuaaguaauuccuggauu

SEQ ID NO: 1663611 - RNA, 19 nt, Homo sapiens
  misc_RNA (1)...(19): siRNA sense strand
gggcaaacaccugugguau

SEQ ID NO: 1663612 - RNA, 19 nt, Homo sapiens
  misc_RNA (1)...(19): siRNA sense strand
gagagaaaagauaaccuua

SEQ ID NO: 1663613 - RNA, 19 nt, Homo sapiens
  misc_RNA (1)...(19): siRNA sense strand
gaaauccuuagaaaucaag

SEQ ID NO: 1663614 - RNA, 19 nt, Homo sapiens
  misc_RNA (1)...(19): siRNA sense strand
cuacagccaccuccuuaga

SEQ ID NO: 1663615 - RNA, 19 nt, Homo sapiens
  misc_RNA (1)...(19): siRNA sense strand
ucacuaguccagaucaugu

SEQ ID NO: 1663616 - RNA, 19 nt, Homo sapiens
  misc_RNA (1)...(19): siRNA sense strand
cgguggacaugcuggcuuu

SEQ ID NO: 1663617 - RNA, 19 nt, Homo sapiens
  misc_RNA (1)...(19): siRNA sense strand
aguaauuccuggauugcuu

SEQ ID NO: 1663618 - RNA, 19 nt, Homo sapiens
  misc_RNA (1)...(19): siRNA sense strand
aagcaguuccugacucauu

SEQ ID NO: 1663619 - RNA, 19 nt, Homo sapiens
  misc_RNA (1)...(19): siRNA sense strand
uagagcagcaagcuuaguu

SEQ ID NO: 1663620 - RNA, 19 nt, Homo sapiens
  misc_RNA (1)...(19): siRNA sense strand
ucucaucgccuccagaauc

SEQ ID NO: 1663621 - RNA, 19 nt, Homo sapiens
  misc_RNA (1)...(19): siRNA sense strand
agcaguuccugacucauuu

SEQ ID NO: 1663622 - RNA, 19 nt, Homo sapiens
  misc_RNA (1)...(19): siRNA sense strand
ucucuuagaaucagccaaa

SEQ ID NO: 1663623 - RNA, 19 nt, Homo sapiens
  misc_RNA (1)...(19): siRNA sense strand
gccuugcauugcuucuaua

SEQ ID NO: 1663624 - RNA, 19 nt, Homo sapiens
  misc_RNA (1)...(19): siRNA sense strand
uguagcaccuguguguuug

SEQ ID NO: 1663625 - RNA, 19 nt, Homo sapiens
  misc_RNA (1)...(19): siRNA sense strand
gacaugcuggcuuuagcua

SEQ ID NO: 1663626 - RNA, 19 nt, Homo sapiens
  misc_RNA (1)...(19): siRNA sense strand
ccugauguguuuccuggau

SEQ ID NO: 1663627 - RNA, 19 nt, Homo sapiens
  misc_RNA (1)...(19): siRNA sense strand
ccgggauacuucuaaaaua

SEQ ID NO: 1663628 - RNA, 19 nt, Homo sapiens
  misc_RNA (1)...(19): siRNA sense strand
agaucaagauuguucuaca

SEQ ID NO: 1663629 - RNA, 19 nt, Homo sapiens
  misc_RNA (1)...(19): siRNA sense strand
cuccuucaguuaacaguga

SEQ ID NO: 1663630 - RNA, 19 nt, Homo sapiens
  misc_RNA (1)...(19): siRNA sense strand
gugaugacaacccggauau

SEQ ID NO: 1663631 - RNA, 19 nt, Homo sapiens
  misc_RNA (1)...(19): siRNA sense strand
ucuggacucuuacagcaau

SEQ ID NO: 1663632 - RNA, 19 nt, Homo sapiens
  misc_RNA (1)...(19): siRNA sense strand
ugccuugcauugcuucuau

SEQ ID NO: 1663633 - RNA, 19 nt, Homo sapiens
  misc_RNA (1)...(19): siRNA sense strand
agaaucagccaaagucgau

SEQ ID NO: 1663634 - RNA, 19 nt, Homo sapiens
  misc_RNA (1)...(19): siRNA sense strand
uagcaccuguguguuugaa

SEQ ID NO: 1663635 - RNA, 19 nt, Homo sapiens
  misc_RNA (1)...(19): siRNA sense strand
ugacucauuucgacaccau

SEQ ID NO: 1663636 - RNA, 19 nt, Homo sapiens
  misc_RNA (1)...(19): siRNA sense strand
gacucuuacagcaauaaua

SEQ ID NO: 1663637 - RNA, 19 nt, Homo sapiens
  misc_RNA (1)...(19): siRNA sense strand
gcaguuucagaucaagauu

SEQ ID NO: 1663638 - RNA, 19 nt, Homo sapiens
  misc_RNA (1)...(19): siRNA sense strand
ggcaaacaccugugguauc

SEQ ID NO: 1663639 - RNA, 19 nt, Homo sapiens
  misc_RNA (1)...(19): siRNA sense strand
guuugaagaccaacucuca

SEQ ID NO: 1663640 - RNA, 19 nt, Homo sapiens
  misc_RNA (1)...(19): siRNA sense strand
uuugaaaacugccgggaua

SEQ ID NO: 1663641 - RNA, 19 nt, Homo sapiens
  misc_RNA (1)...(19): siRNA sense strand
acccggauauugucuguca

SEQ ID NO: 1663642 - RNA, 19 nt, Homo sapiens
  misc_RNA (1)...(19): siRNA sense strand
agagcagcaagcuuaguua

SEQ ID NO: 1663643 - RNA, 19 nt, Homo sapiens
  misc_RNA (1)...(19): siRNA sense strand
ucagaucaagauuguucua

SEQ ID NO: 1663644 - RNA, 19 nt, Homo sapiens
  misc_RNA (1)...(19): siRNA sense strand
ccaauugagagaaaagaua

SEQ ID NO: 1663645 - RNA, 19 nt, Homo sapiens
  misc_RNA (1)...(19): siRNA sense strand
aaggagcaguacagagaug

SEQ ID NO: 1663646 - RNA, 19 nt, Homo sapiens
  misc_RNA (1)...(19): siRNA sense strand
ucuguaaagugggugaaga

SEQ ID NO: 1663647 - RNA, 19 nt, Homo sapiens
  misc_RNA (1)...(19): siRNA sense strand
uggauuugcuugagcuucu

SEQ ID NO: 1663648 - RNA, 19 nt, Homo sapiens
  misc_RNA (1)...(19): siRNA sense strand
agaguuauacaagaaggua

SEQ ID NO: 1663649 - RNA, 19 nt, Homo sapiens
  misc_RNA (1)...(19): siRNA sense strand
acccagcaguuucagauca

SEQ ID NO: 1663650 - RNA, 19 nt, Homo sapiens
  misc_RNA (1)...(19): siRNA sense strand
cuguagcaccuguguguuu

SEQ ID NO: 1663651 - RNA, 19 nt, Homo sapiens
  misc_RNA (1)...(19): siRNA sense strand
gcacuuaauuugcuuguua

SEQ ID NO: 1663652 - RNA, 19 nt, Homo sapiens
  misc_RNA (1)...(19): siRNA sense strand
gggcagauguuaauagaaa

SEQ ID NO: 1663653 - RNA, 19 nt, Homo sapiens
  misc_RNA (1)...(19): siRNA sense strand
gaaaguuccuuguacucua

SEQ ID NO: 1663654 - RNA, 19 nt, Homo sapiens
  misc_RNA (1)...(19): siRNA sense strand
gcaaugcagugccuccaua

SEQ ID NO: 1663655 - RNA, 19 nt, Homo sapiens
  misc_RNA (1)...(19): siRNA sense strand
auaaagagauugcucagua

SEQ ID NO: 1663656 - RNA, 19 nt, Homo sapiens
  misc_RNA (1)...(19): siRNA sense strand
caaaggacauaaagagauu

SEQ ID NO: 1663657 - RNA, 19 nt, Homo sapiens
  misc_RNA (1)...(19): siRNA sense strand
gggcauacgugcuugauga

SEQ ID NO: 1663658 - RNA, 19 nt, Homo sapiens
  misc_RNA (1)...(19): siRNA sense strand
guacuacuguuacauuuga

SEQ ID NO: 1663659 - RNA, 19 nt, Homo sapiens
  misc_RNA (1)...(19): siRNA sense strand
gagaaugcaggcacuauua

SEQ ID NO: 1663660 - RNA, 19 nt, Homo sapiens
  misc_RNA (1)...(19): siRNA sense strand
ccugauaccucuuacuaua

SEQ ID NO: 1663661 - RNA, 19 nt, Homo sapiens
  misc_RNA (1)...(19): siRNA sense strand
gaacuauucuccuuuaugc

SEQ ID NO: 1663662 - RNA, 19 nt, Homo sapiens
  misc_RNA (1)...(19): siRNA sense strand
ggacaagaauacuacaugu

SEQ ID NO: 1663663 - RNA, 19 nt, Homo sapiens
  misc_RNA (1)...(19): siRNA sense strand
gaacagugcagaagagcua

SEQ ID NO: 1663664 - RNA, 19 nt, Homo sapiens
  misc_RNA (1)...(19): siRNA sense strand
ggaaguaugcuuuggauau

SEQ ID NO: 1663665 - RNA, 19 nt, Homo sapiens
  misc_RNA (1)...(19): siRNA sense strand
gaaguaugcuuuggauaug

SEQ ID NO: 1663666 - RNA, 19 nt, Homo sapiens
  misc_RNA (1)...(19): siRNA sense strand
caacacgacuuuaaccaau

SEQ ID NO: 1663667 - RNA, 19 nt, Homo sapiens
  misc_RNA (1)...(19): siRNA sense strand
agagauugcucaguauuua

SEQ ID NO: 1663668 - RNA, 19 nt, Homo sapiens
  misc_RNA (1)...(19): siRNA sense strand
ugaaguaccuuguagaaca

SEQ ID NO: 1663669 - RNA, 19 nt, Homo sapiens
  misc_RNA (1)...(19): siRNA sense strand
caucaugaaucuccuuauu

SEQ ID NO: 1663670 - RNA, 19 nt, Homo sapiens
  misc_RNA (1)...(19): siRNA sense strand
ccacaaacuugcacaaaca

SEQ ID NO: 1663671 - RNA, 19 nt, Homo sapiens
  misc_RNA (1)...(19): siRNA sense strand
cauacgugcuugaugauuu

SEQ ID NO: 1663672 - RNA, 19 nt, Homo sapiens
  misc_RNA (1)...(19): siRNA sense strand
gcauaucgcugcucuuaac

SEQ ID NO: 1663673 - RNA, 19 nt, Homo sapiens
  misc_RNA (1)...(19): siRNA sense strand
uaacaaccauccagacauc

SEQ ID NO: 1663674 - RNA, 19 nt, Homo sapiens
  misc_RNA (1)...(19): siRNA sense strand
uaaagagauugcucaguau

SEQ ID NO: 1663675 - RNA, 19 nt, Homo sapiens
  misc_RNA (1)...(19): siRNA sense strand
gcaucaaccuauggaagua

SEQ ID NO: 1663676 - RNA, 19 nt, Homo sapiens
  misc_RNA (1)...(19): siRNA sense strand
gccagcagcuuauuaucuu

SEQ ID NO: 1663677 - RNA, 19 nt, Homo sapiens
  misc_RNA (1)...(19): siRNA sense strand
gauagaauguggugcugau

SEQ ID NO: 1663678 - RNA, 19 nt, Homo sapiens
  misc_RNA (1)...(19): siRNA sense strand
gcgguacccuguuuguaaa

SEQ ID NO: 1663679 - RNA, 19 nt, Homo sapiens
  misc_RNA (1)...(19): siRNA sense strand
guacccuguuuguaaauuu

SEQ ID NO: 1663680 - RNA, 19 nt, Homo sapiens
  misc_RNA (1)...(19): siRNA sense strand
caaagguaauacugcauug

SEQ ID NO: 1663681 - RNA, 19 nt, Homo sapiens
  misc_RNA (1)...(19): siRNA sense strand
gaacaagaccauuucaaaa

SEQ ID NO: 1663682 - RNA, 19 nt, Homo sapiens
  misc_RNA (1)...(19): siRNA sense strand
guguccagcugacccauua

SEQ ID NO: 1663683 - RNA, 19 nt, Homo sapiens
  misc_RNA (1)...(19): siRNA sense strand
ccacagacacuaauaaugg

SEQ ID NO: 1663684 - RNA, 19 nt, Homo sapiens
  misc_RNA (1)...(19): siRNA sense strand
aacaugagguacagugaua

SEQ ID NO: 1663685 - RNA, 19 nt, Homo sapiens
  misc_RNA (1)...(19): siRNA sense strand
ggaaaaggaugguuaugga

SEQ ID NO: 1663686 - RNA, 19 nt, Homo sapiens
  misc_RNA (1)...(19): siRNA sense strand
gauuucauguuacaaagga

SEQ ID NO: 1663687 - RNA, 19 nt, Homo sapiens
  misc_RNA (1)...(19): siRNA sense strand
gcugacccauuacaguuaa

SEQ ID NO: 1663688 - RNA, 19 nt, Homo sapiens
  misc_RNA (1)...(19): siRNA sense strand
gcaaugaacaugagguaca

SEQ ID NO: 1663689 - RNA, 19 nt, Homo sapiens
  misc_RNA (1)...(19): siRNA sense strand
caaaagcguccuugaaaua

SEQ ID NO: 1663690 - RNA, 19 nt, Homo sapiens
  misc_RNA (1)...(19): siRNA sense strand
ggguacuacuguuacauuu

SEQ ID NO: 1663691 - RNA, 19 nt, Homo sapiens
  misc_RNA (1)...(19): siRNA sense strand
uaaagggcauaucccagaa

SEQ ID NO: 1663692 - RNA, 19 nt, Homo sapiens
  misc_RNA (1)...(19): siRNA sense strand
ucuaaagacagcaguauuu

SEQ ID NO: 1663693 - RNA, 19 nt, Homo sapiens
  misc_RNA (1)...(19): siRNA sense strand
gagcuagaaggucuuauug

SEQ ID NO: 1663694 - RNA, 19 nt, Homo sapiens
  misc_RNA (1)...(19): siRNA sense strand
caagacagaacguauuaau

SEQ ID NO: 1663695 - RNA, 19 nt, Homo sapiens
  misc_RNA (1)...(19): siRNA sense strand
acaaacugcuagugacuug

SEQ ID NO: 1663696 - RNA, 19 nt, Homo sapiens
  misc_RNA (1)...(19): siRNA sense strand
agaacaagaccauuucaaa

SEQ ID NO: 1663697 - RNA, 19 nt, Homo sapiens
  misc_RNA (1)...(19): siRNA sense strand
gcuagaaggucuuauugcu

SEQ ID NO: 1663698 - RNA, 19 nt, Homo sapiens
  misc_RNA (1)...(19): siRNA sense strand
gcaaaagcguccuugaaau

SEQ ID NO: 1663699 - RNA, 19 nt, Homo sapiens
  misc_RNA (1)...(19): siRNA sense strand
ggcgguacccuguuuguaa

SEQ ID NO: 1663700 - RNA, 19 nt, Homo sapiens
  misc_RNA (1)...(19): siRNA sense strand
agagcgagcuaucaaacaa

SEQ ID NO: 1663701 - RNA, 19 nt, Homo sapiens
  misc_RNA (1)...(19): siRNA sense strand
caauucaacuccucuucga

SEQ ID NO: 1663702 - RNA, 19 nt, Homo sapiens
  misc_RNA (1)...(19): siRNA sense strand
ucuacaaguuacugcaaua

SEQ ID NO: 1663703 - RNA, 19 nt, Homo sapiens
  misc_RNA (1)...(19): siRNA sense strand
gaaguuuggacaucaugaa

SEQ ID NO: 1663704 - RNA, 19 nt, Homo sapiens
  misc_RNA (1)...(19): siRNA sense strand
cuagugacuugcuggauga

SEQ ID NO: 1663705 - RNA, 19 nt, Homo sapiens
  misc_RNA (1)...(19): siRNA sense strand
acaaacaaacugcuaguga

SEQ ID NO: 1663706 - RNA, 19 nt, Homo sapiens
  misc_RNA (1)...(19): siRNA sense strand
agacacuaauaauggcuua

SEQ ID NO: 1663707 - RNA, 19 nt, Homo sapiens
  misc_RNA (1)...(19): siRNA sense strand
gaacaugagguacagugau

SEQ ID NO: 1663708 - RNA, 19 nt, Homo sapiens
  misc_RNA (1)...(19): siRNA sense strand
aaaggaugguuauggaaug

SEQ ID NO: 1663709 - RNA, 19 nt, Homo sapiens
  misc_RNA (1)...(19): siRNA sense strand
gagcaucugucaacaacac

SEQ ID NO: 1663710 - RNA, 19 nt, Homo sapiens
  misc_RNA (1)...(19): siRNA sense strand
uagagaaaguuccuuguac

SEQ ID NO: 1663711 - RNA, 19 nt, Homo sapiens
  misc_RNA (1)...(19): siRNA sense strand
gagcaauuuggauccuuua

SEQ ID NO: 1663712 - RNA, 19 nt, Homo sapiens
  misc_RNA (1)...(19): siRNA sense strand
uaauccagccuauaaauca

SEQ ID NO: 1663713 - RNA, 19 nt, Homo sapiens
  misc_RNA (1)...(19): siRNA sense strand
gaugagaaggaaauagcua

SEQ ID NO: 1663714 - RNA, 19 nt, Homo sapiens
  misc_RNA (1)...(19): siRNA sense strand
caaguuacugcaauacuga

SEQ ID NO: 1663715 - RNA, 19 nt, Homo sapiens
  misc_RNA (1)...(19): siRNA sense strand
caauuuggauccuuuaagc

SEQ ID NO: 1663716 - RNA, 19 nt, Homo sapiens
  misc_RNA (1)...(19): siRNA sense strand
ggaagugaacagugcagaa

SEQ ID NO: 1663717 - RNA, 19 nt, Homo sapiens
  misc_RNA (1)...(19): siRNA sense strand
gaacguauucuugguccuu

SEQ ID NO: 1663718 - RNA, 19 nt, Homo sapiens
  misc_RNA (1)...(19): siRNA sense strand
gucaacaacacgacuuuaa

SEQ ID NO: 1663719 - RNA, 19 nt, Homo sapiens
  misc_RNA (1)...(19): siRNA sense strand
caaacgaugcaucaaccua

SEQ ID NO: 1663720 - RNA, 19 nt, Homo sapiens
  misc_RNA (1)...(19): siRNA sense strand
gaaugcaggcacuauuaau

SEQ ID NO: 1663721 - RNA, 19 nt, Homo sapiens
  misc_RNA (1)...(19): siRNA sense strand
guccaguccuuguuaaauc

SEQ ID NO: 1663722 - RNA, 19 nt, Homo sapiens
  misc_RNA (1)...(19): siRNA sense strand
gugacuugcuggaugagaa

SEQ ID NO: 1663723 - RNA, 19 nt, Homo sapiens
  misc_RNA (1)...(19): siRNA sense strand
acaaguuacugcaauacug

SEQ ID NO: 1663724 - RNA, 19 nt, Homo sapiens
  misc_RNA (1)...(19): siRNA sense strand
gauaugcagcagagcaauu

SEQ ID NO: 1663725 - RNA, 19 nt, Homo sapiens
  misc_RNA (1)...(19): siRNA sense strand
agacagaacguauuaaugc

SEQ ID NO: 1663726 - RNA, 19 nt, Homo sapiens
  misc_RNA (1)...(19): siRNA sense strand
gaaguaccuuguagaacac

SEQ ID NO: 1663727 - RNA, 19 nt, Homo sapiens
  misc_RNA (1)...(19): siRNA sense strand
gaagugaacagugcagaag

SEQ ID NO: 1663728 - RNA, 19 nt, Homo sapiens
  misc_RNA (1)...(19): siRNA sense strand
cugcaauacugauagaaug

SEQ ID NO: 1663729 - RNA, 19 nt, Homo sapiens
  misc_RNA (1)...(19): siRNA sense strand
acaagaauacuacaugugu

SEQ ID NO: 1663730 - RNA, 19 nt, Homo sapiens
  misc_RNA (1)...(19): siRNA sense strand
uuagagaaaguuccuugua

SEQ ID NO: 1663731 - RNA, 19 nt, Homo sapiens
  misc_RNA (1)...(19): siRNA sense strand
guguuucgauggccauuug

SEQ ID NO: 1663732 - RNA, 19 nt, Homo sapiens
  misc_RNA (1)...(19): siRNA sense strand
cugcauaucgcugcucuua

SEQ ID NO: 1663733 - RNA, 19 nt, Homo sapiens
  misc_RNA (1)...(19): siRNA sense strand
ggugguccaguccuuguua

SEQ ID NO: 1663734 - RNA, 19 nt, Homo sapiens
  misc_RNA (1)...(19): siRNA sense strand
gaccgccagcagcuuauua

SEQ ID NO: 1663735 - RNA, 19 nt, Homo sapiens
  misc_RNA (1)...(19): siRNA sense strand
agagcaauuuggauccuuu

SEQ ID NO: 1663736 - RNA, 19 nt, Homo sapiens
  misc_RNA (1)...(19): siRNA sense strand
cagcaagacagaacguauu

SEQ ID NO: 1663737 - RNA, 19 nt, Homo sapiens
  misc_RNA (1)...(19): siRNA sense strand
gaucuaaagacagcaguau

SEQ ID NO: 1663738 - RNA, 19 nt, Homo sapiens
  misc_RNA (1)...(19): siRNA sense strand
cagcugacccauuacaguu

SEQ ID NO: 1663739 - RNA, 19 nt, Homo sapiens
  misc_RNA (1)...(19): siRNA sense strand
aaagcguccuugaaauaga

SEQ ID NO: 1663740 - RNA, 19 nt, Homo sapiens
  misc_RNA (1)...(19): siRNA sense strand
ccagcagcuuauuaucuuu

SEQ ID NO: 1663741 - RNA, 19 nt, Homo sapiens
  misc_RNA (1)...(19): siRNA sense strand
gcaagacagaacguauuaa

SEQ ID NO: 1663742 - RNA, 19 nt, Homo sapiens
  misc_RNA (1)...(19): siRNA sense strand
ucaaagguaauacugcauu

SEQ ID NO: 1663743 - RNA, 19 nt, Homo sapiens
  misc_RNA (1)...(19): siRNA sense strand
ccauuacaguuaaauaagg

SEQ ID NO: 1663744 - RNA, 19 nt, Homo sapiens
  misc_RNA (1)...(19): siRNA sense strand
ggaauuccuccuagagcaa

SEQ ID NO: 1663745 - RNA, 19 nt, Homo sapiens
  misc_RNA (1)...(19): siRNA sense strand
gcacaaacaaacugcuagu

SEQ ID NO: 1663746 - RNA, 19 nt, Homo sapiens
  misc_RNA (1)...(19): siRNA sense strand
gccacaaacuugcacaaac

SEQ ID NO: 1663747 - RNA, 19 nt, Homo sapiens
  misc_RNA (1)...(19): siRNA sense strand
gacaucaugaaucuccuua

SEQ ID NO: 1663748 - RNA, 19 nt, Homo sapiens
  misc_RNA (1)...(19): siRNA sense strand
uuacugcaauacugauaga

SEQ ID NO: 1663749 - RNA, 19 nt, Homo sapiens
  misc_RNA (1)...(19): siRNA sense strand
gguacccuguuuguaaauu

SEQ ID NO: 1663750 - RNA, 19 nt, Homo sapiens
  misc_RNA (1)...(19): siRNA sense strand
aaaguuccuuguacucuag

SEQ ID NO: 1663751 - RNA, 19 nt, Homo sapiens
  misc_RNA (1)...(19): siRNA sense strand
caaaugagcuugaugcaaa

SEQ ID NO: 1663752 - RNA, 19 nt, Homo sapiens
  misc_RNA (1)...(19): siRNA sense strand
gaacaaaggugaaaugucu

SEQ ID NO: 1663753 - RNA, 19 nt, Homo sapiens
  misc_RNA (1)...(19): siRNA sense strand
gaaaguagguuguugaaag

SEQ ID NO: 1663754 - RNA, 19 nt, Homo sapiens
  misc_RNA (1)...(19): siRNA sense strand
ggaagaagcagaucagaua

SEQ ID NO: 1663755 - RNA, 19 nt, Homo sapiens
  misc_RNA (1)...(19): siRNA sense strand
cagaaaggcucacuaguaa

SEQ ID NO: 1663756 - RNA, 19 nt, Homo sapiens
  misc_RNA (1)...(19): siRNA sense strand
gaacagaaaguaacacaaa

SEQ ID NO: 1663757 - RNA, 19 nt, Homo sapiens
  misc_RNA (1)...(19): siRNA sense strand
ucuagaagaugaacgauua

SEQ ID NO: 1663758 - RNA, 19 nt, Homo sapiens
  misc_RNA (1)...(19): siRNA sense strand
aaacaugccucuaguauca

SEQ ID NO: 1663759 - RNA, 19 nt, Homo sapiens
  misc_RNA (1)...(19): siRNA sense strand
gaauuaaggucaucuacau

SEQ ID NO: 1663760 - RNA, 19 nt, Homo sapiens
  misc_RNA (1)...(19): siRNA sense strand
gaacaucgaguaccaaaug

SEQ ID NO: 1663761 - RNA, 19 nt, Homo sapiens
  misc_RNA (1)...(19): siRNA sense strand
gaaagcagcaaauuagaaa

SEQ ID NO: 1663762 - RNA, 19 nt, Homo sapiens
  misc_RNA (1)...(19): siRNA sense strand
gaagaugaacgauuaagaa

SEQ ID NO: 1663763 - RNA, 19 nt, Homo sapiens
  misc_RNA (1)...(19): siRNA sense strand
gaucugaagagaacauuua

SEQ ID NO: 1663764 - RNA, 19 nt, Homo sapiens
  misc_RNA (1)...(19): siRNA sense strand
ugaaaugucuagaagauga

SEQ ID NO: 1663765 - RNA, 19 nt, Homo sapiens
  misc_RNA (1)...(19): siRNA sense strand
gaaguuaaagcauugagua

SEQ ID NO: 1663766 - RNA, 19 nt, Homo sapiens
  misc_RNA (1)...(19): siRNA sense strand
gaaaacaccugaauuaaag

SEQ ID NO: 1663767 - RNA, 19 nt, Homo sapiens
  misc_RNA (1)...(19): siRNA sense strand
gaacagaaacugagaagca

SEQ ID NO: 1663768 - RNA, 19 nt, Homo sapiens
  misc_RNA (1)...(19): siRNA sense strand
aauagaaucugagcucuua

SEQ ID NO: 1663769 - RNA, 19 nt, Homo sapiens
  misc_RNA (1)...(19): siRNA sense strand
gggagaacaugcauuaguu

SEQ ID NO: 1663770 - RNA, 19 nt, Homo sapiens
  misc_RNA (1)...(19): siRNA sense strand
ucaaacaacugguggaaga

SEQ ID NO: 1663771 - RNA, 19 nt, Homo sapiens
  misc_RNA (1)...(19): siRNA sense strand
gaaaggcucacuaguaaga

SEQ ID NO: 1663772 - RNA, 19 nt, Homo sapiens
  misc_RNA (1)...(19): siRNA sense strand
ucaaggaucucaccaaaca

SEQ ID NO: 1663773 - RNA, 19 nt, Homo sapiens
  misc_RNA (1)...(19): siRNA sense strand
uaagggagaacaugcauua

SEQ ID NO: 1663774 - RNA, 19 nt, Homo sapiens
  misc_RNA (1)...(19): siRNA sense strand
gaacagaagaugaauuauc

SEQ ID NO: 1663775 - RNA, 19 nt, Homo sapiens
  misc_RNA (1)...(19): siRNA sense strand
uaagaacacugagaacaaa

SEQ ID NO: 1663776 - RNA, 19 nt, Homo sapiens
  misc_RNA (1)...(19): siRNA sense strand
gaaaaugaguccaaacuau

SEQ ID NO: 1663777 - RNA, 19 nt, Homo sapiens
  misc_RNA (1)...(19): siRNA sense strand
ggaaaucaaccgaaaauua

SEQ ID NO: 1663778 - RNA, 19 nt, Homo sapiens
  misc_RNA (1)...(19): siRNA sense strand
acuaauagcucaagacguu

SEQ ID NO: 1663779 - RNA, 19 nt, Homo sapiens
  misc_RNA (1)...(19): siRNA sense strand
uuccagagaucaacuaaua

SEQ ID NO: 1663780 - RNA, 19 nt, Homo sapiens
  misc_RNA (1)...(19): siRNA sense strand
cgacuagacucaucagaga

SEQ ID NO: 1663781 - RNA, 19 nt, Homo sapiens
  misc_RNA (1)...(19): siRNA sense strand
guagacauuuguucagaaa

SEQ ID NO: 1663782 - RNA, 19 nt, Homo sapiens
  misc_RNA (1)...(19): siRNA sense strand
caaugaaagcagcaaauua

SEQ ID NO: 1663783 - RNA, 19 nt, Homo sapiens
  misc_RNA (1)...(19): siRNA sense strand
gauaaaguuuccuguagug

SEQ ID NO: 1663784 - RNA, 19 nt, Homo sapiens
  misc_RNA (1)...(19): siRNA sense strand
gcucuuaucuacggaguuu

SEQ ID NO: 1663785 - RNA, 19 nt, Homo sapiens
  misc_RNA (1)...(19): siRNA sense strand
cagcauaugaacacaauua

SEQ ID NO: 1663786 - RNA, 19 nt, Homo sapiens
  misc_RNA (1)...(19): siRNA sense strand
ucaaagagguaagcaagaa

SEQ ID NO: 1663787 - RNA, 19 nt, Homo sapiens
  misc_RNA (1)...(19): siRNA sense strand
ggugaaaugucuagaagau

SEQ ID NO: 1663788 - RNA, 19 nt, Homo sapiens
  misc_RNA (1)...(19): siRNA sense strand
uaaaggaacuagaagaucu

SEQ ID NO: 1663789 - RNA, 19 nt, Homo sapiens
  misc_RNA (1)...(19): siRNA sense strand
gaagaggcacgccaagaaa

SEQ ID NO: 1663790 - RNA, 19 nt, Homo sapiens
  misc_RNA (1)...(19): siRNA sense strand
caucauggcaucuuuauau

SEQ ID NO: 1663791 - RNA, 19 nt, Homo sapiens
  misc_RNA (1)...(19): siRNA sense strand
gaaguggaaagucuuaauu

SEQ ID NO: 1663792 - RNA, 19 nt, Homo sapiens
  misc_RNA (1)...(19): siRNA sense strand
gaaacagaacagaaaguaa

SEQ ID NO: 1663793 - RNA, 19 nt, Homo sapiens
  misc_RNA (1)...(19): siRNA sense strand
uaucaaggaucucaccaaa

SEQ ID NO: 1663794 - RNA, 19 nt, Homo sapiens
  misc_RNA (1)...(19): siRNA sense strand
acagaaaggcucacuagua

SEQ ID NO: 1663795 - RNA, 19 nt, Homo sapiens
  misc_RNA (1)...(19): siRNA sense strand
caaggaaaccaaagauaaa

SEQ ID NO: 1663796 - RNA, 19 nt, Homo sapiens
  misc_RNA (1)...(19): siRNA sense strand
gauacagacugcaccaaga

SEQ ID NO: 1663797 - RNA, 19 nt, Homo sapiens
  misc_RNA (1)...(19): siRNA sense strand
gaacaaaugaaacagacaa

SEQ ID NO: 1663798 - RNA, 19 nt, Homo sapiens
  misc_RNA (1)...(19): siRNA sense strand
gauaaggccauguugauug

SEQ ID NO: 1663799 - RNA, 19 nt, Homo sapiens
  misc_RNA (1)...(19): siRNA sense strand
ggaagacucaugcaacuug

SEQ ID NO: 1663800 - RNA, 19 nt, Homo sapiens
  misc_RNA (1)...(19): siRNA sense strand
gaacagaggacaaagaaaa

SEQ ID NO: 1663801 - RNA, 19 nt, Homo sapiens
  misc_RNA (1)...(19): siRNA sense strand
gaggugagaaggaaucuuu

SEQ ID NO: 1663802 - RNA, 19 nt, Homo sapiens
  misc_RNA (1)...(19): siRNA sense strand
aaucugagcucuuaucuac

SEQ ID NO: 1663803 - RNA, 19 nt, Homo sapiens
  misc_RNA (1)...(19): siRNA sense strand
aaaguagguuguugaaaga

SEQ ID NO: 1663804 - RNA, 19 nt, Homo sapiens
  misc_RNA (1)...(19): siRNA sense strand
gaugaacgauuaagaacag

SEQ ID NO: 1663805 - RNA, 19 nt, Homo sapiens
  misc_RNA (1)...(19): siRNA sense strand
ggagucagaagaaauuaaa

SEQ ID NO: 1663806 - RNA, 19 nt, Homo sapiens
  misc_RNA (1)...(19): siRNA sense strand
aaacauaucaggagucaga

SEQ ID NO: 1663807 - RNA, 19 nt, Homo sapiens
  misc_RNA (1)...(19): siRNA sense strand
gcaaauaaggaacuugaga

SEQ ID NO: 1663808 - RNA, 19 nt, Homo sapiens
  misc_RNA (1)...(19): siRNA sense strand
gaacaggccaacaagaaau

SEQ ID NO: 1663809 - RNA, 19 nt, Homo sapiens
  misc_RNA (1)...(19): siRNA sense strand
ggaacaggccaacaagaaa

SEQ ID NO: 1663810 - RNA, 19 nt, Homo sapiens
  misc_RNA (1)...(19): siRNA sense strand
gcaaugaaagcagcaaauu

SEQ ID NO: 1663811 - RNA, 19 nt, Homo sapiens
  misc_RNA (1)...(19): siRNA sense strand
gaaggaaaaucuacaaaca

SEQ ID NO: 1663812 - RNA, 19 nt, Homo sapiens
  misc_RNA (1)...(19): siRNA sense strand
guaaacaugccucuaguau

SEQ ID NO: 1663813 - RNA, 19 nt, Homo sapiens
  misc_RNA (1)...(19): siRNA sense strand
gaaagaagaaguggaaagu

SEQ ID NO: 1663814 - RNA, 19 nt, Homo sapiens
  misc_RNA (1)...(19): siRNA sense strand
gagguaagcaagaaauuga

SEQ ID NO: 1663815 - RNA, 19 nt, Homo sapiens
  misc_RNA (1)...(19): siRNA sense strand
acaaggaaaccaaagauaa

SEQ ID NO: 1663816 - RNA, 19 nt, Homo sapiens
  misc_RNA (1)...(19): siRNA sense strand
uagaagaucugaagagaac

SEQ ID NO: 1663817 - RNA, 19 nt, Homo sapiens
  misc_RNA (1)...(19): siRNA sense strand
uggaagaaauagaaucuga

SEQ ID NO: 1663818 - RNA, 19 nt, Homo sapiens
  misc_RNA (1)...(19): siRNA sense strand
gaagaaucaggcacacuuu

SEQ ID NO: 1663819 - RNA, 19 nt, Homo sapiens
  misc_RNA (1)...(19): siRNA sense strand
ggaagucguucuaguucau

SEQ ID NO: 1663820 - RNA, 19 nt, Homo sapiens
  misc_RNA (1)...(19): siRNA sense strand
ggaaaacaccugaauuaaa

SEQ ID NO: 1663821 - RNA, 19 nt, Homo sapiens
  misc_RNA (1)...(19): siRNA sense strand
aaucugagcugcugcuguu

SEQ ID NO: 1663822 - RNA, 19 nt, Homo sapiens
  misc_RNA (1)...(19): siRNA sense strand
caaaugaaacagaacagaa

SEQ ID NO: 1663823 - RNA, 19 nt, Homo sapiens
  misc_RNA (1)...(19): siRNA sense strand
caaauaaggaacuugagaa

SEQ ID NO: 1663824 - RNA, 19 nt, Homo sapiens
  misc_RNA (1)...(19): siRNA sense strand
gagaagaacuaaagaaaag

SEQ ID NO: 1663825 - RNA, 19 nt, Homo sapiens
  misc_RNA (1)...(19): siRNA sense strand
gcaggaacauaucauaaaa

SEQ ID NO: 1663826 - RNA, 19 nt, Homo sapiens
  misc_RNA (1)...(19): siRNA sense strand
gagcauaauaaucgaauug

SEQ ID NO: 1663827 - RNA, 19 nt, Homo sapiens
  misc_RNA (1)...(19): siRNA sense strand
gcagcaggaacauaucaua

SEQ ID NO: 1663828 - RNA, 19 nt, Homo sapiens
  misc_RNA (1)...(19): siRNA sense strand
aaagagcguuucagcauca

SEQ ID NO: 1663829 - RNA, 19 nt, Homo sapiens
  misc_RNA (1)...(19): siRNA sense strand
uaacauuggagcucucuuu

SEQ ID NO: 1663830 - RNA, 19 nt, Homo sapiens
  misc_RNA (1)...(19): siRNA sense strand
aaaguaaagugggcacaaa

SEQ ID NO: 1663831 - RNA, 19 nt, Homo sapiens
  misc_RNA (1)...(19): siRNA sense strand
cauuggagcucucuuugga

SEQ ID NO: 1663832 - RNA, 19 nt, Homo sapiens
  misc_RNA (1)...(19): siRNA sense strand
gagaauaguuaggcugcaa

SEQ ID NO: 1663833 - RNA, 19 nt, Homo sapiens
  misc_RNA (1)...(19): siRNA sense strand
uggaagcuaugacaaagaa

SEQ ID NO: 1663834 - RNA, 19 nt, Homo sapiens
  misc_RNA (1)...(19): siRNA sense strand
ccaaagauaaacucaaaga

SEQ ID NO: 1663835 - RNA, 19 nt, Homo sapiens
  misc_RNA (1)...(19): siRNA sense strand
cagaggauuuguuggaaga

SEQ ID NO: 1663836 - RNA, 19 nt, Homo sapiens
  misc_RNA (1)...(19): siRNA sense strand
caucagagaaauagacaaa

SEQ ID NO: 1663837 - RNA, 19 nt, Homo sapiens
  misc_RNA (1)...(19): siRNA sense strand
gcaaugguaaugaaauaug

SEQ ID NO: 1663838 - RNA, 19 nt, Homo sapiens
  misc_RNA (1)...(19): siRNA sense strand
aaacugagaagcagcauau

SEQ ID NO: 1663839 - RNA, 19 nt, Homo sapiens
  misc_RNA (1)...(19): siRNA sense strand
ugaaacagaacagaaagua

SEQ ID NO: 1663840 - RNA, 19 nt, Homo sapiens
  misc_RNA (1)...(19): siRNA sense strand
caaccuaaugagcauaaua

SEQ ID NO: 1663841 - RNA, 19 nt, Homo sapiens
  misc_RNA (1)...(19): siRNA sense strand
caaagccagugugaacaaa

SEQ ID NO: 1663842 - RNA, 19 nt, Homo sapiens
  misc_RNA (1)...(19): siRNA sense strand
gcagucacaauuugauaaa

SEQ ID NO: 1663843 - RNA, 19 nt, Homo sapiens
  misc_RNA (1)...(19): siRNA sense strand
gaagacucaugcaacuugu

SEQ ID NO: 1663844 - RNA, 19 nt, Homo sapiens
  misc_RNA (1)...(19): siRNA sense strand
gaacauuuaaggaggguau

SEQ ID NO: 1663845 - RNA, 19 nt, Homo sapiens
  misc_RNA (1)...(19): siRNA sense strand
aagaagcaaugguaaugaa

SEQ ID NO: 1663846 - RNA, 19 nt, Homo sapiens
  misc_RNA (1)...(19): siRNA sense strand
guaccaaauggaaugaaua

SEQ ID NO: 1663847 - RNA, 19 nt, Homo sapiens
  misc_RNA (1)...(19): siRNA sense strand
ucagaaagccccuaugaua

SEQ ID NO: 1663848 - RNA, 19 nt, Homo sapiens
  misc_RNA (1)...(19): siRNA sense strand
ggagcucucuuuggaaauc

SEQ ID NO: 1663849 - RNA, 19 nt, Homo sapiens
  misc_RNA (1)...(19): siRNA sense strand
acagaaauagaacgucuua

SEQ ID NO: 1663850 - RNA, 19 nt, Homo sapiens
  misc_RNA (1)...(19): siRNA sense strand
acaaacacuuggaacagaa

SEQ ID NO: 1663851 - RNA, 19 nt, Homo sapiens
  misc_RNA (1)...(19): siRNA sense strand
gaagauaacucucaccuuu

SEQ ID NO: 1663852 - RNA, 19 nt, Homo sapiens
  misc_RNA (1)...(19): siRNA sense strand
ucagugauguccuauaaua

SEQ ID NO: 1663853 - RNA, 19 nt, Homo sapiens
  misc_RNA (1)...(19): siRNA sense strand
gcaagaaguucaagaagau

SEQ ID NO: 1663854 - RNA, 19 nt, Homo sapiens
  misc_RNA (1)...(19): siRNA sense strand
gcuagacugucacuucuua

SEQ ID NO: 1663855 - RNA, 19 nt, Homo sapiens
  misc_RNA (1)...(19): siRNA sense strand
gaaaauaacucuucagauc

SEQ ID NO: 1663856 - RNA, 19 nt, Homo sapiens
  misc_RNA (1)...(19): siRNA sense strand
gaacagacauauuucuagu

SEQ ID NO: 1663857 - RNA, 19 nt, Homo sapiens
  misc_RNA (1)...(19): siRNA sense strand
gcagagauuuccaguguug

SEQ ID NO: 1663858 - RNA, 19 nt, Homo sapiens
  misc_RNA (1)...(19): siRNA sense strand
cagagacaauguuggauua

SEQ ID NO: 1663859 - RNA, 19 nt, Homo sapiens
  misc_RNA (1)...(19): siRNA sense strand
ugauucaucucucuaguua

SEQ ID NO: 1663860 - RNA, 19 nt, Homo sapiens
  misc_RNA (1)...(19): siRNA sense strand
caaauacgcaucuguugua

SEQ ID NO: 1663861 - RNA, 19 nt, Homo sapiens
  misc_RNA (1)...(19): siRNA sense strand
caagacuuauggacuguua

SEQ ID NO: 1663862 - RNA, 19 nt, Homo sapiens
  misc_RNA (1)...(19): siRNA sense strand
ucaagaagaucauuaugga

SEQ ID NO: 1663863 - RNA, 19 nt, Homo sapiens
  misc_RNA (1)...(19): siRNA sense strand
gcagagaucaggccaaguu

SEQ ID NO: 1663864 - RNA, 19 nt, Homo sapiens
  misc_RNA (1)...(19): siRNA sense strand
aaagguaucuggccaggaa

SEQ ID NO: 1663865 - RNA, 19 nt, Homo sapiens
  misc_RNA (1)...(19): siRNA sense strand
aaacacagcugaagcaaac

SEQ ID NO: 1663866 - RNA, 19 nt, Homo sapiens
  misc_RNA (1)...(19): siRNA sense strand
ccugauggcugugcuauuu

SEQ ID NO: 1663867 - RNA, 19 nt, Homo sapiens
  misc_RNA (1)...(19): siRNA sense strand
ggacagagacaauguugga

SEQ ID NO: 1663868 - RNA, 19 nt, Homo sapiens
  misc_RNA (1)...(19): siRNA sense strand
acagacauauuucuaguug

SEQ ID NO: 1663869 - RNA, 19 nt, Homo sapiens
  misc_RNA (1)...(19): siRNA sense strand
auauuaagcugacgcaauu

SEQ ID NO: 1663870 - RNA, 19 nt, Homo sapiens
  misc_RNA (1)...(19): siRNA sense strand
gcaaacagagguccuagug

SEQ ID NO: 1663871 - RNA, 19 nt, Homo sapiens
  misc_RNA (1)...(19): siRNA sense strand
gagaccacccuguuuguuu

SEQ ID NO: 1663872 - RNA, 19 nt, Homo sapiens
  misc_RNA (1)...(19): siRNA sense strand
guauuacacuggaguuuua

SEQ ID NO: 1663873 - RNA, 19 nt, Homo sapiens
  misc_RNA (1)...(19): siRNA sense strand
uggcagagauuuccagugu

SEQ ID NO: 1663874 - RNA, 19 nt, Homo sapiens
  misc_RNA (1)...(19): siRNA sense strand
uuucagugauguccuauaa

SEQ ID NO: 1663875 - RNA, 19 nt, Homo sapiens
  misc_RNA (1)...(19): siRNA sense strand
guugguggcuugaaacuuc

SEQ ID NO: 1663876 - RNA, 19 nt, Homo sapiens
  misc_RNA (1)...(19): siRNA sense strand
gagcugaaguugcuuuggu

SEQ ID NO: 1663877 - RNA, 19 nt, Homo sapiens
  misc_RNA (1)...(19): siRNA sense strand
ucacauuacuuuccugaca

SEQ ID NO: 1663878 - RNA, 19 nt, Homo sapiens
  misc_RNA (1)...(19): siRNA sense strand
gaacuguguguaugaggua

SEQ ID NO: 1663879 - RNA, 19 nt, Homo sapiens
  misc_RNA (1)...(19): siRNA sense strand
ccaaggcgaggugauauua

SEQ ID NO: 1663880 - RNA, 19 nt, Homo sapiens
  misc_RNA (1)...(19): siRNA sense strand
gcaaucugcguagcaaaua

SEQ ID NO: 1663881 - RNA, 19 nt, Homo sapiens
  misc_RNA (1)...(19): siRNA sense strand
agacaauguuggauuaguu

SEQ ID NO: 1663882 - RNA, 19 nt, Homo sapiens
  misc_RNA (1)...(19): siRNA sense strand
gcaaauacgcaucuguugu

SEQ ID NO: 1663883 - RNA, 19 nt, Homo sapiens
  misc_RNA (1)...(19): siRNA sense strand
gaagauccuaggagacaaa

SEQ ID NO: 1663884 - RNA, 19 nt, Homo sapiens
  misc_RNA (1)...(19): siRNA sense strand
ggaauugggaauauauaug

SEQ ID NO: 1663885 - RNA, 19 nt, Homo sapiens
  misc_RNA (1)...(19): siRNA sense strand
ugagguggccuggacauua

SEQ ID NO: 1663886 - RNA, 19 nt, Homo sapiens
  misc_RNA (1)...(19): siRNA sense strand
gcccugauauuucucuguu

SEQ ID NO: 1663887 - RNA, 19 nt, Homo sapiens
  misc_RNA (1)...(19): siRNA sense strand
gaauucuuccgcccugaua

SEQ ID NO: 1663888 - RNA, 19 nt, Homo sapiens
  misc_RNA (1)...(19): siRNA sense strand
gauauuaagcugacgcaau

SEQ ID NO: 1663889 - RNA, 19 nt, Homo sapiens
  misc_RNA (1)...(19): siRNA sense strand
ggaacagacauauuucuag

SEQ ID NO: 1663890 - RNA, 19 nt, Homo sapiens
  misc_RNA (1)...(19): siRNA sense strand
gagguggccuggacauuac

SEQ ID NO: 1663891 - RNA, 19 nt, Homo sapiens
  misc_RNA (1)...(19): siRNA sense strand
ugcaagaaguucaagaaga

SEQ ID NO: 1663892 - RNA, 19 nt, Homo sapiens
  misc_RNA (1)...(19): siRNA sense strand
caagauuuacuggaagaua

SEQ ID NO: 1663893 - RNA, 19 nt, Homo sapiens
  misc_RNA (1)...(19): siRNA sense strand
gacaauguuggauuaguuu

SEQ ID NO: 1663894 - RNA, 19 nt, Homo sapiens
  misc_RNA (1)...(19): siRNA sense strand
ggacuacaccgugggagaa

SEQ ID NO: 1663895 - RNA, 19 nt, Homo sapiens
  misc_RNA (1)...(19): siRNA sense strand
gaagcaaacagagguccua

SEQ ID NO: 1663896 - RNA, 19 nt, Homo sapiens
  misc_RNA (1)...(19): siRNA sense strand
uggaaucacuggguuauca

SEQ ID NO: 1663897 - RNA, 19 nt, Homo sapiens
  misc_RNA (1)...(19): siRNA sense strand
guacuuuguuugcaagaag

SEQ ID NO: 1663898 - RNA, 19 nt, Homo sapiens
  misc_RNA (1)...(19): siRNA sense strand
agacguacuuuguuugcaa

SEQ ID NO: 1663899 - RNA, 19 nt, Homo sapiens
  misc_RNA (1)...(19): siRNA sense strand
agaccacccuguuuguuug

SEQ ID NO: 1663900 - RNA, 19 nt, Homo sapiens
  misc_RNA (1)...(19): siRNA sense strand
gagccagacaucuuugauu

SEQ ID NO: 1663901 - RNA, 19 nt, Homo sapiens
  misc_RNA (1)...(19): siRNA sense strand
gaucaucugccuuuauugg

SEQ ID NO: 1663902 - RNA, 19 nt, Homo sapiens
  misc_RNA (1)...(19): siRNA sense strand
aagcggaauugggaauaua

SEQ ID NO: 1663903 - RNA, 19 nt, Homo sapiens
  misc_RNA (1)...(19): siRNA sense strand
gcacccaggagcugaaguu

SEQ ID NO: 1663904 - RNA, 19 nt, Homo sapiens
  misc_RNA (1)...(19): siRNA sense strand
acagugaucugacacaaac

SEQ ID NO: 1663905 - RNA, 19 nt, Homo sapiens
  misc_RNA (1)...(19): siRNA sense strand
cuagguaucucacagaacu

SEQ ID NO: 1663906 - RNA, 19 nt, Homo sapiens
  misc_RNA (1)...(19): siRNA sense strand
gagacaauguuggauuagu

SEQ ID NO: 1663907 - RNA, 19 nt, Homo sapiens
  misc_RNA (1)...(19): siRNA sense strand
gaacccaguggaauucuuc

SEQ ID NO: 1663908 - RNA, 19 nt, Homo sapiens
  misc_RNA (1)...(19): siRNA sense strand
uauaagaugcggacaggaa

SEQ ID NO: 1663909 - RNA, 19 nt, Homo sapiens
  misc_RNA (1)...(19): siRNA sense strand
cacaagauuuacuggaaga

SEQ ID NO: 1663910 - RNA, 19 nt, Homo sapiens
  misc_RNA (1)...(19): siRNA sense strand
aaauguugaucccaaaugu

SEQ ID NO: 1663911 - RNA, 19 nt, Homo sapiens
  misc_RNA (1)...(19): siRNA sense strand
ccagacaucuuugauucau

SEQ ID NO: 1663912 - RNA, 19 nt, Homo sapiens
  misc_RNA (1)...(19): siRNA sense strand
augcagacguacuuuguuu

SEQ ID NO: 1663913 - RNA, 19 nt, Homo sapiens
  misc_RNA (1)...(19): siRNA sense strand
aagauaacucucaccuuua

SEQ ID NO: 1663914 - RNA, 19 nt, Homo sapiens
  misc_RNA (1)...(19): siRNA sense strand
gaagggcuacggccacugu

SEQ ID NO: 1663915 - RNA, 19 nt, Homo sapiens
  misc_RNA (1)...(19): siRNA sense strand
ugucaucuguuuauucaca

SEQ ID NO: 1663916 - RNA, 19 nt, Homo sapiens
  misc_RNA (1)...(19): siRNA sense strand
uguuauguguggugacuuu

SEQ ID NO: 1663917 - RNA, 19 nt, Homo sapiens
  misc_RNA (1)...(19): siRNA sense strand
agacaucuuugauucaucu

SEQ ID NO: 1663918 - RNA, 19 nt, Homo sapiens
  misc_RNA (1)...(19): siRNA sense strand
caaacacagcugaagcaaa

SEQ ID NO: 1663919 - RNA, 19 nt, Homo sapiens
  misc_RNA (1)...(19): siRNA sense strand
gcuucaaacauuccaaauu

SEQ ID NO: 1663920 - RNA, 19 nt, Homo sapiens
  misc_RNA (1)...(19): siRNA sense strand
acagugagaacaaguuuga

SEQ ID NO: 1663921 - RNA, 19 nt, Homo sapiens
  misc_RNA (1)...(19): siRNA sense strand
caugaacgcugagggagau

SEQ ID NO: 1663922 - RNA, 19 nt, Homo sapiens
  misc_RNA (1)...(19): siRNA sense strand
acgcaucuguuguauaauc

SEQ ID NO: 1663923 - RNA, 19 nt, Homo sapiens
  misc_RNA (1)...(19): siRNA sense strand
cuuauggacuguuaaugga

SEQ ID NO: 1663924 - RNA, 19 nt, Homo sapiens
  misc_RNA (1)...(19): siRNA sense strand
guggugacuuuaauucugu

SEQ ID NO: 1663925 - RNA, 19 nt, Homo sapiens
  misc_RNA (1)...(19): siRNA sense strand
uaaagcggaauugggaaua

SEQ ID NO: 1663926 - RNA, 19 nt, Homo sapiens
  misc_RNA (1)...(19): siRNA sense strand
uuacagaacaagacuuaug

SEQ ID NO: 1663927 - RNA, 19 nt, Homo sapiens
  misc_RNA (1)...(19): siRNA sense strand
uagcaaauacgcaucuguu

SEQ ID NO: 1663928 - RNA, 19 nt, Homo sapiens
  misc_RNA (1)...(19): siRNA sense strand
ccaaaugugaagacaguga

SEQ ID NO: 1663929 - RNA, 19 nt, Homo sapiens
  misc_RNA (1)...(19): siRNA sense strand
agccagacaucuuugauuc

SEQ ID NO: 1663930 - RNA, 19 nt, Homo sapiens
  misc_RNA (1)...(19): siRNA sense strand
gcaaugcuacuggcagaga

SEQ ID NO: 1663931 - RNA, 19 nt, Homo sapiens
  misc_RNA (1)...(19): siRNA sense strand
ggaagauaacucucaccuu

SEQ ID NO: 1663932 - RNA, 19 nt, Homo sapiens
  misc_RNA (1)...(19): siRNA sense strand
gagaaucugcaaagguguu

SEQ ID NO: 1663933 - RNA, 19 nt, Homo sapiens
  misc_RNA (1)...(19): siRNA sense strand
gugaagacagugagaacaa

SEQ ID NO: 1663934 - RNA, 19 nt, Homo sapiens
  misc_RNA (1)...(19): siRNA sense strand
gcggaauugggaauauaua

SEQ ID NO: 1663935 - RNA, 19 nt, Homo sapiens
  misc_RNA (1)...(19): siRNA sense strand
ugagggagaugagccuuca

SEQ ID NO: 1663936 - RNA, 19 nt, Homo sapiens
  misc_RNA (1)...(19): siRNA sense strand
caaacagagguccuaguga

SEQ ID NO: 1663937 - RNA, 19 nt, Homo sapiens
  misc_RNA (1)...(19): siRNA sense strand
guuccugguucuccacuau

SEQ ID NO: 1663938 - RNA, 19 nt, Homo sapiens
  misc_RNA (1)...(19): siRNA sense strand
caaggcgaggugauauuaa

SEQ ID NO: 1663939 - RNA, 19 nt, Homo sapiens
  misc_RNA (1)...(19): siRNA sense strand
ggagaccacccuguuuguu

SEQ ID NO: 1663940 - RNA, 19 nt, Homo sapiens
  misc_RNA (1)...(19): siRNA sense strand
gaaguucaagaagaucauu

SEQ ID NO: 1663941 - RNA, 19 nt, Homo sapiens
  misc_RNA (1)...(19): siRNA sense strand
gaagacagugagaacaagu

SEQ ID NO: 1663942 - RNA, 19 nt, Homo sapiens
  misc_RNA (1)...(19): siRNA sense strand
aaagcggaauugggaauau

SEQ ID NO: 1663943 - RNA, 19 nt, Homo sapiens
  misc_RNA (1)...(19): siRNA sense strand
uagcuagacugucacuucu

SEQ ID NO: 1663944 - RNA, 19 nt, Homo sapiens
  misc_RNA (1)...(19): siRNA sense strand
cagcaccauuucaguuugu

SEQ ID NO: 1663945 - RNA, 19 nt, Homo sapiens
  misc_RNA (1)...(19): siRNA sense strand
uuacagcaccauuucaguu

SEQ ID NO: 1663946 - RNA, 19 nt, Homo sapiens
  misc_RNA (1)...(19): siRNA sense strand
acucucaccuuuauagaca

SEQ ID NO: 1663947 - RNA, 19 nt, Homo sapiens
  misc_RNA (1)...(19): siRNA sense strand
gacagugaucugacacaaa

SEQ ID NO: 1663948 - RNA, 19 nt, Homo sapiens
  misc_RNA (1)...(19): siRNA sense strand
gaucccaaaugugaagaca

SEQ ID NO: 1663949 - RNA, 19 nt, Homo sapiens
  misc_RNA (1)...(19): siRNA sense strand
uauguguggugacuuuaau

SEQ ID NO: 1663950 - RNA, 19 nt, Homo sapiens
  misc_RNA (1)...(19): siRNA sense strand
ucccaaaugugaagacagu

SEQ ID NO: 1663951 - RNA, 19 nt, Homo sapiens
  misc_RNA (1)...(19): siRNA sense strand
gcaagucggucgaggagau

SEQ ID NO: 1663952 - RNA, 19 nt, Homo sapiens
  misc_RNA (1)...(19): siRNA sense strand
ccagaguaguggccgaaua

SEQ ID NO: 1663953 - RNA, 19 nt, Homo sapiens
  misc_RNA (1)...(19): siRNA sense strand
ccaacaagccgaccacguu

SEQ ID NO: 1663954 - RNA, 19 nt, Homo sapiens
  misc_RNA (1)...(19): siRNA sense strand
ucucgacgcuggugcagaa

SEQ ID NO: 1663955 - RNA, 19 nt, Homo sapiens
  misc_RNA (1)...(19): siRNA sense strand
guaguggccgaauaccuua

SEQ ID NO: 1663956 - RNA, 19 nt, Homo sapiens
  misc_RNA (1)...(19): siRNA sense strand
cgacuucgcccgacggaau

SEQ ID NO: 1663957 - RNA, 19 nt, Homo sapiens
  misc_RNA (1)...(19): siRNA sense strand
gagagcauccacugcaagu

SEQ ID NO: 1663958 - RNA, 19 nt, Homo sapiens
  misc_RNA (1)...(19): siRNA sense strand
caacggacugggucgcuau

SEQ ID NO: 1663959 - RNA, 19 nt, Homo sapiens
  misc_RNA (1)...(19): siRNA sense strand
gaauccaggggucguaaua

SEQ ID NO: 1663960 - RNA, 19 nt, Homo sapiens
  misc_RNA (1)...(19): siRNA sense strand
ggccagcguucuccacaac

SEQ ID NO: 1663961 - RNA, 19 nt, Homo sapiens
  misc_RNA (1)...(19): siRNA sense strand
ggucguaauauauguaaac

SEQ ID NO: 1663962 - RNA, 19 nt, Homo sapiens
  misc_RNA (1)...(19): siRNA sense strand
cagaguaguggccgaauac

SEQ ID NO: 1663963 - RNA, 19 nt, Homo sapiens
  misc_RNA (1)...(19): siRNA sense strand
cggacugggucgcuaugug

SEQ ID NO: 1663964 - RNA, 19 nt, Homo sapiens
  misc_RNA (1)...(19): siRNA sense strand
gcaagucggucgaggagau

SEQ ID NO: 1663965 - RNA, 19 nt, Homo sapiens
  misc_RNA (1)...(19): siRNA sense strand
ccagaguaguggccgaaua

SEQ ID NO: 1663966 - RNA, 19 nt, Homo sapiens
  misc_RNA (1)...(19): siRNA sense strand
ccaacaagccgaccacguu

SEQ ID NO: 1663967 - RNA, 19 nt, Homo sapiens
  misc_RNA (1)...(19): siRNA sense strand
ucucgacgcuggugcagaa

SEQ ID NO: 1663968 - RNA, 19 nt, Homo sapiens
  misc_RNA (1)...(19): siRNA sense strand
guaguggccgaauaccuua

SEQ ID NO: 1663969 - RNA, 19 nt, Homo sapiens
  misc_RNA (1)...(19): siRNA sense strand
cgacuucgcccgacggaau

SEQ ID NO: 1663970 - RNA, 19 nt, Homo sapiens
  misc_RNA (1)...(19): siRNA sense strand
gagagcauccacugcaagu

SEQ ID NO: 1663971 - RNA, 19 nt, Homo sapiens
  misc_RNA (1)...(19): siRNA sense strand
caacggacugggucgcuau

SEQ ID NO: 1663972 - RNA, 19 nt, Homo sapiens
  misc_RNA (1)...(19): siRNA sense strand
gaauccaggggucguaaua

SEQ ID NO: 1663973 - RNA, 19 nt, Homo sapiens
  misc_RNA (1)...(19): siRNA sense strand
ggccagcguucuccacaac

SEQ ID NO: 1663974 - RNA, 19 nt, Homo sapiens
  misc_RNA (1)...(19): siRNA sense strand
ggucguaauauauguaaac

SEQ ID NO: 1663975 - RNA, 19 nt, Homo sapiens
  misc_RNA (1)...(19): siRNA sense strand
cagaguaguggccgaauac

SEQ ID NO: 1663976 - RNA, 19 nt, Homo sapiens
  misc_RNA (1)...(19): siRNA sense strand
cggacugggucgcuaugug

SEQ ID NO: 1663977 - RNA, 19 nt, Homo sapiens
  misc_RNA (1)...(19): siRNA sense strand
gcaagucggucgaggagau

SEQ ID NO: 1663978 - RNA, 19 nt, Homo sapiens
  misc_RNA (1)...(19): siRNA sense strand
ccagaguaguggccgaaua

SEQ ID NO: 1663979 - RNA, 19 nt, Homo sapiens
  misc_RNA (1)...(19): siRNA sense strand
ccaacaagccgaccacguu

SEQ ID NO: 1663980 - RNA, 19 nt, Homo sapiens
  misc_RNA (1)...(19): siRNA sense strand
ucucgacgcuggugcagaa

SEQ ID NO: 1663981 - RNA, 19 nt, Homo sapiens
  misc_RNA (1)...(19): siRNA sense strand
guaguggccgaauaccuua

SEQ ID NO: 1663982 - RNA, 19 nt, Homo sapiens
  misc_RNA (1)...(19): siRNA sense strand
cgacuucgcccgacggaau

SEQ ID NO: 1663983 - RNA, 19 nt, Homo sapiens
  misc_RNA (1)...(19): siRNA sense strand
gagagcauccacugcaagu

SEQ ID NO: 1663984 - RNA, 19 nt, Homo sapiens
  misc_RNA (1)...(19): siRNA sense strand
caacggacugggucgcuau

SEQ ID NO: 1663985 - RNA, 19 nt, Homo sapiens
  misc_RNA (1)...(19): siRNA sense strand
gaauccaggggucguaaua

SEQ ID NO: 1663986 - RNA, 19 nt, Homo sapiens
  misc_RNA (1)...(19): siRNA sense strand
ggccagcguucuccacaac

SEQ ID NO: 1663987 - RNA, 19 nt, Homo sapiens
  misc_RNA (1)...(19): siRNA sense strand
ggucguaauauauguaaac

SEQ ID NO: 1663988 - RNA, 19 nt, Homo sapiens
  misc_RNA (1)...(19): siRNA sense strand
cagaguaguggccgaauac

SEQ ID NO: 1663989 - RNA, 19 nt, Homo sapiens
  misc_RNA (1)...(19): siRNA sense strand
cggacugggucgcuaugug

SEQ ID NO: 1663990 - RNA, 19 nt, Homo sapiens
  misc_RNA (1)...(19): siRNA sense strand
gcaagucggucgaggagau

SEQ ID NO: 1663991 - RNA, 19 nt, Homo sapiens
  misc_RNA (1)...(19): siRNA sense strand
ccagaguaguggccgaaua

SEQ ID NO: 1663992 - RNA, 19 nt, Homo sapiens
  misc_RNA (1)...(19): siRNA sense strand
ccaacaagccgaccacguu

SEQ ID NO: 1663993 - RNA, 19 nt, Homo sapiens
  misc_RNA (1)...(19): siRNA sense strand
ucucgacgcuggugcagaa

SEQ ID NO: 1663994 - RNA, 19 nt, Homo sapiens
  misc_RNA (1)...(19): siRNA sense strand
guaguggccgaauaccuua

SEQ ID NO: 1663995 - RNA, 19 nt, Homo sapiens
  misc_RNA (1)...(19): siRNA sense strand
cgacuucgcccgacggaau

SEQ ID NO: 1663996 - RNA, 19 nt, Homo sapiens
  misc_RNA (1)...(19): siRNA sense strand
gagagcauccacugcaagu

SEQ ID NO: 1663997 - RNA, 19 nt, Homo sapiens
  misc_RNA (1)...(19): siRNA sense strand
caacggacugggucgcuau

SEQ ID NO: 1663998 - RNA, 19 nt, Homo sapiens
  misc_RNA (1)...(19): siRNA sense strand
gaauccaggggucguaaua

SEQ ID NO: 1663999 - RNA, 19 nt, Homo sapiens
  misc_RNA (1)...(19): siRNA sense strand
ggccagcguucuccacaac

SEQ ID NO: 1664000 - RNA, 19 nt, Homo sapiens
  misc_RNA (1)...(19): siRNA sense strand
ggucguaauauauguaaac

SEQ ID NO: 1664001 - RNA, 19 nt, Homo sapiens
  misc_RNA (1)...(19): siRNA sense strand
cagaguaguggccgaauac

SEQ ID NO: 1664002 - RNA, 19 nt, Homo sapiens
  misc_RNA (1)...(19): siRNA sense strand
cggacugggucgcuaugug

SEQ ID NO: 1664003 - RNA, 19 nt, Homo sapiens
  misc_RNA (1)...(19): siRNA sense strand
gcaagucggucgaggagau

SEQ ID NO: 1664004 - RNA, 19 nt, Homo sapiens
  misc_RNA (1)...(19): siRNA sense strand
ccagaguaguggccgaaua

SEQ ID NO: 1664005 - RNA, 19 nt, Homo sapiens
  misc_RNA (1)...(19): siRNA sense strand
ccaacaagccgaccacguu

SEQ ID NO: 1664006 - RNA, 19 nt, Homo sapiens
  misc_RNA (1)...(19): siRNA sense strand
ucucgacgcuggugcagaa

SEQ ID NO: 1664007 - RNA, 19 nt, Homo sapiens
  misc_RNA (1)...(19): siRNA sense strand
guaguggccgaauaccuua

SEQ ID NO: 1664008 - RNA, 19 nt, Homo sapiens
  misc_RNA (1)...(19): siRNA sense strand
cgacuucgcccgacggaau

SEQ ID NO: 1664009 - RNA, 19 nt, Homo sapiens
  misc_RNA (1)...(19): siRNA sense strand
gagagcauccacugcaagu

SEQ ID NO: 1664010 - RNA, 19 nt, Homo sapiens
  misc_RNA (1)...(19): siRNA sense strand
caacggacugggucgcuau

SEQ ID NO: 1664011 - RNA, 19 nt, Homo sapiens
  misc_RNA (1)...(19): siRNA sense strand
gaauccaggggucguaaua

SEQ ID NO: 1664012 - RNA, 19 nt, Homo sapiens
  misc_RNA (1)...(19): siRNA sense strand
ggccagcguucuccacaac

SEQ ID NO: 1664013 - RNA, 19 nt, Homo sapiens
  misc_RNA (1)...(19): siRNA sense strand
ggucguaauauauguaaac

SEQ ID NO: 1664014 - RNA, 19 nt, Homo sapiens
  misc_RNA (1)...(19): siRNA sense strand
cagaguaguggccgaauac

SEQ ID NO: 1664015 - RNA, 19 nt, Homo sapiens
  misc_RNA (1)...(19): siRNA sense strand
cggacugggucgcuaugug

SEQ ID NO: 1664016 - RNA, 19 nt, Homo sapiens
  misc_RNA (1)...(19): siRNA sense strand
gcaagucggucgaggagau

SEQ ID NO: 1664017 - RNA, 19 nt, Homo sapiens
  misc_RNA (1)...(19): siRNA sense strand
ccagaguaguggccgaaua

SEQ ID NO: 1664018 - RNA, 19 nt, Homo sapiens
  misc_RNA (1)...(19): siRNA sense strand
ccaacaagccgaccacguu

SEQ ID NO: 1664019 - RNA, 19 nt, Homo sapiens
  misc_RNA (1)...(19): siRNA sense strand
ucucgacgcuggugcagaa

SEQ ID NO: 1664020 - RNA, 19 nt, Homo sapiens
  misc_RNA (1)...(19): siRNA sense strand
guaguggccgaauaccuua

SEQ ID NO: 1664021 - RNA, 19 nt, Homo sapiens
  misc_RNA (1)...(19): siRNA sense strand
cgacuucgcccgacggaau

SEQ ID NO: 1664022 - RNA, 19 nt, Homo sapiens
  misc_RNA (1)...(19): siRNA sense strand
gagagcauccacugcaagu

SEQ ID NO: 1664023 - RNA, 19 nt, Homo sapiens
  misc_RNA (1)...(19): siRNA sense strand
caacggacugggucgcuau

SEQ ID NO: 1664024 - RNA, 19 nt, Homo sapiens
  misc_RNA (1)...(19): siRNA sense strand
gaauccaggggucguaaua

SEQ ID NO: 1664025 - RNA, 19 nt, Homo sapiens
  misc_RNA (1)...(19): siRNA sense strand
ggccagcguucuccacaac

SEQ ID NO: 1664026 - RNA, 19 nt, Homo sapiens
  misc_RNA (1)...(19): siRNA sense strand
ggucguaauauauguaaac

SEQ ID NO: 1664027 - RNA, 19 nt, Homo sapiens
  misc_RNA (1)...(19): siRNA sense strand
cagaguaguggccgaauac

SEQ ID NO: 1664028 - RNA, 19 nt, Homo sapiens
  misc_RNA (1)...(19): siRNA sense strand
cggacugggucgcuaugug

SEQ ID NO: 1664029 - RNA, 19 nt, Homo sapiens
  misc_RNA (1)...(19): siRNA sense strand
gcaagucggucgaggagau

SEQ ID NO: 1664030 - RNA, 19 nt, Homo sapiens
  misc_RNA (1)...(19): siRNA sense strand
ccagaguaguggccgaaua

SEQ ID NO: 1664031 - RNA, 19 nt, Homo sapiens
  misc_RNA (1)...(19): siRNA sense strand
ccaacaagccgaccacguu

SEQ ID NO: 1664032 - RNA, 19 nt, Homo sapiens
  misc_RNA (1)...(19): siRNA sense strand
ucucgacgcuggugcagaa

SEQ ID NO: 1664033 - RNA, 19 nt, Homo sapiens
  misc_RNA (1)...(19): siRNA sense strand
guaguggccgaauaccuua

SEQ ID NO: 1664034 - RNA, 19 nt, Homo sapiens
  misc_RNA (1)...(19): siRNA sense strand
cgacuucgcccgacggaau

SEQ ID NO: 1664035 - RNA, 19 nt, Homo sapiens
  misc_RNA (1)...(19): siRNA sense strand
gagagcauccacugcaagu

SEQ ID NO: 1664036 - RNA, 19 nt, Homo sapiens
  misc_RNA (1)...(19): siRNA sense strand
caacggacugggucgcuau

SEQ ID NO: 1664037 - RNA, 19 nt, Homo sapiens
  misc_RNA (1)...(19): siRNA sense strand
gaauccaggggucguaaua

SEQ ID NO: 1664038 - RNA, 19 nt, Homo sapiens
  misc_RNA (1)...(19): siRNA sense strand
ggccagcguucuccacaac

SEQ ID NO: 1664039 - RNA, 19 nt, Homo sapiens
  misc_RNA (1)...(19): siRNA sense strand
ggucguaauauauguaaac

SEQ ID NO: 1664040 - RNA, 19 nt, Homo sapiens
  misc_RNA (1)...(19): siRNA sense strand
cagaguaguggccgaauac

SEQ ID NO: 1664041 - RNA, 19 nt, Homo sapiens
  misc_RNA (1)...(19): siRNA sense strand
cggacugggucgcuaugug

SEQ ID NO: 1664042 - RNA, 19 nt, Homo sapiens
  misc_RNA (1)...(19): siRNA sense strand
gcaagucggucgaggagau

SEQ ID NO: 1664043 - RNA, 19 nt, Homo sapiens
  misc_RNA (1)...(19): siRNA sense strand
ccagaguaguggccgaaua

SEQ ID NO: 1664044 - RNA, 19 nt, Homo sapiens
  misc_RNA (1)...(19): siRNA sense strand
ccaacaagccgaccacguu

SEQ ID NO: 1664045 - RNA, 19 nt, Homo sapiens
  misc_RNA (1)...(19): siRNA sense strand
ucucgacgcuggugcagaa

SEQ ID NO: 1664046 - RNA, 19 nt, Homo sapiens
  misc_RNA (1)...(19): siRNA sense strand
guaguggccgaauaccuua

SEQ ID NO: 1664047 - RNA, 19 nt, Homo sapiens
  misc_RNA (1)...(19): siRNA sense strand
cgacuucgcccgacggaau

SEQ ID NO: 1664048 - RNA, 19 nt, Homo sapiens
  misc_RNA (1)...(19): siRNA sense strand
gagagcauccacugcaagu

SEQ ID NO: 1664049 - RNA, 19 nt, Homo sapiens
  misc_RNA (1)...(19): siRNA sense strand
caacggacugggucgcuau

SEQ ID NO: 1664050 - RNA, 19 nt, Homo sapiens
  misc_RNA (1)...(19): siRNA sense strand
gaauccaggggucguaaua

SEQ ID NO: 1664051 - RNA, 19 nt, Homo sapiens
  misc_RNA (1)...(19): siRNA sense strand
ggccagcguucuccacaac

SEQ ID NO: 1664052 - RNA, 19 nt, Homo sapiens
  misc_RNA (1)...(19): siRNA sense strand
ggucguaauauauguaaac

SEQ ID NO: 1664053 - RNA, 19 nt, Homo sapiens
  misc_RNA (1)...(19): siRNA sense strand
cagaguaguggccgaauac

SEQ ID NO: 1664054 - RNA, 19 nt, Homo sapiens
  misc_RNA (1)...(19): siRNA sense strand
cggacugggucgcuaugug

SEQ ID NO: 1664055 - RNA, 19 nt, Homo sapiens
  misc_RNA (1)...(19): siRNA sense strand
gcagcaagcuuaguuauaa

SEQ ID NO: 1664056 - RNA, 19 nt, Homo sapiens
  misc_RNA (1)...(19): siRNA sense strand
gaaaccaucuugcaugcua

SEQ ID NO: 1664057 - RNA, 19 nt, Homo sapiens
  misc_RNA (1)...(19): siRNA sense strand
aaaggaaggucaucauauu

SEQ ID NO: 1664058 - RNA, 19 nt, Homo sapiens
  misc_RNA (1)...(19): siRNA sense strand
guuauuaccuggccuauuc

SEQ ID NO: 1664059 - RNA, 19 nt, Homo sapiens
  misc_RNA (1)...(19): siRNA sense strand
caaccugaaugugaacuua

SEQ ID NO: 1664060 - RNA, 19 nt, Homo sapiens
  misc_RNA (1)...(19): siRNA sense strand
gaugagcgguuccagagaa

SEQ ID NO: 1664061 - RNA, 19 nt, Homo sapiens
  misc_RNA (1)...(19): siRNA sense strand
caaaggagcaguacagaga

SEQ ID NO: 1664062 - RNA, 19 nt, Homo sapiens
  misc_RNA (1)...(19): siRNA sense strand
gaagaccucugucguggau

SEQ ID NO: 1664063 - RNA, 19 nt, Homo sapiens
  misc_RNA (1)...(19): siRNA sense strand
guaaugcuccuucaguuaa

SEQ ID NO: 1664064 - RNA, 19 nt, Homo sapiens
  misc_RNA (1)...(19): siRNA sense strand
cagccaaagucgauucuaa

SEQ ID NO: 1664065 - RNA, 19 nt, Homo sapiens
  misc_RNA (1)...(19): siRNA sense strand
gcaccuguguguuugaaga

SEQ ID NO: 1664066 - RNA, 19 nt, Homo sapiens
  misc_RNA (1)...(19): siRNA sense strand
uaaagcaguuccugacuca

SEQ ID NO: 1664067 - RNA, 19 nt, Homo sapiens
  misc_RNA (1)...(19): siRNA sense strand
gcuucuauauuuccaauug

SEQ ID NO: 1664068 - RNA, 19 nt, Homo sapiens
  misc_RNA (1)...(19): siRNA sense strand
gaauccaccugaaguuaca

SEQ ID NO: 1664069 - RNA, 19 nt, Homo sapiens
  misc_RNA (1)...(19): siRNA sense strand
aaaccgaguuccaugcaaa

SEQ ID NO: 1664070 - RNA, 19 nt, Homo sapiens
  misc_RNA (1)...(19): siRNA sense strand
uuaaguaauuccuggauug

SEQ ID NO: 1664071 - RNA, 19 nt, Homo sapiens
  misc_RNA (1)...(19): siRNA sense strand
gcaaacaccugugguaucc

SEQ ID NO: 1664072 - RNA, 19 nt, Homo sapiens
  misc_RNA (1)...(19): siRNA sense strand
ugacagccaugauuacauc

SEQ ID NO: 1664073 - RNA, 19 nt, Homo sapiens
  misc_RNA (1)...(19): siRNA sense strand
gaaaaugacagccaugauu

SEQ ID NO: 1664074 - RNA, 19 nt, Homo sapiens
  misc_RNA (1)...(19): siRNA sense strand
aaaagugccuucucuguaa

SEQ ID NO: 1664075 - RNA, 19 nt, Homo sapiens
  misc_RNA (1)...(19): siRNA sense strand
gaugacaacccggauauug

SEQ ID NO: 1664076 - RNA, 19 nt, Homo sapiens
  misc_RNA (1)...(19): siRNA sense strand
cagccaugauuacaucuuu

SEQ ID NO: 1664077 - RNA, 19 nt, Homo sapiens
  misc_RNA (1)...(19): siRNA sense strand
gaagaccaacucucagaug

SEQ ID NO: 1664078 - RNA, 19 nt, Homo sapiens
  misc_RNA (1)...(19): siRNA sense strand
gaucaagauuguucuacag

SEQ ID NO: 1664079 - RNA, 19 nt, Homo sapiens
  misc_RNA (1)...(19): siRNA sense strand
aaagauucauguucacaga

SEQ ID NO: 1664080 - RNA, 19 nt, Homo sapiens
  misc_RNA (1)...(19): siRNA sense strand
gagccacacuugaaaauga

SEQ ID NO: 1664081 - RNA, 19 nt, Homo sapiens
  misc_RNA (1)...(19): siRNA sense strand
cagaauccaccugaaguua

SEQ ID NO: 1664082 - RNA, 19 nt, Homo sapiens
  misc_RNA (1)...(19): siRNA sense strand
ccuuagagcagcaagcuua

SEQ ID NO: 1664083 - RNA, 19 nt, Homo sapiens
  misc_RNA (1)...(19): siRNA sense strand
gagaaaagauaaccuuaag

SEQ ID NO: 1664084 - RNA, 19 nt, Homo sapiens
  misc_RNA (1)...(19): siRNA sense strand
aagaccaacucucagauga

SEQ ID NO: 1664085 - RNA, 19 nt, Homo sapiens
  misc_RNA (1)...(19): siRNA sense strand
gcaagcuuaguuauaauga

SEQ ID NO: 1664086 - RNA, 19 nt, Homo sapiens
  misc_RNA (1)...(19): siRNA sense strand
gaucugugccugccuuaau

SEQ ID NO: 1664087 - RNA, 19 nt, Homo sapiens
  misc_RNA (1)...(19): siRNA sense strand
ccaaagucgauucuaaauu

SEQ ID NO: 1664088 - RNA, 19 nt, Homo sapiens
  misc_RNA (1)...(19): siRNA sense strand
gagcgguuccagagaagua

SEQ ID NO: 1664089 - RNA, 19 nt, Homo sapiens
  misc_RNA (1)...(19): siRNA sense strand
caucagcccaucucuguug

SEQ ID NO: 1664090 - RNA, 19 nt, Homo sapiens
  misc_RNA (1)...(19): siRNA sense strand
gagcagcaagcuuaguuau

SEQ ID NO: 1664091 - RNA, 19 nt, Homo sapiens
  misc_RNA (1)...(19): siRNA sense strand
ggcuuuagcuaaugcuguu

SEQ ID NO: 1664092 - RNA, 19 nt, Homo sapiens
  misc_RNA (1)...(19): siRNA sense strand
ugauguguuuccuggauuu

SEQ ID NO: 1664093 - RNA, 19 nt, Homo sapiens
  misc_RNA (1)...(19): siRNA sense strand
agauucauguucacagaaa

SEQ ID NO: 1664094 - RNA, 19 nt, Homo sapiens
  misc_RNA (1)...(19): siRNA sense strand
caacccggauauugucugu

SEQ ID NO: 1664095 - RNA, 19 nt, Homo sapiens
  misc_RNA (1)...(19): siRNA sense strand
caugcuggcuuuagcuaau

SEQ ID NO: 1664096 - RNA, 19 nt, Homo sapiens
  misc_RNA (1)...(19): siRNA sense strand
aaagugccuucucuguaaa

SEQ ID NO: 1664097 - RNA, 19 nt, Homo sapiens
  misc_RNA (1)...(19): siRNA sense strand
caucuugcaugcuagaagu

SEQ ID NO: 1664098 - RNA, 19 nt, Homo sapiens
  misc_RNA (1)...(19): siRNA sense strand
cagcaagcuuaguuauaau

SEQ ID NO: 1664099 - RNA, 19 nt, Homo sapiens
  misc_RNA (1)...(19): siRNA sense strand
aaaaugacagccaugauua

SEQ ID NO: 1664100 - RNA, 19 nt, Homo sapiens
  misc_RNA (1)...(19): siRNA sense strand
ggucaucauauuccucaaa

SEQ ID NO: 1664101 - RNA, 19 nt, Homo sapiens
  misc_RNA (1)...(19): siRNA sense strand
guaauuccuggauugcuuu

SEQ ID NO: 1664102 - RNA, 19 nt, Homo sapiens
  misc_RNA (1)...(19): siRNA sense strand
aaguaaugcuccuucaguu

SEQ ID NO: 1664103 - RNA, 19 nt, Homo sapiens
  misc_RNA (1)...(19): siRNA sense strand
ucaguuaacagugaucaaa

SEQ ID NO: 1664104 - RNA, 19 nt, Homo sapiens
  misc_RNA (1)...(19): siRNA sense strand
uacugccucuggacucuua

SEQ ID NO: 1664105 - RNA, 19 nt, Homo sapiens
  misc_RNA (1)...(19): siRNA sense strand
caacccagcaguuucagau

SEQ ID NO: 1664106 - RNA, 19 nt, Homo sapiens
  misc_RNA (1)...(19): siRNA sense strand
ggcaucagcccaucucugu

SEQ ID NO: 1664107 - RNA, 19 nt, Homo sapiens
  misc_RNA (1)...(19): siRNA sense strand
aguaaugcuccuucaguua

SEQ ID NO: 1664108 - RNA, 19 nt, Homo sapiens
  misc_RNA (1)...(19): siRNA sense strand
uaaaaggaaggucaucaua

SEQ ID NO: 1664109 - RNA, 19 nt, Homo sapiens
  misc_RNA (1)...(19): siRNA sense strand
gccaaagucgauucuaaau

SEQ ID NO: 1664110 - RNA, 19 nt, Homo sapiens
  misc_RNA (1)...(19): siRNA sense strand
ccagaauccaccugaaguu

SEQ ID NO: 1664111 - RNA, 19 nt, Homo sapiens
  misc_RNA (1)...(19): siRNA sense strand
uaucucaacccagcaguuu

SEQ ID NO: 1664112 - RNA, 19 nt, Homo sapiens
  misc_RNA (1)...(19): siRNA sense strand
acagccaccuccuuagaau

SEQ ID NO: 1664113 - RNA, 19 nt, Homo sapiens
  misc_RNA (1)...(19): siRNA sense strand
acaauuccuuauucucuca

SEQ ID NO: 1664114 - RNA, 19 nt, Homo sapiens
  misc_RNA (1)...(19): siRNA sense strand
cuuaaguaauuccuggauu

SEQ ID NO: 1664115 - RNA, 19 nt, Homo sapiens
  misc_RNA (1)...(19): siRNA sense strand
gggcaaacaccugugguau

SEQ ID NO: 1664116 - RNA, 19 nt, Homo sapiens
  misc_RNA (1)...(19): siRNA sense strand
gagagaaaagauaaccuua

SEQ ID NO: 1664117 - RNA, 19 nt, Homo sapiens
  misc_RNA (1)...(19): siRNA sense strand
gaaauccuuagaaaucaag

SEQ ID NO: 1664118 - RNA, 19 nt, Homo sapiens
  misc_RNA (1)...(19): siRNA sense strand
cuacagccaccuccuuaga

SEQ ID NO: 1664119 - RNA, 19 nt, Homo sapiens
  misc_RNA (1)...(19): siRNA sense strand
ucacuaguccagaucaugu

SEQ ID NO: 1664120 - RNA, 19 nt, Homo sapiens
  misc_RNA (1)...(19): siRNA sense strand
cgguggacaugcuggcuuu

SEQ ID NO: 1664121 - RNA, 19 nt, Homo sapiens
  misc_RNA (1)...(19): siRNA sense strand
aguaauuccuggauugcuu

SEQ ID NO: 1664122 - RNA, 19 nt, Homo sapiens
  misc_RNA (1)...(19): siRNA sense strand
aagcaguuccugacucauu

SEQ ID NO: 1664123 - RNA, 19 nt, Homo sapiens
  misc_RNA (1)...(19): siRNA sense strand
uagagcagcaagcuuaguu

SEQ ID NO: 1664124 - RNA, 19 nt, Homo sapiens
  misc_RNA (1)...(19): siRNA sense strand
ucucaucgccuccagaauc

SEQ ID NO: 1664125 - RNA, 19 nt, Homo sapiens
  misc_RNA (1)...(19): siRNA sense strand
agcaguuccugacucauuu

SEQ ID NO: 1664126 - RNA, 19 nt, Homo sapiens
  misc_RNA (1)...(19): siRNA sense strand
ucucuuagaaucagccaaa

SEQ ID NO: 1664127 - RNA, 19 nt, Homo sapiens
  misc_RNA (1)...(19): siRNA sense strand
gccuugcauugcuucuaua

SEQ ID NO: 1664128 - RNA, 19 nt, Homo sapiens
  misc_RNA (1)...(19): siRNA sense strand
uguagcaccuguguguuug

SEQ ID NO: 1664129 - RNA, 19 nt, Homo sapiens
  misc_RNA (1)...(19): siRNA sense strand
gacaugcuggcuuuagcua

SEQ ID NO: 1664130 - RNA, 19 nt, Homo sapiens
  misc_RNA (1)...(19): siRNA sense strand
ccugauguguuuccuggau

SEQ ID NO: 1664131 - RNA, 19 nt, Homo sapiens
  misc_RNA (1)...(19): siRNA sense strand
ccgggauacuucuaaaaua

SEQ ID NO: 1664132 - RNA, 19 nt, Homo sapiens
  misc_RNA (1)...(19): siRNA sense strand
agaucaagauuguucuaca

SEQ ID NO: 1664133 - RNA, 19 nt, Homo sapiens
  misc_RNA (1)...(19): siRNA sense strand
cuccuucaguuaacaguga

SEQ ID NO: 1664134 - RNA, 19 nt, Homo sapiens
  misc_RNA (1)...(19): siRNA sense strand
gugaugacaacccggauau

SEQ ID NO: 1664135 - RNA, 19 nt, Homo sapiens
  misc_RNA (1)...(19): siRNA sense strand
ucuggacucuuacagcaau

SEQ ID NO: 1664136 - RNA, 19 nt, Homo sapiens
  misc_RNA (1)...(19): siRNA sense strand
ugccuugcauugcuucuau

SEQ ID NO: 1664137 - RNA, 19 nt, Homo sapiens
  misc_RNA (1)...(19): siRNA sense strand
agaaucagccaaagucgau

SEQ ID NO: 1664138 - RNA, 19 nt, Homo sapiens
  misc_RNA (1)...(19): siRNA sense strand
uagcaccuguguguuugaa

SEQ ID NO: 1664139 - RNA, 19 nt, Homo sapiens
  misc_RNA (1)...(19): siRNA sense strand
ugacucauuucgacaccau

SEQ ID NO: 1664140 - RNA, 19 nt, Homo sapiens
  misc_RNA (1)...(19): siRNA sense strand
gacucuuacagcaauaaua

SEQ ID NO: 1664141 - RNA, 19 nt, Homo sapiens
  misc_RNA (1)...(19): siRNA sense strand
gcaguuucagaucaagauu

SEQ ID NO: 1664142 - RNA, 19 nt, Homo sapiens
  misc_RNA (1)...(19): siRNA sense strand
ggcaaacaccugugguauc

SEQ ID NO: 1664143 - RNA, 19 nt, Homo sapiens
  misc_RNA (1)...(19): siRNA sense strand
guuugaagaccaacucuca

SEQ ID NO: 1664144 - RNA, 19 nt, Homo sapiens
  misc_RNA (1)...(19): siRNA sense strand
uuugaaaacugccgggaua

SEQ ID NO: 1664145 - RNA, 19 nt, Homo sapiens
  misc_RNA (1)...(19): siRNA sense strand
acccggauauugucuguca

SEQ ID NO: 1664146 - RNA, 19 nt, Homo sapiens
  misc_RNA (1)...(19): siRNA sense strand
agagcagcaagcuuaguua

SEQ ID NO: 1664147 - RNA, 19 nt, Homo sapiens
  misc_RNA (1)...(19): siRNA sense strand
ucagaucaagauuguucua

SEQ ID NO: 1664148 - RNA, 19 nt, Homo sapiens
  misc_RNA (1)...(19): siRNA sense strand
ccaauugagagaaaagaua

SEQ ID NO: 1664149 - RNA, 19 nt, Homo sapiens
  misc_RNA (1)...(19): siRNA sense strand
aaggagcaguacagagaug

SEQ ID NO: 1664150 - RNA, 19 nt, Homo sapiens
  misc_RNA (1)...(19): siRNA sense strand
ucuguaaagugggugaaga

SEQ ID NO: 1664151 - RNA, 19 nt, Homo sapiens
  misc_RNA (1)...(19): siRNA sense strand
uggauuugcuugagcuucu

SEQ ID NO: 1664152 - RNA, 19 nt, Homo sapiens
  misc_RNA (1)...(19): siRNA sense strand
agaguuauacaagaaggua

SEQ ID NO: 1664153 - RNA, 19 nt, Homo sapiens
  misc_RNA (1)...(19): siRNA sense strand
acccagcaguuucagauca

SEQ ID NO: 1664154 - RNA, 19 nt, Homo sapiens
  misc_RNA (1)...(19): siRNA sense strand
cuguagcaccuguguguuu

SEQ ID NO: 1664155 - RNA, 19 nt, Homo sapiens
  misc_RNA (1)...(19): siRNA sense strand
gcagcaagcuuaguuauaa

SEQ ID NO: 1664156 - RNA, 19 nt, Homo sapiens
  misc_RNA (1)...(19): siRNA sense strand
gaaaccaucuugcaugcua

SEQ ID NO: 1664157 - RNA, 19 nt, Homo sapiens
  misc_RNA (1)...(19): siRNA sense strand
aaaggaaggucaucauauu

SEQ ID NO: 1664158 - RNA, 19 nt, Homo sapiens
  misc_RNA (1)...(19): siRNA sense strand
guuauuaccuggccuauuc

SEQ ID NO: 1664159 - RNA, 19 nt, Homo sapiens
  misc_RNA (1)...(19): siRNA sense strand
caaccugaaugugaacuua

SEQ ID NO: 1664160 - RNA, 19 nt, Homo sapiens
  misc_RNA (1)...(19): siRNA sense strand
gaugagcgguuccagagaa

SEQ ID NO: 1664161 - RNA, 19 nt, Homo sapiens
  misc_RNA (1)...(19): siRNA sense strand
caaaggagcaguacagaga

SEQ ID NO: 1664162 - RNA, 19 nt, Homo sapiens
  misc_RNA (1)...(19): siRNA sense strand
gaagaccucugucguggau

SEQ ID NO: 1664163 - RNA, 19 nt, Homo sapiens
  misc_RNA (1)...(19): siRNA sense strand
guaaugcuccuucaguuaa

SEQ ID NO: 1664164 - RNA, 19 nt, Homo sapiens
  misc_RNA (1)...(19): siRNA sense strand
cagccaaagucgauucuaa

SEQ ID NO: 1664165 - RNA, 19 nt, Homo sapiens
  misc_RNA (1)...(19): siRNA sense strand
gcaccuguguguuugaaga

SEQ ID NO: 1664166 - RNA, 19 nt, Homo sapiens
  misc_RNA (1)...(19): siRNA sense strand
uaaagcaguuccugacuca

SEQ ID NO: 1664167 - RNA, 19 nt, Homo sapiens
  misc_RNA (1)...(19): siRNA sense strand
gcuucuauauuuccaauug

SEQ ID NO: 1664168 - RNA, 19 nt, Homo sapiens
  misc_RNA (1)...(19): siRNA sense strand
gaauccaccugaaguuaca

SEQ ID NO: 1664169 - RNA, 19 nt, Homo sapiens
  misc_RNA (1)...(19): siRNA sense strand
aaaccgaguuccaugcaaa

SEQ ID NO: 1664170 - RNA, 19 nt, Homo sapiens
  misc_RNA (1)...(19): siRNA sense strand
uuaaguaauuccuggauug

SEQ ID NO: 1664171 - RNA, 19 nt, Homo sapiens
  misc_RNA (1)...(19): siRNA sense strand
gcaaacaccugugguaucc

SEQ ID NO: 1664172 - RNA, 19 nt, Homo sapiens
  misc_RNA (1)...(19): siRNA sense strand
ugacagccaugauuacauc

SEQ ID NO: 1664173 - RNA, 19 nt, Homo sapiens
  misc_RNA (1)...(19): siRNA sense strand
gaaaaugacagccaugauu

SEQ ID NO: 1664174 - RNA, 19 nt, Homo sapiens
  misc_RNA (1)...(19): siRNA sense strand
aaaagugccuucucuguaa

SEQ ID NO: 1664175 - RNA, 19 nt, Homo sapiens
  misc_RNA (1)...(19): siRNA sense strand
gaugacaacccggauauug

SEQ ID NO: 1664176 - RNA, 19 nt, Homo sapiens
  misc_RNA (1)...(19): siRNA sense strand
cagccaugauuacaucuuu

SEQ ID NO: 1664177 - RNA, 19 nt, Homo sapiens
  misc_RNA (1)...(19): siRNA sense strand
gaagaccaacucucagaug

SEQ ID NO: 1664178 - RNA, 19 nt, Homo sapiens
  misc_RNA (1)...(19): siRNA sense strand
gaucaagauuguucuacag

SEQ ID NO: 1664179 - RNA, 19 nt, Homo sapiens
  misc_RNA (1)...(19): siRNA sense strand
aaagauucauguucacaga

SEQ ID NO: 1664180 - RNA, 19 nt, Homo sapiens
  misc_RNA (1)...(19): siRNA sense strand
gagccacacuugaaaauga

SEQ ID NO: 1664181 - RNA, 19 nt, Homo sapiens
  misc_RNA (1)...(19): siRNA sense strand
cagaauccaccugaaguua

SEQ ID NO: 1664182 - RNA, 19 nt, Homo sapiens
  misc_RNA (1)...(19): siRNA sense strand
ccuuagagcagcaagcuua

SEQ ID NO: 1664183 - RNA, 19 nt, Homo sapiens
  misc_RNA (1)...(19): siRNA sense strand
gagaaaagauaaccuuaag

SEQ ID NO: 1664184 - RNA, 19 nt, Homo sapiens
  misc_RNA (1)...(19): siRNA sense strand
aagaccaacucucagauga

SEQ ID NO: 1664185 - RNA, 19 nt, Homo sapiens
  misc_RNA (1)...(19): siRNA sense strand
gcaagcuuaguuauaauga

SEQ ID NO: 1664186 - RNA, 19 nt, Homo sapiens
  misc_RNA (1)...(19): siRNA sense strand
gaucugugccugccuuaau

SEQ ID NO: 1664187 - RNA, 19 nt, Homo sapiens
  misc_RNA (1)...(19): siRNA sense strand
ccaaagucgauucuaaauu

SEQ ID NO: 1664188 - RNA, 19 nt, Homo sapiens
  misc_RNA (1)...(19): siRNA sense strand
gagcgguuccagagaagua

SEQ ID NO: 1664189 - RNA, 19 nt, Homo sapiens
  misc_RNA (1)...(19): siRNA sense strand
caucagcccaucucuguug

SEQ ID NO: 1664190 - RNA, 19 nt, Homo sapiens
  misc_RNA (1)...(19): siRNA sense strand
gagcagcaagcuuaguuau

SEQ ID NO: 1664191 - RNA, 19 nt, Homo sapiens
  misc_RNA (1)...(19): siRNA sense strand
ggcuuuagcuaaugcuguu

SEQ ID NO: 1664192 - RNA, 19 nt, Homo sapiens
  misc_RNA (1)...(19): siRNA sense strand
ugauguguuuccuggauuu

SEQ ID NO: 1664193 - RNA, 19 nt, Homo sapiens
  misc_RNA (1)...(19): siRNA sense strand
agauucauguucacagaaa

SEQ ID NO: 1664194 - RNA, 19 nt, Homo sapiens
  misc_RNA (1)...(19): siRNA sense strand
caacccggauauugucugu

SEQ ID NO: 1664195 - RNA, 19 nt, Homo sapiens
  misc_RNA (1)...(19): siRNA sense strand
caugcuggcuuuagcuaau

SEQ ID NO: 1664196 - RNA, 19 nt, Homo sapiens
  misc_RNA (1)...(19): siRNA sense strand
aaagugccuucucuguaaa

SEQ ID NO: 1664197 - RNA, 19 nt, Homo sapiens
  misc_RNA (1)...(19): siRNA sense strand
caucuugcaugcuagaagu

SEQ ID NO: 1664198 - RNA, 19 nt, Homo sapiens
  misc_RNA (1)...(19): siRNA sense strand
cagcaagcuuaguuauaau

SEQ ID NO: 1664199 - RNA, 19 nt, Homo sapiens
  misc_RNA (1)...(19): siRNA sense strand
aaaaugacagccaugauua

SEQ ID NO: 1664200 - RNA, 19 nt, Homo sapiens
  misc_RNA (1)...(19): siRNA sense strand
ggucaucauauuccucaaa

SEQ ID NO: 1664201 - RNA, 19 nt, Homo sapiens
  misc_RNA (1)...(19): siRNA sense strand
guaauuccuggauugcuuu

SEQ ID NO: 1664202 - RNA, 19 nt, Homo sapiens
  misc_RNA (1)...(19): siRNA sense strand
aaguaaugcuccuucaguu

SEQ ID NO: 1664203 - RNA, 19 nt, Homo sapiens
  misc_RNA (1)...(19): siRNA sense strand
ucaguuaacagugaucaaa

SEQ ID NO: 1664204 - RNA, 19 nt, Homo sapiens
  misc_RNA (1)...(19): siRNA sense strand
uacugccucuggacucuua

SEQ ID NO: 1664205 - RNA, 19 nt, Homo sapiens
  misc_RNA (1)...(19): siRNA sense strand
caacccagcaguuucagau

SEQ ID NO: 1664206 - RNA, 19 nt, Homo sapiens
  misc_RNA (1)...(19): siRNA sense strand
ggcaucagcccaucucugu

SEQ ID NO: 1664207 - RNA, 19 nt, Homo sapiens
  misc_RNA (1)...(19): siRNA sense strand
aguaaugcuccuucaguua

SEQ ID NO: 1664208 - RNA, 19 nt, Homo sapiens
  misc_RNA (1)...(19): siRNA sense strand
uaaaaggaaggucaucaua

SEQ ID NO: 1664209 - RNA, 19 nt, Homo sapiens
  misc_RNA (1)...(19): siRNA sense strand
gccaaagucgauucuaaau

SEQ ID NO: 1664210 - RNA, 19 nt, Homo sapiens
  misc_RNA (1)...(19): siRNA sense strand
ccagaauccaccugaaguu

SEQ ID NO: 1664211 - RNA, 19 nt, Homo sapiens
  misc_RNA (1)...(19): siRNA sense strand
uaucucaacccagcaguuu

SEQ ID NO: 1664212 - RNA, 19 nt, Homo sapiens
  misc_RNA (1)...(19): siRNA sense strand
acagccaccuccuuagaau

SEQ ID NO: 1664213 - RNA, 19 nt, Homo sapiens
  misc_RNA (1)...(19): siRNA sense strand
acaauuccuuauucucuca

SEQ ID NO: 1664214 - RNA, 19 nt, Homo sapiens
  misc_RNA (1)...(19): siRNA sense strand
cuuaaguaauuccuggauu

SEQ ID NO: 1664215 - RNA, 19 nt, Homo sapiens
  misc_RNA (1)...(19): siRNA sense strand
gggcaaacaccugugguau

SEQ ID NO: 1664216 - RNA, 19 nt, Homo sapiens
  misc_RNA (1)...(19): siRNA sense strand
gagagaaaagauaaccuua

SEQ ID NO: 1664217 - RNA, 19 nt, Homo sapiens
  misc_RNA (1)...(19): siRNA sense strand
gaaauccuuagaaaucaag

SEQ ID NO: 1664218 - RNA, 19 nt, Homo sapiens
  misc_RNA (1)...(19): siRNA sense strand
cuacagccaccuccuuaga

SEQ ID NO: 1664219 - RNA, 19 nt, Homo sapiens
  misc_RNA (1)...(19): siRNA sense strand
ucacuaguccagaucaugu

SEQ ID NO: 1664220 - RNA, 19 nt, Homo sapiens
  misc_RNA (1)...(19): siRNA sense strand
cgguggacaugcuggcuuu

SEQ ID NO: 1664221 - RNA, 19 nt, Homo sapiens
  misc_RNA (1)...(19): siRNA sense strand
aguaauuccuggauugcuu

SEQ ID NO: 1664222 - RNA, 19 nt, Homo sapiens
  misc_RNA (1)...(19): siRNA sense strand
aagcaguuccugacucauu

SEQ ID NO: 1664223 - RNA, 19 nt, Homo sapiens
  misc_RNA (1)...(19): siRNA sense strand
uagagcagcaagcuuaguu

SEQ ID NO: 1664224 - RNA, 19 nt, Homo sapiens
  misc_RNA (1)...(19): siRNA sense strand
ucucaucgccuccagaauc

SEQ ID NO: 1664225 - RNA, 19 nt, Homo sapiens
  misc_RNA (1)...(19): siRNA sense strand
agcaguuccugacucauuu

SEQ ID NO: 1664226 - RNA, 19 nt, Homo sapiens
  misc_RNA (1)...(19): siRNA sense strand
ucucuuagaaucagccaaa

SEQ ID NO: 1664227 - RNA, 19 nt, Homo sapiens
  misc_RNA (1)...(19): siRNA sense strand
gccuugcauugcuucuaua

SEQ ID NO: 1664228 - RNA, 19 nt, Homo sapiens
  misc_RNA (1)...(19): siRNA sense strand
uguagcaccuguguguuug

SEQ ID NO: 1664229 - RNA, 19 nt, Homo sapiens
  misc_RNA (1)...(19): siRNA sense strand
gacaugcuggcuuuagcua

SEQ ID NO: 1664230 - RNA, 19 nt, Homo sapiens
  misc_RNA (1)...(19): siRNA sense strand
ccugauguguuuccuggau

SEQ ID NO: 1664231 - RNA, 19 nt, Homo sapiens
  misc_RNA (1)...(19): siRNA sense strand
ccgggauacuucuaaaaua

SEQ ID NO: 1664232 - RNA, 19 nt, Homo sapiens
  misc_RNA (1)...(19): siRNA sense strand
agaucaagauuguucuaca

SEQ ID NO: 1664233 - RNA, 19 nt, Homo sapiens
  misc_RNA (1)...(19): siRNA sense strand
cuccuucaguuaacaguga

SEQ ID NO: 1664234 - RNA, 19 nt, Homo sapiens
  misc_RNA (1)...(19): siRNA sense strand
gugaugacaacccggauau

SEQ ID NO: 1664235 - RNA, 19 nt, Homo sapiens
  misc_RNA (1)...(19): siRNA sense strand
ucuggacucuuacagcaau

SEQ ID NO: 1664236 - RNA, 19 nt, Homo sapiens
  misc_RNA (1)...(19): siRNA sense strand
ugccuugcauugcuucuau

SEQ ID NO: 1664237 - RNA, 19 nt, Homo sapiens
  misc_RNA (1)...(19): siRNA sense strand
agaaucagccaaagucgau

SEQ ID NO: 1664238 - RNA, 19 nt, Homo sapiens
  misc_RNA (1)...(19): siRNA sense strand
uagcaccuguguguuugaa

SEQ ID NO: 1664239 - RNA, 19 nt, Homo sapiens
  misc_RNA (1)...(19): siRNA sense strand
ugacucauuucgacaccau

SEQ ID NO: 1664240 - RNA, 19 nt, Homo sapiens
  misc_RNA (1)...(19): siRNA sense strand
gacucuuacagcaauaaua

SEQ ID NO: 1664241 - RNA, 19 nt, Homo sapiens
  misc_RNA (1)...(19): siRNA sense strand
gcaguuucagaucaagauu

SEQ ID NO: 1664242 - RNA, 19 nt, Homo sapiens
  misc_RNA (1)...(19): siRNA sense strand
ggcaaacaccugugguauc

SEQ ID NO: 1664243 - RNA, 19 nt, Homo sapiens
  misc_RNA (1)...(19): siRNA sense strand
guuugaagaccaacucuca

SEQ ID NO: 1664244 - RNA, 19 nt, Homo sapiens
  misc_RNA (1)...(19): siRNA sense strand
uuugaaaacugccgggaua

SEQ ID NO: 1664245 - RNA, 19 nt, Homo sapiens
  misc_RNA (1)...(19): siRNA sense strand
acccggauauugucuguca

SEQ ID NO: 1664246 - RNA, 19 nt, Homo sapiens
  misc_RNA (1)...(19): siRNA sense strand
agagcagcaagcuuaguua

SEQ ID NO: 1664247 - RNA, 19 nt, Homo sapiens
  misc_RNA (1)...(19): siRNA sense strand
ucagaucaagauuguucua

SEQ ID NO: 1664248 - RNA, 19 nt, Homo sapiens
  misc_RNA (1)...(19): siRNA sense strand
ccaauugagagaaaagaua

SEQ ID NO: 1664249 - RNA, 19 nt, Homo sapiens
  misc_RNA (1)...(19): siRNA sense strand
aaggagcaguacagagaug

SEQ ID NO: 1664250 - RNA, 19 nt, Homo sapiens
  misc_RNA (1)...(19): siRNA sense strand
ucuguaaagugggugaaga

SEQ ID NO: 1664251 - RNA, 19 nt, Homo sapiens
  misc_RNA (1)...(19): siRNA sense strand
uggauuugcuugagcuucu

SEQ ID NO: 1664252 - RNA, 19 nt, Homo sapiens
  misc_RNA (1)...(19): siRNA sense strand
agaguuauacaagaaggua

SEQ ID NO: 1664253 - RNA, 19 nt, Homo sapiens
  misc_RNA (1)...(19): siRNA sense strand
acccagcaguuucagauca

SEQ ID NO: 1664254 - RNA, 19 nt, Homo sapiens
  misc_RNA (1)...(19): siRNA sense strand
cuguagcaccuguguguuu

SEQ ID NO: 1664255 - RNA, 19 nt, Homo sapiens
  misc_RNA (1)...(19): siRNA sense strand
gcagcaagcuuaguuauaa

SEQ ID NO: 1664256 - RNA, 19 nt, Homo sapiens
  misc_RNA (1)...(19): siRNA sense strand
gaaaccaucuugcaugcua

SEQ ID NO: 1664257 - RNA, 19 nt, Homo sapiens
  misc_RNA (1)...(19): siRNA sense strand
aaaggaaggucaucauauu

SEQ ID NO: 1664258 - RNA, 19 nt, Homo sapiens
  misc_RNA (1)...(19): siRNA sense strand
guuauuaccuggccuauuc

SEQ ID NO: 1664259 - RNA, 19 nt, Homo sapiens
  misc_RNA (1)...(19): siRNA sense strand
caaccugaaugugaacuua

SEQ ID NO: 1664260 - RNA, 19 nt, Homo sapiens
  misc_RNA (1)...(19): siRNA sense strand
gaugagcgguuccagagaa

SEQ ID NO: 1664261 - RNA, 19 nt, Homo sapiens
  misc_RNA (1)...(19): siRNA sense strand
caaaggagcaguacagaga

SEQ ID NO: 1664262 - RNA, 19 nt, Homo sapiens
  misc_RNA (1)...(19): siRNA sense strand
gaagaccucugucguggau

SEQ ID NO: 1664263 - RNA, 19 nt, Homo sapiens
  misc_RNA (1)...(19): siRNA sense strand
guaaugcuccuucaguuaa

SEQ ID NO: 1664264 - RNA, 19 nt, Homo sapiens
  misc_RNA (1)...(19): siRNA sense strand
cagccaaagucgauucuaa

SEQ ID NO: 1664265 - RNA, 19 nt, Homo sapiens
  misc_RNA (1)...(19): siRNA sense strand
gcaccuguguguuugaaga

SEQ ID NO: 1664266 - RNA, 19 nt, Homo sapiens
  misc_RNA (1)...(19): siRNA sense strand
uaaagcaguuccugacuca

SEQ ID NO: 1664267 - RNA, 19 nt, Homo sapiens
  misc_RNA (1)...(19): siRNA sense strand
gcuucuauauuuccaauug

SEQ ID NO: 1664268 - RNA, 19 nt, Homo sapiens
  misc_RNA (1)...(19): siRNA sense strand
gaauccaccugaaguuaca

SEQ ID NO: 1664269 - RNA, 19 nt, Homo sapiens
  misc_RNA (1)...(19): siRNA sense strand
aaaccgaguuccaugcaaa

SEQ ID NO: 1664270 - RNA, 19 nt, Homo sapiens
  misc_RNA (1)...(19): siRNA sense strand
uuaaguaauuccuggauug

SEQ ID NO: 1664271 - RNA, 19 nt, Homo sapiens
  misc_RNA (1)...(19): siRNA sense strand
gcaaacaccugugguaucc

SEQ ID NO: 1664272 - RNA, 19 nt, Homo sapiens
  misc_RNA (1)...(19): siRNA sense strand
ugacagccaugauuacauc

SEQ ID NO: 1664273 - RNA, 19 nt, Homo sapiens
  misc_RNA (1)...(19): siRNA sense strand
gaaaaugacagccaugauu

SEQ ID NO: 1664274 - RNA, 19 nt, Homo sapiens
  misc_RNA (1)...(19): siRNA sense strand
aaaagugccuucucuguaa

SEQ ID NO: 1664275 - RNA, 19 nt, Homo sapiens
  misc_RNA (1)...(19): siRNA sense strand
gaugacaacccggauauug

SEQ ID NO: 1664276 - RNA, 19 nt, Homo sapiens
  misc_RNA (1)...(19): siRNA sense strand
cagccaugauuacaucuuu

SEQ ID NO: 1664277 - RNA, 19 nt, Homo sapiens
  misc_RNA (1)...(19): siRNA sense strand
gaagaccaacucucagaug

SEQ ID NO: 1664278 - RNA, 19 nt, Homo sapiens
  misc_RNA (1)...(19): siRNA sense strand
gaucaagauuguucuacag

SEQ ID NO: 1664279 - RNA, 19 nt, Homo sapiens
  misc_RNA (1)...(19): siRNA sense strand
aaagauucauguucacaga

SEQ ID NO: 1664280 - RNA, 19 nt, Homo sapiens
  misc_RNA (1)...(19): siRNA sense strand
gagccacacuugaaaauga

SEQ ID NO: 1664281 - RNA, 19 nt, Homo sapiens
  misc_RNA (1)...(19): siRNA sense strand
cagaauccaccugaaguua

SEQ ID NO: 1664282 - RNA, 19 nt, Homo sapiens
  misc_RNA (1)...(19): siRNA sense strand
ccuuagagcagcaagcuua

SEQ ID NO: 1664283 - RNA, 19 nt, Homo sapiens
  misc_RNA (1)...(19): siRNA sense strand
gagaaaagauaaccuuaag

SEQ ID NO: 1664284 - RNA, 19 nt, Homo sapiens
  misc_RNA (1)...(19): siRNA sense strand
aagaccaacucucagauga

SEQ ID NO: 1664285 - RNA, 19 nt, Homo sapiens
  misc_RNA (1)...(19): siRNA sense strand
gcaagcuuaguuauaauga

SEQ ID NO: 1664286 - RNA, 19 nt, Homo sapiens
  misc_RNA (1)...(19): siRNA sense strand
gaucugugccugccuuaau

SEQ ID NO: 1664287 - RNA, 19 nt, Homo sapiens
  misc_RNA (1)...(19): siRNA sense strand
ccaaagucgauucuaaauu

SEQ ID NO: 1664288 - RNA, 19 nt, Homo sapiens
  misc_RNA (1)...(19): siRNA sense strand
gagcgguuccagagaagua

SEQ ID NO: 1664289 - RNA, 19 nt, Homo sapiens
  misc_RNA (1)...(19): siRNA sense strand
caucagcccaucucuguug

SEQ ID NO: 1664290 - RNA, 19 nt, Homo sapiens
  misc_RNA (1)...(19): siRNA sense strand
gagcagcaagcuuaguuau

SEQ ID NO: 1664291 - RNA, 19 nt, Homo sapiens
  misc_RNA (1)...(19): siRNA sense strand
ggcuuuagcuaaugcuguu

SEQ ID NO: 1664292 - RNA, 19 nt, Homo sapiens
  misc_RNA (1)...(19): siRNA sense strand
ugauguguuuccuggauuu

SEQ ID NO: 1664293 - RNA, 19 nt, Homo sapiens
  misc_RNA (1)...(19): siRNA sense strand
agauucauguucacagaaa

SEQ ID NO: 1664294 - RNA, 19 nt, Homo sapiens
  misc_RNA (1)...(19): siRNA sense strand
caacccggauauugucugu

SEQ ID NO: 1664295 - RNA, 19 nt, Homo sapiens
  misc_RNA (1)...(19): siRNA sense strand
caugcuggcuuuagcuaau

SEQ ID NO: 1664296 - RNA, 19 nt, Homo sapiens
  misc_RNA (1)...(19): siRNA sense strand
aaagugccuucucuguaaa

SEQ ID NO: 1664297 - RNA, 19 nt, Homo sapiens
  misc_RNA (1)...(19): siRNA sense strand
caucuugcaugcuagaagu

SEQ ID NO: 1664298 - RNA, 19 nt, Homo sapiens
  misc_RNA (1)...(19): siRNA sense strand
cagcaagcuuaguuauaau

SEQ ID NO: 1664299 - RNA, 19 nt, Homo sapiens
  misc_RNA (1)...(19): siRNA sense strand
aaaaugacagccaugauua

SEQ ID NO: 1664300 - RNA, 19 nt, Homo sapiens
  misc_RNA (1)...(19): siRNA sense strand
ggucaucauauuccucaaa

SEQ ID NO: 1664301 - RNA, 19 nt, Homo sapiens
  misc_RNA (1)...(19): siRNA sense strand
guaauuccuggauugcuuu

SEQ ID NO: 1664302 - RNA, 19 nt, Homo sapiens
  misc_RNA (1)...(19): siRNA sense strand
aaguaaugcuccuucaguu

SEQ ID NO: 1664303 - RNA, 19 nt, Homo sapiens
  misc_RNA (1)...(19): siRNA sense strand
ucaguuaacagugaucaaa

SEQ ID NO: 1664304 - RNA, 19 nt, Homo sapiens
  misc_RNA (1)...(19): siRNA sense strand
uacugccucuggacucuua

SEQ ID NO: 1664305 - RNA, 19 nt, Homo sapiens
  misc_RNA (1)...(19): siRNA sense strand
caacccagcaguuucagau

SEQ ID NO: 1664306 - RNA, 19 nt, Homo sapiens
  misc_RNA (1)...(19): siRNA sense strand
ggcaucagcccaucucugu

SEQ ID NO: 1664307 - RNA, 19 nt, Homo sapiens
  misc_RNA (1)...(19): siRNA sense strand
aguaaugcuccuucaguua

SEQ ID NO: 1664308 - RNA, 19 nt, Homo sapiens
  misc_RNA (1)...(19): siRNA sense strand
uaaaaggaaggucaucaua

SEQ ID NO: 1664309 - RNA, 19 nt, Homo sapiens
  misc_RNA (1)...(19): siRNA sense strand
gccaaagucgauucuaaau

SEQ ID NO: 1664310 - RNA, 19 nt, Homo sapiens
  misc_RNA (1)...(19): siRNA sense strand
ccagaauccaccugaaguu

SEQ ID NO: 1664311 - RNA, 19 nt, Homo sapiens
  misc_RNA (1)...(19): siRNA sense strand
uaucucaacccagcaguuu

SEQ ID NO: 1664312 - RNA, 19 nt, Homo sapiens
  misc_RNA (1)...(19): siRNA sense strand
acagccaccuccuuagaau

SEQ ID NO: 1664313 - RNA, 19 nt, Homo sapiens
  misc_RNA (1)...(19): siRNA sense strand
acaauuccuuauucucuca

SEQ ID NO: 1664314 - RNA, 19 nt, Homo sapiens
  misc_RNA (1)...(19): siRNA sense strand
cuuaaguaauuccuggauu

SEQ ID NO: 1664315 - RNA, 19 nt, Homo sapiens
  misc_RNA (1)...(19): siRNA sense strand
gggcaaacaccugugguau

SEQ ID NO: 1664316 - RNA, 19 nt, Homo sapiens
  misc_RNA (1)...(19): siRNA sense strand
gagagaaaagauaaccuua

SEQ ID NO: 1664317 - RNA, 19 nt, Homo sapiens
  misc_RNA (1)...(19): siRNA sense strand
gaaauccuuagaaaucaag

SEQ ID NO: 1664318 - RNA, 19 nt, Homo sapiens
  misc_RNA (1)...(19): siRNA sense strand
cuacagccaccuccuuaga

SEQ ID NO: 1664319 - RNA, 19 nt, Homo sapiens
  misc_RNA (1)...(19): siRNA sense strand
ucacuaguccagaucaugu

SEQ ID NO: 1664320 - RNA, 19 nt, Homo sapiens
  misc_RNA (1)...(19): siRNA sense strand
cgguggacaugcuggcuuu

SEQ ID NO: 1664321 - RNA, 19 nt, Homo sapiens
  misc_RNA (1)...(19): siRNA sense strand
aguaauuccuggauugcuu

SEQ ID NO: 1664322 - RNA, 19 nt, Homo sapiens
  misc_RNA (1)...(19): siRNA sense strand
aagcaguuccugacucauu

SEQ ID NO: 1664323 - RNA, 19 nt, Homo sapiens
  misc_RNA (1)...(19): siRNA sense strand
uagagcagcaagcuuaguu

SEQ ID NO: 1664324 - RNA, 19 nt, Homo sapiens
  misc_RNA (1)...(19): siRNA sense strand
ucucaucgccuccagaauc

SEQ ID NO: 1664325 - RNA, 19 nt, Homo sapiens
  misc_RNA (1)...(19): siRNA sense strand
agcaguuccugacucauuu

SEQ ID NO: 1664326 - RNA, 19 nt, Homo sapiens
  misc_RNA (1)...(19): siRNA sense strand
ucucuuagaaucagccaaa

SEQ ID NO: 1664327 - RNA, 19 nt, Homo sapiens
  misc_RNA (1)...(19): siRNA sense strand
gccuugcauugcuucuaua

SEQ ID NO: 1664328 - RNA, 19 nt, Homo sapiens
  misc_RNA (1)...(19): siRNA sense strand
uguagcaccuguguguuug

SEQ ID NO: 1664329 - RNA, 19 nt, Homo sapiens
  misc_RNA (1)...(19): siRNA sense strand
gacaugcuggcuuuagcua

SEQ ID NO: 1664330 - RNA, 19 nt, Homo sapiens
  misc_RNA (1)...(19): siRNA sense strand
ccugauguguuuccuggau

SEQ ID NO: 1664331 - RNA, 19 nt, Homo sapiens
  misc_RNA (1)...(19): siRNA sense strand
ccgggauacuucuaaaaua

SEQ ID NO: 1664332 - RNA, 19 nt, Homo sapiens
  misc_RNA (1)...(19): siRNA sense strand
agaucaagauuguucuaca

SEQ ID NO: 1664333 - RNA, 19 nt, Homo sapiens
  misc_RNA (1)...(19): siRNA sense strand
cuccuucaguuaacaguga

SEQ ID NO: 1664334 - RNA, 19 nt, Homo sapiens
  misc_RNA (1)...(19): siRNA sense strand
gugaugacaacccggauau

SEQ ID NO: 1664335 - RNA, 19 nt, Homo sapiens
  misc_RNA (1)...(19): siRNA sense strand
ucuggacucuuacagcaau

SEQ ID NO: 1664336 - RNA, 19 nt, Homo sapiens
  misc_RNA (1)...(19): siRNA sense strand
ugccuugcauugcuucuau

SEQ ID NO: 1664337 - RNA, 19 nt, Homo sapiens
  misc_RNA (1)...(19): siRNA sense strand
agaaucagccaaagucgau

SEQ ID NO: 1664338 - RNA, 19 nt, Homo sapiens
  misc_RNA (1)...(19): siRNA sense strand
uagcaccuguguguuugaa

SEQ ID NO: 1664339 - RNA, 19 nt, Homo sapiens
  misc_RNA (1)...(19): siRNA sense strand
ugacucauuucgacaccau

SEQ ID NO: 1664340 - RNA, 19 nt, Homo sapiens
  misc_RNA (1)...(19): siRNA sense strand
gacucuuacagcaauaaua

SEQ ID NO: 1664341 - RNA, 19 nt, Homo sapiens
  misc_RNA (1)...(19): siRNA sense strand
gcaguuucagaucaagauu

SEQ ID NO: 1664342 - RNA, 19 nt, Homo sapiens
  misc_RNA (1)...(19): siRNA sense strand
ggcaaacaccugugguauc

SEQ ID NO: 1664343 - RNA, 19 nt, Homo sapiens
  misc_RNA (1)...(19): siRNA sense strand
guuugaagaccaacucuca

SEQ ID NO: 1664344 - RNA, 19 nt, Homo sapiens
  misc_RNA (1)...(19): siRNA sense strand
uuugaaaacugccgggaua

SEQ ID NO: 1664345 - RNA, 19 nt, Homo sapiens
  misc_RNA (1)...(19): siRNA sense strand
acccggauauugucuguca

SEQ ID NO: 1664346 - RNA, 19 nt, Homo sapiens
  misc_RNA (1)...(19): siRNA sense strand
agagcagcaagcuuaguua

SEQ ID NO: 1664347 - RNA, 19 nt, Homo sapiens
  misc_RNA (1)...(19): siRNA sense strand
ucagaucaagauuguucua

SEQ ID NO: 1664348 - RNA, 19 nt, Homo sapiens
  misc_RNA (1)...(19): siRNA sense strand
ccaauugagagaaaagaua

SEQ ID NO: 1664349 - RNA, 19 nt, Homo sapiens
  misc_RNA (1)...(19): siRNA sense strand
aaggagcaguacagagaug

SEQ ID NO: 1664350 - RNA, 19 nt, Homo sapiens
  misc_RNA (1)...(19): siRNA sense strand
ucuguaaagugggugaaga

SEQ ID NO: 1664351 - RNA, 19 nt, Homo sapiens
  misc_RNA (1)...(19): siRNA sense strand
uggauuugcuugagcuucu

SEQ ID NO: 1664352 - RNA, 19 nt, Homo sapiens
  misc_RNA (1)...(19): siRNA sense strand
agaguuauacaagaaggua

SEQ ID NO: 1664353 - RNA, 19 nt, Homo sapiens
  misc_RNA (1)...(19): siRNA sense strand
acccagcaguuucagauca

SEQ ID NO: 1664354 - RNA, 19 nt, Homo sapiens
  misc_RNA (1)...(19): siRNA sense strand
cuguagcaccuguguguuu

SEQ ID NO: 1664355 - RNA, 19 nt, Homo sapiens
  misc_RNA (1)...(19): siRNA sense strand
gaacuggacucaucuguua

SEQ ID NO: 1664356 - RNA, 19 nt, Homo sapiens
  misc_RNA (1)...(19): siRNA sense strand
guaacaacccuaccaauua

SEQ ID NO: 1664357 - RNA, 19 nt, Homo sapiens
  misc_RNA (1)...(19): siRNA sense strand
uaacaacccuaccaauuaa

SEQ ID NO: 1664358 - RNA, 19 nt, Homo sapiens
  misc_RNA (1)...(19): siRNA sense strand
uaucagggcuccaacuuua

SEQ ID NO: 1664359 - RNA, 19 nt, Homo sapiens
  misc_RNA (1)...(19): siRNA sense strand
gacaagcagugacacauua

SEQ ID NO: 1664360 - RNA, 19 nt, Homo sapiens
  misc_RNA (1)...(19): siRNA sense strand
gaucaucucuccaaacaug

SEQ ID NO: 1664361 - RNA, 19 nt, Homo sapiens
  misc_RNA (1)...(19): siRNA sense strand
ggacagcucuugccauugu

SEQ ID NO: 1664362 - RNA, 19 nt, Homo sapiens
  misc_RNA (1)...(19): siRNA sense strand
gcacaacucuugcucagau

SEQ ID NO: 1664363 - RNA, 19 nt, Homo sapiens
  misc_RNA (1)...(19): siRNA sense strand
caaccaacauggaagaauu

SEQ ID NO: 1664364 - RNA, 19 nt, Homo sapiens
  misc_RNA (1)...(19): siRNA sense strand
ccagucagcuucacgcuaa

SEQ ID NO: 1664365 - RNA, 19 nt, Homo sapiens
  misc_RNA (1)...(19): siRNA sense strand
ugaaggaugugguaaaguu

SEQ ID NO: 1664366 - RNA, 19 nt, Homo sapiens
  misc_RNA (1)...(19): siRNA sense strand
guucaucucuacaggauuu

SEQ ID NO: 1664367 - RNA, 19 nt, Homo sapiens
  misc_RNA (1)...(19): siRNA sense strand
caaauuagaccugguguuu

SEQ ID NO: 1664368 - RNA, 19 nt, Homo sapiens
  misc_RNA (1)...(19): siRNA sense strand
gaaggaagaggcaguaaug

SEQ ID NO: 1664369 - RNA, 19 nt, Homo sapiens
  misc_RNA (1)...(19): siRNA sense strand
caacauggaagaauucuga

SEQ ID NO: 1664370 - RNA, 19 nt, Homo sapiens
  misc_RNA (1)...(19): siRNA sense strand
uuagugagcucagcagaua

SEQ ID NO: 1664371 - RNA, 19 nt, Homo sapiens
  misc_RNA (1)...(19): siRNA sense strand
gcaagcacaucagccagua

SEQ ID NO: 1664372 - RNA, 19 nt, Homo sapiens
  misc_RNA (1)...(19): siRNA sense strand
ggaaacgcuuggcaacuug

SEQ ID NO: 1664373 - RNA, 19 nt, Homo sapiens
  misc_RNA (1)...(19): siRNA sense strand
gcaagaggcuucgaagagu

SEQ ID NO: 1664374 - RNA, 19 nt, Homo sapiens
  misc_RNA (1)...(19): siRNA sense strand
gcaaggacaagauggagua

SEQ ID NO: 1664375 - RNA, 19 nt, Homo sapiens
  misc_RNA (1)...(19): siRNA sense strand
ucaagcaacuggacaacaa

SEQ ID NO: 1664376 - RNA, 19 nt, Homo sapiens
  misc_RNA (1)...(19): siRNA sense strand
caaaucaauccaacuagua

SEQ ID NO: 1664377 - RNA, 19 nt, Homo sapiens
  misc_RNA (1)...(19): siRNA sense strand
caaugggaaucaauuaguu

SEQ ID NO: 1664378 - RNA, 19 nt, Homo sapiens
  misc_RNA (1)...(19): siRNA sense strand
gugaugagcuccagagaca

SEQ ID NO: 1664379 - RNA, 19 nt, Homo sapiens
  misc_RNA (1)...(19): siRNA sense strand
gaauaacguuucucaacca

SEQ ID NO: 1664380 - RNA, 19 nt, Homo sapiens
  misc_RNA (1)...(19): siRNA sense strand
gaugagcuccagagacaua

SEQ ID NO: 1664381 - RNA, 19 nt, Homo sapiens
  misc_RNA (1)...(19): siRNA sense strand
gcagcagccuuuacagaau

SEQ ID NO: 1664382 - RNA, 19 nt, Homo sapiens
  misc_RNA (1)...(19): siRNA sense strand
ccaauaacuuugaauacug

SEQ ID NO: 1664383 - RNA, 19 nt, Homo sapiens
  misc_RNA (1)...(19): siRNA sense strand
agacauagaagaacccaua

SEQ ID NO: 1664384 - RNA, 19 nt, Homo sapiens
  misc_RNA (1)...(19): siRNA sense strand
gcacaucuucgcuggcaua

SEQ ID NO: 1664385 - RNA, 19 nt, Homo sapiens
  misc_RNA (1)...(19): siRNA sense strand
gaaggucaacaaauucaaa

SEQ ID NO: 1664386 - RNA, 19 nt, Homo sapiens
  misc_RNA (1)...(19): siRNA sense strand
ggaauauucuugcucaaaa

SEQ ID NO: 1664387 - RNA, 19 nt, Homo sapiens
  misc_RNA (1)...(19): siRNA sense strand
caucuucgcuggcauacug

SEQ ID NO: 1664388 - RNA, 19 nt, Homo sapiens
  misc_RNA (1)...(19): siRNA sense strand
caaaacaucucauuuacga

SEQ ID NO: 1664389 - RNA, 19 nt, Homo sapiens
  misc_RNA (1)...(19): siRNA sense strand
cuaauggaaugcagaauca

SEQ ID NO: 1664390 - RNA, 19 nt, Homo sapiens
  misc_RNA (1)...(19): siRNA sense strand
gggcaaaucaguuggcaaa

SEQ ID NO: 1664391 - RNA, 19 nt, Homo sapiens
  misc_RNA (1)...(19): siRNA sense strand
caagaggcuucgaagaguu

SEQ ID NO: 1664392 - RNA, 19 nt, Homo sapiens
  misc_RNA (1)...(19): siRNA sense strand
aguggaaggucaacaaauu

SEQ ID NO: 1664393 - RNA, 19 nt, Homo sapiens
  misc_RNA (1)...(19): siRNA sense strand
gugaucaucucuccaaaca

SEQ ID NO: 1664394 - RNA, 19 nt, Homo sapiens
  misc_RNA (1)...(19): siRNA sense strand
caggacagcuucugggaau

SEQ ID NO: 1664395 - RNA, 19 nt, Homo sapiens
  misc_RNA (1)...(19): siRNA sense strand
gcagccauuucucaagauu

SEQ ID NO: 1664396 - RNA, 19 nt, Homo sapiens
  misc_RNA (1)...(19): siRNA sense strand
gcucauuucugcagguaau

SEQ ID NO: 1664397 - RNA, 19 nt, Homo sapiens
  misc_RNA (1)...(19): siRNA sense strand
ggaguucccguuacaauca

SEQ ID NO: 1664398 - RNA, 19 nt, Homo sapiens
  misc_RNA (1)...(19): siRNA sense strand
gcaacuggacaacaacaaa

SEQ ID NO: 1664399 - RNA, 19 nt, Homo sapiens
  misc_RNA (1)...(19): siRNA sense strand
gaaggaugugguaaaguuu

SEQ ID NO: 1664400 - RNA, 19 nt, Homo sapiens
  misc_RNA (1)...(19): siRNA sense strand
uaaucaagcuauacucaca

SEQ ID NO: 1664401 - RNA, 19 nt, Homo sapiens
  misc_RNA (1)...(19): siRNA sense strand
ucaaaucaauccaacuagu

SEQ ID NO: 1664402 - RNA, 19 nt, Homo sapiens
  misc_RNA (1)...(19): siRNA sense strand
gcaguuggaggaauugcua

SEQ ID NO: 1664403 - RNA, 19 nt, Homo sapiens
  misc_RNA (1)...(19): siRNA sense strand
caauaccacugcaguuaca

SEQ ID NO: 1664404 - RNA, 19 nt, Homo sapiens
  misc_RNA (1)...(19): siRNA sense strand
gccagagaauaacaauaaa

SEQ ID NO: 1664405 - RNA, 19 nt, Homo sapiens
  misc_RNA (1)...(19): siRNA sense strand
ugggacagcucuugccauu

SEQ ID NO: 1664406 - RNA, 19 nt, Homo sapiens
  misc_RNA (1)...(19): siRNA sense strand
cagaauauucagagucuuu

SEQ ID NO: 1664407 - RNA, 19 nt, Homo sapiens
  misc_RNA (1)...(19): siRNA sense strand
ggcgauggcuacagaagga

SEQ ID NO: 1664408 - RNA, 19 nt, Homo sapiens
  misc_RNA (1)...(19): siRNA sense strand
aauuagaccugguguuuca

SEQ ID NO: 1664409 - RNA, 19 nt, Homo sapiens
  misc_RNA (1)...(19): siRNA sense strand
ggucaacaaauucaaauca

SEQ ID NO: 1664410 - RNA, 19 nt, Homo sapiens
  misc_RNA (1)...(19): siRNA sense strand
cagcggcgauggcuacaga

SEQ ID NO: 1664411 - RNA, 19 nt, Homo sapiens
  misc_RNA (1)...(19): siRNA sense strand
gaacgcaccauugaagaau

SEQ ID NO: 1664412 - RNA, 19 nt, Homo sapiens
  misc_RNA (1)...(19): siRNA sense strand
caacagcuagaacugguaa

SEQ ID NO: 1664413 - RNA, 19 nt, Homo sapiens
  misc_RNA (1)...(19): siRNA sense strand
cgggagaacuggacucauc

SEQ ID NO: 1664414 - RNA, 19 nt, Homo sapiens
  misc_RNA (1)...(19): siRNA sense strand
ggaauguucuaaaagguuu

SEQ ID NO: 1664415 - RNA, 19 nt, Homo sapiens
  misc_RNA (1)...(19): siRNA sense strand
ggaagaggcaguaaugaac

SEQ ID NO: 1664416 - RNA, 19 nt, Homo sapiens
  misc_RNA (1)...(19): siRNA sense strand
ggagaaggaagaggcagua

SEQ ID NO: 1664417 - RNA, 19 nt, Homo sapiens
  misc_RNA (1)...(19): siRNA sense strand
ggacagcuucugggaauau

SEQ ID NO: 1664418 - RNA, 19 nt, Homo sapiens
  misc_RNA (1)...(19): siRNA sense strand
cagcagccuuuacagaaug

SEQ ID NO: 1664419 - RNA, 19 nt, Homo sapiens
  misc_RNA (1)...(19): siRNA sense strand
ucaaaacgcaccagaauaa

SEQ ID NO: 1664420 - RNA, 19 nt, Homo sapiens
  misc_RNA (1)...(19): siRNA sense strand
uggaaacgcuuggcaacuu

SEQ ID NO: 1664421 - RNA, 19 nt, Homo sapiens
  misc_RNA (1)...(19): siRNA sense strand
cacgauaggugcuguuagu

SEQ ID NO: 1664422 - RNA, 19 nt, Homo sapiens
  misc_RNA (1)...(19): siRNA sense strand
caaauuugcaaguucagaa

SEQ ID NO: 1664423 - RNA, 19 nt, Homo sapiens
  misc_RNA (1)...(19): siRNA sense strand
caagugguaguguacagua

SEQ ID NO: 1664424 - RNA, 19 nt, Homo sapiens
  misc_RNA (1)...(19): siRNA sense strand
agccagagaauaacaauaa

SEQ ID NO: 1664425 - RNA, 19 nt, Homo sapiens
  misc_RNA (1)...(19): siRNA sense strand
ucagagucuuucaaauuug

SEQ ID NO: 1664426 - RNA, 19 nt, Homo sapiens
  misc_RNA (1)...(19): siRNA sense strand
gcacaucagccaguaguuc

SEQ ID NO: 1664427 - RNA, 19 nt, Homo sapiens
  misc_RNA (1)...(19): siRNA sense strand
uguaacaacccuaccaauu

SEQ ID NO: 1664428 - RNA, 19 nt, Homo sapiens
  misc_RNA (1)...(19): siRNA sense strand
ccacuccuccugcuucaaa

SEQ ID NO: 1664429 - RNA, 19 nt, Homo sapiens
  misc_RNA (1)...(19): siRNA sense strand
uacuauagcuccuguaacu

SEQ ID NO: 1664430 - RNA, 19 nt, Homo sapiens
  misc_RNA (1)...(19): siRNA sense strand
guacagguucagaauauuc

SEQ ID NO: 1664431 - RNA, 19 nt, Homo sapiens
  misc_RNA (1)...(19): siRNA sense strand
ucagcaggaucaaucaaau

SEQ ID NO: 1664432 - RNA, 19 nt, Homo sapiens
  misc_RNA (1)...(19): siRNA sense strand
ucaaacaccugcugcuacu

SEQ ID NO: 1664433 - RNA, 19 nt, Homo sapiens
  misc_RNA (1)...(19): siRNA sense strand
gauagugggacuuccaaug

SEQ ID NO: 1664434 - RNA, 19 nt, Homo sapiens
  misc_RNA (1)...(19): siRNA sense strand
uuacagacucuuccuggua

SEQ ID NO: 1664435 - RNA, 19 nt, Homo sapiens
  misc_RNA (1)...(19): siRNA sense strand
gggaauauucuugcucaaa

SEQ ID NO: 1664436 - RNA, 19 nt, Homo sapiens
  misc_RNA (1)...(19): siRNA sense strand
acaguuccgguccaaauua

SEQ ID NO: 1664437 - RNA, 19 nt, Homo sapiens
  misc_RNA (1)...(19): siRNA sense strand
cuguacagguucagaauau

SEQ ID NO: 1664438 - RNA, 19 nt, Homo sapiens
  misc_RNA (1)...(19): siRNA sense strand
ccaguacuaugccagaauc

SEQ ID NO: 1664439 - RNA, 19 nt, Homo sapiens
  misc_RNA (1)...(19): siRNA sense strand
guacucaggcucaaguugu

SEQ ID NO: 1664440 - RNA, 19 nt, Homo sapiens
  misc_RNA (1)...(19): siRNA sense strand
ccaagaauugucacaguug

SEQ ID NO: 1664441 - RNA, 19 nt, Homo sapiens
  misc_RNA (1)...(19): siRNA sense strand
cccaagaauugucacaguu

SEQ ID NO: 1664442 - RNA, 19 nt, Homo sapiens
  misc_RNA (1)...(19): siRNA sense strand
uguagcaguuggaggaauu

SEQ ID NO: 1664443 - RNA, 19 nt, Homo sapiens
  misc_RNA (1)...(19): siRNA sense strand
gcuccaacuuuaacaccuu

SEQ ID NO: 1664444 - RNA, 19 nt, Homo sapiens
  misc_RNA (1)...(19): siRNA sense strand
uacagaauguucaacuuca

SEQ ID NO: 1664445 - RNA, 19 nt, Homo sapiens
  misc_RNA (1)...(19): siRNA sense strand
gcacaaccacugcuucaac

SEQ ID NO: 1664446 - RNA, 19 nt, Homo sapiens
  misc_RNA (1)...(19): siRNA sense strand
caacuggacaacaacaaau

SEQ ID NO: 1664447 - RNA, 19 nt, Homo sapiens
  misc_RNA (1)...(19): siRNA sense strand
cagcaacucccaauguuuc

SEQ ID NO: 1664448 - RNA, 19 nt, Homo sapiens
  misc_RNA (1)...(19): siRNA sense strand
ugucacaguugcagccauu

SEQ ID NO: 1664449 - RNA, 19 nt, Homo sapiens
  misc_RNA (1)...(19): siRNA sense strand
gcaguaaugaaccaggaaa

SEQ ID NO: 1664450 - RNA, 19 nt, Homo sapiens
  misc_RNA (1)...(19): siRNA sense strand
ugacaagcagugacacauu

SEQ ID NO: 1664451 - RNA, 19 nt, Homo sapiens
  misc_RNA (1)...(19): siRNA sense strand
uagaccugguguuucaaua

SEQ ID NO: 1664452 - RNA, 19 nt, Homo sapiens
  misc_RNA (1)...(19): siRNA sense strand
cgacucaggugcuuaucag

SEQ ID NO: 1664453 - RNA, 19 nt, Homo sapiens
  misc_RNA (1)...(19): siRNA sense strand
uauagcuccuguaacugua

SEQ ID NO: 1664454 - RNA, 19 nt, Homo sapiens
  misc_RNA (1)...(19): siRNA sense strand
guuacaaucacuaguguug

SEQ ID NO: 1664455 - RNA, 19 nt, Homo sapiens
  misc_RNA (1)...(19): siRNA sense strand
gaaacacacucuugagaaa

SEQ ID NO: 1664456 - RNA, 19 nt, Homo sapiens
  misc_RNA (1)...(19): siRNA sense strand
gaaauugccugguuacaug

SEQ ID NO: 1664457 - RNA, 19 nt, Homo sapiens
  misc_RNA (1)...(19): siRNA sense strand
gaacgaaacgcacaccuua

SEQ ID NO: 1664458 - RNA, 19 nt, Homo sapiens
  misc_RNA (1)...(19): siRNA sense strand
caagagaaguuuaaucuga

SEQ ID NO: 1664459 - RNA, 19 nt, Homo sapiens
  misc_RNA (1)...(19): siRNA sense strand
ggacauauguugccucaga

SEQ ID NO: 1664460 - RNA, 19 nt, Homo sapiens
  misc_RNA (1)...(19): siRNA sense strand
gaaaauggcuacugaaauu

SEQ ID NO: 1664461 - RNA, 19 nt, Homo sapiens
  misc_RNA (1)...(19): siRNA sense strand
gaaacagaguguaauagaa

SEQ ID NO: 1664462 - RNA, 19 nt, Homo sapiens
  misc_RNA (1)...(19): siRNA sense strand
ggaagucacugaaacauuc

SEQ ID NO: 1664463 - RNA, 19 nt, Homo sapiens
  misc_RNA (1)...(19): siRNA sense strand
gcaagaaguuugugaagau

SEQ ID NO: 1664464 - RNA, 19 nt, Homo sapiens
  misc_RNA (1)...(19): siRNA sense strand
uuaaauagcugugucgaua

SEQ ID NO: 1664465 - RNA, 19 nt, Homo sapiens
  misc_RNA (1)...(19): siRNA sense strand
ggaagaagcuggucuccau

SEQ ID NO: 1664466 - RNA, 19 nt, Homo sapiens
  misc_RNA (1)...(19): siRNA sense strand
uaagugaccuggaagauga

SEQ ID NO: 1664467 - RNA, 19 nt, Homo sapiens
  misc_RNA (1)...(19): siRNA sense strand
gcagagagcucaugaacag

SEQ ID NO: 1664468 - RNA, 19 nt, Homo sapiens
  misc_RNA (1)...(19): siRNA sense strand
uagaagaaccucucaaaua

SEQ ID NO: 1664469 - RNA, 19 nt, Homo sapiens
  misc_RNA (1)...(19): siRNA sense strand
ccgagaagcucaagucuuu

SEQ ID NO: 1664470 - RNA, 19 nt, Homo sapiens
  misc_RNA (1)...(19): siRNA sense strand
gaagagagacugacacaga

SEQ ID NO: 1664471 - RNA, 19 nt, Homo sapiens
  misc_RNA (1)...(19): siRNA sense strand
gaagaacacuuucaagaac

SEQ ID NO: 1664472 - RNA, 19 nt, Homo sapiens
  misc_RNA (1)...(19): siRNA sense strand
gaugaaaucugaccuacga

SEQ ID NO: 1664473 - RNA, 19 nt, Homo sapiens
  misc_RNA (1)...(19): siRNA sense strand
ggaagaauaucgugcacaa

SEQ ID NO: 1664474 - RNA, 19 nt, Homo sapiens
  misc_RNA (1)...(19): siRNA sense strand
gaacccagaugacuugaau

SEQ ID NO: 1664475 - RNA, 19 nt, Homo sapiens
  misc_RNA (1)...(19): siRNA sense strand
gagagagugugaucaguuu

SEQ ID NO: 1664476 - RNA, 19 nt, Homo sapiens
  misc_RNA (1)...(19): siRNA sense strand
ugaaacagcugcacagaug

SEQ ID NO: 1664477 - RNA, 19 nt, Homo sapiens
  misc_RNA (1)...(19): siRNA sense strand
gacuggagcucgaagauaa

SEQ ID NO: 1664478 - RNA, 19 nt, Homo sapiens
  misc_RNA (1)...(19): siRNA sense strand
agucugagcuggaagaaua

SEQ ID NO: 1664479 - RNA, 19 nt, Homo sapiens
  misc_RNA (1)...(19): siRNA sense strand
cagaagaaguugaggcuaa

SEQ ID NO: 1664480 - RNA, 19 nt, Homo sapiens
  misc_RNA (1)...(19): siRNA sense strand
gaaccagacugcucacuag

SEQ ID NO: 1664481 - RNA, 19 nt, Homo sapiens
  misc_RNA (1)...(19): siRNA sense strand
gaacuuaaucaacgucuaa

SEQ ID NO: 1664482 - RNA, 19 nt, Homo sapiens
  misc_RNA (1)...(19): siRNA sense strand
agaagaaccucucaaauag

SEQ ID NO: 1664483 - RNA, 19 nt, Homo sapiens
  misc_RNA (1)...(19): siRNA sense strand
ggagcucucugaaguuaaa

SEQ ID NO: 1664484 - RNA, 19 nt, Homo sapiens
  misc_RNA (1)...(19): siRNA sense strand
ugacacagaugagaaauga

SEQ ID NO: 1664485 - RNA, 19 nt, Homo sapiens
  misc_RNA (1)...(19): siRNA sense strand
gaaacuggaugaagaguac

SEQ ID NO: 1664486 - RNA, 19 nt, Homo sapiens
  misc_RNA (1)...(19): siRNA sense strand
gcggagcucucugaaguua

SEQ ID NO: 1664487 - RNA, 19 nt, Homo sapiens
  misc_RNA (1)...(19): siRNA sense strand
gaaauauacuccagcucaa

SEQ ID NO: 1664488 - RNA, 19 nt, Homo sapiens
  misc_RNA (1)...(19): siRNA sense strand
uagaugaacuccagucuga

SEQ ID NO: 1664489 - RNA, 19 nt, Homo sapiens
  misc_RNA (1)...(19): siRNA sense strand
gaauguggauggagagaug

SEQ ID NO: 1664490 - RNA, 19 nt, Homo sapiens
  misc_RNA (1)...(19): siRNA sense strand
gcacagaaaucuccagacu

SEQ ID NO: 1664491 - RNA, 19 nt, Homo sapiens
  misc_RNA (1)...(19): siRNA sense strand
gaacucaccgucagaagaa

SEQ ID NO: 1664492 - RNA, 19 nt, Homo sapiens
  misc_RNA (1)...(19): siRNA sense strand
guucuaagcuacaacgaaa

SEQ ID NO: 1664493 - RNA, 19 nt, Homo sapiens
  misc_RNA (1)...(19): siRNA sense strand
gggagcagcuguuggaaga

SEQ ID NO: 1664494 - RNA, 19 nt, Homo sapiens
  misc_RNA (1)...(19): siRNA sense strand
gaagagaccaggacugaau

SEQ ID NO: 1664495 - RNA, 19 nt, Homo sapiens
  misc_RNA (1)...(19): siRNA sense strand
aggcagagcuggucauuga

SEQ ID NO: 1664496 - RNA, 19 nt, Homo sapiens
  misc_RNA (1)...(19): siRNA sense strand
ggaaaagguucagaauuua

SEQ ID NO: 1664497 - RNA, 19 nt, Homo sapiens
  misc_RNA (1)...(19): siRNA sense strand
acagaaaucuccagacuuc

SEQ ID NO: 1664498 - RNA, 19 nt, Homo sapiens
  misc_RNA (1)...(19): siRNA sense strand
gacagcagaucgagaaaga

SEQ ID NO: 1664499 - RNA, 19 nt, Homo sapiens
  misc_RNA (1)...(19): siRNA sense strand
ucaaauagaagcccaguuu

SEQ ID NO: 1664500 - RNA, 19 nt, Homo sapiens
  misc_RNA (1)...(19): siRNA sense strand
ggaaacagaguguaauaga

SEQ ID NO: 1664501 - RNA, 19 nt, Homo sapiens
  misc_RNA (1)...(19): siRNA sense strand
ucaggaaacuggaugaaga

SEQ ID NO: 1664502 - RNA, 19 nt, Homo sapiens
  misc_RNA (1)...(19): siRNA sense strand
ugacaagccugguggagaa

SEQ ID NO: 1664503 - RNA, 19 nt, Homo sapiens
  misc_RNA (1)...(19): siRNA sense strand
gcaaaggcaugagaacgaa

SEQ ID NO: 1664504 - RNA, 19 nt, Homo sapiens
  misc_RNA (1)...(19): siRNA sense strand
gaagauaaagugcgccauu

SEQ ID NO: 1664505 - RNA, 19 nt, Homo sapiens
  misc_RNA (1)...(19): siRNA sense strand
ccaaauauaagcuguugua

SEQ ID NO: 1664506 - RNA, 19 nt, Homo sapiens
  misc_RNA (1)...(19): siRNA sense strand
gacuagaaauggaacauga

SEQ ID NO: 1664507 - RNA, 19 nt, Homo sapiens
  misc_RNA (1)...(19): siRNA sense strand
gcaaaugucccggaugaaa

SEQ ID NO: 1664508 - RNA, 19 nt, Homo sapiens
  misc_RNA (1)...(19): siRNA sense strand
ccagaugacuugaaugcuu

SEQ ID NO: 1664509 - RNA, 19 nt, Homo sapiens
  misc_RNA (1)...(19): siRNA sense strand
gaacaauucagacacauca

SEQ ID NO: 1664510 - RNA, 19 nt, Homo sapiens
  misc_RNA (1)...(19): siRNA sense strand
caacaucuccucucucaau

SEQ ID NO: 1664511 - RNA, 19 nt, Homo sapiens
  misc_RNA (1)...(19): siRNA sense strand
agagagagaugcuggagaa

SEQ ID NO: 1664512 - RNA, 19 nt, Homo sapiens
  misc_RNA (1)...(19): siRNA sense strand
gaugagaaaugaauaugag

SEQ ID NO: 1664513 - RNA, 19 nt, Homo sapiens
  misc_RNA (1)...(19): siRNA sense strand
gaagagaaacugcaagaag

SEQ ID NO: 1664514 - RNA, 19 nt, Homo sapiens
  misc_RNA (1)...(19): siRNA sense strand
gcaguaugguuuacagaau

SEQ ID NO: 1664515 - RNA, 19 nt, Homo sapiens
  misc_RNA (1)...(19): siRNA sense strand
caucuaaacccaucaggua

SEQ ID NO: 1664516 - RNA, 19 nt, Homo sapiens
  misc_RNA (1)...(19): siRNA sense strand
ccugggagcugaagaauca

SEQ ID NO: 1664517 - RNA, 19 nt, Homo sapiens
  misc_RNA (1)...(19): siRNA sense strand
gagcagcuguuggaagaaa

SEQ ID NO: 1664518 - RNA, 19 nt, Homo sapiens
  misc_RNA (1)...(19): siRNA sense strand
gaaacgcacaccuuagaaa

SEQ ID NO: 1664519 - RNA, 19 nt, Homo sapiens
  misc_RNA (1)...(19): siRNA sense strand
gagaagcucaagucuuuaa

SEQ ID NO: 1664520 - RNA, 19 nt, Homo sapiens
  misc_RNA (1)...(19): siRNA sense strand
aaagaacaaucuccugcua

SEQ ID NO: 1664521 - RNA, 19 nt, Homo sapiens
  misc_RNA (1)...(19): siRNA sense strand
gaagauagcauuucuaacc

SEQ ID NO: 1664522 - RNA, 19 nt, Homo sapiens
  misc_RNA (1)...(19): siRNA sense strand
gaacacacagcucuuggaa

SEQ ID NO: 1664523 - RNA, 19 nt, Homo sapiens
  misc_RNA (1)...(19): siRNA sense strand
gcucagcccaaauauguua

SEQ ID NO: 1664524 - RNA, 19 nt, Homo sapiens
  misc_RNA (1)...(19): siRNA sense strand
gaacaggcagugaaggaaa

SEQ ID NO: 1664525 - RNA, 19 nt, Homo sapiens
  misc_RNA (1)...(19): siRNA sense strand
gcucaaggcuagacugaca

SEQ ID NO: 1664526 - RNA, 19 nt, Homo sapiens
  misc_RNA (1)...(19): siRNA sense strand
gaagacaccgugcagaaug

SEQ ID NO: 1664527 - RNA, 19 nt, Homo sapiens
  misc_RNA (1)...(19): siRNA sense strand
gcugguggcuucucaggaa

SEQ ID NO: 1664528 - RNA, 19 nt, Homo sapiens
  misc_RNA (1)...(19): siRNA sense strand
ugaaggcaaugaugcauga

SEQ ID NO: 1664529 - RNA, 19 nt, Homo sapiens
  misc_RNA (1)...(19): siRNA sense strand
uacaggagcugacuaggaa

SEQ ID NO: 1664530 - RNA, 19 nt, Homo sapiens
  misc_RNA (1)...(19): siRNA sense strand
aagauaaagugcgccauua

SEQ ID NO: 1664531 - RNA, 19 nt, Homo sapiens
  misc_RNA (1)...(19): siRNA sense strand
gaacuggaacguuguaaag

SEQ ID NO: 1664532 - RNA, 19 nt, Homo sapiens
  misc_RNA (1)...(19): siRNA sense strand
gcagugagaugcagcaaaa

SEQ ID NO: 1664533 - RNA, 19 nt, Homo sapiens
  misc_RNA (1)...(19): siRNA sense strand
ugaagaugcuugagagaau

SEQ ID NO: 1664534 - RNA, 19 nt, Homo sapiens
  misc_RNA (1)...(19): siRNA sense strand
ggaaagacuagaaauggaa

SEQ ID NO: 1664535 - RNA, 19 nt, Homo sapiens
  misc_RNA (1)...(19): siRNA sense strand
ccuaagaaauguaucugaa

SEQ ID NO: 1664536 - RNA, 19 nt, Homo sapiens
  misc_RNA (1)...(19): siRNA sense strand
gacagcagcuacuccaaga

SEQ ID NO: 1664537 - RNA, 19 nt, Homo sapiens
  misc_RNA (1)...(19): siRNA sense strand
cccaggagcugcugaaaga

SEQ ID NO: 1664538 - RNA, 19 nt, Homo sapiens
  misc_RNA (1)...(19): siRNA sense strand
ugaaggaccuccaggaaca

SEQ ID NO: 1664539 - RNA, 19 nt, Homo sapiens
  misc_RNA (1)...(19): siRNA sense strand
gcaagaaggcacaggagaa

SEQ ID NO: 1664540 - RNA, 19 nt, Homo sapiens
  misc_RNA (1)...(19): siRNA sense strand
caaugaguguagaagauuu

SEQ ID NO: 1664541 - RNA, 19 nt, Homo sapiens
  misc_RNA (1)...(19): siRNA sense strand
gaagaugugagccgagaaa

SEQ ID NO: 1664542 - RNA, 19 nt, Homo sapiens
  misc_RNA (1)...(19): siRNA sense strand
ggcaacaucuccucucuca

SEQ ID NO: 1664543 - RNA, 19 nt, Homo sapiens
  misc_RNA (1)...(19): siRNA sense strand
aagaaccucucaaauagaa

SEQ ID NO: 1664544 - RNA, 19 nt, Homo sapiens
  misc_RNA (1)...(19): siRNA sense strand
agaaagaggaguuaagaaa

SEQ ID NO: 1664545 - RNA, 19 nt, Homo sapiens
  misc_RNA (1)...(19): siRNA sense strand
gaaguauuccauaaucuug

SEQ ID NO: 1664546 - RNA, 19 nt, Homo sapiens
  misc_RNA (1)...(19): siRNA sense strand
gaacaagagaaguuuaauc

SEQ ID NO: 1664547 - RNA, 19 nt, Homo sapiens
  misc_RNA (1)...(19): siRNA sense strand
ggaaaacacuacucuccua

SEQ ID NO: 1664548 - RNA, 19 nt, Homo sapiens
  misc_RNA (1)...(19): siRNA sense strand
gaagaaccucucaaauaga

SEQ ID NO: 1664549 - RNA, 19 nt, Homo sapiens
  misc_RNA (1)...(19): siRNA sense strand
uagaagcucagcccaaaua

SEQ ID NO: 1664550 - RNA, 19 nt, Homo sapiens
  misc_RNA (1)...(19): siRNA sense strand
gaaggucagucagaugaau

SEQ ID NO: 1664551 - RNA, 19 nt, Homo sapiens
  misc_RNA (1)...(19): siRNA sense strand
caucagggcuccauaacca

SEQ ID NO: 1664552 - RNA, 19 nt, Homo sapiens
  misc_RNA (1)...(19): siRNA sense strand
gaacuucugagauaugaau

SEQ ID NO: 1664553 - RNA, 19 nt, Homo sapiens
  misc_RNA (1)...(19): siRNA sense strand
aaucgaaccugauggaaau

SEQ ID NO: 1664554 - RNA, 19 nt, Homo sapiens
  misc_RNA (1)...(19): siRNA sense strand
aaaguuagagccaggguua

SEQ ID NO: 1664555 - RNA, 19 nt, Homo sapiens
  misc_RNA (1)...(19): siRNA sense strand
gaaacacacucuugagaaa

SEQ ID NO: 1664556 - RNA, 19 nt, Homo sapiens
  misc_RNA (1)...(19): siRNA sense strand
gaaauugccugguuacaug

SEQ ID NO: 1664557 - RNA, 19 nt, Homo sapiens
  misc_RNA (1)...(19): siRNA sense strand
gaacgaaacgcacaccuua

SEQ ID NO: 1664558 - RNA, 19 nt, Homo sapiens
  misc_RNA (1)...(19): siRNA sense strand
caagagaaguuuaaucuga

SEQ ID NO: 1664559 - RNA, 19 nt, Homo sapiens
  misc_RNA (1)...(19): siRNA sense strand
ggacauauguugccucaga

SEQ ID NO: 1664560 - RNA, 19 nt, Homo sapiens
  misc_RNA (1)...(19): siRNA sense strand
gaaaauggcuacugaaauu

SEQ ID NO: 1664561 - RNA, 19 nt, Homo sapiens
  misc_RNA (1)...(19): siRNA sense strand
gaaacagaguguaauagaa

SEQ ID NO: 1664562 - RNA, 19 nt, Homo sapiens
  misc_RNA (1)...(19): siRNA sense strand
ggaagucacugaaacauuc

SEQ ID NO: 1664563 - RNA, 19 nt, Homo sapiens
  misc_RNA (1)...(19): siRNA sense strand
gcaagaaguuugugaagau

SEQ ID NO: 1664564 - RNA, 19 nt, Homo sapiens
  misc_RNA (1)...(19): siRNA sense strand
uuaaauagcugugucgaua

SEQ ID NO: 1664565 - RNA, 19 nt, Homo sapiens
  misc_RNA (1)...(19): siRNA sense strand
ggaagaagcuggucuccau

SEQ ID NO: 1664566 - RNA, 19 nt, Homo sapiens
  misc_RNA (1)...(19): siRNA sense strand
uaagugaccuggaagauga

SEQ ID NO: 1664567 - RNA, 19 nt, Homo sapiens
  misc_RNA (1)...(19): siRNA sense strand
gcagagagcucaugaacag

SEQ ID NO: 1664568 - RNA, 19 nt, Homo sapiens
  misc_RNA (1)...(19): siRNA sense strand
uagaagaaccucucaaaua

SEQ ID NO: 1664569 - RNA, 19 nt, Homo sapiens
  misc_RNA (1)...(19): siRNA sense strand
ccgagaagcucaagucuuu

SEQ ID NO: 1664570 - RNA, 19 nt, Homo sapiens
  misc_RNA (1)...(19): siRNA sense strand
gaagagagacugacacaga

SEQ ID NO: 1664571 - RNA, 19 nt, Homo sapiens
  misc_RNA (1)...(19): siRNA sense strand
gaagaacacuuucaagaac

SEQ ID NO: 1664572 - RNA, 19 nt, Homo sapiens
  misc_RNA (1)...(19): siRNA sense strand
gaugaaaucugaccuacga

SEQ ID NO: 1664573 - RNA, 19 nt, Homo sapiens
  misc_RNA (1)...(19): siRNA sense strand
ggaagaauaucgugcacaa

SEQ ID NO: 1664574 - RNA, 19 nt, Homo sapiens
  misc_RNA (1)...(19): siRNA sense strand
gaacccagaugacuugaau

SEQ ID NO: 1664575 - RNA, 19 nt, Homo sapiens
  misc_RNA (1)...(19): siRNA sense strand
gagagagugugaucaguuu

SEQ ID NO: 1664576 - RNA, 19 nt, Homo sapiens
  misc_RNA (1)...(19): siRNA sense strand
ugaaacagcugcacagaug

SEQ ID NO: 1664577 - RNA, 19 nt, Homo sapiens
  misc_RNA (1)...(19): siRNA sense strand
gacuggagcucgaagauaa

SEQ ID NO: 1664578 - RNA, 19 nt, Homo sapiens
  misc_RNA (1)...(19): siRNA sense strand
agucugagcuggaagaaua

SEQ ID NO: 1664579 - RNA, 19 nt, Homo sapiens
  misc_RNA (1)...(19): siRNA sense strand
cagaagaaguugaggcuaa

SEQ ID NO: 1664580 - RNA, 19 nt, Homo sapiens
  misc_RNA (1)...(19): siRNA sense strand
gaaccagacugcucacuag

SEQ ID NO: 1664581 - RNA, 19 nt, Homo sapiens
  misc_RNA (1)...(19): siRNA sense strand
gaacuuaaucaacgucuaa

SEQ ID NO: 1664582 - RNA, 19 nt, Homo sapiens
  misc_RNA (1)...(19): siRNA sense strand
agaagaaccucucaaauag

SEQ ID NO: 1664583 - RNA, 19 nt, Homo sapiens
  misc_RNA (1)...(19): siRNA sense strand
ggagcucucugaaguuaaa

SEQ ID NO: 1664584 - RNA, 19 nt, Homo sapiens
  misc_RNA (1)...(19): siRNA sense strand
ugacacagaugagaaauga

SEQ ID NO: 1664585 - RNA, 19 nt, Homo sapiens
  misc_RNA (1)...(19): siRNA sense strand
gaaacuggaugaagaguac

SEQ ID NO: 1664586 - RNA, 19 nt, Homo sapiens
  misc_RNA (1)...(19): siRNA sense strand
gcggagcucucugaaguua

SEQ ID NO: 1664587 - RNA, 19 nt, Homo sapiens
  misc_RNA (1)...(19): siRNA sense strand
gaaauauacuccagcucaa

SEQ ID NO: 1664588 - RNA, 19 nt, Homo sapiens
  misc_RNA (1)...(19): siRNA sense strand
uagaugaacuccagucuga

SEQ ID NO: 1664589 - RNA, 19 nt, Homo sapiens
  misc_RNA (1)...(19): siRNA sense strand
gaauguggauggagagaug

SEQ ID NO: 1664590 - RNA, 19 nt, Homo sapiens
  misc_RNA (1)...(19): siRNA sense strand
gcacagaaaucuccagacu

SEQ ID NO: 1664591 - RNA, 19 nt, Homo sapiens
  misc_RNA (1)...(19): siRNA sense strand
gaacucaccgucagaagaa

SEQ ID NO: 1664592 - RNA, 19 nt, Homo sapiens
  misc_RNA (1)...(19): siRNA sense strand
guucuaagcuacaacgaaa

SEQ ID NO: 1664593 - RNA, 19 nt, Homo sapiens
  misc_RNA (1)...(19): siRNA sense strand
gggagcagcuguuggaaga

SEQ ID NO: 1664594 - RNA, 19 nt, Homo sapiens
  misc_RNA (1)...(19): siRNA sense strand
gaagagaccaggacugaau

SEQ ID NO: 1664595 - RNA, 19 nt, Homo sapiens
  misc_RNA (1)...(19): siRNA sense strand
aggcagagcuggucauuga

SEQ ID NO: 1664596 - RNA, 19 nt, Homo sapiens
  misc_RNA (1)...(19): siRNA sense strand
ggaaaagguucagaauuua

SEQ ID NO: 1664597 - RNA, 19 nt, Homo sapiens
  misc_RNA (1)...(19): siRNA sense strand
acagaaaucuccagacuuc

SEQ ID NO: 1664598 - RNA, 19 nt, Homo sapiens
  misc_RNA (1)...(19): siRNA sense strand
gacagcagaucgagaaaga

SEQ ID NO: 1664599 - RNA, 19 nt, Homo sapiens
  misc_RNA (1)...(19): siRNA sense strand
ucaaauagaagcccaguuu

SEQ ID NO: 1664600 - RNA, 19 nt, Homo sapiens
  misc_RNA (1)...(19): siRNA sense strand
ggaaacagaguguaauaga

SEQ ID NO: 1664601 - RNA, 19 nt, Homo sapiens
  misc_RNA (1)...(19): siRNA sense strand
ucaggaaacuggaugaaga

SEQ ID NO: 1664602 - RNA, 19 nt, Homo sapiens
  misc_RNA (1)...(19): siRNA sense strand
ugacaagccugguggagaa

SEQ ID NO: 1664603 - RNA, 19 nt, Homo sapiens
  misc_RNA (1)...(19): siRNA sense strand
gcaaaggcaugagaacgaa

SEQ ID NO: 1664604 - RNA, 19 nt, Homo sapiens
  misc_RNA (1)...(19): siRNA sense strand
gaagauaaagugcgccauu

SEQ ID NO: 1664605 - RNA, 19 nt, Homo sapiens
  misc_RNA (1)...(19): siRNA sense strand
ccaaauauaagcuguugua

SEQ ID NO: 1664606 - RNA, 19 nt, Homo sapiens
  misc_RNA (1)...(19): siRNA sense strand
gacuagaaauggaacauga

SEQ ID NO: 1664607 - RNA, 19 nt, Homo sapiens
  misc_RNA (1)...(19): siRNA sense strand
gcaaaugucccggaugaaa

SEQ ID NO: 1664608 - RNA, 19 nt, Homo sapiens
  misc_RNA (1)...(19): siRNA sense strand
ccagaugacuugaaugcuu

SEQ ID NO: 1664609 - RNA, 19 nt, Homo sapiens
  misc_RNA (1)...(19): siRNA sense strand
gaacaauucagacacauca

SEQ ID NO: 1664610 - RNA, 19 nt, Homo sapiens
  misc_RNA (1)...(19): siRNA sense strand
caacaucuccucucucaau

SEQ ID NO: 1664611 - RNA, 19 nt, Homo sapiens
  misc_RNA (1)...(19): siRNA sense strand
agagagagaugcuggagaa

SEQ ID NO: 1664612 - RNA, 19 nt, Homo sapiens
  misc_RNA (1)...(19): siRNA sense strand
gaugagaaaugaauaugag

SEQ ID NO: 1664613 - RNA, 19 nt, Homo sapiens
  misc_RNA (1)...(19): siRNA sense strand
gaagagaaacugcaagaag

SEQ ID NO: 1664614 - RNA, 19 nt, Homo sapiens
  misc_RNA (1)...(19): siRNA sense strand
gcaguaugguuuacagaau

SEQ ID NO: 1664615 - RNA, 19 nt, Homo sapiens
  misc_RNA (1)...(19): siRNA sense strand
caucuaaacccaucaggua

SEQ ID NO: 1664616 - RNA, 19 nt, Homo sapiens
  misc_RNA (1)...(19): siRNA sense strand
ccugggagcugaagaauca

SEQ ID NO: 1664617 - RNA, 19 nt, Homo sapiens
  misc_RNA (1)...(19): siRNA sense strand
gagcagcuguuggaagaaa

SEQ ID NO: 1664618 - RNA, 19 nt, Homo sapiens
  misc_RNA (1)...(19): siRNA sense strand
gaaacgcacaccuuagaaa

SEQ ID NO: 1664619 - RNA, 19 nt, Homo sapiens
  misc_RNA (1)...(19): siRNA sense strand
gagaagcucaagucuuuaa

SEQ ID NO: 1664620 - RNA, 19 nt, Homo sapiens
  misc_RNA (1)...(19): siRNA sense strand
aaagaacaaucuccugcua

SEQ ID NO: 1664621 - RNA, 19 nt, Homo sapiens
  misc_RNA (1)...(19): siRNA sense strand
gaagauagcauuucuaacc

SEQ ID NO: 1664622 - RNA, 19 nt, Homo sapiens
  misc_RNA (1)...(19): siRNA sense strand
gaacacacagcucuuggaa

SEQ ID NO: 1664623 - RNA, 19 nt, Homo sapiens
  misc_RNA (1)...(19): siRNA sense strand
gcucagcccaaauauguua

SEQ ID NO: 1664624 - RNA, 19 nt, Homo sapiens
  misc_RNA (1)...(19): siRNA sense strand
gaacaggcagugaaggaaa

SEQ ID NO: 1664625 - RNA, 19 nt, Homo sapiens
  misc_RNA (1)...(19): siRNA sense strand
gcucaaggcuagacugaca

SEQ ID NO: 1664626 - RNA, 19 nt, Homo sapiens
  misc_RNA (1)...(19): siRNA sense strand
gaagacaccgugcagaaug

SEQ ID NO: 1664627 - RNA, 19 nt, Homo sapiens
  misc_RNA (1)...(19): siRNA sense strand
gcugguggcuucucaggaa

SEQ ID NO: 1664628 - RNA, 19 nt, Homo sapiens
  misc_RNA (1)...(19): siRNA sense strand
ugaaggcaaugaugcauga

SEQ ID NO: 1664629 - RNA, 19 nt, Homo sapiens
  misc_RNA (1)...(19): siRNA sense strand
uacaggagcugacuaggaa

SEQ ID NO: 1664630 - RNA, 19 nt, Homo sapiens
  misc_RNA (1)...(19): siRNA sense strand
aagauaaagugcgccauua

SEQ ID NO: 1664631 - RNA, 19 nt, Homo sapiens
  misc_RNA (1)...(19): siRNA sense strand
gaacuggaacguuguaaag

SEQ ID NO: 1664632 - RNA, 19 nt, Homo sapiens
  misc_RNA (1)...(19): siRNA sense strand
gcagugagaugcagcaaaa

SEQ ID NO: 1664633 - RNA, 19 nt, Homo sapiens
  misc_RNA (1)...(19): siRNA sense strand
ugaagaugcuugagagaau

SEQ ID NO: 1664634 - RNA, 19 nt, Homo sapiens
  misc_RNA (1)...(19): siRNA sense strand
ggaaagacuagaaauggaa

SEQ ID NO: 1664635 - RNA, 19 nt, Homo sapiens
  misc_RNA (1)...(19): siRNA sense strand
ccuaagaaauguaucugaa

SEQ ID NO: 1664636 - RNA, 19 nt, Homo sapiens
  misc_RNA (1)...(19): siRNA sense strand
gacagcagcuacuccaaga

SEQ ID NO: 1664637 - RNA, 19 nt, Homo sapiens
  misc_RNA (1)...(19): siRNA sense strand
cccaggagcugcugaaaga

SEQ ID NO: 1664638 - RNA, 19 nt, Homo sapiens
  misc_RNA (1)...(19): siRNA sense strand
ugaaggaccuccaggaaca

SEQ ID NO: 1664639 - RNA, 19 nt, Homo sapiens
  misc_RNA (1)...(19): siRNA sense strand
gcaagaaggcacaggagaa

SEQ ID NO: 1664640 - RNA, 19 nt, Homo sapiens
  misc_RNA (1)...(19): siRNA sense strand
caaugaguguagaagauuu

SEQ ID NO: 1664641 - RNA, 19 nt, Homo sapiens
  misc_RNA (1)...(19): siRNA sense strand
gaagaugugagccgagaaa

SEQ ID NO: 1664642 - RNA, 19 nt, Homo sapiens
  misc_RNA (1)...(19): siRNA sense strand
ggcaacaucuccucucuca

SEQ ID NO: 1664643 - RNA, 19 nt, Homo sapiens
  misc_RNA (1)...(19): siRNA sense strand
aagaaccucucaaauagaa

SEQ ID NO: 1664644 - RNA, 19 nt, Homo sapiens
  misc_RNA (1)...(19): siRNA sense strand
agaaagaggaguuaagaaa

SEQ ID NO: 1664645 - RNA, 19 nt, Homo sapiens
  misc_RNA (1)...(19): siRNA sense strand
gaaguauuccauaaucuug

SEQ ID NO: 1664646 - RNA, 19 nt, Homo sapiens
  misc_RNA (1)...(19): siRNA sense strand
gaacaagagaaguuuaauc

SEQ ID NO: 1664647 - RNA, 19 nt, Homo sapiens
  misc_RNA (1)...(19): siRNA sense strand
ggaaaacacuacucuccua

SEQ ID NO: 1664648 - RNA, 19 nt, Homo sapiens
  misc_RNA (1)...(19): siRNA sense strand
gaagaaccucucaaauaga

SEQ ID NO: 1664649 - RNA, 19 nt, Homo sapiens
  misc_RNA (1)...(19): siRNA sense strand
uagaagcucagcccaaaua

SEQ ID NO: 1664650 - RNA, 19 nt, Homo sapiens
  misc_RNA (1)...(19): siRNA sense strand
gaaggucagucagaugaau

SEQ ID NO: 1664651 - RNA, 19 nt, Homo sapiens
  misc_RNA (1)...(19): siRNA sense strand
caucagggcuccauaacca

SEQ ID NO: 1664652 - RNA, 19 nt, Homo sapiens
  misc_RNA (1)...(19): siRNA sense strand
gaacuucugagauaugaau

SEQ ID NO: 1664653 - RNA, 19 nt, Homo sapiens
  misc_RNA (1)...(19): siRNA sense strand
aaucgaaccugauggaaau

SEQ ID NO: 1664654 - RNA, 19 nt, Homo sapiens
  misc_RNA (1)...(19): siRNA sense strand
aaaguuagagccaggguua

SEQ ID NO: 1664655 - RNA, 19 nt, Homo sapiens
  misc_RNA (1)...(19): siRNA sense strand
gaaacacacucuugagaaa

SEQ ID NO: 1664656 - RNA, 19 nt, Homo sapiens
  misc_RNA (1)...(19): siRNA sense strand
gaaauugccugguuacaug

SEQ ID NO: 1664657 - RNA, 19 nt, Homo sapiens
  misc_RNA (1)...(19): siRNA sense strand
gaacgaaacgcacaccuua

SEQ ID NO: 1664658 - RNA, 19 nt, Homo sapiens
  misc_RNA (1)...(19): siRNA sense strand
caagagaaguuuaaucuga

SEQ ID NO: 1664659 - RNA, 19 nt, Homo sapiens
  misc_RNA (1)...(19): siRNA sense strand
ggacauauguugccucaga

SEQ ID NO: 1664660 - RNA, 19 nt, Homo sapiens
  misc_RNA (1)...(19): siRNA sense strand
gaaaauggcuacugaaauu

SEQ ID NO: 1664661 - RNA, 19 nt, Homo sapiens
  misc_RNA (1)...(19): siRNA sense strand
gaaacagaguguaauagaa

SEQ ID NO: 1664662 - RNA, 19 nt, Homo sapiens
  misc_RNA (1)...(19): siRNA sense strand
ggaagucacugaaacauuc

SEQ ID NO: 1664663 - RNA, 19 nt, Homo sapiens
  misc_RNA (1)...(19): siRNA sense strand
gcaagaaguuugugaagau

SEQ ID NO: 1664664 - RNA, 19 nt, Homo sapiens
  misc_RNA (1)...(19): siRNA sense strand
uuaaauagcugugucgaua

SEQ ID NO: 1664665 - RNA, 19 nt, Homo sapiens
  misc_RNA (1)...(19): siRNA sense strand
ggaagaagcuggucuccau

SEQ ID NO: 1664666 - RNA, 19 nt, Homo sapiens
  misc_RNA (1)...(19): siRNA sense strand
uaagugaccuggaagauga

SEQ ID NO: 1664667 - RNA, 19 nt, Homo sapiens
  misc_RNA (1)...(19): siRNA sense strand
gcagagagcucaugaacag

SEQ ID NO: 1664668 - RNA, 19 nt, Homo sapiens
  misc_RNA (1)...(19): siRNA sense strand
uagaagaaccucucaaaua

SEQ ID NO: 1664669 - RNA, 19 nt, Homo sapiens
  misc_RNA (1)...(19): siRNA sense strand
ccgagaagcucaagucuuu

SEQ ID NO: 1664670 - RNA, 19 nt, Homo sapiens
  misc_RNA (1)...(19): siRNA sense strand
gaagagagacugacacaga

SEQ ID NO: 1664671 - RNA, 19 nt, Homo sapiens
  misc_RNA (1)...(19): siRNA sense strand
gaagaacacuuucaagaac

SEQ ID NO: 1664672 - RNA, 19 nt, Homo sapiens
  misc_RNA (1)...(19): siRNA sense strand
gaugaaaucugaccuacga

SEQ ID NO: 1664673 - RNA, 19 nt, Homo sapiens
  misc_RNA (1)...(19): siRNA sense strand
ggaagaauaucgugcacaa

SEQ ID NO: 1664674 - RNA, 19 nt, Homo sapiens
  misc_RNA (1)...(19): siRNA sense strand
gaacccagaugacuugaau

SEQ ID NO: 1664675 - RNA, 19 nt, Homo sapiens
  misc_RNA (1)...(19): siRNA sense strand
gagagagugugaucaguuu

SEQ ID NO: 1664676 - RNA, 19 nt, Homo sapiens
  misc_RNA (1)...(19): siRNA sense strand
ugaaacagcugcacagaug

SEQ ID NO: 1664677 - RNA, 19 nt, Homo sapiens
  misc_RNA (1)...(19): siRNA sense strand
gacuggagcucgaagauaa

SEQ ID NO: 1664678 - RNA, 19 nt, Homo sapiens
  misc_RNA (1)...(19): siRNA sense strand
agucugagcuggaagaaua

SEQ ID NO: 1664679 - RNA, 19 nt, Homo sapiens
  misc_RNA (1)...(19): siRNA sense strand
cagaagaaguugaggcuaa

SEQ ID NO: 1664680 - RNA, 19 nt, Homo sapiens
  misc_RNA (1)...(19): siRNA sense strand
gaaccagacugcucacuag

SEQ ID NO: 1664681 - RNA, 19 nt, Homo sapiens
  misc_RNA (1)...(19): siRNA sense strand
gaacuuaaucaacgucuaa

SEQ ID NO: 1664682 - RNA, 19 nt, Homo sapiens
  misc_RNA (1)...(19): siRNA sense strand
agaagaaccucucaaauag

SEQ ID NO: 1664683 - RNA, 19 nt, Homo sapiens
  misc_RNA (1)...(19): siRNA sense strand
ggagcucucugaaguuaaa

SEQ ID NO: 1664684 - RNA, 19 nt, Homo sapiens
  misc_RNA (1)...(19): siRNA sense strand
ugacacagaugagaaauga

SEQ ID NO: 1664685 - RNA, 19 nt, Homo sapiens
  misc_RNA (1)...(19): siRNA sense strand
gaaacuggaugaagaguac

SEQ ID NO: 1664686 - RNA, 19 nt, Homo sapiens
  misc_RNA (1)...(19): siRNA sense strand
gcggagcucucugaaguua

SEQ ID NO: 1664687 - RNA, 19 nt, Homo sapiens
  misc_RNA (1)...(19): siRNA sense strand
gaaauauacuccagcucaa

SEQ ID NO: 1664688 - RNA, 19 nt, Homo sapiens
  misc_RNA (1)...(19): siRNA sense strand
uagaugaacuccagucuga

SEQ ID NO: 1664689 - RNA, 19 nt, Homo sapiens
  misc_RNA (1)...(19): siRNA sense strand
gaauguggauggagagaug

SEQ ID NO: 1664690 - RNA, 19 nt, Homo sapiens
  misc_RNA (1)...(19): siRNA sense strand
gcacagaaaucuccagacu

SEQ ID NO: 1664691 - RNA, 19 nt, Homo sapiens
  misc_RNA (1)...(19): siRNA sense strand
gaacucaccgucagaagaa

SEQ ID NO: 1664692 - RNA, 19 nt, Homo sapiens
  misc_RNA (1)...(19): siRNA sense strand
guucuaagcuacaacgaaa

SEQ ID NO: 1664693 - RNA, 19 nt, Homo sapiens
  misc_RNA (1)...(19): siRNA sense strand
gggagcagcuguuggaaga

SEQ ID NO: 1664694 - RNA, 19 nt, Homo sapiens
  misc_RNA (1)...(19): siRNA sense strand
gaagagaccaggacugaau

SEQ ID NO: 1664695 - RNA, 19 nt, Homo sapiens
  misc_RNA (1)...(19): siRNA sense strand
aggcagagcuggucauuga

SEQ ID NO: 1664696 - RNA, 19 nt, Homo sapiens
  misc_RNA (1)...(19): siRNA sense strand
ggaaaagguucagaauuua

SEQ ID NO: 1664697 - RNA, 19 nt, Homo sapiens
  misc_RNA (1)...(19): siRNA sense strand
acagaaaucuccagacuuc

SEQ ID NO: 1664698 - RNA, 19 nt, Homo sapiens
  misc_RNA (1)...(19): siRNA sense strand
gacagcagaucgagaaaga

SEQ ID NO: 1664699 - RNA, 19 nt, Homo sapiens
  misc_RNA (1)...(19): siRNA sense strand
ucaaauagaagcccaguuu

SEQ ID NO: 1664700 - RNA, 19 nt, Homo sapiens
  misc_RNA (1)...(19): siRNA sense strand
ggaaacagaguguaauaga

SEQ ID NO: 1664701 - RNA, 19 nt, Homo sapiens
  misc_RNA (1)...(19): siRNA sense strand
ucaggaaacuggaugaaga

SEQ ID NO: 1664702 - RNA, 19 nt, Homo sapiens
  misc_RNA (1)...(19): siRNA sense strand
ugacaagccugguggagaa

SEQ ID NO: 1664703 - RNA, 19 nt, Homo sapiens
  misc_RNA (1)...(19): siRNA sense strand
gcaaaggcaugagaacgaa

SEQ ID NO: 1664704 - RNA, 19 nt, Homo sapiens
  misc_RNA (1)...(19): siRNA sense strand
gaagauaaagugcgccauu

SEQ ID NO: 1664705 - RNA, 19 nt, Homo sapiens
  misc_RNA (1)...(19): siRNA sense strand
ccaaauauaagcuguugua

SEQ ID NO: 1664706 - RNA, 19 nt, Homo sapiens
  misc_RNA (1)...(19): siRNA sense strand
gacuagaaauggaacauga

SEQ ID NO: 1664707 - RNA, 19 nt, Homo sapiens
  misc_RNA (1)...(19): siRNA sense strand
gcaaaugucccggaugaaa

SEQ ID NO: 1664708 - RNA, 19 nt, Homo sapiens
  misc_RNA (1)...(19): siRNA sense strand
ccagaugacuugaaugcuu

SEQ ID NO: 1664709 - RNA, 19 nt, Homo sapiens
  misc_RNA (1)...(19): siRNA sense strand
gaacaauucagacacauca

SEQ ID NO: 1664710 - RNA, 19 nt, Homo sapiens
  misc_RNA (1)...(19): siRNA sense strand
caacaucuccucucucaau

SEQ ID NO: 1664711 - RNA, 19 nt, Homo sapiens
  misc_RNA (1)...(19): siRNA sense strand
agagagagaugcuggagaa

SEQ ID NO: 1664712 - RNA, 19 nt, Homo sapiens
  misc_RNA (1)...(19): siRNA sense strand
gaugagaaaugaauaugag

SEQ ID NO: 1664713 - RNA, 19 nt, Homo sapiens
  misc_RNA (1)...(19): siRNA sense strand
gaagagaaacugcaagaag

SEQ ID NO: 1664714 - RNA, 19 nt, Homo sapiens
  misc_RNA (1)...(19): siRNA sense strand
gcaguaugguuuacagaau

SEQ ID NO: 1664715 - RNA, 19 nt, Homo sapiens
  misc_RNA (1)...(19): siRNA sense strand
caucuaaacccaucaggua

SEQ ID NO: 1664716 - RNA, 19 nt, Homo sapiens
  misc_RNA (1)...(19): siRNA sense strand
ccugggagcugaagaauca

SEQ ID NO: 1664717 - RNA, 19 nt, Homo sapiens
  misc_RNA (1)...(19): siRNA sense strand
gagcagcuguuggaagaaa

SEQ ID NO: 1664718 - RNA, 19 nt, Homo sapiens
  misc_RNA (1)...(19): siRNA sense strand
gaaacgcacaccuuagaaa

SEQ ID NO: 1664719 - RNA, 19 nt, Homo sapiens
  misc_RNA (1)...(19): siRNA sense strand
gagaagcucaagucuuuaa

SEQ ID NO: 1664720 - RNA, 19 nt, Homo sapiens
  misc_RNA (1)...(19): siRNA sense strand
aaagaacaaucuccugcua

SEQ ID NO: 1664721 - RNA, 19 nt, Homo sapiens
  misc_RNA (1)...(19): siRNA sense strand
gaagauagcauuucuaacc

SEQ ID NO: 1664722 - RNA, 19 nt, Homo sapiens
  misc_RNA (1)...(19): siRNA sense strand
gaacacacagcucuuggaa

SEQ ID NO: 1664723 - RNA, 19 nt, Homo sapiens
  misc_RNA (1)...(19): siRNA sense strand
gcucagcccaaauauguua

SEQ ID NO: 1664724 - RNA, 19 nt, Homo sapiens
  misc_RNA (1)...(19): siRNA sense strand
gaacaggcagugaaggaaa

SEQ ID NO: 1664725 - RNA, 19 nt, Homo sapiens
  misc_RNA (1)...(19): siRNA sense strand
gcucaaggcuagacugaca

SEQ ID NO: 1664726 - RNA, 19 nt, Homo sapiens
  misc_RNA (1)...(19): siRNA sense strand
gaagacaccgugcagaaug

SEQ ID NO: 1664727 - RNA, 19 nt, Homo sapiens
  misc_RNA (1)...(19): siRNA sense strand
gcugguggcuucucaggaa

SEQ ID NO: 1664728 - RNA, 19 nt, Homo sapiens
  misc_RNA (1)...(19): siRNA sense strand
ugaaggcaaugaugcauga

SEQ ID NO: 1664729 - RNA, 19 nt, Homo sapiens
  misc_RNA (1)...(19): siRNA sense strand
uacaggagcugacuaggaa

SEQ ID NO: 1664730 - RNA, 19 nt, Homo sapiens
  misc_RNA (1)...(19): siRNA sense strand
aagauaaagugcgccauua

SEQ ID NO: 1664731 - RNA, 19 nt, Homo sapiens
  misc_RNA (1)...(19): siRNA sense strand
gaacuggaacguuguaaag

SEQ ID NO: 1664732 - RNA, 19 nt, Homo sapiens
  misc_RNA (1)...(19): siRNA sense strand
gcagugagaugcagcaaaa

SEQ ID NO: 1664733 - RNA, 19 nt, Homo sapiens
  misc_RNA (1)...(19): siRNA sense strand
ugaagaugcuugagagaau

SEQ ID NO: 1664734 - RNA, 19 nt, Homo sapiens
  misc_RNA (1)...(19): siRNA sense strand
ggaaagacuagaaauggaa

SEQ ID NO: 1664735 - RNA, 19 nt, Homo sapiens
  misc_RNA (1)...(19): siRNA sense strand
ccuaagaaauguaucugaa

SEQ ID NO: 1664736 - RNA, 19 nt, Homo sapiens
  misc_RNA (1)...(19): siRNA sense strand
gacagcagcuacuccaaga

SEQ ID NO: 1664737 - RNA, 19 nt, Homo sapiens
  misc_RNA (1)...(19): siRNA sense strand
cccaggagcugcugaaaga

SEQ ID NO: 1664738 - RNA, 19 nt, Homo sapiens
  misc_RNA (1)...(19): siRNA sense strand
ugaaggaccuccaggaaca

SEQ ID NO: 1664739 - RNA, 19 nt, Homo sapiens
  misc_RNA (1)...(19): siRNA sense strand
gcaagaaggcacaggagaa

SEQ ID NO: 1664740 - RNA, 19 nt, Homo sapiens
  misc_RNA (1)...(19): siRNA sense strand
caaugaguguagaagauuu

SEQ ID NO: 1664741 - RNA, 19 nt, Homo sapiens
  misc_RNA (1)...(19): siRNA sense strand
gaagaugugagccgagaaa

SEQ ID NO: 1664742 - RNA, 19 nt, Homo sapiens
  misc_RNA (1)...(19): siRNA sense strand
ggcaacaucuccucucuca

SEQ ID NO: 1664743 - RNA, 19 nt, Homo sapiens
  misc_RNA (1)...(19): siRNA sense strand
aagaaccucucaaauagaa

SEQ ID NO: 1664744 - RNA, 19 nt, Homo sapiens
  misc_RNA (1)...(19): siRNA sense strand
agaaagaggaguuaagaaa

SEQ ID NO: 1664745 - RNA, 19 nt, Homo sapiens
  misc_RNA (1)...(19): siRNA sense strand
gaaguauuccauaaucuug

SEQ ID NO: 1664746 - RNA, 19 nt, Homo sapiens
  misc_RNA (1)...(19): siRNA sense strand
gaacaagagaaguuuaauc

SEQ ID NO: 1664747 - RNA, 19 nt, Homo sapiens
  misc_RNA (1)...(19): siRNA sense strand
ggaaaacacuacucuccua

SEQ ID NO: 1664748 - RNA, 19 nt, Homo sapiens
  misc_RNA (1)...(19): siRNA sense strand
gaagaaccucucaaauaga

SEQ ID NO: 1664749 - RNA, 19 nt, Homo sapiens
  misc_RNA (1)...(19): siRNA sense strand
uagaagcucagcccaaaua

SEQ ID NO: 1664750 - RNA, 19 nt, Homo sapiens
  misc_RNA (1)...(19): siRNA sense strand
gaaggucagucagaugaau

SEQ ID NO: 1664751 - RNA, 19 nt, Homo sapiens
  misc_RNA (1)...(19): siRNA sense strand
caucagggcuccauaacca

SEQ ID NO: 1664752 - RNA, 19 nt, Homo sapiens
  misc_RNA (1)...(19): siRNA sense strand
gaacuucugagauaugaau

SEQ ID NO: 1664753 - RNA, 19 nt, Homo sapiens
  misc_RNA (1)...(19): siRNA sense strand
aaucgaaccugauggaaau

SEQ ID NO: 1664754 - RNA, 19 nt, Homo sapiens
  misc_RNA (1)...(19): siRNA sense strand
aaaguuagagccaggguua

SEQ ID NO: 1664755 - RNA, 19 nt, Homo sapiens
  misc_RNA (1)...(19): siRNA sense strand
gaaacacacucuugagaaa

SEQ ID NO: 1664756 - RNA, 19 nt, Homo sapiens
  misc_RNA (1)...(19): siRNA sense strand
gaaauugccugguuacaug

SEQ ID NO: 1664757 - RNA, 19 nt, Homo sapiens
  misc_RNA (1)...(19): siRNA sense strand
gaacgaaacgcacaccuua

SEQ ID NO: 1664758 - RNA, 19 nt, Homo sapiens
  misc_RNA (1)...(19): siRNA sense strand
caagagaaguuuaaucuga

SEQ ID NO: 1664759 - RNA, 19 nt, Homo sapiens
  misc_RNA (1)...(19): siRNA sense strand
ggacauauguugccucaga

SEQ ID NO: 1664760 - RNA, 19 nt, Homo sapiens
  misc_RNA (1)...(19): siRNA sense strand
gaaaauggcuacugaaauu

SEQ ID NO: 1664761 - RNA, 19 nt, Homo sapiens
  misc_RNA (1)...(19): siRNA sense strand
gaaacagaguguaauagaa

SEQ ID NO: 1664762 - RNA, 19 nt, Homo sapiens
  misc_RNA (1)...(19): siRNA sense strand
ggaagucacugaaacauuc

SEQ ID NO: 1664763 - RNA, 19 nt, Homo sapiens
  misc_RNA (1)...(19): siRNA sense strand
gcaagaaguuugugaagau

SEQ ID NO: 1664764 - RNA, 19 nt, Homo sapiens
  misc_RNA (1)...(19): siRNA sense strand
uuaaauagcugugucgaua

SEQ ID NO: 1664765 - RNA, 19 nt, Homo sapiens
  misc_RNA (1)...(19): siRNA sense strand
ggaagaagcuggucuccau

SEQ ID NO: 1664766 - RNA, 19 nt, Homo sapiens
  misc_RNA (1)...(19): siRNA sense strand
uaagugaccuggaagauga

SEQ ID NO: 1664767 - RNA, 19 nt, Homo sapiens
  misc_RNA (1)...(19): siRNA sense strand
gcagagagcucaugaacag

SEQ ID NO: 1664768 - RNA, 19 nt, Homo sapiens
  misc_RNA (1)...(19): siRNA sense strand
uagaagaaccucucaaaua

SEQ ID NO: 1664769 - RNA, 19 nt, Homo sapiens
  misc_RNA (1)...(19): siRNA sense strand
ccgagaagcucaagucuuu

SEQ ID NO: 1664770 - RNA, 19 nt, Homo sapiens
  misc_RNA (1)...(19): siRNA sense strand
gaagagagacugacacaga

SEQ ID NO: 1664771 - RNA, 19 nt, Homo sapiens
  misc_RNA (1)...(19): siRNA sense strand
gaagaacacuuucaagaac

SEQ ID NO: 1664772 - RNA, 19 nt, Homo sapiens
  misc_RNA (1)...(19): siRNA sense strand
gaugaaaucugaccuacga

SEQ ID NO: 1664773 - RNA, 19 nt, Homo sapiens
  misc_RNA (1)...(19): siRNA sense strand
ggaagaauaucgugcacaa

SEQ ID NO: 1664774 - RNA, 19 nt, Homo sapiens
  misc_RNA (1)...(19): siRNA sense strand
gaacccagaugacuugaau

SEQ ID NO: 1664775 - RNA, 19 nt, Homo sapiens
  misc_RNA (1)...(19): siRNA sense strand
gagagagugugaucaguuu

SEQ ID NO: 1664776 - RNA, 19 nt, Homo sapiens
  misc_RNA (1)...(19): siRNA sense strand
ugaaacagcugcacagaug

SEQ ID NO: 1664777 - RNA, 19 nt, Homo sapiens
  misc_RNA (1)...(19): siRNA sense strand
gacuggagcucgaagauaa

SEQ ID NO: 1664778 - RNA, 19 nt, Homo sapiens
  misc_RNA (1)...(19): siRNA sense strand
agucugagcuggaagaaua

SEQ ID NO: 1664779 - RNA, 19 nt, Homo sapiens
  misc_RNA (1)...(19): siRNA sense strand
cagaagaaguugaggcuaa

SEQ ID NO: 1664780 - RNA, 19 nt, Homo sapiens
  misc_RNA (1)...(19): siRNA sense strand
gaaccagacugcucacuag

SEQ ID NO: 1664781 - RNA, 19 nt, Homo sapiens
  misc_RNA (1)...(19): siRNA sense strand
gaacuuaaucaacgucuaa

SEQ ID NO: 1664782 - RNA, 19 nt, Homo sapiens
  misc_RNA (1)...(19): siRNA sense strand
agaagaaccucucaaauag

SEQ ID NO: 1664783 - RNA, 19 nt, Homo sapiens
  misc_RNA (1)...(19): siRNA sense strand
ggagcucucugaaguuaaa

SEQ ID NO: 1664784 - RNA, 19 nt, Homo sapiens
  misc_RNA (1)...(19): siRNA sense strand
ugacacagaugagaaauga

SEQ ID NO: 1664785 - RNA, 19 nt, Homo sapiens
  misc_RNA (1)...(19): siRNA sense strand
gaaacuggaugaagaguac

SEQ ID NO: 1664786 - RNA, 19 nt, Homo sapiens
  misc_RNA (1)...(19): siRNA sense strand
gcggagcucucugaaguua

SEQ ID NO: 1664787 - RNA, 19 nt, Homo sapiens
  misc_RNA (1)...(19): siRNA sense strand
gaaauauacuccagcucaa

SEQ ID NO: 1664788 - RNA, 19 nt, Homo sapiens
  misc_RNA (1)...(19): siRNA sense strand
uagaugaacuccagucuga

SEQ ID NO: 1664789 - RNA, 19 nt, Homo sapiens
  misc_RNA (1)...(19): siRNA sense strand
gaauguggauggagagaug

SEQ ID NO: 1664790 - RNA, 19 nt, Homo sapiens
  misc_RNA (1)...(19): siRNA sense strand
gcacagaaaucuccagacu

SEQ ID NO: 1664791 - RNA, 19 nt, Homo sapiens
  misc_RNA (1)...(19): siRNA sense strand
gaacucaccgucagaagaa

SEQ ID NO: 1664792 - RNA, 19 nt, Homo sapiens
  misc_RNA (1)...(19): siRNA sense strand
guucuaagcuacaacgaaa

SEQ ID NO: 1664793 - RNA, 19 nt, Homo sapiens
  misc_RNA (1)...(19): siRNA sense strand
gggagcagcuguuggaaga

SEQ ID NO: 1664794 - RNA, 19 nt, Homo sapiens
  misc_RNA (1)...(19): siRNA sense strand
gaagagaccaggacugaau

SEQ ID NO: 1664795 - RNA, 19 nt, Homo sapiens
  misc_RNA (1)...(19): siRNA sense strand
aggcagagcuggucauuga

SEQ ID NO: 1664796 - RNA, 19 nt, Homo sapiens
  misc_RNA (1)...(19): siRNA sense strand
ggaaaagguucagaauuua

SEQ ID NO: 1664797 - RNA, 19 nt, Homo sapiens
  misc_RNA (1)...(19): siRNA sense strand
acagaaaucuccagacuuc

SEQ ID NO: 1664798 - RNA, 19 nt, Homo sapiens
  misc_RNA (1)...(19): siRNA sense strand
gacagcagaucgagaaaga

SEQ ID NO: 1664799 - RNA, 19 nt, Homo sapiens
  misc_RNA (1)...(19): siRNA sense strand
ucaaauagaagcccaguuu

SEQ ID NO: 1664800 - RNA, 19 nt, Homo sapiens
  misc_RNA (1)...(19): siRNA sense strand
ggaaacagaguguaauaga

SEQ ID NO: 1664801 - RNA, 19 nt, Homo sapiens
  misc_RNA (1)...(19): siRNA sense strand
ucaggaaacuggaugaaga

SEQ ID NO: 1664802 - RNA, 19 nt, Homo sapiens
  misc_RNA (1)...(19): siRNA sense strand
ugacaagccugguggagaa

SEQ ID NO: 1664803 - RNA, 19 nt, Homo sapiens
  misc_RNA (1)...(19): siRNA sense strand
gcaaaggcaugagaacgaa

SEQ ID NO: 1664804 - RNA, 19 nt, Homo sapiens
  misc_RNA (1)...(19): siRNA sense strand
gaagauaaagugcgccauu

SEQ ID NO: 1664805 - RNA, 19 nt, Homo sapiens
  misc_RNA (1)...(19): siRNA sense strand
ccaaauauaagcuguugua

SEQ ID NO: 1664806 - RNA, 19 nt, Homo sapiens
  misc_RNA (1)...(19): siRNA sense strand
gacuagaaauggaacauga

SEQ ID NO: 1664807 - RNA, 19 nt, Homo sapiens
  misc_RNA (1)...(19): siRNA sense strand
gcaaaugucccggaugaaa

SEQ ID NO: 1664808 - RNA, 19 nt, Homo sapiens
  misc_RNA (1)...(19): siRNA sense strand
ccagaugacuugaaugcuu

SEQ ID NO: 1664809 - RNA, 19 nt, Homo sapiens
  misc_RNA (1)...(19): siRNA sense strand
gaacaauucagacacauca

SEQ ID NO: 1664810 - RNA, 19 nt, Homo sapiens
  misc_RNA (1)...(19): siRNA sense strand
caacaucuccucucucaau

SEQ ID NO: 1664811 - RNA, 19 nt, Homo sapiens
  misc_RNA (1)...(19): siRNA sense strand
agagagagaugcuggagaa

SEQ ID NO: 1664812 - RNA, 19 nt, Homo sapiens
  misc_RNA (1)...(19): siRNA sense strand
gaugagaaaugaauaugag

SEQ ID NO: 1664813 - RNA, 19 nt, Homo sapiens
  misc_RNA (1)...(19): siRNA sense strand
gaagagaaacugcaagaag

SEQ ID NO: 1664814 - RNA, 19 nt, Homo sapiens
  misc_RNA (1)...(19): siRNA sense strand
gcaguaugguuuacagaau

SEQ ID NO: 1664815 - RNA, 19 nt, Homo sapiens
  misc_RNA (1)...(19): siRNA sense strand
caucuaaacccaucaggua

SEQ ID NO: 1664816 - RNA, 19 nt, Homo sapiens
  misc_RNA (1)...(19): siRNA sense strand
ccugggagcugaagaauca

SEQ ID NO: 1664817 - RNA, 19 nt, Homo sapiens
  misc_RNA (1)...(19): siRNA sense strand
gagcagcuguuggaagaaa

SEQ ID NO: 1664818 - RNA, 19 nt, Homo sapiens
  misc_RNA (1)...(19): siRNA sense strand
gaaacgcacaccuuagaaa

SEQ ID NO: 1664819 - RNA, 19 nt, Homo sapiens
  misc_RNA (1)...(19): siRNA sense strand
gagaagcucaagucuuuaa

SEQ ID NO: 1664820 - RNA, 19 nt, Homo sapiens
  misc_RNA (1)...(19): siRNA sense strand
aaagaacaaucuccugcua

SEQ ID NO: 1664821 - RNA, 19 nt, Homo sapiens
  misc_RNA (1)...(19): siRNA sense strand
gaagauagcauuucuaacc

SEQ ID NO: 1664822 - RNA, 19 nt, Homo sapiens
  misc_RNA (1)...(19): siRNA sense strand
gaacacacagcucuuggaa

SEQ ID NO: 1664823 - RNA, 19 nt, Homo sapiens
  misc_RNA (1)...(19): siRNA sense strand
gcucagcccaaauauguua

SEQ ID NO: 1664824 - RNA, 19 nt, Homo sapiens
  misc_RNA (1)...(19): siRNA sense strand
gaacaggcagugaaggaaa

SEQ ID NO: 1664825 - RNA, 19 nt, Homo sapiens
  misc_RNA (1)...(19): siRNA sense strand
gcucaaggcuagacugaca

SEQ ID NO: 1664826 - RNA, 19 nt, Homo sapiens
  misc_RNA (1)...(19): siRNA sense strand
gaagacaccgugcagaaug

SEQ ID NO: 1664827 - RNA, 19 nt, Homo sapiens
  misc_RNA (1)...(19): siRNA sense strand
gcugguggcuucucaggaa

SEQ ID NO: 1664828 - RNA, 19 nt, Homo sapiens
  misc_RNA (1)...(19): siRNA sense strand
ugaaggcaaugaugcauga

SEQ ID NO: 1664829 - RNA, 19 nt, Homo sapiens
  misc_RNA (1)...(19): siRNA sense strand
uacaggagcugacuaggaa

SEQ ID NO: 1664830 - RNA, 19 nt, Homo sapiens
  misc_RNA (1)...(19): siRNA sense strand
aagauaaagugcgccauua

SEQ ID NO: 1664831 - RNA, 19 nt, Homo sapiens
  misc_RNA (1)...(19): siRNA sense strand
gaacuggaacguuguaaag

SEQ ID NO: 1664832 - RNA, 19 nt, Homo sapiens
  misc_RNA (1)...(19): siRNA sense strand
gcagugagaugcagcaaaa

SEQ ID NO: 1664833 - RNA, 19 nt, Homo sapiens
  misc_RNA (1)...(19): siRNA sense strand
ugaagaugcuugagagaau

SEQ ID NO: 1664834 - RNA, 19 nt, Homo sapiens
  misc_RNA (1)...(19): siRNA sense strand
ggaaagacuagaaauggaa

SEQ ID NO: 1664835 - RNA, 19 nt, Homo sapiens
  misc_RNA (1)...(19): siRNA sense strand
ccuaagaaauguaucugaa

SEQ ID NO: 1664836 - RNA, 19 nt, Homo sapiens
  misc_RNA (1)...(19): siRNA sense strand
gacagcagcuacuccaaga

SEQ ID NO: 1664837 - RNA, 19 nt, Homo sapiens
  misc_RNA (1)...(19): siRNA sense strand
cccaggagcugcugaaaga

SEQ ID NO: 1664838 - RNA, 19 nt, Homo sapiens
  misc_RNA (1)...(19): siRNA sense strand
ugaaggaccuccaggaaca

SEQ ID NO: 1664839 - RNA, 19 nt, Homo sapiens
  misc_RNA (1)...(19): siRNA sense strand
gcaagaaggcacaggagaa

SEQ ID NO: 1664840 - RNA, 19 nt, Homo sapiens
  misc_RNA (1)...(19): siRNA sense strand
caaugaguguagaagauuu

SEQ ID NO: 1664841 - RNA, 19 nt, Homo sapiens
  misc_RNA (1)...(19): siRNA sense strand
gaagaugugagccgagaaa

SEQ ID NO: 1664842 - RNA, 19 nt, Homo sapiens
  misc_RNA (1)...(19): siRNA sense strand
ggcaacaucuccucucuca

SEQ ID NO: 1664843 - RNA, 19 nt, Homo sapiens
  misc_RNA (1)...(19): siRNA sense strand
aagaaccucucaaauagaa

SEQ ID NO: 1664844 - RNA, 19 nt, Homo sapiens
  misc_RNA (1)...(19): siRNA sense strand
agaaagaggaguuaagaaa

SEQ ID NO: 1664845 - RNA, 19 nt, Homo sapiens
  misc_RNA (1)...(19): siRNA sense strand
gaaguauuccauaaucuug

SEQ ID NO: 1664846 - RNA, 19 nt, Homo sapiens
  misc_RNA (1)...(19): siRNA sense strand
gaacaagagaaguuuaauc

SEQ ID NO: 1664847 - RNA, 19 nt, Homo sapiens
  misc_RNA (1)...(19): siRNA sense strand
ggaaaacacuacucuccua

SEQ ID NO: 1664848 - RNA, 19 nt, Homo sapiens
  misc_RNA (1)...(19): siRNA sense strand
gaagaaccucucaaauaga

SEQ ID NO: 1664849 - RNA, 19 nt, Homo sapiens
  misc_RNA (1)...(19): siRNA sense strand
uagaagcucagcccaaaua

SEQ ID NO: 1664850 - RNA, 19 nt, Homo sapiens
  misc_RNA (1)...(19): siRNA sense strand
gaaggucagucagaugaau

SEQ ID NO: 1664851 - RNA, 19 nt, Homo sapiens
  misc_RNA (1)...(19): siRNA sense strand
caucagggcuccauaacca

SEQ ID NO: 1664852 - RNA, 19 nt, Homo sapiens
  misc_RNA (1)...(19): siRNA sense strand
gaacuucugagauaugaau

SEQ ID NO: 1664853 - RNA, 19 nt, Homo sapiens
  misc_RNA (1)...(19): siRNA sense strand
aaucgaaccugauggaaau

SEQ ID NO: 1664854 - RNA, 19 nt, Homo sapiens
  misc_RNA (1)...(19): siRNA sense strand
aaaguuagagccaggguua

SEQ ID NO: 1664855 - RNA, 19 nt, Homo sapiens
  misc_RNA (1)...(19): siRNA sense strand
gaaacacacucuugagaaa

SEQ ID NO: 1664856 - RNA, 19 nt, Homo sapiens
  misc_RNA (1)...(19): siRNA sense strand
gaaauugccugguuacaug

SEQ ID NO: 1664857 - RNA, 19 nt, Homo sapiens
  misc_RNA (1)...(19): siRNA sense strand
gaacgaaacgcacaccuua

SEQ ID NO: 1664858 - RNA, 19 nt, Homo sapiens
  misc_RNA (1)...(19): siRNA sense strand
caagagaaguuuaaucuga

SEQ ID NO: 1664859 - RNA, 19 nt, Homo sapiens
  misc_RNA (1)...(19): siRNA sense strand
ggacauauguugccucaga

SEQ ID NO: 1664860 - RNA, 19 nt, Homo sapiens
  misc_RNA (1)...(19): siRNA sense strand
gaaaauggcuacugaaauu

SEQ ID NO: 1664861 - RNA, 19 nt, Homo sapiens
  misc_RNA (1)...(19): siRNA sense strand
gaaacagaguguaauagaa

SEQ ID NO: 1664862 - RNA, 19 nt, Homo sapiens
  misc_RNA (1)...(19): siRNA sense strand
ggaagucacugaaacauuc

SEQ ID NO: 1664863 - RNA, 19 nt, Homo sapiens
  misc_RNA (1)...(19): siRNA sense strand
gcaagaaguuugugaagau

SEQ ID NO: 1664864 - RNA, 19 nt, Homo sapiens
  misc_RNA (1)...(19): siRNA sense strand
uuaaauagcugugucgaua

SEQ ID NO: 1664865 - RNA, 19 nt, Homo sapiens
  misc_RNA (1)...(19): siRNA sense strand
ggaagaagcuggucuccau

SEQ ID NO: 1664866 - RNA, 19 nt, Homo sapiens
  misc_RNA (1)...(19): siRNA sense strand
uaagugaccuggaagauga

SEQ ID NO: 1664867 - RNA, 19 nt, Homo sapiens
  misc_RNA (1)...(19): siRNA sense strand
gcagagagcucaugaacag

SEQ ID NO: 1664868 - RNA, 19 nt, Homo sapiens
  misc_RNA (1)...(19): siRNA sense strand
uagaagaaccucucaaaua

SEQ ID NO: 1664869 - RNA, 19 nt, Homo sapiens
  misc_RNA (1)...(19): siRNA sense strand
ccgagaagcucaagucuuu

SEQ ID NO: 1664870 - RNA, 19 nt, Homo sapiens
  misc_RNA (1)...(19): siRNA sense strand
gaagagagacugacacaga

SEQ ID NO: 1664871 - RNA, 19 nt, Homo sapiens
  misc_RNA (1)...(19): siRNA sense strand
gaagaacacuuucaagaac

SEQ ID NO: 1664872 - RNA, 19 nt, Homo sapiens
  misc_RNA (1)...(19): siRNA sense strand
gaugaaaucugaccuacga

SEQ ID NO: 1664873 - RNA, 19 nt, Homo sapiens
  misc_RNA (1)...(19): siRNA sense strand
ggaagaauaucgugcacaa

SEQ ID NO: 1664874 - RNA, 19 nt, Homo sapiens
  misc_RNA (1)...(19): siRNA sense strand
gaacccagaugacuugaau

SEQ ID NO: 1664875 - RNA, 19 nt, Homo sapiens
  misc_RNA (1)...(19): siRNA sense strand
gagagagugugaucaguuu

SEQ ID NO: 1664876 - RNA, 19 nt, Homo sapiens
  misc_RNA (1)...(19): siRNA sense strand
ugaaacagcugcacagaug

SEQ ID NO: 1664877 - RNA, 19 nt, Homo sapiens
  misc_RNA (1)...(19): siRNA sense strand
gacuggagcucgaagauaa

SEQ ID NO: 1664878 - RNA, 19 nt, Homo sapiens
  misc_RNA (1)...(19): siRNA sense strand
agucugagcuggaagaaua

SEQ ID NO: 1664879 - RNA, 19 nt, Homo sapiens
  misc_RNA (1)...(19): siRNA sense strand
cagaagaaguugaggcuaa

SEQ ID NO: 1664880 - RNA, 19 nt, Homo sapiens
  misc_RNA (1)...(19): siRNA sense strand
gaaccagacugcucacuag

SEQ ID NO: 1664881 - RNA, 19 nt, Homo sapiens
  misc_RNA (1)...(19): siRNA sense strand
gaacuuaaucaacgucuaa

SEQ ID NO: 1664882 - RNA, 19 nt, Homo sapiens
  misc_RNA (1)...(19): siRNA sense strand
agaagaaccucucaaauag

SEQ ID NO: 1664883 - RNA, 19 nt, Homo sapiens
  misc_RNA (1)...(19): siRNA sense strand
ggagcucucugaaguuaaa

SEQ ID NO: 1664884 - RNA, 19 nt, Homo sapiens
  misc_RNA (1)...(19): siRNA sense strand
ugacacagaugagaaauga

SEQ ID NO: 1664885 - RNA, 19 nt, Homo sapiens
  misc_RNA (1)...(19): siRNA sense strand
gaaacuggaugaagaguac

SEQ ID NO: 1664886 - RNA, 19 nt, Homo sapiens
  misc_RNA (1)...(19): siRNA sense strand
gcggagcucucugaaguua

SEQ ID NO: 1664887 - RNA, 19 nt, Homo sapiens
  misc_RNA (1)...(19): siRNA sense strand
gaaauauacuccagcucaa

SEQ ID NO: 1664888 - RNA, 19 nt, Homo sapiens
  misc_RNA (1)...(19): siRNA sense strand
uagaugaacuccagucuga

SEQ ID NO: 1664889 - RNA, 19 nt, Homo sapiens
  misc_RNA (1)...(19): siRNA sense strand
gaauguggauggagagaug

SEQ ID NO: 1664890 - RNA, 19 nt, Homo sapiens
  misc_RNA (1)...(19): siRNA sense strand
gcacagaaaucuccagacu

SEQ ID NO: 1664891 - RNA, 19 nt, Homo sapiens
  misc_RNA (1)...(19): siRNA sense strand
gaacucaccgucagaagaa

SEQ ID NO: 1664892 - RNA, 19 nt, Homo sapiens
  misc_RNA (1)...(19): siRNA sense strand
guucuaagcuacaacgaaa

SEQ ID NO: 1664893 - RNA, 19 nt, Homo sapiens
  misc_RNA (1)...(19): siRNA sense strand
gggagcagcuguuggaaga

SEQ ID NO: 1664894 - RNA, 19 nt, Homo sapiens
  misc_RNA (1)...(19): siRNA sense strand
gaagagaccaggacugaau

SEQ ID NO: 1664895 - RNA, 19 nt, Homo sapiens
  misc_RNA (1)...(19): siRNA sense strand
aggcagagcuggucauuga

SEQ ID NO: 1664896 - RNA, 19 nt, Homo sapiens
  misc_RNA (1)...(19): siRNA sense strand
ggaaaagguucagaauuua

SEQ ID NO: 1664897 - RNA, 19 nt, Homo sapiens
  misc_RNA (1)...(19): siRNA sense strand
acagaaaucuccagacuuc

SEQ ID NO: 1664898 - RNA, 19 nt, Homo sapiens
  misc_RNA (1)...(19): siRNA sense strand
gacagcagaucgagaaaga

SEQ ID NO: 1664899 - RNA, 19 nt, Homo sapiens
  misc_RNA (1)...(19): siRNA sense strand
ucaaauagaagcccaguuu

SEQ ID NO: 1664900 - RNA, 19 nt, Homo sapiens
  misc_RNA (1)...(19): siRNA sense strand
ggaaacagaguguaauaga

SEQ ID NO: 1664901 - RNA, 19 nt, Homo sapiens
  misc_RNA (1)...(19): siRNA sense strand
ucaggaaacuggaugaaga

SEQ ID NO: 1664902 - RNA, 19 nt, Homo sapiens
  misc_RNA (1)...(19): siRNA sense strand
ugacaagccugguggagaa

SEQ ID NO: 1664903 - RNA, 19 nt, Homo sapiens
  misc_RNA (1)...(19): siRNA sense strand
gcaaaggcaugagaacgaa

SEQ ID NO: 1664904 - RNA, 19 nt, Homo sapiens
  misc_RNA (1)...(19): siRNA sense strand
gaagauaaagugcgccauu

SEQ ID NO: 1664905 - RNA, 19 nt, Homo sapiens
  misc_RNA (1)...(19): siRNA sense strand
ccaaauauaagcuguugua

SEQ ID NO: 1664906 - RNA, 19 nt, Homo sapiens
  misc_RNA (1)...(19): siRNA sense strand
gacuagaaauggaacauga

SEQ ID NO: 1664907 - RNA, 19 nt, Homo sapiens
  misc_RNA (1)...(19): siRNA sense strand
gcaaaugucccggaugaaa

SEQ ID NO: 1664908 - RNA, 19 nt, Homo sapiens
  misc_RNA (1)...(19): siRNA sense strand
ccagaugacuugaaugcuu

SEQ ID NO: 1664909 - RNA, 19 nt, Homo sapiens
  misc_RNA (1)...(19): siRNA sense strand
gaacaauucagacacauca

SEQ ID NO: 1664910 - RNA, 19 nt, Homo sapiens
  misc_RNA (1)...(19): siRNA sense strand
caacaucuccucucucaau

SEQ ID NO: 1664911 - RNA, 19 nt, Homo sapiens
  misc_RNA (1)...(19): siRNA sense strand
agagagagaugcuggagaa

SEQ ID NO: 1664912 - RNA, 19 nt, Homo sapiens
  misc_RNA (1)...(19): siRNA sense strand
gaugagaaaugaauaugag

SEQ ID NO: 1664913 - RNA, 19 nt, Homo sapiens
  misc_RNA (1)...(19): siRNA sense strand
gaagagaaacugcaagaag

SEQ ID NO: 1664914 - RNA, 19 nt, Homo sapiens
  misc_RNA (1)...(19): siRNA sense strand
gcaguaugguuuacagaau

SEQ ID NO: 1664915 - RNA, 19 nt, Homo sapiens
  misc_RNA (1)...(19): siRNA sense strand
caucuaaacccaucaggua

SEQ ID NO: 1664916 - RNA, 19 nt, Homo sapiens
  misc_RNA (1)...(19): siRNA sense strand
ccugggagcugaagaauca

SEQ ID NO: 1664917 - RNA, 19 nt, Homo sapiens
  misc_RNA (1)...(19): siRNA sense strand
gagcagcuguuggaagaaa

SEQ ID NO: 1664918 - RNA, 19 nt, Homo sapiens
  misc_RNA (1)...(19): siRNA sense strand
gaaacgcacaccuuagaaa

SEQ ID NO: 1664919 - RNA, 19 nt, Homo sapiens
  misc_RNA (1)...(19): siRNA sense strand
gagaagcucaagucuuuaa

SEQ ID NO: 1664920 - RNA, 19 nt, Homo sapiens
  misc_RNA (1)...(19): siRNA sense strand
aaagaacaaucuccugcua

SEQ ID NO: 1664921 - RNA, 19 nt, Homo sapiens
  misc_RNA (1)...(19): siRNA sense strand
gaagauagcauuucuaacc

SEQ ID NO: 1664922 - RNA, 19 nt, Homo sapiens
  misc_RNA (1)...(19): siRNA sense strand
gaacacacagcucuuggaa

SEQ ID NO: 1664923 - RNA, 19 nt, Homo sapiens
  misc_RNA (1)...(19): siRNA sense strand
gcucagcccaaauauguua

SEQ ID NO: 1664924 - RNA, 19 nt, Homo sapiens
  misc_RNA (1)...(19): siRNA sense strand
gaacaggcagugaaggaaa

SEQ ID NO: 1664925 - RNA, 19 nt, Homo sapiens
  misc_RNA (1)...(19): siRNA sense strand
gcucaaggcuagacugaca

SEQ ID NO: 1664926 - RNA, 19 nt, Homo sapiens
  misc_RNA (1)...(19): siRNA sense strand
gaagacaccgugcagaaug

SEQ ID NO: 1664927 - RNA, 19 nt, Homo sapiens
  misc_RNA (1)...(19): siRNA sense strand
gcugguggcuucucaggaa

SEQ ID NO: 1664928 - RNA, 19 nt, Homo sapiens
  misc_RNA (1)...(19): siRNA sense strand
ugaaggcaaugaugcauga

SEQ ID NO: 1664929 - RNA, 19 nt, Homo sapiens
  misc_RNA (1)...(19): siRNA sense strand
uacaggagcugacuaggaa

SEQ ID NO: 1664930 - RNA, 19 nt, Homo sapiens
  misc_RNA (1)...(19): siRNA sense strand
aagauaaagugcgccauua

SEQ ID NO: 1664931 - RNA, 19 nt, Homo sapiens
  misc_RNA (1)...(19): siRNA sense strand
gaacuggaacguuguaaag

SEQ ID NO: 1664932 - RNA, 19 nt, Homo sapiens
  misc_RNA (1)...(19): siRNA sense strand
gcagugagaugcagcaaaa

SEQ ID NO: 1664933 - RNA, 19 nt, Homo sapiens
  misc_RNA (1)...(19): siRNA sense strand
ugaagaugcuugagagaau

SEQ ID NO: 1664934 - RNA, 19 nt, Homo sapiens
  misc_RNA (1)...(19): siRNA sense strand
ggaaagacuagaaauggaa

SEQ ID NO: 1664935 - RNA, 19 nt, Homo sapiens
  misc_RNA (1)...(19): siRNA sense strand
ccuaagaaauguaucugaa

SEQ ID NO: 1664936 - RNA, 19 nt, Homo sapiens
  misc_RNA (1)...(19): siRNA sense strand
gacagcagcuacuccaaga

SEQ ID NO: 1664937 - RNA, 19 nt, Homo sapiens
  misc_RNA (1)...(19): siRNA sense strand
cccaggagcugcugaaaga

SEQ ID NO: 1664938 - RNA, 19 nt, Homo sapiens
  misc_RNA (1)...(19): siRNA sense strand
ugaaggaccuccaggaaca

SEQ ID NO: 1664939 - RNA, 19 nt, Homo sapiens
  misc_RNA (1)...(19): siRNA sense strand
gcaagaaggcacaggagaa

SEQ ID NO: 1664940 - RNA, 19 nt, Homo sapiens
  misc_RNA (1)...(19): siRNA sense strand
caaugaguguagaagauuu

SEQ ID NO: 1664941 - RNA, 19 nt, Homo sapiens
  misc_RNA (1)...(19): siRNA sense strand
gaagaugugagccgagaaa

SEQ ID NO: 1664942 - RNA, 19 nt, Homo sapiens
  misc_RNA (1)...(19): siRNA sense strand
ggcaacaucuccucucuca

SEQ ID NO: 1664943 - RNA, 19 nt, Homo sapiens
  misc_RNA (1)...(19): siRNA sense strand
aagaaccucucaaauagaa

SEQ ID NO: 1664944 - RNA, 19 nt, Homo sapiens
  misc_RNA (1)...(19): siRNA sense strand
agaaagaggaguuaagaaa

SEQ ID NO: 1664945 - RNA, 19 nt, Homo sapiens
  misc_RNA (1)...(19): siRNA sense strand
gaaguauuccauaaucuug

SEQ ID NO: 1664946 - RNA, 19 nt, Homo sapiens
  misc_RNA (1)...(19): siRNA sense strand
gaacaagagaaguuuaauc

SEQ ID NO: 1664947 - RNA, 19 nt, Homo sapiens
  misc_RNA (1)...(19): siRNA sense strand
ggaaaacacuacucuccua

SEQ ID NO: 1664948 - RNA, 19 nt, Homo sapiens
  misc_RNA (1)...(19): siRNA sense strand
gaagaaccucucaaauaga

SEQ ID NO: 1664949 - RNA, 19 nt, Homo sapiens
  misc_RNA (1)...(19): siRNA sense strand
uagaagcucagcccaaaua

SEQ ID NO: 1664950 - RNA, 19 nt, Homo sapiens
  misc_RNA (1)...(19): siRNA sense strand
gaaggucagucagaugaau

SEQ ID NO: 1664951 - RNA, 19 nt, Homo sapiens
  misc_RNA (1)...(19): siRNA sense strand
caucagggcuccauaacca

SEQ ID NO: 1664952 - RNA, 19 nt, Homo sapiens
  misc_RNA (1)...(19): siRNA sense strand
gaacuucugagauaugaau

SEQ ID NO: 1664953 - RNA, 19 nt, Homo sapiens
  misc_RNA (1)...(19): siRNA sense strand
aaucgaaccugauggaaau

SEQ ID NO: 1664954 - RNA, 19 nt, Homo sapiens
  misc_RNA (1)...(19): siRNA sense strand
aaaguuagagccaggguua

SEQ ID NO: 1664955 - RNA, 19 nt, Homo sapiens
  misc_RNA (1)...(19): siRNA sense strand
gaaacacacucuugagaaa

SEQ ID NO: 1664956 - RNA, 19 nt, Homo sapiens
  misc_RNA (1)...(19): siRNA sense strand
gaaauugccugguuacaug

SEQ ID NO: 1664957 - RNA, 19 nt, Homo sapiens
  misc_RNA (1)...(19): siRNA sense strand
gaacgaaacgcacaccuua

SEQ ID NO: 1664958 - RNA, 19 nt, Homo sapiens
  misc_RNA (1)...(19): siRNA sense strand
caagagaaguuuaaucuga

SEQ ID NO: 1664959 - RNA, 19 nt, Homo sapiens
  misc_RNA (1)...(19): siRNA sense strand
ggacauauguugccucaga

SEQ ID NO: 1664960 - RNA, 19 nt, Homo sapiens
  misc_RNA (1)...(19): siRNA sense strand
gaaaauggcuacugaaauu

SEQ ID NO: 1664961 - RNA, 19 nt, Homo sapiens
  misc_RNA (1)...(19): siRNA sense strand
gaaacagaguguaauagaa

SEQ ID NO: 1664962 - RNA, 19 nt, Homo sapiens
  misc_RNA (1)...(19): siRNA sense strand
ggaagucacugaaacauuc

SEQ ID NO: 1664963 - RNA, 19 nt, Homo sapiens
  misc_RNA (1)...(19): siRNA sense strand
gcaagaaguuugugaagau

SEQ ID NO: 1664964 - RNA, 19 nt, Homo sapiens
  misc_RNA (1)...(19): siRNA sense strand
uuaaauagcugugucgaua

SEQ ID NO: 1664965 - RNA, 19 nt, Homo sapiens
  misc_RNA (1)...(19): siRNA sense strand
ggaagaagcuggucuccau

SEQ ID NO: 1664966 - RNA, 19 nt, Homo sapiens
  misc_RNA (1)...(19): siRNA sense strand
uaagugaccuggaagauga

SEQ ID NO: 1664967 - RNA, 19 nt, Homo sapiens
  misc_RNA (1)...(19): siRNA sense strand
gcagagagcucaugaacag

SEQ ID NO: 1664968 - RNA, 19 nt, Homo sapiens
  misc_RNA (1)...(19): siRNA sense strand
uagaagaaccucucaaaua

SEQ ID NO: 1664969 - RNA, 19 nt, Homo sapiens
  misc_RNA (1)...(19): siRNA sense strand
ccgagaagcucaagucuuu

SEQ ID NO: 1664970 - RNA, 19 nt, Homo sapiens
  misc_RNA (1)...(19): siRNA sense strand
gaagagagacugacacaga

SEQ ID NO: 1664971 - RNA, 19 nt, Homo sapiens
  misc_RNA (1)...(19): siRNA sense strand
gaagaacacuuucaagaac

SEQ ID NO: 1664972 - RNA, 19 nt, Homo sapiens
  misc_RNA (1)...(19): siRNA sense strand
gaugaaaucugaccuacga

SEQ ID NO: 1664973 - RNA, 19 nt, Homo sapiens
  misc_RNA (1)...(19): siRNA sense strand
ggaagaauaucgugcacaa

SEQ ID NO: 1664974 - RNA, 19 nt, Homo sapiens
  misc_RNA (1)...(19): siRNA sense strand
gaacccagaugacuugaau

SEQ ID NO: 1664975 - RNA, 19 nt, Homo sapiens
  misc_RNA (1)...(19): siRNA sense strand
gagagagugugaucaguuu

SEQ ID NO: 1664976 - RNA, 19 nt, Homo sapiens
  misc_RNA (1)...(19): siRNA sense strand
ugaaacagcugcacagaug

SEQ ID NO: 1664977 - RNA, 19 nt, Homo sapiens
  misc_RNA (1)...(19): siRNA sense strand
gacuggagcucgaagauaa

SEQ ID NO: 1664978 - RNA, 19 nt, Homo sapiens
  misc_RNA (1)...(19): siRNA sense strand
agucugagcuggaagaaua

SEQ ID NO: 1664979 - RNA, 19 nt, Homo sapiens
  misc_RNA (1)...(19): siRNA sense strand
cagaagaaguugaggcuaa

SEQ ID NO: 1664980 - RNA, 19 nt, Homo sapiens
  misc_RNA (1)...(19): siRNA sense strand
gaaccagacugcucacuag

SEQ ID NO: 1664981 - RNA, 19 nt, Homo sapiens
  misc_RNA (1)...(19): siRNA sense strand
gaacuuaaucaacgucuaa

SEQ ID NO: 1664982 - RNA, 19 nt, Homo sapiens
  misc_RNA (1)...(19): siRNA sense strand
agaagaaccucucaaauag

SEQ ID NO: 1664983 - RNA, 19 nt, Homo sapiens
  misc_RNA (1)...(19): siRNA sense strand
ggagcucucugaaguuaaa

SEQ ID NO: 1664984 - RNA, 19 nt, Homo sapiens
  misc_RNA (1)...(19): siRNA sense strand
ugacacagaugagaaauga

SEQ ID NO: 1664985 - RNA, 19 nt, Homo sapiens
  misc_RNA (1)...(19): siRNA sense strand
gaaacuggaugaagaguac

SEQ ID NO: 1664986 - RNA, 19 nt, Homo sapiens
  misc_RNA (1)...(19): siRNA sense strand
gcggagcucucugaaguua

SEQ ID NO: 1664987 - RNA, 19 nt, Homo sapiens
  misc_RNA (1)...(19): siRNA sense strand
gaaauauacuccagcucaa

SEQ ID NO: 1664988 - RNA, 19 nt, Homo sapiens
  misc_RNA (1)...(19): siRNA sense strand
uagaugaacuccagucuga

SEQ ID NO: 1664989 - RNA, 19 nt, Homo sapiens
  misc_RNA (1)...(19): siRNA sense strand
gaauguggauggagagaug

SEQ ID NO: 1664990 - RNA, 19 nt, Homo sapiens
  misc_RNA (1)...(19): siRNA sense strand
gcacagaaaucuccagacu

SEQ ID NO: 1664991 - RNA, 19 nt, Homo sapiens
  misc_RNA (1)...(19): siRNA sense strand
gaacucaccgucagaagaa

SEQ ID NO: 1664992 - RNA, 19 nt, Homo sapiens
  misc_RNA (1)...(19): siRNA sense strand
guucuaagcuacaacgaaa

SEQ ID NO: 1664993 - RNA, 19 nt, Homo sapiens
  misc_RNA (1)...(19): siRNA sense strand
gggagcagcuguuggaaga

SEQ ID NO: 1664994 - RNA, 19 nt, Homo sapiens
  misc_RNA (1)...(19): siRNA sense strand
gaagagaccaggacugaau

SEQ ID NO: 1664995 - RNA, 19 nt, Homo sapiens
  misc_RNA (1)...(19): siRNA sense strand
aggcagagcuggucauuga

SEQ ID NO: 1664996 - RNA, 19 nt, Homo sapiens
  misc_RNA (1)...(19): siRNA sense strand
ggaaaagguucagaauuua

SEQ ID NO: 1664997 - RNA, 19 nt, Homo sapiens
  misc_RNA (1)...(19): siRNA sense strand
acagaaaucuccagacuuc

SEQ ID NO: 1664998 - RNA, 19 nt, Homo sapiens
  misc_RNA (1)...(19): siRNA sense strand
gacagcagaucgagaaaga

SEQ ID NO: 1664999 - RNA, 19 nt, Homo sapiens
  misc_RNA (1)...(19): siRNA sense strand
ucaaauagaagcccaguuu

SEQ ID NO: 1665000 - RNA, 19 nt, Homo sapiens
  misc_RNA (1)...(19): siRNA sense strand
ggaaacagaguguaauaga

SEQ ID NO: 1665001 - RNA, 19 nt, Homo sapiens
  misc_RNA (1)...(19): siRNA sense strand
ucaggaaacuggaugaaga

SEQ ID NO: 1665002 - RNA, 19 nt, Homo sapiens
  misc_RNA (1)...(19): siRNA sense strand
ugacaagccugguggagaa

SEQ ID NO: 1665003 - RNA, 19 nt, Homo sapiens
  misc_RNA (1)...(19): siRNA sense strand
gcaaaggcaugagaacgaa

SEQ ID NO: 1665004 - RNA, 19 nt, Homo sapiens
  misc_RNA (1)...(19): siRNA sense strand
gaagauaaagugcgccauu

SEQ ID NO: 1665005 - RNA, 19 nt, Homo sapiens
  misc_RNA (1)...(19): siRNA sense strand
ccaaauauaagcuguugua

SEQ ID NO: 1665006 - RNA, 19 nt, Homo sapiens
  misc_RNA (1)...(19): siRNA sense strand
gacuagaaauggaacauga

SEQ ID NO: 1665007 - RNA, 19 nt, Homo sapiens
  misc_RNA (1)...(19): siRNA sense strand
gcaaaugucccggaugaaa

SEQ ID NO: 1665008 - RNA, 19 nt, Homo sapiens
  misc_RNA (1)...(19): siRNA sense strand
ccagaugacuugaaugcuu

SEQ ID NO: 1665009 - RNA, 19 nt, Homo sapiens
  misc_RNA (1)...(19): siRNA sense strand
gaacaauucagacacauca

SEQ ID NO: 1665010 - RNA, 19 nt, Homo sapiens
  misc_RNA (1)...(19): siRNA sense strand
caacaucuccucucucaau

SEQ ID NO: 1665011 - RNA, 19 nt, Homo sapiens
  misc_RNA (1)...(19): siRNA sense strand
agagagagaugcuggagaa

SEQ ID NO: 1665012 - RNA, 19 nt, Homo sapiens
  misc_RNA (1)...(19): siRNA sense strand
gaugagaaaugaauaugag

SEQ ID NO: 1665013 - RNA, 19 nt, Homo sapiens
  misc_RNA (1)...(19): siRNA sense strand
gaagagaaacugcaagaag

SEQ ID NO: 1665014 - RNA, 19 nt, Homo sapiens
  misc_RNA (1)...(19): siRNA sense strand
gcaguaugguuuacagaau

SEQ ID NO: 1665015 - RNA, 19 nt, Homo sapiens
  misc_RNA (1)...(19): siRNA sense strand
caucuaaacccaucaggua

SEQ ID NO: 1665016 - RNA, 19 nt, Homo sapiens
  misc_RNA (1)...(19): siRNA sense strand
ccugggagcugaagaauca

SEQ ID NO: 1665017 - RNA, 19 nt, Homo sapiens
  misc_RNA (1)...(19): siRNA sense strand
gagcagcuguuggaagaaa

SEQ ID NO: 1665018 - RNA, 19 nt, Homo sapiens
  misc_RNA (1)...(19): siRNA sense strand
gaaacgcacaccuuagaaa

SEQ ID NO: 1665019 - RNA, 19 nt, Homo sapiens
  misc_RNA (1)...(19): siRNA sense strand
gagaagcucaagucuuuaa

SEQ ID NO: 1665020 - RNA, 19 nt, Homo sapiens
  misc_RNA (1)...(19): siRNA sense strand
aaagaacaaucuccugcua

SEQ ID NO: 1665021 - RNA, 19 nt, Homo sapiens
  misc_RNA (1)...(19): siRNA sense strand
gaagauagcauuucuaacc

SEQ ID NO: 1665022 - RNA, 19 nt, Homo sapiens
  misc_RNA (1)...(19): siRNA sense strand
gaacacacagcucuuggaa

SEQ ID NO: 1665023 - RNA, 19 nt, Homo sapiens
  misc_RNA (1)...(19): siRNA sense strand
gcucagcccaaauauguua

SEQ ID NO: 1665024 - RNA, 19 nt, Homo sapiens
  misc_RNA (1)...(19): siRNA sense strand
gaacaggcagugaaggaaa

SEQ ID NO: 1665025 - RNA, 19 nt, Homo sapiens
  misc_RNA (1)...(19): siRNA sense strand
gcucaaggcuagacugaca

SEQ ID NO: 1665026 - RNA, 19 nt, Homo sapiens
  misc_RNA (1)...(19): siRNA sense strand
gaagacaccgugcagaaug

SEQ ID NO: 1665027 - RNA, 19 nt, Homo sapiens
  misc_RNA (1)...(19): siRNA sense strand
gcugguggcuucucaggaa

SEQ ID NO: 1665028 - RNA, 19 nt, Homo sapiens
  misc_RNA (1)...(19): siRNA sense strand
ugaaggcaaugaugcauga

SEQ ID NO: 1665029 - RNA, 19 nt, Homo sapiens
  misc_RNA (1)...(19): siRNA sense strand
uacaggagcugacuaggaa

SEQ ID NO: 1665030 - RNA, 19 nt, Homo sapiens
  misc_RNA (1)...(19): siRNA sense strand
aagauaaagugcgccauua

SEQ ID NO: 1665031 - RNA, 19 nt, Homo sapiens
  misc_RNA (1)...(19): siRNA sense strand
gaacuggaacguuguaaag

SEQ ID NO: 1665032 - RNA, 19 nt, Homo sapiens
  misc_RNA (1)...(19): siRNA sense strand
gcagugagaugcagcaaaa

SEQ ID NO: 1665033 - RNA, 19 nt, Homo sapiens
  misc_RNA (1)...(19): siRNA sense strand
ugaagaugcuugagagaau

SEQ ID NO: 1665034 - RNA, 19 nt, Homo sapiens
  misc_RNA (1)...(19): siRNA sense strand
ggaaagacuagaaauggaa

SEQ ID NO: 1665035 - RNA, 19 nt, Homo sapiens
  misc_RNA (1)...(19): siRNA sense strand
ccuaagaaauguaucugaa

SEQ ID NO: 1665036 - RNA, 19 nt, Homo sapiens
  misc_RNA (1)...(19): siRNA sense strand
gacagcagcuacuccaaga

SEQ ID NO: 1665037 - RNA, 19 nt, Homo sapiens
  misc_RNA (1)...(19): siRNA sense strand
cccaggagcugcugaaaga

SEQ ID NO: 1665038 - RNA, 19 nt, Homo sapiens
  misc_RNA (1)...(19): siRNA sense strand
ugaaggaccuccaggaaca

SEQ ID NO: 1665039 - RNA, 19 nt, Homo sapiens
  misc_RNA (1)...(19): siRNA sense strand
gcaagaaggcacaggagaa

SEQ ID NO: 1665040 - RNA, 19 nt, Homo sapiens
  misc_RNA (1)...(19): siRNA sense strand
caaugaguguagaagauuu

SEQ ID NO: 1665041 - RNA, 19 nt, Homo sapiens
  misc_RNA (1)...(19): siRNA sense strand
gaagaugugagccgagaaa

SEQ ID NO: 1665042 - RNA, 19 nt, Homo sapiens
  misc_RNA (1)...(19): siRNA sense strand
ggcaacaucuccucucuca

SEQ ID NO: 1665043 - RNA, 19 nt, Homo sapiens
  misc_RNA (1)...(19): siRNA sense strand
aagaaccucucaaauagaa

SEQ ID NO: 1665044 - RNA, 19 nt, Homo sapiens
  misc_RNA (1)...(19): siRNA sense strand
agaaagaggaguuaagaaa

SEQ ID NO: 1665045 - RNA, 19 nt, Homo sapiens
  misc_RNA (1)...(19): siRNA sense strand
gaaguauuccauaaucuug

SEQ ID NO: 1665046 - RNA, 19 nt, Homo sapiens
  misc_RNA (1)...(19): siRNA sense strand
gaacaagagaaguuuaauc

SEQ ID NO: 1665047 - RNA, 19 nt, Homo sapiens
  misc_RNA (1)...(19): siRNA sense strand
ggaaaacacuacucuccua

SEQ ID NO: 1665048 - RNA, 19 nt, Homo sapiens
  misc_RNA (1)...(19): siRNA sense strand
gaagaaccucucaaauaga

SEQ ID NO: 1665049 - RNA, 19 nt, Homo sapiens
  misc_RNA (1)...(19): siRNA sense strand
uagaagcucagcccaaaua

SEQ ID NO: 1665050 - RNA, 19 nt, Homo sapiens
  misc_RNA (1)...(19): siRNA sense strand
gaaggucagucagaugaau

SEQ ID NO: 1665051 - RNA, 19 nt, Homo sapiens
  misc_RNA (1)...(19): siRNA sense strand
caucagggcuccauaacca

SEQ ID NO: 1665052 - RNA, 19 nt, Homo sapiens
  misc_RNA (1)...(19): siRNA sense strand
gaacuucugagauaugaau

SEQ ID NO: 1665053 - RNA, 19 nt, Homo sapiens
  misc_RNA (1)...(19): siRNA sense strand
aaucgaaccugauggaaau

SEQ ID NO: 1665054 - RNA, 19 nt, Homo sapiens
  misc_RNA (1)...(19): siRNA sense strand
aaaguuagagccaggguua

SEQ ID NO: 1665055 - RNA, 19 nt, Homo sapiens
  misc_RNA (1)...(19): siRNA sense strand
gaaacacacucuugagaaa

SEQ ID NO: 1665056 - RNA, 19 nt, Homo sapiens
  misc_RNA (1)...(19): siRNA sense strand
gaaauugccugguuacaug

SEQ ID NO: 1665057 - RNA, 19 nt, Homo sapiens
  misc_RNA (1)...(19): siRNA sense strand
gaacgaaacgcacaccuua

SEQ ID NO: 1665058 - RNA, 19 nt, Homo sapiens
  misc_RNA (1)...(19): siRNA sense strand
caagagaaguuuaaucuga

SEQ ID NO: 1665059 - RNA, 19 nt, Homo sapiens
  misc_RNA (1)...(19): siRNA sense strand
ggacauauguugccucaga

SEQ ID NO: 1665060 - RNA, 19 nt, Homo sapiens
  misc_RNA (1)...(19): siRNA sense strand
gaaaauggcuacugaaauu

SEQ ID NO: 1665061 - RNA, 19 nt, Homo sapiens
  misc_RNA (1)...(19): siRNA sense strand
gaaacagaguguaauagaa

SEQ ID NO: 1665062 - RNA, 19 nt, Homo sapiens
  misc_RNA (1)...(19): siRNA sense strand
ggaagucacugaaacauuc

SEQ ID NO: 1665063 - RNA, 19 nt, Homo sapiens
  misc_RNA (1)...(19): siRNA sense strand
gcaagaaguuugugaagau

SEQ ID NO: 1665064 - RNA, 19 nt, Homo sapiens
  misc_RNA (1)...(19): siRNA sense strand
uuaaauagcugugucgaua

SEQ ID NO: 1665065 - RNA, 19 nt, Homo sapiens
  misc_RNA (1)...(19): siRNA sense strand
ggaagaagcuggucuccau

SEQ ID NO: 1665066 - RNA, 19 nt, Homo sapiens
  misc_RNA (1)...(19): siRNA sense strand
uaagugaccuggaagauga

SEQ ID NO: 1665067 - RNA, 19 nt, Homo sapiens
  misc_RNA (1)...(19): siRNA sense strand
gcagagagcucaugaacag

SEQ ID NO: 1665068 - RNA, 19 nt, Homo sapiens
  misc_RNA (1)...(19): siRNA sense strand
uagaagaaccucucaaaua

SEQ ID NO: 1665069 - RNA, 19 nt, Homo sapiens
  misc_RNA (1)...(19): siRNA sense strand
ccgagaagcucaagucuuu

SEQ ID NO: 1665070 - RNA, 19 nt, Homo sapiens
  misc_RNA (1)...(19): siRNA sense strand
gaagagagacugacacaga

SEQ ID NO: 1665071 - RNA, 19 nt, Homo sapiens
  misc_RNA (1)...(19): siRNA sense strand
gaagaacacuuucaagaac

SEQ ID NO: 1665072 - RNA, 19 nt, Homo sapiens
  misc_RNA (1)...(19): siRNA sense strand
gaugaaaucugaccuacga

SEQ ID NO: 1665073 - RNA, 19 nt, Homo sapiens
  misc_RNA (1)...(19): siRNA sense strand
ggaagaauaucgugcacaa

SEQ ID NO: 1665074 - RNA, 19 nt, Homo sapiens
  misc_RNA (1)...(19): siRNA sense strand
gaacccagaugacuugaau

SEQ ID NO: 1665075 - RNA, 19 nt, Homo sapiens
  misc_RNA (1)...(19): siRNA sense strand
gagagagugugaucaguuu

SEQ ID NO: 1665076 - RNA, 19 nt, Homo sapiens
  misc_RNA (1)...(19): siRNA sense strand
ugaaacagcugcacagaug

SEQ ID NO: 1665077 - RNA, 19 nt, Homo sapiens
  misc_RNA (1)...(19): siRNA sense strand
gacuggagcucgaagauaa

SEQ ID NO: 1665078 - RNA, 19 nt, Homo sapiens
  misc_RNA (1)...(19): siRNA sense strand
agucugagcuggaagaaua

SEQ ID NO: 1665079 - RNA, 19 nt, Homo sapiens
  misc_RNA (1)...(19): siRNA sense strand
cagaagaaguugaggcuaa

SEQ ID NO: 1665080 - RNA, 19 nt, Homo sapiens
  misc_RNA (1)...(19): siRNA sense strand
gaaccagacugcucacuag

SEQ ID NO: 1665081 - RNA, 19 nt, Homo sapiens
  misc_RNA (1)...(19): siRNA sense strand
gaacuuaaucaacgucuaa

SEQ ID NO: 1665082 - RNA, 19 nt, Homo sapiens
  misc_RNA (1)...(19): siRNA sense strand
agaagaaccucucaaauag

SEQ ID NO: 1665083 - RNA, 19 nt, Homo sapiens
  misc_RNA (1)...(19): siRNA sense strand
ggagcucucugaaguuaaa

SEQ ID NO: 1665084 - RNA, 19 nt, Homo sapiens
  misc_RNA (1)...(19): siRNA sense strand
ugacacagaugagaaauga

SEQ ID NO: 1665085 - RNA, 19 nt, Homo sapiens
  misc_RNA (1)...(19): siRNA sense strand
gaaacuggaugaagaguac

SEQ ID NO: 1665086 - RNA, 19 nt, Homo sapiens
  misc_RNA (1)...(19): siRNA sense strand
gcggagcucucugaaguua

SEQ ID NO: 1665087 - RNA, 19 nt, Homo sapiens
  misc_RNA (1)...(19): siRNA sense strand
gaaauauacuccagcucaa

SEQ ID NO: 1665088 - RNA, 19 nt, Homo sapiens
  misc_RNA (1)...(19): siRNA sense strand
uagaugaacuccagucuga

SEQ ID NO: 1665089 - RNA, 19 nt, Homo sapiens
  misc_RNA (1)...(19): siRNA sense strand
gaauguggauggagagaug

SEQ ID NO: 1665090 - RNA, 19 nt, Homo sapiens
  misc_RNA (1)...(19): siRNA sense strand
gcacagaaaucuccagacu

SEQ ID NO: 1665091 - RNA, 19 nt, Homo sapiens
  misc_RNA (1)...(19): siRNA sense strand
gaacucaccgucagaagaa

SEQ ID NO: 1665092 - RNA, 19 nt, Homo sapiens
  misc_RNA (1)...(19): siRNA sense strand
guucuaagcuacaacgaaa

SEQ ID NO: 1665093 - RNA, 19 nt, Homo sapiens
  misc_RNA (1)...(19): siRNA sense strand
gggagcagcuguuggaaga

SEQ ID NO: 1665094 - RNA, 19 nt, Homo sapiens
  misc_RNA (1)...(19): siRNA sense strand
gaagagaccaggacugaau

SEQ ID NO: 1665095 - RNA, 19 nt, Homo sapiens
  misc_RNA (1)...(19): siRNA sense strand
aggcagagcuggucauuga

SEQ ID NO: 1665096 - RNA, 19 nt, Homo sapiens
  misc_RNA (1)...(19): siRNA sense strand
ggaaaagguucagaauuua

SEQ ID NO: 1665097 - RNA, 19 nt, Homo sapiens
  misc_RNA (1)...(19): siRNA sense strand
acagaaaucuccagacuuc

SEQ ID NO: 1665098 - RNA, 19 nt, Homo sapiens
  misc_RNA (1)...(19): siRNA sense strand
gacagcagaucgagaaaga

SEQ ID NO: 1665099 - RNA, 19 nt, Homo sapiens
  misc_RNA (1)...(19): siRNA sense strand
ucaaauagaagcccaguuu

SEQ ID NO: 1665100 - RNA, 19 nt, Homo sapiens
  misc_RNA (1)...(19): siRNA sense strand
ggaaacagaguguaauaga

SEQ ID NO: 1665101 - RNA, 19 nt, Homo sapiens
  misc_RNA (1)...(19): siRNA sense strand
ucaggaaacuggaugaaga

SEQ ID NO: 1665102 - RNA, 19 nt, Homo sapiens
  misc_RNA (1)...(19): siRNA sense strand
ugacaagccugguggagaa

SEQ ID NO: 1665103 - RNA, 19 nt, Homo sapiens
  misc_RNA (1)...(19): siRNA sense strand
gcaaaggcaugagaacgaa

SEQ ID NO: 1665104 - RNA, 19 nt, Homo sapiens
  misc_RNA (1)...(19): siRNA sense strand
gaagauaaagugcgccauu

SEQ ID NO: 1665105 - RNA, 19 nt, Homo sapiens
  misc_RNA (1)...(19): siRNA sense strand
ccaaauauaagcuguugua

SEQ ID NO: 1665106 - RNA, 19 nt, Homo sapiens
  misc_RNA (1)...(19): siRNA sense strand
gacuagaaauggaacauga

SEQ ID NO: 1665107 - RNA, 19 nt, Homo sapiens
  misc_RNA (1)...(19): siRNA sense strand
gcaaaugucccggaugaaa

SEQ ID NO: 1665108 - RNA, 19 nt, Homo sapiens
  misc_RNA (1)...(19): siRNA sense strand
ccagaugacuugaaugcuu

SEQ ID NO: 1665109 - RNA, 19 nt, Homo sapiens
  misc_RNA (1)...(19): siRNA sense strand
gaacaauucagacacauca

SEQ ID NO: 1665110 - RNA, 19 nt, Homo sapiens
  misc_RNA (1)...(19): siRNA sense strand
caacaucuccucucucaau

SEQ ID NO: 1665111 - RNA, 19 nt, Homo sapiens
  misc_RNA (1)...(19): siRNA sense strand
agagagagaugcuggagaa

SEQ ID NO: 1665112 - RNA, 19 nt, Homo sapiens
  misc_RNA (1)...(19): siRNA sense strand
gaugagaaaugaauaugag

SEQ ID NO: 1665113 - RNA, 19 nt, Homo sapiens
  misc_RNA (1)...(19): siRNA sense strand
gaagagaaacugcaagaag

SEQ ID NO: 1665114 - RNA, 19 nt, Homo sapiens
  misc_RNA (1)...(19): siRNA sense strand
gcaguaugguuuacagaau

SEQ ID NO: 1665115 - RNA, 19 nt, Homo sapiens
  misc_RNA (1)...(19): siRNA sense strand
caucuaaacccaucaggua

SEQ ID NO: 1665116 - RNA, 19 nt, Homo sapiens
  misc_RNA (1)...(19): siRNA sense strand
ccugggagcugaagaauca

SEQ ID NO: 1665117 - RNA, 19 nt, Homo sapiens
  misc_RNA (1)...(19): siRNA sense strand
gagcagcuguuggaagaaa

SEQ ID NO: 1665118 - RNA, 19 nt, Homo sapiens
  misc_RNA (1)...(19): siRNA sense strand
gaaacgcacaccuuagaaa

SEQ ID NO: 1665119 - RNA, 19 nt, Homo sapiens
  misc_RNA (1)...(19): siRNA sense strand
gagaagcucaagucuuuaa

SEQ ID NO: 1665120 - RNA, 19 nt, Homo sapiens
  misc_RNA (1)...(19): siRNA sense strand
aaagaacaaucuccugcua

SEQ ID NO: 1665121 - RNA, 19 nt, Homo sapiens
  misc_RNA (1)...(19): siRNA sense strand
gaagauagcauuucuaacc

SEQ ID NO: 1665122 - RNA, 19 nt, Homo sapiens
  misc_RNA (1)...(19): siRNA sense strand
gaacacacagcucuuggaa

SEQ ID NO: 1665123 - RNA, 19 nt, Homo sapiens
  misc_RNA (1)...(19): siRNA sense strand
gcucagcccaaauauguua

SEQ ID NO: 1665124 - RNA, 19 nt, Homo sapiens
  misc_RNA (1)...(19): siRNA sense strand
gaacaggcagugaaggaaa

SEQ ID NO: 1665125 - RNA, 19 nt, Homo sapiens
  misc_RNA (1)...(19): siRNA sense strand
gcucaaggcuagacugaca

SEQ ID NO: 1665126 - RNA, 19 nt, Homo sapiens
  misc_RNA (1)...(19): siRNA sense strand
gaagacaccgugcagaaug

SEQ ID NO: 1665127 - RNA, 19 nt, Homo sapiens
  misc_RNA (1)...(19): siRNA sense strand
gcugguggcuucucaggaa

SEQ ID NO: 1665128 - RNA, 19 nt, Homo sapiens
  misc_RNA (1)...(19): siRNA sense strand
ugaaggcaaugaugcauga

SEQ ID NO: 1665129 - RNA, 19 nt, Homo sapiens
  misc_RNA (1)...(19): siRNA sense strand
uacaggagcugacuaggaa

SEQ ID NO: 1665130 - RNA, 19 nt, Homo sapiens
  misc_RNA (1)...(19): siRNA sense strand
aagauaaagugcgccauua

SEQ ID NO: 1665131 - RNA, 19 nt, Homo sapiens
  misc_RNA (1)...(19): siRNA sense strand
gaacuggaacguuguaaag

SEQ ID NO: 1665132 - RNA, 19 nt, Homo sapiens
  misc_RNA (1)...(19): siRNA sense strand
gcagugagaugcagcaaaa

SEQ ID NO: 1665133 - RNA, 19 nt, Homo sapiens
  misc_RNA (1)...(19): siRNA sense strand
ugaagaugcuugagagaau

SEQ ID NO: 1665134 - RNA, 19 nt, Homo sapiens
  misc_RNA (1)...(19): siRNA sense strand
ggaaagacuagaaauggaa

SEQ ID NO: 1665135 - RNA, 19 nt, Homo sapiens
  misc_RNA (1)...(19): siRNA sense strand
ccuaagaaauguaucugaa

SEQ ID NO: 1665136 - RNA, 19 nt, Homo sapiens
  misc_RNA (1)...(19): siRNA sense strand
gacagcagcuacuccaaga

SEQ ID NO: 1665137 - RNA, 19 nt, Homo sapiens
  misc_RNA (1)...(19): siRNA sense strand
cccaggagcugcugaaaga

SEQ ID NO: 1665138 - RNA, 19 nt, Homo sapiens
  misc_RNA (1)...(19): siRNA sense strand
ugaaggaccuccaggaaca

SEQ ID NO: 1665139 - RNA, 19 nt, Homo sapiens
  misc_RNA (1)...(19): siRNA sense strand
gcaagaaggcacaggagaa

SEQ ID NO: 1665140 - RNA, 19 nt, Homo sapiens
  misc_RNA (1)...(19): siRNA sense strand
caaugaguguagaagauuu

SEQ ID NO: 1665141 - RNA, 19 nt, Homo sapiens
  misc_RNA (1)...(19): siRNA sense strand
gaagaugugagccgagaaa

SEQ ID NO: 1665142 - RNA, 19 nt, Homo sapiens
  misc_RNA (1)...(19): siRNA sense strand
ggcaacaucuccucucuca

SEQ ID NO: 1665143 - RNA, 19 nt, Homo sapiens
  misc_RNA (1)...(19): siRNA sense strand
aagaaccucucaaauagaa

SEQ ID NO: 1665144 - RNA, 19 nt, Homo sapiens
  misc_RNA (1)...(19): siRNA sense strand
agaaagaggaguuaagaaa

SEQ ID NO: 1665145 - RNA, 19 nt, Homo sapiens
  misc_RNA (1)...(19): siRNA sense strand
gaaguauuccauaaucuug

SEQ ID NO: 1665146 - RNA, 19 nt, Homo sapiens
  misc_RNA (1)...(19): siRNA sense strand
gaacaagagaaguuuaauc

SEQ ID NO: 1665147 - RNA, 19 nt, Homo sapiens
  misc_RNA (1)...(19): siRNA sense strand
ggaaaacacuacucuccua

SEQ ID NO: 1665148 - RNA, 19 nt, Homo sapiens
  misc_RNA (1)...(19): siRNA sense strand
gaagaaccucucaaauaga

SEQ ID NO: 1665149 - RNA, 19 nt, Homo sapiens
  misc_RNA (1)...(19): siRNA sense strand
uagaagcucagcccaaaua

SEQ ID NO: 1665150 - RNA, 19 nt, Homo sapiens
  misc_RNA (1)...(19): siRNA sense strand
gaaggucagucagaugaau

SEQ ID NO: 1665151 - RNA, 19 nt, Homo sapiens
  misc_RNA (1)...(19): siRNA sense strand
caucagggcuccauaacca

SEQ ID NO: 1665152 - RNA, 19 nt, Homo sapiens
  misc_RNA (1)...(19): siRNA sense strand
gaacuucugagauaugaau

SEQ ID NO: 1665153 - RNA, 19 nt, Homo sapiens
  misc_RNA (1)...(19): siRNA sense strand
aaucgaaccugauggaaau

SEQ ID NO: 1665154 - RNA, 19 nt, Homo sapiens
  misc_RNA (1)...(19): siRNA sense strand
aaaguuagagccaggguua

SEQ ID NO: 1665155 - RNA, 19 nt, Homo sapiens
  misc_RNA (1)...(19): siRNA sense strand
gaaacacacucuugagaaa

SEQ ID NO: 1665156 - RNA, 19 nt, Homo sapiens
  misc_RNA (1)...(19): siRNA sense strand
gaaauugccugguuacaug

SEQ ID NO: 1665157 - RNA, 19 nt, Homo sapiens
  misc_RNA (1)...(19): siRNA sense strand
gaacgaaacgcacaccuua

SEQ ID NO: 1665158 - RNA, 19 nt, Homo sapiens
  misc_RNA (1)...(19): siRNA sense strand
caagagaaguuuaaucuga

SEQ ID NO: 1665159 - RNA, 19 nt, Homo sapiens
  misc_RNA (1)...(19): siRNA sense strand
ggacauauguugccucaga

SEQ ID NO: 1665160 - RNA, 19 nt, Homo sapiens
  misc_RNA (1)...(19): siRNA sense strand
gaaaauggcuacugaaauu

SEQ ID NO: 1665161 - RNA, 19 nt, Homo sapiens
  misc_RNA (1)...(19): siRNA sense strand
gaaacagaguguaauagaa

SEQ ID NO: 1665162 - RNA, 19 nt, Homo sapiens
  misc_RNA (1)...(19): siRNA sense strand
ggaagucacugaaacauuc

SEQ ID NO: 1665163 - RNA, 19 nt, Homo sapiens
  misc_RNA (1)...(19): siRNA sense strand
gcaagaaguuugugaagau

SEQ ID NO: 1665164 - RNA, 19 nt, Homo sapiens
  misc_RNA (1)...(19): siRNA sense strand
uuaaauagcugugucgaua

SEQ ID NO: 1665165 - RNA, 19 nt, Homo sapiens
  misc_RNA (1)...(19): siRNA sense strand
ggaagaagcuggucuccau

SEQ ID NO: 1665166 - RNA, 19 nt, Homo sapiens
  misc_RNA (1)...(19): siRNA sense strand
uaagugaccuggaagauga

SEQ ID NO: 1665167 - RNA, 19 nt, Homo sapiens
  misc_RNA (1)...(19): siRNA sense strand
gcagagagcucaugaacag

SEQ ID NO: 1665168 - RNA, 19 nt, Homo sapiens
  misc_RNA (1)...(19): siRNA sense strand
uagaagaaccucucaaaua

SEQ ID NO: 1665169 - RNA, 19 nt, Homo sapiens
  misc_RNA (1)...(19): siRNA sense strand
ccgagaagcucaagucuuu

SEQ ID NO: 1665170 - RNA, 19 nt, Homo sapiens
  misc_RNA (1)...(19): siRNA sense strand
gaagagagacugacacaga

SEQ ID NO: 1665171 - RNA, 19 nt, Homo sapiens
  misc_RNA (1)...(19): siRNA sense strand
gaagaacacuuucaagaac

SEQ ID NO: 1665172 - RNA, 19 nt, Homo sapiens
  misc_RNA (1)...(19): siRNA sense strand
gaugaaaucugaccuacga

SEQ ID NO: 1665173 - RNA, 19 nt, Homo sapiens
  misc_RNA (1)...(19): siRNA sense strand
ggaagaauaucgugcacaa

SEQ ID NO: 1665174 - RNA, 19 nt, Homo sapiens
  misc_RNA (1)...(19): siRNA sense strand
gaacccagaugacuugaau

SEQ ID NO: 1665175 - RNA, 19 nt, Homo sapiens
  misc_RNA (1)...(19): siRNA sense strand
gagagagugugaucaguuu

SEQ ID NO: 1665176 - RNA, 19 nt, Homo sapiens
  misc_RNA (1)...(19): siRNA sense strand
ugaaacagcugcacagaug

SEQ ID NO: 1665177 - RNA, 19 nt, Homo sapiens
  misc_RNA (1)...(19): siRNA sense strand
gacuggagcucgaagauaa

SEQ ID NO: 1665178 - RNA, 19 nt, Homo sapiens
  misc_RNA (1)...(19): siRNA sense strand
agucugagcuggaagaaua

SEQ ID NO: 1665179 - RNA, 19 nt, Homo sapiens
  misc_RNA (1)...(19): siRNA sense strand
cagaagaaguugaggcuaa

SEQ ID NO: 1665180 - RNA, 19 nt, Homo sapiens
  misc_RNA (1)...(19): siRNA sense strand
gaaccagacugcucacuag

SEQ ID NO: 1665181 - RNA, 19 nt, Homo sapiens
  misc_RNA (1)...(19): siRNA sense strand
gaacuuaaucaacgucuaa

SEQ ID NO: 1665182 - RNA, 19 nt, Homo sapiens
  misc_RNA (1)...(19): siRNA sense strand
agaagaaccucucaaauag

SEQ ID NO: 1665183 - RNA, 19 nt, Homo sapiens
  misc_RNA (1)...(19): siRNA sense strand
ggagcucucugaaguuaaa

SEQ ID NO: 1665184 - RNA, 19 nt, Homo sapiens
  misc_RNA (1)...(19): siRNA sense strand
ugacacagaugagaaauga

SEQ ID NO: 1665185 - RNA, 19 nt, Homo sapiens
  misc_RNA (1)...(19): siRNA sense strand
gaaacuggaugaagaguac

SEQ ID NO: 1665186 - RNA, 19 nt, Homo sapiens
  misc_RNA (1)...(19): siRNA sense strand
gcggagcucucugaaguua

SEQ ID NO: 1665187 - RNA, 19 nt, Homo sapiens
  misc_RNA (1)...(19): siRNA sense strand
gaaauauacuccagcucaa

SEQ ID NO: 1665188 - RNA, 19 nt, Homo sapiens
  misc_RNA (1)...(19): siRNA sense strand
uagaugaacuccagucuga

SEQ ID NO: 1665189 - RNA, 19 nt, Homo sapiens
  misc_RNA (1)...(19): siRNA sense strand
gaauguggauggagagaug

SEQ ID NO: 1665190 - RNA, 19 nt, Homo sapiens
  misc_RNA (1)...(19): siRNA sense strand
gcacagaaaucuccagacu

SEQ ID NO: 1665191 - RNA, 19 nt, Homo sapiens
  misc_RNA (1)...(19): siRNA sense strand
gaacucaccgucagaagaa

SEQ ID NO: 1665192 - RNA, 19 nt, Homo sapiens
  misc_RNA (1)...(19): siRNA sense strand
guucuaagcuacaacgaaa

SEQ ID NO: 1665193 - RNA, 19 nt, Homo sapiens
  misc_RNA (1)...(19): siRNA sense strand
gggagcagcuguuggaaga

SEQ ID NO: 1665194 - RNA, 19 nt, Homo sapiens
  misc_RNA (1)...(19): siRNA sense strand
gaagagaccaggacugaau

SEQ ID NO: 1665195 - RNA, 19 nt, Homo sapiens
  misc_RNA (1)...(19): siRNA sense strand
aggcagagcuggucauuga

SEQ ID NO: 1665196 - RNA, 19 nt, Homo sapiens
  misc_RNA (1)...(19): siRNA sense strand
ggaaaagguucagaauuua

SEQ ID NO: 1665197 - RNA, 19 nt, Homo sapiens
  misc_RNA (1)...(19): siRNA sense strand
acagaaaucuccagacuuc

SEQ ID NO: 1665198 - RNA, 19 nt, Homo sapiens
  misc_RNA (1)...(19): siRNA sense strand
gacagcagaucgagaaaga

SEQ ID NO: 1665199 - RNA, 19 nt, Homo sapiens
  misc_RNA (1)...(19): siRNA sense strand
ucaaauagaagcccaguuu

SEQ ID NO: 1665200 - RNA, 19 nt, Homo sapiens
  misc_RNA (1)...(19): siRNA sense strand
ggaaacagaguguaauaga

SEQ ID NO: 1665201 - RNA, 19 nt, Homo sapiens
  misc_RNA (1)...(19): siRNA sense strand
ucaggaaacuggaugaaga

SEQ ID NO: 1665202 - RNA, 19 nt, Homo sapiens
  misc_RNA (1)...(19): siRNA sense strand
ugacaagccugguggagaa

SEQ ID NO: 1665203 - RNA, 19 nt, Homo sapiens
  misc_RNA (1)...(19): siRNA sense strand
gcaaaggcaugagaacgaa

SEQ ID NO: 1665204 - RNA, 19 nt, Homo sapiens
  misc_RNA (1)...(19): siRNA sense strand
gaagauaaagugcgccauu

SEQ ID NO: 1665205 - RNA, 19 nt, Homo sapiens
  misc_RNA (1)...(19): siRNA sense strand
ccaaauauaagcuguugua

SEQ ID NO: 1665206 - RNA, 19 nt, Homo sapiens
  misc_RNA (1)...(19): siRNA sense strand
gacuagaaauggaacauga

SEQ ID NO: 1665207 - RNA, 19 nt, Homo sapiens
  misc_RNA (1)...(19): siRNA sense strand
gcaaaugucccggaugaaa

SEQ ID NO: 1665208 - RNA, 19 nt, Homo sapiens
  misc_RNA (1)...(19): siRNA sense strand
ccagaugacuugaaugcuu

SEQ ID NO: 1665209 - RNA, 19 nt, Homo sapiens
  misc_RNA (1)...(19): siRNA sense strand
gaacaauucagacacauca

SEQ ID NO: 1665210 - RNA, 19 nt, Homo sapiens
  misc_RNA (1)...(19): siRNA sense strand
caacaucuccucucucaau

SEQ ID NO: 1665211 - RNA, 19 nt, Homo sapiens
  misc_RNA (1)...(19): siRNA sense strand
agagagagaugcuggagaa

SEQ ID NO: 1665212 - RNA, 19 nt, Homo sapiens
  misc_RNA (1)...(19): siRNA sense strand
gaugagaaaugaauaugag

SEQ ID NO: 1665213 - RNA, 19 nt, Homo sapiens
  misc_RNA (1)...(19): siRNA sense strand
gaagagaaacugcaagaag

SEQ ID NO: 1665214 - RNA, 19 nt, Homo sapiens
  misc_RNA (1)...(19): siRNA sense strand
gcaguaugguuuacagaau

SEQ ID NO: 1665215 - RNA, 19 nt, Homo sapiens
  misc_RNA (1)...(19): siRNA sense strand
caucuaaacccaucaggua

SEQ ID NO: 1665216 - RNA, 19 nt, Homo sapiens
  misc_RNA (1)...(19): siRNA sense strand
ccugggagcugaagaauca

SEQ ID NO: 1665217 - RNA, 19 nt, Homo sapiens
  misc_RNA (1)...(19): siRNA sense strand
gagcagcuguuggaagaaa

SEQ ID NO: 1665218 - RNA, 19 nt, Homo sapiens
  misc_RNA (1)...(19): siRNA sense strand
gaaacgcacaccuuagaaa

SEQ ID NO: 1665219 - RNA, 19 nt, Homo sapiens
  misc_RNA (1)...(19): siRNA sense strand
gagaagcucaagucuuuaa

SEQ ID NO: 1665220 - RNA, 19 nt, Homo sapiens
  misc_RNA (1)...(19): siRNA sense strand
aaagaacaaucuccugcua

SEQ ID NO: 1665221 - RNA, 19 nt, Homo sapiens
  misc_RNA (1)...(19): siRNA sense strand
gaagauagcauuucuaacc

SEQ ID NO: 1665222 - RNA, 19 nt, Homo sapiens
  misc_RNA (1)...(19): siRNA sense strand
gaacacacagcucuuggaa

SEQ ID NO: 1665223 - RNA, 19 nt, Homo sapiens
  misc_RNA (1)...(19): siRNA sense strand
gcucagcccaaauauguua

SEQ ID NO: 1665224 - RNA, 19 nt, Homo sapiens
  misc_RNA (1)...(19): siRNA sense strand
gaacaggcagugaaggaaa

SEQ ID NO: 1665225 - RNA, 19 nt, Homo sapiens
  misc_RNA (1)...(19): siRNA sense strand
gcucaaggcuagacugaca

SEQ ID NO: 1665226 - RNA, 19 nt, Homo sapiens
  misc_RNA (1)...(19): siRNA sense strand
gaagacaccgugcagaaug

SEQ ID NO: 1665227 - RNA, 19 nt, Homo sapiens
  misc_RNA (1)...(19): siRNA sense strand
gcugguggcuucucaggaa

SEQ ID NO: 1665228 - RNA, 19 nt, Homo sapiens
  misc_RNA (1)...(19): siRNA sense strand
ugaaggcaaugaugcauga

SEQ ID NO: 1665229 - RNA, 19 nt, Homo sapiens
  misc_RNA (1)...(19): siRNA sense strand
uacaggagcugacuaggaa

SEQ ID NO: 1665230 - RNA, 19 nt, Homo sapiens
  misc_RNA (1)...(19): siRNA sense strand
aagauaaagugcgccauua

SEQ ID NO: 1665231 - RNA, 19 nt, Homo sapiens
  misc_RNA (1)...(19): siRNA sense strand
gaacuggaacguuguaaag

SEQ ID NO: 1665232 - RNA, 19 nt, Homo sapiens
  misc_RNA (1)...(19): siRNA sense strand
gcagugagaugcagcaaaa

SEQ ID NO: 1665233 - RNA, 19 nt, Homo sapiens
  misc_RNA (1)...(19): siRNA sense strand
ugaagaugcuugagagaau

SEQ ID NO: 1665234 - RNA, 19 nt, Homo sapiens
  misc_RNA (1)...(19): siRNA sense strand
ggaaagacuagaaauggaa

SEQ ID NO: 1665235 - RNA, 19 nt, Homo sapiens
  misc_RNA (1)...(19): siRNA sense strand
ccuaagaaauguaucugaa

SEQ ID NO: 1665236 - RNA, 19 nt, Homo sapiens
  misc_RNA (1)...(19): siRNA sense strand
gacagcagcuacuccaaga

SEQ ID NO: 1665237 - RNA, 19 nt, Homo sapiens
  misc_RNA (1)...(19): siRNA sense strand
cccaggagcugcugaaaga

SEQ ID NO: 1665238 - RNA, 19 nt, Homo sapiens
  misc_RNA (1)...(19): siRNA sense strand
ugaaggaccuccaggaaca

SEQ ID NO: 1665239 - RNA, 19 nt, Homo sapiens
  misc_RNA (1)...(19): siRNA sense strand
gcaagaaggcacaggagaa

SEQ ID NO: 1665240 - RNA, 19 nt, Homo sapiens
  misc_RNA (1)...(19): siRNA sense strand
caaugaguguagaagauuu

SEQ ID NO: 1665241 - RNA, 19 nt, Homo sapiens
  misc_RNA (1)...(19): siRNA sense strand
gaagaugugagccgagaaa

SEQ ID NO: 1665242 - RNA, 19 nt, Homo sapiens
  misc_RNA (1)...(19): siRNA sense strand
ggcaacaucuccucucuca

SEQ ID NO: 1665243 - RNA, 19 nt, Homo sapiens
  misc_RNA (1)...(19): siRNA sense strand
aagaaccucucaaauagaa

SEQ ID NO: 1665244 - RNA, 19 nt, Homo sapiens
  misc_RNA (1)...(19): siRNA sense strand
agaaagaggaguuaagaaa

SEQ ID NO: 1665245 - RNA, 19 nt, Homo sapiens
  misc_RNA (1)...(19): siRNA sense strand
gaaguauuccauaaucuug

SEQ ID NO: 1665246 - RNA, 19 nt, Homo sapiens
  misc_RNA (1)...(19): siRNA sense strand
gaacaagagaaguuuaauc

SEQ ID NO: 1665247 - RNA, 19 nt, Homo sapiens
  misc_RNA (1)...(19): siRNA sense strand
ggaaaacacuacucuccua

SEQ ID NO: 1665248 - RNA, 19 nt, Homo sapiens
  misc_RNA (1)...(19): siRNA sense strand
gaagaaccucucaaauaga

SEQ ID NO: 1665249 - RNA, 19 nt, Homo sapiens
  misc_RNA (1)...(19): siRNA sense strand
uagaagcucagcccaaaua

SEQ ID NO: 1665250 - RNA, 19 nt, Homo sapiens
  misc_RNA (1)...(19): siRNA sense strand
gaaggucagucagaugaau

SEQ ID NO: 1665251 - RNA, 19 nt, Homo sapiens
  misc_RNA (1)...(19): siRNA sense strand
caucagggcuccauaacca

SEQ ID NO: 1665252 - RNA, 19 nt, Homo sapiens
  misc_RNA (1)...(19): siRNA sense strand
gaacuucugagauaugaau

SEQ ID NO: 1665253 - RNA, 19 nt, Homo sapiens
  misc_RNA (1)...(19): siRNA sense strand
aaucgaaccugauggaaau

SEQ ID NO: 1665254 - RNA, 19 nt, Homo sapiens
  misc_RNA (1)...(19): siRNA sense strand
aaaguuagagccaggguua

SEQ ID NO: 1665255 - RNA, 19 nt, Homo sapiens
  misc_RNA (1)...(19): siRNA sense strand
gaaacacacucuugagaaa

SEQ ID NO: 1665256 - RNA, 19 nt, Homo sapiens
  misc_RNA (1)...(19): siRNA sense strand
gaaauugccugguuacaug

SEQ ID NO: 1665257 - RNA, 19 nt, Homo sapiens
  misc_RNA (1)...(19): siRNA sense strand
gaacgaaacgcacaccuua

SEQ ID NO: 1665258 - RNA, 19 nt, Homo sapiens
  misc_RNA (1)...(19): siRNA sense strand
caagagaaguuuaaucuga

SEQ ID NO: 1665259 - RNA, 19 nt, Homo sapiens
  misc_RNA (1)...(19): siRNA sense strand
ggacauauguugccucaga

SEQ ID NO: 1665260 - RNA, 19 nt, Homo sapiens
  misc_RNA (1)...(19): siRNA sense strand
gaaaauggcuacugaaauu

SEQ ID NO: 1665261 - RNA, 19 nt, Homo sapiens
  misc_RNA (1)...(19): siRNA sense strand
gaaacagaguguaauagaa

SEQ ID NO: 1665262 - RNA, 19 nt, Homo sapiens
  misc_RNA (1)...(19): siRNA sense strand
ggaagucacugaaacauuc

SEQ ID NO: 1665263 - RNA, 19 nt, Homo sapiens
  misc_RNA (1)...(19): siRNA sense strand
gcaagaaguuugugaagau

SEQ ID NO: 1665264 - RNA, 19 nt, Homo sapiens
  misc_RNA (1)...(19): siRNA sense strand
uuaaauagcugugucgaua

SEQ ID NO: 1665265 - RNA, 19 nt, Homo sapiens
  misc_RNA (1)...(19): siRNA sense strand
ggaagaagcuggucuccau

SEQ ID NO: 1665266 - RNA, 19 nt, Homo sapiens
  misc_RNA (1)...(19): siRNA sense strand
uaagugaccuggaagauga

SEQ ID NO: 1665267 - RNA, 19 nt, Homo sapiens
  misc_RNA (1)...(19): siRNA sense strand
gcagagagcucaugaacag

SEQ ID NO: 1665268 - RNA, 19 nt, Homo sapiens
  misc_RNA (1)...(19): siRNA sense strand
uagaagaaccucucaaaua

SEQ ID NO: 1665269 - RNA, 19 nt, Homo sapiens
  misc_RNA (1)...(19): siRNA sense strand
ccgagaagcucaagucuuu

SEQ ID NO: 1665270 - RNA, 19 nt, Homo sapiens
  misc_RNA (1)...(19): siRNA sense strand
gaagagagacugacacaga

SEQ ID NO: 1665271 - RNA, 19 nt, Homo sapiens
  misc_RNA (1)...(19): siRNA sense strand
gaagaacacuuucaagaac

SEQ ID NO: 1665272 - RNA, 19 nt, Homo sapiens
  misc_RNA (1)...(19): siRNA sense strand
gaugaaaucugaccuacga

SEQ ID NO: 1665273 - RNA, 19 nt, Homo sapiens
  misc_RNA (1)...(19): siRNA sense strand
ggaagaauaucgugcacaa

SEQ ID NO: 1665274 - RNA, 19 nt, Homo sapiens
  misc_RNA (1)...(19): siRNA sense strand
gaacccagaugacuugaau

SEQ ID NO: 1665275 - RNA, 19 nt, Homo sapiens
  misc_RNA (1)...(19): siRNA sense strand
gagagagugugaucaguuu

SEQ ID NO: 1665276 - RNA, 19 nt, Homo sapiens
  misc_RNA (1)...(19): siRNA sense strand
ugaaacagcugcacagaug

SEQ ID NO: 1665277 - RNA, 19 nt, Homo sapiens
  misc_RNA (1)...(19): siRNA sense strand
gacuggagcucgaagauaa

SEQ ID NO: 1665278 - RNA, 19 nt, Homo sapiens
  misc_RNA (1)...(19): siRNA sense strand
agucugagcuggaagaaua

SEQ ID NO: 1665279 - RNA, 19 nt, Homo sapiens
  misc_RNA (1)...(19): siRNA sense strand
cagaagaaguugaggcuaa

SEQ ID NO: 1665280 - RNA, 19 nt, Homo sapiens
  misc_RNA (1)...(19): siRNA sense strand
gaaccagacugcucacuag

SEQ ID NO: 1665281 - RNA, 19 nt, Homo sapiens
  misc_RNA (1)...(19): siRNA sense strand
gaacuuaaucaacgucuaa

SEQ ID NO: 1665282 - RNA, 19 nt, Homo sapiens
  misc_RNA (1)...(19): siRNA sense strand
agaagaaccucucaaauag

SEQ ID NO: 1665283 - RNA, 19 nt, Homo sapiens
  misc_RNA (1)...(19): siRNA sense strand
ggagcucucugaaguuaaa

SEQ ID NO: 1665284 - RNA, 19 nt, Homo sapiens
  misc_RNA (1)...(19): siRNA sense strand
ugacacagaugagaaauga

SEQ ID NO: 1665285 - RNA, 19 nt, Homo sapiens
  misc_RNA (1)...(19): siRNA sense strand
gaaacuggaugaagaguac

SEQ ID NO: 1665286 - RNA, 19 nt, Homo sapiens
  misc_RNA (1)...(19): siRNA sense strand
gcggagcucucugaaguua

SEQ ID NO: 1665287 - RNA, 19 nt, Homo sapiens
  misc_RNA (1)...(19): siRNA sense strand
gaaauauacuccagcucaa

SEQ ID NO: 1665288 - RNA, 19 nt, Homo sapiens
  misc_RNA (1)...(19): siRNA sense strand
uagaugaacuccagucuga

SEQ ID NO: 1665289 - RNA, 19 nt, Homo sapiens
  misc_RNA (1)...(19): siRNA sense strand
gaauguggauggagagaug

SEQ ID NO: 1665290 - RNA, 19 nt, Homo sapiens
  misc_RNA (1)...(19): siRNA sense strand
gcacagaaaucuccagacu

SEQ ID NO: 1665291 - RNA, 19 nt, Homo sapiens
  misc_RNA (1)...(19): siRNA sense strand
gaacucaccgucagaagaa

SEQ ID NO: 1665292 - RNA, 19 nt, Homo sapiens
  misc_RNA (1)...(19): siRNA sense strand
guucuaagcuacaacgaaa

SEQ ID NO: 1665293 - RNA, 19 nt, Homo sapiens
  misc_RNA (1)...(19): siRNA sense strand
gggagcagcuguuggaaga

SEQ ID NO: 1665294 - RNA, 19 nt, Homo sapiens
  misc_RNA (1)...(19): siRNA sense strand
gaagagaccaggacugaau

SEQ ID NO: 1665295 - RNA, 19 nt, Homo sapiens
  misc_RNA (1)...(19): siRNA sense strand
aggcagagcuggucauuga

SEQ ID NO: 1665296 - RNA, 19 nt, Homo sapiens
  misc_RNA (1)...(19): siRNA sense strand
ggaaaagguucagaauuua

SEQ ID NO: 1665297 - RNA, 19 nt, Homo sapiens
  misc_RNA (1)...(19): siRNA sense strand
acagaaaucuccagacuuc

SEQ ID NO: 1665298 - RNA, 19 nt, Homo sapiens
  misc_RNA (1)...(19): siRNA sense strand
gacagcagaucgagaaaga

SEQ ID NO: 1665299 - RNA, 19 nt, Homo sapiens
  misc_RNA (1)...(19): siRNA sense strand
ucaaauagaagcccaguuu

SEQ ID NO: 1665300 - RNA, 19 nt, Homo sapiens
  misc_RNA (1)...(19): siRNA sense strand
ggaaacagaguguaauaga

SEQ ID NO: 1665301 - RNA, 19 nt, Homo sapiens
  misc_RNA (1)...(19): siRNA sense strand
ucaggaaacuggaugaaga

SEQ ID NO: 1665302 - RNA, 19 nt, Homo sapiens
  misc_RNA (1)...(19): siRNA sense strand
ugacaagccugguggagaa

SEQ ID NO: 1665303 - RNA, 19 nt, Homo sapiens
  misc_RNA (1)...(19): siRNA sense strand
gcaaaggcaugagaacgaa

SEQ ID NO: 1665304 - RNA, 19 nt, Homo sapiens
  misc_RNA (1)...(19): siRNA sense strand
gaagauaaagugcgccauu

SEQ ID NO: 1665305 - RNA, 19 nt, Homo sapiens
  misc_RNA (1)...(19): siRNA sense strand
ccaaauauaagcuguugua

SEQ ID NO: 1665306 - RNA, 19 nt, Homo sapiens
  misc_RNA (1)...(19): siRNA sense strand
gacuagaaauggaacauga

SEQ ID NO: 1665307 - RNA, 19 nt, Homo sapiens
  misc_RNA (1)...(19): siRNA sense strand
gcaaaugucccggaugaaa

SEQ ID NO: 1665308 - RNA, 19 nt, Homo sapiens
  misc_RNA (1)...(19): siRNA sense strand
ccagaugacuugaaugcuu

SEQ ID NO: 1665309 - RNA, 19 nt, Homo sapiens
  misc_RNA (1)...(19): siRNA sense strand
gaacaauucagacacauca

SEQ ID NO: 1665310 - RNA, 19 nt, Homo sapiens
  misc_RNA (1)...(19): siRNA sense strand
caacaucuccucucucaau

SEQ ID NO: 1665311 - RNA, 19 nt, Homo sapiens
  misc_RNA (1)...(19): siRNA sense strand
agagagagaugcuggagaa

SEQ ID NO: 1665312 - RNA, 19 nt, Homo sapiens
  misc_RNA (1)...(19): siRNA sense strand
gaugagaaaugaauaugag

SEQ ID NO: 1665313 - RNA, 19 nt, Homo sapiens
  misc_RNA (1)...(19): siRNA sense strand
gaagagaaacugcaagaag

SEQ ID NO: 1665314 - RNA, 19 nt, Homo sapiens
  misc_RNA (1)...(19): siRNA sense strand
gcaguaugguuuacagaau

SEQ ID NO: 1665315 - RNA, 19 nt, Homo sapiens
  misc_RNA (1)...(19): siRNA sense strand
caucuaaacccaucaggua

SEQ ID NO: 1665316 - RNA, 19 nt, Homo sapiens
  misc_RNA (1)...(19): siRNA sense strand
ccugggagcugaagaauca

SEQ ID NO: 1665317 - RNA, 19 nt, Homo sapiens
  misc_RNA (1)...(19): siRNA sense strand
gagcagcuguuggaagaaa

SEQ ID NO: 1665318 - RNA, 19 nt, Homo sapiens
  misc_RNA (1)...(19): siRNA sense strand
gaaacgcacaccuuagaaa

SEQ ID NO: 1665319 - RNA, 19 nt, Homo sapiens
  misc_RNA (1)...(19): siRNA sense strand
gagaagcucaagucuuuaa

SEQ ID NO: 1665320 - RNA, 19 nt, Homo sapiens
  misc_RNA (1)...(19): siRNA sense strand
aaagaacaaucuccugcua

SEQ ID NO: 1665321 - RNA, 19 nt, Homo sapiens
  misc_RNA (1)...(19): siRNA sense strand
gaagauagcauuucuaacc

SEQ ID NO: 1665322 - RNA, 19 nt, Homo sapiens
  misc_RNA (1)...(19): siRNA sense strand
gaacacacagcucuuggaa

SEQ ID NO: 1665323 - RNA, 19 nt, Homo sapiens
  misc_RNA (1)...(19): siRNA sense strand
gcucagcccaaauauguua

SEQ ID NO: 1665324 - RNA, 19 nt, Homo sapiens
  misc_RNA (1)...(19): siRNA sense strand
gaacaggcagugaaggaaa

SEQ ID NO: 1665325 - RNA, 19 nt, Homo sapiens
  misc_RNA (1)...(19): siRNA sense strand
gcucaaggcuagacugaca

SEQ ID NO: 1665326 - RNA, 19 nt, Homo sapiens
  misc_RNA (1)...(19): siRNA sense strand
gaagacaccgugcagaaug

SEQ ID NO: 1665327 - RNA, 19 nt, Homo sapiens
  misc_RNA (1)...(19): siRNA sense strand
gcugguggcuucucaggaa

SEQ ID NO: 1665328 - RNA, 19 nt, Homo sapiens
  misc_RNA (1)...(19): siRNA sense strand
ugaaggcaaugaugcauga

SEQ ID NO: 1665329 - RNA, 19 nt, Homo sapiens
  misc_RNA (1)...(19): siRNA sense strand
uacaggagcugacuaggaa

SEQ ID NO: 1665330 - RNA, 19 nt, Homo sapiens
  misc_RNA (1)...(19): siRNA sense strand
aagauaaagugcgccauua

SEQ ID NO: 1665331 - RNA, 19 nt, Homo sapiens
  misc_RNA (1)...(19): siRNA sense strand
gaacuggaacguuguaaag

SEQ ID NO: 1665332 - RNA, 19 nt, Homo sapiens
  misc_RNA (1)...(19): siRNA sense strand
gcagugagaugcagcaaaa

SEQ ID NO: 1665333 - RNA, 19 nt, Homo sapiens
  misc_RNA (1)...(19): siRNA sense strand
ugaagaugcuugagagaau

SEQ ID NO: 1665334 - RNA, 19 nt, Homo sapiens
  misc_RNA (1)...(19): siRNA sense strand
ggaaagacuagaaauggaa

SEQ ID NO: 1665335 - RNA, 19 nt, Homo sapiens
  misc_RNA (1)...(19): siRNA sense strand
ccuaagaaauguaucugaa

SEQ ID NO: 1665336 - RNA, 19 nt, Homo sapiens
  misc_RNA (1)...(19): siRNA sense strand
gacagcagcuacuccaaga

SEQ ID NO: 1665337 - RNA, 19 nt, Homo sapiens
  misc_RNA (1)...(19): siRNA sense strand
cccaggagcugcugaaaga

SEQ ID NO: 1665338 - RNA, 19 nt, Homo sapiens
  misc_RNA (1)...(19): siRNA sense strand
ugaaggaccuccaggaaca

SEQ ID NO: 1665339 - RNA, 19 nt, Homo sapiens
  misc_RNA (1)...(19): siRNA sense strand
gcaagaaggcacaggagaa

SEQ ID NO: 1665340 - RNA, 19 nt, Homo sapiens
  misc_RNA (1)...(19): siRNA sense strand
caaugaguguagaagauuu

SEQ ID NO: 1665341 - RNA, 19 nt, Homo sapiens
  misc_RNA (1)...(19): siRNA sense strand
gaagaugugagccgagaaa

SEQ ID NO: 1665342 - RNA, 19 nt, Homo sapiens
  misc_RNA (1)...(19): siRNA sense strand
ggcaacaucuccucucuca

SEQ ID NO: 1665343 - RNA, 19 nt, Homo sapiens
  misc_RNA (1)...(19): siRNA sense strand
aagaaccucucaaauagaa

SEQ ID NO: 1665344 - RNA, 19 nt, Homo sapiens
  misc_RNA (1)...(19): siRNA sense strand
agaaagaggaguuaagaaa

SEQ ID NO: 1665345 - RNA, 19 nt, Homo sapiens
  misc_RNA (1)...(19): siRNA sense strand
gaaguauuccauaaucuug

SEQ ID NO: 1665346 - RNA, 19 nt, Homo sapiens
  misc_RNA (1)...(19): siRNA sense strand
gaacaagagaaguuuaauc

SEQ ID NO: 1665347 - RNA, 19 nt, Homo sapiens
  misc_RNA (1)...(19): siRNA sense strand
ggaaaacacuacucuccua

SEQ ID NO: 1665348 - RNA, 19 nt, Homo sapiens
  misc_RNA (1)...(19): siRNA sense strand
gaagaaccucucaaauaga

SEQ ID NO: 1665349 - RNA, 19 nt, Homo sapiens
  misc_RNA (1)...(19): siRNA sense strand
uagaagcucagcccaaaua

SEQ ID NO: 1665350 - RNA, 19 nt, Homo sapiens
  misc_RNA (1)...(19): siRNA sense strand
gaaggucagucagaugaau

SEQ ID NO: 1665351 - RNA, 19 nt, Homo sapiens
  misc_RNA (1)...(19): siRNA sense strand
caucagggcuccauaacca

SEQ ID NO: 1665352 - RNA, 19 nt, Homo sapiens
  misc_RNA (1)...(19): siRNA sense strand
gaacuucugagauaugaau

SEQ ID NO: 1665353 - RNA, 19 nt, Homo sapiens
  misc_RNA (1)...(19): siRNA sense strand
aaucgaaccugauggaaau

SEQ ID NO: 1665354 - RNA, 19 nt, Homo sapiens
  misc_RNA (1)...(19): siRNA sense strand
aaaguuagagccaggguua

SEQ ID NO: 1665355 - RNA, 19 nt, Homo sapiens
  misc_RNA (1)...(19): siRNA sense strand
gaaacacacucuugagaaa

SEQ ID NO: 1665356 - RNA, 19 nt, Homo sapiens
  misc_RNA (1)...(19): siRNA sense strand
gaaauugccugguuacaug

SEQ ID NO: 1665357 - RNA, 19 nt, Homo sapiens
  misc_RNA (1)...(19): siRNA sense strand
gaacgaaacgcacaccuua

SEQ ID NO: 1665358 - RNA, 19 nt, Homo sapiens
  misc_RNA (1)...(19): siRNA sense strand
caagagaaguuuaaucuga

SEQ ID NO: 1665359 - RNA, 19 nt, Homo sapiens
  misc_RNA (1)...(19): siRNA sense strand
ggacauauguugccucaga

SEQ ID NO: 1665360 - RNA, 19 nt, Homo sapiens
  misc_RNA (1)...(19): siRNA sense strand
gaaaauggcuacugaaauu

SEQ ID NO: 1665361 - RNA, 19 nt, Homo sapiens
  misc_RNA (1)...(19): siRNA sense strand
gaaacagaguguaauagaa

SEQ ID NO: 1665362 - RNA, 19 nt, Homo sapiens
  misc_RNA (1)...(19): siRNA sense strand
ggaagucacugaaacauuc

SEQ ID NO: 1665363 - RNA, 19 nt, Homo sapiens
  misc_RNA (1)...(19): siRNA sense strand
gcaagaaguuugugaagau

SEQ ID NO: 1665364 - RNA, 19 nt, Homo sapiens
  misc_RNA (1)...(19): siRNA sense strand
uuaaauagcugugucgaua

SEQ ID NO: 1665365 - RNA, 19 nt, Homo sapiens
  misc_RNA (1)...(19): siRNA sense strand
ggaagaagcuggucuccau

SEQ ID NO: 1665366 - RNA, 19 nt, Homo sapiens
  misc_RNA (1)...(19): siRNA sense strand
uaagugaccuggaagauga

SEQ ID NO: 1665367 - RNA, 19 nt, Homo sapiens
  misc_RNA (1)...(19): siRNA sense strand
gcagagagcucaugaacag

SEQ ID NO: 1665368 - RNA, 19 nt, Homo sapiens
  misc_RNA (1)...(19): siRNA sense strand
uagaagaaccucucaaaua

SEQ ID NO: 1665369 - RNA, 19 nt, Homo sapiens
  misc_RNA (1)...(19): siRNA sense strand
ccgagaagcucaagucuuu

SEQ ID NO: 1665370 - RNA, 19 nt, Homo sapiens
  misc_RNA (1)...(19): siRNA sense strand
gaagagagacugacacaga

SEQ ID NO: 1665371 - RNA, 19 nt, Homo sapiens
  misc_RNA (1)...(19): siRNA sense strand
gaagaacacuuucaagaac

SEQ ID NO: 1665372 - RNA, 19 nt, Homo sapiens
  misc_RNA (1)...(19): siRNA sense strand
gaugaaaucugaccuacga

SEQ ID NO: 1665373 - RNA, 19 nt, Homo sapiens
  misc_RNA (1)...(19): siRNA sense strand
ggaagaauaucgugcacaa

SEQ ID NO: 1665374 - RNA, 19 nt, Homo sapiens
  misc_RNA (1)...(19): siRNA sense strand
gaacccagaugacuugaau

SEQ ID NO: 1665375 - RNA, 19 nt, Homo sapiens
  misc_RNA (1)...(19): siRNA sense strand
gagagagugugaucaguuu

SEQ ID NO: 1665376 - RNA, 19 nt, Homo sapiens
  misc_RNA (1)...(19): siRNA sense strand
ugaaacagcugcacagaug

SEQ ID NO: 1665377 - RNA, 19 nt, Homo sapiens
  misc_RNA (1)...(19): siRNA sense strand
gacuggagcucgaagauaa

SEQ ID NO: 1665378 - RNA, 19 nt, Homo sapiens
  misc_RNA (1)...(19): siRNA sense strand
agucugagcuggaagaaua

SEQ ID NO: 1665379 - RNA, 19 nt, Homo sapiens
  misc_RNA (1)...(19): siRNA sense strand
cagaagaaguugaggcuaa

SEQ ID NO: 1665380 - RNA, 19 nt, Homo sapiens
  misc_RNA (1)...(19): siRNA sense strand
gaaccagacugcucacuag

SEQ ID NO: 1665381 - RNA, 19 nt, Homo sapiens
  misc_RNA (1)...(19): siRNA sense strand
gaacuuaaucaacgucuaa

SEQ ID NO: 1665382 - RNA, 19 nt, Homo sapiens
  misc_RNA (1)...(19): siRNA sense strand
agaagaaccucucaaauag

SEQ ID NO: 1665383 - RNA, 19 nt, Homo sapiens
  misc_RNA (1)...(19): siRNA sense strand
ggagcucucugaaguuaaa

SEQ ID NO: 1665384 - RNA, 19 nt, Homo sapiens
  misc_RNA (1)...(19): siRNA sense strand
ugacacagaugagaaauga

SEQ ID NO: 1665385 - RNA, 19 nt, Homo sapiens
  misc_RNA (1)...(19): siRNA sense strand
gaaacuggaugaagaguac

SEQ ID NO: 1665386 - RNA, 19 nt, Homo sapiens
  misc_RNA (1)...(19): siRNA sense strand
gcggagcucucugaaguua

SEQ ID NO: 1665387 - RNA, 19 nt, Homo sapiens
  misc_RNA (1)...(19): siRNA sense strand
gaaauauacuccagcucaa

SEQ ID NO: 1665388 - RNA, 19 nt, Homo sapiens
  misc_RNA (1)...(19): siRNA sense strand
uagaugaacuccagucuga

SEQ ID NO: 1665389 - RNA, 19 nt, Homo sapiens
  misc_RNA (1)...(19): siRNA sense strand
gaauguggauggagagaug

SEQ ID NO: 1665390 - RNA, 19 nt, Homo sapiens
  misc_RNA (1)...(19): siRNA sense strand
gcacagaaaucuccagacu

SEQ ID NO: 1665391 - RNA, 19 nt, Homo sapiens
  misc_RNA (1)...(19): siRNA sense strand
gaacucaccgucagaagaa

SEQ ID NO: 1665392 - RNA, 19 nt, Homo sapiens
  misc_RNA (1)...(19): siRNA sense strand
guucuaagcuacaacgaaa

SEQ ID NO: 1665393 - RNA, 19 nt, Homo sapiens
  misc_RNA (1)...(19): siRNA sense strand
gggagcagcuguuggaaga

SEQ ID NO: 1665394 - RNA, 19 nt, Homo sapiens
  misc_RNA (1)...(19): siRNA sense strand
gaagagaccaggacugaau

SEQ ID NO: 1665395 - RNA, 19 nt, Homo sapiens
  misc_RNA (1)...(19): siRNA sense strand
aggcagagcuggucauuga

SEQ ID NO: 1665396 - RNA, 19 nt, Homo sapiens
  misc_RNA (1)...(19): siRNA sense strand
ggaaaagguucagaauuua

SEQ ID NO: 1665397 - RNA, 19 nt, Homo sapiens
  misc_RNA (1)...(19): siRNA sense strand
acagaaaucuccagacuuc

SEQ ID NO: 1665398 - RNA, 19 nt, Homo sapiens
  misc_RNA (1)...(19): siRNA sense strand
gacagcagaucgagaaaga

SEQ ID NO: 1665399 - RNA, 19 nt, Homo sapiens
  misc_RNA (1)...(19): siRNA sense strand
ucaaauagaagcccaguuu

SEQ ID NO: 1665400 - RNA, 19 nt, Homo sapiens
  misc_RNA (1)...(19): siRNA sense strand
ggaaacagaguguaauaga

SEQ ID NO: 1665401 - RNA, 19 nt, Homo sapiens
  misc_RNA (1)...(19): siRNA sense strand
ucaggaaacuggaugaaga

SEQ ID NO: 1665402 - RNA, 19 nt, Homo sapiens
  misc_RNA (1)...(19): siRNA sense strand
ugacaagccugguggagaa

SEQ ID NO: 1665403 - RNA, 19 nt, Homo sapiens
  misc_RNA (1)...(19): siRNA sense strand
gcaaaggcaugagaacgaa

SEQ ID NO: 1665404 - RNA, 19 nt, Homo sapiens
  misc_RNA (1)...(19): siRNA sense strand
gaagauaaagugcgccauu

SEQ ID NO: 1665405 - RNA, 19 nt, Homo sapiens
  misc_RNA (1)...(19): siRNA sense strand
ccaaauauaagcuguugua

SEQ ID NO: 1665406 - RNA, 19 nt, Homo sapiens
  misc_RNA (1)...(19): siRNA sense strand
gacuagaaauggaacauga

SEQ ID NO: 1665407 - RNA, 19 nt, Homo sapiens
  misc_RNA (1)...(19): siRNA sense strand
gcaaaugucccggaugaaa

SEQ ID NO: 1665408 - RNA, 19 nt, Homo sapiens
  misc_RNA (1)...(19): siRNA sense strand
ccagaugacuugaaugcuu

SEQ ID NO: 1665409 - RNA, 19 nt, Homo sapiens
  misc_RNA (1)...(19): siRNA sense strand
gaacaauucagacacauca

SEQ ID NO: 1665410 - RNA, 19 nt, Homo sapiens
  misc_RNA (1)...(19): siRNA sense strand
caacaucuccucucucaau

SEQ ID NO: 1665411 - RNA, 19 nt, Homo sapiens
  misc_RNA (1)...(19): siRNA sense strand
agagagagaugcuggagaa

SEQ ID NO: 1665412 - RNA, 19 nt, Homo sapiens
  misc_RNA (1)...(19): siRNA sense strand
gaugagaaaugaauaugag

SEQ ID NO: 1665413 - RNA, 19 nt, Homo sapiens
  misc_RNA (1)...(19): siRNA sense strand
gaagagaaacugcaagaag

SEQ ID NO: 1665414 - RNA, 19 nt, Homo sapiens
  misc_RNA (1)...(19): siRNA sense strand
gcaguaugguuuacagaau

SEQ ID NO: 1665415 - RNA, 19 nt, Homo sapiens
  misc_RNA (1)...(19): siRNA sense strand
caucuaaacccaucaggua

SEQ ID NO: 1665416 - RNA, 19 nt, Homo sapiens
  misc_RNA (1)...(19): siRNA sense strand
ccugggagcugaagaauca

SEQ ID NO: 1665417 - RNA, 19 nt, Homo sapiens
  misc_RNA (1)...(19): siRNA sense strand
gagcagcuguuggaagaaa

SEQ ID NO: 1665418 - RNA, 19 nt, Homo sapiens
  misc_RNA (1)...(19): siRNA sense strand
gaaacgcacaccuuagaaa

SEQ ID NO: 1665419 - RNA, 19 nt, Homo sapiens
  misc_RNA (1)...(19): siRNA sense strand
gagaagcucaagucuuuaa

SEQ ID NO: 1665420 - RNA, 19 nt, Homo sapiens
  misc_RNA (1)...(19): siRNA sense strand
aaagaacaaucuccugcua

SEQ ID NO: 1665421 - RNA, 19 nt, Homo sapiens
  misc_RNA (1)...(19): siRNA sense strand
gaagauagcauuucuaacc

SEQ ID NO: 1665422 - RNA, 19 nt, Homo sapiens
  misc_RNA (1)...(19): siRNA sense strand
gaacacacagcucuuggaa

SEQ ID NO: 1665423 - RNA, 19 nt, Homo sapiens
  misc_RNA (1)...(19): siRNA sense strand
gcucagcccaaauauguua

SEQ ID NO: 1665424 - RNA, 19 nt, Homo sapiens
  misc_RNA (1)...(19): siRNA sense strand
gaacaggcagugaaggaaa

SEQ ID NO: 1665425 - RNA, 19 nt, Homo sapiens
  misc_RNA (1)...(19): siRNA sense strand
gcucaaggcuagacugaca

SEQ ID NO: 1665426 - RNA, 19 nt, Homo sapiens
  misc_RNA (1)...(19): siRNA sense strand
gaagacaccgugcagaaug

SEQ ID NO: 1665427 - RNA, 19 nt, Homo sapiens
  misc_RNA (1)...(19): siRNA sense strand
gcugguggcuucucaggaa

SEQ ID NO: 1665428 - RNA, 19 nt, Homo sapiens
  misc_RNA (1)...(19): siRNA sense strand
ugaaggcaaugaugcauga

SEQ ID NO: 1665429 - RNA, 19 nt, Homo sapiens
  misc_RNA (1)...(19): siRNA sense strand
uacaggagcugacuaggaa

SEQ ID NO: 1665430 - RNA, 19 nt, Homo sapiens
  misc_RNA (1)...(19): siRNA sense strand
aagauaaagugcgccauua

SEQ ID NO: 1665431 - RNA, 19 nt, Homo sapiens
  misc_RNA (1)...(19): siRNA sense strand
gaacuggaacguuguaaag

SEQ ID NO: 1665432 - RNA, 19 nt, Homo sapiens
  misc_RNA (1)...(19): siRNA sense strand
gcagugagaugcagcaaaa

SEQ ID NO: 1665433 - RNA, 19 nt, Homo sapiens
  misc_RNA (1)...(19): siRNA sense strand
ugaagaugcuugagagaau

SEQ ID NO: 1665434 - RNA, 19 nt, Homo sapiens
  misc_RNA (1)...(19): siRNA sense strand
ggaaagacuagaaauggaa

SEQ ID NO: 1665435 - RNA, 19 nt, Homo sapiens
  misc_RNA (1)...(19): siRNA sense strand
ccuaagaaauguaucugaa

SEQ ID NO: 1665436 - RNA, 19 nt, Homo sapiens
  misc_RNA (1)...(19): siRNA sense strand
gacagcagcuacuccaaga

SEQ ID NO: 1665437 - RNA, 19 nt, Homo sapiens
  misc_RNA (1)...(19): siRNA sense strand
cccaggagcugcugaaaga

SEQ ID NO: 1665438 - RNA, 19 nt, Homo sapiens
  misc_RNA (1)...(19): siRNA sense strand
ugaaggaccuccaggaaca

SEQ ID NO: 1665439 - RNA, 19 nt, Homo sapiens
  misc_RNA (1)...(19): siRNA sense strand
gcaagaaggcacaggagaa

SEQ ID NO: 1665440 - RNA, 19 nt, Homo sapiens
  misc_RNA (1)...(19): siRNA sense strand
caaugaguguagaagauuu

SEQ ID NO: 1665441 - RNA, 19 nt, Homo sapiens
  misc_RNA (1)...(19): siRNA sense strand
gaagaugugagccgagaaa

SEQ ID NO: 1665442 - RNA, 19 nt, Homo sapiens
  misc_RNA (1)...(19): siRNA sense strand
ggcaacaucuccucucuca

SEQ ID NO: 1665443 - RNA, 19 nt, Homo sapiens
  misc_RNA (1)...(19): siRNA sense strand
aagaaccucucaaauagaa

SEQ ID NO: 1665444 - RNA, 19 nt, Homo sapiens
  misc_RNA (1)...(19): siRNA sense strand
agaaagaggaguuaagaaa

SEQ ID NO: 1665445 - RNA, 19 nt, Homo sapiens
  misc_RNA (1)...(19): siRNA sense strand
gaaguauuccauaaucuug

SEQ ID NO: 1665446 - RNA, 19 nt, Homo sapiens
  misc_RNA (1)...(19): siRNA sense strand
gaacaagagaaguuuaauc

SEQ ID NO: 1665447 - RNA, 19 nt, Homo sapiens
  misc_RNA (1)...(19): siRNA sense strand
ggaaaacacuacucuccua

SEQ ID NO: 1665448 - RNA, 19 nt, Homo sapiens
  misc_RNA (1)...(19): siRNA sense strand
gaagaaccucucaaauaga

SEQ ID NO: 1665449 - RNA, 19 nt, Homo sapiens
  misc_RNA (1)...(19): siRNA sense strand
uagaagcucagcccaaaua

SEQ ID NO: 1665450 - RNA, 19 nt, Homo sapiens
  misc_RNA (1)...(19): siRNA sense strand
gaaggucagucagaugaau

SEQ ID NO: 1665451 - RNA, 19 nt, Homo sapiens
  misc_RNA (1)...(19): siRNA sense strand
caucagggcuccauaacca

SEQ ID NO: 1665452 - RNA, 19 nt, Homo sapiens
  misc_RNA (1)...(19): siRNA sense strand
gaacuucugagauaugaau

SEQ ID NO: 1665453 - RNA, 19 nt, Homo sapiens
  misc_RNA (1)...(19): siRNA sense strand
aaucgaaccugauggaaau

SEQ ID NO: 1665454 - RNA, 19 nt, Homo sapiens
  misc_RNA (1)...(19): siRNA sense strand
aaaguuagagccaggguua

SEQ ID NO: 1665455 - RNA, 19 nt, Homo sapiens
  misc_RNA (1)...(19): siRNA sense strand
ggaaagaacuucaggaaau

SEQ ID NO: 1665456 - RNA, 19 nt, Homo sapiens
  misc_RNA (1)...(19): siRNA sense strand
ugaaugcucugcagaaaua

SEQ ID NO: 1665457 - RNA, 19 nt, Homo sapiens
  misc_RNA (1)...(19): siRNA sense strand
gaaagcacauuccguuuau

SEQ ID NO: 1665458 - RNA, 19 nt, Homo sapiens
  misc_RNA (1)...(19): siRNA sense strand
gaaagaacuucaggaaauu

SEQ ID NO: 1665459 - RNA, 19 nt, Homo sapiens
  misc_RNA (1)...(19): siRNA sense strand
ugaaagaacucauggaaau

SEQ ID NO: 1665460 - RNA, 19 nt, Homo sapiens
  misc_RNA (1)...(19): siRNA sense strand
gcagaaauaucccaacugu

SEQ ID NO: 1665461 - RNA, 19 nt, Homo sapiens
  misc_RNA (1)...(19): siRNA sense strand
gcugagaaguggaaugaaa

SEQ ID NO: 1665462 - RNA, 19 nt, Homo sapiens
  misc_RNA (1)...(19): siRNA sense strand
gcacauuccguuuauaauu

SEQ ID NO: 1665463 - RNA, 19 nt, Homo sapiens
  misc_RNA (1)...(19): siRNA sense strand
ccagugaucuucauauuag

SEQ ID NO: 1665464 - RNA, 19 nt, Homo sapiens
  misc_RNA (1)...(19): siRNA sense strand
gaaagaacucauggaaaua

SEQ ID NO: 1665465 - RNA, 19 nt, Homo sapiens
  misc_RNA (1)...(19): siRNA sense strand
gcagauacacuuaaugaau

SEQ ID NO: 1665466 - RNA, 19 nt, Homo sapiens
  misc_RNA (1)...(19): siRNA sense strand
ggaaauagaagaagugagu

SEQ ID NO: 1665467 - RNA, 19 nt, Homo sapiens
  misc_RNA (1)...(19): siRNA sense strand
gaagcaagccaacugugua

SEQ ID NO: 1665468 - RNA, 19 nt, Homo sapiens
  misc_RNA (1)...(19): siRNA sense strand
ggaaaucacaaggcaguua

SEQ ID NO: 1665469 - RNA, 19 nt, Homo sapiens
  misc_RNA (1)...(19): siRNA sense strand
gaaauucacagagagagua

SEQ ID NO: 1665470 - RNA, 19 nt, Homo sapiens
  misc_RNA (1)...(19): siRNA sense strand
gaaaucacaaggcaguuaa

SEQ ID NO: 1665471 - RNA, 19 nt, Homo sapiens
  misc_RNA (1)...(19): siRNA sense strand
caaauggucuauaaugagu

SEQ ID NO: 1665472 - RNA, 19 nt, Homo sapiens
  misc_RNA (1)...(19): siRNA sense strand
accaaacacuucucuauaa

SEQ ID NO: 1665473 - RNA, 19 nt, Homo sapiens
  misc_RNA (1)...(19): siRNA sense strand
aggaagagccauuuaauuu

SEQ ID NO: 1665474 - RNA, 19 nt, Homo sapiens
  misc_RNA (1)...(19): siRNA sense strand
guaacucuguccuuauuau

SEQ ID NO: 1665475 - RNA, 19 nt, Homo sapiens
  misc_RNA (1)...(19): siRNA sense strand
cuacagaagcauuucaaua

SEQ ID NO: 1665476 - RNA, 19 nt, Homo sapiens
  misc_RNA (1)...(19): siRNA sense strand
gaggaagagccauuuaauu

SEQ ID NO: 1665477 - RNA, 19 nt, Homo sapiens
  misc_RNA (1)...(19): siRNA sense strand
ccaaacacuucucuauaau

SEQ ID NO: 1665478 - RNA, 19 nt, Homo sapiens
  misc_RNA (1)...(19): siRNA sense strand
cagaagcauuucaauauca

SEQ ID NO: 1665479 - RNA, 19 nt, Homo sapiens
  misc_RNA (1)...(19): siRNA sense strand
gaagagccauuuaauuuuc

SEQ ID NO: 1665480 - RNA, 19 nt, Homo sapiens
  misc_RNA (1)...(19): siRNA sense strand
ucacagguacaaagaauuu

SEQ ID NO: 1665481 - RNA, 19 nt, Homo sapiens
  misc_RNA (1)...(19): siRNA sense strand
ggucuuacauguagauugg

SEQ ID NO: 1665482 - RNA, 19 nt, Homo sapiens
  misc_RNA (1)...(19): siRNA sense strand
gcccagugaucuucauauu

SEQ ID NO: 1665483 - RNA, 19 nt, Homo sapiens
  misc_RNA (1)...(19): siRNA sense strand
agucguaaaucaaagagua

SEQ ID NO: 1665484 - RNA, 19 nt, Homo sapiens
  misc_RNA (1)...(19): siRNA sense strand
cgucagaguccacauagua

SEQ ID NO: 1665485 - RNA, 19 nt, Homo sapiens
  misc_RNA (1)...(19): siRNA sense strand
gagaguaccagcugaugaa

SEQ ID NO: 1665486 - RNA, 19 nt, Homo sapiens
  misc_RNA (1)...(19): siRNA sense strand
uaauaaagcccauggaaag

SEQ ID NO: 1665487 - RNA, 19 nt, Homo sapiens
  misc_RNA (1)...(19): siRNA sense strand
aguaacagcuuaauucaca

SEQ ID NO: 1665488 - RNA, 19 nt, Homo sapiens
  misc_RNA (1)...(19): siRNA sense strand
gcauuucaauaucagcaaa

SEQ ID NO: 1665489 - RNA, 19 nt, Homo sapiens
  misc_RNA (1)...(19): siRNA sense strand
aaagaacaguuaucucuac

SEQ ID NO: 1665490 - RNA, 19 nt, Homo sapiens
  misc_RNA (1)...(19): siRNA sense strand
ucacaaggcaguuaaaucu

SEQ ID NO: 1665491 - RNA, 19 nt, Homo sapiens
  misc_RNA (1)...(19): siRNA sense strand
gcaucgcacccauuuauga

SEQ ID NO: 1665492 - RNA, 19 nt, Homo sapiens
  misc_RNA (1)...(19): siRNA sense strand
gaaguggaaugaaaauguu

SEQ ID NO: 1665493 - RNA, 19 nt, Homo sapiens
  misc_RNA (1)...(19): siRNA sense strand
uaaccuauuuggagugcaa

SEQ ID NO: 1665494 - RNA, 19 nt, Homo sapiens
  misc_RNA (1)...(19): siRNA sense strand
ugaaacugcuuuuggauaa

SEQ ID NO: 1665495 - RNA, 19 nt, Homo sapiens
  misc_RNA (1)...(19): siRNA sense strand
cagcaucgcacccauuuau

SEQ ID NO: 1665496 - RNA, 19 nt, Homo sapiens
  misc_RNA (1)...(19): siRNA sense strand
gaaguacuacagaagcauu

SEQ ID NO: 1665497 - RNA, 19 nt, Homo sapiens
  misc_RNA (1)...(19): siRNA sense strand
uaagugagcugcugaaaag

SEQ ID NO: 1665498 - RNA, 19 nt, Homo sapiens
  misc_RNA (1)...(19): siRNA sense strand
caaaaucgcccuaaaggaa

SEQ ID NO: 1665499 - RNA, 19 nt, Homo sapiens
  misc_RNA (1)...(19): siRNA sense strand
gcagaucaaugacaaaauc

SEQ ID NO: 1665500 - RNA, 19 nt, Homo sapiens
  misc_RNA (1)...(19): siRNA sense strand
uaugaaugcucugcagaaa

SEQ ID NO: 1665501 - RNA, 19 nt, Homo sapiens
  misc_RNA (1)...(19): siRNA sense strand
ggaagcaagccaacugugu

SEQ ID NO: 1665502 - RNA, 19 nt, Homo sapiens
  misc_RNA (1)...(19): siRNA sense strand
gcaagaaguacuacagaag

SEQ ID NO: 1665503 - RNA, 19 nt, Homo sapiens
  misc_RNA (1)...(19): siRNA sense strand
aaaccaaacacuucucuau

SEQ ID NO: 1665504 - RNA, 19 nt, Homo sapiens
  misc_RNA (1)...(19): siRNA sense strand
guaguuggagauaaaguuu

SEQ ID NO: 1665505 - RNA, 19 nt, Homo sapiens
  misc_RNA (1)...(19): siRNA sense strand
ucaaagaguaacagcuuaa

SEQ ID NO: 1665506 - RNA, 19 nt, Homo sapiens
  misc_RNA (1)...(19): siRNA sense strand
ggaagagccauuuaauuuu

SEQ ID NO: 1665507 - RNA, 19 nt, Homo sapiens
  misc_RNA (1)...(19): siRNA sense strand
uauuguacauggucuauca

SEQ ID NO: 1665508 - RNA, 19 nt, Homo sapiens
  misc_RNA (1)...(19): siRNA sense strand
cggcagauacacuuaauga

SEQ ID NO: 1665509 - RNA, 19 nt, Homo sapiens
  misc_RNA (1)...(19): siRNA sense strand
ggacucgaaagcaaauauu

SEQ ID NO: 1665510 - RNA, 19 nt, Homo sapiens
  misc_RNA (1)...(19): siRNA sense strand
ugccguagaucuaauggaa

SEQ ID NO: 1665511 - RNA, 19 nt, Homo sapiens
  misc_RNA (1)...(19): siRNA sense strand
gaugcuugcuuuaaaucga

SEQ ID NO: 1665512 - RNA, 19 nt, Homo sapiens
  misc_RNA (1)...(19): siRNA sense strand
acagaagcauuucaauauc

SEQ ID NO: 1665513 - RNA, 19 nt, Homo sapiens
  misc_RNA (1)...(19): siRNA sense strand
gaaaauguaguuggagaua

SEQ ID NO: 1665514 - RNA, 19 nt, Homo sapiens
  misc_RNA (1)...(19): siRNA sense strand
aagcacauuccguuuauaa

SEQ ID NO: 1665515 - RNA, 19 nt, Homo sapiens
  misc_RNA (1)...(19): siRNA sense strand
agauagaagugugcaagaa

SEQ ID NO: 1665516 - RNA, 19 nt, Homo sapiens
  misc_RNA (1)...(19): siRNA sense strand
guuauuggucuuacaugua

SEQ ID NO: 1665517 - RNA, 19 nt, Homo sapiens
  misc_RNA (1)...(19): siRNA sense strand
uuuggaagcuuugcugaaa

SEQ ID NO: 1665518 - RNA, 19 nt, Homo sapiens
  misc_RNA (1)...(19): siRNA sense strand
gcaacauccucacuaagcu

SEQ ID NO: 1665519 - RNA, 19 nt, Homo sapiens
  misc_RNA (1)...(19): siRNA sense strand
aagaguaacagcuuaauuc

SEQ ID NO: 1665520 - RNA, 19 nt, Homo sapiens
  misc_RNA (1)...(19): siRNA sense strand
aaccaaacacuucucuaua

SEQ ID NO: 1665521 - RNA, 19 nt, Homo sapiens
  misc_RNA (1)...(19): siRNA sense strand
gcaguuaaaucuggaaaau

SEQ ID NO: 1665522 - RNA, 19 nt, Homo sapiens
  misc_RNA (1)...(19): siRNA sense strand
gaacuucaggaaauucaca

SEQ ID NO: 1665523 - RNA, 19 nt, Homo sapiens
  misc_RNA (1)...(19): siRNA sense strand
gagcagucguaaaucaaag

SEQ ID NO: 1665524 - RNA, 19 nt, Homo sapiens
  misc_RNA (1)...(19): siRNA sense strand
guacauggucuaucagucu

SEQ ID NO: 1665525 - RNA, 19 nt, Homo sapiens
  misc_RNA (1)...(19): siRNA sense strand
gcuauugaugcuugcuuua

SEQ ID NO: 1665526 - RNA, 19 nt, Homo sapiens
  misc_RNA (1)...(19): siRNA sense strand
cugcagaguuuccagacaa

SEQ ID NO: 1665527 - RNA, 19 nt, Homo sapiens
  misc_RNA (1)...(19): siRNA sense strand
uuaauaaagcccauggaaa

SEQ ID NO: 1665528 - RNA, 19 nt, Homo sapiens
  misc_RNA (1)...(19): siRNA sense strand
gagugcaaguacaauacaa

SEQ ID NO: 1665529 - RNA, 19 nt, Homo sapiens
  misc_RNA (1)...(19): siRNA sense strand
gaacucauggaaauagaag

SEQ ID NO: 1665530 - RNA, 19 nt, Homo sapiens
  misc_RNA (1)...(19): siRNA sense strand
uucaguaucucucagaaga

SEQ ID NO: 1665531 - RNA, 19 nt, Homo sapiens
  misc_RNA (1)...(19): siRNA sense strand
uuauuggucuuacauguag

SEQ ID NO: 1665532 - RNA, 19 nt, Homo sapiens
  misc_RNA (1)...(19): siRNA sense strand
ugggcaacauccucacuaa

SEQ ID NO: 1665533 - RNA, 19 nt, Homo sapiens
  misc_RNA (1)...(19): siRNA sense strand
uaacagcaucgcacccauu

SEQ ID NO: 1665534 - RNA, 19 nt, Homo sapiens
  misc_RNA (1)...(19): siRNA sense strand
ggucauuacacaugcuauu

SEQ ID NO: 1665535 - RNA, 19 nt, Homo sapiens
  misc_RNA (1)...(19): siRNA sense strand
ucacacagagugccuuuca

SEQ ID NO: 1665536 - RNA, 19 nt, Homo sapiens
  misc_RNA (1)...(19): siRNA sense strand
gauagaagugugcaagaag

SEQ ID NO: 1665537 - RNA, 19 nt, Homo sapiens
  misc_RNA (1)...(19): siRNA sense strand
agagugccuuucacaggua

SEQ ID NO: 1665538 - RNA, 19 nt, Homo sapiens
  misc_RNA (1)...(19): siRNA sense strand
cccagugaucuucauauua

SEQ ID NO: 1665539 - RNA, 19 nt, Homo sapiens
  misc_RNA (1)...(19): siRNA sense strand
ugacaucuaugaggaagag

SEQ ID NO: 1665540 - RNA, 19 nt, Homo sapiens
  misc_RNA (1)...(19): siRNA sense strand
gcauggacucgaaagcaaa

SEQ ID NO: 1665541 - RNA, 19 nt, Homo sapiens
  misc_RNA (1)...(19): siRNA sense strand
ugcaagaaguacuacagaa

SEQ ID NO: 1665542 - RNA, 19 nt, Homo sapiens
  misc_RNA (1)...(19): siRNA sense strand
agagugaagucaagauuuu

SEQ ID NO: 1665543 - RNA, 19 nt, Homo sapiens
  misc_RNA (1)...(19): siRNA sense strand
caaguacaauacaaacacu

SEQ ID NO: 1665544 - RNA, 19 nt, Homo sapiens
  misc_RNA (1)...(19): siRNA sense strand
gaaagauuuugucgucaga

SEQ ID NO: 1665545 - RNA, 19 nt, Homo sapiens
  misc_RNA (1)...(19): siRNA sense strand
gcaaguacaauacaaacac

SEQ ID NO: 1665546 - RNA, 19 nt, Homo sapiens
  misc_RNA (1)...(19): siRNA sense strand
aaagcacauuccguuuaua

SEQ ID NO: 1665547 - RNA, 19 nt, Homo sapiens
  misc_RNA (1)...(19): siRNA sense strand
aaucaaagaguaacagcuu

SEQ ID NO: 1665548 - RNA, 19 nt, Homo sapiens
  misc_RNA (1)...(19): siRNA sense strand
aaagagugaagucaagauu

SEQ ID NO: 1665549 - RNA, 19 nt, Homo sapiens
  misc_RNA (1)...(19): siRNA sense strand
gcaguugcccagugaucuu

SEQ ID NO: 1665550 - RNA, 19 nt, Homo sapiens
  misc_RNA (1)...(19): siRNA sense strand
ugaggaagagccauuuaau

SEQ ID NO: 1665551 - RNA, 19 nt, Homo sapiens
  misc_RNA (1)...(19): siRNA sense strand
cauuacacaugcuauugau

SEQ ID NO: 1665552 - RNA, 19 nt, Homo sapiens
  misc_RNA (1)...(19): siRNA sense strand
caaacacuucucuauaauc

SEQ ID NO: 1665553 - RNA, 19 nt, Homo sapiens
  misc_RNA (1)...(19): siRNA sense strand
uaaagcccauggaaagaac

SEQ ID NO: 1665554 - RNA, 19 nt, Homo sapiens
  misc_RNA (1)...(19): siRNA sense strand
uuucacagguacaaagaau

SEQ ID NO: 1665555 - RNA, 19 nt, Homo sapiens
  misc_RNA (1)...(19): siRNA sense strand
ggaaagaacuucaggaaau

SEQ ID NO: 1665556 - RNA, 19 nt, Homo sapiens
  misc_RNA (1)...(19): siRNA sense strand
ugaaugcucugcagaaaua

SEQ ID NO: 1665557 - RNA, 19 nt, Homo sapiens
  misc_RNA (1)...(19): siRNA sense strand
gaaagcacauuccguuuau

SEQ ID NO: 1665558 - RNA, 19 nt, Homo sapiens
  misc_RNA (1)...(19): siRNA sense strand
gaaagaacuucaggaaauu

SEQ ID NO: 1665559 - RNA, 19 nt, Homo sapiens
  misc_RNA (1)...(19): siRNA sense strand
ugaaagaacucauggaaau

SEQ ID NO: 1665560 - RNA, 19 nt, Homo sapiens
  misc_RNA (1)...(19): siRNA sense strand
gcagaaauaucccaacugu

SEQ ID NO: 1665561 - RNA, 19 nt, Homo sapiens
  misc_RNA (1)...(19): siRNA sense strand
gcugagaaguggaaugaaa

SEQ ID NO: 1665562 - RNA, 19 nt, Homo sapiens
  misc_RNA (1)...(19): siRNA sense strand
gcacauuccguuuauaauu

SEQ ID NO: 1665563 - RNA, 19 nt, Homo sapiens
  misc_RNA (1)...(19): siRNA sense strand
ccagugaucuucauauuag

SEQ ID NO: 1665564 - RNA, 19 nt, Homo sapiens
  misc_RNA (1)...(19): siRNA sense strand
gaaagaacucauggaaaua

SEQ ID NO: 1665565 - RNA, 19 nt, Homo sapiens
  misc_RNA (1)...(19): siRNA sense strand
gcagauacacuuaaugaau

SEQ ID NO: 1665566 - RNA, 19 nt, Homo sapiens
  misc_RNA (1)...(19): siRNA sense strand
ggaaauagaagaagugagu

SEQ ID NO: 1665567 - RNA, 19 nt, Homo sapiens
  misc_RNA (1)...(19): siRNA sense strand
gaagcaagccaacugugua

SEQ ID NO: 1665568 - RNA, 19 nt, Homo sapiens
  misc_RNA (1)...(19): siRNA sense strand
ggaaaucacaaggcaguua

SEQ ID NO: 1665569 - RNA, 19 nt, Homo sapiens
  misc_RNA (1)...(19): siRNA sense strand
gaaauucacagagagagua

SEQ ID NO: 1665570 - RNA, 19 nt, Homo sapiens
  misc_RNA (1)...(19): siRNA sense strand
gaaaucacaaggcaguuaa

SEQ ID NO: 1665571 - RNA, 19 nt, Homo sapiens
  misc_RNA (1)...(19): siRNA sense strand
caaauggucuauaaugagu

SEQ ID NO: 1665572 - RNA, 19 nt, Homo sapiens
  misc_RNA (1)...(19): siRNA sense strand
accaaacacuucucuauaa

SEQ ID NO: 1665573 - RNA, 19 nt, Homo sapiens
  misc_RNA (1)...(19): siRNA sense strand
aggaagagccauuuaauuu

SEQ ID NO: 1665574 - RNA, 19 nt, Homo sapiens
  misc_RNA (1)...(19): siRNA sense strand
guaacucuguccuuauuau

SEQ ID NO: 1665575 - RNA, 19 nt, Homo sapiens
  misc_RNA (1)...(19): siRNA sense strand
cuacagaagcauuucaaua

SEQ ID NO: 1665576 - RNA, 19 nt, Homo sapiens
  misc_RNA (1)...(19): siRNA sense strand
gaggaagagccauuuaauu

SEQ ID NO: 1665577 - RNA, 19 nt, Homo sapiens
  misc_RNA (1)...(19): siRNA sense strand
ccaaacacuucucuauaau

SEQ ID NO: 1665578 - RNA, 19 nt, Homo sapiens
  misc_RNA (1)...(19): siRNA sense strand
cagaagcauuucaauauca

SEQ ID NO: 1665579 - RNA, 19 nt, Homo sapiens
  misc_RNA (1)...(19): siRNA sense strand
gaagagccauuuaauuuuc

SEQ ID NO: 1665580 - RNA, 19 nt, Homo sapiens
  misc_RNA (1)...(19): siRNA sense strand
ucacagguacaaagaauuu

SEQ ID NO: 1665581 - RNA, 19 nt, Homo sapiens
  misc_RNA (1)...(19): siRNA sense strand
ggucuuacauguagauugg

SEQ ID NO: 1665582 - RNA, 19 nt, Homo sapiens
  misc_RNA (1)...(19): siRNA sense strand
gcccagugaucuucauauu

SEQ ID NO: 1665583 - RNA, 19 nt, Homo sapiens
  misc_RNA (1)...(19): siRNA sense strand
agucguaaaucaaagagua

SEQ ID NO: 1665584 - RNA, 19 nt, Homo sapiens
  misc_RNA (1)...(19): siRNA sense strand
cgucagaguccacauagua

SEQ ID NO: 1665585 - RNA, 19 nt, Homo sapiens
  misc_RNA (1)...(19): siRNA sense strand
gagaguaccagcugaugaa

SEQ ID NO: 1665586 - RNA, 19 nt, Homo sapiens
  misc_RNA (1)...(19): siRNA sense strand
uaauaaagcccauggaaag

SEQ ID NO: 1665587 - RNA, 19 nt, Homo sapiens
  misc_RNA (1)...(19): siRNA sense strand
aguaacagcuuaauucaca

SEQ ID NO: 1665588 - RNA, 19 nt, Homo sapiens
  misc_RNA (1)...(19): siRNA sense strand
gcauuucaauaucagcaaa

SEQ ID NO: 1665589 - RNA, 19 nt, Homo sapiens
  misc_RNA (1)...(19): siRNA sense strand
aaagaacaguuaucucuac

SEQ ID NO: 1665590 - RNA, 19 nt, Homo sapiens
  misc_RNA (1)...(19): siRNA sense strand
ucacaaggcaguuaaaucu

SEQ ID NO: 1665591 - RNA, 19 nt, Homo sapiens
  misc_RNA (1)...(19): siRNA sense strand
gcaucgcacccauuuauga

SEQ ID NO: 1665592 - RNA, 19 nt, Homo sapiens
  misc_RNA (1)...(19): siRNA sense strand
gaaguggaaugaaaauguu

SEQ ID NO: 1665593 - RNA, 19 nt, Homo sapiens
  misc_RNA (1)...(19): siRNA sense strand
uaaccuauuuggagugcaa

SEQ ID NO: 1665594 - RNA, 19 nt, Homo sapiens
  misc_RNA (1)...(19): siRNA sense strand
ugaaacugcuuuuggauaa

SEQ ID NO: 1665595 - RNA, 19 nt, Homo sapiens
  misc_RNA (1)...(19): siRNA sense strand
cagcaucgcacccauuuau

SEQ ID NO: 1665596 - RNA, 19 nt, Homo sapiens
  misc_RNA (1)...(19): siRNA sense strand
gaaguacuacagaagcauu

SEQ ID NO: 1665597 - RNA, 19 nt, Homo sapiens
  misc_RNA (1)...(19): siRNA sense strand
uaagugagcugcugaaaag

SEQ ID NO: 1665598 - RNA, 19 nt, Homo sapiens
  misc_RNA (1)...(19): siRNA sense strand
caaaaucgcccuaaaggaa

SEQ ID NO: 1665599 - RNA, 19 nt, Homo sapiens
  misc_RNA (1)...(19): siRNA sense strand
gcagaucaaugacaaaauc

SEQ ID NO: 1665600 - RNA, 19 nt, Homo sapiens
  misc_RNA (1)...(19): siRNA sense strand
uaugaaugcucugcagaaa

SEQ ID NO: 1665601 - RNA, 19 nt, Homo sapiens
  misc_RNA (1)...(19): siRNA sense strand
ggaagcaagccaacugugu

SEQ ID NO: 1665602 - RNA, 19 nt, Homo sapiens
  misc_RNA (1)...(19): siRNA sense strand
gcaagaaguacuacagaag

SEQ ID NO: 1665603 - RNA, 19 nt, Homo sapiens
  misc_RNA (1)...(19): siRNA sense strand
aaaccaaacacuucucuau

SEQ ID NO: 1665604 - RNA, 19 nt, Homo sapiens
  misc_RNA (1)...(19): siRNA sense strand
guaguuggagauaaaguuu

SEQ ID NO: 1665605 - RNA, 19 nt, Homo sapiens
  misc_RNA (1)...(19): siRNA sense strand
ucaaagaguaacagcuuaa

SEQ ID NO: 1665606 - RNA, 19 nt, Homo sapiens
  misc_RNA (1)...(19): siRNA sense strand
ggaagagccauuuaauuuu

SEQ ID NO: 1665607 - RNA, 19 nt, Homo sapiens
  misc_RNA (1)...(19): siRNA sense strand
uauuguacauggucuauca

SEQ ID NO: 1665608 - RNA, 19 nt, Homo sapiens
  misc_RNA (1)...(19): siRNA sense strand
cggcagauacacuuaauga

SEQ ID NO: 1665609 - RNA, 19 nt, Homo sapiens
  misc_RNA (1)...(19): siRNA sense strand
ggacucgaaagcaaauauu

SEQ ID NO: 1665610 - RNA, 19 nt, Homo sapiens
  misc_RNA (1)...(19): siRNA sense strand
ugccguagaucuaauggaa

SEQ ID NO: 1665611 - RNA, 19 nt, Homo sapiens
  misc_RNA (1)...(19): siRNA sense strand
gaugcuugcuuuaaaucga

SEQ ID NO: 1665612 - RNA, 19 nt, Homo sapiens
  misc_RNA (1)...(19): siRNA sense strand
acagaagcauuucaauauc

SEQ ID NO: 1665613 - RNA, 19 nt, Homo sapiens
  misc_RNA (1)...(19): siRNA sense strand
gaaaauguaguuggagaua

SEQ ID NO: 1665614 - RNA, 19 nt, Homo sapiens
  misc_RNA (1)...(19): siRNA sense strand
aagcacauuccguuuauaa

SEQ ID NO: 1665615 - RNA, 19 nt, Homo sapiens
  misc_RNA (1)...(19): siRNA sense strand
agauagaagugugcaagaa

SEQ ID NO: 1665616 - RNA, 19 nt, Homo sapiens
  misc_RNA (1)...(19): siRNA sense strand
guuauuggucuuacaugua

SEQ ID NO: 1665617 - RNA, 19 nt, Homo sapiens
  misc_RNA (1)...(19): siRNA sense strand
uuuggaagcuuugcugaaa

SEQ ID NO: 1665618 - RNA, 19 nt, Homo sapiens
  misc_RNA (1)...(19): siRNA sense strand
gcaacauccucacuaagcu

SEQ ID NO: 1665619 - RNA, 19 nt, Homo sapiens
  misc_RNA (1)...(19): siRNA sense strand
aagaguaacagcuuaauuc

SEQ ID NO: 1665620 - RNA, 19 nt, Homo sapiens
  misc_RNA (1)...(19): siRNA sense strand
aaccaaacacuucucuaua

SEQ ID NO: 1665621 - RNA, 19 nt, Homo sapiens
  misc_RNA (1)...(19): siRNA sense strand
gcaguuaaaucuggaaaau

SEQ ID NO: 1665622 - RNA, 19 nt, Homo sapiens
  misc_RNA (1)...(19): siRNA sense strand
gaacuucaggaaauucaca

SEQ ID NO: 1665623 - RNA, 19 nt, Homo sapiens
  misc_RNA (1)...(19): siRNA sense strand
gagcagucguaaaucaaag

SEQ ID NO: 1665624 - RNA, 19 nt, Homo sapiens
  misc_RNA (1)...(19): siRNA sense strand
guacauggucuaucagucu

SEQ ID NO: 1665625 - RNA, 19 nt, Homo sapiens
  misc_RNA (1)...(19): siRNA sense strand
gcuauugaugcuugcuuua

SEQ ID NO: 1665626 - RNA, 19 nt, Homo sapiens
  misc_RNA (1)...(19): siRNA sense strand
cugcagaguuuccagacaa

SEQ ID NO: 1665627 - RNA, 19 nt, Homo sapiens
  misc_RNA (1)...(19): siRNA sense strand
uuaauaaagcccauggaaa

SEQ ID NO: 1665628 - RNA, 19 nt, Homo sapiens
  misc_RNA (1)...(19): siRNA sense strand
gagugcaaguacaauacaa

SEQ ID NO: 1665629 - RNA, 19 nt, Homo sapiens
  misc_RNA (1)...(19): siRNA sense strand
gaacucauggaaauagaag

SEQ ID NO: 1665630 - RNA, 19 nt, Homo sapiens
  misc_RNA (1)...(19): siRNA sense strand
uucaguaucucucagaaga

SEQ ID NO: 1665631 - RNA, 19 nt, Homo sapiens
  misc_RNA (1)...(19): siRNA sense strand
uuauuggucuuacauguag

SEQ ID NO: 1665632 - RNA, 19 nt, Homo sapiens
  misc_RNA (1)...(19): siRNA sense strand
ugggcaacauccucacuaa

SEQ ID NO: 1665633 - RNA, 19 nt, Homo sapiens
  misc_RNA (1)...(19): siRNA sense strand
uaacagcaucgcacccauu

SEQ ID NO: 1665634 - RNA, 19 nt, Homo sapiens
  misc_RNA (1)...(19): siRNA sense strand
ggucauuacacaugcuauu

SEQ ID NO: 1665635 - RNA, 19 nt, Homo sapiens
  misc_RNA (1)...(19): siRNA sense strand
ucacacagagugccuuuca

SEQ ID NO: 1665636 - RNA, 19 nt, Homo sapiens
  misc_RNA (1)...(19): siRNA sense strand
gauagaagugugcaagaag

SEQ ID NO: 1665637 - RNA, 19 nt, Homo sapiens
  misc_RNA (1)...(19): siRNA sense strand
agagugccuuucacaggua

SEQ ID NO: 1665638 - RNA, 19 nt, Homo sapiens
  misc_RNA (1)...(19): siRNA sense strand
cccagugaucuucauauua

SEQ ID NO: 1665639 - RNA, 19 nt, Homo sapiens
  misc_RNA (1)...(19): siRNA sense strand
ugacaucuaugaggaagag

SEQ ID NO: 1665640 - RNA, 19 nt, Homo sapiens
  misc_RNA (1)...(19): siRNA sense strand
gcauggacucgaaagcaaa

SEQ ID NO: 1665641 - RNA, 19 nt, Homo sapiens
  misc_RNA (1)...(19): siRNA sense strand
ugcaagaaguacuacagaa

SEQ ID NO: 1665642 - RNA, 19 nt, Homo sapiens
  misc_RNA (1)...(19): siRNA sense strand
agagugaagucaagauuuu

SEQ ID NO: 1665643 - RNA, 19 nt, Homo sapiens
  misc_RNA (1)...(19): siRNA sense strand
caaguacaauacaaacacu

SEQ ID NO: 1665644 - RNA, 19 nt, Homo sapiens
  misc_RNA (1)...(19): siRNA sense strand
gaaagauuuugucgucaga

SEQ ID NO: 1665645 - RNA, 19 nt, Homo sapiens
  misc_RNA (1)...(19): siRNA sense strand
gcaaguacaauacaaacac

SEQ ID NO: 1665646 - RNA, 19 nt, Homo sapiens
  misc_RNA (1)...(19): siRNA sense strand
aaagcacauuccguuuaua

SEQ ID NO: 1665647 - RNA, 19 nt, Homo sapiens
  misc_RNA (1)...(19): siRNA sense strand
aaucaaagaguaacagcuu

SEQ ID NO: 1665648 - RNA, 19 nt, Homo sapiens
  misc_RNA (1)...(19): siRNA sense strand
aaagagugaagucaagauu

SEQ ID NO: 1665649 - RNA, 19 nt, Homo sapiens
  misc_RNA (1)...(19): siRNA sense strand
gcaguugcccagugaucuu

SEQ ID NO: 1665650 - RNA, 19 nt, Homo sapiens
  misc_RNA (1)...(19): siRNA sense strand
ugaggaagagccauuuaau

SEQ ID NO: 1665651 - RNA, 19 nt, Homo sapiens
  misc_RNA (1)...(19): siRNA sense strand
cauuacacaugcuauugau

SEQ ID NO: 1665652 - RNA, 19 nt, Homo sapiens
  misc_RNA (1)...(19): siRNA sense strand
caaacacuucucuauaauc

SEQ ID NO: 1665653 - RNA, 19 nt, Homo sapiens
  misc_RNA (1)...(19): siRNA sense strand
uaaagcccauggaaagaac

SEQ ID NO: 1665654 - RNA, 19 nt, Homo sapiens
  misc_RNA (1)...(19): siRNA sense strand
uuucacagguacaaagaau

SEQ ID NO: 1665655 - RNA, 19 nt, Homo sapiens
  misc_RNA (1)...(19): siRNA sense strand
ggaaagaacuucaggaaau

SEQ ID NO: 1665656 - RNA, 19 nt, Homo sapiens
  misc_RNA (1)...(19): siRNA sense strand
ugaaugcucugcagaaaua

SEQ ID NO: 1665657 - RNA, 19 nt, Homo sapiens
  misc_RNA (1)...(19): siRNA sense strand
gaaagcacauuccguuuau

SEQ ID NO: 1665658 - RNA, 19 nt, Homo sapiens
  misc_RNA (1)...(19): siRNA sense strand
gaaagaacuucaggaaauu

SEQ ID NO: 1665659 - RNA, 19 nt, Homo sapiens
  misc_RNA (1)...(19): siRNA sense strand
ugaaagaacucauggaaau

SEQ ID NO: 1665660 - RNA, 19 nt, Homo sapiens
  misc_RNA (1)...(19): siRNA sense strand
gcagaaauaucccaacugu

SEQ ID NO: 1665661 - RNA, 19 nt, Homo sapiens
  misc_RNA (1)...(19): siRNA sense strand
gcugagaaguggaaugaaa

SEQ ID NO: 1665662 - RNA, 19 nt, Homo sapiens
  misc_RNA (1)...(19): siRNA sense strand
gcacauuccguuuauaauu

SEQ ID NO: 1665663 - RNA, 19 nt, Homo sapiens
  misc_RNA (1)...(19): siRNA sense strand
ccagugaucuucauauuag

SEQ ID NO: 1665664 - RNA, 19 nt, Homo sapiens
  misc_RNA (1)...(19): siRNA sense strand
gaaagaacucauggaaaua

SEQ ID NO: 1665665 - RNA, 19 nt, Homo sapiens
  misc_RNA (1)...(19): siRNA sense strand
gcagauacacuuaaugaau

SEQ ID NO: 1665666 - RNA, 19 nt, Homo sapiens
  misc_RNA (1)...(19): siRNA sense strand
ggaaauagaagaagugagu

SEQ ID NO: 1665667 - RNA, 19 nt, Homo sapiens
  misc_RNA (1)...(19): siRNA sense strand
gaagcaagccaacugugua

SEQ ID NO: 1665668 - RNA, 19 nt, Homo sapiens
  misc_RNA (1)...(19): siRNA sense strand
ggaaaucacaaggcaguua

SEQ ID NO: 1665669 - RNA, 19 nt, Homo sapiens
  misc_RNA (1)...(19): siRNA sense strand
gaaauucacagagagagua

SEQ ID NO: 1665670 - RNA, 19 nt, Homo sapiens
  misc_RNA (1)...(19): siRNA sense strand
gaaaucacaaggcaguuaa

SEQ ID NO: 1665671 - RNA, 19 nt, Homo sapiens
  misc_RNA (1)...(19): siRNA sense strand
caaauggucuauaaugagu

SEQ ID NO: 1665672 - RNA, 19 nt, Homo sapiens
  misc_RNA (1)...(19): siRNA sense strand
accaaacacuucucuauaa

SEQ ID NO: 1665673 - RNA, 19 nt, Homo sapiens
  misc_RNA (1)...(19): siRNA sense strand
aggaagagccauuuaauuu

SEQ ID NO: 1665674 - RNA, 19 nt, Homo sapiens
  misc_RNA (1)...(19): siRNA sense strand
guaacucuguccuuauuau

SEQ ID NO: 1665675 - RNA, 19 nt, Homo sapiens
  misc_RNA (1)...(19): siRNA sense strand
cuacagaagcauuucaaua

SEQ ID NO: 1665676 - RNA, 19 nt, Homo sapiens
  misc_RNA (1)...(19): siRNA sense strand
gaggaagagccauuuaauu

SEQ ID NO: 1665677 - RNA, 19 nt, Homo sapiens
  misc_RNA (1)...(19): siRNA sense strand
ccaaacacuucucuauaau

SEQ ID NO: 1665678 - RNA, 19 nt, Homo sapiens
  misc_RNA (1)...(19): siRNA sense strand
cagaagcauuucaauauca

SEQ ID NO: 1665679 - RNA, 19 nt, Homo sapiens
  misc_RNA (1)...(19): siRNA sense strand
gaagagccauuuaauuuuc

SEQ ID NO: 1665680 - RNA, 19 nt, Homo sapiens
  misc_RNA (1)...(19): siRNA sense strand
ucacagguacaaagaauuu

SEQ ID NO: 1665681 - RNA, 19 nt, Homo sapiens
  misc_RNA (1)...(19): siRNA sense strand
ggucuuacauguagauugg

SEQ ID NO: 1665682 - RNA, 19 nt, Homo sapiens
  misc_RNA (1)...(19): siRNA sense strand
gcccagugaucuucauauu

SEQ ID NO: 1665683 - RNA, 19 nt, Homo sapiens
  misc_RNA (1)...(19): siRNA sense strand
agucguaaaucaaagagua

SEQ ID NO: 1665684 - RNA, 19 nt, Homo sapiens
  misc_RNA (1)...(19): siRNA sense strand
cgucagaguccacauagua

SEQ ID NO: 1665685 - RNA, 19 nt, Homo sapiens
  misc_RNA (1)...(19): siRNA sense strand
gagaguaccagcugaugaa

SEQ ID NO: 1665686 - RNA, 19 nt, Homo sapiens
  misc_RNA (1)...(19): siRNA sense strand
uaauaaagcccauggaaag

SEQ ID NO: 1665687 - RNA, 19 nt, Homo sapiens
  misc_RNA (1)...(19): siRNA sense strand
aguaacagcuuaauucaca

SEQ ID NO: 1665688 - RNA, 19 nt, Homo sapiens
  misc_RNA (1)...(19): siRNA sense strand
gcauuucaauaucagcaaa

SEQ ID NO: 1665689 - RNA, 19 nt, Homo sapiens
  misc_RNA (1)...(19): siRNA sense strand
aaagaacaguuaucucuac

SEQ ID NO: 1665690 - RNA, 19 nt, Homo sapiens
  misc_RNA (1)...(19): siRNA sense strand
ucacaaggcaguuaaaucu

SEQ ID NO: 1665691 - RNA, 19 nt, Homo sapiens
  misc_RNA (1)...(19): siRNA sense strand
gcaucgcacccauuuauga

SEQ ID NO: 1665692 - RNA, 19 nt, Homo sapiens
  misc_RNA (1)...(19): siRNA sense strand
gaaguggaaugaaaauguu

SEQ ID NO: 1665693 - RNA, 19 nt, Homo sapiens
  misc_RNA (1)...(19): siRNA sense strand
uaaccuauuuggagugcaa

SEQ ID NO: 1665694 - RNA, 19 nt, Homo sapiens
  misc_RNA (1)...(19): siRNA sense strand
ugaaacugcuuuuggauaa

SEQ ID NO: 1665695 - RNA, 19 nt, Homo sapiens
  misc_RNA (1)...(19): siRNA sense strand
cagcaucgcacccauuuau

SEQ ID NO: 1665696 - RNA, 19 nt, Homo sapiens
  misc_RNA (1)...(19): siRNA sense strand
gaaguacuacagaagcauu

SEQ ID NO: 1665697 - RNA, 19 nt, Homo sapiens
  misc_RNA (1)...(19): siRNA sense strand
uaagugagcugcugaaaag

SEQ ID NO: 1665698 - RNA, 19 nt, Homo sapiens
  misc_RNA (1)...(19): siRNA sense strand
caaaaucgcccuaaaggaa

SEQ ID NO: 1665699 - RNA, 19 nt, Homo sapiens
  misc_RNA (1)...(19): siRNA sense strand
gcagaucaaugacaaaauc

SEQ ID NO: 1665700 - RNA, 19 nt, Homo sapiens
  misc_RNA (1)...(19): siRNA sense strand
uaugaaugcucugcagaaa

SEQ ID NO: 1665701 - RNA, 19 nt, Homo sapiens
  misc_RNA (1)...(19): siRNA sense strand
ggaagcaagccaacugugu

SEQ ID NO: 1665702 - RNA, 19 nt, Homo sapiens
  misc_RNA (1)...(19): siRNA sense strand
gcaagaaguacuacagaag

SEQ ID NO: 1665703 - RNA, 19 nt, Homo sapiens
  misc_RNA (1)...(19): siRNA sense strand
aaaccaaacacuucucuau

SEQ ID NO: 1665704 - RNA, 19 nt, Homo sapiens
  misc_RNA (1)...(19): siRNA sense strand
guaguuggagauaaaguuu

SEQ ID NO: 1665705 - RNA, 19 nt, Homo sapiens
  misc_RNA (1)...(19): siRNA sense strand
ucaaagaguaacagcuuaa

SEQ ID NO: 1665706 - RNA, 19 nt, Homo sapiens
  misc_RNA (1)...(19): siRNA sense strand
ggaagagccauuuaauuuu

SEQ ID NO: 1665707 - RNA, 19 nt, Homo sapiens
  misc_RNA (1)...(19): siRNA sense strand
uauuguacauggucuauca

SEQ ID NO: 1665708 - RNA, 19 nt, Homo sapiens
  misc_RNA (1)...(19): siRNA sense strand
cggcagauacacuuaauga

SEQ ID NO: 1665709 - RNA, 19 nt, Homo sapiens
  misc_RNA (1)...(19): siRNA sense strand
ggacucgaaagcaaauauu

SEQ ID NO: 1665710 - RNA, 19 nt, Homo sapiens
  misc_RNA (1)...(19): siRNA sense strand
ugccguagaucuaauggaa

SEQ ID NO: 1665711 - RNA, 19 nt, Homo sapiens
  misc_RNA (1)...(19): siRNA sense strand
gaugcuugcuuuaaaucga

SEQ ID NO: 1665712 - RNA, 19 nt, Homo sapiens
  misc_RNA (1)...(19): siRNA sense strand
acagaagcauuucaauauc

SEQ ID NO: 1665713 - RNA, 19 nt, Homo sapiens
  misc_RNA (1)...(19): siRNA sense strand
gaaaauguaguuggagaua

SEQ ID NO: 1665714 - RNA, 19 nt, Homo sapiens
  misc_RNA (1)...(19): siRNA sense strand
aagcacauuccguuuauaa

SEQ ID NO: 1665715 - RNA, 19 nt, Homo sapiens
  misc_RNA (1)...(19): siRNA sense strand
agauagaagugugcaagaa

SEQ ID NO: 1665716 - RNA, 19 nt, Homo sapiens
  misc_RNA (1)...(19): siRNA sense strand
guuauuggucuuacaugua

SEQ ID NO: 1665717 - RNA, 19 nt, Homo sapiens
  misc_RNA (1)...(19): siRNA sense strand
uuuggaagcuuugcugaaa

SEQ ID NO: 1665718 - RNA, 19 nt, Homo sapiens
  misc_RNA (1)...(19): siRNA sense strand
gcaacauccucacuaagcu

SEQ ID NO: 1665719 - RNA, 19 nt, Homo sapiens
  misc_RNA (1)...(19): siRNA sense strand
aagaguaacagcuuaauuc

SEQ ID NO: 1665720 - RNA, 19 nt, Homo sapiens
  misc_RNA (1)...(19): siRNA sense strand
aaccaaacacuucucuaua

SEQ ID NO: 1665721 - RNA, 19 nt, Homo sapiens
  misc_RNA (1)...(19): siRNA sense strand
gcaguuaaaucuggaaaau

SEQ ID NO: 1665722 - RNA, 19 nt, Homo sapiens
  misc_RNA (1)...(19): siRNA sense strand
gaacuucaggaaauucaca

SEQ ID NO: 1665723 - RNA, 19 nt, Homo sapiens
  misc_RNA (1)...(19): siRNA sense strand
gagcagucguaaaucaaag

SEQ ID NO: 1665724 - RNA, 19 nt, Homo sapiens
  misc_RNA (1)...(19): siRNA sense strand
guacauggucuaucagucu

SEQ ID NO: 1665725 - RNA, 19 nt, Homo sapiens
  misc_RNA (1)...(19): siRNA sense strand
gcuauugaugcuugcuuua

SEQ ID NO: 1665726 - RNA, 19 nt, Homo sapiens
  misc_RNA (1)...(19): siRNA sense strand
cugcagaguuuccagacaa

SEQ ID NO: 1665727 - RNA, 19 nt, Homo sapiens
  misc_RNA (1)...(19): siRNA sense strand
uuaauaaagcccauggaaa

SEQ ID NO: 1665728 - RNA, 19 nt, Homo sapiens
  misc_RNA (1)...(19): siRNA sense strand
gagugcaaguacaauacaa

SEQ ID NO: 1665729 - RNA, 19 nt, Homo sapiens
  misc_RNA (1)...(19): siRNA sense strand
gaacucauggaaauagaag

SEQ ID NO: 1665730 - RNA, 19 nt, Homo sapiens
  misc_RNA (1)...(19): siRNA sense strand
uucaguaucucucagaaga

SEQ ID NO: 1665731 - RNA, 19 nt, Homo sapiens
  misc_RNA (1)...(19): siRNA sense strand
uuauuggucuuacauguag

SEQ ID NO: 1665732 - RNA, 19 nt, Homo sapiens
  misc_RNA (1)...(19): siRNA sense strand
ugggcaacauccucacuaa

SEQ ID NO: 1665733 - RNA, 19 nt, Homo sapiens
  misc_RNA (1)...(19): siRNA sense strand
uaacagcaucgcacccauu

SEQ ID NO: 1665734 - RNA, 19 nt, Homo sapiens
  misc_RNA (1)...(19): siRNA sense strand
ggucauuacacaugcuauu

SEQ ID NO: 1665735 - RNA, 19 nt, Homo sapiens
  misc_RNA (1)...(19): siRNA sense strand
ucacacagagugccuuuca

SEQ ID NO: 1665736 - RNA, 19 nt, Homo sapiens
  misc_RNA (1)...(19): siRNA sense strand
gauagaagugugcaagaag

SEQ ID NO: 1665737 - RNA, 19 nt, Homo sapiens
  misc_RNA (1)...(19): siRNA sense strand
agagugccuuucacaggua

SEQ ID NO: 1665738 - RNA, 19 nt, Homo sapiens
  misc_RNA (1)...(19): siRNA sense strand
cccagugaucuucauauua

SEQ ID NO: 1665739 - RNA, 19 nt, Homo sapiens
  misc_RNA (1)...(19): siRNA sense strand
ugacaucuaugaggaagag

SEQ ID NO: 1665740 - RNA, 19 nt, Homo sapiens
  misc_RNA (1)...(19): siRNA sense strand
gcauggacucgaaagcaaa

SEQ ID NO: 1665741 - RNA, 19 nt, Homo sapiens
  misc_RNA (1)...(19): siRNA sense strand
ugcaagaaguacuacagaa

SEQ ID NO: 1665742 - RNA, 19 nt, Homo sapiens
  misc_RNA (1)...(19): siRNA sense strand
agagugaagucaagauuuu

SEQ ID NO: 1665743 - RNA, 19 nt, Homo sapiens
  misc_RNA (1)...(19): siRNA sense strand
caaguacaauacaaacacu

SEQ ID NO: 1665744 - RNA, 19 nt, Homo sapiens
  misc_RNA (1)...(19): siRNA sense strand
gaaagauuuugucgucaga

SEQ ID NO: 1665745 - RNA, 19 nt, Homo sapiens
  misc_RNA (1)...(19): siRNA sense strand
gcaaguacaauacaaacac

SEQ ID NO: 1665746 - RNA, 19 nt, Homo sapiens
  misc_RNA (1)...(19): siRNA sense strand
aaagcacauuccguuuaua

SEQ ID NO: 1665747 - RNA, 19 nt, Homo sapiens
  misc_RNA (1)...(19): siRNA sense strand
aaucaaagaguaacagcuu

SEQ ID NO: 1665748 - RNA, 19 nt, Homo sapiens
  misc_RNA (1)...(19): siRNA sense strand
aaagagugaagucaagauu

SEQ ID NO: 1665749 - RNA, 19 nt, Homo sapiens
  misc_RNA (1)...(19): siRNA sense strand
gcaguugcccagugaucuu

SEQ ID NO: 1665750 - RNA, 19 nt, Homo sapiens
  misc_RNA (1)...(19): siRNA sense strand
ugaggaagagccauuuaau

SEQ ID NO: 1665751 - RNA, 19 nt, Homo sapiens
  misc_RNA (1)...(19): siRNA sense strand
cauuacacaugcuauugau

SEQ ID NO: 1665752 - RNA, 19 nt, Homo sapiens
  misc_RNA (1)...(19): siRNA sense strand
caaacacuucucuauaauc

SEQ ID NO: 1665753 - RNA, 19 nt, Homo sapiens
  misc_RNA (1)...(19): siRNA sense strand
uaaagcccauggaaagaac

SEQ ID NO: 1665754 - RNA, 19 nt, Homo sapiens
  misc_RNA (1)...(19): siRNA sense strand
uuucacagguacaaagaau

SEQ ID NO: 1665755 - RNA, 19 nt, Homo sapiens
  misc_RNA (1)...(19): siRNA sense strand
ggaaagaacuucaggaaau

SEQ ID NO: 1665756 - RNA, 19 nt, Homo sapiens
  misc_RNA (1)...(19): siRNA sense strand
ugaaugcucugcagaaaua

SEQ ID NO: 1665757 - RNA, 19 nt, Homo sapiens
  misc_RNA (1)...(19): siRNA sense strand
gaaagcacauuccguuuau

SEQ ID NO: 1665758 - RNA, 19 nt, Homo sapiens
  misc_RNA (1)...(19): siRNA sense strand
gaaagaacuucaggaaauu

SEQ ID NO: 1665759 - RNA, 19 nt, Homo sapiens
  misc_RNA (1)...(19): siRNA sense strand
ugaaagaacucauggaaau

SEQ ID NO: 1665760 - RNA, 19 nt, Homo sapiens
  misc_RNA (1)...(19): siRNA sense strand
gcagaaauaucccaacugu

SEQ ID NO: 1665761 - RNA, 19 nt, Homo sapiens
  misc_RNA (1)...(19): siRNA sense strand
gcugagaaguggaaugaaa

SEQ ID NO: 1665762 - RNA, 19 nt, Homo sapiens
  misc_RNA (1)...(19): siRNA sense strand
gcacauuccguuuauaauu

SEQ ID NO: 1665763 - RNA, 19 nt, Homo sapiens
  misc_RNA (1)...(19): siRNA sense strand
ccagugaucuucauauuag

SEQ ID NO: 1665764 - RNA, 19 nt, Homo sapiens
  misc_RNA (1)...(19): siRNA sense strand
gaaagaacucauggaaaua

SEQ ID NO: 1665765 - RNA, 19 nt, Homo sapiens
  misc_RNA (1)...(19): siRNA sense strand
gcagauacacuuaaugaau

SEQ ID NO: 1665766 - RNA, 19 nt, Homo sapiens
  misc_RNA (1)...(19): siRNA sense strand
ggaaauagaagaagugagu

SEQ ID NO: 1665767 - RNA, 19 nt, Homo sapiens
  misc_RNA (1)...(19): siRNA sense strand
gaagcaagccaacugugua

SEQ ID NO: 1665768 - RNA, 19 nt, Homo sapiens
  misc_RNA (1)...(19): siRNA sense strand
ggaaaucacaaggcaguua

SEQ ID NO: 1665769 - RNA, 19 nt, Homo sapiens
  misc_RNA (1)...(19): siRNA sense strand
gaaauucacagagagagua

SEQ ID NO: 1665770 - RNA, 19 nt, Homo sapiens
  misc_RNA (1)...(19): siRNA sense strand
gaaaucacaaggcaguuaa

SEQ ID NO: 1665771 - RNA, 19 nt, Homo sapiens
  misc_RNA (1)...(19): siRNA sense strand
caaauggucuauaaugagu

SEQ ID NO: 1665772 - RNA, 19 nt, Homo sapiens
  misc_RNA (1)...(19): siRNA sense strand
accaaacacuucucuauaa

SEQ ID NO: 1665773 - RNA, 19 nt, Homo sapiens
  misc_RNA (1)...(19): siRNA sense strand
aggaagagccauuuaauuu

SEQ ID NO: 1665774 - RNA, 19 nt, Homo sapiens
  misc_RNA (1)...(19): siRNA sense strand
guaacucuguccuuauuau

SEQ ID NO: 1665775 - RNA, 19 nt, Homo sapiens
  misc_RNA (1)...(19): siRNA sense strand
cuacagaagcauuucaaua

SEQ ID NO: 1665776 - RNA, 19 nt, Homo sapiens
  misc_RNA (1)...(19): siRNA sense strand
gaggaagagccauuuaauu

SEQ ID NO: 1665777 - RNA, 19 nt, Homo sapiens
  misc_RNA (1)...(19): siRNA sense strand
ccaaacacuucucuauaau

SEQ ID NO: 1665778 - RNA, 19 nt, Homo sapiens
  misc_RNA (1)...(19): siRNA sense strand
cagaagcauuucaauauca

SEQ ID NO: 1665779 - RNA, 19 nt, Homo sapiens
  misc_RNA (1)...(19): siRNA sense strand
gaagagccauuuaauuuuc

SEQ ID NO: 1665780 - RNA, 19 nt, Homo sapiens
  misc_RNA (1)...(19): siRNA sense strand
ucacagguacaaagaauuu

SEQ ID NO: 1665781 - RNA, 19 nt, Homo sapiens
  misc_RNA (1)...(19): siRNA sense strand
ggucuuacauguagauugg

SEQ ID NO: 1665782 - RNA, 19 nt, Homo sapiens
  misc_RNA (1)...(19): siRNA sense strand
gcccagugaucuucauauu

SEQ ID NO: 1665783 - RNA, 19 nt, Homo sapiens
  misc_RNA (1)...(19): siRNA sense strand
agucguaaaucaaagagua

SEQ ID NO: 1665784 - RNA, 19 nt, Homo sapiens
  misc_RNA (1)...(19): siRNA sense strand
cgucagaguccacauagua

SEQ ID NO: 1665785 - RNA, 19 nt, Homo sapiens
  misc_RNA (1)...(19): siRNA sense strand
gagaguaccagcugaugaa

SEQ ID NO: 1665786 - RNA, 19 nt, Homo sapiens
  misc_RNA (1)...(19): siRNA sense strand
uaauaaagcccauggaaag

SEQ ID NO: 1665787 - RNA, 19 nt, Homo sapiens
  misc_RNA (1)...(19): siRNA sense strand
aguaacagcuuaauucaca

SEQ ID NO: 1665788 - RNA, 19 nt, Homo sapiens
  misc_RNA (1)...(19): siRNA sense strand
gcauuucaauaucagcaaa

SEQ ID NO: 1665789 - RNA, 19 nt, Homo sapiens
  misc_RNA (1)...(19): siRNA sense strand
aaagaacaguuaucucuac

SEQ ID NO: 1665790 - RNA, 19 nt, Homo sapiens
  misc_RNA (1)...(19): siRNA sense strand
ucacaaggcaguuaaaucu

SEQ ID NO: 1665791 - RNA, 19 nt, Homo sapiens
  misc_RNA (1)...(19): siRNA sense strand
gcaucgcacccauuuauga

SEQ ID NO: 1665792 - RNA, 19 nt, Homo sapiens
  misc_RNA (1)...(19): siRNA sense strand
gaaguggaaugaaaauguu

SEQ ID NO: 1665793 - RNA, 19 nt, Homo sapiens
  misc_RNA (1)...(19): siRNA sense strand
uaaccuauuuggagugcaa

SEQ ID NO: 1665794 - RNA, 19 nt, Homo sapiens
  misc_RNA (1)...(19): siRNA sense strand
ugaaacugcuuuuggauaa

SEQ ID NO: 1665795 - RNA, 19 nt, Homo sapiens
  misc_RNA (1)...(19): siRNA sense strand
cagcaucgcacccauuuau

SEQ ID NO: 1665796 - RNA, 19 nt, Homo sapiens
  misc_RNA (1)...(19): siRNA sense strand
gaaguacuacagaagcauu

SEQ ID NO: 1665797 - RNA, 19 nt, Homo sapiens
  misc_RNA (1)...(19): siRNA sense strand
uaagugagcugcugaaaag

SEQ ID NO: 1665798 - RNA, 19 nt, Homo sapiens
  misc_RNA (1)...(19): siRNA sense strand
caaaaucgcccuaaaggaa

SEQ ID NO: 1665799 - RNA, 19 nt, Homo sapiens
  misc_RNA (1)...(19): siRNA sense strand
gcagaucaaugacaaaauc

SEQ ID NO: 1665800 - RNA, 19 nt, Homo sapiens
  misc_RNA (1)...(19): siRNA sense strand
uaugaaugcucugcagaaa

SEQ ID NO: 1665801 - RNA, 19 nt, Homo sapiens
  misc_RNA (1)...(19): siRNA sense strand
ggaagcaagccaacugugu

SEQ ID NO: 1665802 - RNA, 19 nt, Homo sapiens
  misc_RNA (1)...(19): siRNA sense strand
gcaagaaguacuacagaag

SEQ ID NO: 1665803 - RNA, 19 nt, Homo sapiens
  misc_RNA (1)...(19): siRNA sense strand
aaaccaaacacuucucuau

SEQ ID NO: 1665804 - RNA, 19 nt, Homo sapiens
  misc_RNA (1)...(19): siRNA sense strand
guaguuggagauaaaguuu

SEQ ID NO: 1665805 - RNA, 19 nt, Homo sapiens
  misc_RNA (1)...(19): siRNA sense strand
ucaaagaguaacagcuuaa

SEQ ID NO: 1665806 - RNA, 19 nt, Homo sapiens
  misc_RNA (1)...(19): siRNA sense strand
ggaagagccauuuaauuuu

SEQ ID NO: 1665807 - RNA, 19 nt, Homo sapiens
  misc_RNA (1)...(19): siRNA sense strand
uauuguacauggucuauca

SEQ ID NO: 1665808 - RNA, 19 nt, Homo sapiens
  misc_RNA (1)...(19): siRNA sense strand
cggcagauacacuuaauga

SEQ ID NO: 1665809 - RNA, 19 nt, Homo sapiens
  misc_RNA (1)...(19): siRNA sense strand
ggacucgaaagcaaauauu

SEQ ID NO: 1665810 - RNA, 19 nt, Homo sapiens
  misc_RNA (1)...(19): siRNA sense strand
ugccguagaucuaauggaa

SEQ ID NO: 1665811 - RNA, 19 nt, Homo sapiens
  misc_RNA (1)...(19): siRNA sense strand
gaugcuugcuuuaaaucga

SEQ ID NO: 1665812 - RNA, 19 nt, Homo sapiens
  misc_RNA (1)...(19): siRNA sense strand
acagaagcauuucaauauc

SEQ ID NO: 1665813 - RNA, 19 nt, Homo sapiens
  misc_RNA (1)...(19): siRNA sense strand
gaaaauguaguuggagaua

SEQ ID NO: 1665814 - RNA, 19 nt, Homo sapiens
  misc_RNA (1)...(19): siRNA sense strand
aagcacauuccguuuauaa

SEQ ID NO: 1665815 - RNA, 19 nt, Homo sapiens
  misc_RNA (1)...(19): siRNA sense strand
agauagaagugugcaagaa

SEQ ID NO: 1665816 - RNA, 19 nt, Homo sapiens
  misc_RNA (1)...(19): siRNA sense strand
guuauuggucuuacaugua

SEQ ID NO: 1665817 - RNA, 19 nt, Homo sapiens
  misc_RNA (1)...(19): siRNA sense strand
uuuggaagcuuugcugaaa

SEQ ID NO: 1665818 - RNA, 19 nt, Homo sapiens
  misc_RNA (1)...(19): siRNA sense strand
gcaacauccucacuaagcu

SEQ ID NO: 1665819 - RNA, 19 nt, Homo sapiens
  misc_RNA (1)...(19): siRNA sense strand
aagaguaacagcuuaauuc

SEQ ID NO: 1665820 - RNA, 19 nt, Homo sapiens
  misc_RNA (1)...(19): siRNA sense strand
aaccaaacacuucucuaua

SEQ ID NO: 1665821 - RNA, 19 nt, Homo sapiens
  misc_RNA (1)...(19): siRNA sense strand
gcaguuaaaucuggaaaau

SEQ ID NO: 1665822 - RNA, 19 nt, Homo sapiens
  misc_RNA (1)...(19): siRNA sense strand
gaacuucaggaaauucaca

SEQ ID NO: 1665823 - RNA, 19 nt, Homo sapiens
  misc_RNA (1)...(19): siRNA sense strand
gagcagucguaaaucaaag

SEQ ID NO: 1665824 - RNA, 19 nt, Homo sapiens
  misc_RNA (1)...(19): siRNA sense strand
guacauggucuaucagucu

SEQ ID NO: 1665825 - RNA, 19 nt, Homo sapiens
  misc_RNA (1)...(19): siRNA sense strand
gcuauugaugcuugcuuua

SEQ ID NO: 1665826 - RNA, 19 nt, Homo sapiens
  misc_RNA (1)...(19): siRNA sense strand
cugcagaguuuccagacaa

SEQ ID NO: 1665827 - RNA, 19 nt, Homo sapiens
  misc_RNA (1)...(19): siRNA sense strand
uuaauaaagcccauggaaa

SEQ ID NO: 1665828 - RNA, 19 nt, Homo sapiens
  misc_RNA (1)...(19): siRNA sense strand
gagugcaaguacaauacaa

SEQ ID NO: 1665829 - RNA, 19 nt, Homo sapiens
  misc_RNA (1)...(19): siRNA sense strand
gaacucauggaaauagaag

SEQ ID NO: 1665830 - RNA, 19 nt, Homo sapiens
  misc_RNA (1)...(19): siRNA sense strand
uucaguaucucucagaaga

SEQ ID NO: 1665831 - RNA, 19 nt, Homo sapiens
  misc_RNA (1)...(19): siRNA sense strand
uuauuggucuuacauguag

SEQ ID NO: 1665832 - RNA, 19 nt, Homo sapiens
  misc_RNA (1)...(19): siRNA sense strand
ugggcaacauccucacuaa

SEQ ID NO: 1665833 - RNA, 19 nt, Homo sapiens
  misc_RNA (1)...(19): siRNA sense strand
uaacagcaucgcacccauu

SEQ ID NO: 1665834 - RNA, 19 nt, Homo sapiens
  misc_RNA (1)...(19): siRNA sense strand
ggucauuacacaugcuauu

SEQ ID NO: 1665835 - RNA, 19 nt, Homo sapiens
  misc_RNA (1)...(19): siRNA sense strand
ucacacagagugccuuuca

SEQ ID NO: 1665836 - RNA, 19 nt, Homo sapiens
  misc_RNA (1)...(19): siRNA sense strand
gauagaagugugcaagaag

SEQ ID NO: 1665837 - RNA, 19 nt, Homo sapiens
  misc_RNA (1)...(19): siRNA sense strand
agagugccuuucacaggua

SEQ ID NO: 1665838 - RNA, 19 nt, Homo sapiens
  misc_RNA (1)...(19): siRNA sense strand
cccagugaucuucauauua

SEQ ID NO: 1665839 - RNA, 19 nt, Homo sapiens
  misc_RNA (1)...(19): siRNA sense strand
ugacaucuaugaggaagag

SEQ ID NO: 1665840 - RNA, 19 nt, Homo sapiens
  misc_RNA (1)...(19): siRNA sense strand
gcauggacucgaaagcaaa

SEQ ID NO: 1665841 - RNA, 19 nt, Homo sapiens
  misc_RNA (1)...(19): siRNA sense strand
ugcaagaaguacuacagaa

SEQ ID NO: 1665842 - RNA, 19 nt, Homo sapiens
  misc_RNA (1)...(19): siRNA sense strand
agagugaagucaagauuuu

SEQ ID NO: 1665843 - RNA, 19 nt, Homo sapiens
  misc_RNA (1)...(19): siRNA sense strand
caaguacaauacaaacacu

SEQ ID NO: 1665844 - RNA, 19 nt, Homo sapiens
  misc_RNA (1)...(19): siRNA sense strand
gaaagauuuugucgucaga

SEQ ID NO: 1665845 - RNA, 19 nt, Homo sapiens
  misc_RNA (1)...(19): siRNA sense strand
gcaaguacaauacaaacac

SEQ ID NO: 1665846 - RNA, 19 nt, Homo sapiens
  misc_RNA (1)...(19): siRNA sense strand
aaagcacauuccguuuaua

SEQ ID NO: 1665847 - RNA, 19 nt, Homo sapiens
  misc_RNA (1)...(19): siRNA sense strand
aaucaaagaguaacagcuu

SEQ ID NO: 1665848 - RNA, 19 nt, Homo sapiens
  misc_RNA (1)...(19): siRNA sense strand
aaagagugaagucaagauu

SEQ ID NO: 1665849 - RNA, 19 nt, Homo sapiens
  misc_RNA (1)...(19): siRNA sense strand
gcaguugcccagugaucuu

SEQ ID NO: 1665850 - RNA, 19 nt, Homo sapiens
  misc_RNA (1)...(19): siRNA sense strand
ugaggaagagccauuuaau

SEQ ID NO: 1665851 - RNA, 19 nt, Homo sapiens
  misc_RNA (1)...(19): siRNA sense strand
cauuacacaugcuauugau

SEQ ID NO: 1665852 - RNA, 19 nt, Homo sapiens
  misc_RNA (1)...(19): siRNA sense strand
caaacacuucucuauaauc

SEQ ID NO: 1665853 - RNA, 19 nt, Homo sapiens
  misc_RNA (1)...(19): siRNA sense strand
uaaagcccauggaaagaac

SEQ ID NO: 1665854 - RNA, 19 nt, Homo sapiens
  misc_RNA (1)...(19): siRNA sense strand
uuucacagguacaaagaau

SEQ ID NO: 1665855 - RNA, 19 nt, Homo sapiens
  misc_RNA (1)...(19): siRNA sense strand
ggaaagaacuucaggaaau

SEQ ID NO: 1665856 - RNA, 19 nt, Homo sapiens
  misc_RNA (1)...(19): siRNA sense strand
ugaaugcucugcagaaaua

SEQ ID NO: 1665857 - RNA, 19 nt, Homo sapiens
  misc_RNA (1)...(19): siRNA sense strand
gaaagcacauuccguuuau

SEQ ID NO: 1665858 - RNA, 19 nt, Homo sapiens
  misc_RNA (1)...(19): siRNA sense strand
gaaagaacuucaggaaauu

SEQ ID NO: 1665859 - RNA, 19 nt, Homo sapiens
  misc_RNA (1)...(19): siRNA sense strand
ugaaagaacucauggaaau

SEQ ID NO: 1665860 - RNA, 19 nt, Homo sapiens
  misc_RNA (1)...(19): siRNA sense strand
gcagaaauaucccaacugu

SEQ ID NO: 1665861 - RNA, 19 nt, Homo sapiens
  misc_RNA (1)...(19): siRNA sense strand
gcugagaaguggaaugaaa

SEQ ID NO: 1665862 - RNA, 19 nt, Homo sapiens
  misc_RNA (1)...(19): siRNA sense strand
gcacauuccguuuauaauu

SEQ ID NO: 1665863 - RNA, 19 nt, Homo sapiens
  misc_RNA (1)...(19): siRNA sense strand
ccagugaucuucauauuag

SEQ ID NO: 1665864 - RNA, 19 nt, Homo sapiens
  misc_RNA (1)...(19): siRNA sense strand
gaaagaacucauggaaaua

SEQ ID NO: 1665865 - RNA, 19 nt, Homo sapiens
  misc_RNA (1)...(19): siRNA sense strand
gcagauacacuuaaugaau

SEQ ID NO: 1665866 - RNA, 19 nt, Homo sapiens
  misc_RNA (1)...(19): siRNA sense strand
ggaaauagaagaagugagu

SEQ ID NO: 1665867 - RNA, 19 nt, Homo sapiens
  misc_RNA (1)...(19): siRNA sense strand
gaagcaagccaacugugua

SEQ ID NO: 1665868 - RNA, 19 nt, Homo sapiens
  misc_RNA (1)...(19): siRNA sense strand
ggaaaucacaaggcaguua

SEQ ID NO: 1665869 - RNA, 19 nt, Homo sapiens
  misc_RNA (1)...(19): siRNA sense strand
gaaauucacagagagagua

SEQ ID NO: 1665870 - RNA, 19 nt, Homo sapiens
  misc_RNA (1)...(19): siRNA sense strand
gaaaucacaaggcaguuaa

SEQ ID NO: 1665871 - RNA, 19 nt, Homo sapiens
  misc_RNA (1)...(19): siRNA sense strand
caaauggucuauaaugagu

SEQ ID NO: 1665872 - RNA, 19 nt, Homo sapiens
  misc_RNA (1)...(19): siRNA sense strand
accaaacacuucucuauaa

SEQ ID NO: 1665873 - RNA, 19 nt, Homo sapiens
  misc_RNA (1)...(19): siRNA sense strand
aggaagagccauuuaauuu

SEQ ID NO: 1665874 - RNA, 19 nt, Homo sapiens
  misc_RNA (1)...(19): siRNA sense strand
guaacucuguccuuauuau

SEQ ID NO: 1665875 - RNA, 19 nt, Homo sapiens
  misc_RNA (1)...(19): siRNA sense strand
cuacagaagcauuucaaua

SEQ ID NO: 1665876 - RNA, 19 nt, Homo sapiens
  misc_RNA (1)...(19): siRNA sense strand
gaggaagagccauuuaauu

SEQ ID NO: 1665877 - RNA, 19 nt, Homo sapiens
  misc_RNA (1)...(19): siRNA sense strand
ccaaacacuucucuauaau

SEQ ID NO: 1665878 - RNA, 19 nt, Homo sapiens
  misc_RNA (1)...(19): siRNA sense strand
cagaagcauuucaauauca

SEQ ID NO: 1665879 - RNA, 19 nt, Homo sapiens
  misc_RNA (1)...(19): siRNA sense strand
gaagagccauuuaauuuuc

SEQ ID NO: 1665880 - RNA, 19 nt, Homo sapiens
  misc_RNA (1)...(19): siRNA sense strand
ucacagguacaaagaauuu

SEQ ID NO: 1665881 - RNA, 19 nt, Homo sapiens
  misc_RNA (1)...(19): siRNA sense strand
ggucuuacauguagauugg

SEQ ID NO: 1665882 - RNA, 19 nt, Homo sapiens
  misc_RNA (1)...(19): siRNA sense strand
gcccagugaucuucauauu

SEQ ID NO: 1665883 - RNA, 19 nt, Homo sapiens
  misc_RNA (1)...(19): siRNA sense strand
agucguaaaucaaagagua

SEQ ID NO: 1665884 - RNA, 19 nt, Homo sapiens
  misc_RNA (1)...(19): siRNA sense strand
cgucagaguccacauagua

SEQ ID NO: 1665885 - RNA, 19 nt, Homo sapiens
  misc_RNA (1)...(19): siRNA sense strand
gagaguaccagcugaugaa

SEQ ID NO: 1665886 - RNA, 19 nt, Homo sapiens
  misc_RNA (1)...(19): siRNA sense strand
uaauaaagcccauggaaag

SEQ ID NO: 1665887 - RNA, 19 nt, Homo sapiens
  misc_RNA (1)...(19): siRNA sense strand
aguaacagcuuaauucaca

SEQ ID NO: 1665888 - RNA, 19 nt, Homo sapiens
  misc_RNA (1)...(19): siRNA sense strand
gcauuucaauaucagcaaa

SEQ ID NO: 1665889 - RNA, 19 nt, Homo sapiens
  misc_RNA (1)...(19): siRNA sense strand
aaagaacaguuaucucuac

SEQ ID NO: 1665890 - RNA, 19 nt, Homo sapiens
  misc_RNA (1)...(19): siRNA sense strand
ucacaaggcaguuaaaucu

SEQ ID NO: 1665891 - RNA, 19 nt, Homo sapiens
  misc_RNA (1)...(19): siRNA sense strand
gcaucgcacccauuuauga

SEQ ID NO: 1665892 - RNA, 19 nt, Homo sapiens
  misc_RNA (1)...(19): siRNA sense strand
gaaguggaaugaaaauguu

SEQ ID NO: 1665893 - RNA, 19 nt, Homo sapiens
  misc_RNA (1)...(19): siRNA sense strand
uaaccuauuuggagugcaa

SEQ ID NO: 1665894 - RNA, 19 nt, Homo sapiens
  misc_RNA (1)...(19): siRNA sense strand
ugaaacugcuuuuggauaa

SEQ ID NO: 1665895 - RNA, 19 nt, Homo sapiens
  misc_RNA (1)...(19): siRNA sense strand
cagcaucgcacccauuuau

SEQ ID NO: 1665896 - RNA, 19 nt, Homo sapiens
  misc_RNA (1)...(19): siRNA sense strand
gaaguacuacagaagcauu

SEQ ID NO: 1665897 - RNA, 19 nt, Homo sapiens
  misc_RNA (1)...(19): siRNA sense strand
uaagugagcugcugaaaag

SEQ ID NO: 1665898 - RNA, 19 nt, Homo sapiens
  misc_RNA (1)...(19): siRNA sense strand
caaaaucgcccuaaaggaa

SEQ ID NO: 1665899 - RNA, 19 nt, Homo sapiens
  misc_RNA (1)...(19): siRNA sense strand
gcagaucaaugacaaaauc

SEQ ID NO: 1665900 - RNA, 19 nt, Homo sapiens
  misc_RNA (1)...(19): siRNA sense strand
uaugaaugcucugcagaaa

SEQ ID NO: 1665901 - RNA, 19 nt, Homo sapiens
  misc_RNA (1)...(19): siRNA sense strand
ggaagcaagccaacugugu

SEQ ID NO: 1665902 - RNA, 19 nt, Homo sapiens
  misc_RNA (1)...(19): siRNA sense strand
gcaagaaguacuacagaag

SEQ ID NO: 1665903 - RNA, 19 nt, Homo sapiens
  misc_RNA (1)...(19): siRNA sense strand
aaaccaaacacuucucuau

SEQ ID NO: 1665904 - RNA, 19 nt, Homo sapiens
  misc_RNA (1)...(19): siRNA sense strand
guaguuggagauaaaguuu

SEQ ID NO: 1665905 - RNA, 19 nt, Homo sapiens
  misc_RNA (1)...(19): siRNA sense strand
ucaaagaguaacagcuuaa

SEQ ID NO: 1665906 - RNA, 19 nt, Homo sapiens
  misc_RNA (1)...(19): siRNA sense strand
ggaagagccauuuaauuuu

SEQ ID NO: 1665907 - RNA, 19 nt, Homo sapiens
  misc_RNA (1)...(19): siRNA sense strand
uauuguacauggucuauca

SEQ ID NO: 1665908 - RNA, 19 nt, Homo sapiens
  misc_RNA (1)...(19): siRNA sense strand
cggcagauacacuuaauga

SEQ ID NO: 1665909 - RNA, 19 nt, Homo sapiens
  misc_RNA (1)...(19): siRNA sense strand
ggacucgaaagcaaauauu

SEQ ID NO: 1665910 - RNA, 19 nt, Homo sapiens
  misc_RNA (1)...(19): siRNA sense strand
ugccguagaucuaauggaa

SEQ ID NO: 1665911 - RNA, 19 nt, Homo sapiens
  misc_RNA (1)...(19): siRNA sense strand
gaugcuugcuuuaaaucga

SEQ ID NO: 1665912 - RNA, 19 nt, Homo sapiens
  misc_RNA (1)...(19): siRNA sense strand
acagaagcauuucaauauc

SEQ ID NO: 1665913 - RNA, 19 nt, Homo sapiens
  misc_RNA (1)...(19): siRNA sense strand
gaaaauguaguuggagaua

SEQ ID NO: 1665914 - RNA, 19 nt, Homo sapiens
  misc_RNA (1)...(19): siRNA sense strand
aagcacauuccguuuauaa

SEQ ID NO: 1665915 - RNA, 19 nt, Homo sapiens
  misc_RNA (1)...(19): siRNA sense strand
agauagaagugugcaagaa

SEQ ID NO: 1665916 - RNA, 19 nt, Homo sapiens
  misc_RNA (1)...(19): siRNA sense strand
guuauuggucuuacaugua

SEQ ID NO: 1665917 - RNA, 19 nt, Homo sapiens
  misc_RNA (1)...(19): siRNA sense strand
uuuggaagcuuugcugaaa

SEQ ID NO: 1665918 - RNA, 19 nt, Homo sapiens
  misc_RNA (1)...(19): siRNA sense strand
gcaacauccucacuaagcu

SEQ ID NO: 1665919 - RNA, 19 nt, Homo sapiens
  misc_RNA (1)...(19): siRNA sense strand
aagaguaacagcuuaauuc

SEQ ID NO: 1665920 - RNA, 19 nt, Homo sapiens
  misc_RNA (1)...(19): siRNA sense strand
aaccaaacacuucucuaua

SEQ ID NO: 1665921 - RNA, 19 nt, Homo sapiens
  misc_RNA (1)...(19): siRNA sense strand
gcaguuaaaucuggaaaau

SEQ ID NO: 1665922 - RNA, 19 nt, Homo sapiens
  misc_RNA (1)...(19): siRNA sense strand
gaacuucaggaaauucaca

SEQ ID NO: 1665923 - RNA, 19 nt, Homo sapiens
  misc_RNA (1)...(19): siRNA sense strand
gagcagucguaaaucaaag

SEQ ID NO: 1665924 - RNA, 19 nt, Homo sapiens
  misc_RNA (1)...(19): siRNA sense strand
guacauggucuaucagucu

SEQ ID NO: 1665925 - RNA, 19 nt, Homo sapiens
  misc_RNA (1)...(19): siRNA sense strand
gcuauugaugcuugcuuua

SEQ ID NO: 1665926 - RNA, 19 nt, Homo sapiens
  misc_RNA (1)...(19): siRNA sense strand
cugcagaguuuccagacaa

SEQ ID NO: 1665927 - RNA, 19 nt, Homo sapiens
  misc_RNA (1)...(19): siRNA sense strand
uuaauaaagcccauggaaa

SEQ ID NO: 1665928 - RNA, 19 nt, Homo sapiens
  misc_RNA (1)...(19): siRNA sense strand
gagugcaaguacaauacaa

SEQ ID NO: 1665929 - RNA, 19 nt, Homo sapiens
  misc_RNA (1)...(19): siRNA sense strand
gaacucauggaaauagaag

SEQ ID NO: 1665930 - RNA, 19 nt, Homo sapiens
  misc_RNA (1)...(19): siRNA sense strand
uucaguaucucucagaaga

SEQ ID NO: 1665931 - RNA, 19 nt, Homo sapiens
  misc_RNA (1)...(19): siRNA sense strand
uuauuggucuuacauguag

SEQ ID NO: 1665932 - RNA, 19 nt, Homo sapiens
  misc_RNA (1)...(19): siRNA sense strand
ugggcaacauccucacuaa

SEQ ID NO: 1665933 - RNA, 19 nt, Homo sapiens
  misc_RNA (1)...(19): siRNA sense strand
uaacagcaucgcacccauu

SEQ ID NO: 1665934 - RNA, 19 nt, Homo sapiens
  misc_RNA (1)...(19): siRNA sense strand
ggucauuacacaugcuauu

SEQ ID NO: 1665935 - RNA, 19 nt, Homo sapiens
  misc_RNA (1)...(19): siRNA sense strand
ucacacagagugccuuuca

SEQ ID NO: 1665936 - RNA, 19 nt, Homo sapiens
  misc_RNA (1)...(19): siRNA sense strand
gauagaagugugcaagaag

SEQ ID NO: 1665937 - RNA, 19 nt, Homo sapiens
  misc_RNA (1)...(19): siRNA sense strand
agagugccuuucacaggua

SEQ ID NO: 1665938 - RNA, 19 nt, Homo sapiens
  misc_RNA (1)...(19): siRNA sense strand
cccagugaucuucauauua

SEQ ID NO: 1665939 - RNA, 19 nt, Homo sapiens
  misc_RNA (1)...(19): siRNA sense strand
ugacaucuaugaggaagag

SEQ ID NO: 1665940 - RNA, 19 nt, Homo sapiens
  misc_RNA (1)...(19): siRNA sense strand
gcauggacucgaaagcaaa

SEQ ID NO: 1665941 - RNA, 19 nt, Homo sapiens
  misc_RNA (1)...(19): siRNA sense strand
ugcaagaaguacuacagaa

SEQ ID NO: 1665942 - RNA, 19 nt, Homo sapiens
  misc_RNA (1)...(19): siRNA sense strand
agagugaagucaagauuuu

SEQ ID NO: 1665943 - RNA, 19 nt, Homo sapiens
  misc_RNA (1)...(19): siRNA sense strand
caaguacaauacaaacacu

SEQ ID NO: 1665944 - RNA, 19 nt, Homo sapiens
  misc_RNA (1)...(19): siRNA sense strand
gaaagauuuugucgucaga

SEQ ID NO: 1665945 - RNA, 19 nt, Homo sapiens
  misc_RNA (1)...(19): siRNA sense strand
gcaaguacaauacaaacac

SEQ ID NO: 1665946 - RNA, 19 nt, Homo sapiens
  misc_RNA (1)...(19): siRNA sense strand
aaagcacauuccguuuaua

SEQ ID NO: 1665947 - RNA, 19 nt, Homo sapiens
  misc_RNA (1)...(19): siRNA sense strand
aaucaaagaguaacagcuu

SEQ ID NO: 1665948 - RNA, 19 nt, Homo sapiens
  misc_RNA (1)...(19): siRNA sense strand
aaagagugaagucaagauu

SEQ ID NO: 1665949 - RNA, 19 nt, Homo sapiens
  misc_RNA (1)...(19): siRNA sense strand
gcaguugcccagugaucuu

SEQ ID NO: 1665950 - RNA, 19 nt, Homo sapiens
  misc_RNA (1)...(19): siRNA sense strand
ugaggaagagccauuuaau

SEQ ID NO: 1665951 - RNA, 19 nt, Homo sapiens
  misc_RNA (1)...(19): siRNA sense strand
cauuacacaugcuauugau

SEQ ID NO: 1665952 - RNA, 19 nt, Homo sapiens
  misc_RNA (1)...(19): siRNA sense strand
caaacacuucucuauaauc

SEQ ID NO: 1665953 - RNA, 19 nt, Homo sapiens
  misc_RNA (1)...(19): siRNA sense strand
uaaagcccauggaaagaac

SEQ ID NO: 1665954 - RNA, 19 nt, Homo sapiens
  misc_RNA (1)...(19): siRNA sense strand
uuucacagguacaaagaau

SEQ ID NO: 1665955 - RNA, 19 nt, Homo sapiens
  misc_RNA (1)...(19): siRNA sense strand
ggaaagaacuucaggaaau

SEQ ID NO: 1665956 - RNA, 19 nt, Homo sapiens
  misc_RNA (1)...(19): siRNA sense strand
ugaaugcucugcagaaaua

SEQ ID NO: 1665957 - RNA, 19 nt, Homo sapiens
  misc_RNA (1)...(19): siRNA sense strand
gaaagcacauuccguuuau

SEQ ID NO: 1665958 - RNA, 19 nt, Homo sapiens
  misc_RNA (1)...(19): siRNA sense strand
gaaagaacuucaggaaauu

SEQ ID NO: 1665959 - RNA, 19 nt, Homo sapiens
  misc_RNA (1)...(19): siRNA sense strand
ugaaagaacucauggaaau

SEQ ID NO: 1665960 - RNA, 19 nt, Homo sapiens
  misc_RNA (1)...(19): siRNA sense strand
gcagaaauaucccaacugu

SEQ ID NO: 1665961 - RNA, 19 nt, Homo sapiens
  misc_RNA (1)...(19): siRNA sense strand
gcugagaaguggaaugaaa

SEQ ID NO: 1665962 - RNA, 19 nt, Homo sapiens
  misc_RNA (1)...(19): siRNA sense strand
gcacauuccguuuauaauu

SEQ ID NO: 1665963 - RNA, 19 nt, Homo sapiens
  misc_RNA (1)...(19): siRNA sense strand
ccagugaucuucauauuag

SEQ ID NO: 1665964 - RNA, 19 nt, Homo sapiens
  misc_RNA (1)...(19): siRNA sense strand
gaaagaacucauggaaaua

SEQ ID NO: 1665965 - RNA, 19 nt, Homo sapiens
  misc_RNA (1)...(19): siRNA sense strand
gcagauacacuuaaugaau

SEQ ID NO: 1665966 - RNA, 19 nt, Homo sapiens
  misc_RNA (1)...(19): siRNA sense strand
ggaaauagaagaagugagu

SEQ ID NO: 1665967 - RNA, 19 nt, Homo sapiens
  misc_RNA (1)...(19): siRNA sense strand
gaagcaagccaacugugua

SEQ ID NO: 1665968 - RNA, 19 nt, Homo sapiens
  misc_RNA (1)...(19): siRNA sense strand
ggaaaucacaaggcaguua

SEQ ID NO: 1665969 - RNA, 19 nt, Homo sapiens
  misc_RNA (1)...(19): siRNA sense strand
gaaauucacagagagagua

SEQ ID NO: 1665970 - RNA, 19 nt, Homo sapiens
  misc_RNA (1)...(19): siRNA sense strand
gaaaucacaaggcaguuaa

SEQ ID NO: 1665971 - RNA, 19 nt, Homo sapiens
  misc_RNA (1)...(19): siRNA sense strand
caaauggucuauaaugagu

SEQ ID NO: 1665972 - RNA, 19 nt, Homo sapiens
  misc_RNA (1)...(19): siRNA sense strand
accaaacacuucucuauaa

SEQ ID NO: 1665973 - RNA, 19 nt, Homo sapiens
  misc_RNA (1)...(19): siRNA sense strand
aggaagagccauuuaauuu

SEQ ID NO: 1665974 - RNA, 19 nt, Homo sapiens
  misc_RNA (1)...(19): siRNA sense strand
guaacucuguccuuauuau

SEQ ID NO: 1665975 - RNA, 19 nt, Homo sapiens
  misc_RNA (1)...(19): siRNA sense strand
cuacagaagcauuucaaua

SEQ ID NO: 1665976 - RNA, 19 nt, Homo sapiens
  misc_RNA (1)...(19): siRNA sense strand
gaggaagagccauuuaauu

SEQ ID NO: 1665977 - RNA, 19 nt, Homo sapiens
  misc_RNA (1)...(19): siRNA sense strand
ccaaacacuucucuauaau

SEQ ID NO: 1665978 - RNA, 19 nt, Homo sapiens
  misc_RNA (1)...(19): siRNA sense strand
cagaagcauuucaauauca

SEQ ID NO: 1665979 - RNA, 19 nt, Homo sapiens
  misc_RNA (1)...(19): siRNA sense strand
gaagagccauuuaauuuuc

SEQ ID NO: 1665980 - RNA, 19 nt, Homo sapiens
  misc_RNA (1)...(19): siRNA sense strand
ucacagguacaaagaauuu

SEQ ID NO: 1665981 - RNA, 19 nt, Homo sapiens
  misc_RNA (1)...(19): siRNA sense strand
ggucuuacauguagauugg

SEQ ID NO: 1665982 - RNA, 19 nt, Homo sapiens
  misc_RNA (1)...(19): siRNA sense strand
gcccagugaucuucauauu

SEQ ID NO: 1665983 - RNA, 19 nt, Homo sapiens
  misc_RNA (1)...(19): siRNA sense strand
agucguaaaucaaagagua

SEQ ID NO: 1665984 - RNA, 19 nt, Homo sapiens
  misc_RNA (1)...(19): siRNA sense strand
cgucagaguccacauagua

SEQ ID NO: 1665985 - RNA, 19 nt, Homo sapiens
  misc_RNA (1)...(19): siRNA sense strand
gagaguaccagcugaugaa

SEQ ID NO: 1665986 - RNA, 19 nt, Homo sapiens
  misc_RNA (1)...(19): siRNA sense strand
uaauaaagcccauggaaag

SEQ ID NO: 1665987 - RNA, 19 nt, Homo sapiens
  misc_RNA (1)...(19): siRNA sense strand
aguaacagcuuaauucaca

SEQ ID NO: 1665988 - RNA, 19 nt, Homo sapiens
  misc_RNA (1)...(19): siRNA sense strand
gcauuucaauaucagcaaa

SEQ ID NO: 1665989 - RNA, 19 nt, Homo sapiens
  misc_RNA (1)...(19): siRNA sense strand
aaagaacaguuaucucuac

SEQ ID NO: 1665990 - RNA, 19 nt, Homo sapiens
  misc_RNA (1)...(19): siRNA sense strand
ucacaaggcaguuaaaucu

SEQ ID NO: 1665991 - RNA, 19 nt, Homo sapiens
  misc_RNA (1)...(19): siRNA sense strand
gcaucgcacccauuuauga

SEQ ID NO: 1665992 - RNA, 19 nt, Homo sapiens
  misc_RNA (1)...(19): siRNA sense strand
gaaguggaaugaaaauguu

SEQ ID NO: 1665993 - RNA, 19 nt, Homo sapiens
  misc_RNA (1)...(19): siRNA sense strand
uaaccuauuuggagugcaa

SEQ ID NO: 1665994 - RNA, 19 nt, Homo sapiens
  misc_RNA (1)...(19): siRNA sense strand
ugaaacugcuuuuggauaa

SEQ ID NO: 1665995 - RNA, 19 nt, Homo sapiens
  misc_RNA (1)...(19): siRNA sense strand
cagcaucgcacccauuuau

SEQ ID NO: 1665996 - RNA, 19 nt, Homo sapiens
  misc_RNA (1)...(19): siRNA sense strand
gaaguacuacagaagcauu

SEQ ID NO: 1665997 - RNA, 19 nt, Homo sapiens
  misc_RNA (1)...(19): siRNA sense strand
uaagugagcugcugaaaag

SEQ ID NO: 1665998 - RNA, 19 nt, Homo sapiens
  misc_RNA (1)...(19): siRNA sense strand
caaaaucgcccuaaaggaa

SEQ ID NO: 1665999 - RNA, 19 nt, Homo sapiens
  misc_RNA (1)...(19): siRNA sense strand
gcagaucaaugacaaaauc

SEQ ID NO: 1666000 - RNA, 19 nt, Homo sapiens
  misc_RNA (1)...(19): siRNA sense strand
uaugaaugcucugcagaaa

SEQ ID NO: 1666001 - RNA, 19 nt, Homo sapiens
  misc_RNA (1)...(19): siRNA sense strand
ggaagcaagccaacugugu

SEQ ID NO: 1666002 - RNA, 19 nt, Homo sapiens
  misc_RNA (1)...(19): siRNA sense strand
gcaagaaguacuacagaag

SEQ ID NO: 1666003 - RNA, 19 nt, Homo sapiens
  misc_RNA (1)...(19): siRNA sense strand
aaaccaaacacuucucuau

SEQ ID NO: 1666004 - RNA, 19 nt, Homo sapiens
  misc_RNA (1)...(19): siRNA sense strand
guaguuggagauaaaguuu

SEQ ID NO: 1666005 - RNA, 19 nt, Homo sapiens
  misc_RNA (1)...(19): siRNA sense strand
ucaaagaguaacagcuuaa

SEQ ID NO: 1666006 - RNA, 19 nt, Homo sapiens
  misc_RNA (1)...(19): siRNA sense strand
ggaagagccauuuaauuuu

SEQ ID NO: 1666007 - RNA, 19 nt, Homo sapiens
  misc_RNA (1)...(19): siRNA sense strand
uauuguacauggucuauca

SEQ ID NO: 1666008 - RNA, 19 nt, Homo sapiens
  misc_RNA (1)...(19): siRNA sense strand
cggcagauacacuuaauga

SEQ ID NO: 1666009 - RNA, 19 nt, Homo sapiens
  misc_RNA (1)...(19): siRNA sense strand
ggacucgaaagcaaauauu

SEQ ID NO: 1666010 - RNA, 19 nt, Homo sapiens
  misc_RNA (1)...(19): siRNA sense strand
ugccguagaucuaauggaa

SEQ ID NO: 1666011 - RNA, 19 nt, Homo sapiens
  misc_RNA (1)...(19): siRNA sense strand
gaugcuugcuuuaaaucga

SEQ ID NO: 1666012 - RNA, 19 nt, Homo sapiens
  misc_RNA (1)...(19): siRNA sense strand
acagaagcauuucaauauc

SEQ ID NO: 1666013 - RNA, 19 nt, Homo sapiens
  misc_RNA (1)...(19): siRNA sense strand
gaaaauguaguuggagaua

SEQ ID NO: 1666014 - RNA, 19 nt, Homo sapiens
  misc_RNA (1)...(19): siRNA sense strand
aagcacauuccguuuauaa

SEQ ID NO: 1666015 - RNA, 19 nt, Homo sapiens
  misc_RNA (1)...(19): siRNA sense strand
agauagaagugugcaagaa

SEQ ID NO: 1666016 - RNA, 19 nt, Homo sapiens
  misc_RNA (1)...(19): siRNA sense strand
guuauuggucuuacaugua

SEQ ID NO: 1666017 - RNA, 19 nt, Homo sapiens
  misc_RNA (1)...(19): siRNA sense strand
uuuggaagcuuugcugaaa

SEQ ID NO: 1666018 - RNA, 19 nt, Homo sapiens
  misc_RNA (1)...(19): siRNA sense strand
gcaacauccucacuaagcu

SEQ ID NO: 1666019 - RNA, 19 nt, Homo sapiens
  misc_RNA (1)...(19): siRNA sense strand
aagaguaacagcuuaauuc

SEQ ID NO: 1666020 - RNA, 19 nt, Homo sapiens
  misc_RNA (1)...(19): siRNA sense strand
aaccaaacacuucucuaua

SEQ ID NO: 1666021 - RNA, 19 nt, Homo sapiens
  misc_RNA (1)...(19): siRNA sense strand
gcaguuaaaucuggaaaau

SEQ ID NO: 1666022 - RNA, 19 nt, Homo sapiens
  misc_RNA (1)...(19): siRNA sense strand
gaacuucaggaaauucaca

SEQ ID NO: 1666023 - RNA, 19 nt, Homo sapiens
  misc_RNA (1)...(19): siRNA sense strand
gagcagucguaaaucaaag

SEQ ID NO: 1666024 - RNA, 19 nt, Homo sapiens
  misc_RNA (1)...(19): siRNA sense strand
guacauggucuaucagucu

SEQ ID NO: 1666025 - RNA, 19 nt, Homo sapiens
  misc_RNA (1)...(19): siRNA sense strand
gcuauugaugcuugcuuua

SEQ ID NO: 1666026 - RNA, 19 nt, Homo sapiens
  misc_RNA (1)...(19): siRNA sense strand
cugcagaguuuccagacaa

SEQ ID NO: 1666027 - RNA, 19 nt, Homo sapiens
  misc_RNA (1)...(19): siRNA sense strand
uuaauaaagcccauggaaa

SEQ ID NO: 1666028 - RNA, 19 nt, Homo sapiens
  misc_RNA (1)...(19): siRNA sense strand
gagugcaaguacaauacaa

SEQ ID NO: 1666029 - RNA, 19 nt, Homo sapiens
  misc_RNA (1)...(19): siRNA sense strand
gaacucauggaaauagaag

SEQ ID NO: 1666030 - RNA, 19 nt, Homo sapiens
  misc_RNA (1)...(19): siRNA sense strand
uucaguaucucucagaaga

SEQ ID NO: 1666031 - RNA, 19 nt, Homo sapiens
  misc_RNA (1)...(19): siRNA sense strand
uuauuggucuuacauguag

SEQ ID NO: 1666032 - RNA, 19 nt, Homo sapiens
  misc_RNA (1)...(19): siRNA sense strand
ugggcaacauccucacuaa

SEQ ID NO: 1666033 - RNA, 19 nt, Homo sapiens
  misc_RNA (1)...(19): siRNA sense strand
uaacagcaucgcacccauu

SEQ ID NO: 1666034 - RNA, 19 nt, Homo sapiens
  misc_RNA (1)...(19): siRNA sense strand
ggucauuacacaugcuauu

SEQ ID NO: 1666035 - RNA, 19 nt, Homo sapiens
  misc_RNA (1)...(19): siRNA sense strand
ucacacagagugccuuuca

SEQ ID NO: 1666036 - RNA, 19 nt, Homo sapiens
  misc_RNA (1)...(19): siRNA sense strand
gauagaagugugcaagaag

SEQ ID NO: 1666037 - RNA, 19 nt, Homo sapiens
  misc_RNA (1)...(19): siRNA sense strand
agagugccuuucacaggua

SEQ ID NO: 1666038 - RNA, 19 nt, Homo sapiens
  misc_RNA (1)...(19): siRNA sense strand
cccagugaucuucauauua

SEQ ID NO: 1666039 - RNA, 19 nt, Homo sapiens
  misc_RNA (1)...(19): siRNA sense strand
ugacaucuaugaggaagag

SEQ ID NO: 1666040 - RNA, 19 nt, Homo sapiens
  misc_RNA (1)...(19): siRNA sense strand
gcauggacucgaaagcaaa

SEQ ID NO: 1666041 - RNA, 19 nt, Homo sapiens
  misc_RNA (1)...(19): siRNA sense strand
ugcaagaaguacuacagaa

SEQ ID NO: 1666042 - RNA, 19 nt, Homo sapiens
  misc_RNA (1)...(19): siRNA sense strand
agagugaagucaagauuuu

SEQ ID NO: 1666043 - RNA, 19 nt, Homo sapiens
  misc_RNA (1)...(19): siRNA sense strand
caaguacaauacaaacacu

SEQ ID NO: 1666044 - RNA, 19 nt, Homo sapiens
  misc_RNA (1)...(19): siRNA sense strand
gaaagauuuugucgucaga

SEQ ID NO: 1666045 - RNA, 19 nt, Homo sapiens
  misc_RNA (1)...(19): siRNA sense strand
gcaaguacaauacaaacac

SEQ ID NO: 1666046 - RNA, 19 nt, Homo sapiens
  misc_RNA (1)...(19): siRNA sense strand
aaagcacauuccguuuaua

SEQ ID NO: 1666047 - RNA, 19 nt, Homo sapiens
  misc_RNA (1)...(19): siRNA sense strand
aaucaaagaguaacagcuu

SEQ ID NO: 1666048 - RNA, 19 nt, Homo sapiens
  misc_RNA (1)...(19): siRNA sense strand
aaagagugaagucaagauu

SEQ ID NO: 1666049 - RNA, 19 nt, Homo sapiens
  misc_RNA (1)...(19): siRNA sense strand
gcaguugcccagugaucuu

SEQ ID NO: 1666050 - RNA, 19 nt, Homo sapiens
  misc_RNA (1)...(19): siRNA sense strand
ugaggaagagccauuuaau

SEQ ID NO: 1666051 - RNA, 19 nt, Homo sapiens
  misc_RNA (1)...(19): siRNA sense strand
cauuacacaugcuauugau

SEQ ID NO: 1666052 - RNA, 19 nt, Homo sapiens
  misc_RNA (1)...(19): siRNA sense strand
caaacacuucucuauaauc

SEQ ID NO: 1666053 - RNA, 19 nt, Homo sapiens
  misc_RNA (1)...(19): siRNA sense strand
uaaagcccauggaaagaac

SEQ ID NO: 1666054 - RNA, 19 nt, Homo sapiens
  misc_RNA (1)...(19): siRNA sense strand
uuucacagguacaaagaau

SEQ ID NO: 1666055 - RNA, 19 nt, Homo sapiens
  misc_RNA (1)...(19): siRNA sense strand
ugaauucccuucugaguua

SEQ ID NO: 1666056 - RNA, 19 nt, Homo sapiens
  misc_RNA (1)...(19): siRNA sense strand
ggacucgcaucccacuauu

SEQ ID NO: 1666057 - RNA, 19 nt, Homo sapiens
  misc_RNA (1)...(19): siRNA sense strand
cgaugagccugcuauacaa

SEQ ID NO: 1666058 - RNA, 19 nt, Homo sapiens
  misc_RNA (1)...(19): siRNA sense strand
acaagaaggugagcaagau

SEQ ID NO: 1666059 - RNA, 19 nt, Homo sapiens
  misc_RNA (1)...(19): siRNA sense strand
cgucaucgacuacaucuug

SEQ ID NO: 1666060 - RNA, 19 nt, Homo sapiens
  misc_RNA (1)...(19): siRNA sense strand
cuucugaguuaaugucaaa

SEQ ID NO: 1666061 - RNA, 19 nt, Homo sapiens
  misc_RNA (1)...(19): siRNA sense strand
gaauucccuucugaguuaa

SEQ ID NO: 1666062 - RNA, 19 nt, Homo sapiens
  misc_RNA (1)...(19): siRNA sense strand
cuucugaauucccuucuga

SEQ ID NO: 1666063 - RNA, 19 nt, Homo sapiens
  misc_RNA (1)...(19): siRNA sense strand
cugaguuaaugucaaauga

SEQ ID NO: 1666064 - RNA, 19 nt, Homo sapiens
  misc_RNA (1)...(19): siRNA sense strand
ccgaugagccugcuauaca

SEQ ID NO: 1666065 - RNA, 19 nt, Homo sapiens
  misc_RNA (1)...(19): siRNA sense strand
cuugcaggcuucugaauuc

SEQ ID NO: 1666066 - RNA, 19 nt, Homo sapiens
  misc_RNA (1)...(19): siRNA sense strand
gcacgucaucgacuacauc

SEQ ID NO: 1666067 - RNA, 19 nt, Homo sapiens
  misc_RNA (1)...(19): siRNA sense strand
cagccugcaucaccagaga

SEQ ID NO: 1666068 - RNA, 19 nt, Homo sapiens
  misc_RNA (1)...(19): siRNA sense strand
gaaggugagcaagauggaa

SEQ ID NO: 1666069 - RNA, 19 nt, Homo sapiens
  misc_RNA (1)...(19): siRNA sense strand
cgugagguccguuaggaaa

SEQ ID NO: 1666070 - RNA, 19 nt, Homo sapiens
  misc_RNA (1)...(19): siRNA sense strand
caagaaggugagcaagaug

SEQ ID NO: 1666071 - RNA, 19 nt, Homo sapiens
  misc_RNA (1)...(19): siRNA sense strand
gaccacagccugggcaucu

SEQ ID NO: 1666072 - RNA, 19 nt, Homo sapiens
  misc_RNA (1)...(19): siRNA sense strand
ugcagcacgucaucgacua

SEQ ID NO: 1666073 - RNA, 19 nt, Homo sapiens
  misc_RNA (1)...(19): siRNA sense strand
agaacaagaaggugagcaa

SEQ ID NO: 1666074 - RNA, 19 nt, Homo sapiens
  misc_RNA (1)...(19): siRNA sense strand
ucgcaucccacuauuguca

SEQ ID NO: 1666075 - RNA, 19 nt, Homo sapiens
  misc_RNA (1)...(19): siRNA sense strand
aaggugagcaagauggaaa

SEQ ID NO: 1666076 - RNA, 19 nt, Homo sapiens
  misc_RNA (1)...(19): siRNA sense strand
ugagcaagauggaaauccu

SEQ ID NO: 1666077 - RNA, 19 nt, Homo sapiens
  misc_RNA (1)...(19): siRNA sense strand
ggacaccaauggagacaua

SEQ ID NO: 1666078 - RNA, 19 nt, Homo sapiens
  misc_RNA (1)...(19): siRNA sense strand
gcaagacgauggaguuuua

SEQ ID NO: 1666079 - RNA, 19 nt, Homo sapiens
  misc_RNA (1)...(19): siRNA sense strand
gaaaggacaacccaauuga

SEQ ID NO: 1666080 - RNA, 19 nt, Homo sapiens
  misc_RNA (1)...(19): siRNA sense strand
ccacaagaauggcacauau

SEQ ID NO: 1666081 - RNA, 19 nt, Homo sapiens
  misc_RNA (1)...(19): siRNA sense strand
gcacauaugagcuagugua

SEQ ID NO: 1666082 - RNA, 19 nt, Homo sapiens
  misc_RNA (1)...(19): siRNA sense strand
caacacaucugcagaacca

SEQ ID NO: 1666083 - RNA, 19 nt, Homo sapiens
  misc_RNA (1)...(19): siRNA sense strand
gagcucgucuuccguguug

SEQ ID NO: 1666084 - RNA, 19 nt, Homo sapiens
  misc_RNA (1)...(19): siRNA sense strand
gagagcggcuggcugcauu

SEQ ID NO: 1666085 - RNA, 19 nt, Homo sapiens
  misc_RNA (1)...(19): siRNA sense strand
ggacuuccauaaccauuca

SEQ ID NO: 1666086 - RNA, 19 nt, Homo sapiens
  misc_RNA (1)...(19): siRNA sense strand
gagcgccacugcacacgaa

SEQ ID NO: 1666087 - RNA, 19 nt, Homo sapiens
  misc_RNA (1)...(19): siRNA sense strand
gaaugaaauuguaguaacg

SEQ ID NO: 1666088 - RNA, 19 nt, Homo sapiens
  misc_RNA (1)...(19): siRNA sense strand
gaauggcacauaugagcua

SEQ ID NO: 1666089 - RNA, 19 nt, Homo sapiens
  misc_RNA (1)...(19): siRNA sense strand
gcuccuuccuguccuauau

SEQ ID NO: 1666090 - RNA, 19 nt, Homo sapiens
  misc_RNA (1)...(19): siRNA sense strand
gcccagagguccagccaau

SEQ ID NO: 1666091 - RNA, 19 nt, Homo sapiens
  misc_RNA (1)...(19): siRNA sense strand
gcccagagccugacgcuau

SEQ ID NO: 1666092 - RNA, 19 nt, Homo sapiens
  misc_RNA (1)...(19): siRNA sense strand
gcaaugggcaguucaaugc

SEQ ID NO: 1666093 - RNA, 19 nt, Homo sapiens
  misc_RNA (1)...(19): siRNA sense strand
cgaaaggacaacccaauug

SEQ ID NO: 1666094 - RNA, 19 nt, Homo sapiens
  misc_RNA (1)...(19): siRNA sense strand
gaacacaucggcaguagcu

SEQ ID NO: 1666095 - RNA, 19 nt, Homo sapiens
  misc_RNA (1)...(19): siRNA sense strand
caacagccgcauccaggua

SEQ ID NO: 1666096 - RNA, 19 nt, Homo sapiens
  misc_RNA (1)...(19): siRNA sense strand
ggcaaccacugcuuuaaag

SEQ ID NO: 1666097 - RNA, 19 nt, Homo sapiens
  misc_RNA (1)...(19): siRNA sense strand
gcacaggcggcaaacgaaa

SEQ ID NO: 1666098 - RNA, 19 nt, Homo sapiens
  misc_RNA (1)...(19): siRNA sense strand
gaguuccucuucaaguuug

SEQ ID NO: 1666099 - RNA, 19 nt, Homo sapiens
  misc_RNA (1)...(19): siRNA sense strand
gaagggagaaaggugaauu

SEQ ID NO: 1666100 - RNA, 19 nt, Homo sapiens
  misc_RNA (1)...(19): siRNA sense strand
acaagaauggcacauauga

SEQ ID NO: 1666101 - RNA, 19 nt, Homo sapiens
  misc_RNA (1)...(19): siRNA sense strand
uaacggacuuccauaacca

SEQ ID NO: 1666102 - RNA, 19 nt, Homo sapiens
  misc_RNA (1)...(19): siRNA sense strand
guacagcacaggcggcaaa

SEQ ID NO: 1666103 - RNA, 19 nt, Homo sapiens
  misc_RNA (1)...(19): siRNA sense strand
cauaugagcuaguguacac

SEQ ID NO: 1666104 - RNA, 19 nt, Homo sapiens
  misc_RNA (1)...(19): siRNA sense strand
gacgcuauccuguccagua

SEQ ID NO: 1666105 - RNA, 19 nt, Homo sapiens
  misc_RNA (1)...(19): siRNA sense strand
ggacaacccaauugaggau

SEQ ID NO: 1666106 - RNA, 19 nt, Homo sapiens
  misc_RNA (1)...(19): siRNA sense strand
gcaacaaccaguguauuca

SEQ ID NO: 1666107 - RNA, 19 nt, Homo sapiens
  misc_RNA (1)...(19): siRNA sense strand
gcuggcaaccacugcuuua

SEQ ID NO: 1666108 - RNA, 19 nt, Homo sapiens
  misc_RNA (1)...(19): siRNA sense strand
ccaagggaguggccguaga

SEQ ID NO: 1666109 - RNA, 19 nt, Homo sapiens
  misc_RNA (1)...(19): siRNA sense strand
ggcgaucggugcucaaucu

SEQ ID NO: 1666110 - RNA, 19 nt, Homo sapiens
  misc_RNA (1)...(19): siRNA sense strand
ucucggcacugcagaacaa

SEQ ID NO: 1666111 - RNA, 19 nt, Homo sapiens
  misc_RNA (1)...(19): siRNA sense strand
guaguaacggacuuccaua

SEQ ID NO: 1666112 - RNA, 19 nt, Homo sapiens
  misc_RNA (1)...(19): siRNA sense strand
gugaacaacaagaaugaaa

SEQ ID NO: 1666113 - RNA, 19 nt, Homo sapiens
  misc_RNA (1)...(19): siRNA sense strand
ccaaugagggccaguucaa

SEQ ID NO: 1666114 - RNA, 19 nt, Homo sapiens
  misc_RNA (1)...(19): siRNA sense strand
gaugugaagcgccguguca

SEQ ID NO: 1666115 - RNA, 19 nt, Homo sapiens
  misc_RNA (1)...(19): siRNA sense strand
uaucaacacaucugcagaa

SEQ ID NO: 1666116 - RNA, 19 nt, Homo sapiens
  misc_RNA (1)...(19): siRNA sense strand
guaacggacuuccauaacc

SEQ ID NO: 1666117 - RNA, 19 nt, Homo sapiens
  misc_RNA (1)...(19): siRNA sense strand
acaacccaauugaggauga

SEQ ID NO: 1666118 - RNA, 19 nt, Homo sapiens
  misc_RNA (1)...(19): siRNA sense strand
gaccucggauggccaugug

SEQ ID NO: 1666119 - RNA, 19 nt, Homo sapiens
  misc_RNA (1)...(19): siRNA sense strand
gguguacagugccgaugga

SEQ ID NO: 1666120 - RNA, 19 nt, Homo sapiens
  misc_RNA (1)...(19): siRNA sense strand
ccgcagcaauugccuuagu

SEQ ID NO: 1666121 - RNA, 19 nt, Homo sapiens
  misc_RNA (1)...(19): siRNA sense strand
gcagccaugugcgccagaa

SEQ ID NO: 1666122 - RNA, 19 nt, Homo sapiens
  misc_RNA (1)...(19): siRNA sense strand
gcugugaacaacaagaaug

SEQ ID NO: 1666123 - RNA, 19 nt, Homo sapiens
  misc_RNA (1)...(19): siRNA sense strand
caaguucaagaccaagauu

SEQ ID NO: 1666124 - RNA, 19 nt, Homo sapiens
  misc_RNA (1)...(19): siRNA sense strand
acauaauuguggcagacua

SEQ ID NO: 1666125 - RNA, 19 nt, Homo sapiens
  misc_RNA (1)...(19): siRNA sense strand
caccaauggagacauaauu

SEQ ID NO: 1666126 - RNA, 19 nt, Homo sapiens
  misc_RNA (1)...(19): siRNA sense strand
gcuauccuguccaguaugc

SEQ ID NO: 1666127 - RNA, 19 nt, Homo sapiens
  misc_RNA (1)...(19): siRNA sense strand
uguccuauaucaacacauc

SEQ ID NO: 1666128 - RNA, 19 nt, Homo sapiens
  misc_RNA (1)...(19): siRNA sense strand
uaguaacggacuuccauaa

SEQ ID NO: 1666129 - RNA, 19 nt, Homo sapiens
  misc_RNA (1)...(19): siRNA sense strand
gaccggaauggacauauca

SEQ ID NO: 1666130 - RNA, 19 nt, Homo sapiens
  misc_RNA (1)...(19): siRNA sense strand
gcaaguucaagaccaagau

SEQ ID NO: 1666131 - RNA, 19 nt, Homo sapiens
  misc_RNA (1)...(19): siRNA sense strand
cgauggaguuuuacuguga

SEQ ID NO: 1666132 - RNA, 19 nt, Homo sapiens
  misc_RNA (1)...(19): siRNA sense strand
uggcaaccacugcuuuaaa

SEQ ID NO: 1666133 - RNA, 19 nt, Homo sapiens
  misc_RNA (1)...(19): siRNA sense strand
cagcacaggcggcaaacga

SEQ ID NO: 1666134 - RNA, 19 nt, Homo sapiens
  misc_RNA (1)...(19): siRNA sense strand
ucagcgaccuggagaccau

SEQ ID NO: 1666135 - RNA, 19 nt, Homo sapiens
  misc_RNA (1)...(19): siRNA sense strand
guccgcagcaauugccuua

SEQ ID NO: 1666136 - RNA, 19 nt, Homo sapiens
  misc_RNA (1)...(19): siRNA sense strand
gacagcaacaaccagugua

SEQ ID NO: 1666137 - RNA, 19 nt, Homo sapiens
  misc_RNA (1)...(19): siRNA sense strand
ggcaaugggcaguucaaug

SEQ ID NO: 1666138 - RNA, 19 nt, Homo sapiens
  misc_RNA (1)...(19): siRNA sense strand
uaauuguggcagacuauga

SEQ ID NO: 1666139 - RNA, 19 nt, Homo sapiens
  misc_RNA (1)...(19): siRNA sense strand
acgcuauccuguccaguau

SEQ ID NO: 1666140 - RNA, 19 nt, Homo sapiens
  misc_RNA (1)...(19): siRNA sense strand
ggagcggccacaugagaau

SEQ ID NO: 1666141 - RNA, 19 nt, Homo sapiens
  misc_RNA (1)...(19): siRNA sense strand
ccagagguccagccaaugg

SEQ ID NO: 1666142 - RNA, 19 nt, Homo sapiens
  misc_RNA (1)...(19): siRNA sense strand
uggcacauaugagcuagug

SEQ ID NO: 1666143 - RNA, 19 nt, Homo sapiens
  misc_RNA (1)...(19): siRNA sense strand
cgagggcaaugggcaguuc

SEQ ID NO: 1666144 - RNA, 19 nt, Homo sapiens
  misc_RNA (1)...(19): siRNA sense strand
agaccggaauggacauauc

SEQ ID NO: 1666145 - RNA, 19 nt, Homo sapiens
  misc_RNA (1)...(19): siRNA sense strand
caacaaccaguguauucag

SEQ ID NO: 1666146 - RNA, 19 nt, Homo sapiens
  misc_RNA (1)...(19): siRNA sense strand
uuccauaaccauucaguga

SEQ ID NO: 1666147 - RNA, 19 nt, Homo sapiens
  misc_RNA (1)...(19): siRNA sense strand
ccacugaccgccacuuugc

SEQ ID NO: 1666148 - RNA, 19 nt, Homo sapiens
  misc_RNA (1)...(19): siRNA sense strand
guagaccggaauggacaua

SEQ ID NO: 1666149 - RNA, 19 nt, Homo sapiens
  misc_RNA (1)...(19): siRNA sense strand
cauaauuguggcagacuau

SEQ ID NO: 1666150 - RNA, 19 nt, Homo sapiens
  misc_RNA (1)...(19): siRNA sense strand
caggaacacaucggcagua

SEQ ID NO: 1666151 - RNA, 19 nt, Homo sapiens
  misc_RNA (1)...(19): siRNA sense strand
ggccacugaccgccacuuu

SEQ ID NO: 1666152 - RNA, 19 nt, Homo sapiens
  misc_RNA (1)...(19): siRNA sense strand
cagcaacaaccaguguauu

SEQ ID NO: 1666153 - RNA, 19 nt, Homo sapiens
  misc_RNA (1)...(19): siRNA sense strand
acgaaaggacaacccaauu

SEQ ID NO: 1666154 - RNA, 19 nt, Homo sapiens
  misc_RNA (1)...(19): siRNA sense strand
gugaagcgccgugucaagu

SEQ ID NO: 1666155 - RNA, 19 nt, Homo sapiens
  misc_RNA (1)...(19): siRNA sense strand
cugcagaaccacuguaugg

SEQ ID NO: 1666156 - RNA, 19 nt, Homo sapiens
  misc_RNA (1)...(19): siRNA sense strand
cagugccgauggagaguuc

SEQ ID NO: 1666157 - RNA, 19 nt, Homo sapiens
  misc_RNA (1)...(19): siRNA sense strand
guauucagguuuucuccaa

SEQ ID NO: 1666158 - RNA, 19 nt, Homo sapiens
  misc_RNA (1)...(19): siRNA sense strand
cacaagaauggcacauaug

SEQ ID NO: 1666159 - RNA, 19 nt, Homo sapiens
  misc_RNA (1)...(19): siRNA sense strand
ggacaccaauggagacaua

SEQ ID NO: 1666160 - RNA, 19 nt, Homo sapiens
  misc_RNA (1)...(19): siRNA sense strand
gcaagacgauggaguuuua

SEQ ID NO: 1666161 - RNA, 19 nt, Homo sapiens
  misc_RNA (1)...(19): siRNA sense strand
gaaaggacaacccaauuga

SEQ ID NO: 1666162 - RNA, 19 nt, Homo sapiens
  misc_RNA (1)...(19): siRNA sense strand
ccacaagaauggcacauau

SEQ ID NO: 1666163 - RNA, 19 nt, Homo sapiens
  misc_RNA (1)...(19): siRNA sense strand
gcacauaugagcuagugua

SEQ ID NO: 1666164 - RNA, 19 nt, Homo sapiens
  misc_RNA (1)...(19): siRNA sense strand
caacacaucugcagaacca

SEQ ID NO: 1666165 - RNA, 19 nt, Homo sapiens
  misc_RNA (1)...(19): siRNA sense strand
gagcucgucuuccguguug

SEQ ID NO: 1666166 - RNA, 19 nt, Homo sapiens
  misc_RNA (1)...(19): siRNA sense strand
gagagcggcuggcugcauu

SEQ ID NO: 1666167 - RNA, 19 nt, Homo sapiens
  misc_RNA (1)...(19): siRNA sense strand
ggacuuccauaaccauuca

SEQ ID NO: 1666168 - RNA, 19 nt, Homo sapiens
  misc_RNA (1)...(19): siRNA sense strand
gagcgccacugcacacgaa

SEQ ID NO: 1666169 - RNA, 19 nt, Homo sapiens
  misc_RNA (1)...(19): siRNA sense strand
gaaugaaauuguaguaacg

SEQ ID NO: 1666170 - RNA, 19 nt, Homo sapiens
  misc_RNA (1)...(19): siRNA sense strand
gaauggcacauaugagcua

SEQ ID NO: 1666171 - RNA, 19 nt, Homo sapiens
  misc_RNA (1)...(19): siRNA sense strand
gcuccuuccuguccuauau

SEQ ID NO: 1666172 - RNA, 19 nt, Homo sapiens
  misc_RNA (1)...(19): siRNA sense strand
gcccagagguccagccaau

SEQ ID NO: 1666173 - RNA, 19 nt, Homo sapiens
  misc_RNA (1)...(19): siRNA sense strand
gcccagagccugacgcuau

SEQ ID NO: 1666174 - RNA, 19 nt, Homo sapiens
  misc_RNA (1)...(19): siRNA sense strand
gcaaugggcaguucaaugc

SEQ ID NO: 1666175 - RNA, 19 nt, Homo sapiens
  misc_RNA (1)...(19): siRNA sense strand
cgaaaggacaacccaauug

SEQ ID NO: 1666176 - RNA, 19 nt, Homo sapiens
  misc_RNA (1)...(19): siRNA sense strand
gaacacaucggcaguagcu

SEQ ID NO: 1666177 - RNA, 19 nt, Homo sapiens
  misc_RNA (1)...(19): siRNA sense strand
caacagccgcauccaggua

SEQ ID NO: 1666178 - RNA, 19 nt, Homo sapiens
  misc_RNA (1)...(19): siRNA sense strand
ggcaaccacugcuuuaaag

SEQ ID NO: 1666179 - RNA, 19 nt, Homo sapiens
  misc_RNA (1)...(19): siRNA sense strand
gcacaggcggcaaacgaaa

SEQ ID NO: 1666180 - RNA, 19 nt, Homo sapiens
  misc_RNA (1)...(19): siRNA sense strand
gaguuccucuucaaguuug

SEQ ID NO: 1666181 - RNA, 19 nt, Homo sapiens
  misc_RNA (1)...(19): siRNA sense strand
gaagggagaaaggugaauu

SEQ ID NO: 1666182 - RNA, 19 nt, Homo sapiens
  misc_RNA (1)...(19): siRNA sense strand
acaagaauggcacauauga

SEQ ID NO: 1666183 - RNA, 19 nt, Homo sapiens
  misc_RNA (1)...(19): siRNA sense strand
uaacggacuuccauaacca

SEQ ID NO: 1666184 - RNA, 19 nt, Homo sapiens
  misc_RNA (1)...(19): siRNA sense strand
guacagcacaggcggcaaa

SEQ ID NO: 1666185 - RNA, 19 nt, Homo sapiens
  misc_RNA (1)...(19): siRNA sense strand
cauaugagcuaguguacac

SEQ ID NO: 1666186 - RNA, 19 nt, Homo sapiens
  misc_RNA (1)...(19): siRNA sense strand
gacgcuauccuguccagua

SEQ ID NO: 1666187 - RNA, 19 nt, Homo sapiens
  misc_RNA (1)...(19): siRNA sense strand
ggacaacccaauugaggau

SEQ ID NO: 1666188 - RNA, 19 nt, Homo sapiens
  misc_RNA (1)...(19): siRNA sense strand
gcaacaaccaguguauuca

SEQ ID NO: 1666189 - RNA, 19 nt, Homo sapiens
  misc_RNA (1)...(19): siRNA sense strand
gcuggcaaccacugcuuua

SEQ ID NO: 1666190 - RNA, 19 nt, Homo sapiens
  misc_RNA (1)...(19): siRNA sense strand
ccaagggaguggccguaga

SEQ ID NO: 1666191 - RNA, 19 nt, Homo sapiens
  misc_RNA (1)...(19): siRNA sense strand
ggcgaucggugcucaaucu

SEQ ID NO: 1666192 - RNA, 19 nt, Homo sapiens
  misc_RNA (1)...(19): siRNA sense strand
ucucggcacugcagaacaa

SEQ ID NO: 1666193 - RNA, 19 nt, Homo sapiens
  misc_RNA (1)...(19): siRNA sense strand
guaguaacggacuuccaua

SEQ ID NO: 1666194 - RNA, 19 nt, Homo sapiens
  misc_RNA (1)...(19): siRNA sense strand
gugaacaacaagaaugaaa

SEQ ID NO: 1666195 - RNA, 19 nt, Homo sapiens
  misc_RNA (1)...(19): siRNA sense strand
ccaaugagggccaguucaa

SEQ ID NO: 1666196 - RNA, 19 nt, Homo sapiens
  misc_RNA (1)...(19): siRNA sense strand
gaugugaagcgccguguca

SEQ ID NO: 1666197 - RNA, 19 nt, Homo sapiens
  misc_RNA (1)...(19): siRNA sense strand
uaucaacacaucugcagaa

SEQ ID NO: 1666198 - RNA, 19 nt, Homo sapiens
  misc_RNA (1)...(19): siRNA sense strand
guaacggacuuccauaacc

SEQ ID NO: 1666199 - RNA, 19 nt, Homo sapiens
  misc_RNA (1)...(19): siRNA sense strand
acaacccaauugaggauga

SEQ ID NO: 1666200 - RNA, 19 nt, Homo sapiens
  misc_RNA (1)...(19): siRNA sense strand
gaccucggauggccaugug

SEQ ID NO: 1666201 - RNA, 19 nt, Homo sapiens
  misc_RNA (1)...(19): siRNA sense strand
gguguacagugccgaugga

SEQ ID NO: 1666202 - RNA, 19 nt, Homo sapiens
  misc_RNA (1)...(19): siRNA sense strand
ccgcagcaauugccuuagu

SEQ ID NO: 1666203 - RNA, 19 nt, Homo sapiens
  misc_RNA (1)...(19): siRNA sense strand
gcagccaugugcgccagaa

SEQ ID NO: 1666204 - RNA, 19 nt, Homo sapiens
  misc_RNA (1)...(19): siRNA sense strand
gcugugaacaacaagaaug

SEQ ID NO: 1666205 - RNA, 19 nt, Homo sapiens
  misc_RNA (1)...(19): siRNA sense strand
caaguucaagaccaagauu

SEQ ID NO: 1666206 - RNA, 19 nt, Homo sapiens
  misc_RNA (1)...(19): siRNA sense strand
acauaauuguggcagacua

SEQ ID NO: 1666207 - RNA, 19 nt, Homo sapiens
  misc_RNA (1)...(19): siRNA sense strand
caccaauggagacauaauu

SEQ ID NO: 1666208 - RNA, 19 nt, Homo sapiens
  misc_RNA (1)...(19): siRNA sense strand
gcuauccuguccaguaugc

SEQ ID NO: 1666209 - RNA, 19 nt, Homo sapiens
  misc_RNA (1)...(19): siRNA sense strand
uguccuauaucaacacauc

SEQ ID NO: 1666210 - RNA, 19 nt, Homo sapiens
  misc_RNA (1)...(19): siRNA sense strand
uaguaacggacuuccauaa

SEQ ID NO: 1666211 - RNA, 19 nt, Homo sapiens
  misc_RNA (1)...(19): siRNA sense strand
gaccggaauggacauauca

SEQ ID NO: 1666212 - RNA, 19 nt, Homo sapiens
  misc_RNA (1)...(19): siRNA sense strand
gcaaguucaagaccaagau

SEQ ID NO: 1666213 - RNA, 19 nt, Homo sapiens
  misc_RNA (1)...(19): siRNA sense strand
cgauggaguuuuacuguga

SEQ ID NO: 1666214 - RNA, 19 nt, Homo sapiens
  misc_RNA (1)...(19): siRNA sense strand
uggcaaccacugcuuuaaa

SEQ ID NO: 1666215 - RNA, 19 nt, Homo sapiens
  misc_RNA (1)...(19): siRNA sense strand
cagcacaggcggcaaacga

SEQ ID NO: 1666216 - RNA, 19 nt, Homo sapiens
  misc_RNA (1)...(19): siRNA sense strand
ucagcgaccuggagaccau

SEQ ID NO: 1666217 - RNA, 19 nt, Homo sapiens
  misc_RNA (1)...(19): siRNA sense strand
guccgcagcaauugccuua

SEQ ID NO: 1666218 - RNA, 19 nt, Homo sapiens
  misc_RNA (1)...(19): siRNA sense strand
gacagcaacaaccagugua

SEQ ID NO: 1666219 - RNA, 19 nt, Homo sapiens
  misc_RNA (1)...(19): siRNA sense strand
ggcaaugggcaguucaaug

SEQ ID NO: 1666220 - RNA, 19 nt, Homo sapiens
  misc_RNA (1)...(19): siRNA sense strand
uaauuguggcagacuauga

SEQ ID NO: 1666221 - RNA, 19 nt, Homo sapiens
  misc_RNA (1)...(19): siRNA sense strand
acgcuauccuguccaguau

SEQ ID NO: 1666222 - RNA, 19 nt, Homo sapiens
  misc_RNA (1)...(19): siRNA sense strand
ggagcggccacaugagaau

SEQ ID NO: 1666223 - RNA, 19 nt, Homo sapiens
  misc_RNA (1)...(19): siRNA sense strand
ccagagguccagccaaugg

SEQ ID NO: 1666224 - RNA, 19 nt, Homo sapiens
  misc_RNA (1)...(19): siRNA sense strand
uggcacauaugagcuagug

SEQ ID NO: 1666225 - RNA, 19 nt, Homo sapiens
  misc_RNA (1)...(19): siRNA sense strand
cgagggcaaugggcaguuc

SEQ ID NO: 1666226 - RNA, 19 nt, Homo sapiens
  misc_RNA (1)...(19): siRNA sense strand
agaccggaauggacauauc

SEQ ID NO: 1666227 - RNA, 19 nt, Homo sapiens
  misc_RNA (1)...(19): siRNA sense strand
caacaaccaguguauucag

SEQ ID NO: 1666228 - RNA, 19 nt, Homo sapiens
  misc_RNA (1)...(19): siRNA sense strand
uuccauaaccauucaguga

SEQ ID NO: 1666229 - RNA, 19 nt, Homo sapiens
  misc_RNA (1)...(19): siRNA sense strand
ccacugaccgccacuuugc

SEQ ID NO: 1666230 - RNA, 19 nt, Homo sapiens
  misc_RNA (1)...(19): siRNA sense strand
guagaccggaauggacaua

SEQ ID NO: 1666231 - RNA, 19 nt, Homo sapiens
  misc_RNA (1)...(19): siRNA sense strand
cauaauuguggcagacuau

SEQ ID NO: 1666232 - RNA, 19 nt, Homo sapiens
  misc_RNA (1)...(19): siRNA sense strand
caggaacacaucggcagua

SEQ ID NO: 1666233 - RNA, 19 nt, Homo sapiens
  misc_RNA (1)...(19): siRNA sense strand
ggccacugaccgccacuuu

SEQ ID NO: 1666234 - RNA, 19 nt, Homo sapiens
  misc_RNA (1)...(19): siRNA sense strand
cagcaacaaccaguguauu

SEQ ID NO: 1666235 - RNA, 19 nt, Homo sapiens
  misc_RNA (1)...(19): siRNA sense strand
acgaaaggacaacccaauu

SEQ ID NO: 1666236 - RNA, 19 nt, Homo sapiens
  misc_RNA (1)...(19): siRNA sense strand
gugaagcgccgugucaagu

SEQ ID NO: 1666237 - RNA, 19 nt, Homo sapiens
  misc_RNA (1)...(19): siRNA sense strand
cugcagaaccacuguaugg

SEQ ID NO: 1666238 - RNA, 19 nt, Homo sapiens
  misc_RNA (1)...(19): siRNA sense strand
cagugccgauggagaguuc

SEQ ID NO: 1666239 - RNA, 19 nt, Homo sapiens
  misc_RNA (1)...(19): siRNA sense strand
guauucagguuuucuccaa

SEQ ID NO: 1666240 - RNA, 19 nt, Homo sapiens
  misc_RNA (1)...(19): siRNA sense strand
cacaagaauggcacauaug

SEQ ID NO: 1666241 - RNA, 19 nt, Homo sapiens
  misc_RNA (1)...(19): siRNA sense strand
cagccaagauguuuaacua

SEQ ID NO: 1666242 - RNA, 19 nt, Homo sapiens
  misc_RNA (1)...(19): siRNA sense strand
uaacaaccaucguaagaau

SEQ ID NO: 1666243 - RNA, 19 nt, Homo sapiens
  misc_RNA (1)...(19): siRNA sense strand
gcuauuacuucuucaauuc

SEQ ID NO: 1666244 - RNA, 19 nt, Homo sapiens
  misc_RNA (1)...(19): siRNA sense strand
gaaagcugguagaagauga

SEQ ID NO: 1666245 - RNA, 19 nt, Homo sapiens
  misc_RNA (1)...(19): siRNA sense strand
gcucuauccugccuucuuu

SEQ ID NO: 1666246 - RNA, 19 nt, Homo sapiens
  misc_RNA (1)...(19): siRNA sense strand
ugauugaacuuuccuucua

SEQ ID NO: 1666247 - RNA, 19 nt, Homo sapiens
  misc_RNA (1)...(19): siRNA sense strand
gcacuaucccuucccagua

SEQ ID NO: 1666248 - RNA, 19 nt, Homo sapiens
  misc_RNA (1)...(19): siRNA sense strand
cuggaaagcugguagaaga

SEQ ID NO: 1666249 - RNA, 19 nt, Homo sapiens
  misc_RNA (1)...(19): siRNA sense strand
gaagaacaccugcaacaac

SEQ ID NO: 1666250 - RNA, 19 nt, Homo sapiens
  misc_RNA (1)...(19): siRNA sense strand
gcaugacucuuccgauuac

SEQ ID NO: 1666251 - RNA, 19 nt, Homo sapiens
  misc_RNA (1)...(19): siRNA sense strand
gcgcauggcccacaaguuc

SEQ ID NO: 1666252 - RNA, 19 nt, Homo sapiens
  misc_RNA (1)...(19): siRNA sense strand
ggagucagccaagauguuu

SEQ ID NO: 1666253 - RNA, 19 nt, Homo sapiens
  misc_RNA (1)...(19): siRNA sense strand
gcaacaacaucuucaucgu

SEQ ID NO: 1666254 - RNA, 19 nt, Homo sapiens
  misc_RNA (1)...(19): siRNA sense strand
ccucugaugucaagcgaaa

SEQ ID NO: 1666255 - RNA, 19 nt, Homo sapiens
  misc_RNA (1)...(19): siRNA sense strand
ggaagaacaccugcaacaa

SEQ ID NO: 1666256 - RNA, 19 nt, Homo sapiens
  misc_RNA (1)...(19): siRNA sense strand
ucaauaacaaccaucguaa

SEQ ID NO: 1666257 - RNA, 19 nt, Homo sapiens
  misc_RNA (1)...(19): siRNA sense strand
aagaacaccugcaacaaca

SEQ ID NO: 1666258 - RNA, 19 nt, Homo sapiens
  misc_RNA (1)...(19): siRNA sense strand
ggcuauuacuucuucaauu

SEQ ID NO: 1666259 - RNA, 19 nt, Homo sapiens
  misc_RNA (1)...(19): siRNA sense strand
uuuccugguuugccaauua

SEQ ID NO: 1666260 - RNA, 19 nt, Homo sapiens
  misc_RNA (1)...(19): siRNA sense strand
ucuaugacaugaagaaagu

SEQ ID NO: 1666261 - RNA, 19 nt, Homo sapiens
  misc_RNA (1)...(19): siRNA sense strand
cugcaugacucuuccgauu

SEQ ID NO: 1666262 - RNA, 19 nt, Homo sapiens
  misc_RNA (1)...(19): siRNA sense strand
cauccgagcugggacucua

SEQ ID NO: 1666263 - RNA, 19 nt, Homo sapiens
  misc_RNA (1)...(19): siRNA sense strand
gaacaccugcaacaacauc

SEQ ID NO: 1666264 - RNA, 19 nt, Homo sapiens
  misc_RNA (1)...(19): siRNA sense strand
gguacuacaugauugaacu

SEQ ID NO: 1666265 - RNA, 19 nt, Homo sapiens
  misc_RNA (1)...(19): siRNA sense strand
cacuaucccuucccaguau

SEQ ID NO: 1666266 - RNA, 19 nt, Homo sapiens
  misc_RNA (1)...(19): siRNA sense strand
gauugaacuuuccuucuac

SEQ ID NO: 1666267 - RNA, 19 nt, Homo sapiens
  misc_RNA (1)...(19): siRNA sense strand
aauaacaaccaucguaaga

SEQ ID NO: 1666268 - RNA, 19 nt, Homo sapiens
  misc_RNA (1)...(19): siRNA sense strand
gauggaagaacaccugcaa

SEQ ID NO: 1666269 - RNA, 19 nt, Homo sapiens
  misc_RNA (1)...(19): siRNA sense strand
ggaaagcugguagaagaug

SEQ ID NO: 1666270 - RNA, 19 nt, Homo sapiens
  misc_RNA (1)...(19): siRNA sense strand
guauugguacuacaugauu

SEQ ID NO: 1666271 - RNA, 19 nt, Homo sapiens
  misc_RNA (1)...(19): siRNA sense strand
gaugucaagcgaaaggauu

SEQ ID NO: 1666272 - RNA, 19 nt, Homo sapiens
  misc_RNA (1)...(19): siRNA sense strand
acaaccaucguaagaauga

SEQ ID NO: 1666273 - RNA, 19 nt, Homo sapiens
  misc_RNA (1)...(19): siRNA sense strand
caacaucuucaucgucuuc

SEQ ID NO: 1666274 - RNA, 19 nt, Homo sapiens
  misc_RNA (1)...(19): siRNA sense strand
gcagugaccgggaagaaac

SEQ ID NO: 1666275 - RNA, 19 nt, Homo sapiens
  misc_RNA (1)...(19): siRNA sense strand
gagcugggacucuaaucau

SEQ ID NO: 1666276 - RNA, 19 nt, Homo sapiens
  misc_RNA (1)...(19): siRNA sense strand
cuucuucaauuccaugaug

SEQ ID NO: 1666277 - RNA, 19 nt, Homo sapiens
  misc_RNA (1)...(19): siRNA sense strand
gaaaguuugggagggauau

SEQ ID NO: 1666278 - RNA, 19 nt, Homo sapiens
  misc_RNA (1)...(19): siRNA sense strand
ccauguggccaccaucauu

SEQ ID NO: 1666279 - RNA, 19 nt, Homo sapiens
  misc_RNA (1)...(19): siRNA sense strand
cuucugggccuaccucauu

SEQ ID NO: 1666280 - RNA, 19 nt, Homo sapiens
  misc_RNA (1)...(19): siRNA sense strand
ugcaugacucuuccgauua

SEQ ID NO: 1666281 - RNA, 19 nt, Homo sapiens
  misc_RNA (1)...(19): siRNA sense strand
cagcauugccucugauguc

SEQ ID NO: 1666282 - RNA, 19 nt, Homo sapiens
  misc_RNA (1)...(19): siRNA sense strand
uauugguacuacaugauug

SEQ ID NO: 1666283 - RNA, 19 nt, Homo sapiens
  misc_RNA (1)...(19): siRNA sense strand
uaacuggaaagcugguaga

SEQ ID NO: 1666284 - RNA, 19 nt, Homo sapiens
  misc_RNA (1)...(19): siRNA sense strand
ggccgucauuguggauaaa

SEQ ID NO: 1666285 - RNA, 19 nt, Homo sapiens
  misc_RNA (1)...(19): siRNA sense strand
gagucagccaagauguuua

SEQ ID NO: 1666286 - RNA, 19 nt, Homo sapiens
  misc_RNA (1)...(19): siRNA sense strand
caucagcuuuuccugguuu

SEQ ID NO: 1666287 - RNA, 19 nt, Homo sapiens
  misc_RNA (1)...(19): siRNA sense strand
cucaauaacaaccaucgua

SEQ ID NO: 1666288 - RNA, 19 nt, Homo sapiens
  misc_RNA (1)...(19): siRNA sense strand
cuacaugauugaacuuucc

SEQ ID NO: 1666289 - RNA, 19 nt, Homo sapiens
  misc_RNA (1)...(19): siRNA sense strand
caauaacaaccaucguaag

SEQ ID NO: 1666290 - RNA, 19 nt, Homo sapiens
  misc_RNA (1)...(19): siRNA sense strand
uggaagaacaccugcaaca

SEQ ID NO: 1666291 - RNA, 19 nt, Homo sapiens
  misc_RNA (1)...(19): siRNA sense strand
agucagccaagauguuuaa

SEQ ID NO: 1666292 - RNA, 19 nt, Homo sapiens
  misc_RNA (1)...(19): siRNA sense strand
ucaaggaacagaucaucca

SEQ ID NO: 1666293 - RNA, 19 nt, Homo sapiens
  misc_RNA (1)...(19): siRNA sense strand
ccuucuggauccugcauug

SEQ ID NO: 1666294 - RNA, 19 nt, Homo sapiens
  misc_RNA (1)...(19): siRNA sense strand
ccaucauucucaucagcuu

SEQ ID NO: 1666295 - RNA, 19 nt, Homo sapiens
  misc_RNA (1)...(19): siRNA sense strand
ggauuucaaggaacagauc

SEQ ID NO: 1666296 - RNA, 19 nt, Homo sapiens
  misc_RNA (1)...(19): siRNA sense strand
guacuacaugauugaacuu

SEQ ID NO: 1666297 - RNA, 19 nt, Homo sapiens
  misc_RNA (1)...(19): siRNA sense strand
cgagcugggacucuaauca

SEQ ID NO: 1666298 - RNA, 19 nt, Homo sapiens
  misc_RNA (1)...(19): siRNA sense strand
gaagccagcuggagauuca

SEQ ID NO: 1666299 - RNA, 19 nt, Homo sapiens
  misc_RNA (1)...(19): siRNA sense strand
cagccaagauguuuaacua

SEQ ID NO: 1666300 - RNA, 19 nt, Homo sapiens
  misc_RNA (1)...(19): siRNA sense strand
uaacaaccaucguaagaau

SEQ ID NO: 1666301 - RNA, 19 nt, Homo sapiens
  misc_RNA (1)...(19): siRNA sense strand
gcuauuacuucuucaauuc

SEQ ID NO: 1666302 - RNA, 19 nt, Homo sapiens
  misc_RNA (1)...(19): siRNA sense strand
gaaagcugguagaagauga

SEQ ID NO: 1666303 - RNA, 19 nt, Homo sapiens
  misc_RNA (1)...(19): siRNA sense strand
gcucuauccugccuucuuu

SEQ ID NO: 1666304 - RNA, 19 nt, Homo sapiens
  misc_RNA (1)...(19): siRNA sense strand
ugauugaacuuuccuucua

SEQ ID NO: 1666305 - RNA, 19 nt, Homo sapiens
  misc_RNA (1)...(19): siRNA sense strand
gcacuaucccuucccagua

SEQ ID NO: 1666306 - RNA, 19 nt, Homo sapiens
  misc_RNA (1)...(19): siRNA sense strand
cuggaaagcugguagaaga

SEQ ID NO: 1666307 - RNA, 19 nt, Homo sapiens
  misc_RNA (1)...(19): siRNA sense strand
ccaagcagguggaaguaga

SEQ ID NO: 1666308 - RNA, 19 nt, Homo sapiens
  misc_RNA (1)...(19): siRNA sense strand
gaagaacaccugcaacaac

SEQ ID NO: 1666309 - RNA, 19 nt, Homo sapiens
  misc_RNA (1)...(19): siRNA sense strand
gcaugacucuuccgauuac

SEQ ID NO: 1666310 - RNA, 19 nt, Homo sapiens
  misc_RNA (1)...(19): siRNA sense strand
gcgcauggcccacaaguuc

SEQ ID NO: 1666311 - RNA, 19 nt, Homo sapiens
  misc_RNA (1)...(19): siRNA sense strand
ggagucagccaagauguuu

SEQ ID NO: 1666312 - RNA, 19 nt, Homo sapiens
  misc_RNA (1)...(19): siRNA sense strand
gcaacaacaucuucaucgu

SEQ ID NO: 1666313 - RNA, 19 nt, Homo sapiens
  misc_RNA (1)...(19): siRNA sense strand
gcugcccucuugaacauaa

SEQ ID NO: 1666314 - RNA, 19 nt, Homo sapiens
  misc_RNA (1)...(19): siRNA sense strand
ccucugaugucaagcgaaa

SEQ ID NO: 1666315 - RNA, 19 nt, Homo sapiens
  misc_RNA (1)...(19): siRNA sense strand
ggaagaacaccugcaacaa

SEQ ID NO: 1666316 - RNA, 19 nt, Homo sapiens
  misc_RNA (1)...(19): siRNA sense strand
ucaauaacaaccaucguaa

SEQ ID NO: 1666317 - RNA, 19 nt, Homo sapiens
  misc_RNA (1)...(19): siRNA sense strand
aagaacaccugcaacaaca

SEQ ID NO: 1666318 - RNA, 19 nt, Homo sapiens
  misc_RNA (1)...(19): siRNA sense strand
ggcuauuacuucuucaauu

SEQ ID NO: 1666319 - RNA, 19 nt, Homo sapiens
  misc_RNA (1)...(19): siRNA sense strand
ucuaugacaugaagaaagu

SEQ ID NO: 1666320 - RNA, 19 nt, Homo sapiens
  misc_RNA (1)...(19): siRNA sense strand
cugcaugacucuuccgauu

SEQ ID NO: 1666321 - RNA, 19 nt, Homo sapiens
  misc_RNA (1)...(19): siRNA sense strand
uuuccugguuugccaauua

SEQ ID NO: 1666322 - RNA, 19 nt, Homo sapiens
  misc_RNA (1)...(19): siRNA sense strand
ggcccagucuccucaagaa

SEQ ID NO: 1666323 - RNA, 19 nt, Homo sapiens
  misc_RNA (1)...(19): siRNA sense strand
ccagucuccucaagaaguu

SEQ ID NO: 1666324 - RNA, 19 nt, Homo sapiens
  misc_RNA (1)...(19): siRNA sense strand
cauccgagcugggacucua

SEQ ID NO: 1666325 - RNA, 19 nt, Homo sapiens
  misc_RNA (1)...(19): siRNA sense strand
gaacaccugcaacaacauc

SEQ ID NO: 1666326 - RNA, 19 nt, Homo sapiens
  misc_RNA (1)...(19): siRNA sense strand
cacuaucccuucccaguau

SEQ ID NO: 1666327 - RNA, 19 nt, Homo sapiens
  misc_RNA (1)...(19): siRNA sense strand
gauugaacuuuccuucuac

SEQ ID NO: 1666328 - RNA, 19 nt, Homo sapiens
  misc_RNA (1)...(19): siRNA sense strand
gguacuacaugauugaacu

SEQ ID NO: 1666329 - RNA, 19 nt, Homo sapiens
  misc_RNA (1)...(19): siRNA sense strand
aauaacaaccaucguaaga

SEQ ID NO: 1666330 - RNA, 19 nt, Homo sapiens
  misc_RNA (1)...(19): siRNA sense strand
guauugguacuacaugauu

SEQ ID NO: 1666331 - RNA, 19 nt, Homo sapiens
  misc_RNA (1)...(19): siRNA sense strand
ggaaagcugguagaagaug

SEQ ID NO: 1666332 - RNA, 19 nt, Homo sapiens
  misc_RNA (1)...(19): siRNA sense strand
gauggaagaacaccugcaa

SEQ ID NO: 1666333 - RNA, 19 nt, Homo sapiens
  misc_RNA (1)...(19): siRNA sense strand
gaugucaagcgaaaggauu

SEQ ID NO: 1666334 - RNA, 19 nt, Homo sapiens
  misc_RNA (1)...(19): siRNA sense strand
acaaccaucguaagaauga

SEQ ID NO: 1666335 - RNA, 19 nt, Homo sapiens
  misc_RNA (1)...(19): siRNA sense strand
caacaucuucaucgucuuc

SEQ ID NO: 1666336 - RNA, 19 nt, Homo sapiens
  misc_RNA (1)...(19): siRNA sense strand
gcuggagauucacauuuua

SEQ ID NO: 1666337 - RNA, 19 nt, Homo sapiens
  misc_RNA (1)...(19): siRNA sense strand
cagcuggagauucacauuu

SEQ ID NO: 1666338 - RNA, 19 nt, Homo sapiens
  misc_RNA (1)...(19): siRNA sense strand
gcagguggaaguagagcuu

SEQ ID NO: 1666339 - RNA, 19 nt, Homo sapiens
  misc_RNA (1)...(19): siRNA sense strand
gcagugaccgggaagaaac

SEQ ID NO: 1666340 - RNA, 19 nt, Homo sapiens
  misc_RNA (1)...(19): siRNA sense strand
gagcugggacucuaaucau

SEQ ID NO: 1666341 - RNA, 19 nt, Homo sapiens
  misc_RNA (1)...(19): siRNA sense strand
cuucuucaauuccaugaug

SEQ ID NO: 1666342 - RNA, 19 nt, Homo sapiens
  misc_RNA (1)...(19): siRNA sense strand
gaaaguuugggagggauau

SEQ ID NO: 1666343 - RNA, 19 nt, Homo sapiens
  misc_RNA (1)...(19): siRNA sense strand
ccauguggccaccaucauu

SEQ ID NO: 1666344 - RNA, 19 nt, Homo sapiens
  misc_RNA (1)...(19): siRNA sense strand
gagaagccagcuggagauu

SEQ ID NO: 1666345 - RNA, 19 nt, Homo sapiens
  misc_RNA (1)...(19): siRNA sense strand
cuucugggccuaccucauu

SEQ ID NO: 1666346 - RNA, 19 nt, Homo sapiens
  misc_RNA (1)...(19): siRNA sense strand
uuaccugauugccuucauu

SEQ ID NO: 1666347 - RNA, 19 nt, Homo sapiens
  misc_RNA (1)...(19): siRNA sense strand
ugcaugacucuuccgauua

SEQ ID NO: 1666348 - RNA, 19 nt, Homo sapiens
  misc_RNA (1)...(19): siRNA sense strand
uggcugcccucuugaacau

SEQ ID NO: 1666349 - RNA, 19 nt, Homo sapiens
  misc_RNA (1)...(19): siRNA sense strand
ggccgucauuguggauaaa

SEQ ID NO: 1666350 - RNA, 19 nt, Homo sapiens
  misc_RNA (1)...(19): siRNA sense strand
uaacuggaaagcugguaga

SEQ ID NO: 1666351 - RNA, 19 nt, Homo sapiens
  misc_RNA (1)...(19): siRNA sense strand
gagucagccaagauguuua

SEQ ID NO: 1666352 - RNA, 19 nt, Homo sapiens
  misc_RNA (1)...(19): siRNA sense strand
cagcauugccucugauguc

SEQ ID NO: 1666353 - RNA, 19 nt, Homo sapiens
  misc_RNA (1)...(19): siRNA sense strand
uauugguacuacaugauug

SEQ ID NO: 1666354 - RNA, 19 nt, Homo sapiens
  misc_RNA (1)...(19): siRNA sense strand
cucaagaaguuccgagaag

SEQ ID NO: 1666355 - RNA, 19 nt, Homo sapiens
  misc_RNA (1)...(19): siRNA sense strand
cucaauaacaaccaucgua

SEQ ID NO: 1666356 - RNA, 19 nt, Homo sapiens
  misc_RNA (1)...(19): siRNA sense strand
caucagcuuuuccugguuu

SEQ ID NO: 1666357 - RNA, 19 nt, Homo sapiens
  misc_RNA (1)...(19): siRNA sense strand
cuacaugauugaacuuucc

SEQ ID NO: 1666358 - RNA, 19 nt, Homo sapiens
  misc_RNA (1)...(19): siRNA sense strand
caauaacaaccaucguaag

SEQ ID NO: 1666359 - RNA, 19 nt, Homo sapiens
  misc_RNA (1)...(19): siRNA sense strand
uggaagaacaccugcaaca

SEQ ID NO: 1666360 - RNA, 19 nt, Homo sapiens
  misc_RNA (1)...(19): siRNA sense strand
agucagccaagauguuuaa

SEQ ID NO: 1666361 - RNA, 19 nt, Homo sapiens
  misc_RNA (1)...(19): siRNA sense strand
uggccgucauuguggauaa

SEQ ID NO: 1666362 - RNA, 19 nt, Homo sapiens
  misc_RNA (1)...(19): siRNA sense strand
cgagaagccagcuggagau

SEQ ID NO: 1666363 - RNA, 19 nt, Homo sapiens
  misc_RNA (1)...(19): siRNA sense strand
ccuucuggauccugcauug

SEQ ID NO: 1666364 - RNA, 19 nt, Homo sapiens
  misc_RNA (1)...(19): siRNA sense strand
accacuggcugcccucuug

SEQ ID NO: 1666365 - RNA, 19 nt, Homo sapiens
  misc_RNA (1)...(19): siRNA sense strand
ucuugaacauaaaggagaa

SEQ ID NO: 1666366 - RNA, 19 nt, Homo sapiens
  misc_RNA (1)...(19): siRNA sense strand
ccaucauucucaucagcuu

SEQ ID NO: 1666367 - RNA, 19 nt, Homo sapiens
  misc_RNA (1)...(19): siRNA sense strand
ucaaggaacagaucaucca

SEQ ID NO: 1666368 - RNA, 19 nt, Homo sapiens
  misc_RNA (1)...(19): siRNA sense strand
guacuacaugauugaacuu

SEQ ID NO: 1666369 - RNA, 19 nt, Homo sapiens
  misc_RNA (1)...(19): siRNA sense strand
ggauuucaaggaacagauc

SEQ ID NO: 1666370 - RNA, 19 nt, Homo sapiens
  misc_RNA (1)...(19): siRNA sense strand
gaacauaaaggagaaaacu

SEQ ID NO: 1666371 - RNA, 19 nt, Homo sapiens
  misc_RNA (1)...(19): siRNA sense strand
cgagcugggacucuaauca

SEQ ID NO: 1666372 - RNA, 19 nt, Homo sapiens
  misc_RNA (1)...(19): siRNA sense strand
gcccaagcagguggaagua

SEQ ID NO: 1666373 - RNA, 19 nt, Homo sapiens
  misc_RNA (1)...(19): siRNA sense strand
ccucaagaaguuccgagaa

SEQ ID NO: 1666374 - RNA, 19 nt, Homo sapiens
  misc_RNA (1)...(19): siRNA sense strand
gaagccagcuggagauuca

SEQ ID NO: 1666375 - RNA, 19 nt, Homo sapiens
  misc_RNA (1)...(19): siRNA sense strand
cagccaagauguuuaacua

SEQ ID NO: 1666376 - RNA, 19 nt, Homo sapiens
  misc_RNA (1)...(19): siRNA sense strand
uaacaaccaucguaagaau

SEQ ID NO: 1666377 - RNA, 19 nt, Homo sapiens
  misc_RNA (1)...(19): siRNA sense strand
gcuauuacuucuucaauuc

SEQ ID NO: 1666378 - RNA, 19 nt, Homo sapiens
  misc_RNA (1)...(19): siRNA sense strand
gaaagcugguagaagauga

SEQ ID NO: 1666379 - RNA, 19 nt, Homo sapiens
  misc_RNA (1)...(19): siRNA sense strand
gcucuauccugccuucuuu

SEQ ID NO: 1666380 - RNA, 19 nt, Homo sapiens
  misc_RNA (1)...(19): siRNA sense strand
ugauugaacuuuccuucua

SEQ ID NO: 1666381 - RNA, 19 nt, Homo sapiens
  misc_RNA (1)...(19): siRNA sense strand
gcacuaucccuucccagua

SEQ ID NO: 1666382 - RNA, 19 nt, Homo sapiens
  misc_RNA (1)...(19): siRNA sense strand
cuggaaagcugguagaaga

SEQ ID NO: 1666383 - RNA, 19 nt, Homo sapiens
  misc_RNA (1)...(19): siRNA sense strand
ccaagcagguggaaguaga

SEQ ID NO: 1666384 - RNA, 19 nt, Homo sapiens
  misc_RNA (1)...(19): siRNA sense strand
gaagaacaccugcaacaac

SEQ ID NO: 1666385 - RNA, 19 nt, Homo sapiens
  misc_RNA (1)...(19): siRNA sense strand
gcaugacucuuccgauuac

SEQ ID NO: 1666386 - RNA, 19 nt, Homo sapiens
  misc_RNA (1)...(19): siRNA sense strand
gcgcauggcccacaaguuc

SEQ ID NO: 1666387 - RNA, 19 nt, Homo sapiens
  misc_RNA (1)...(19): siRNA sense strand
ggagucagccaagauguuu

SEQ ID NO: 1666388 - RNA, 19 nt, Homo sapiens
  misc_RNA (1)...(19): siRNA sense strand
gcaacaacaucuucaucgu

SEQ ID NO: 1666389 - RNA, 19 nt, Homo sapiens
  misc_RNA (1)...(19): siRNA sense strand
gcugcccucuugaacauaa

SEQ ID NO: 1666390 - RNA, 19 nt, Homo sapiens
  misc_RNA (1)...(19): siRNA sense strand
ccucugaugucaagcgaaa

SEQ ID NO: 1666391 - RNA, 19 nt, Homo sapiens
  misc_RNA (1)...(19): siRNA sense strand
ggaagaacaccugcaacaa

SEQ ID NO: 1666392 - RNA, 19 nt, Homo sapiens
  misc_RNA (1)...(19): siRNA sense strand
ucaauaacaaccaucguaa

SEQ ID NO: 1666393 - RNA, 19 nt, Homo sapiens
  misc_RNA (1)...(19): siRNA sense strand
aagaacaccugcaacaaca

SEQ ID NO: 1666394 - RNA, 19 nt, Homo sapiens
  misc_RNA (1)...(19): siRNA sense strand
ggcuauuacuucuucaauu

SEQ ID NO: 1666395 - RNA, 19 nt, Homo sapiens
  misc_RNA (1)...(19): siRNA sense strand
ucuaugacaugaagaaagu

SEQ ID NO: 1666396 - RNA, 19 nt, Homo sapiens
  misc_RNA (1)...(19): siRNA sense strand
cugcaugacucuuccgauu

SEQ ID NO: 1666397 - RNA, 19 nt, Homo sapiens
  misc_RNA (1)...(19): siRNA sense strand
uuuccugguuugccaauua

SEQ ID NO: 1666398 - RNA, 19 nt, Homo sapiens
  misc_RNA (1)...(19): siRNA sense strand
ggcccagucuccucaagaa

SEQ ID NO: 1666399 - RNA, 19 nt, Homo sapiens
  misc_RNA (1)...(19): siRNA sense strand
ccagucuccucaagaaguu

SEQ ID NO: 1666400 - RNA, 19 nt, Homo sapiens
  misc_RNA (1)...(19): siRNA sense strand
cauccgagcugggacucua

SEQ ID NO: 1666401 - RNA, 19 nt, Homo sapiens
  misc_RNA (1)...(19): siRNA sense strand
gaacaccugcaacaacauc

SEQ ID NO: 1666402 - RNA, 19 nt, Homo sapiens
  misc_RNA (1)...(19): siRNA sense strand
cacuaucccuucccaguau

SEQ ID NO: 1666403 - RNA, 19 nt, Homo sapiens
  misc_RNA (1)...(19): siRNA sense strand
gauugaacuuuccuucuac

SEQ ID NO: 1666404 - RNA, 19 nt, Homo sapiens
  misc_RNA (1)...(19): siRNA sense strand
gguacuacaugauugaacu

SEQ ID NO: 1666405 - RNA, 19 nt, Homo sapiens
  misc_RNA (1)...(19): siRNA sense strand
aauaacaaccaucguaaga

SEQ ID NO: 1666406 - RNA, 19 nt, Homo sapiens
  misc_RNA (1)...(19): siRNA sense strand
guauugguacuacaugauu

SEQ ID NO: 1666407 - RNA, 19 nt, Homo sapiens
  misc_RNA (1)...(19): siRNA sense strand
ggaaagcugguagaagaug

SEQ ID NO: 1666408 - RNA, 19 nt, Homo sapiens
  misc_RNA (1)...(19): siRNA sense strand
gauggaagaacaccugcaa

SEQ ID NO: 1666409 - RNA, 19 nt, Homo sapiens
  misc_RNA (1)...(19): siRNA sense strand
gaugucaagcgaaaggauu

SEQ ID NO: 1666410 - RNA, 19 nt, Homo sapiens
  misc_RNA (1)...(19): siRNA sense strand
acaaccaucguaagaauga

SEQ ID NO: 1666411 - RNA, 19 nt, Homo sapiens
  misc_RNA (1)...(19): siRNA sense strand
caacaucuucaucgucuuc

SEQ ID NO: 1666412 - RNA, 19 nt, Homo sapiens
  misc_RNA (1)...(19): siRNA sense strand
gcuggagauucacauuuua

SEQ ID NO: 1666413 - RNA, 19 nt, Homo sapiens
  misc_RNA (1)...(19): siRNA sense strand
cagcuggagauucacauuu

SEQ ID NO: 1666414 - RNA, 19 nt, Homo sapiens
  misc_RNA (1)...(19): siRNA sense strand
gcagguggaaguagagcuu

SEQ ID NO: 1666415 - RNA, 19 nt, Homo sapiens
  misc_RNA (1)...(19): siRNA sense strand
gcagugaccgggaagaaac

SEQ ID NO: 1666416 - RNA, 19 nt, Homo sapiens
  misc_RNA (1)...(19): siRNA sense strand
gagcugggacucuaaucau

SEQ ID NO: 1666417 - RNA, 19 nt, Homo sapiens
  misc_RNA (1)...(19): siRNA sense strand
cuucuucaauuccaugaug

SEQ ID NO: 1666418 - RNA, 19 nt, Homo sapiens
  misc_RNA (1)...(19): siRNA sense strand
gaaaguuugggagggauau

SEQ ID NO: 1666419 - RNA, 19 nt, Homo sapiens
  misc_RNA (1)...(19): siRNA sense strand
ccauguggccaccaucauu

SEQ ID NO: 1666420 - RNA, 19 nt, Homo sapiens
  misc_RNA (1)...(19): siRNA sense strand
gagaagccagcuggagauu

SEQ ID NO: 1666421 - RNA, 19 nt, Homo sapiens
  misc_RNA (1)...(19): siRNA sense strand
cuucugggccuaccucauu

SEQ ID NO: 1666422 - RNA, 19 nt, Homo sapiens
  misc_RNA (1)...(19): siRNA sense strand
uuaccugauugccuucauu

SEQ ID NO: 1666423 - RNA, 19 nt, Homo sapiens
  misc_RNA (1)...(19): siRNA sense strand
ugcaugacucuuccgauua

SEQ ID NO: 1666424 - RNA, 19 nt, Homo sapiens
  misc_RNA (1)...(19): siRNA sense strand
uggcugcccucuugaacau

SEQ ID NO: 1666425 - RNA, 19 nt, Homo sapiens
  misc_RNA (1)...(19): siRNA sense strand
ggccgucauuguggauaaa

SEQ ID NO: 1666426 - RNA, 19 nt, Homo sapiens
  misc_RNA (1)...(19): siRNA sense strand
uaacuggaaagcugguaga

SEQ ID NO: 1666427 - RNA, 19 nt, Homo sapiens
  misc_RNA (1)...(19): siRNA sense strand
gagucagccaagauguuua

SEQ ID NO: 1666428 - RNA, 19 nt, Homo sapiens
  misc_RNA (1)...(19): siRNA sense strand
cagcauugccucugauguc

SEQ ID NO: 1666429 - RNA, 19 nt, Homo sapiens
  misc_RNA (1)...(19): siRNA sense strand
uauugguacuacaugauug

SEQ ID NO: 1666430 - RNA, 19 nt, Homo sapiens
  misc_RNA (1)...(19): siRNA sense strand
cucaagaaguuccgagaag

SEQ ID NO: 1666431 - RNA, 19 nt, Homo sapiens
  misc_RNA (1)...(19): siRNA sense strand
cucaauaacaaccaucgua

SEQ ID NO: 1666432 - RNA, 19 nt, Homo sapiens
  misc_RNA (1)...(19): siRNA sense strand
caucagcuuuuccugguuu

SEQ ID NO: 1666433 - RNA, 19 nt, Homo sapiens
  misc_RNA (1)...(19): siRNA sense strand
cuacaugauugaacuuucc

SEQ ID NO: 1666434 - RNA, 19 nt, Homo sapiens
  misc_RNA (1)...(19): siRNA sense strand
caauaacaaccaucguaag

SEQ ID NO: 1666435 - RNA, 19 nt, Homo sapiens
  misc_RNA (1)...(19): siRNA sense strand
uggaagaacaccugcaaca

SEQ ID NO: 1666436 - RNA, 19 nt, Homo sapiens
  misc_RNA (1)...(19): siRNA sense strand
agucagccaagauguuuaa

SEQ ID NO: 1666437 - RNA, 19 nt, Homo sapiens
  misc_RNA (1)...(19): siRNA sense strand
uggccgucauuguggauaa

SEQ ID NO: 1666438 - RNA, 19 nt, Homo sapiens
  misc_RNA (1)...(19): siRNA sense strand
cgagaagccagcuggagau

SEQ ID NO: 1666439 - RNA, 19 nt, Homo sapiens
  misc_RNA (1)...(19): siRNA sense strand
ccuucuggauccugcauug

SEQ ID NO: 1666440 - RNA, 19 nt, Homo sapiens
  misc_RNA (1)...(19): siRNA sense strand
accacuggcugcccucuug

SEQ ID NO: 1666441 - RNA, 19 nt, Homo sapiens
  misc_RNA (1)...(19): siRNA sense strand
ucuugaacauaaaggagaa

SEQ ID NO: 1666442 - RNA, 19 nt, Homo sapiens
  misc_RNA (1)...(19): siRNA sense strand
ccaucauucucaucagcuu

SEQ ID NO: 1666443 - RNA, 19 nt, Homo sapiens
  misc_RNA (1)...(19): siRNA sense strand
ucaaggaacagaucaucca

SEQ ID NO: 1666444 - RNA, 19 nt, Homo sapiens
  misc_RNA (1)...(19): siRNA sense strand
guacuacaugauugaacuu

SEQ ID NO: 1666445 - RNA, 19 nt, Homo sapiens
  misc_RNA (1)...(19): siRNA sense strand
ggauuucaaggaacagauc

SEQ ID NO: 1666446 - RNA, 19 nt, Homo sapiens
  misc_RNA (1)...(19): siRNA sense strand
gaacauaaaggagaaaacu

SEQ ID NO: 1666447 - RNA, 19 nt, Homo sapiens
  misc_RNA (1)...(19): siRNA sense strand
cgagcugggacucuaauca

SEQ ID NO: 1666448 - RNA, 19 nt, Homo sapiens
  misc_RNA (1)...(19): siRNA sense strand
gcccaagcagguggaagua

SEQ ID NO: 1666449 - RNA, 19 nt, Homo sapiens
  misc_RNA (1)...(19): siRNA sense strand
ccucaagaaguuccgagaa

SEQ ID NO: 1666450 - RNA, 19 nt, Homo sapiens
  misc_RNA (1)...(19): siRNA sense strand
cagccaagauguuuaacua

SEQ ID NO: 1666451 - RNA, 19 nt, Homo sapiens
  misc_RNA (1)...(19): siRNA sense strand
uaacaaccaucguaagaau

SEQ ID NO: 1666452 - RNA, 19 nt, Homo sapiens
  misc_RNA (1)...(19): siRNA sense strand
gcuauuacuucuucaauuc

SEQ ID NO: 1666453 - RNA, 19 nt, Homo sapiens
  misc_RNA (1)...(19): siRNA sense strand
gaaagcugguagaagauga

SEQ ID NO: 1666454 - RNA, 19 nt, Homo sapiens
  misc_RNA (1)...(19): siRNA sense strand
gcucuauccugccuucuuu

SEQ ID NO: 1666455 - RNA, 19 nt, Homo sapiens
  misc_RNA (1)...(19): siRNA sense strand
ugauugaacuuuccuucua

SEQ ID NO: 1666456 - RNA, 19 nt, Homo sapiens
  misc_RNA (1)...(19): siRNA sense strand
gcacuaucccuucccagua

SEQ ID NO: 1666457 - RNA, 19 nt, Homo sapiens
  misc_RNA (1)...(19): siRNA sense strand
cuggaaagcugguagaaga

SEQ ID NO: 1666458 - RNA, 19 nt, Homo sapiens
  misc_RNA (1)...(19): siRNA sense strand
gaagaacaccugcaacaac

SEQ ID NO: 1666459 - RNA, 19 nt, Homo sapiens
  misc_RNA (1)...(19): siRNA sense strand
gcaugacucuuccgauuac

SEQ ID NO: 1666460 - RNA, 19 nt, Homo sapiens
  misc_RNA (1)...(19): siRNA sense strand
gcgcauggcccacaaguuc

SEQ ID NO: 1666461 - RNA, 19 nt, Homo sapiens
  misc_RNA (1)...(19): siRNA sense strand
ggagucagccaagauguuu

SEQ ID NO: 1666462 - RNA, 19 nt, Homo sapiens
  misc_RNA (1)...(19): siRNA sense strand
gcaacaacaucuucaucgu

SEQ ID NO: 1666463 - RNA, 19 nt, Homo sapiens
  misc_RNA (1)...(19): siRNA sense strand
ccucugaugucaagcgaaa

SEQ ID NO: 1666464 - RNA, 19 nt, Homo sapiens
  misc_RNA (1)...(19): siRNA sense strand
ggaagaacaccugcaacaa

SEQ ID NO: 1666465 - RNA, 19 nt, Homo sapiens
  misc_RNA (1)...(19): siRNA sense strand
ucaauaacaaccaucguaa

SEQ ID NO: 1666466 - RNA, 19 nt, Homo sapiens
  misc_RNA (1)...(19): siRNA sense strand
aagaacaccugcaacaaca

SEQ ID NO: 1666467 - RNA, 19 nt, Homo sapiens
  misc_RNA (1)...(19): siRNA sense strand
ggcuauuacuucuucaauu

SEQ ID NO: 1666468 - RNA, 19 nt, Homo sapiens
  misc_RNA (1)...(19): siRNA sense strand
uuuccugguuugccaauua

SEQ ID NO: 1666469 - RNA, 19 nt, Homo sapiens
  misc_RNA (1)...(19): siRNA sense strand
ucuaugacaugaagaaagu

SEQ ID NO: 1666470 - RNA, 19 nt, Homo sapiens
  misc_RNA (1)...(19): siRNA sense strand
cugcaugacucuuccgauu

SEQ ID NO: 1666471 - RNA, 19 nt, Homo sapiens
  misc_RNA (1)...(19): siRNA sense strand
cauccgagcugggacucua

SEQ ID NO: 1666472 - RNA, 19 nt, Homo sapiens
  misc_RNA (1)...(19): siRNA sense strand
gaacaccugcaacaacauc

SEQ ID NO: 1666473 - RNA, 19 nt, Homo sapiens
  misc_RNA (1)...(19): siRNA sense strand
gguacuacaugauugaacu

SEQ ID NO: 1666474 - RNA, 19 nt, Homo sapiens
  misc_RNA (1)...(19): siRNA sense strand
cacuaucccuucccaguau

SEQ ID NO: 1666475 - RNA, 19 nt, Homo sapiens
  misc_RNA (1)...(19): siRNA sense strand
gauugaacuuuccuucuac

SEQ ID NO: 1666476 - RNA, 19 nt, Homo sapiens
  misc_RNA (1)...(19): siRNA sense strand
aauaacaaccaucguaaga

SEQ ID NO: 1666477 - RNA, 19 nt, Homo sapiens
  misc_RNA (1)...(19): siRNA sense strand
gauggaagaacaccugcaa

SEQ ID NO: 1666478 - RNA, 19 nt, Homo sapiens
  misc_RNA (1)...(19): siRNA sense strand
ggaaagcugguagaagaug

SEQ ID NO: 1666479 - RNA, 19 nt, Homo sapiens
  misc_RNA (1)...(19): siRNA sense strand
guauugguacuacaugauu

SEQ ID NO: 1666480 - RNA, 19 nt, Homo sapiens
  misc_RNA (1)...(19): siRNA sense strand
gaugucaagcgaaaggauu

SEQ ID NO: 1666481 - RNA, 19 nt, Homo sapiens
  misc_RNA (1)...(19): siRNA sense strand
acaaccaucguaagaauga

SEQ ID NO: 1666482 - RNA, 19 nt, Homo sapiens
  misc_RNA (1)...(19): siRNA sense strand
caacaucuucaucgucuuc

SEQ ID NO: 1666483 - RNA, 19 nt, Homo sapiens
  misc_RNA (1)...(19): siRNA sense strand
gcagugaccgggaagaaac

SEQ ID NO: 1666484 - RNA, 19 nt, Homo sapiens
  misc_RNA (1)...(19): siRNA sense strand
gagcugggacucuaaucau

SEQ ID NO: 1666485 - RNA, 19 nt, Homo sapiens
  misc_RNA (1)...(19): siRNA sense strand
cuucuucaauuccaugaug

SEQ ID NO: 1666486 - RNA, 19 nt, Homo sapiens
  misc_RNA (1)...(19): siRNA sense strand
gaaaguuugggagggauau

SEQ ID NO: 1666487 - RNA, 19 nt, Homo sapiens
  misc_RNA (1)...(19): siRNA sense strand
ccauguggccaccaucauu

SEQ ID NO: 1666488 - RNA, 19 nt, Homo sapiens
  misc_RNA (1)...(19): siRNA sense strand
cuucugggccuaccucauu

SEQ ID NO: 1666489 - RNA, 19 nt, Homo sapiens
  misc_RNA (1)...(19): siRNA sense strand
ugcaugacucuuccgauua

SEQ ID NO: 1666490 - RNA, 19 nt, Homo sapiens
  misc_RNA (1)...(19): siRNA sense strand
cagcauugccucugauguc

SEQ ID NO: 1666491 - RNA, 19 nt, Homo sapiens
  misc_RNA (1)...(19): siRNA sense strand
uauugguacuacaugauug

SEQ ID NO: 1666492 - RNA, 19 nt, Homo sapiens
  misc_RNA (1)...(19): siRNA sense strand
uaacuggaaagcugguaga

SEQ ID NO: 1666493 - RNA, 19 nt, Homo sapiens
  misc_RNA (1)...(19): siRNA sense strand
ggccgucauuguggauaaa

SEQ ID NO: 1666494 - RNA, 19 nt, Homo sapiens
  misc_RNA (1)...(19): siRNA sense strand
gagucagccaagauguuua

SEQ ID NO: 1666495 - RNA, 19 nt, Homo sapiens
  misc_RNA (1)...(19): siRNA sense strand
caucagcuuuuccugguuu

SEQ ID NO: 1666496 - RNA, 19 nt, Homo sapiens
  misc_RNA (1)...(19): siRNA sense strand
cucaauaacaaccaucgua

SEQ ID NO: 1666497 - RNA, 19 nt, Homo sapiens
  misc_RNA (1)...(19): siRNA sense strand
cuacaugauugaacuuucc

SEQ ID NO: 1666498 - RNA, 19 nt, Homo sapiens
  misc_RNA (1)...(19): siRNA sense strand
caauaacaaccaucguaag

SEQ ID NO: 1666499 - RNA, 19 nt, Homo sapiens
  misc_RNA (1)...(19): siRNA sense strand
uggaagaacaccugcaaca

SEQ ID NO: 1666500 - RNA, 19 nt, Homo sapiens
  misc_RNA (1)...(19): siRNA sense strand
agucagccaagauguuuaa

SEQ ID NO: 1666501 - RNA, 19 nt, Homo sapiens
  misc_RNA (1)...(19): siRNA sense strand
ucaaggaacagaucaucca

SEQ ID NO: 1666502 - RNA, 19 nt, Homo sapiens
  misc_RNA (1)...(19): siRNA sense strand
ccuucuggauccugcauug

SEQ ID NO: 1666503 - RNA, 19 nt, Homo sapiens
  misc_RNA (1)...(19): siRNA sense strand
ccaucauucucaucagcuu

SEQ ID NO: 1666504 - RNA, 19 nt, Homo sapiens
  misc_RNA (1)...(19): siRNA sense strand
ggauuucaaggaacagauc

SEQ ID NO: 1666505 - RNA, 19 nt, Homo sapiens
  misc_RNA (1)...(19): siRNA sense strand
guacuacaugauugaacuu

SEQ ID NO: 1666506 - RNA, 19 nt, Homo sapiens
  misc_RNA (1)...(19): siRNA sense strand
cgagcugggacucuaauca

SEQ ID NO: 1666507 - RNA, 19 nt, Homo sapiens
  misc_RNA (1)...(19): siRNA sense strand
gaagccagcuggagauuca

SEQ ID NO: 1666508 - RNA, 19 nt, Homo sapiens
  misc_RNA (1)...(19): siRNA sense strand
cagccaagauguuuaacua

SEQ ID NO: 1666509 - RNA, 19 nt, Homo sapiens
  misc_RNA (1)...(19): siRNA sense strand
uaacaaccaucguaagaau

SEQ ID NO: 1666510 - RNA, 19 nt, Homo sapiens
  misc_RNA (1)...(19): siRNA sense strand
gcuauuacuucuucaauuc

SEQ ID NO: 1666511 - RNA, 19 nt, Homo sapiens
  misc_RNA (1)...(19): siRNA sense strand
gaaagcugguagaagauga

SEQ ID NO: 1666512 - RNA, 19 nt, Homo sapiens
  misc_RNA (1)...(19): siRNA sense strand
gcucuauccugccuucuuu

SEQ ID NO: 1666513 - RNA, 19 nt, Homo sapiens
  misc_RNA (1)...(19): siRNA sense strand
ugauugaacuuuccuucua

SEQ ID NO: 1666514 - RNA, 19 nt, Homo sapiens
  misc_RNA (1)...(19): siRNA sense strand
gcacuaucccuucccagua

SEQ ID NO: 1666515 - RNA, 19 nt, Homo sapiens
  misc_RNA (1)...(19): siRNA sense strand
cuggaaagcugguagaaga

SEQ ID NO: 1666516 - RNA, 19 nt, Homo sapiens
  misc_RNA (1)...(19): siRNA sense strand
ccaagcagguggaaguaga

SEQ ID NO: 1666517 - RNA, 19 nt, Homo sapiens
  misc_RNA (1)...(19): siRNA sense strand
gaagaacaccugcaacaac

SEQ ID NO: 1666518 - RNA, 19 nt, Homo sapiens
  misc_RNA (1)...(19): siRNA sense strand
gcaugacucuuccgauuac

SEQ ID NO: 1666519 - RNA, 19 nt, Homo sapiens
  misc_RNA (1)...(19): siRNA sense strand
gcgcauggcccacaaguuc

SEQ ID NO: 1666520 - RNA, 19 nt, Homo sapiens
  misc_RNA (1)...(19): siRNA sense strand
ggagucagccaagauguuu

SEQ ID NO: 1666521 - RNA, 19 nt, Homo sapiens
  misc_RNA (1)...(19): siRNA sense strand
gcaacaacaucuucaucgu

SEQ ID NO: 1666522 - RNA, 19 nt, Homo sapiens
  misc_RNA (1)...(19): siRNA sense strand
gcugcccucuugaacauaa

SEQ ID NO: 1666523 - RNA, 19 nt, Homo sapiens
  misc_RNA (1)...(19): siRNA sense strand
ccucugaugucaagcgaaa

SEQ ID NO: 1666524 - RNA, 19 nt, Homo sapiens
  misc_RNA (1)...(19): siRNA sense strand
ggaagaacaccugcaacaa

SEQ ID NO: 1666525 - RNA, 19 nt, Homo sapiens
  misc_RNA (1)...(19): siRNA sense strand
ucaauaacaaccaucguaa

SEQ ID NO: 1666526 - RNA, 19 nt, Homo sapiens
  misc_RNA (1)...(19): siRNA sense strand
aagaacaccugcaacaaca

SEQ ID NO: 1666527 - RNA, 19 nt, Homo sapiens
  misc_RNA (1)...(19): siRNA sense strand
ggcuauuacuucuucaauu

SEQ ID NO: 1666528 - RNA, 19 nt, Homo sapiens
  misc_RNA (1)...(19): siRNA sense strand
ucuaugacaugaagaaagu

SEQ ID NO: 1666529 - RNA, 19 nt, Homo sapiens
  misc_RNA (1)...(19): siRNA sense strand
cugcaugacucuuccgauu

SEQ ID NO: 1666530 - RNA, 19 nt, Homo sapiens
  misc_RNA (1)...(19): siRNA sense strand
uuuccugguuugccaauua

SEQ ID NO: 1666531 - RNA, 19 nt, Homo sapiens
  misc_RNA (1)...(19): siRNA sense strand
ggcccagucuccucaagaa

SEQ ID NO: 1666532 - RNA, 19 nt, Homo sapiens
  misc_RNA (1)...(19): siRNA sense strand
ccagucuccucaagaaguu

SEQ ID NO: 1666533 - RNA, 19 nt, Homo sapiens
  misc_RNA (1)...(19): siRNA sense strand
cauccgagcugggacucua

SEQ ID NO: 1666534 - RNA, 19 nt, Homo sapiens
  misc_RNA (1)...(19): siRNA sense strand
gaacaccugcaacaacauc

SEQ ID NO: 1666535 - RNA, 19 nt, Homo sapiens
  misc_RNA (1)...(19): siRNA sense strand
cacuaucccuucccaguau

SEQ ID NO: 1666536 - RNA, 19 nt, Homo sapiens
  misc_RNA (1)...(19): siRNA sense strand
gauugaacuuuccuucuac

SEQ ID NO: 1666537 - RNA, 19 nt, Homo sapiens
  misc_RNA (1)...(19): siRNA sense strand
gguacuacaugauugaacu

SEQ ID NO: 1666538 - RNA, 19 nt, Homo sapiens
  misc_RNA (1)...(19): siRNA sense strand
aauaacaaccaucguaaga

SEQ ID NO: 1666539 - RNA, 19 nt, Homo sapiens
  misc_RNA (1)...(19): siRNA sense strand
guauugguacuacaugauu

SEQ ID NO: 1666540 - RNA, 19 nt, Homo sapiens
  misc_RNA (1)...(19): siRNA sense strand
ggaaagcugguagaagaug

SEQ ID NO: 1666541 - RNA, 19 nt, Homo sapiens
  misc_RNA (1)...(19): siRNA sense strand
gauggaagaacaccugcaa

SEQ ID NO: 1666542 - RNA, 19 nt, Homo sapiens
  misc_RNA (1)...(19): siRNA sense strand
gaugucaagcgaaaggauu

SEQ ID NO: 1666543 - RNA, 19 nt, Homo sapiens
  misc_RNA (1)...(19): siRNA sense strand
acaaccaucguaagaauga

SEQ ID NO: 1666544 - RNA, 19 nt, Homo sapiens
  misc_RNA (1)...(19): siRNA sense strand
caacaucuucaucgucuuc

SEQ ID NO: 1666545 - RNA, 19 nt, Homo sapiens
  misc_RNA (1)...(19): siRNA sense strand
gcuggagauucacauuuua

SEQ ID NO: 1666546 - RNA, 19 nt, Homo sapiens
  misc_RNA (1)...(19): siRNA sense strand
cagcuggagauucacauuu

SEQ ID NO: 1666547 - RNA, 19 nt, Homo sapiens
  misc_RNA (1)...(19): siRNA sense strand
gcagguggaaguagagcuu

SEQ ID NO: 1666548 - RNA, 19 nt, Homo sapiens
  misc_RNA (1)...(19): siRNA sense strand
gcagugaccgggaagaaac

SEQ ID NO: 1666549 - RNA, 19 nt, Homo sapiens
  misc_RNA (1)...(19): siRNA sense strand
gagcugggacucuaaucau

SEQ ID NO: 1666550 - RNA, 19 nt, Homo sapiens
  misc_RNA (1)...(19): siRNA sense strand
cuucuucaauuccaugaug

SEQ ID NO: 1666551 - RNA, 19 nt, Homo sapiens
  misc_RNA (1)...(19): siRNA sense strand
gaaaguuugggagggauau

SEQ ID NO: 1666552 - RNA, 19 nt, Homo sapiens
  misc_RNA (1)...(19): siRNA sense strand
ccauguggccaccaucauu

SEQ ID NO: 1666553 - RNA, 19 nt, Homo sapiens
  misc_RNA (1)...(19): siRNA sense strand
gagaagccagcuggagauu

SEQ ID NO: 1666554 - RNA, 19 nt, Homo sapiens
  misc_RNA (1)...(19): siRNA sense strand
cuucugggccuaccucauu

SEQ ID NO: 1666555 - RNA, 19 nt, Homo sapiens
  misc_RNA (1)...(19): siRNA sense strand
uuaccugauugccuucauu

SEQ ID NO: 1666556 - RNA, 19 nt, Homo sapiens
  misc_RNA (1)...(19): siRNA sense strand
ugcaugacucuuccgauua

SEQ ID NO: 1666557 - RNA, 19 nt, Homo sapiens
  misc_RNA (1)...(19): siRNA sense strand
uggcugcccucuugaacau

SEQ ID NO: 1666558 - RNA, 19 nt, Homo sapiens
  misc_RNA (1)...(19): siRNA sense strand
ggccgucauuguggauaaa

SEQ ID NO: 1666559 - RNA, 19 nt, Homo sapiens
  misc_RNA (1)...(19): siRNA sense strand
uaacuggaaagcugguaga

SEQ ID NO: 1666560 - RNA, 19 nt, Homo sapiens
  misc_RNA (1)...(19): siRNA sense strand
gagucagccaagauguuua

SEQ ID NO: 1666561 - RNA, 19 nt, Homo sapiens
  misc_RNA (1)...(19): siRNA sense strand
cagcauugccucugauguc

SEQ ID NO: 1666562 - RNA, 19 nt, Homo sapiens
  misc_RNA (1)...(19): siRNA sense strand
uauugguacuacaugauug

SEQ ID NO: 1666563 - RNA, 19 nt, Homo sapiens
  misc_RNA (1)...(19): siRNA sense strand
cucaagaaguuccgagaag

SEQ ID NO: 1666564 - RNA, 19 nt, Homo sapiens
  misc_RNA (1)...(19): siRNA sense strand
cucaauaacaaccaucgua

SEQ ID NO: 1666565 - RNA, 19 nt, Homo sapiens
  misc_RNA (1)...(19): siRNA sense strand
caucagcuuuuccugguuu

SEQ ID NO: 1666566 - RNA, 19 nt, Homo sapiens
  misc_RNA (1)...(19): siRNA sense strand
cuacaugauugaacuuucc

SEQ ID NO: 1666567 - RNA, 19 nt, Homo sapiens
  misc_RNA (1)...(19): siRNA sense strand
caauaacaaccaucguaag

SEQ ID NO: 1666568 - RNA, 19 nt, Homo sapiens
  misc_RNA (1)...(19): siRNA sense strand
uggaagaacaccugcaaca

SEQ ID NO: 1666569 - RNA, 19 nt, Homo sapiens
  misc_RNA (1)...(19): siRNA sense strand
agucagccaagauguuuaa

SEQ ID NO: 1666570 - RNA, 19 nt, Homo sapiens
  misc_RNA (1)...(19): siRNA sense strand
uggccgucauuguggauaa

SEQ ID NO: 1666571 - RNA, 19 nt, Homo sapiens
  misc_RNA (1)...(19): siRNA sense strand
cgagaagccagcuggagau

SEQ ID NO: 1666572 - RNA, 19 nt, Homo sapiens
  misc_RNA (1)...(19): siRNA sense strand
ccuucuggauccugcauug

SEQ ID NO: 1666573 - RNA, 19 nt, Homo sapiens
  misc_RNA (1)...(19): siRNA sense strand
accacuggcugcccucuug

SEQ ID NO: 1666574 - RNA, 19 nt, Homo sapiens
  misc_RNA (1)...(19): siRNA sense strand
ucuugaacauaaaggagaa

SEQ ID NO: 1666575 - RNA, 19 nt, Homo sapiens
  misc_RNA (1)...(19): siRNA sense strand
ccaucauucucaucagcuu

SEQ ID NO: 1666576 - RNA, 19 nt, Homo sapiens
  misc_RNA (1)...(19): siRNA sense strand
ucaaggaacagaucaucca

SEQ ID NO: 1666577 - RNA, 19 nt, Homo sapiens
  misc_RNA (1)...(19): siRNA sense strand
guacuacaugauugaacuu

SEQ ID NO: 1666578 - RNA, 19 nt, Homo sapiens
  misc_RNA (1)...(19): siRNA sense strand
ggauuucaaggaacagauc

SEQ ID NO: 1666579 - RNA, 19 nt, Homo sapiens
  misc_RNA (1)...(19): siRNA sense strand
gaacauaaaggagaaaacu

SEQ ID NO: 1666580 - RNA, 19 nt, Homo sapiens
  misc_RNA (1)...(19): siRNA sense strand
cgagcugggacucuaauca

SEQ ID NO: 1666581 - RNA, 19 nt, Homo sapiens
  misc_RNA (1)...(19): siRNA sense strand
gcccaagcagguggaagua

SEQ ID NO: 1666582 - RNA, 19 nt, Homo sapiens
  misc_RNA (1)...(19): siRNA sense strand
ccucaagaaguuccgagaa

SEQ ID NO: 1666583 - RNA, 19 nt, Homo sapiens
  misc_RNA (1)...(19): siRNA sense strand
gaagccagcuggagauuca

SEQ ID NO: 1666584 - RNA, 19 nt, Homo sapiens
  misc_RNA (1)...(19): siRNA sense strand
cagccaagauguuuaacua

SEQ ID NO: 1666585 - RNA, 19 nt, Homo sapiens
  misc_RNA (1)...(19): siRNA sense strand
uaacaaccaucguaagaau

SEQ ID NO: 1666586 - RNA, 19 nt, Homo sapiens
  misc_RNA (1)...(19): siRNA sense strand
gcuauuacuucuucaauuc

SEQ ID NO: 1666587 - RNA, 19 nt, Homo sapiens
  misc_RNA (1)...(19): siRNA sense strand
gaaagcugguagaagauga

SEQ ID NO: 1666588 - RNA, 19 nt, Homo sapiens
  misc_RNA (1)...(19): siRNA sense strand
gcucuauccugccuucuuu

SEQ ID NO: 1666589 - RNA, 19 nt, Homo sapiens
  misc_RNA (1)...(19): siRNA sense strand
ugauugaacuuuccuucua

SEQ ID NO: 1666590 - RNA, 19 nt, Homo sapiens
  misc_RNA (1)...(19): siRNA sense strand
gcacuaucccuucccagua

SEQ ID NO: 1666591 - RNA, 19 nt, Homo sapiens
  misc_RNA (1)...(19): siRNA sense strand
cuggaaagcugguagaaga

SEQ ID NO: 1666592 - RNA, 19 nt, Homo sapiens
  misc_RNA (1)...(19): siRNA sense strand
ccaagcagguggaaguaga

SEQ ID NO: 1666593 - RNA, 19 nt, Homo sapiens
  misc_RNA (1)...(19): siRNA sense strand
gaagaacaccugcaacaac

SEQ ID NO: 1666594 - RNA, 19 nt, Homo sapiens
  misc_RNA (1)...(19): siRNA sense strand
gcaugacucuuccgauuac

SEQ ID NO: 1666595 - RNA, 19 nt, Homo sapiens
  misc_RNA (1)...(19): siRNA sense strand
gcgcauggcccacaaguuc

SEQ ID NO: 1666596 - RNA, 19 nt, Homo sapiens
  misc_RNA (1)...(19): siRNA sense strand
ggagucagccaagauguuu

SEQ ID NO: 1666597 - RNA, 19 nt, Homo sapiens
  misc_RNA (1)...(19): siRNA sense strand
gcaacaacaucuucaucgu

SEQ ID NO: 1666598 - RNA, 19 nt, Homo sapiens
  misc_RNA (1)...(19): siRNA sense strand
gcugcccucuugaacauaa

SEQ ID NO: 1666599 - RNA, 19 nt, Homo sapiens
  misc_RNA (1)...(19): siRNA sense strand
ccucugaugucaagcgaaa

SEQ ID NO: 1666600 - RNA, 19 nt, Homo sapiens
  misc_RNA (1)...(19): siRNA sense strand
ggaagaacaccugcaacaa

SEQ ID NO: 1666601 - RNA, 19 nt, Homo sapiens
  misc_RNA (1)...(19): siRNA sense strand
ucaauaacaaccaucguaa

SEQ ID NO: 1666602 - RNA, 19 nt, Homo sapiens
  misc_RNA (1)...(19): siRNA sense strand
aagaacaccugcaacaaca

SEQ ID NO: 1666603 - RNA, 19 nt, Homo sapiens
  misc_RNA (1)...(19): siRNA sense strand
ggcuauuacuucuucaauu

SEQ ID NO: 1666604 - RNA, 19 nt, Homo sapiens
  misc_RNA (1)...(19): siRNA sense strand
ucuaugacaugaagaaagu

SEQ ID NO: 1666605 - RNA, 19 nt, Homo sapiens
  misc_RNA (1)...(19): siRNA sense strand
cugcaugacucuuccgauu

SEQ ID NO: 1666606 - RNA, 19 nt, Homo sapiens
  misc_RNA (1)...(19): siRNA sense strand
uuuccugguuugccaauua

SEQ ID NO: 1666607 - RNA, 19 nt, Homo sapiens
  misc_RNA (1)...(19): siRNA sense strand
ggcccagucuccucaagaa

SEQ ID NO: 1666608 - RNA, 19 nt, Homo sapiens
  misc_RNA (1)...(19): siRNA sense strand
ccagucuccucaagaaguu

SEQ ID NO: 1666609 - RNA, 19 nt, Homo sapiens
  misc_RNA (1)...(19): siRNA sense strand
cauccgagcugggacucua

SEQ ID NO: 1666610 - RNA, 19 nt, Homo sapiens
  misc_RNA (1)...(19): siRNA sense strand
gaacaccugcaacaacauc

SEQ ID NO: 1666611 - RNA, 19 nt, Homo sapiens
  misc_RNA (1)...(19): siRNA sense strand
cacuaucccuucccaguau

SEQ ID NO: 1666612 - RNA, 19 nt, Homo sapiens
  misc_RNA (1)...(19): siRNA sense strand
gauugaacuuuccuucuac

SEQ ID NO: 1666613 - RNA, 19 nt, Homo sapiens
  misc_RNA (1)...(19): siRNA sense strand
gguacuacaugauugaacu

SEQ ID NO: 1666614 - RNA, 19 nt, Homo sapiens
  misc_RNA (1)...(19): siRNA sense strand
aauaacaaccaucguaaga

SEQ ID NO: 1666615 - RNA, 19 nt, Homo sapiens
  misc_RNA (1)...(19): siRNA sense strand
guauugguacuacaugauu

SEQ ID NO: 1666616 - RNA, 19 nt, Homo sapiens
  misc_RNA (1)...(19): siRNA sense strand
ggaaagcugguagaagaug

SEQ ID NO: 1666617 - RNA, 19 nt, Homo sapiens
  misc_RNA (1)...(19): siRNA sense strand
gauggaagaacaccugcaa

SEQ ID NO: 1666618 - RNA, 19 nt, Homo sapiens
  misc_RNA (1)...(19): siRNA sense strand
gaugucaagcgaaaggauu

SEQ ID NO: 1666619 - RNA, 19 nt, Homo sapiens
  misc_RNA (1)...(19): siRNA sense strand
acaaccaucguaagaauga

SEQ ID NO: 1666620 - RNA, 19 nt, Homo sapiens
  misc_RNA (1)...(19): siRNA sense strand
caacaucuucaucgucuuc

SEQ ID NO: 1666621 - RNA, 19 nt, Homo sapiens
  misc_RNA (1)...(19): siRNA sense strand
gcuggagauucacauuuua

SEQ ID NO: 1666622 - RNA, 19 nt, Homo sapiens
  misc_RNA (1)...(19): siRNA sense strand
cagcuggagauucacauuu

SEQ ID NO: 1666623 - RNA, 19 nt, Homo sapiens
  misc_RNA (1)...(19): siRNA sense strand
gcagguggaaguagagcuu

SEQ ID NO: 1666624 - RNA, 19 nt, Homo sapiens
  misc_RNA (1)...(19): siRNA sense strand
gcagugaccgggaagaaac

SEQ ID NO: 1666625 - RNA, 19 nt, Homo sapiens
  misc_RNA (1)...(19): siRNA sense strand
gagcugggacucuaaucau

SEQ ID NO: 1666626 - RNA, 19 nt, Homo sapiens
  misc_RNA (1)...(19): siRNA sense strand
cuucuucaauuccaugaug

SEQ ID NO: 1666627 - RNA, 19 nt, Homo sapiens
  misc_RNA (1)...(19): siRNA sense strand
gaaaguuugggagggauau

SEQ ID NO: 1666628 - RNA, 19 nt, Homo sapiens
  misc_RNA (1)...(19): siRNA sense strand
ccauguggccaccaucauu

SEQ ID NO: 1666629 - RNA, 19 nt, Homo sapiens
  misc_RNA (1)...(19): siRNA sense strand
gagaagccagcuggagauu

SEQ ID NO: 1666630 - RNA, 19 nt, Homo sapiens
  misc_RNA (1)...(19): siRNA sense strand
cuucugggccuaccucauu

SEQ ID NO: 1666631 - RNA, 19 nt, Homo sapiens
  misc_RNA (1)...(19): siRNA sense strand
uuaccugauugccuucauu

SEQ ID NO: 1666632 - RNA, 19 nt, Homo sapiens
  misc_RNA (1)...(19): siRNA sense strand
ugcaugacucuuccgauua

SEQ ID NO: 1666633 - RNA, 19 nt, Homo sapiens
  misc_RNA (1)...(19): siRNA sense strand
uggcugcccucuugaacau

SEQ ID NO: 1666634 - RNA, 19 nt, Homo sapiens
  misc_RNA (1)...(19): siRNA sense strand
ggccgucauuguggauaaa

SEQ ID NO: 1666635 - RNA, 19 nt, Homo sapiens
  misc_RNA (1)...(19): siRNA sense strand
uaacuggaaagcugguaga

SEQ ID NO: 1666636 - RNA, 19 nt, Homo sapiens
  misc_RNA (1)...(19): siRNA sense strand
gagucagccaagauguuua

SEQ ID NO: 1666637 - RNA, 19 nt, Homo sapiens
  misc_RNA (1)...(19): siRNA sense strand
cagcauugccucugauguc

SEQ ID NO: 1666638 - RNA, 19 nt, Homo sapiens
  misc_RNA (1)...(19): siRNA sense strand
uauugguacuacaugauug

SEQ ID NO: 1666639 - RNA, 19 nt, Homo sapiens
  misc_RNA (1)...(19): siRNA sense strand
cucaagaaguuccgagaag

SEQ ID NO: 1666640 - RNA, 19 nt, Homo sapiens
  misc_RNA (1)...(19): siRNA sense strand
cucaauaacaaccaucgua

SEQ ID NO: 1666641 - RNA, 19 nt, Homo sapiens
  misc_RNA (1)...(19): siRNA sense strand
caucagcuuuuccugguuu

SEQ ID NO: 1666642 - RNA, 19 nt, Homo sapiens
  misc_RNA (1)...(19): siRNA sense strand
cuacaugauugaacuuucc

SEQ ID NO: 1666643 - RNA, 19 nt, Homo sapiens
  misc_RNA (1)...(19): siRNA sense strand
caauaacaaccaucguaag

SEQ ID NO: 1666644 - RNA, 19 nt, Homo sapiens
  misc_RNA (1)...(19): siRNA sense strand
uggaagaacaccugcaaca

SEQ ID NO: 1666645 - RNA, 19 nt, Homo sapiens
  misc_RNA (1)...(19): siRNA sense strand
agucagccaagauguuuaa

SEQ ID NO: 1666646 - RNA, 19 nt, Homo sapiens
  misc_RNA (1)...(19): siRNA sense strand
uggccgucauuguggauaa

SEQ ID NO: 1666647 - RNA, 19 nt, Homo sapiens
  misc_RNA (1)...(19): siRNA sense strand
cgagaagccagcuggagau

SEQ ID NO: 1666648 - RNA, 19 nt, Homo sapiens
  misc_RNA (1)...(19): siRNA sense strand
ccuucuggauccugcauug

SEQ ID NO: 1666649 - RNA, 19 nt, Homo sapiens
  misc_RNA (1)...(19): siRNA sense strand
accacuggcugcccucuug

SEQ ID NO: 1666650 - RNA, 19 nt, Homo sapiens
  misc_RNA (1)...(19): siRNA sense strand
ucuugaacauaaaggagaa

SEQ ID NO: 1666651 - RNA, 19 nt, Homo sapiens
  misc_RNA (1)...(19): siRNA sense strand
ccaucauucucaucagcuu

SEQ ID NO: 1666652 - RNA, 19 nt, Homo sapiens
  misc_RNA (1)...(19): siRNA sense strand
ucaaggaacagaucaucca

SEQ ID NO: 1666653 - RNA, 19 nt, Homo sapiens
  misc_RNA (1)...(19): siRNA sense strand
guacuacaugauugaacuu

SEQ ID NO: 1666654 - RNA, 19 nt, Homo sapiens
  misc_RNA (1)...(19): siRNA sense strand
ggauuucaaggaacagauc

SEQ ID NO: 1666655 - RNA, 19 nt, Homo sapiens
  misc_RNA (1)...(19): siRNA sense strand
gaacauaaaggagaaaacu

SEQ ID NO: 1666656 - RNA, 19 nt, Homo sapiens
  misc_RNA (1)...(19): siRNA sense strand
cgagcugggacucuaauca

SEQ ID NO: 1666657 - RNA, 19 nt, Homo sapiens
  misc_RNA (1)...(19): siRNA sense strand
gcccaagcagguggaagua

SEQ ID NO: 1666658 - RNA, 19 nt, Homo sapiens
  misc_RNA (1)...(19): siRNA sense strand
ccucaagaaguuccgagaa

SEQ ID NO: 1666659 - RNA, 19 nt, Homo sapiens
  misc_RNA (1)...(19): siRNA sense strand
gaaauaaccugugaaacau

SEQ ID NO: 1666660 - RNA, 19 nt, Homo sapiens
  misc_RNA (1)...(19): siRNA sense strand
guauucagcugauuucuau

SEQ ID NO: 1666661 - RNA, 19 nt, Homo sapiens
  misc_RNA (1)...(19): siRNA sense strand
gaagaaagcuaugcagacu

SEQ ID NO: 1666662 - RNA, 19 nt, Homo sapiens
  misc_RNA (1)...(19): siRNA sense strand
ugaaauaaccugugaaaca

SEQ ID NO: 1666663 - RNA, 19 nt, Homo sapiens
  misc_RNA (1)...(19): siRNA sense strand
aaaugugacuguucucuuu

SEQ ID NO: 1666664 - RNA, 19 nt, Homo sapiens
  misc_RNA (1)...(19): siRNA sense strand
gaauuguguugaaugcuuu

SEQ ID NO: 1666665 - RNA, 19 nt, Homo sapiens
  misc_RNA (1)...(19): siRNA sense strand
agaauuggcugacagaaau

SEQ ID NO: 1666666 - RNA, 19 nt, Homo sapiens
  misc_RNA (1)...(19): siRNA sense strand
gaucagacuguauauauug

SEQ ID NO: 1666667 - RNA, 19 nt, Homo sapiens
  misc_RNA (1)...(19): siRNA sense strand
ugaaagagcucagacaucu

SEQ ID NO: 1666668 - RNA, 19 nt, Homo sapiens
  misc_RNA (1)...(19): siRNA sense strand
gaggauggauguucuacug

SEQ ID NO: 1666669 - RNA, 19 nt, Homo sapiens
  misc_RNA (1)...(19): siRNA sense strand
ggagagagacaucauuuca

SEQ ID NO: 1666670 - RNA, 19 nt, Homo sapiens
  misc_RNA (1)...(19): siRNA sense strand
cgcaaacuguggagaaaua

SEQ ID NO: 1666671 - RNA, 19 nt, Homo sapiens
  misc_RNA (1)...(19): siRNA sense strand
gggaaaagcuacagaaaga

SEQ ID NO: 1666672 - RNA, 19 nt, Homo sapiens
  misc_RNA (1)...(19): siRNA sense strand
ggauggauguucuacugaa

SEQ ID NO: 1666673 - RNA, 19 nt, Homo sapiens
  misc_RNA (1)...(19): siRNA sense strand
cuacugaaauaaccuguga

SEQ ID NO: 1666674 - RNA, 19 nt, Homo sapiens
  misc_RNA (1)...(19): siRNA sense strand
acagaaagaugacacagau

SEQ ID NO: 1666675 - RNA, 19 nt, Homo sapiens
  misc_RNA (1)...(19): siRNA sense strand
ugacuuuguucgcuuguuu

SEQ ID NO: 1666676 - RNA, 19 nt, Homo sapiens
  misc_RNA (1)...(19): siRNA sense strand
gaaccucauuugaagaaag

SEQ ID NO: 1666677 - RNA, 19 nt, Homo sapiens
  misc_RNA (1)...(19): siRNA sense strand
gccuggauuucuuagauua

SEQ ID NO: 1666678 - RNA, 19 nt, Homo sapiens
  misc_RNA (1)...(19): siRNA sense strand
gauauggaagcaaaucuuu

SEQ ID NO: 1666679 - RNA, 19 nt, Homo sapiens
  misc_RNA (1)...(19): siRNA sense strand
ggaaagaccuauguaacac

SEQ ID NO: 1666680 - RNA, 19 nt, Homo sapiens
  misc_RNA (1)...(19): siRNA sense strand
ugaaucaucuuaguucuuc

SEQ ID NO: 1666681 - RNA, 19 nt, Homo sapiens
  misc_RNA (1)...(19): siRNA sense strand
gauggauguucuacugaaa

SEQ ID NO: 1666682 - RNA, 19 nt, Homo sapiens
  misc_RNA (1)...(19): siRNA sense strand
gaagcaagugaacgugaua

SEQ ID NO: 1666683 - RNA, 19 nt, Homo sapiens
  misc_RNA (1)...(19): siRNA sense strand
uaacauucuucuuggaguu

SEQ ID NO: 1666684 - RNA, 19 nt, Homo sapiens
  misc_RNA (1)...(19): siRNA sense strand
gagacaucauuucagcuuu

SEQ ID NO: 1666685 - RNA, 19 nt, Homo sapiens
  misc_RNA (1)...(19): siRNA sense strand
uggauguucuacugaaaua

SEQ ID NO: 1666686 - RNA, 19 nt, Homo sapiens
  misc_RNA (1)...(19): siRNA sense strand
ugaauuguguugaaugcuu

SEQ ID NO: 1666687 - RNA, 19 nt, Homo sapiens
  misc_RNA (1)...(19): siRNA sense strand
agaaagcuaugcagacugu

SEQ ID NO: 1666688 - RNA, 19 nt, Homo sapiens
  misc_RNA (1)...(19): siRNA sense strand
gaaaugugacuguucucuu

SEQ ID NO: 1666689 - RNA, 19 nt, Homo sapiens
  misc_RNA (1)...(19): siRNA sense strand
uaaaggagaagcaagugaa

SEQ ID NO: 1666690 - RNA, 19 nt, Homo sapiens
  misc_RNA (1)...(19): siRNA sense strand
ucagggaaauaucaaguuc

SEQ ID NO: 1666691 - RNA, 19 nt, Homo sapiens
  misc_RNA (1)...(19): siRNA sense strand
caaguaaccacagcugaaa

SEQ ID NO: 1666692 - RNA, 19 nt, Homo sapiens
  misc_RNA (1)...(19): siRNA sense strand
aaagaccuauguaacacaa

SEQ ID NO: 1666693 - RNA, 19 nt, Homo sapiens
  misc_RNA (1)...(19): siRNA sense strand
cuuuagagcucccacaugu

SEQ ID NO: 1666694 - RNA, 19 nt, Homo sapiens
  misc_RNA (1)...(19): siRNA sense strand
aaacuguggagaaauauug

SEQ ID NO: 1666695 - RNA, 19 nt, Homo sapiens
  misc_RNA (1)...(19): siRNA sense strand
ggaguuuucuacacuguuu

SEQ ID NO: 1666696 - RNA, 19 nt, Homo sapiens
  misc_RNA (1)...(19): siRNA sense strand
uauugaaccucauuugaag

SEQ ID NO: 1666697 - RNA, 19 nt, Homo sapiens
  misc_RNA (1)...(19): siRNA sense strand
agacaucauuucagcuuuc

SEQ ID NO: 1666698 - RNA, 19 nt, Homo sapiens
  misc_RNA (1)...(19): siRNA sense strand
gaaagaccuauguaacaca

SEQ ID NO: 1666699 - RNA, 19 nt, Homo sapiens
  misc_RNA (1)...(19): siRNA sense strand
uuucuaugcugccuacauu

SEQ ID NO: 1666700 - RNA, 19 nt, Homo sapiens
  misc_RNA (1)...(19): siRNA sense strand
cagcauaggcaaccuucaa

SEQ ID NO: 1666701 - RNA, 19 nt, Homo sapiens
  misc_RNA (1)...(19): siRNA sense strand
caucuggcaguacuuaauu

SEQ ID NO: 1666702 - RNA, 19 nt, Homo sapiens
  misc_RNA (1)...(19): siRNA sense strand
agacaucuggcaguacuua

SEQ ID NO: 1666703 - RNA, 19 nt, Homo sapiens
  misc_RNA (1)...(19): siRNA sense strand
cagaguauucagcugauuu

SEQ ID NO: 1666704 - RNA, 19 nt, Homo sapiens
  misc_RNA (1)...(19): siRNA sense strand
aagcuaugcagacuguuua

SEQ ID NO: 1666705 - RNA, 19 nt, Homo sapiens
  misc_RNA (1)...(19): siRNA sense strand
uggaaagaccuauguaaca

SEQ ID NO: 1666706 - RNA, 19 nt, Homo sapiens
  misc_RNA (1)...(19): siRNA sense strand
caucuugcaguccuuguuu

SEQ ID NO: 1666707 - RNA, 19 nt, Homo sapiens
  misc_RNA (1)...(19): siRNA sense strand
cagacuguauauauuguuc

SEQ ID NO: 1666708 - RNA, 19 nt, Homo sapiens
  misc_RNA (1)...(19): siRNA sense strand
gaaaagcuacagaaagaug

SEQ ID NO: 1666709 - RNA, 19 nt, Homo sapiens
  misc_RNA (1)...(19): siRNA sense strand
guuugugaauuguguugaa

SEQ ID NO: 1666710 - RNA, 19 nt, Homo sapiens
  misc_RNA (1)...(19): siRNA sense strand
aaagcuaugcagacuguuu

SEQ ID NO: 1666711 - RNA, 19 nt, Homo sapiens
  misc_RNA (1)...(19): siRNA sense strand
gagaaauauugaaccucau

SEQ ID NO: 1666712 - RNA, 19 nt, Homo sapiens
  misc_RNA (1)...(19): siRNA sense strand
ugucuuauauuucccugau

SEQ ID NO: 1666713 - RNA, 19 nt, Homo sapiens
  misc_RNA (1)...(19): siRNA sense strand
acaaguaaccacagcugaa

SEQ ID NO: 1666714 - RNA, 19 nt, Homo sapiens
  misc_RNA (1)...(19): siRNA sense strand
uugagccguuugucuuaua

SEQ ID NO: 1666715 - RNA, 19 nt, Homo sapiens
  misc_RNA (1)...(19): siRNA sense strand
gcuuugagccguuugucuu

SEQ ID NO: 1666716 - RNA, 19 nt, Homo sapiens
  misc_RNA (1)...(19): siRNA sense strand
aagaauuggcugacagaaa

SEQ ID NO: 1666717 - RNA, 19 nt, Homo sapiens
  misc_RNA (1)...(19): siRNA sense strand
gaaauuguuugggaaaagu

SEQ ID NO: 1666718 - RNA, 19 nt, Homo sapiens
  misc_RNA (1)...(19): siRNA sense strand
caaacuguggagaaauauu

SEQ ID NO: 1666719 - RNA, 19 nt, Homo sapiens
  misc_RNA (1)...(19): siRNA sense strand
gcaaacuguggagaaauau

SEQ ID NO: 1666720 - RNA, 19 nt, Homo sapiens
  misc_RNA (1)...(19): siRNA sense strand
ucuaugcugccuacauuaa

SEQ ID NO: 1666721 - RNA, 19 nt, Homo sapiens
  misc_RNA (1)...(19): siRNA sense strand
aaaagauccugucccauga

SEQ ID NO: 1666722 - RNA, 19 nt, Homo sapiens
  misc_RNA (1)...(19): siRNA sense strand
agccguuugucuuauauuu

SEQ ID NO: 1666723 - RNA, 19 nt, Homo sapiens
  misc_RNA (1)...(19): siRNA sense strand
uuuguucgcuuguuuaaac

SEQ ID NO: 1666724 - RNA, 19 nt, Homo sapiens
  misc_RNA (1)...(19): siRNA sense strand
ugaacgugauacucgcaaa

SEQ ID NO: 1666725 - RNA, 19 nt, Homo sapiens
  misc_RNA (1)...(19): siRNA sense strand
cauuaacauucuucuugga

SEQ ID NO: 1666726 - RNA, 19 nt, Homo sapiens
  misc_RNA (1)...(19): siRNA sense strand
ccagaguauucagcugauu

SEQ ID NO: 1666727 - RNA, 19 nt, Homo sapiens
  misc_RNA (1)...(19): siRNA sense strand
uuacaagaauuggcugaca

SEQ ID NO: 1666728 - RNA, 19 nt, Homo sapiens
  misc_RNA (1)...(19): siRNA sense strand
gaucauccuccagaguauu

SEQ ID NO: 1666729 - RNA, 19 nt, Homo sapiens
  misc_RNA (1)...(19): siRNA sense strand
cauuucagcuuuccaucca

SEQ ID NO: 1666730 - RNA, 19 nt, Homo sapiens
  misc_RNA (1)...(19): siRNA sense strand
agaagcaagugaacgugau

SEQ ID NO: 1666731 - RNA, 19 nt, Homo sapiens
  misc_RNA (1)...(19): siRNA sense strand
gacuuuguucgcuuguuua

SEQ ID NO: 1666732 - RNA, 19 nt, Homo sapiens
  misc_RNA (1)...(19): siRNA sense strand
ugagccguuugucuuauau

SEQ ID NO: 1666733 - RNA, 19 nt, Homo sapiens
  misc_RNA (1)...(19): siRNA sense strand
gguuaaaggagaagcaagu

SEQ ID NO: 1666734 - RNA, 19 nt, Homo sapiens
  misc_RNA (1)...(19): siRNA sense strand
uuagagcucccacaugugu

SEQ ID NO: 1666735 - RNA, 19 nt, Homo sapiens
  misc_RNA (1)...(19): siRNA sense strand
ugaucauccuccagaguau

SEQ ID NO: 1666736 - RNA, 19 nt, Homo sapiens
  misc_RNA (1)...(19): siRNA sense strand
uaugcugccuacauuaaca

SEQ ID NO: 1666737 - RNA, 19 nt, Homo sapiens
  misc_RNA (1)...(19): siRNA sense strand
gauguucuacugaaauaac

SEQ ID NO: 1666738 - RNA, 19 nt, Homo sapiens
  misc_RNA (1)...(19): siRNA sense strand
agagacaucauuucagcuu

SEQ ID NO: 1666739 - RNA, 19 nt, Homo sapiens
  misc_RNA (1)...(19): siRNA sense strand
gaacgugauacucgcaaac

SEQ ID NO: 1666740 - RNA, 19 nt, Homo sapiens
  misc_RNA (1)...(19): siRNA sense strand
uuucagcuuuccauccauu

SEQ ID NO: 1666741 - RNA, 19 nt, Homo sapiens
  misc_RNA (1)...(19): siRNA sense strand
guccuuguuuggagagaga

SEQ ID NO: 1666742 - RNA, 19 nt, Homo sapiens
  misc_RNA (1)...(19): siRNA sense strand
gcaagugaacgugauacuc

SEQ ID NO: 1666743 - RNA, 19 nt, Homo sapiens
  misc_RNA (1)...(19): siRNA sense strand
cuacacuguuugucgagau

SEQ ID NO: 1666744 - RNA, 19 nt, Homo sapiens
  misc_RNA (1)...(19): siRNA sense strand
gaauuggcugacagaaaug

SEQ ID NO: 1666745 - RNA, 19 nt, Homo sapiens
  misc_RNA (1)...(19): siRNA sense strand
ugccuggauuucuuagauu

SEQ ID NO: 1666746 - RNA, 19 nt, Homo sapiens
  misc_RNA (1)...(19): siRNA sense strand
acugaaauaaccugugaaa

SEQ ID NO: 1666747 - RNA, 19 nt, Homo sapiens
  misc_RNA (1)...(19): siRNA sense strand
gagagagacaucauuucag

SEQ ID NO: 1666748 - RNA, 19 nt, Homo sapiens
  misc_RNA (1)...(19): siRNA sense strand
agaccuauguaacacaaac

SEQ ID NO: 1666749 - RNA, 19 nt, Homo sapiens
  misc_RNA (1)...(19): siRNA sense strand
gacauacugcuaguggaaa

SEQ ID NO: 1666750 - RNA, 19 nt, Homo sapiens
  misc_RNA (1)...(19): siRNA sense strand
guggagaaauauugaaccu

SEQ ID NO: 1666751 - RNA, 19 nt, Homo sapiens
  misc_RNA (1)...(19): siRNA sense strand
uuaaaggagaagcaaguga

SEQ ID NO: 1666752 - RNA, 19 nt, Homo sapiens
  misc_RNA (1)...(19): siRNA sense strand
uacacuguuugucgagauu

SEQ ID NO: 1666753 - RNA, 19 nt, Homo sapiens
  misc_RNA (1)...(19): siRNA sense strand
uugccuggauuucuuagau

SEQ ID NO: 1666754 - RNA, 19 nt, Homo sapiens
  misc_RNA (1)...(19): siRNA sense strand
uuggagagagacaucauuu

SEQ ID NO: 1666755 - RNA, 19 nt, Homo sapiens
  misc_RNA (1)...(19): siRNA sense strand
uguguugaaugcuuuacau

SEQ ID NO: 1666756 - RNA, 19 nt, Homo sapiens
  misc_RNA (1)...(19): siRNA sense strand
agagcucccacauguguuu

SEQ ID NO: 1666757 - RNA, 19 nt, Homo sapiens
  misc_RNA (1)...(19): siRNA sense strand
guggaaagaccuauguaac

SEQ ID NO: 1666758 - RNA, 19 nt, Homo sapiens
  misc_RNA (1)...(19): siRNA sense strand
acaagaauuggcugacaga

SEQ ID NO: 1666759 - RNA, 19 nt, Homo sapiens
  misc_RNA (1)...(19): siRNA sense strand
gaaauaaccugugaaacau

SEQ ID NO: 1666760 - RNA, 19 nt, Homo sapiens
  misc_RNA (1)...(19): siRNA sense strand
guauucagcugauuucuau

SEQ ID NO: 1666761 - RNA, 19 nt, Homo sapiens
  misc_RNA (1)...(19): siRNA sense strand
gaagaaagcuaugcagacu

SEQ ID NO: 1666762 - RNA, 19 nt, Homo sapiens
  misc_RNA (1)...(19): siRNA sense strand
ugaaauaaccugugaaaca

SEQ ID NO: 1666763 - RNA, 19 nt, Homo sapiens
  misc_RNA (1)...(19): siRNA sense strand
aaaugugacuguucucuuu

SEQ ID NO: 1666764 - RNA, 19 nt, Homo sapiens
  misc_RNA (1)...(19): siRNA sense strand
gaauuguguugaaugcuuu

SEQ ID NO: 1666765 - RNA, 19 nt, Homo sapiens
  misc_RNA (1)...(19): siRNA sense strand
agaauuggcugacagaaau

SEQ ID NO: 1666766 - RNA, 19 nt, Homo sapiens
  misc_RNA (1)...(19): siRNA sense strand
gaucagacuguauauauug

SEQ ID NO: 1666767 - RNA, 19 nt, Homo sapiens
  misc_RNA (1)...(19): siRNA sense strand
ugaaagagcucagacaucu

SEQ ID NO: 1666768 - RNA, 19 nt, Homo sapiens
  misc_RNA (1)...(19): siRNA sense strand
gaggauggauguucuacug

SEQ ID NO: 1666769 - RNA, 19 nt, Homo sapiens
  misc_RNA (1)...(19): siRNA sense strand
ggagagagacaucauuuca

SEQ ID NO: 1666770 - RNA, 19 nt, Homo sapiens
  misc_RNA (1)...(19): siRNA sense strand
cgcaaacuguggagaaaua

SEQ ID NO: 1666771 - RNA, 19 nt, Homo sapiens
  misc_RNA (1)...(19): siRNA sense strand
gggaaaagcuacagaaaga

SEQ ID NO: 1666772 - RNA, 19 nt, Homo sapiens
  misc_RNA (1)...(19): siRNA sense strand
ggauggauguucuacugaa

SEQ ID NO: 1666773 - RNA, 19 nt, Homo sapiens
  misc_RNA (1)...(19): siRNA sense strand
cuacugaaauaaccuguga

SEQ ID NO: 1666774 - RNA, 19 nt, Homo sapiens
  misc_RNA (1)...(19): siRNA sense strand
acagaaagaugacacagau

SEQ ID NO: 1666775 - RNA, 19 nt, Homo sapiens
  misc_RNA (1)...(19): siRNA sense strand
ugacuuuguucgcuuguuu

SEQ ID NO: 1666776 - RNA, 19 nt, Homo sapiens
  misc_RNA (1)...(19): siRNA sense strand
gaaccucauuugaagaaag

SEQ ID NO: 1666777 - RNA, 19 nt, Homo sapiens
  misc_RNA (1)...(19): siRNA sense strand
gccuggauuucuuagauua

SEQ ID NO: 1666778 - RNA, 19 nt, Homo sapiens
  misc_RNA (1)...(19): siRNA sense strand
gauauggaagcaaaucuuu

SEQ ID NO: 1666779 - RNA, 19 nt, Homo sapiens
  misc_RNA (1)...(19): siRNA sense strand
ggaaagaccuauguaacac

SEQ ID NO: 1666780 - RNA, 19 nt, Homo sapiens
  misc_RNA (1)...(19): siRNA sense strand
ugaaucaucuuaguucuuc

SEQ ID NO: 1666781 - RNA, 19 nt, Homo sapiens
  misc_RNA (1)...(19): siRNA sense strand
gauggauguucuacugaaa

SEQ ID NO: 1666782 - RNA, 19 nt, Homo sapiens
  misc_RNA (1)...(19): siRNA sense strand
gaagcaagugaacgugaua

SEQ ID NO: 1666783 - RNA, 19 nt, Homo sapiens
  misc_RNA (1)...(19): siRNA sense strand
uaacauucuucuuggaguu

SEQ ID NO: 1666784 - RNA, 19 nt, Homo sapiens
  misc_RNA (1)...(19): siRNA sense strand
gagacaucauuucagcuuu

SEQ ID NO: 1666785 - RNA, 19 nt, Homo sapiens
  misc_RNA (1)...(19): siRNA sense strand
uggauguucuacugaaaua

SEQ ID NO: 1666786 - RNA, 19 nt, Homo sapiens
  misc_RNA (1)...(19): siRNA sense strand
ugaauuguguugaaugcuu

SEQ ID NO: 1666787 - RNA, 19 nt, Homo sapiens
  misc_RNA (1)...(19): siRNA sense strand
agaaagcuaugcagacugu

SEQ ID NO: 1666788 - RNA, 19 nt, Homo sapiens
  misc_RNA (1)...(19): siRNA sense strand
gaaaugugacuguucucuu

SEQ ID NO: 1666789 - RNA, 19 nt, Homo sapiens
  misc_RNA (1)...(19): siRNA sense strand
uaaaggagaagcaagugaa

SEQ ID NO: 1666790 - RNA, 19 nt, Homo sapiens
  misc_RNA (1)...(19): siRNA sense strand
ucagggaaauaucaaguuc

SEQ ID NO: 1666791 - RNA, 19 nt, Homo sapiens
  misc_RNA (1)...(19): siRNA sense strand
caaguaaccacagcugaaa

SEQ ID NO: 1666792 - RNA, 19 nt, Homo sapiens
  misc_RNA (1)...(19): siRNA sense strand
aaagaccuauguaacacaa

SEQ ID NO: 1666793 - RNA, 19 nt, Homo sapiens
  misc_RNA (1)...(19): siRNA sense strand
cuuuagagcucccacaugu

SEQ ID NO: 1666794 - RNA, 19 nt, Homo sapiens
  misc_RNA (1)...(19): siRNA sense strand
aaacuguggagaaauauug

SEQ ID NO: 1666795 - RNA, 19 nt, Homo sapiens
  misc_RNA (1)...(19): siRNA sense strand
ggaguuuucuacacuguuu

SEQ ID NO: 1666796 - RNA, 19 nt, Homo sapiens
  misc_RNA (1)...(19): siRNA sense strand
uauugaaccucauuugaag

SEQ ID NO: 1666797 - RNA, 19 nt, Homo sapiens
  misc_RNA (1)...(19): siRNA sense strand
agacaucauuucagcuuuc

SEQ ID NO: 1666798 - RNA, 19 nt, Homo sapiens
  misc_RNA (1)...(19): siRNA sense strand
gaaagaccuauguaacaca

SEQ ID NO: 1666799 - RNA, 19 nt, Homo sapiens
  misc_RNA (1)...(19): siRNA sense strand
uuucuaugcugccuacauu

SEQ ID NO: 1666800 - RNA, 19 nt, Homo sapiens
  misc_RNA (1)...(19): siRNA sense strand
cagcauaggcaaccuucaa

SEQ ID NO: 1666801 - RNA, 19 nt, Homo sapiens
  misc_RNA (1)...(19): siRNA sense strand
caucuggcaguacuuaauu

SEQ ID NO: 1666802 - RNA, 19 nt, Homo sapiens
  misc_RNA (1)...(19): siRNA sense strand
agacaucuggcaguacuua

SEQ ID NO: 1666803 - RNA, 19 nt, Homo sapiens
  misc_RNA (1)...(19): siRNA sense strand
cagaguauucagcugauuu

SEQ ID NO: 1666804 - RNA, 19 nt, Homo sapiens
  misc_RNA (1)...(19): siRNA sense strand
aagcuaugcagacuguuua

SEQ ID NO: 1666805 - RNA, 19 nt, Homo sapiens
  misc_RNA (1)...(19): siRNA sense strand
uggaaagaccuauguaaca

SEQ ID NO: 1666806 - RNA, 19 nt, Homo sapiens
  misc_RNA (1)...(19): siRNA sense strand
caucuugcaguccuuguuu

SEQ ID NO: 1666807 - RNA, 19 nt, Homo sapiens
  misc_RNA (1)...(19): siRNA sense strand
cagacuguauauauuguuc

SEQ ID NO: 1666808 - RNA, 19 nt, Homo sapiens
  misc_RNA (1)...(19): siRNA sense strand
gaaaagcuacagaaagaug

SEQ ID NO: 1666809 - RNA, 19 nt, Homo sapiens
  misc_RNA (1)...(19): siRNA sense strand
guuugugaauuguguugaa

SEQ ID NO: 1666810 - RNA, 19 nt, Homo sapiens
  misc_RNA (1)...(19): siRNA sense strand
aaagcuaugcagacuguuu

SEQ ID NO: 1666811 - RNA, 19 nt, Homo sapiens
  misc_RNA (1)...(19): siRNA sense strand
gagaaauauugaaccucau

SEQ ID NO: 1666812 - RNA, 19 nt, Homo sapiens
  misc_RNA (1)...(19): siRNA sense strand
ugucuuauauuucccugau

SEQ ID NO: 1666813 - RNA, 19 nt, Homo sapiens
  misc_RNA (1)...(19): siRNA sense strand
acaaguaaccacagcugaa

SEQ ID NO: 1666814 - RNA, 19 nt, Homo sapiens
  misc_RNA (1)...(19): siRNA sense strand
uugagccguuugucuuaua

SEQ ID NO: 1666815 - RNA, 19 nt, Homo sapiens
  misc_RNA (1)...(19): siRNA sense strand
gcuuugagccguuugucuu

SEQ ID NO: 1666816 - RNA, 19 nt, Homo sapiens
  misc_RNA (1)...(19): siRNA sense strand
aagaauuggcugacagaaa

SEQ ID NO: 1666817 - RNA, 19 nt, Homo sapiens
  misc_RNA (1)...(19): siRNA sense strand
gaaauuguuugggaaaagu

SEQ ID NO: 1666818 - RNA, 19 nt, Homo sapiens
  misc_RNA (1)...(19): siRNA sense strand
caaacuguggagaaauauu

SEQ ID NO: 1666819 - RNA, 19 nt, Homo sapiens
  misc_RNA (1)...(19): siRNA sense strand
gcaaacuguggagaaauau

SEQ ID NO: 1666820 - RNA, 19 nt, Homo sapiens
  misc_RNA (1)...(19): siRNA sense strand
ucuaugcugccuacauuaa

SEQ ID NO: 1666821 - RNA, 19 nt, Homo sapiens
  misc_RNA (1)...(19): siRNA sense strand
aaaagauccugucccauga

SEQ ID NO: 1666822 - RNA, 19 nt, Homo sapiens
  misc_RNA (1)...(19): siRNA sense strand
agccguuugucuuauauuu

SEQ ID NO: 1666823 - RNA, 19 nt, Homo sapiens
  misc_RNA (1)...(19): siRNA sense strand
uuuguucgcuuguuuaaac

SEQ ID NO: 1666824 - RNA, 19 nt, Homo sapiens
  misc_RNA (1)...(19): siRNA sense strand
ugaacgugauacucgcaaa

SEQ ID NO: 1666825 - RNA, 19 nt, Homo sapiens
  misc_RNA (1)...(19): siRNA sense strand
cauuaacauucuucuugga

SEQ ID NO: 1666826 - RNA, 19 nt, Homo sapiens
  misc_RNA (1)...(19): siRNA sense strand
ccagaguauucagcugauu

SEQ ID NO: 1666827 - RNA, 19 nt, Homo sapiens
  misc_RNA (1)...(19): siRNA sense strand
uuacaagaauuggcugaca

SEQ ID NO: 1666828 - RNA, 19 nt, Homo sapiens
  misc_RNA (1)...(19): siRNA sense strand
gaucauccuccagaguauu

SEQ ID NO: 1666829 - RNA, 19 nt, Homo sapiens
  misc_RNA (1)...(19): siRNA sense strand
cauuucagcuuuccaucca

SEQ ID NO: 1666830 - RNA, 19 nt, Homo sapiens
  misc_RNA (1)...(19): siRNA sense strand
agaagcaagugaacgugau

SEQ ID NO: 1666831 - RNA, 19 nt, Homo sapiens
  misc_RNA (1)...(19): siRNA sense strand
gacuuuguucgcuuguuua

SEQ ID NO: 1666832 - RNA, 19 nt, Homo sapiens
  misc_RNA (1)...(19): siRNA sense strand
ugagccguuugucuuauau

SEQ ID NO: 1666833 - RNA, 19 nt, Homo sapiens
  misc_RNA (1)...(19): siRNA sense strand
gguuaaaggagaagcaagu

SEQ ID NO: 1666834 - RNA, 19 nt, Homo sapiens
  misc_RNA (1)...(19): siRNA sense strand
uuagagcucccacaugugu

SEQ ID NO: 1666835 - RNA, 19 nt, Homo sapiens
  misc_RNA (1)...(19): siRNA sense strand
ugaucauccuccagaguau

SEQ ID NO: 1666836 - RNA, 19 nt, Homo sapiens
  misc_RNA (1)...(19): siRNA sense strand
uaugcugccuacauuaaca

SEQ ID NO: 1666837 - RNA, 19 nt, Homo sapiens
  misc_RNA (1)...(19): siRNA sense strand
gauguucuacugaaauaac

SEQ ID NO: 1666838 - RNA, 19 nt, Homo sapiens
  misc_RNA (1)...(19): siRNA sense strand
agagacaucauuucagcuu

SEQ ID NO: 1666839 - RNA, 19 nt, Homo sapiens
  misc_RNA (1)...(19): siRNA sense strand
gaacgugauacucgcaaac

SEQ ID NO: 1666840 - RNA, 19 nt, Homo sapiens
  misc_RNA (1)...(19): siRNA sense strand
uuucagcuuuccauccauu

SEQ ID NO: 1666841 - RNA, 19 nt, Homo sapiens
  misc_RNA (1)...(19): siRNA sense strand
guccuuguuuggagagaga

SEQ ID NO: 1666842 - RNA, 19 nt, Homo sapiens
  misc_RNA (1)...(19): siRNA sense strand
gcaagugaacgugauacuc

SEQ ID NO: 1666843 - RNA, 19 nt, Homo sapiens
  misc_RNA (1)...(19): siRNA sense strand
cuacacuguuugucgagau

SEQ ID NO: 1666844 - RNA, 19 nt, Homo sapiens
  misc_RNA (1)...(19): siRNA sense strand
gaauuggcugacagaaaug

SEQ ID NO: 1666845 - RNA, 19 nt, Homo sapiens
  misc_RNA (1)...(19): siRNA sense strand
ugccuggauuucuuagauu

SEQ ID NO: 1666846 - RNA, 19 nt, Homo sapiens
  misc_RNA (1)...(19): siRNA sense strand
acugaaauaaccugugaaa

SEQ ID NO: 1666847 - RNA, 19 nt, Homo sapiens
  misc_RNA (1)...(19): siRNA sense strand
gagagagacaucauuucag

SEQ ID NO: 1666848 - RNA, 19 nt, Homo sapiens
  misc_RNA (1)...(19): siRNA sense strand
agaccuauguaacacaaac

SEQ ID NO: 1666849 - RNA, 19 nt, Homo sapiens
  misc_RNA (1)...(19): siRNA sense strand
gacauacugcuaguggaaa

SEQ ID NO: 1666850 - RNA, 19 nt, Homo sapiens
  misc_RNA (1)...(19): siRNA sense strand
guggagaaauauugaaccu

SEQ ID NO: 1666851 - RNA, 19 nt, Homo sapiens
  misc_RNA (1)...(19): siRNA sense strand
uuaaaggagaagcaaguga

SEQ ID NO: 1666852 - RNA, 19 nt, Homo sapiens
  misc_RNA (1)...(19): siRNA sense strand
uacacuguuugucgagauu

SEQ ID NO: 1666853 - RNA, 19 nt, Homo sapiens
  misc_RNA (1)...(19): siRNA sense strand
uugccuggauuucuuagau

SEQ ID NO: 1666854 - RNA, 19 nt, Homo sapiens
  misc_RNA (1)...(19): siRNA sense strand
uuggagagagacaucauuu

SEQ ID NO: 1666855 - RNA, 19 nt, Homo sapiens
  misc_RNA (1)...(19): siRNA sense strand
uguguugaaugcuuuacau

SEQ ID NO: 1666856 - RNA, 19 nt, Homo sapiens
  misc_RNA (1)...(19): siRNA sense strand
agagcucccacauguguuu

SEQ ID NO: 1666857 - RNA, 19 nt, Homo sapiens
  misc_RNA (1)...(19): siRNA sense strand
guggaaagaccuauguaac

SEQ ID NO: 1666858 - RNA, 19 nt, Homo sapiens
  misc_RNA (1)...(19): siRNA sense strand
acaagaauuggcugacaga

SEQ ID NO: 1666859 - RNA, 19 nt, Homo sapiens
  misc_RNA (1)...(19): siRNA sense strand
gaaauaaccugugaaacau

SEQ ID NO: 1666860 - RNA, 19 nt, Homo sapiens
  misc_RNA (1)...(19): siRNA sense strand
guauucagcugauuucuau

SEQ ID NO: 1666861 - RNA, 19 nt, Homo sapiens
  misc_RNA (1)...(19): siRNA sense strand
gaagaaagcuaugcagacu

SEQ ID NO: 1666862 - RNA, 19 nt, Homo sapiens
  misc_RNA (1)...(19): siRNA sense strand
ugaaauaaccugugaaaca

SEQ ID NO: 1666863 - RNA, 19 nt, Homo sapiens
  misc_RNA (1)...(19): siRNA sense strand
aaaugugacuguucucuuu

SEQ ID NO: 1666864 - RNA, 19 nt, Homo sapiens
  misc_RNA (1)...(19): siRNA sense strand
gaauuguguugaaugcuuu

SEQ ID NO: 1666865 - RNA, 19 nt, Homo sapiens
  misc_RNA (1)...(19): siRNA sense strand
agaauuggcugacagaaau

SEQ ID NO: 1666866 - RNA, 19 nt, Homo sapiens
  misc_RNA (1)...(19): siRNA sense strand
gaucagacuguauauauug

SEQ ID NO: 1666867 - RNA, 19 nt, Homo sapiens
  misc_RNA (1)...(19): siRNA sense strand
ugaaagagcucagacaucu

SEQ ID NO: 1666868 - RNA, 19 nt, Homo sapiens
  misc_RNA (1)...(19): siRNA sense strand
gaggauggauguucuacug

SEQ ID NO: 1666869 - RNA, 19 nt, Homo sapiens
  misc_RNA (1)...(19): siRNA sense strand
ggagagagacaucauuuca

SEQ ID NO: 1666870 - RNA, 19 nt, Homo sapiens
  misc_RNA (1)...(19): siRNA sense strand
cgcaaacuguggagaaaua

SEQ ID NO: 1666871 - RNA, 19 nt, Homo sapiens
  misc_RNA (1)...(19): siRNA sense strand
gggaaaagcuacagaaaga

SEQ ID NO: 1666872 - RNA, 19 nt, Homo sapiens
  misc_RNA (1)...(19): siRNA sense strand
ggauggauguucuacugaa

SEQ ID NO: 1666873 - RNA, 19 nt, Homo sapiens
  misc_RNA (1)...(19): siRNA sense strand
cuacugaaauaaccuguga

SEQ ID NO: 1666874 - RNA, 19 nt, Homo sapiens
  misc_RNA (1)...(19): siRNA sense strand
acagaaagaugacacagau

SEQ ID NO: 1666875 - RNA, 19 nt, Homo sapiens
  misc_RNA (1)...(19): siRNA sense strand
ugacuuuguucgcuuguuu

SEQ ID NO: 1666876 - RNA, 19 nt, Homo sapiens
  misc_RNA (1)...(19): siRNA sense strand
gaaccucauuugaagaaag

SEQ ID NO: 1666877 - RNA, 19 nt, Homo sapiens
  misc_RNA (1)...(19): siRNA sense strand
gccuggauuucuuagauua

SEQ ID NO: 1666878 - RNA, 19 nt, Homo sapiens
  misc_RNA (1)...(19): siRNA sense strand
gauauggaagcaaaucuuu

SEQ ID NO: 1666879 - RNA, 19 nt, Homo sapiens
  misc_RNA (1)...(19): siRNA sense strand
ggaaagaccuauguaacac

SEQ ID NO: 1666880 - RNA, 19 nt, Homo sapiens
  misc_RNA (1)...(19): siRNA sense strand
ugaaucaucuuaguucuuc

SEQ ID NO: 1666881 - RNA, 19 nt, Homo sapiens
  misc_RNA (1)...(19): siRNA sense strand
gauggauguucuacugaaa

SEQ ID NO: 1666882 - RNA, 19 nt, Homo sapiens
  misc_RNA (1)...(19): siRNA sense strand
gaagcaagugaacgugaua

SEQ ID NO: 1666883 - RNA, 19 nt, Homo sapiens
  misc_RNA (1)...(19): siRNA sense strand
uaacauucuucuuggaguu

SEQ ID NO: 1666884 - RNA, 19 nt, Homo sapiens
  misc_RNA (1)...(19): siRNA sense strand
gagacaucauuucagcuuu

SEQ ID NO: 1666885 - RNA, 19 nt, Homo sapiens
  misc_RNA (1)...(19): siRNA sense strand
uggauguucuacugaaaua

SEQ ID NO: 1666886 - RNA, 19 nt, Homo sapiens
  misc_RNA (1)...(19): siRNA sense strand
ugaauuguguugaaugcuu

SEQ ID NO: 1666887 - RNA, 19 nt, Homo sapiens
  misc_RNA (1)...(19): siRNA sense strand
agaaagcuaugcagacugu

SEQ ID NO: 1666888 - RNA, 19 nt, Homo sapiens
  misc_RNA (1)...(19): siRNA sense strand
gaaaugugacuguucucuu

SEQ ID NO: 1666889 - RNA, 19 nt, Homo sapiens
  misc_RNA (1)...(19): siRNA sense strand
uaaaggagaagcaagugaa

SEQ ID NO: 1666890 - RNA, 19 nt, Homo sapiens
  misc_RNA (1)...(19): siRNA sense strand
ucagggaaauaucaaguuc

SEQ ID NO: 1666891 - RNA, 19 nt, Homo sapiens
  misc_RNA (1)...(19): siRNA sense strand
caaguaaccacagcugaaa

SEQ ID NO: 1666892 - RNA, 19 nt, Homo sapiens
  misc_RNA (1)...(19): siRNA sense strand
aaagaccuauguaacacaa

SEQ ID NO: 1666893 - RNA, 19 nt, Homo sapiens
  misc_RNA (1)...(19): siRNA sense strand
cuuuagagcucccacaugu

SEQ ID NO: 1666894 - RNA, 19 nt, Homo sapiens
  misc_RNA (1)...(19): siRNA sense strand
aaacuguggagaaauauug

SEQ ID NO: 1666895 - RNA, 19 nt, Homo sapiens
  misc_RNA (1)...(19): siRNA sense strand
ggaguuuucuacacuguuu

SEQ ID NO: 1666896 - RNA, 19 nt, Homo sapiens
  misc_RNA (1)...(19): siRNA sense strand
uauugaaccucauuugaag

SEQ ID NO: 1666897 - RNA, 19 nt, Homo sapiens
  misc_RNA (1)...(19): siRNA sense strand
agacaucauuucagcuuuc

SEQ ID NO: 1666898 - RNA, 19 nt, Homo sapiens
  misc_RNA (1)...(19): siRNA sense strand
gaaagaccuauguaacaca

SEQ ID NO: 1666899 - RNA, 19 nt, Homo sapiens
  misc_RNA (1)...(19): siRNA sense strand
uuucuaugcugccuacauu

SEQ ID NO: 1666900 - RNA, 19 nt, Homo sapiens
  misc_RNA (1)...(19): siRNA sense strand
cagcauaggcaaccuucaa

SEQ ID NO: 1666901 - RNA, 19 nt, Homo sapiens
  misc_RNA (1)...(19): siRNA sense strand
caucuggcaguacuuaauu

SEQ ID NO: 1666902 - RNA, 19 nt, Homo sapiens
  misc_RNA (1)...(19): siRNA sense strand
agacaucuggcaguacuua

SEQ ID NO: 1666903 - RNA, 19 nt, Homo sapiens
  misc_RNA (1)...(19): siRNA sense strand
cagaguauucagcugauuu

SEQ ID NO: 1666904 - RNA, 19 nt, Homo sapiens
  misc_RNA (1)...(19): siRNA sense strand
aagcuaugcagacuguuua

SEQ ID NO: 1666905 - RNA, 19 nt, Homo sapiens
  misc_RNA (1)...(19): siRNA sense strand
uggaaagaccuauguaaca

SEQ ID NO: 1666906 - RNA, 19 nt, Homo sapiens
  misc_RNA (1)...(19): siRNA sense strand
caucuugcaguccuuguuu

SEQ ID NO: 1666907 - RNA, 19 nt, Homo sapiens
  misc_RNA (1)...(19): siRNA sense strand
cagacuguauauauuguuc

SEQ ID NO: 1666908 - RNA, 19 nt, Homo sapiens
  misc_RNA (1)...(19): siRNA sense strand
gaaaagcuacagaaagaug

SEQ ID NO: 1666909 - RNA, 19 nt, Homo sapiens
  misc_RNA (1)...(19): siRNA sense strand
guuugugaauuguguugaa

SEQ ID NO: 1666910 - RNA, 19 nt, Homo sapiens
  misc_RNA (1)...(19): siRNA sense strand
aaagcuaugcagacuguuu

SEQ ID NO: 1666911 - RNA, 19 nt, Homo sapiens
  misc_RNA (1)...(19): siRNA sense strand
gagaaauauugaaccucau

SEQ ID NO: 1666912 - RNA, 19 nt, Homo sapiens
  misc_RNA (1)...(19): siRNA sense strand
ugucuuauauuucccugau

SEQ ID NO: 1666913 - RNA, 19 nt, Homo sapiens
  misc_RNA (1)...(19): siRNA sense strand
acaaguaaccacagcugaa

SEQ ID NO: 1666914 - RNA, 19 nt, Homo sapiens
  misc_RNA (1)...(19): siRNA sense strand
uugagccguuugucuuaua

SEQ ID NO: 1666915 - RNA, 19 nt, Homo sapiens
  misc_RNA (1)...(19): siRNA sense strand
gcuuugagccguuugucuu

SEQ ID NO: 1666916 - RNA, 19 nt, Homo sapiens
  misc_RNA (1)...(19): siRNA sense strand
aagaauuggcugacagaaa

SEQ ID NO: 1666917 - RNA, 19 nt, Homo sapiens
  misc_RNA (1)...(19): siRNA sense strand
gaaauuguuugggaaaagu

SEQ ID NO: 1666918 - RNA, 19 nt, Homo sapiens
  misc_RNA (1)...(19): siRNA sense strand
caaacuguggagaaauauu

SEQ ID NO: 1666919 - RNA, 19 nt, Homo sapiens
  misc_RNA (1)...(19): siRNA sense strand
gcaaacuguggagaaauau

SEQ ID NO: 1666920 - RNA, 19 nt, Homo sapiens
  misc_RNA (1)...(19): siRNA sense strand
ucuaugcugccuacauuaa

SEQ ID NO: 1666921 - RNA, 19 nt, Homo sapiens
  misc_RNA (1)...(19): siRNA sense strand
aaaagauccugucccauga

SEQ ID NO: 1666922 - RNA, 19 nt, Homo sapiens
  misc_RNA (1)...(19): siRNA sense strand
agccguuugucuuauauuu

SEQ ID NO: 1666923 - RNA, 19 nt, Homo sapiens
  misc_RNA (1)...(19): siRNA sense strand
uuuguucgcuuguuuaaac

SEQ ID NO: 1666924 - RNA, 19 nt, Homo sapiens
  misc_RNA (1)...(19): siRNA sense strand
ugaacgugauacucgcaaa

SEQ ID NO: 1666925 - RNA, 19 nt, Homo sapiens
  misc_RNA (1)...(19): siRNA sense strand
cauuaacauucuucuugga

SEQ ID NO: 1666926 - RNA, 19 nt, Homo sapiens
  misc_RNA (1)...(19): siRNA sense strand
ccagaguauucagcugauu

SEQ ID NO: 1666927 - RNA, 19 nt, Homo sapiens
  misc_RNA (1)...(19): siRNA sense strand
uuacaagaauuggcugaca

SEQ ID NO: 1666928 - RNA, 19 nt, Homo sapiens
  misc_RNA (1)...(19): siRNA sense strand
gaucauccuccagaguauu

SEQ ID NO: 1666929 - RNA, 19 nt, Homo sapiens
  misc_RNA (1)...(19): siRNA sense strand
cauuucagcuuuccaucca

SEQ ID NO: 1666930 - RNA, 19 nt, Homo sapiens
  misc_RNA (1)...(19): siRNA sense strand
agaagcaagugaacgugau

SEQ ID NO: 1666931 - RNA, 19 nt, Homo sapiens
  misc_RNA (1)...(19): siRNA sense strand
gacuuuguucgcuuguuua

SEQ ID NO: 1666932 - RNA, 19 nt, Homo sapiens
  misc_RNA (1)...(19): siRNA sense strand
ugagccguuugucuuauau

SEQ ID NO: 1666933 - RNA, 19 nt, Homo sapiens
  misc_RNA (1)...(19): siRNA sense strand
gguuaaaggagaagcaagu

SEQ ID NO: 1666934 - RNA, 19 nt, Homo sapiens
  misc_RNA (1)...(19): siRNA sense strand
uuagagcucccacaugugu

SEQ ID NO: 1666935 - RNA, 19 nt, Homo sapiens
  misc_RNA (1)...(19): siRNA sense strand
ugaucauccuccagaguau

SEQ ID NO: 1666936 - RNA, 19 nt, Homo sapiens
  misc_RNA (1)...(19): siRNA sense strand
uaugcugccuacauuaaca

SEQ ID NO: 1666937 - RNA, 19 nt, Homo sapiens
  misc_RNA (1)...(19): siRNA sense strand
gauguucuacugaaauaac

SEQ ID NO: 1666938 - RNA, 19 nt, Homo sapiens
  misc_RNA (1)...(19): siRNA sense strand
agagacaucauuucagcuu

SEQ ID NO: 1666939 - RNA, 19 nt, Homo sapiens
  misc_RNA (1)...(19): siRNA sense strand
gaacgugauacucgcaaac

SEQ ID NO: 1666940 - RNA, 19 nt, Homo sapiens
  misc_RNA (1)...(19): siRNA sense strand
uuucagcuuuccauccauu

SEQ ID NO: 1666941 - RNA, 19 nt, Homo sapiens
  misc_RNA (1)...(19): siRNA sense strand
guccuuguuuggagagaga

SEQ ID NO: 1666942 - RNA, 19 nt, Homo sapiens
  misc_RNA (1)...(19): siRNA sense strand
gcaagugaacgugauacuc

SEQ ID NO: 1666943 - RNA, 19 nt, Homo sapiens
  misc_RNA (1)...(19): siRNA sense strand
cuacacuguuugucgagau

SEQ ID NO: 1666944 - RNA, 19 nt, Homo sapiens
  misc_RNA (1)...(19): siRNA sense strand
gaauuggcugacagaaaug

SEQ ID NO: 1666945 - RNA, 19 nt, Homo sapiens
  misc_RNA (1)...(19): siRNA sense strand
ugccuggauuucuuagauu

SEQ ID NO: 1666946 - RNA, 19 nt, Homo sapiens
  misc_RNA (1)...(19): siRNA sense strand
acugaaauaaccugugaaa

SEQ ID NO: 1666947 - RNA, 19 nt, Homo sapiens
  misc_RNA (1)...(19): siRNA sense strand
gagagagacaucauuucag

SEQ ID NO: 1666948 - RNA, 19 nt, Homo sapiens
  misc_RNA (1)...(19): siRNA sense strand
agaccuauguaacacaaac

SEQ ID NO: 1666949 - RNA, 19 nt, Homo sapiens
  misc_RNA (1)...(19): siRNA sense strand
gacauacugcuaguggaaa

SEQ ID NO: 1666950 - RNA, 19 nt, Homo sapiens
  misc_RNA (1)...(19): siRNA sense strand
guggagaaauauugaaccu

SEQ ID NO: 1666951 - RNA, 19 nt, Homo sapiens
  misc_RNA (1)...(19): siRNA sense strand
uuaaaggagaagcaaguga

SEQ ID NO: 1666952 - RNA, 19 nt, Homo sapiens
  misc_RNA (1)...(19): siRNA sense strand
uacacuguuugucgagauu

SEQ ID NO: 1666953 - RNA, 19 nt, Homo sapiens
  misc_RNA (1)...(19): siRNA sense strand
uugccuggauuucuuagau

SEQ ID NO: 1666954 - RNA, 19 nt, Homo sapiens
  misc_RNA (1)...(19): siRNA sense strand
uuggagagagacaucauuu

SEQ ID NO: 1666955 - RNA, 19 nt, Homo sapiens
  misc_RNA (1)...(19): siRNA sense strand
uguguugaaugcuuuacau

SEQ ID NO: 1666956 - RNA, 19 nt, Homo sapiens
  misc_RNA (1)...(19): siRNA sense strand
agagcucccacauguguuu

SEQ ID NO: 1666957 - RNA, 19 nt, Homo sapiens
  misc_RNA (1)...(19): siRNA sense strand
guggaaagaccuauguaac

SEQ ID NO: 1666958 - RNA, 19 nt, Homo sapiens
  misc_RNA (1)...(19): siRNA sense strand
acaagaauuggcugacaga

SEQ ID NO: 1666959 - RNA, 19 nt, Homo sapiens
  misc_RNA (1)...(19): siRNA sense strand
gaaauaaccugugaaacau

SEQ ID NO: 1666960 - RNA, 19 nt, Homo sapiens
  misc_RNA (1)...(19): siRNA sense strand
guauucagcugauuucuau

SEQ ID NO: 1666961 - RNA, 19 nt, Homo sapiens
  misc_RNA (1)...(19): siRNA sense strand
gaagaaagcuaugcagacu

SEQ ID NO: 1666962 - RNA, 19 nt, Homo sapiens
  misc_RNA (1)...(19): siRNA sense strand
ugaaauaaccugugaaaca

SEQ ID NO: 1666963 - RNA, 19 nt, Homo sapiens
  misc_RNA (1)...(19): siRNA sense strand
aaaugugacuguucucuuu

SEQ ID NO: 1666964 - RNA, 19 nt, Homo sapiens
  misc_RNA (1)...(19): siRNA sense strand
gaauuguguugaaugcuuu

SEQ ID NO: 1666965 - RNA, 19 nt, Homo sapiens
  misc_RNA (1)...(19): siRNA sense strand
agaauuggcugacagaaau

SEQ ID NO: 1666966 - RNA, 19 nt, Homo sapiens
  misc_RNA (1)...(19): siRNA sense strand
gaucagacuguauauauug

SEQ ID NO: 1666967 - RNA, 19 nt, Homo sapiens
  misc_RNA (1)...(19): siRNA sense strand
ugaaagagcucagacaucu

SEQ ID NO: 1666968 - RNA, 19 nt, Homo sapiens
  misc_RNA (1)...(19): siRNA sense strand
gaggauggauguucuacug

SEQ ID NO: 1666969 - RNA, 19 nt, Homo sapiens
  misc_RNA (1)...(19): siRNA sense strand
ggagagagacaucauuuca

SEQ ID NO: 1666970 - RNA, 19 nt, Homo sapiens
  misc_RNA (1)...(19): siRNA sense strand
cgcaaacuguggagaaaua

SEQ ID NO: 1666971 - RNA, 19 nt, Homo sapiens
  misc_RNA (1)...(19): siRNA sense strand
gggaaaagcuacagaaaga

SEQ ID NO: 1666972 - RNA, 19 nt, Homo sapiens
  misc_RNA (1)...(19): siRNA sense strand
ggauggauguucuacugaa

SEQ ID NO: 1666973 - RNA, 19 nt, Homo sapiens
  misc_RNA (1)...(19): siRNA sense strand
cuacugaaauaaccuguga

SEQ ID NO: 1666974 - RNA, 19 nt, Homo sapiens
  misc_RNA (1)...(19): siRNA sense strand
acagaaagaugacacagau

SEQ ID NO: 1666975 - RNA, 19 nt, Homo sapiens
  misc_RNA (1)...(19): siRNA sense strand
ugacuuuguucgcuuguuu

SEQ ID NO: 1666976 - RNA, 19 nt, Homo sapiens
  misc_RNA (1)...(19): siRNA sense strand
gaaccucauuugaagaaag

SEQ ID NO: 1666977 - RNA, 19 nt, Homo sapiens
  misc_RNA (1)...(19): siRNA sense strand
gccuggauuucuuagauua

SEQ ID NO: 1666978 - RNA, 19 nt, Homo sapiens
  misc_RNA (1)...(19): siRNA sense strand
gauauggaagcaaaucuuu

SEQ ID NO: 1666979 - RNA, 19 nt, Homo sapiens
  misc_RNA (1)...(19): siRNA sense strand
ggaaagaccuauguaacac

SEQ ID NO: 1666980 - RNA, 19 nt, Homo sapiens
  misc_RNA (1)...(19): siRNA sense strand
ugaaucaucuuaguucuuc

SEQ ID NO: 1666981 - RNA, 19 nt, Homo sapiens
  misc_RNA (1)...(19): siRNA sense strand
gauggauguucuacugaaa

SEQ ID NO: 1666982 - RNA, 19 nt, Homo sapiens
  misc_RNA (1)...(19): siRNA sense strand
gaagcaagugaacgugaua

SEQ ID NO: 1666983 - RNA, 19 nt, Homo sapiens
  misc_RNA (1)...(19): siRNA sense strand
uaacauucuucuuggaguu

SEQ ID NO: 1666984 - RNA, 19 nt, Homo sapiens
  misc_RNA (1)...(19): siRNA sense strand
gagacaucauuucagcuuu

SEQ ID NO: 1666985 - RNA, 19 nt, Homo sapiens
  misc_RNA (1)...(19): siRNA sense strand
uggauguucuacugaaaua

SEQ ID NO: 1666986 - RNA, 19 nt, Homo sapiens
  misc_RNA (1)...(19): siRNA sense strand
ugaauuguguugaaugcuu

SEQ ID NO: 1666987 - RNA, 19 nt, Homo sapiens
  misc_RNA (1)...(19): siRNA sense strand
agaaagcuaugcagacugu

SEQ ID NO: 1666988 - RNA, 19 nt, Homo sapiens
  misc_RNA (1)...(19): siRNA sense strand
gaaaugugacuguucucuu

SEQ ID NO: 1666989 - RNA, 19 nt, Homo sapiens
  misc_RNA (1)...(19): siRNA sense strand
uaaaggagaagcaagugaa

SEQ ID NO: 1666990 - RNA, 19 nt, Homo sapiens
  misc_RNA (1)...(19): siRNA sense strand
ucagggaaauaucaaguuc

SEQ ID NO: 1666991 - RNA, 19 nt, Homo sapiens
  misc_RNA (1)...(19): siRNA sense strand
caaguaaccacagcugaaa

SEQ ID NO: 1666992 - RNA, 19 nt, Homo sapiens
  misc_RNA (1)...(19): siRNA sense strand
aaagaccuauguaacacaa

SEQ ID NO: 1666993 - RNA, 19 nt, Homo sapiens
  misc_RNA (1)...(19): siRNA sense strand
cuuuagagcucccacaugu

SEQ ID NO: 1666994 - RNA, 19 nt, Homo sapiens
  misc_RNA (1)...(19): siRNA sense strand
aaacuguggagaaauauug

SEQ ID NO: 1666995 - RNA, 19 nt, Homo sapiens
  misc_RNA (1)...(19): siRNA sense strand
ggaguuuucuacacuguuu

SEQ ID NO: 1666996 - RNA, 19 nt, Homo sapiens
  misc_RNA (1)...(19): siRNA sense strand
uauugaaccucauuugaag

SEQ ID NO: 1666997 - RNA, 19 nt, Homo sapiens
  misc_RNA (1)...(19): siRNA sense strand
agacaucauuucagcuuuc

SEQ ID NO: 1666998 - RNA, 19 nt, Homo sapiens
  misc_RNA (1)...(19): siRNA sense strand
gaaagaccuauguaacaca

SEQ ID NO: 1666999 - RNA, 19 nt, Homo sapiens
  misc_RNA (1)...(19): siRNA sense strand
uuucuaugcugccuacauu

SEQ ID NO: 1667000 - RNA, 19 nt, Homo sapiens
  misc_RNA (1)...(19): siRNA sense strand
cagcauaggcaaccuucaa

SEQ ID NO: 1667001 - RNA, 19 nt, Homo sapiens
  misc_RNA (1)...(19): siRNA sense strand
caucuggcaguacuuaauu

SEQ ID NO: 1667002 - RNA, 19 nt, Homo sapiens
  misc_RNA (1)...(19): siRNA sense strand
agacaucuggcaguacuua

SEQ ID NO: 1667003 - RNA, 19 nt, Homo sapiens
  misc_RNA (1)...(19): siRNA sense strand
cagaguauucagcugauuu

SEQ ID NO: 1667004 - RNA, 19 nt, Homo sapiens
  misc_RNA (1)...(19): siRNA sense strand
aagcuaugcagacuguuua

SEQ ID NO: 1667005 - RNA, 19 nt, Homo sapiens
  misc_RNA (1)...(19): siRNA sense strand
uggaaagaccuauguaaca

SEQ ID NO: 1667006 - RNA, 19 nt, Homo sapiens
  misc_RNA (1)...(19): siRNA sense strand
caucuugcaguccuuguuu

SEQ ID NO: 1667007 - RNA, 19 nt, Homo sapiens
  misc_RNA (1)...(19): siRNA sense strand
cagacuguauauauuguuc

SEQ ID NO: 1667008 - RNA, 19 nt, Homo sapiens
  misc_RNA (1)...(19): siRNA sense strand
gaaaagcuacagaaagaug

SEQ ID NO: 1667009 - RNA, 19 nt, Homo sapiens
  misc_RNA (1)...(19): siRNA sense strand
guuugugaauuguguugaa

SEQ ID NO: 1667010 - RNA, 19 nt, Homo sapiens
  misc_RNA (1)...(19): siRNA sense strand
aaagcuaugcagacuguuu

SEQ ID NO: 1667011 - RNA, 19 nt, Homo sapiens
  misc_RNA (1)...(19): siRNA sense strand
gagaaauauugaaccucau

SEQ ID NO: 1667012 - RNA, 19 nt, Homo sapiens
  misc_RNA (1)...(19): siRNA sense strand
ugucuuauauuucccugau

SEQ ID NO: 1667013 - RNA, 19 nt, Homo sapiens
  misc_RNA (1)...(19): siRNA sense strand
acaaguaaccacagcugaa

SEQ ID NO: 1667014 - RNA, 19 nt, Homo sapiens
  misc_RNA (1)...(19): siRNA sense strand
uugagccguuugucuuaua

SEQ ID NO: 1667015 - RNA, 19 nt, Homo sapiens
  misc_RNA (1)...(19): siRNA sense strand
gcuuugagccguuugucuu

SEQ ID NO: 1667016 - RNA, 19 nt, Homo sapiens
  misc_RNA (1)...(19): siRNA sense strand
aagaauuggcugacagaaa

SEQ ID NO: 1667017 - RNA, 19 nt, Homo sapiens
  misc_RNA (1)...(19): siRNA sense strand
gaaauuguuugggaaaagu

SEQ ID NO: 1667018 - RNA, 19 nt, Homo sapiens
  misc_RNA (1)...(19): siRNA sense strand
caaacuguggagaaauauu

SEQ ID NO: 1667019 - RNA, 19 nt, Homo sapiens
  misc_RNA (1)...(19): siRNA sense strand
gcaaacuguggagaaauau

SEQ ID NO: 1667020 - RNA, 19 nt, Homo sapiens
  misc_RNA (1)...(19): siRNA sense strand
ucuaugcugccuacauuaa

SEQ ID NO: 1667021 - RNA, 19 nt, Homo sapiens
  misc_RNA (1)...(19): siRNA sense strand
aaaagauccugucccauga

SEQ ID NO: 1667022 - RNA, 19 nt, Homo sapiens
  misc_RNA (1)...(19): siRNA sense strand
agccguuugucuuauauuu

SEQ ID NO: 1667023 - RNA, 19 nt, Homo sapiens
  misc_RNA (1)...(19): siRNA sense strand
uuuguucgcuuguuuaaac

SEQ ID NO: 1667024 - RNA, 19 nt, Homo sapiens
  misc_RNA (1)...(19): siRNA sense strand
ugaacgugauacucgcaaa

SEQ ID NO: 1667025 - RNA, 19 nt, Homo sapiens
  misc_RNA (1)...(19): siRNA sense strand
cauuaacauucuucuugga

SEQ ID NO: 1667026 - RNA, 19 nt, Homo sapiens
  misc_RNA (1)...(19): siRNA sense strand
ccagaguauucagcugauu

SEQ ID NO: 1667027 - RNA, 19 nt, Homo sapiens
  misc_RNA (1)...(19): siRNA sense strand
uuacaagaauuggcugaca

SEQ ID NO: 1667028 - RNA, 19 nt, Homo sapiens
  misc_RNA (1)...(19): siRNA sense strand
gaucauccuccagaguauu

SEQ ID NO: 1667029 - RNA, 19 nt, Homo sapiens
  misc_RNA (1)...(19): siRNA sense strand
cauuucagcuuuccaucca

SEQ ID NO: 1667030 - RNA, 19 nt, Homo sapiens
  misc_RNA (1)...(19): siRNA sense strand
agaagcaagugaacgugau

SEQ ID NO: 1667031 - RNA, 19 nt, Homo sapiens
  misc_RNA (1)...(19): siRNA sense strand
gacuuuguucgcuuguuua

SEQ ID NO: 1667032 - RNA, 19 nt, Homo sapiens
  misc_RNA (1)...(19): siRNA sense strand
ugagccguuugucuuauau

SEQ ID NO: 1667033 - RNA, 19 nt, Homo sapiens
  misc_RNA (1)...(19): siRNA sense strand
gguuaaaggagaagcaagu

SEQ ID NO: 1667034 - RNA, 19 nt, Homo sapiens
  misc_RNA (1)...(19): siRNA sense strand
uuagagcucccacaugugu

SEQ ID NO: 1667035 - RNA, 19 nt, Homo sapiens
  misc_RNA (1)...(19): siRNA sense strand
ugaucauccuccagaguau

SEQ ID NO: 1667036 - RNA, 19 nt, Homo sapiens
  misc_RNA (1)...(19): siRNA sense strand
uaugcugccuacauuaaca

SEQ ID NO: 1667037 - RNA, 19 nt, Homo sapiens
  misc_RNA (1)...(19): siRNA sense strand
gauguucuacugaaauaac

SEQ ID NO: 1667038 - RNA, 19 nt, Homo sapiens
  misc_RNA (1)...(19): siRNA sense strand
agagacaucauuucagcuu

SEQ ID NO: 1667039 - RNA, 19 nt, Homo sapiens
  misc_RNA (1)...(19): siRNA sense strand
gaacgugauacucgcaaac

SEQ ID NO: 1667040 - RNA, 19 nt, Homo sapiens
  misc_RNA (1)...(19): siRNA sense strand
uuucagcuuuccauccauu

SEQ ID NO: 1667041 - RNA, 19 nt, Homo sapiens
  misc_RNA (1)...(19): siRNA sense strand
guccuuguuuggagagaga

SEQ ID NO: 1667042 - RNA, 19 nt, Homo sapiens
  misc_RNA (1)...(19): siRNA sense strand
gcaagugaacgugauacuc

SEQ ID NO: 1667043 - RNA, 19 nt, Homo sapiens
  misc_RNA (1)...(19): siRNA sense strand
cuacacuguuugucgagau

SEQ ID NO: 1667044 - RNA, 19 nt, Homo sapiens
  misc_RNA (1)...(19): siRNA sense strand
gaauuggcugacagaaaug

SEQ ID NO: 1667045 - RNA, 19 nt, Homo sapiens
  misc_RNA (1)...(19): siRNA sense strand
ugccuggauuucuuagauu

SEQ ID NO: 1667046 - RNA, 19 nt, Homo sapiens
  misc_RNA (1)...(19): siRNA sense strand
acugaaauaaccugugaaa

SEQ ID NO: 1667047 - RNA, 19 nt, Homo sapiens
  misc_RNA (1)...(19): siRNA sense strand
gagagagacaucauuucag

SEQ ID NO: 1667048 - RNA, 19 nt, Homo sapiens
  misc_RNA (1)...(19): siRNA sense strand
agaccuauguaacacaaac

SEQ ID NO: 1667049 - RNA, 19 nt, Homo sapiens
  misc_RNA (1)...(19): siRNA sense strand
gacauacugcuaguggaaa

SEQ ID NO: 1667050 - RNA, 19 nt, Homo sapiens
  misc_RNA (1)...(19): siRNA sense strand
guggagaaauauugaaccu

SEQ ID NO: 1667051 - RNA, 19 nt, Homo sapiens
  misc_RNA (1)...(19): siRNA sense strand
uuaaaggagaagcaaguga

SEQ ID NO: 1667052 - RNA, 19 nt, Homo sapiens
  misc_RNA (1)...(19): siRNA sense strand
uacacuguuugucgagauu

SEQ ID NO: 1667053 - RNA, 19 nt, Homo sapiens
  misc_RNA (1)...(19): siRNA sense strand
uugccuggauuucuuagau

SEQ ID NO: 1667054 - RNA, 19 nt, Homo sapiens
  misc_RNA (1)...(19): siRNA sense strand
uuggagagagacaucauuu

SEQ ID NO: 1667055 - RNA, 19 nt, Homo sapiens
  misc_RNA (1)...(19): siRNA sense strand
uguguugaaugcuuuacau

SEQ ID NO: 1667056 - RNA, 19 nt, Homo sapiens
  misc_RNA (1)...(19): siRNA sense strand
agagcucccacauguguuu

SEQ ID NO: 1667057 - RNA, 19 nt, Homo sapiens
  misc_RNA (1)...(19): siRNA sense strand
guggaaagaccuauguaac

SEQ ID NO: 1667058 - RNA, 19 nt, Homo sapiens
  misc_RNA (1)...(19): siRNA sense strand
acaagaauuggcugacaga

SEQ ID NO: 1667059 - RNA, 19 nt, Homo sapiens
  misc_RNA (1)...(19): siRNA sense strand
ccugaucaauuucguauuu

SEQ ID NO: 1667060 - RNA, 19 nt, Homo sapiens
  misc_RNA (1)...(19): siRNA sense strand
gcaagugccucuuccucuu

SEQ ID NO: 1667061 - RNA, 19 nt, Homo sapiens
  misc_RNA (1)...(19): siRNA sense strand
gagaaugcuuggagaaugg

SEQ ID NO: 1667062 - RNA, 19 nt, Homo sapiens
  misc_RNA (1)...(19): siRNA sense strand
ucggcaagcucuacuauga

SEQ ID NO: 1667063 - RNA, 19 nt, Homo sapiens
  misc_RNA (1)...(19): siRNA sense strand
ggaaguaugaccugcacua

SEQ ID NO: 1667064 - RNA, 19 nt, Homo sapiens
  misc_RNA (1)...(19): siRNA sense strand
ccucaaagaucaacuacuc

SEQ ID NO: 1667065 - RNA, 19 nt, Homo sapiens
  misc_RNA (1)...(19): siRNA sense strand
gaaugaacagugcugguuu

SEQ ID NO: 1667066 - RNA, 19 nt, Homo sapiens
  misc_RNA (1)...(19): siRNA sense strand
gcacacggccauugucaug

SEQ ID NO: 1667067 - RNA, 19 nt, Homo sapiens
  misc_RNA (1)...(19): siRNA sense strand
ggcaagcucuacuaugaga

SEQ ID NO: 1667068 - RNA, 19 nt, Homo sapiens
  misc_RNA (1)...(19): siRNA sense strand
ucaccaccaucuucaacua

SEQ ID NO: 1667069 - RNA, 19 nt, Homo sapiens
  misc_RNA (1)...(19): siRNA sense strand
ggacgugggccucaaagau

SEQ ID NO: 1667070 - RNA, 19 nt, Homo sapiens
  misc_RNA (1)...(19): siRNA sense strand
cgagaaugcuuggagaaug

SEQ ID NO: 1667071 - RNA, 19 nt, Homo sapiens
  misc_RNA (1)...(19): siRNA sense strand
gcagcucguugaccaugaa

SEQ ID NO: 1667072 - RNA, 19 nt, Homo sapiens
  misc_RNA (1)...(19): siRNA sense strand
gaucaacuacucacagugu

SEQ ID NO: 1667073 - RNA, 19 nt, Homo sapiens
  misc_RNA (1)...(19): siRNA sense strand
gauccuaaugacaaaguua

SEQ ID NO: 1667074 - RNA, 19 nt, Homo sapiens
  misc_RNA (1)...(19): siRNA sense strand
gcucuacuaugagaaugaa

SEQ ID NO: 1667075 - RNA, 19 nt, Homo sapiens
  misc_RNA (1)...(19): siRNA sense strand
ucaccuacaugcucuucuu

SEQ ID NO: 1667076 - RNA, 19 nt, Homo sapiens
  misc_RNA (1)...(19): siRNA sense strand
cggaaugccuaucgagaau

SEQ ID NO: 1667077 - RNA, 19 nt, Homo sapiens
  misc_RNA (1)...(19): siRNA sense strand
ucaggauccuaaugacaaa

SEQ ID NO: 1667078 - RNA, 19 nt, Homo sapiens
  misc_RNA (1)...(19): siRNA sense strand
acaagcagaggaaguauga

SEQ ID NO: 1667079 - RNA, 19 nt, Homo sapiens
  misc_RNA (1)...(19): siRNA sense strand
gaagugcacgagagcaaug

SEQ ID NO: 1667080 - RNA, 19 nt, Homo sapiens
  misc_RNA (1)...(19): siRNA sense strand
gaaugccuaucgagaaugc

SEQ ID NO: 1667081 - RNA, 19 nt, Homo sapiens
  misc_RNA (1)...(19): siRNA sense strand
caacuucuucuggauguuu

SEQ ID NO: 1667082 - RNA, 19 nt, Homo sapiens
  misc_RNA (1)...(19): siRNA sense strand
ucaacggcgucaaguacaa

SEQ ID NO: 1667083 - RNA, 19 nt, Homo sapiens
  misc_RNA (1)...(19): siRNA sense strand
gaucauguucaucuauuuc

SEQ ID NO: 1667084 - RNA, 19 nt, Homo sapiens
  misc_RNA (1)...(19): siRNA sense strand
gaaccucaucaccaccuuu

SEQ ID NO: 1667085 - RNA, 19 nt, Homo sapiens
  misc_RNA (1)...(19): siRNA sense strand
cauccgagacaauccagua

SEQ ID NO: 1667086 - RNA, 19 nt, Homo sapiens
  misc_RNA (1)...(19): siRNA sense strand
aaugaacagugcugguuug

SEQ ID NO: 1667087 - RNA, 19 nt, Homo sapiens
  misc_RNA (1)...(19): siRNA sense strand
ugucacagaucauguucau

SEQ ID NO: 1667088 - RNA, 19 nt, Homo sapiens
  misc_RNA (1)...(19): siRNA sense strand
gcaucgcccuugucgucaa

SEQ ID NO: 1667089 - RNA, 19 nt, Homo sapiens
  misc_RNA (1)...(19): siRNA sense strand
ccaccuuuauccugcgaaa

SEQ ID NO: 1667090 - RNA, 19 nt, Homo sapiens
  misc_RNA (1)...(19): siRNA sense strand
ugcgaaaugucaugugguu

SEQ ID NO: 1667091 - RNA, 19 nt, Homo sapiens
  misc_RNA (1)...(19): siRNA sense strand
ugaccaacuucuucuggau

SEQ ID NO: 1667092 - RNA, 19 nt, Homo sapiens
  misc_RNA (1)...(19): siRNA sense strand
ggauccuaaugacaaaguu

SEQ ID NO: 1667093 - RNA, 19 nt, Homo sapiens
  misc_RNA (1)...(19): siRNA sense strand
caacaucgucaggauccua

SEQ ID NO: 1667094 - RNA, 19 nt, Homo sapiens
  misc_RNA (1)...(19): siRNA sense strand
gacgugggccucaaagauc

SEQ ID NO: 1667095 - RNA, 19 nt, Homo sapiens
  misc_RNA (1)...(19): siRNA sense strand
aagaucaacuacucacagu

SEQ ID NO: 1667096 - RNA, 19 nt, Homo sapiens
  misc_RNA (1)...(19): siRNA sense strand
ggaaccucaucaccaccuu

SEQ ID NO: 1667097 - RNA, 19 nt, Homo sapiens
  misc_RNA (1)...(19): siRNA sense strand
caagcucuacuaugagaau

SEQ ID NO: 1667098 - RNA, 19 nt, Homo sapiens
  misc_RNA (1)...(19): siRNA sense strand
guacaacacgacccggaau

SEQ ID NO: 1667099 - RNA, 19 nt, Homo sapiens
  misc_RNA (1)...(19): siRNA sense strand
guacuucaacggcgucaag

SEQ ID NO: 1667100 - RNA, 19 nt, Homo sapiens
  misc_RNA (1)...(19): siRNA sense strand
cuucgugucugucuucuac

SEQ ID NO: 1667101 - RNA, 19 nt, Homo sapiens
  misc_RNA (1)...(19): siRNA sense strand
guacaggaaggcagugaag

SEQ ID NO: 1667102 - RNA, 19 nt, Homo sapiens
  misc_RNA (1)...(19): siRNA sense strand
gcucguugaccaugaagug

SEQ ID NO: 1667103 - RNA, 19 nt, Homo sapiens
  misc_RNA (1)...(19): siRNA sense strand
ccaccaucuucaacuacuu

SEQ ID NO: 1667104 - RNA, 19 nt, Homo sapiens
  misc_RNA (1)...(19): siRNA sense strand
caauuucguauuucuguuc

SEQ ID NO: 1667105 - RNA, 19 nt, Homo sapiens
  misc_RNA (1)...(19): siRNA sense strand
aaccucaucaccaccuuua

SEQ ID NO: 1667106 - RNA, 19 nt, Homo sapiens
  misc_RNA (1)...(19): siRNA sense strand
agacaauccaguacaggaa

SEQ ID NO: 1667107 - RNA, 19 nt, Homo sapiens
  misc_RNA (1)...(19): siRNA sense strand
gaaguaugaccugcacuac

SEQ ID NO: 1667108 - RNA, 19 nt, Homo sapiens
  misc_RNA (1)...(19): siRNA sense strand
ugcagucguuccaggguuu

SEQ ID NO: 1667109 - RNA, 19 nt, Homo sapiens
  misc_RNA (1)...(19): siRNA sense strand
ccggaaugccuaucgagaa

SEQ ID NO: 1667110 - RNA, 19 nt, Homo sapiens
  misc_RNA (1)...(19): siRNA sense strand
cuggcgaccugguggacua

SEQ ID NO: 1667111 - RNA, 19 nt, Homo sapiens
  misc_RNA (1)...(19): siRNA sense strand
agaaugaacagugcugguu

SEQ ID NO: 1667112 - RNA, 19 nt, Homo sapiens
  misc_RNA (1)...(19): siRNA sense strand
caagugccucuuccucuuc

SEQ ID NO: 1667113 - RNA, 19 nt, Homo sapiens
  misc_RNA (1)...(19): siRNA sense strand
gggccucaaagaucaacua

SEQ ID NO: 1667114 - RNA, 19 nt, Homo sapiens
  misc_RNA (1)...(19): siRNA sense strand
gacaagcagaggaaguaug

SEQ ID NO: 1667115 - RNA, 19 nt, Homo sapiens
  misc_RNA (1)...(19): siRNA sense strand
ucaucuauuucaacuccuu

SEQ ID NO: 1667116 - RNA, 19 nt, Homo sapiens
  misc_RNA (1)...(19): siRNA sense strand
gaucaauuucguauuucug

SEQ ID NO: 1667117 - RNA, 19 nt, Homo sapiens
  misc_RNA (1)...(19): siRNA sense strand
ucgugcuccugaucaauuu

SEQ ID NO: 1667118 - RNA, 19 nt, Homo sapiens
  misc_RNA (1)...(19): siRNA sense strand
gaaaugucaugugguuccu

SEQ ID NO: 1667119 - RNA, 19 nt, Homo sapiens
  misc_RNA (1)...(19): siRNA sense strand
gaugacaagcagaggaagu

SEQ ID NO: 1667120 - RNA, 19 nt, Homo sapiens
  misc_RNA (1)...(19): siRNA sense strand
caucggcaagcucuacuau

SEQ ID NO: 1667121 - RNA, 19 nt, Homo sapiens
  misc_RNA (1)...(19): siRNA sense strand
caaagaucaacuacucaca

SEQ ID NO: 1667122 - RNA, 19 nt, Homo sapiens
  misc_RNA (1)...(19): siRNA sense strand
gacccggaaugccuaucga

SEQ ID NO: 1667123 - RNA, 19 nt, Homo sapiens
  misc_RNA (1)...(19): siRNA sense strand
acacgaccuuggaccagau

SEQ ID NO: 1667124 - RNA, 19 nt, Homo sapiens
  misc_RNA (1)...(19): siRNA sense strand
ccacacggaucagcuucca

SEQ ID NO: 1667125 - RNA, 19 nt, Homo sapiens
  misc_RNA (1)...(19): siRNA sense strand
ccucaucaccaccuuuauc

SEQ ID NO: 1667126 - RNA, 19 nt, Homo sapiens
  misc_RNA (1)...(19): siRNA sense strand
ggaaugccuaucgagaaug

SEQ ID NO: 1667127 - RNA, 19 nt, Homo sapiens
  misc_RNA (1)...(19): siRNA sense strand
gcgcagagcucaaggacua

SEQ ID NO: 1667128 - RNA, 19 nt, Homo sapiens
  misc_RNA (1)...(19): siRNA sense strand
gagaagaccacccgaagaa

SEQ ID NO: 1667129 - RNA, 19 nt, Homo sapiens
  misc_RNA (1)...(19): siRNA sense strand
ucagcgagaucaacaaguu

SEQ ID NO: 1667130 - RNA, 19 nt, Homo sapiens
  misc_RNA (1)...(19): siRNA sense strand
gcagggacccguugaacaa

SEQ ID NO: 1667131 - RNA, 19 nt, Homo sapiens
  misc_RNA (1)...(19): siRNA sense strand
ggccauggcucaucaccaa

SEQ ID NO: 1667132 - RNA, 19 nt, Homo sapiens
  misc_RNA (1)...(19): siRNA sense strand
gaagaccacccgaagaaug

SEQ ID NO: 1667133 - RNA, 19 nt, Homo sapiens
  misc_RNA (1)...(19): siRNA sense strand
cagagaagguccacgugaa

SEQ ID NO: 1667134 - RNA, 19 nt, Homo sapiens
  misc_RNA (1)...(19): siRNA sense strand
gcuuugagcuggagaaguc

SEQ ID NO: 1667135 - RNA, 19 nt, Homo sapiens
  misc_RNA (1)...(19): siRNA sense strand
ucagauaugaugacuauga

SEQ ID NO: 1667136 - RNA, 19 nt, Homo sapiens
  misc_RNA (1)...(19): siRNA sense strand
gcagggccaucuggaacua

SEQ ID NO: 1667137 - RNA, 19 nt, Homo sapiens
  misc_RNA (1)...(19): siRNA sense strand
ucaagacaguggccugcua

SEQ ID NO: 1667138 - RNA, 19 nt, Homo sapiens
  misc_RNA (1)...(19): siRNA sense strand
ccuauagccucaccuacaa

SEQ ID NO: 1667139 - RNA, 19 nt, Homo sapiens
  misc_RNA (1)...(19): siRNA sense strand
gcaagccgcucugcuguac

SEQ ID NO: 1667140 - RNA, 19 nt, Homo sapiens
  misc_RNA (1)...(19): siRNA sense strand
ccacuacauugccaucaug

SEQ ID NO: 1667141 - RNA, 19 nt, Homo sapiens
  misc_RNA (1)...(19): siRNA sense strand
gagaagcugcgcaaacuca

SEQ ID NO: 1667142 - RNA, 19 nt, Homo sapiens
  misc_RNA (1)...(19): siRNA sense strand
gcucuccuccuucguguuu

SEQ ID NO: 1667143 - RNA, 19 nt, Homo sapiens
  misc_RNA (1)...(19): siRNA sense strand
gauguccucugggcgagua

SEQ ID NO: 1667144 - RNA, 19 nt, Homo sapiens
  misc_RNA (1)...(19): siRNA sense strand
ggagauggagagccgcuuu

SEQ ID NO: 1667145 - RNA, 19 nt, Homo sapiens
  misc_RNA (1)...(19): siRNA sense strand
gaagguccacgugaacuug

SEQ ID NO: 1667146 - RNA, 19 nt, Homo sapiens
  misc_RNA (1)...(19): siRNA sense strand
ccugcacccugacuacuuu

SEQ ID NO: 1667147 - RNA, 19 nt, Homo sapiens
  misc_RNA (1)...(19): siRNA sense strand
cagauaugaugacuaugau

SEQ ID NO: 1667148 - RNA, 19 nt, Homo sapiens
  misc_RNA (1)...(19): siRNA sense strand
caucggccauggcucauca

SEQ ID NO: 1667149 - RNA, 19 nt, Homo sapiens
  misc_RNA (1)...(19): siRNA sense strand
gccacucgcucuccuccuu

SEQ ID NO: 1667150 - RNA, 19 nt, Homo sapiens
  misc_RNA (1)...(19): siRNA sense strand
gccaucacccgcuacauga

SEQ ID NO: 1667151 - RNA, 19 nt, Homo sapiens
  misc_RNA (1)...(19): siRNA sense strand
ccgagaagcugcgcaaacu

SEQ ID NO: 1667152 - RNA, 19 nt, Homo sapiens
  misc_RNA (1)...(19): siRNA sense strand
uauagccucaccuacaaua

SEQ ID NO: 1667153 - RNA, 19 nt, Homo sapiens
  misc_RNA (1)...(19): siRNA sense strand
ggacgucccaggaggagau

SEQ ID NO: 1667154 - RNA, 19 nt, Homo sapiens
  misc_RNA (1)...(19): siRNA sense strand
gcucccacauggccgaguu

SEQ ID NO: 1667155 - RNA, 19 nt, Homo sapiens
  misc_RNA (1)...(19): siRNA sense strand
ccagacaugcugugcuuug

SEQ ID NO: 1667156 - RNA, 19 nt, Homo sapiens
  misc_RNA (1)...(19): siRNA sense strand
cucaaggucuauaucaaga

SEQ ID NO: 1667157 - RNA, 19 nt, Homo sapiens
  misc_RNA (1)...(19): siRNA sense strand
cuauauccacugcgucuuu

SEQ ID NO: 1667158 - RNA, 19 nt, Homo sapiens
  misc_RNA (1)...(19): siRNA sense strand
gaauguacaaccucuucug

SEQ ID NO: 1667159 - RNA, 19 nt, Homo sapiens
  misc_RNA (1)...(19): siRNA sense strand
ccacauggccgaguuucug

SEQ ID NO: 1667160 - RNA, 19 nt, Homo sapiens
  misc_RNA (1)...(19): siRNA sense strand
aaacucagcgagaucaaca

SEQ ID NO: 1667161 - RNA, 19 nt, Homo sapiens
  misc_RNA (1)...(19): siRNA sense strand
uauauccacugcgucuuug

SEQ ID NO: 1667162 - RNA, 19 nt, Homo sapiens
  misc_RNA (1)...(19): siRNA sense strand
agacccuacuuucggauau

SEQ ID NO: 1667163 - RNA, 19 nt, Homo sapiens
  misc_RNA (1)...(19): siRNA sense strand
agggccaucuggaacuaua

SEQ ID NO: 1667164 - RNA, 19 nt, Homo sapiens
  misc_RNA (1)...(19): siRNA sense strand
acaauaccaucgccaugca

SEQ ID NO: 1667165 - RNA, 19 nt, Homo sapiens
  misc_RNA (1)...(19): siRNA sense strand
gagauggagagccgcuuug

SEQ ID NO: 1667166 - RNA, 19 nt, Homo sapiens
  misc_RNA (1)...(19): siRNA sense strand
gcugcuggaugagaaguuc

SEQ ID NO: 1667167 - RNA, 19 nt, Homo sapiens
  misc_RNA (1)...(19): siRNA sense strand
gacccuacuuucggauaug

SEQ ID NO: 1667168 - RNA, 19 nt, Homo sapiens
  misc_RNA (1)...(19): siRNA sense strand
cagacaugcugugcuuugu

SEQ ID NO: 1667169 - RNA, 19 nt, Homo sapiens
  misc_RNA (1)...(19): siRNA sense strand
caaccuggcaguggugaug

SEQ ID NO: 1667170 - RNA, 19 nt, Homo sapiens
  misc_RNA (1)...(19): siRNA sense strand
gccuauagccucaccuaca

SEQ ID NO: 1667171 - RNA, 19 nt, Homo sapiens
  misc_RNA (1)...(19): siRNA sense strand
gccacuacauugccaucau

SEQ ID NO: 1667172 - RNA, 19 nt, Homo sapiens
  misc_RNA (1)...(19): siRNA sense strand
gcaaacucagcgagaucaa

SEQ ID NO: 1667173 - RNA, 19 nt, Homo sapiens
  misc_RNA (1)...(19): siRNA sense strand
agagaagaccacccgaaga

SEQ ID NO: 1667174 - RNA, 19 nt, Homo sapiens
  misc_RNA (1)...(19): siRNA sense strand
acccagacaugcugugcuu

SEQ ID NO: 1667175 - RNA, 19 nt, Homo sapiens
  misc_RNA (1)...(19): siRNA sense strand
auccaggccuugcugaaga

SEQ ID NO: 1667176 - RNA, 19 nt, Homo sapiens
  misc_RNA (1)...(19): siRNA sense strand
ccugguaggcucccacaug

SEQ ID NO: 1667177 - RNA, 19 nt, Homo sapiens
  misc_RNA (1)...(19): siRNA sense strand
gagcuggagaagucagaga

SEQ ID NO: 1667178 - RNA, 19 nt, Homo sapiens
  misc_RNA (1)...(19): siRNA sense strand
caagcagggacccguugaa

SEQ ID NO: 1667179 - RNA, 19 nt, Homo sapiens
  misc_RNA (1)...(19): siRNA sense strand
gcgcaaacucagcgagauc

SEQ ID NO: 1667180 - RNA, 19 nt, Homo sapiens
  misc_RNA (1)...(19): siRNA sense strand
ccucaaggucuauaucaag

SEQ ID NO: 1667181 - RNA, 19 nt, Homo sapiens
  misc_RNA (1)...(19): siRNA sense strand
cagccuauagccucaccua

SEQ ID NO: 1667182 - RNA, 19 nt, Homo sapiens
  misc_RNA (1)...(19): siRNA sense strand
gggaagaccauggcuacuc

SEQ ID NO: 1667183 - RNA, 19 nt, Homo sapiens
  misc_RNA (1)...(19): siRNA sense strand
ccaagcagggacccguuga

SEQ ID NO: 1667184 - RNA, 19 nt, Homo sapiens
  misc_RNA (1)...(19): siRNA sense strand
gauuaauccucacauguua

SEQ ID NO: 1667185 - RNA, 19 nt, Homo sapiens
  misc_RNA (1)...(19): siRNA sense strand
gaaauugacccuaauacuu

SEQ ID NO: 1667186 - RNA, 19 nt, Homo sapiens
  misc_RNA (1)...(19): siRNA sense strand
gcugagaaauugacccuaa

SEQ ID NO: 1667187 - RNA, 19 nt, Homo sapiens
  misc_RNA (1)...(19): siRNA sense strand
gaugagaucuccaggaaag

SEQ ID NO: 1667188 - RNA, 19 nt, Homo sapiens
  misc_RNA (1)...(19): siRNA sense strand
ucacaaggcuaguucgaaa

SEQ ID NO: 1667189 - RNA, 19 nt, Homo sapiens
  misc_RNA (1)...(19): siRNA sense strand
gaagaaacaaguaaggaaa

SEQ ID NO: 1667190 - RNA, 19 nt, Homo sapiens
  misc_RNA (1)...(19): siRNA sense strand
gaaaacagcugcaucuugu

SEQ ID NO: 1667191 - RNA, 19 nt, Homo sapiens
  misc_RNA (1)...(19): siRNA sense strand
guaaggaaauggaagugaa

SEQ ID NO: 1667192 - RNA, 19 nt, Homo sapiens
  misc_RNA (1)...(19): siRNA sense strand
gagguuugcugagaaauug

SEQ ID NO: 1667193 - RNA, 19 nt, Homo sapiens
  misc_RNA (1)...(19): siRNA sense strand
gaaaggacaggccuacaga

SEQ ID NO: 1667194 - RNA, 19 nt, Homo sapiens
  misc_RNA (1)...(19): siRNA sense strand
ggaauggccaucagaauca

SEQ ID NO: 1667195 - RNA, 19 nt, Homo sapiens
  misc_RNA (1)...(19): siRNA sense strand
uaaaccauaucgcccaauu

SEQ ID NO: 1667196 - RNA, 19 nt, Homo sapiens
  misc_RNA (1)...(19): siRNA sense strand
uaccagauuucagaacuua

SEQ ID NO: 1667197 - RNA, 19 nt, Homo sapiens
  misc_RNA (1)...(19): siRNA sense strand
gaccugggcuugccaaagg

SEQ ID NO: 1667198 - RNA, 19 nt, Homo sapiens
  misc_RNA (1)...(19): siRNA sense strand
ccagauuucagaacuuaua

SEQ ID NO: 1667199 - RNA, 19 nt, Homo sapiens
  misc_RNA (1)...(19): siRNA sense strand
ugaaauugcugccguuguc

SEQ ID NO: 1667200 - RNA, 19 nt, Homo sapiens
  misc_RNA (1)...(19): siRNA sense strand
ugagagguuugcugagaaa

SEQ ID NO: 1667201 - RNA, 19 nt, Homo sapiens
  misc_RNA (1)...(19): siRNA sense strand
gagaucuccaggaaaguua

SEQ ID NO: 1667202 - RNA, 19 nt, Homo sapiens
  misc_RNA (1)...(19): siRNA sense strand
guugagagguuugcugaga

SEQ ID NO: 1667203 - RNA, 19 nt, Homo sapiens
  misc_RNA (1)...(19): siRNA sense strand
gaggugugcugucgguaug

SEQ ID NO: 1667204 - RNA, 19 nt, Homo sapiens
  misc_RNA (1)...(19): siRNA sense strand
guaccagauuucagaacuu

SEQ ID NO: 1667205 - RNA, 19 nt, Homo sapiens
  misc_RNA (1)...(19): siRNA sense strand
ugagaaauugacccuaaua

SEQ ID NO: 1667206 - RNA, 19 nt, Homo sapiens
  misc_RNA (1)...(19): siRNA sense strand
aggaugagaucuccaggaa

SEQ ID NO: 1667207 - RNA, 19 nt, Homo sapiens
  misc_RNA (1)...(19): siRNA sense strand
aaauugacccuaauacuuc

SEQ ID NO: 1667208 - RNA, 19 nt, Homo sapiens
  misc_RNA (1)...(19): siRNA sense strand
gagaguugauccugauguc

SEQ ID NO: 1667209 - RNA, 19 nt, Homo sapiens
  misc_RNA (1)...(19): siRNA sense strand
ugaagaaacaaguaaggaa

SEQ ID NO: 1667210 - RNA, 19 nt, Homo sapiens
  misc_RNA (1)...(19): siRNA sense strand
gggaauggccaucagaauc

SEQ ID NO: 1667211 - RNA, 19 nt, Homo sapiens
  misc_RNA (1)...(19): siRNA sense strand
agaaacaaguaaggaaaug

SEQ ID NO: 1667212 - RNA, 19 nt, Homo sapiens
  misc_RNA (1)...(19): siRNA sense strand
cagaugaagaaacaaguaa

SEQ ID NO: 1667213 - RNA, 19 nt, Homo sapiens
  misc_RNA (1)...(19): siRNA sense strand
ucacuauccuccuccuguu

SEQ ID NO: 1667214 - RNA, 19 nt, Homo sapiens
  misc_RNA (1)...(19): siRNA sense strand
aaacagcugcaucuuguau

SEQ ID NO: 1667215 - RNA, 19 nt, Homo sapiens
  misc_RNA (1)...(19): siRNA sense strand
uaaggaaauggaagugaaa

SEQ ID NO: 1667216 - RNA, 19 nt, Homo sapiens
  misc_RNA (1)...(19): siRNA sense strand
aagaugagaacaaggauga

SEQ ID NO: 1667217 - RNA, 19 nt, Homo sapiens
  misc_RNA (1)...(19): siRNA sense strand
ucagaugaagaaacaagua

SEQ ID NO: 1667218 - RNA, 19 nt, Homo sapiens
  misc_RNA (1)...(19): siRNA sense strand
caaguccuguguaccagau

SEQ ID NO: 1667219 - RNA, 19 nt, Homo sapiens
  misc_RNA (1)...(19): siRNA sense strand
ucgaaaacaugauaaguug

SEQ ID NO: 1667220 - RNA, 19 nt, Homo sapiens
  misc_RNA (1)...(19): siRNA sense strand
gaugagaacaaggaugaga

SEQ ID NO: 1667221 - RNA, 19 nt, Homo sapiens
  misc_RNA (1)...(19): siRNA sense strand
gagggaauggccaucagaa

SEQ ID NO: 1667222 - RNA, 19 nt, Homo sapiens
  misc_RNA (1)...(19): siRNA sense strand
aaacaaguaaggaaaugga

SEQ ID NO: 1667223 - RNA, 19 nt, Homo sapiens
  misc_RNA (1)...(19): siRNA sense strand
gauccucuucuucagauga

SEQ ID NO: 1667224 - RNA, 19 nt, Homo sapiens
  misc_RNA (1)...(19): siRNA sense strand
aagaggcaguugagagguu

SEQ ID NO: 1667225 - RNA, 19 nt, Homo sapiens
  misc_RNA (1)...(19): siRNA sense strand
caaguaaggaaauggaagu

SEQ ID NO: 1667226 - RNA, 19 nt, Homo sapiens
  misc_RNA (1)...(19): siRNA sense strand
auaaagaugagaacaagga

SEQ ID NO: 1667227 - RNA, 19 nt, Homo sapiens
  misc_RNA (1)...(19): siRNA sense strand
uuaccagggcccuugauaa

SEQ ID NO: 1667228 - RNA, 19 nt, Homo sapiens
  misc_RNA (1)...(19): siRNA sense strand
acagcugcaucuuguauag

SEQ ID NO: 1667229 - RNA, 19 nt, Homo sapiens
  misc_RNA (1)...(19): siRNA sense strand
gagaaauugacccuaauac

SEQ ID NO: 1667230 - RNA, 19 nt, Homo sapiens
  misc_RNA (1)...(19): siRNA sense strand
ccaaaggagcucacucucu

SEQ ID NO: 1667231 - RNA, 19 nt, Homo sapiens
  misc_RNA (1)...(19): siRNA sense strand
gaaacaaguaaggaaaugg

SEQ ID NO: 1667232 - RNA, 19 nt, Homo sapiens
  misc_RNA (1)...(19): siRNA sense strand
guugccagcuuugaaaaua

SEQ ID NO: 1667233 - RNA, 19 nt, Homo sapiens
  misc_RNA (1)...(19): siRNA sense strand
gaugaagaaacaaguaagg

SEQ ID NO: 1667234 - RNA, 19 nt, Homo sapiens
  misc_RNA (1)...(19): siRNA sense strand
guuaccagggcccuugaua

SEQ ID NO: 1667235 - RNA, 19 nt, Homo sapiens
  misc_RNA (1)...(19): siRNA sense strand
agaggcaguugagagguuu

SEQ ID NO: 1667236 - RNA, 19 nt, Homo sapiens
  misc_RNA (1)...(19): siRNA sense strand
gaauguaucgagggaaugg

SEQ ID NO: 1667237 - RNA, 19 nt, Homo sapiens
  misc_RNA (1)...(19): siRNA sense strand
cagauguauucgugucaau

SEQ ID NO: 1667238 - RNA, 19 nt, Homo sapiens
  misc_RNA (1)...(19): siRNA sense strand
gacccuaauacuucaagaa

SEQ ID NO: 1667239 - RNA, 19 nt, Homo sapiens
  misc_RNA (1)...(19): siRNA sense strand
ggaugagaucuccaggaaa

SEQ ID NO: 1667240 - RNA, 19 nt, Homo sapiens
  misc_RNA (1)...(19): siRNA sense strand
gguaccuccuccuggaaug

SEQ ID NO: 1667241 - RNA, 19 nt, Homo sapiens
  misc_RNA (1)...(19): siRNA sense strand
aggaauguaucgagggaau

SEQ ID NO: 1667242 - RNA, 19 nt, Homo sapiens
  misc_RNA (1)...(19): siRNA sense strand
ugagaucuccaggaaaguu

SEQ ID NO: 1667243 - RNA, 19 nt, Homo sapiens
  misc_RNA (1)...(19): siRNA sense strand
gcugcaucuuguauaguga

SEQ ID NO: 1667244 - RNA, 19 nt, Homo sapiens
  misc_RNA (1)...(19): siRNA sense strand
cuccuggaaugcauuguga

SEQ ID NO: 1667245 - RNA, 19 nt, Homo sapiens
  misc_RNA (1)...(19): siRNA sense strand
uaccagggcccuugauaag

SEQ ID NO: 1667246 - RNA, 19 nt, Homo sapiens
  misc_RNA (1)...(19): siRNA sense strand
cgaaaggacaggccuacag

SEQ ID NO: 1667247 - RNA, 19 nt, Homo sapiens
  misc_RNA (1)...(19): siRNA sense strand
uugagagguuugcugagaa

SEQ ID NO: 1667248 - RNA, 19 nt, Homo sapiens
  misc_RNA (1)...(19): siRNA sense strand
auucauuguugccagcuuu

SEQ ID NO: 1667249 - RNA, 19 nt, Homo sapiens
  misc_RNA (1)...(19): siRNA sense strand
gaaacccaguucggugacu

SEQ ID NO: 1667250 - RNA, 19 nt, Homo sapiens
  misc_RNA (1)...(19): siRNA sense strand
cugagaaauugacccuaau

SEQ ID NO: 1667251 - RNA, 19 nt, Homo sapiens
  misc_RNA (1)...(19): siRNA sense strand
guccugaaagccugugaaa

SEQ ID NO: 1667252 - RNA, 19 nt, Homo sapiens
  misc_RNA (1)...(19): siRNA sense strand
acagauguauucgugucaa

SEQ ID NO: 1667253 - RNA, 19 nt, Homo sapiens
  misc_RNA (1)...(19): siRNA sense strand
cauucaggauccucuucuu

SEQ ID NO: 1667254 - RNA, 19 nt, Homo sapiens
  misc_RNA (1)...(19): siRNA sense strand
agagguuugcugagaaauu

SEQ ID NO: 1667255 - RNA, 19 nt, Homo sapiens
  misc_RNA (1)...(19): siRNA sense strand
acccuaauacuucaagaaa

SEQ ID NO: 1667256 - RNA, 19 nt, Homo sapiens
  misc_RNA (1)...(19): siRNA sense strand
aguccuguguaccagauuu

SEQ ID NO: 1667257 - RNA, 19 nt, Homo sapiens
  misc_RNA (1)...(19): siRNA sense strand
aaggacaggccuacagaug

SEQ ID NO: 1667258 - RNA, 19 nt, Homo sapiens
  misc_RNA (1)...(19): siRNA sense strand
gcaagucggucgaggagau

SEQ ID NO: 1667259 - RNA, 19 nt, Homo sapiens
  misc_RNA (1)...(19): siRNA sense strand
ccagaguaguggccgaaua

SEQ ID NO: 1667260 - RNA, 19 nt, Homo sapiens
  misc_RNA (1)...(19): siRNA sense strand
ccaacaagccgaccacguu

SEQ ID NO: 1667261 - RNA, 19 nt, Homo sapiens
  misc_RNA (1)...(19): siRNA sense strand
ucucgacgcuggugcagaa

SEQ ID NO: 1667262 - RNA, 19 nt, Homo sapiens
  misc_RNA (1)...(19): siRNA sense strand
guaguggccgaauaccuua

SEQ ID NO: 1667263 - RNA, 19 nt, Homo sapiens
  misc_RNA (1)...(19): siRNA sense strand
cgacuucgcccgacggaau

SEQ ID NO: 1667264 - RNA, 19 nt, Homo sapiens
  misc_RNA (1)...(19): siRNA sense strand
gagagcauccacugcaagu

SEQ ID NO: 1667265 - RNA, 19 nt, Homo sapiens
  misc_RNA (1)...(19): siRNA sense strand
caacggacugggucgcuau

SEQ ID NO: 1667266 - RNA, 19 nt, Homo sapiens
  misc_RNA (1)...(19): siRNA sense strand
gaauccaggggucguaaua

SEQ ID NO: 1667267 - RNA, 19 nt, Homo sapiens
  misc_RNA (1)...(19): siRNA sense strand
ggccagcguucuccacaac

SEQ ID NO: 1667268 - RNA, 19 nt, Homo sapiens
  misc_RNA (1)...(19): siRNA sense strand
ggucguaauauauguaaac

SEQ ID NO: 1667269 - RNA, 19 nt, Homo sapiens
  misc_RNA (1)...(19): siRNA sense strand
cagaguaguggccgaauac

SEQ ID NO: 1667270 - RNA, 19 nt, Homo sapiens
  misc_RNA (1)...(19): siRNA sense strand
cggacugggucgcuaugug

SEQ ID NO: 1667271 - RNA, 19 nt, Homo sapiens
  misc_RNA (1)...(19): siRNA sense strand
gcaagucggucgaggagau

SEQ ID NO: 1667272 - RNA, 19 nt, Homo sapiens
  misc_RNA (1)...(19): siRNA sense strand
ccagaguaguggccgaaua

SEQ ID NO: 1667273 - RNA, 19 nt, Homo sapiens
  misc_RNA (1)...(19): siRNA sense strand
ccaacaagccgaccacguu

SEQ ID NO: 1667274 - RNA, 19 nt, Homo sapiens
  misc_RNA (1)...(19): siRNA sense strand
ucucgacgcuggugcagaa

SEQ ID NO: 1667275 - RNA, 19 nt, Homo sapiens
  misc_RNA (1)...(19): siRNA sense strand
guaguggccgaauaccuua

SEQ ID NO: 1667276 - RNA, 19 nt, Homo sapiens
  misc_RNA (1)...(19): siRNA sense strand
cgacuucgcccgacggaau

SEQ ID NO: 1667277 - RNA, 19 nt, Homo sapiens
  misc_RNA (1)...(19): siRNA sense strand
gagagcauccacugcaagu

SEQ ID NO: 1667278 - RNA, 19 nt, Homo sapiens
  misc_RNA (1)...(19): siRNA sense strand
caacggacugggucgcuau

SEQ ID NO: 1667279 - RNA, 19 nt, Homo sapiens
  misc_RNA (1)...(19): siRNA sense strand
gaauccaggggucguaaua

SEQ ID NO: 1667280 - RNA, 19 nt, Homo sapiens
  misc_RNA (1)...(19): siRNA sense strand
ggccagcguucuccacaac

SEQ ID NO: 1667281 - RNA, 19 nt, Homo sapiens
  misc_RNA (1)...(19): siRNA sense strand
ggucguaauauauguaaac

SEQ ID NO: 1667282 - RNA, 19 nt, Homo sapiens
  misc_RNA (1)...(19): siRNA sense strand
cagaguaguggccgaauac

SEQ ID NO: 1667283 - RNA, 19 nt, Homo sapiens
  misc_RNA (1)...(19): siRNA sense strand
cggacugggucgcuaugug

SEQ ID NO: 1667284 - RNA, 19 nt, Homo sapiens
  misc_RNA (1)...(19): siRNA sense strand
gcaagucggucgaggagau

SEQ ID NO: 1667285 - RNA, 19 nt, Homo sapiens
  misc_RNA (1)...(19): siRNA sense strand
ccagaguaguggccgaaua

SEQ ID NO: 1667286 - RNA, 19 nt, Homo sapiens
  misc_RNA (1)...(19): siRNA sense strand
ccaacaagccgaccacguu

SEQ ID NO: 1667287 - RNA, 19 nt, Homo sapiens
  misc_RNA (1)...(19): siRNA sense strand
ucucgacgcuggugcagaa

SEQ ID NO: 1667288 - RNA, 19 nt, Homo sapiens
  misc_RNA (1)...(19): siRNA sense strand
guaguggccgaauaccuua

SEQ ID NO: 1667289 - RNA, 19 nt, Homo sapiens
  misc_RNA (1)...(19): siRNA sense strand
cgacuucgcccgacggaau

SEQ ID NO: 1667290 - RNA, 19 nt, Homo sapiens
  misc_RNA (1)...(19): siRNA sense strand
gagagcauccacugcaagu

SEQ ID NO: 1667291 - RNA, 19 nt, Homo sapiens
  misc_RNA (1)...(19): siRNA sense strand
caacggacugggucgcuau

SEQ ID NO: 1667292 - RNA, 19 nt, Homo sapiens
  misc_RNA (1)...(19): siRNA sense strand
gaauccaggggucguaaua

SEQ ID NO: 1667293 - RNA, 19 nt, Homo sapiens
  misc_RNA (1)...(19): siRNA sense strand
ggccagcguucuccacaac

SEQ ID NO: 1667294 - RNA, 19 nt, Homo sapiens
  misc_RNA (1)...(19): siRNA sense strand
ggucguaauauauguaaac

SEQ ID NO: 1667295 - RNA, 19 nt, Homo sapiens
  misc_RNA (1)...(19): siRNA sense strand
cagaguaguggccgaauac

SEQ ID NO: 1667296 - RNA, 19 nt, Homo sapiens
  misc_RNA (1)...(19): siRNA sense strand
cggacugggucgcuaugug

SEQ ID NO: 1667297 - RNA, 19 nt, Homo sapiens
  misc_RNA (1)...(19): siRNA sense strand
gcaagucggucgaggagau

SEQ ID NO: 1667298 - RNA, 19 nt, Homo sapiens
  misc_RNA (1)...(19): siRNA sense strand
ccagaguaguggccgaaua

SEQ ID NO: 1667299 - RNA, 19 nt, Homo sapiens
  misc_RNA (1)...(19): siRNA sense strand
ccaacaagccgaccacguu

SEQ ID NO: 1667300 - RNA, 19 nt, Homo sapiens
  misc_RNA (1)...(19): siRNA sense strand
ucucgacgcuggugcagaa

SEQ ID NO: 1667301 - RNA, 19 nt, Homo sapiens
  misc_RNA (1)...(19): siRNA sense strand
guaguggccgaauaccuua

SEQ ID NO: 1667302 - RNA, 19 nt, Homo sapiens
  misc_RNA (1)...(19): siRNA sense strand
cgacuucgcccgacggaau

SEQ ID NO: 1667303 - RNA, 19 nt, Homo sapiens
  misc_RNA (1)...(19): siRNA sense strand
gagagcauccacugcaagu

SEQ ID NO: 1667304 - RNA, 19 nt, Homo sapiens
  misc_RNA (1)...(19): siRNA sense strand
caacggacugggucgcuau

SEQ ID NO: 1667305 - RNA, 19 nt, Homo sapiens
  misc_RNA (1)...(19): siRNA sense strand
gaauccaggggucguaaua

SEQ ID NO: 1667306 - RNA, 19 nt, Homo sapiens
  misc_RNA (1)...(19): siRNA sense strand
ggccagcguucuccacaac

SEQ ID NO: 1667307 - RNA, 19 nt, Homo sapiens
  misc_RNA (1)...(19): siRNA sense strand
ggucguaauauauguaaac

SEQ ID NO: 1667308 - RNA, 19 nt, Homo sapiens
  misc_RNA (1)...(19): siRNA sense strand
cagaguaguggccgaauac

SEQ ID NO: 1667309 - RNA, 19 nt, Homo sapiens
  misc_RNA (1)...(19): siRNA sense strand
cggacugggucgcuaugug

SEQ ID NO: 1667310 - RNA, 19 nt, Homo sapiens
  misc_RNA (1)...(19): siRNA sense strand
guucaaagcuacuuacgau

SEQ ID NO: 1667311 - RNA, 19 nt, Homo sapiens
  misc_RNA (1)...(19): siRNA sense strand
gguguucacugcccgauau

SEQ ID NO: 1667312 - RNA, 19 nt, Homo sapiens
  misc_RNA (1)...(19): siRNA sense strand
ccaacuacaucucacucua

SEQ ID NO: 1667313 - RNA, 19 nt, Homo sapiens
  misc_RNA (1)...(19): siRNA sense strand
gggaagaaguugaguuugc

SEQ ID NO: 1667314 - RNA, 19 nt, Homo sapiens
  misc_RNA (1)...(19): siRNA sense strand
guaugaagguggucuacau

SEQ ID NO: 1667315 - RNA, 19 nt, Homo sapiens
  misc_RNA (1)...(19): siRNA sense strand
cuacugcgauuucuucuac

SEQ ID NO: 1667316 - RNA, 19 nt, Homo sapiens
  misc_RNA (1)...(19): siRNA sense strand
ggaucuggcgcuaccauuu

SEQ ID NO: 1667317 - RNA, 19 nt, Homo sapiens
  misc_RNA (1)...(19): siRNA sense strand
gauuucuucuaccucuaua

SEQ ID NO: 1667318 - RNA, 19 nt, Homo sapiens
  misc_RNA (1)...(19): siRNA sense strand
gagauccucuggaccuucu

SEQ ID NO: 1667319 - RNA, 19 nt, Homo sapiens
  misc_RNA (1)...(19): siRNA sense strand
caccagccacuacuuguuu

SEQ ID NO: 1667320 - RNA, 19 nt, Homo sapiens
  misc_RNA (1)...(19): siRNA sense strand
gaucuggcgcuaccauuuc

SEQ ID NO: 1667321 - RNA, 19 nt, Homo sapiens
  misc_RNA (1)...(19): siRNA sense strand
ggagucaguggccaucuug

SEQ ID NO: 1667322 - RNA, 19 nt, Homo sapiens
  misc_RNA (1)...(19): siRNA sense strand
ccaucuaccuggagucagu

SEQ ID NO: 1667323 - RNA, 19 nt, Homo sapiens
  misc_RNA (1)...(19): siRNA sense strand
cccgauaucuggaccucuu

SEQ ID NO: 1667324 - RNA, 19 nt, Homo sapiens
  misc_RNA (1)...(19): siRNA sense strand
cuaccucuauaucaccaaa

SEQ ID NO: 1667325 - RNA, 19 nt, Homo sapiens
  misc_RNA (1)...(19): siRNA sense strand
gcgauuucuucuaccucua

SEQ ID NO: 1667326 - RNA, 19 nt, Homo sapiens
  misc_RNA (1)...(19): siRNA sense strand
uggcguuccuggucaauca

SEQ ID NO: 1667327 - RNA, 19 nt, Homo sapiens
  misc_RNA (1)...(19): siRNA sense strand
uacauagccugcuccuuca

SEQ ID NO: 1667328 - RNA, 19 nt, Homo sapiens
  misc_RNA (1)...(19): siRNA sense strand
ccacggucugguugauuua

SEQ ID NO: 1667329 - RNA, 19 nt, Homo sapiens
  misc_RNA (1)...(19): siRNA sense strand
caacuacaucucacucuac

SEQ ID NO: 1667330 - RNA, 19 nt, Homo sapiens
  misc_RNA (1)...(19): siRNA sense strand
caucaccagccacuacuug

SEQ ID NO: 1667331 - RNA, 19 nt, Homo sapiens
  misc_RNA (1)...(19): siRNA sense strand
guugauuuauagcaaguuc

SEQ ID NO: 1667332 - RNA, 19 nt, Homo sapiens
  misc_RNA (1)...(19): siRNA sense strand
cuauaucaccaaaguccua

SEQ ID NO: 1667333 - RNA, 19 nt, Homo sapiens
  misc_RNA (1)...(19): siRNA sense strand
acggucugguugauuuaua

SEQ ID NO: 1667334 - RNA, 19 nt, Homo sapiens
  misc_RNA (1)...(19): siRNA sense strand
uguuugcgcuaggcguuua

SEQ ID NO: 1667335 - RNA, 19 nt, Homo sapiens
  misc_RNA (1)...(19): siRNA sense strand
gaccaucaccagccacuac

SEQ ID NO: 1667336 - RNA, 19 nt, Homo sapiens
  misc_RNA (1)...(19): siRNA sense strand
ucugguugauuuauagcaa

SEQ ID NO: 1667337 - RNA, 19 nt, Homo sapiens
  misc_RNA (1)...(19): siRNA sense strand
cuacaucucacucuacaac

SEQ ID NO: 1667338 - RNA, 19 nt, Homo sapiens
  misc_RNA (1)...(19): siRNA sense strand
ugaagguggucuacauagc

SEQ ID NO: 1667339 - RNA, 19 nt, Homo sapiens
  misc_RNA (1)...(19): siRNA sense strand
ucaccagccacuacuuguu

SEQ ID NO: 1667340 - RNA, 19 nt, Homo sapiens
  misc_RNA (1)...(19): siRNA sense strand
ccuguuugcugugguguuc

SEQ ID NO: 1667341 - RNA, 19 nt, Homo sapiens
  misc_RNA (1)...(19): siRNA sense strand
gccggaauuucagggaaga

SEQ ID NO: 1667342 - RNA, 19 nt, Homo sapiens
  misc_RNA (1)...(19): siRNA sense strand
ccuccucgccaucaucuug

SEQ ID NO: 1667343 - RNA, 19 nt, Homo sapiens
  misc_RNA (1)...(19): siRNA sense strand
uggagucaguggccaucuu

SEQ ID NO: 1667344 - RNA, 19 nt, Homo sapiens
  misc_RNA (1)...(19): siRNA sense strand
gaagagagauggcuuauca

SEQ ID NO: 1667345 - RNA, 19 nt, Homo sapiens
  misc_RNA (1)...(19): siRNA sense strand
gaaaguggcuuauccaaug

SEQ ID NO: 1667346 - RNA, 19 nt, Homo sapiens
  misc_RNA (1)...(19): siRNA sense strand
gaaggcaguuucugggaua

SEQ ID NO: 1667347 - RNA, 19 nt, Homo sapiens
  misc_RNA (1)...(19): siRNA sense strand
gcuauaauauggacagauu

SEQ ID NO: 1667348 - RNA, 19 nt, Homo sapiens
  misc_RNA (1)...(19): siRNA sense strand
gcaaagggaucggaagaga

SEQ ID NO: 1667349 - RNA, 19 nt, Homo sapiens
  misc_RNA (1)...(19): siRNA sense strand
gaagaaguguauuaugaca

SEQ ID NO: 1667350 - RNA, 19 nt, Homo sapiens
  misc_RNA (1)...(19): siRNA sense strand
ggaaagaaagugauuguca

SEQ ID NO: 1667351 - RNA, 19 nt, Homo sapiens
  misc_RNA (1)...(19): siRNA sense strand
gaauuucucuacucaacga

SEQ ID NO: 1667352 - RNA, 19 nt, Homo sapiens
  misc_RNA (1)...(19): siRNA sense strand
ucaacgagcuauaauaugg

SEQ ID NO: 1667353 - RNA, 19 nt, Homo sapiens
  misc_RNA (1)...(19): siRNA sense strand
ggaagauccuggaauuucu

SEQ ID NO: 1667354 - RNA, 19 nt, Homo sapiens
  misc_RNA (1)...(19): siRNA sense strand
gccaagaagaaguguauua

SEQ ID NO: 1667355 - RNA, 19 nt, Homo sapiens
  misc_RNA (1)...(19): siRNA sense strand
caccaacacuucuuugaau

SEQ ID NO: 1667356 - RNA, 19 nt, Homo sapiens
  misc_RNA (1)...(19): siRNA sense strand
cagagaugcuccaaggaaa

SEQ ID NO: 1667357 - RNA, 19 nt, Homo sapiens
  misc_RNA (1)...(19): siRNA sense strand
agaaauccaugcaggaaga

SEQ ID NO: 1667358 - RNA, 19 nt, Homo sapiens
  misc_RNA (1)...(19): siRNA sense strand
ggacuagacaugcucauuc

SEQ ID NO: 1667359 - RNA, 19 nt, Homo sapiens
  misc_RNA (1)...(19): siRNA sense strand
ggaaaguggcuuauccaau

SEQ ID NO: 1667360 - RNA, 19 nt, Homo sapiens
  misc_RNA (1)...(19): siRNA sense strand
gaccuucgcagagcaauuu

SEQ ID NO: 1667361 - RNA, 19 nt, Homo sapiens
  misc_RNA (1)...(19): siRNA sense strand
caacacuucuuugaaucuu

SEQ ID NO: 1667362 - RNA, 19 nt, Homo sapiens
  misc_RNA (1)...(19): siRNA sense strand
agaaaggaauauucagugu

SEQ ID NO: 1667363 - RNA, 19 nt, Homo sapiens
  misc_RNA (1)...(19): siRNA sense strand
ggacagauucauaaacaag

SEQ ID NO: 1667364 - RNA, 19 nt, Homo sapiens
  misc_RNA (1)...(19): siRNA sense strand
ccagagaugcuccaaggaa

SEQ ID NO: 1667365 - RNA, 19 nt, Homo sapiens
  misc_RNA (1)...(19): siRNA sense strand
ggaccacucuucugaucag

SEQ ID NO: 1667366 - RNA, 19 nt, Homo sapiens
  misc_RNA (1)...(19): siRNA sense strand
caagaagaaguguauuaug

SEQ ID NO: 1667367 - RNA, 19 nt, Homo sapiens
  misc_RNA (1)...(19): siRNA sense strand
caucagaaaggaauauuca

SEQ ID NO: 1667368 - RNA, 19 nt, Homo sapiens
  misc_RNA (1)...(19): siRNA sense strand
ccaagaagaaguguauuau

SEQ ID NO: 1667369 - RNA, 19 nt, Homo sapiens
  misc_RNA (1)...(19): siRNA sense strand
ggaauucagaccagagaug

SEQ ID NO: 1667370 - RNA, 19 nt, Homo sapiens
  misc_RNA (1)...(19): siRNA sense strand
caaaagaaacucuacagaa

SEQ ID NO: 1667371 - RNA, 19 nt, Homo sapiens
  misc_RNA (1)...(19): siRNA sense strand
ccaaggaaagaaagugauu

SEQ ID NO: 1667372 - RNA, 19 nt, Homo sapiens
  misc_RNA (1)...(19): siRNA sense strand
gacuagacaugcucauucu

SEQ ID NO: 1667373 - RNA, 19 nt, Homo sapiens
  misc_RNA (1)...(19): siRNA sense strand
aaaagaaacucuacagaag

SEQ ID NO: 1667374 - RNA, 19 nt, Homo sapiens
  misc_RNA (1)...(19): siRNA sense strand
gcaaaagcauggaagucaa

SEQ ID NO: 1667375 - RNA, 19 nt, Homo sapiens
  misc_RNA (1)...(19): siRNA sense strand
aaagggaucggaagagaga

SEQ ID NO: 1667376 - RNA, 19 nt, Homo sapiens
  misc_RNA (1)...(19): siRNA sense strand
aagaaacucuacagaaggu

SEQ ID NO: 1667377 - RNA, 19 nt, Homo sapiens
  misc_RNA (1)...(19): siRNA sense strand
ccucauagacacagaaaca

SEQ ID NO: 1667378 - RNA, 19 nt, Homo sapiens
  misc_RNA (1)...(19): siRNA sense strand
gcgccaagaagaaguguau

SEQ ID NO: 1667379 - RNA, 19 nt, Homo sapiens
  misc_RNA (1)...(19): siRNA sense strand
gagaugcuccaaggaaaga

SEQ ID NO: 1667380 - RNA, 19 nt, Homo sapiens
  misc_RNA (1)...(19): siRNA sense strand
ucaccaacacuucuuugaa

SEQ ID NO: 1667381 - RNA, 19 nt, Homo sapiens
  misc_RNA (1)...(19): siRNA sense strand
guucuucuccuccaucaga

SEQ ID NO: 1667382 - RNA, 19 nt, Homo sapiens
  misc_RNA (1)...(19): siRNA sense strand
gaaugugcccuggagauca

SEQ ID NO: 1667383 - RNA, 19 nt, Homo sapiens
  misc_RNA (1)...(19): siRNA sense strand
acacagaaacagccaugaa

SEQ ID NO: 1667384 - RNA, 19 nt, Homo sapiens
  misc_RNA (1)...(19): siRNA sense strand
guucuuggccucauagaca

SEQ ID NO: 1667385 - RNA, 19 nt, Homo sapiens
  misc_RNA (1)...(19): siRNA sense strand
cagcaaagggaucggaaga

SEQ ID NO: 1667386 - RNA, 19 nt, Homo sapiens
  misc_RNA (1)...(19): siRNA sense strand
cuacuacuauucugcaaac

SEQ ID NO: 1667387 - RNA, 19 nt, Homo sapiens
  misc_RNA (1)...(19): siRNA sense strand
gaggaauucagaccagaga

SEQ ID NO: 1667388 - RNA, 19 nt, Homo sapiens
  misc_RNA (1)...(19): siRNA sense strand
acucaacgagcuauaauau

SEQ ID NO: 1667389 - RNA, 19 nt, Homo sapiens
  misc_RNA (1)...(19): siRNA sense strand
ccuggaauuucucuacuca

SEQ ID NO: 1667390 - RNA, 19 nt, Homo sapiens
  misc_RNA (1)...(19): siRNA sense strand
ggaaugugcccuggagauc

SEQ ID NO: 1667391 - RNA, 19 nt, Homo sapiens
  misc_RNA (1)...(19): siRNA sense strand
gauaguccauaugcaagca

SEQ ID NO: 1667392 - RNA, 19 nt, Homo sapiens
  misc_RNA (1)...(19): siRNA sense strand
gagcuauaauauggacaga

SEQ ID NO: 1667393 - RNA, 19 nt, Homo sapiens
  misc_RNA (1)...(19): siRNA sense strand
ucagaaauccaugcaggaa

SEQ ID NO: 1667394 - RNA, 19 nt, Homo sapiens
  misc_RNA (1)...(19): siRNA sense strand
uagacaugcucauucucaa

SEQ ID NO: 1667395 - RNA, 19 nt, Homo sapiens
  misc_RNA (1)...(19): siRNA sense strand
auggacagauucauaaaca

SEQ ID NO: 1667396 - RNA, 19 nt, Homo sapiens
  misc_RNA (1)...(19): siRNA sense strand
augaugauauucaccaugu

SEQ ID NO: 1667397 - RNA, 19 nt, Homo sapiens
  misc_RNA (1)...(19): siRNA sense strand
gagcagccucagcacacua

SEQ ID NO: 1667398 - RNA, 19 nt, Homo sapiens
  misc_RNA (1)...(19): siRNA sense strand
ucagaaaggaauauucagu

SEQ ID NO: 1667399 - RNA, 19 nt, Homo sapiens
  misc_RNA (1)...(19): siRNA sense strand
cuagacaugcucauucuca

SEQ ID NO: 1667400 - RNA, 19 nt, Homo sapiens
  misc_RNA (1)...(19): siRNA sense strand
uuucugggauaguccauau

SEQ ID NO: 1667401 - RNA, 19 nt, Homo sapiens
  misc_RNA (1)...(19): siRNA sense strand
gggaaaguggcuuauccaa

SEQ ID NO: 1667402 - RNA, 19 nt, Homo sapiens
  misc_RNA (1)...(19): siRNA sense strand
ccacaucaccaacacuucu

SEQ ID NO: 1667403 - RNA, 19 nt, Homo sapiens
  misc_RNA (1)...(19): siRNA sense strand
caaggaaagaaagugauug

SEQ ID NO: 1667404 - RNA, 19 nt, Homo sapiens
  misc_RNA (1)...(19): siRNA sense strand
caacgagcuauaauaugga

SEQ ID NO: 1667405 - RNA, 19 nt, Homo sapiens
  misc_RNA (1)...(19): siRNA sense strand
uggaauuucucuacucaac

SEQ ID NO: 1667406 - RNA, 19 nt, Homo sapiens
  misc_RNA (1)...(19): siRNA sense strand
gagcucugcgccaagaaga

SEQ ID NO: 1667407 - RNA, 19 nt, Homo sapiens
  misc_RNA (1)...(19): siRNA sense strand
cuucauggccuacuacuac

SEQ ID NO: 1667408 - RNA, 19 nt, Homo sapiens
  misc_RNA (1)...(19): siRNA sense strand
uccaaugguugcugccuau

SEQ ID NO: 1667409 - RNA, 19 nt, Homo sapiens
  misc_RNA (1)...(19): siRNA sense strand
gaugcuccaaggaaagaaa

SEQ ID NO: 1667410 - RNA, 19 nt, Homo sapiens
  misc_RNA (1)...(19): siRNA sense strand
gauccuggaauuucucuac

SEQ ID NO: 1667411 - RNA, 19 nt, Homo sapiens
  misc_RNA (1)...(19): siRNA sense strand
gaagauccuggaauuucuc

SEQ ID NO: 1667412 - RNA, 19 nt, Homo sapiens
  misc_RNA (1)...(19): siRNA sense strand
acagcgaggucaaaagaaa

SEQ ID NO: 1667413 - RNA, 19 nt, Homo sapiens
  misc_RNA (1)...(19): siRNA sense strand
ucaaucacucucuguguuc

SEQ ID NO: 1667414 - RNA, 19 nt, Homo sapiens
  misc_RNA (1)...(19): siRNA sense strand
aaaguggcuuauccaaugg

SEQ ID NO: 1667415 - RNA, 19 nt, Homo sapiens
  misc_RNA (1)...(19): siRNA sense strand
guuacgugguccugacugu

SEQ ID NO: 1667416 - RNA, 19 nt, Homo sapiens
  misc_RNA (1)...(19): siRNA sense strand
aaugguugcugccuauucu

SEQ ID NO: 1667417 - RNA, 19 nt, Homo sapiens
  misc_RNA (1)...(19): siRNA sense strand
ggagcagccucagcacacu

SEQ ID NO: 1667418 - RNA, 19 nt, Homo sapiens
  misc_RNA (1)...(19): siRNA sense strand
aucaaucacucucuguguu

SEQ ID NO: 1667419 - RNA, 19 nt, Homo sapiens
  misc_RNA (1)...(19): siRNA sense strand
ggaagagagauggcuuauc

SEQ ID NO: 1667420 - RNA, 19 nt, Homo sapiens
  misc_RNA (1)...(19): siRNA sense strand
gacagauucauaaacaagu

SEQ ID NO: 1667421 - RNA, 19 nt, Homo sapiens
  misc_RNA (1)...(19): siRNA sense strand
uggacagauucauaaacaa

SEQ ID NO: 1667422 - RNA, 19 nt, Homo sapiens
  misc_RNA (1)...(19): siRNA sense strand
ucggaagagagauggcuua

SEQ ID NO: 1667423 - RNA, 19 nt, Homo sapiens
  misc_RNA (1)...(19): siRNA sense strand
caaugguugcugccuauuc

SEQ ID NO: 1667424 - RNA, 19 nt, Homo sapiens
  misc_RNA (1)...(19): siRNA sense strand
ggguucuucuccuccauca

SEQ ID NO: 1667425 - RNA, 19 nt, Homo sapiens
  misc_RNA (1)...(19): siRNA sense strand
cuacucaacgagcuauaau

SEQ ID NO: 1667426 - RNA, 19 nt, Homo sapiens
  misc_RNA (1)...(19): siRNA sense strand
gaagagagauggcuuauca

SEQ ID NO: 1667427 - RNA, 19 nt, Homo sapiens
  misc_RNA (1)...(19): siRNA sense strand
gaaaguggcuuauccaaug

SEQ ID NO: 1667428 - RNA, 19 nt, Homo sapiens
  misc_RNA (1)...(19): siRNA sense strand
gaaggcaguuucugggaua

SEQ ID NO: 1667429 - RNA, 19 nt, Homo sapiens
  misc_RNA (1)...(19): siRNA sense strand
gcuauaauauggacagauu

SEQ ID NO: 1667430 - RNA, 19 nt, Homo sapiens
  misc_RNA (1)...(19): siRNA sense strand
gcaaagggaucggaagaga

SEQ ID NO: 1667431 - RNA, 19 nt, Homo sapiens
  misc_RNA (1)...(19): siRNA sense strand
gaagaaguguauuaugaca

SEQ ID NO: 1667432 - RNA, 19 nt, Homo sapiens
  misc_RNA (1)...(19): siRNA sense strand
ggaaagaaagugauuguca

SEQ ID NO: 1667433 - RNA, 19 nt, Homo sapiens
  misc_RNA (1)...(19): siRNA sense strand
gaauuucucuacucaacga

SEQ ID NO: 1667434 - RNA, 19 nt, Homo sapiens
  misc_RNA (1)...(19): siRNA sense strand
ucaacgagcuauaauaugg

SEQ ID NO: 1667435 - RNA, 19 nt, Homo sapiens
  misc_RNA (1)...(19): siRNA sense strand
ggaagauccuggaauuucu

SEQ ID NO: 1667436 - RNA, 19 nt, Homo sapiens
  misc_RNA (1)...(19): siRNA sense strand
gccaagaagaaguguauua

SEQ ID NO: 1667437 - RNA, 19 nt, Homo sapiens
  misc_RNA (1)...(19): siRNA sense strand
caccaacacuucuuugaau

SEQ ID NO: 1667438 - RNA, 19 nt, Homo sapiens
  misc_RNA (1)...(19): siRNA sense strand
cagagaugcuccaaggaaa

SEQ ID NO: 1667439 - RNA, 19 nt, Homo sapiens
  misc_RNA (1)...(19): siRNA sense strand
agaaauccaugcaggaaga

SEQ ID NO: 1667440 - RNA, 19 nt, Homo sapiens
  misc_RNA (1)...(19): siRNA sense strand
ggacuagacaugcucauuc

SEQ ID NO: 1667441 - RNA, 19 nt, Homo sapiens
  misc_RNA (1)...(19): siRNA sense strand
ggaaaguggcuuauccaau

SEQ ID NO: 1667442 - RNA, 19 nt, Homo sapiens
  misc_RNA (1)...(19): siRNA sense strand
gaccuucgcagagcaauuu

SEQ ID NO: 1667443 - RNA, 19 nt, Homo sapiens
  misc_RNA (1)...(19): siRNA sense strand
caacacuucuuugaaucuu

SEQ ID NO: 1667444 - RNA, 19 nt, Homo sapiens
  misc_RNA (1)...(19): siRNA sense strand
agaaaggaauauucagugu

SEQ ID NO: 1667445 - RNA, 19 nt, Homo sapiens
  misc_RNA (1)...(19): siRNA sense strand
ggacagauucauaaacaag

SEQ ID NO: 1667446 - RNA, 19 nt, Homo sapiens
  misc_RNA (1)...(19): siRNA sense strand
ccagagaugcuccaaggaa

SEQ ID NO: 1667447 - RNA, 19 nt, Homo sapiens
  misc_RNA (1)...(19): siRNA sense strand
ggaccacucuucugaucag

SEQ ID NO: 1667448 - RNA, 19 nt, Homo sapiens
  misc_RNA (1)...(19): siRNA sense strand
caagaagaaguguauuaug

SEQ ID NO: 1667449 - RNA, 19 nt, Homo sapiens
  misc_RNA (1)...(19): siRNA sense strand
caucagaaaggaauauuca

SEQ ID NO: 1667450 - RNA, 19 nt, Homo sapiens
  misc_RNA (1)...(19): siRNA sense strand
ccaagaagaaguguauuau

SEQ ID NO: 1667451 - RNA, 19 nt, Homo sapiens
  misc_RNA (1)...(19): siRNA sense strand
ggaauucagaccagagaug

SEQ ID NO: 1667452 - RNA, 19 nt, Homo sapiens
  misc_RNA (1)...(19): siRNA sense strand
caaaagaaacucuacagaa

SEQ ID NO: 1667453 - RNA, 19 nt, Homo sapiens
  misc_RNA (1)...(19): siRNA sense strand
ccaaggaaagaaagugauu

SEQ ID NO: 1667454 - RNA, 19 nt, Homo sapiens
  misc_RNA (1)...(19): siRNA sense strand
gacuagacaugcucauucu

SEQ ID NO: 1667455 - RNA, 19 nt, Homo sapiens
  misc_RNA (1)...(19): siRNA sense strand
aaaagaaacucuacagaag

SEQ ID NO: 1667456 - RNA, 19 nt, Homo sapiens
  misc_RNA (1)...(19): siRNA sense strand
gcaaaagcauggaagucaa

SEQ ID NO: 1667457 - RNA, 19 nt, Homo sapiens
  misc_RNA (1)...(19): siRNA sense strand
aaagggaucggaagagaga

SEQ ID NO: 1667458 - RNA, 19 nt, Homo sapiens
  misc_RNA (1)...(19): siRNA sense strand
aagaaacucuacagaaggu

SEQ ID NO: 1667459 - RNA, 19 nt, Homo sapiens
  misc_RNA (1)...(19): siRNA sense strand
ccucauagacacagaaaca

SEQ ID NO: 1667460 - RNA, 19 nt, Homo sapiens
  misc_RNA (1)...(19): siRNA sense strand
gcgccaagaagaaguguau

SEQ ID NO: 1667461 - RNA, 19 nt, Homo sapiens
  misc_RNA (1)...(19): siRNA sense strand
gagaugcuccaaggaaaga

SEQ ID NO: 1667462 - RNA, 19 nt, Homo sapiens
  misc_RNA (1)...(19): siRNA sense strand
ucaccaacacuucuuugaa

SEQ ID NO: 1667463 - RNA, 19 nt, Homo sapiens
  misc_RNA (1)...(19): siRNA sense strand
guucuucuccuccaucaga

SEQ ID NO: 1667464 - RNA, 19 nt, Homo sapiens
  misc_RNA (1)...(19): siRNA sense strand
gaaugugcccuggagauca

SEQ ID NO: 1667465 - RNA, 19 nt, Homo sapiens
  misc_RNA (1)...(19): siRNA sense strand
acacagaaacagccaugaa

SEQ ID NO: 1667466 - RNA, 19 nt, Homo sapiens
  misc_RNA (1)...(19): siRNA sense strand
guucuuggccucauagaca

SEQ ID NO: 1667467 - RNA, 19 nt, Homo sapiens
  misc_RNA (1)...(19): siRNA sense strand
cagcaaagggaucggaaga

SEQ ID NO: 1667468 - RNA, 19 nt, Homo sapiens
  misc_RNA (1)...(19): siRNA sense strand
cuacuacuauucugcaaac

SEQ ID NO: 1667469 - RNA, 19 nt, Homo sapiens
  misc_RNA (1)...(19): siRNA sense strand
gaggaauucagaccagaga

SEQ ID NO: 1667470 - RNA, 19 nt, Homo sapiens
  misc_RNA (1)...(19): siRNA sense strand
acucaacgagcuauaauau

SEQ ID NO: 1667471 - RNA, 19 nt, Homo sapiens
  misc_RNA (1)...(19): siRNA sense strand
ccuggaauuucucuacuca

SEQ ID NO: 1667472 - RNA, 19 nt, Homo sapiens
  misc_RNA (1)...(19): siRNA sense strand
ggaaugugcccuggagauc

SEQ ID NO: 1667473 - RNA, 19 nt, Homo sapiens
  misc_RNA (1)...(19): siRNA sense strand
gauaguccauaugcaagca

SEQ ID NO: 1667474 - RNA, 19 nt, Homo sapiens
  misc_RNA (1)...(19): siRNA sense strand
gagcuauaauauggacaga

SEQ ID NO: 1667475 - RNA, 19 nt, Homo sapiens
  misc_RNA (1)...(19): siRNA sense strand
ucagaaauccaugcaggaa

SEQ ID NO: 1667476 - RNA, 19 nt, Homo sapiens
  misc_RNA (1)...(19): siRNA sense strand
uagacaugcucauucucaa

SEQ ID NO: 1667477 - RNA, 19 nt, Homo sapiens
  misc_RNA (1)...(19): siRNA sense strand
auggacagauucauaaaca

SEQ ID NO: 1667478 - RNA, 19 nt, Homo sapiens
  misc_RNA (1)...(19): siRNA sense strand
augaugauauucaccaugu

SEQ ID NO: 1667479 - RNA, 19 nt, Homo sapiens
  misc_RNA (1)...(19): siRNA sense strand
gagcagccucagcacacua

SEQ ID NO: 1667480 - RNA, 19 nt, Homo sapiens
  misc_RNA (1)...(19): siRNA sense strand
ucagaaaggaauauucagu

SEQ ID NO: 1667481 - RNA, 19 nt, Homo sapiens
  misc_RNA (1)...(19): siRNA sense strand
cuagacaugcucauucuca

SEQ ID NO: 1667482 - RNA, 19 nt, Homo sapiens
  misc_RNA (1)...(19): siRNA sense strand
uuucugggauaguccauau

SEQ ID NO: 1667483 - RNA, 19 nt, Homo sapiens
  misc_RNA (1)...(19): siRNA sense strand
gggaaaguggcuuauccaa

SEQ ID NO: 1667484 - RNA, 19 nt, Homo sapiens
  misc_RNA (1)...(19): siRNA sense strand
ccacaucaccaacacuucu

SEQ ID NO: 1667485 - RNA, 19 nt, Homo sapiens
  misc_RNA (1)...(19): siRNA sense strand
caaggaaagaaagugauug

SEQ ID NO: 1667486 - RNA, 19 nt, Homo sapiens
  misc_RNA (1)...(19): siRNA sense strand
caacgagcuauaauaugga

SEQ ID NO: 1667487 - RNA, 19 nt, Homo sapiens
  misc_RNA (1)...(19): siRNA sense strand
uggaauuucucuacucaac

SEQ ID NO: 1667488 - RNA, 19 nt, Homo sapiens
  misc_RNA (1)...(19): siRNA sense strand
gagcucugcgccaagaaga

SEQ ID NO: 1667489 - RNA, 19 nt, Homo sapiens
  misc_RNA (1)...(19): siRNA sense strand
cuucauggccuacuacuac

SEQ ID NO: 1667490 - RNA, 19 nt, Homo sapiens
  misc_RNA (1)...(19): siRNA sense strand
uccaaugguugcugccuau

SEQ ID NO: 1667491 - RNA, 19 nt, Homo sapiens
  misc_RNA (1)...(19): siRNA sense strand
gaugcuccaaggaaagaaa

SEQ ID NO: 1667492 - RNA, 19 nt, Homo sapiens
  misc_RNA (1)...(19): siRNA sense strand
gauccuggaauuucucuac

SEQ ID NO: 1667493 - RNA, 19 nt, Homo sapiens
  misc_RNA (1)...(19): siRNA sense strand
gaagauccuggaauuucuc

SEQ ID NO: 1667494 - RNA, 19 nt, Homo sapiens
  misc_RNA (1)...(19): siRNA sense strand
acagcgaggucaaaagaaa

SEQ ID NO: 1667495 - RNA, 19 nt, Homo sapiens
  misc_RNA (1)...(19): siRNA sense strand
ucaaucacucucuguguuc

SEQ ID NO: 1667496 - RNA, 19 nt, Homo sapiens
  misc_RNA (1)...(19): siRNA sense strand
aaaguggcuuauccaaugg

SEQ ID NO: 1667497 - RNA, 19 nt, Homo sapiens
  misc_RNA (1)...(19): siRNA sense strand
guuacgugguccugacugu

SEQ ID NO: 1667498 - RNA, 19 nt, Homo sapiens
  misc_RNA (1)...(19): siRNA sense strand
aaugguugcugccuauucu

SEQ ID NO: 1667499 - RNA, 19 nt, Homo sapiens
  misc_RNA (1)...(19): siRNA sense strand
ggagcagccucagcacacu

SEQ ID NO: 1667500 - RNA, 19 nt, Homo sapiens
  misc_RNA (1)...(19): siRNA sense strand
aucaaucacucucuguguu

SEQ ID NO: 1667501 - RNA, 19 nt, Homo sapiens
  misc_RNA (1)...(19): siRNA sense strand
ggaagagagauggcuuauc

SEQ ID NO: 1667502 - RNA, 19 nt, Homo sapiens
  misc_RNA (1)...(19): siRNA sense strand
gacagauucauaaacaagu

SEQ ID NO: 1667503 - RNA, 19 nt, Homo sapiens
  misc_RNA (1)...(19): siRNA sense strand
uggacagauucauaaacaa

SEQ ID NO: 1667504 - RNA, 19 nt, Homo sapiens
  misc_RNA (1)...(19): siRNA sense strand
ucggaagagagauggcuua

SEQ ID NO: 1667505 - RNA, 19 nt, Homo sapiens
  misc_RNA (1)...(19): siRNA sense strand
caaugguugcugccuauuc

SEQ ID NO: 1667506 - RNA, 19 nt, Homo sapiens
  misc_RNA (1)...(19): siRNA sense strand
ggguucuucuccuccauca

SEQ ID NO: 1667507 - RNA, 19 nt, Homo sapiens
  misc_RNA (1)...(19): siRNA sense strand
cuacucaacgagcuauaau

SEQ ID NO: 1667508 - RNA, 19 nt, Homo sapiens
  misc_RNA (1)...(19): siRNA sense strand
caacauuccuccauauuua

SEQ ID NO: 1667509 - RNA, 19 nt, Homo sapiens
  misc_RNA (1)...(19): siRNA sense strand
gagaagcucuggugauuau

SEQ ID NO: 1667510 - RNA, 19 nt, Homo sapiens
  misc_RNA (1)...(19): siRNA sense strand
gacagaaguuugcaagaua

SEQ ID NO: 1667511 - RNA, 19 nt, Homo sapiens
  misc_RNA (1)...(19): siRNA sense strand
gggacagacuuuaguaaua

SEQ ID NO: 1667512 - RNA, 19 nt, Homo sapiens
  misc_RNA (1)...(19): siRNA sense strand
cagaaggacuggagugaua

SEQ ID NO: 1667513 - RNA, 19 nt, Homo sapiens
  misc_RNA (1)...(19): siRNA sense strand
ccagaagcuuucccuauua

SEQ ID NO: 1667514 - RNA, 19 nt, Homo sapiens
  misc_RNA (1)...(19): siRNA sense strand
gaacaaaccaaucuguauu

SEQ ID NO: 1667515 - RNA, 19 nt, Homo sapiens
  misc_RNA (1)...(19): siRNA sense strand
ggagaugggucuauugugu

SEQ ID NO: 1667516 - RNA, 19 nt, Homo sapiens
  misc_RNA (1)...(19): siRNA sense strand
ggacagacuuuaguaauag

SEQ ID NO: 1667517 - RNA, 19 nt, Homo sapiens
  misc_RNA (1)...(19): siRNA sense strand
aaacagaaguugugaguuc

SEQ ID NO: 1667518 - RNA, 19 nt, Homo sapiens
  misc_RNA (1)...(19): siRNA sense strand
gaagaacacggaacuggua

SEQ ID NO: 1667519 - RNA, 19 nt, Homo sapiens
  misc_RNA (1)...(19): siRNA sense strand
gauaaucgccuucacaaau

SEQ ID NO: 1667520 - RNA, 19 nt, Homo sapiens
  misc_RNA (1)...(19): siRNA sense strand
cgacagaauuacaauagaa

SEQ ID NO: 1667521 - RNA, 19 nt, Homo sapiens
  misc_RNA (1)...(19): siRNA sense strand
caaugaaacuuguuaccaa

SEQ ID NO: 1667522 - RNA, 19 nt, Homo sapiens
  misc_RNA (1)...(19): siRNA sense strand
ggaaagauggucauuugaa

SEQ ID NO: 1667523 - RNA, 19 nt, Homo sapiens
  misc_RNA (1)...(19): siRNA sense strand
gagaaacaguauauugguu

SEQ ID NO: 1667524 - RNA, 19 nt, Homo sapiens
  misc_RNA (1)...(19): siRNA sense strand
ccaaacugccuaugaauuu

SEQ ID NO: 1667525 - RNA, 19 nt, Homo sapiens
  misc_RNA (1)...(19): siRNA sense strand
cagcauggcgacagaauua

SEQ ID NO: 1667526 - RNA, 19 nt, Homo sapiens
  misc_RNA (1)...(19): siRNA sense strand
gaagauagacuggaauugu

SEQ ID NO: 1667527 - RNA, 19 nt, Homo sapiens
  misc_RNA (1)...(19): siRNA sense strand
aaagaaaucugagcaacuu

SEQ ID NO: 1667528 - RNA, 19 nt, Homo sapiens
  misc_RNA (1)...(19): siRNA sense strand
ccggaagccuccuguauuu

SEQ ID NO: 1667529 - RNA, 19 nt, Homo sapiens
  misc_RNA (1)...(19): siRNA sense strand
uaacacaacugagccaaug

SEQ ID NO: 1667530 - RNA, 19 nt, Homo sapiens
  misc_RNA (1)...(19): siRNA sense strand
gaaagauggucauuugaac

SEQ ID NO: 1667531 - RNA, 19 nt, Homo sapiens
  misc_RNA (1)...(19): siRNA sense strand
gaagugcacugggaaagau

SEQ ID NO: 1667532 - RNA, 19 nt, Homo sapiens
  misc_RNA (1)...(19): siRNA sense strand
caacugagccaauggauca

SEQ ID NO: 1667533 - RNA, 19 nt, Homo sapiens
  misc_RNA (1)...(19): siRNA sense strand
gaaaguauagccagagaau

SEQ ID NO: 1667534 - RNA, 19 nt, Homo sapiens
  misc_RNA (1)...(19): siRNA sense strand
gaaaguuguccacacuaua

SEQ ID NO: 1667535 - RNA, 19 nt, Homo sapiens
  misc_RNA (1)...(19): siRNA sense strand
gcacuuuccaggugaauuu

SEQ ID NO: 1667536 - RNA, 19 nt, Homo sapiens
  misc_RNA (1)...(19): siRNA sense strand
caaaugugguuguggauuc

SEQ ID NO: 1667537 - RNA, 19 nt, Homo sapiens
  misc_RNA (1)...(19): siRNA sense strand
uauauugguuccaguauga

SEQ ID NO: 1667538 - RNA, 19 nt, Homo sapiens
  misc_RNA (1)...(19): siRNA sense strand
gaaagaacuauucaacaga

SEQ ID NO: 1667539 - RNA, 19 nt, Homo sapiens
  misc_RNA (1)...(19): siRNA sense strand
agugaaagauguucuggua

SEQ ID NO: 1667540 - RNA, 19 nt, Homo sapiens
  misc_RNA (1)...(19): siRNA sense strand
gccaauggaucacucuuga

SEQ ID NO: 1667541 - RNA, 19 nt, Homo sapiens
  misc_RNA (1)...(19): siRNA sense strand
guccugauguugaagauuu

SEQ ID NO: 1667542 - RNA, 19 nt, Homo sapiens
  misc_RNA (1)...(19): siRNA sense strand
uaaggaguaugacaaucua

SEQ ID NO: 1667543 - RNA, 19 nt, Homo sapiens
  misc_RNA (1)...(19): siRNA sense strand
cugguaaacugucaucuaa

SEQ ID NO: 1667544 - RNA, 19 nt, Homo sapiens
  misc_RNA (1)...(19): siRNA sense strand
caucugaucuuccucaaag

SEQ ID NO: 1667545 - RNA, 19 nt, Homo sapiens
  misc_RNA (1)...(19): siRNA sense strand
ugggaaagauggucauuug

SEQ ID NO: 1667546 - RNA, 19 nt, Homo sapiens
  misc_RNA (1)...(19): siRNA sense strand
gauacggguuuccuccuaa

SEQ ID NO: 1667547 - RNA, 19 nt, Homo sapiens
  misc_RNA (1)...(19): siRNA sense strand
gagaagaagauccgaauca

SEQ ID NO: 1667548 - RNA, 19 nt, Homo sapiens
  misc_RNA (1)...(19): siRNA sense strand
agucucagcucccaacuaa

SEQ ID NO: 1667549 - RNA, 19 nt, Homo sapiens
  misc_RNA (1)...(19): siRNA sense strand
ccuaacagcuuguaauugg

SEQ ID NO: 1667550 - RNA, 19 nt, Homo sapiens
  misc_RNA (1)...(19): siRNA sense strand
gaggauggugguuguguua

SEQ ID NO: 1667551 - RNA, 19 nt, Homo sapiens
  misc_RNA (1)...(19): siRNA sense strand
caaagggacuuccucacau

SEQ ID NO: 1667552 - RNA, 19 nt, Homo sapiens
  misc_RNA (1)...(19): siRNA sense strand
gcaaagggacuuccucaca

SEQ ID NO: 1667553 - RNA, 19 nt, Homo sapiens
  misc_RNA (1)...(19): siRNA sense strand
caauuugguuugcucauau

SEQ ID NO: 1667554 - RNA, 19 nt, Homo sapiens
  misc_RNA (1)...(19): siRNA sense strand
ggauggugguuguguuauu

SEQ ID NO: 1667555 - RNA, 19 nt, Homo sapiens
  misc_RNA (1)...(19): siRNA sense strand
acagaaguuugcaagauaa

SEQ ID NO: 1667556 - RNA, 19 nt, Homo sapiens
  misc_RNA (1)...(19): siRNA sense strand
uaacguaacugccuuucag

SEQ ID NO: 1667557 - RNA, 19 nt, Homo sapiens
  misc_RNA (1)...(19): siRNA sense strand
ggucagagaaacaguauau

SEQ ID NO: 1667558 - RNA, 19 nt, Homo sapiens
  misc_RNA (1)...(19): siRNA sense strand
gcucaucccugcagagaag

SEQ ID NO: 1667559 - RNA, 19 nt, Homo sapiens
  misc_RNA (1)...(19): siRNA sense strand
gcagcuugauccugauuug

SEQ ID NO: 1667560 - RNA, 19 nt, Homo sapiens
  misc_RNA (1)...(19): siRNA sense strand
gagcagaggcuacuacaag

SEQ ID NO: 1667561 - RNA, 19 nt, Homo sapiens
  misc_RNA (1)...(19): siRNA sense strand
gauggugguuguguuauug

SEQ ID NO: 1667562 - RNA, 19 nt, Homo sapiens
  misc_RNA (1)...(19): siRNA sense strand
gggacuuccucacauguuu

SEQ ID NO: 1667563 - RNA, 19 nt, Homo sapiens
  misc_RNA (1)...(19): siRNA sense strand
uaccaaggcucccuauuca

SEQ ID NO: 1667564 - RNA, 19 nt, Homo sapiens
  misc_RNA (1)...(19): siRNA sense strand
guauuuggauggagacaga

SEQ ID NO: 1667565 - RNA, 19 nt, Homo sapiens
  misc_RNA (1)...(19): siRNA sense strand
ugacagaaguuugcaagau

SEQ ID NO: 1667566 - RNA, 19 nt, Homo sapiens
  misc_RNA (1)...(19): siRNA sense strand
gcuauggaauggacaaaca

SEQ ID NO: 1667567 - RNA, 19 nt, Homo sapiens
  misc_RNA (1)...(19): siRNA sense strand
ggaaucaagucccucacau

SEQ ID NO: 1667568 - RNA, 19 nt, Homo sapiens
  misc_RNA (1)...(19): siRNA sense strand
gguaaacugucaucuaagg

SEQ ID NO: 1667569 - RNA, 19 nt, Homo sapiens
  misc_RNA (1)...(19): siRNA sense strand
acaagaagauauugcuguu

SEQ ID NO: 1667570 - RNA, 19 nt, Homo sapiens
  misc_RNA (1)...(19): siRNA sense strand
acacggaacugguaaaggu

SEQ ID NO: 1667571 - RNA, 19 nt, Homo sapiens
  misc_RNA (1)...(19): siRNA sense strand
gauggagacagaacuaauu

SEQ ID NO: 1667572 - RNA, 19 nt, Homo sapiens
  misc_RNA (1)...(19): siRNA sense strand
guaccagacuauggaauga

SEQ ID NO: 1667573 - RNA, 19 nt, Homo sapiens
  misc_RNA (1)...(19): siRNA sense strand
caacauuaaugggagaaga

SEQ ID NO: 1667574 - RNA, 19 nt, Homo sapiens
  misc_RNA (1)...(19): siRNA sense strand
auagugagcuuauucgaau

SEQ ID NO: 1667575 - RNA, 19 nt, Homo sapiens
  misc_RNA (1)...(19): siRNA sense strand
caacuaucacugcaaauug

SEQ ID NO: 1667576 - RNA, 19 nt, Homo sapiens
  misc_RNA (1)...(19): siRNA sense strand
uugaagagauggauaguca

SEQ ID NO: 1667577 - RNA, 19 nt, Homo sapiens
  misc_RNA (1)...(19): siRNA sense strand
ugaugggccuuuccaacua

SEQ ID NO: 1667578 - RNA, 19 nt, Homo sapiens
  misc_RNA (1)...(19): siRNA sense strand
ucagagaaacaguauauug

SEQ ID NO: 1667579 - RNA, 19 nt, Homo sapiens
  misc_RNA (1)...(19): siRNA sense strand
acaauuugguuugcucaua

SEQ ID NO: 1667580 - RNA, 19 nt, Homo sapiens
  misc_RNA (1)...(19): siRNA sense strand
uggcaugccuuaagagaga

SEQ ID NO: 1667581 - RNA, 19 nt, Homo sapiens
  misc_RNA (1)...(19): siRNA sense strand
ggaggagcuugaagagaug

SEQ ID NO: 1667582 - RNA, 19 nt, Homo sapiens
  misc_RNA (1)...(19): siRNA sense strand
uggaggagcuugaagagau

SEQ ID NO: 1667583 - RNA, 19 nt, Homo sapiens
  misc_RNA (1)...(19): siRNA sense strand
uuaaagaggcuguaaguca

SEQ ID NO: 1667584 - RNA, 19 nt, Homo sapiens
  misc_RNA (1)...(19): siRNA sense strand
gggcaacccaggacuguuu

SEQ ID NO: 1667585 - RNA, 19 nt, Homo sapiens
  misc_RNA (1)...(19): siRNA sense strand
ggaagaguggucagagaaa

SEQ ID NO: 1667586 - RNA, 19 nt, Homo sapiens
  misc_RNA (1)...(19): siRNA sense strand
ggagggaaauuguauaacc

SEQ ID NO: 1667587 - RNA, 19 nt, Homo sapiens
  misc_RNA (1)...(19): siRNA sense strand
gauguauggucuuaugcaa

SEQ ID NO: 1667588 - RNA, 19 nt, Homo sapiens
  misc_RNA (1)...(19): siRNA sense strand
aaagaaauguacuccuugu

SEQ ID NO: 1667589 - RNA, 19 nt, Homo sapiens
  misc_RNA (1)...(19): siRNA sense strand
cagaggagaugggucuauu

SEQ ID NO: 1667590 - RNA, 19 nt, Homo sapiens
  misc_RNA (1)...(19): siRNA sense strand
aauuacagcuuucccuuga

SEQ ID NO: 1667591 - RNA, 19 nt, Homo sapiens
  misc_RNA (1)...(19): siRNA sense strand
gcaccuggcccgauaucaa

SEQ ID NO: 1667592 - RNA, 19 nt, Homo sapiens
  misc_RNA (1)...(19): siRNA sense strand
ucacagcuucuucuaguaa

SEQ ID NO: 1667593 - RNA, 19 nt, Homo sapiens
  misc_RNA (1)...(19): siRNA sense strand
ugagcaacuucauaacgua

SEQ ID NO: 1667594 - RNA, 19 nt, Homo sapiens
  misc_RNA (1)...(19): siRNA sense strand
gcgacagaauuacaauaga

SEQ ID NO: 1667595 - RNA, 19 nt, Homo sapiens
  misc_RNA (1)...(19): siRNA sense strand
guaugacaaucuaccagaa

SEQ ID NO: 1667596 - RNA, 19 nt, Homo sapiens
  misc_RNA (1)...(19): siRNA sense strand
gagaugggucuauugugua

SEQ ID NO: 1667597 - RNA, 19 nt, Homo sapiens
  misc_RNA (1)...(19): siRNA sense strand
ccuaugaauuugcuuccua

SEQ ID NO: 1667598 - RNA, 19 nt, Homo sapiens
  misc_RNA (1)...(19): siRNA sense strand
ccugaggaauauccacaua

SEQ ID NO: 1667599 - RNA, 19 nt, Homo sapiens
  misc_RNA (1)...(19): siRNA sense strand
aaucugagcaacuucauaa

SEQ ID NO: 1667600 - RNA, 19 nt, Homo sapiens
  misc_RNA (1)...(19): siRNA sense strand
agaaaguuguccacacuau

SEQ ID NO: 1667601 - RNA, 19 nt, Homo sapiens
  misc_RNA (1)...(19): siRNA sense strand
ugaagaggauggugguugu

SEQ ID NO: 1667602 - RNA, 19 nt, Homo sapiens
  misc_RNA (1)...(19): siRNA sense strand
gugcuacaucguccuauua

SEQ ID NO: 1667603 - RNA, 19 nt, Homo sapiens
  misc_RNA (1)...(19): siRNA sense strand
gcagggugguguauucuac

SEQ ID NO: 1667604 - RNA, 19 nt, Homo sapiens
  misc_RNA (1)...(19): siRNA sense strand
gaugggccuuuccaacuau

SEQ ID NO: 1667605 - RNA, 19 nt, Homo sapiens
  misc_RNA (1)...(19): siRNA sense strand
ucaacauuccuccauauuu

SEQ ID NO: 1667606 - RNA, 19 nt, Homo sapiens
  misc_RNA (1)...(19): siRNA sense strand
aaggaggaguuaaacauga

SEQ ID NO: 1667607 - RNA, 19 nt, Homo sapiens
  misc_RNA (1)...(19): siRNA sense strand
accagaagcuuucccuauu

SEQ ID NO: 1667608 - RNA, 19 nt, Homo sapiens
  misc_RNA (1)...(19): siRNA sense strand
ccaagaagaccguggacaa

SEQ ID NO: 1667609 - RNA, 19 nt, Homo sapiens
  misc_RNA (1)...(19): siRNA sense strand
gcacagcgacgaguacaag

SEQ ID NO: 1667610 - RNA, 19 nt, Homo sapiens
  misc_RNA (1)...(19): siRNA sense strand
gcgcuuaccucggcuacca

SEQ ID NO: 1667611 - RNA, 19 nt, Homo sapiens
  misc_RNA (1)...(19): siRNA sense strand
acgagcggcugcagaagaa

SEQ ID NO: 1667612 - RNA, 19 nt, Homo sapiens
  misc_RNA (1)...(19): siRNA sense strand
ccucgcaggucaagagcaa

SEQ ID NO: 1667613 - RNA, 19 nt, Homo sapiens
  misc_RNA (1)...(19): siRNA sense strand
agaagaccguggacaagca

SEQ ID NO: 1667614 - RNA, 19 nt, Homo sapiens
  misc_RNA (1)...(19): siRNA sense strand
agaacgagcggcugcagaa

SEQ ID NO: 1667615 - RNA, 19 nt, Homo sapiens
  misc_RNA (1)...(19): siRNA sense strand
gggcaagaacugcaagaag

SEQ ID NO: 1667616 - RNA, 19 nt, Homo sapiens
  misc_RNA (1)...(19): siRNA sense strand
caagaagaccguggacaag

SEQ ID NO: 1667617 - RNA, 19 nt, Homo sapiens
  misc_RNA (1)...(19): siRNA sense strand
ucaagagcaaggccaagaa

SEQ ID NO: 1667618 - RNA, 19 nt, Homo sapiens
  misc_RNA (1)...(19): siRNA sense strand
gcacccugcggaacuuguu

SEQ ID NO: 1667619 - RNA, 19 nt, Homo sapiens
  misc_RNA (1)...(19): siRNA sense strand
caagagcaaggccaagaag

SEQ ID NO: 1667620 - RNA, 19 nt, Homo sapiens
  misc_RNA (1)...(19): siRNA sense strand
acaagcacagcgacgagua

SEQ ID NO: 1667621 - RNA, 19 nt, Homo sapiens
  misc_RNA (1)...(19): siRNA sense strand
ucagcacccugcggaacuu

SEQ ID NO: 1667622 - RNA, 19 nt, Homo sapiens
  misc_RNA (1)...(19): siRNA sense strand
gaaauaagcuggcacagau

SEQ ID NO: 1667623 - RNA, 19 nt, Homo sapiens
  misc_RNA (1)...(19): siRNA sense strand
gaaaguuuaugauccagua

SEQ ID NO: 1667624 - RNA, 19 nt, Homo sapiens
  misc_RNA (1)...(19): siRNA sense strand
gaaagucaagcaacgauua

SEQ ID NO: 1667625 - RNA, 19 nt, Homo sapiens
  misc_RNA (1)...(19): siRNA sense strand
ugaccgaucucccauauuu

SEQ ID NO: 1667626 - RNA, 19 nt, Homo sapiens
  misc_RNA (1)...(19): siRNA sense strand
aaacaugcauuuccucuuu

SEQ ID NO: 1667627 - RNA, 19 nt, Homo sapiens
  misc_RNA (1)...(19): siRNA sense strand
gcauucagcuauaaagaaa

SEQ ID NO: 1667628 - RNA, 19 nt, Homo sapiens
  misc_RNA (1)...(19): siRNA sense strand
gagauagugugcaaggaua

SEQ ID NO: 1667629 - RNA, 19 nt, Homo sapiens
  misc_RNA (1)...(19): siRNA sense strand
agacagggcuugccaaaug

SEQ ID NO: 1667630 - RNA, 19 nt, Homo sapiens
  misc_RNA (1)...(19): siRNA sense strand
ggagacaauuccuguggua

SEQ ID NO: 1667631 - RNA, 19 nt, Homo sapiens
  misc_RNA (1)...(19): siRNA sense strand
gacaaaggguggaggauau

SEQ ID NO: 1667632 - RNA, 19 nt, Homo sapiens
  misc_RNA (1)...(19): siRNA sense strand
gaaaauguguccagagauu

SEQ ID NO: 1667633 - RNA, 19 nt, Homo sapiens
  misc_RNA (1)...(19): siRNA sense strand
gagcuauucuugauuacaa

SEQ ID NO: 1667634 - RNA, 19 nt, Homo sapiens
  misc_RNA (1)...(19): siRNA sense strand
gaaagugcuuacccaaaug

SEQ ID NO: 1667635 - RNA, 19 nt, Homo sapiens
  misc_RNA (1)...(19): siRNA sense strand
gcaaggauaugaggaacuu

SEQ ID NO: 1667636 - RNA, 19 nt, Homo sapiens
  misc_RNA (1)...(19): siRNA sense strand
ugaaagugcuuacccaaau

SEQ ID NO: 1667637 - RNA, 19 nt, Homo sapiens
  misc_RNA (1)...(19): siRNA sense strand
auuaauggcuggaaaguuu

SEQ ID NO: 1667638 - RNA, 19 nt, Homo sapiens
  misc_RNA (1)...(19): siRNA sense strand
ucuaaucccuucuuuguga

SEQ ID NO: 1667639 - RNA, 19 nt, Homo sapiens
  misc_RNA (1)...(19): siRNA sense strand
gagagucacuacgcaaauu

SEQ ID NO: 1667640 - RNA, 19 nt, Homo sapiens
  misc_RNA (1)...(19): siRNA sense strand
gcaguaagaauugcugaua

SEQ ID NO: 1667641 - RNA, 19 nt, Homo sapiens
  misc_RNA (1)...(19): siRNA sense strand
uuaaagccauugugaaaga

SEQ ID NO: 1667642 - RNA, 19 nt, Homo sapiens
  misc_RNA (1)...(19): siRNA sense strand
gcaguuuccuucagcauuc

SEQ ID NO: 1667643 - RNA, 19 nt, Homo sapiens
  misc_RNA (1)...(19): siRNA sense strand
gauccaguaucugaauaua

SEQ ID NO: 1667644 - RNA, 19 nt, Homo sapiens
  misc_RNA (1)...(19): siRNA sense strand
uaacggacaggcacuauuu

SEQ ID NO: 1667645 - RNA, 19 nt, Homo sapiens
  misc_RNA (1)...(19): siRNA sense strand
ugugaaagaugucauguau

SEQ ID NO: 1667646 - RNA, 19 nt, Homo sapiens
  misc_RNA (1)...(19): siRNA sense strand
ggaagaacagaguaaacua

SEQ ID NO: 1667647 - RNA, 19 nt, Homo sapiens
  misc_RNA (1)...(19): siRNA sense strand
cgcauuggcuggaauauau

SEQ ID NO: 1667648 - RNA, 19 nt, Homo sapiens
  misc_RNA (1)...(19): siRNA sense strand
guauagagauagugugcaa

SEQ ID NO: 1667649 - RNA, 19 nt, Homo sapiens
  misc_RNA (1)...(19): siRNA sense strand
caguaagaauugcugauaa

SEQ ID NO: 1667650 - RNA, 19 nt, Homo sapiens
  misc_RNA (1)...(19): siRNA sense strand
guaauuaugaguucuguga

SEQ ID NO: 1667651 - RNA, 19 nt, Homo sapiens
  misc_RNA (1)...(19): siRNA sense strand
gaacagcagcgauucaaag

SEQ ID NO: 1667652 - RNA, 19 nt, Homo sapiens
  misc_RNA (1)...(19): siRNA sense strand
ggaaauaagcuggcacaga

SEQ ID NO: 1667653 - RNA, 19 nt, Homo sapiens
  misc_RNA (1)...(19): siRNA sense strand
gaacagcccagcucacauc

SEQ ID NO: 1667654 - RNA, 19 nt, Homo sapiens
  misc_RNA (1)...(19): siRNA sense strand
ggaacuugcggcuugcuua

SEQ ID NO: 1667655 - RNA, 19 nt, Homo sapiens
  misc_RNA (1)...(19): siRNA sense strand
ugacggacuuuaagcugua

SEQ ID NO: 1667656 - RNA, 19 nt, Homo sapiens
  misc_RNA (1)...(19): siRNA sense strand
auguauaucugcccauuua

SEQ ID NO: 1667657 - RNA, 19 nt, Homo sapiens
  misc_RNA (1)...(19): siRNA sense strand
ggaagaggcuccacuuuuc

SEQ ID NO: 1667658 - RNA, 19 nt, Homo sapiens
  misc_RNA (1)...(19): siRNA sense strand
gcacagucacacaagcuua

SEQ ID NO: 1667659 - RNA, 19 nt, Homo sapiens
  misc_RNA (1)...(19): siRNA sense strand
caacaaacaugcauuuccu

SEQ ID NO: 1667660 - RNA, 19 nt, Homo sapiens
  misc_RNA (1)...(19): siRNA sense strand
gaccucagaugcccauuca

SEQ ID NO: 1667661 - RNA, 19 nt, Homo sapiens
  misc_RNA (1)...(19): siRNA sense strand
gacaggcacuauuugcauu

SEQ ID NO: 1667662 - RNA, 19 nt, Homo sapiens
  misc_RNA (1)...(19): siRNA sense strand
gaagaacagaguaaacuag

SEQ ID NO: 1667663 - RNA, 19 nt, Homo sapiens
  misc_RNA (1)...(19): siRNA sense strand
gcaaaugacaaggcaguuu

SEQ ID NO: 1667664 - RNA, 19 nt, Homo sapiens
  misc_RNA (1)...(19): siRNA sense strand
acacaagcuuaucaucuuu

SEQ ID NO: 1667665 - RNA, 19 nt, Homo sapiens
  misc_RNA (1)...(19): siRNA sense strand
cacacaagcuuaucaucuu

SEQ ID NO: 1667666 - RNA, 19 nt, Homo sapiens
  misc_RNA (1)...(19): siRNA sense strand
gacagggcuugccaaauga

SEQ ID NO: 1667667 - RNA, 19 nt, Homo sapiens
  misc_RNA (1)...(19): siRNA sense strand
gcacagagccauggagaca

SEQ ID NO: 1667668 - RNA, 19 nt, Homo sapiens
  misc_RNA (1)...(19): siRNA sense strand
gcugaccgaucucccauau

SEQ ID NO: 1667669 - RNA, 19 nt, Homo sapiens
  misc_RNA (1)...(19): siRNA sense strand
ugacagugacggacuuuaa

SEQ ID NO: 1667670 - RNA, 19 nt, Homo sapiens
  misc_RNA (1)...(19): siRNA sense strand
gcuacaauuucuagucaga

SEQ ID NO: 1667671 - RNA, 19 nt, Homo sapiens
  misc_RNA (1)...(19): siRNA sense strand
ccaggagaaucaauuaaag

SEQ ID NO: 1667672 - RNA, 19 nt, Homo sapiens
  misc_RNA (1)...(19): siRNA sense strand
gcaguuuguugauuguguu

SEQ ID NO: 1667673 - RNA, 19 nt, Homo sapiens
  misc_RNA (1)...(19): siRNA sense strand
caccuacccugccaucauu

SEQ ID NO: 1667674 - RNA, 19 nt, Homo sapiens
  misc_RNA (1)...(19): siRNA sense strand
gacaauuccugugguauag

SEQ ID NO: 1667675 - RNA, 19 nt, Homo sapiens
  misc_RNA (1)...(19): siRNA sense strand
ggacgcauuggcuggaaua

SEQ ID NO: 1667676 - RNA, 19 nt, Homo sapiens
  misc_RNA (1)...(19): siRNA sense strand
gaacuugcggcuugcuuau

SEQ ID NO: 1667677 - RNA, 19 nt, Homo sapiens
  misc_RNA (1)...(19): siRNA sense strand
gcucacaucucuggcuaug

SEQ ID NO: 1667678 - RNA, 19 nt, Homo sapiens
  misc_RNA (1)...(19): siRNA sense strand
gcucuaagggauggaaaua

SEQ ID NO: 1667679 - RNA, 19 nt, Homo sapiens
  misc_RNA (1)...(19): siRNA sense strand
ccauauuucugcaguuugu

SEQ ID NO: 1667680 - RNA, 19 nt, Homo sapiens
  misc_RNA (1)...(19): siRNA sense strand
caucugugguggugcauug

SEQ ID NO: 1667681 - RNA, 19 nt, Homo sapiens
  misc_RNA (1)...(19): siRNA sense strand
gauuucagguucagugaca

SEQ ID NO: 1667682 - RNA, 19 nt, Homo sapiens
  misc_RNA (1)...(19): siRNA sense strand
agacaauuccugugguaua

SEQ ID NO: 1667683 - RNA, 19 nt, Homo sapiens
  misc_RNA (1)...(19): siRNA sense strand
agaguaaacuagggauauu

SEQ ID NO: 1667684 - RNA, 19 nt, Homo sapiens
  misc_RNA (1)...(19): siRNA sense strand
cuauuugcauucagcuaua

SEQ ID NO: 1667685 - RNA, 19 nt, Homo sapiens
  misc_RNA (1)...(19): siRNA sense strand
cuucagcauucgaguuuaa

SEQ ID NO: 1667686 - RNA, 19 nt, Homo sapiens
  misc_RNA (1)...(19): siRNA sense strand
gagagggacccgcauuuua

SEQ ID NO: 1667687 - RNA, 19 nt, Homo sapiens
  misc_RNA (1)...(19): siRNA sense strand
ucuaagggauggaaauaag

SEQ ID NO: 1667688 - RNA, 19 nt, Homo sapiens
  misc_RNA (1)...(19): siRNA sense strand
ggacaggcacuauuugcau

SEQ ID NO: 1667689 - RNA, 19 nt, Homo sapiens
  misc_RNA (1)...(19): siRNA sense strand
ggaaagucaagcaacgauu

SEQ ID NO: 1667690 - RNA, 19 nt, Homo sapiens
  misc_RNA (1)...(19): siRNA sense strand
cauuuggaauuguggguaa

SEQ ID NO: 1667691 - RNA, 19 nt, Homo sapiens
  misc_RNA (1)...(19): siRNA sense strand
caaaugacaaggcaguuuc

SEQ ID NO: 1667692 - RNA, 19 nt, Homo sapiens
  misc_RNA (1)...(19): siRNA sense strand
uggauaagcuuuggacaca

SEQ ID NO: 1667693 - RNA, 19 nt, Homo sapiens
  misc_RNA (1)...(19): siRNA sense strand
ucacaucucuggcuaugcu

SEQ ID NO: 1667694 - RNA, 19 nt, Homo sapiens
  misc_RNA (1)...(19): siRNA sense strand
caacuaguguaaaagauga

SEQ ID NO: 1667695 - RNA, 19 nt, Homo sapiens
  misc_RNA (1)...(19): siRNA sense strand
gaaaaggaguggauaagcu

SEQ ID NO: 1667696 - RNA, 19 nt, Homo sapiens
  misc_RNA (1)...(19): siRNA sense strand
acaggaccauuaaaggauu

SEQ ID NO: 1667697 - RNA, 19 nt, Homo sapiens
  misc_RNA (1)...(19): siRNA sense strand
uggaggauaugaaagugaa

SEQ ID NO: 1667698 - RNA, 19 nt, Homo sapiens
  misc_RNA (1)...(19): siRNA sense strand
acuugcggcuugcuuauaa

SEQ ID NO: 1667699 - RNA, 19 nt, Homo sapiens
  misc_RNA (1)...(19): siRNA sense strand
agacaaaggguggaggaua

SEQ ID NO: 1667700 - RNA, 19 nt, Homo sapiens
  misc_RNA (1)...(19): siRNA sense strand
uccaguaucugaauauaag

SEQ ID NO: 1667701 - RNA, 19 nt, Homo sapiens
  misc_RNA (1)...(19): siRNA sense strand
acuuuaagcuguacuucaa

SEQ ID NO: 1667702 - RNA, 19 nt, Homo sapiens
  misc_RNA (1)...(19): siRNA sense strand
cuacaggaccauuaaagga

SEQ ID NO: 1667703 - RNA, 19 nt, Homo sapiens
  misc_RNA (1)...(19): siRNA sense strand
gcauuggcuggaauauaua

SEQ ID NO: 1667704 - RNA, 19 nt, Homo sapiens
  misc_RNA (1)...(19): siRNA sense strand
cagguucagugacaucaga

SEQ ID NO: 1667705 - RNA, 19 nt, Homo sapiens
  misc_RNA (1)...(19): siRNA sense strand
cagagucccuguguuguca

SEQ ID NO: 1667706 - RNA, 19 nt, Homo sapiens
  misc_RNA (1)...(19): siRNA sense strand
aaacaggaagaacagagua

SEQ ID NO: 1667707 - RNA, 19 nt, Homo sapiens
  misc_RNA (1)...(19): siRNA sense strand
acagagccauggagacaau

SEQ ID NO: 1667708 - RNA, 19 nt, Homo sapiens
  misc_RNA (1)...(19): siRNA sense strand
gaguaaacuagggauauuu

SEQ ID NO: 1667709 - RNA, 19 nt, Homo sapiens
  misc_RNA (1)...(19): siRNA sense strand
cagcccagcucacaucucu

SEQ ID NO: 1667710 - RNA, 19 nt, Homo sapiens
  misc_RNA (1)...(19): siRNA sense strand
gagauuguguacccuucga

SEQ ID NO: 1667711 - RNA, 19 nt, Homo sapiens
  misc_RNA (1)...(19): siRNA sense strand
ugaaugguguaaacagcuu

SEQ ID NO: 1667712 - RNA, 19 nt, Homo sapiens
  misc_RNA (1)...(19): siRNA sense strand
cagaaaauguguccagaga

SEQ ID NO: 1667713 - RNA, 19 nt, Homo sapiens
  misc_RNA (1)...(19): siRNA sense strand
ccucaacaaacaugcauuu

SEQ ID NO: 1667714 - RNA, 19 nt, Homo sapiens
  misc_RNA (1)...(19): siRNA sense strand
acaagcuuaucaucuuuga

SEQ ID NO: 1667715 - RNA, 19 nt, Homo sapiens
  misc_RNA (1)...(19): siRNA sense strand
guauaucugcccauuuaug

SEQ ID NO: 1667716 - RNA, 19 nt, Homo sapiens
  misc_RNA (1)...(19): siRNA sense strand
uugcuagucugagucauuu

SEQ ID NO: 1667717 - RNA, 19 nt, Homo sapiens
  misc_RNA (1)...(19): siRNA sense strand
caggaccauuaaaggauuu

SEQ ID NO: 1667718 - RNA, 19 nt, Homo sapiens
  misc_RNA (1)...(19): siRNA sense strand
caaacaauaauggaugcua

SEQ ID NO: 1667719 - RNA, 19 nt, Homo sapiens
  misc_RNA (1)...(19): siRNA sense strand
gaaugguguaaacagcuua

SEQ ID NO: 1667720 - RNA, 19 nt, Homo sapiens
  misc_RNA (1)...(19): siRNA sense strand
ucccauauuucugcaguuu

SEQ ID NO: 1667721 - RNA, 19 nt, Homo sapiens
  misc_RNA (1)...(19): siRNA sense strand
gugaaagugcuuacccaaa

SEQ ID NO: 1667722 - RNA, 19 nt, Homo sapiens
  misc_RNA (1)...(19): siRNA sense strand
gaaauaagcuggcacagau

SEQ ID NO: 1667723 - RNA, 19 nt, Homo sapiens
  misc_RNA (1)...(19): siRNA sense strand
gaaaguuuaugauccagua

SEQ ID NO: 1667724 - RNA, 19 nt, Homo sapiens
  misc_RNA (1)...(19): siRNA sense strand
gaaagucaagcaacgauua

SEQ ID NO: 1667725 - RNA, 19 nt, Homo sapiens
  misc_RNA (1)...(19): siRNA sense strand
ugaccgaucucccauauuu

SEQ ID NO: 1667726 - RNA, 19 nt, Homo sapiens
  misc_RNA (1)...(19): siRNA sense strand
aaacaugcauuuccucuuu

SEQ ID NO: 1667727 - RNA, 19 nt, Homo sapiens
  misc_RNA (1)...(19): siRNA sense strand
gcauucagcuauaaagaaa

SEQ ID NO: 1667728 - RNA, 19 nt, Homo sapiens
  misc_RNA (1)...(19): siRNA sense strand
gagauagugugcaaggaua

SEQ ID NO: 1667729 - RNA, 19 nt, Homo sapiens
  misc_RNA (1)...(19): siRNA sense strand
agacagggcuugccaaaug

SEQ ID NO: 1667730 - RNA, 19 nt, Homo sapiens
  misc_RNA (1)...(19): siRNA sense strand
ggagacaauuccuguggua

SEQ ID NO: 1667731 - RNA, 19 nt, Homo sapiens
  misc_RNA (1)...(19): siRNA sense strand
gacaaaggguggaggauau

SEQ ID NO: 1667732 - RNA, 19 nt, Homo sapiens
  misc_RNA (1)...(19): siRNA sense strand
gaaaauguguccagagauu

SEQ ID NO: 1667733 - RNA, 19 nt, Homo sapiens
  misc_RNA (1)...(19): siRNA sense strand
gagcuauucuugauuacaa

SEQ ID NO: 1667734 - RNA, 19 nt, Homo sapiens
  misc_RNA (1)...(19): siRNA sense strand
gaaagugcuuacccaaaug

SEQ ID NO: 1667735 - RNA, 19 nt, Homo sapiens
  misc_RNA (1)...(19): siRNA sense strand
gcaaggauaugaggaacuu

SEQ ID NO: 1667736 - RNA, 19 nt, Homo sapiens
  misc_RNA (1)...(19): siRNA sense strand
ugaaagugcuuacccaaau

SEQ ID NO: 1667737 - RNA, 19 nt, Homo sapiens
  misc_RNA (1)...(19): siRNA sense strand
auuaauggcuggaaaguuu

SEQ ID NO: 1667738 - RNA, 19 nt, Homo sapiens
  misc_RNA (1)...(19): siRNA sense strand
gagagucacuacgcaaauu

SEQ ID NO: 1667739 - RNA, 19 nt, Homo sapiens
  misc_RNA (1)...(19): siRNA sense strand
gcaguaagaauugcugaua

SEQ ID NO: 1667740 - RNA, 19 nt, Homo sapiens
  misc_RNA (1)...(19): siRNA sense strand
uuaaagccauugugaaaga

SEQ ID NO: 1667741 - RNA, 19 nt, Homo sapiens
  misc_RNA (1)...(19): siRNA sense strand
gcaguuuccuucagcauuc

SEQ ID NO: 1667742 - RNA, 19 nt, Homo sapiens
  misc_RNA (1)...(19): siRNA sense strand
gauccaguaucugaauaua

SEQ ID NO: 1667743 - RNA, 19 nt, Homo sapiens
  misc_RNA (1)...(19): siRNA sense strand
uaacggacaggcacuauuu

SEQ ID NO: 1667744 - RNA, 19 nt, Homo sapiens
  misc_RNA (1)...(19): siRNA sense strand
ugugaaagaugucauguau

SEQ ID NO: 1667745 - RNA, 19 nt, Homo sapiens
  misc_RNA (1)...(19): siRNA sense strand
ggaagaacagaguaaacua

SEQ ID NO: 1667746 - RNA, 19 nt, Homo sapiens
  misc_RNA (1)...(19): siRNA sense strand
cgcauuggcuggaauauau

SEQ ID NO: 1667747 - RNA, 19 nt, Homo sapiens
  misc_RNA (1)...(19): siRNA sense strand
guauagagauagugugcaa

SEQ ID NO: 1667748 - RNA, 19 nt, Homo sapiens
  misc_RNA (1)...(19): siRNA sense strand
caguaagaauugcugauaa

SEQ ID NO: 1667749 - RNA, 19 nt, Homo sapiens
  misc_RNA (1)...(19): siRNA sense strand
guaauuaugaguucuguga

SEQ ID NO: 1667750 - RNA, 19 nt, Homo sapiens
  misc_RNA (1)...(19): siRNA sense strand
gaacagcagcgauucaaag

SEQ ID NO: 1667751 - RNA, 19 nt, Homo sapiens
  misc_RNA (1)...(19): siRNA sense strand
ggaaauaagcuggcacaga

SEQ ID NO: 1667752 - RNA, 19 nt, Homo sapiens
  misc_RNA (1)...(19): siRNA sense strand
gaacagcccagcucacauc

SEQ ID NO: 1667753 - RNA, 19 nt, Homo sapiens
  misc_RNA (1)...(19): siRNA sense strand
ggaacuugcggcuugcuua

SEQ ID NO: 1667754 - RNA, 19 nt, Homo sapiens
  misc_RNA (1)...(19): siRNA sense strand
ugacggacuuuaagcugua

SEQ ID NO: 1667755 - RNA, 19 nt, Homo sapiens
  misc_RNA (1)...(19): siRNA sense strand
auguauaucugcccauuua

SEQ ID NO: 1667756 - RNA, 19 nt, Homo sapiens
  misc_RNA (1)...(19): siRNA sense strand
ggaagaggcuccacuuuuc

SEQ ID NO: 1667757 - RNA, 19 nt, Homo sapiens
  misc_RNA (1)...(19): siRNA sense strand
gcacagucacacaagcuua

SEQ ID NO: 1667758 - RNA, 19 nt, Homo sapiens
  misc_RNA (1)...(19): siRNA sense strand
caacaaacaugcauuuccu

SEQ ID NO: 1667759 - RNA, 19 nt, Homo sapiens
  misc_RNA (1)...(19): siRNA sense strand
gacaggcacuauuugcauu

SEQ ID NO: 1667760 - RNA, 19 nt, Homo sapiens
  misc_RNA (1)...(19): siRNA sense strand
gaagaacagaguaaacuag

SEQ ID NO: 1667761 - RNA, 19 nt, Homo sapiens
  misc_RNA (1)...(19): siRNA sense strand
gcaaaugacaaggcaguuu

SEQ ID NO: 1667762 - RNA, 19 nt, Homo sapiens
  misc_RNA (1)...(19): siRNA sense strand
acacaagcuuaucaucuuu

SEQ ID NO: 1667763 - RNA, 19 nt, Homo sapiens
  misc_RNA (1)...(19): siRNA sense strand
cacacaagcuuaucaucuu

SEQ ID NO: 1667764 - RNA, 19 nt, Homo sapiens
  misc_RNA (1)...(19): siRNA sense strand
gacagggcuugccaaauga

SEQ ID NO: 1667765 - RNA, 19 nt, Homo sapiens
  misc_RNA (1)...(19): siRNA sense strand
gcacagagccauggagaca

SEQ ID NO: 1667766 - RNA, 19 nt, Homo sapiens
  misc_RNA (1)...(19): siRNA sense strand
gcugaccgaucucccauau

SEQ ID NO: 1667767 - RNA, 19 nt, Homo sapiens
  misc_RNA (1)...(19): siRNA sense strand
ugacagugacggacuuuaa

SEQ ID NO: 1667768 - RNA, 19 nt, Homo sapiens
  misc_RNA (1)...(19): siRNA sense strand
gcuacaauuucuagucaga

SEQ ID NO: 1667769 - RNA, 19 nt, Homo sapiens
  misc_RNA (1)...(19): siRNA sense strand
ccaggagaaucaauuaaag

SEQ ID NO: 1667770 - RNA, 19 nt, Homo sapiens
  misc_RNA (1)...(19): siRNA sense strand
gcaguuuguugauuguguu

SEQ ID NO: 1667771 - RNA, 19 nt, Homo sapiens
  misc_RNA (1)...(19): siRNA sense strand
caccuacccugccaucauu

SEQ ID NO: 1667772 - RNA, 19 nt, Homo sapiens
  misc_RNA (1)...(19): siRNA sense strand
gacaauuccugugguauag

SEQ ID NO: 1667773 - RNA, 19 nt, Homo sapiens
  misc_RNA (1)...(19): siRNA sense strand
ggacgcauuggcuggaaua

SEQ ID NO: 1667774 - RNA, 19 nt, Homo sapiens
  misc_RNA (1)...(19): siRNA sense strand
gaacuugcggcuugcuuau

SEQ ID NO: 1667775 - RNA, 19 nt, Homo sapiens
  misc_RNA (1)...(19): siRNA sense strand
gcucacaucucuggcuaug

SEQ ID NO: 1667776 - RNA, 19 nt, Homo sapiens
  misc_RNA (1)...(19): siRNA sense strand
gcucuaagggauggaaaua

SEQ ID NO: 1667777 - RNA, 19 nt, Homo sapiens
  misc_RNA (1)...(19): siRNA sense strand
ccauauuucugcaguuugu

SEQ ID NO: 1667778 - RNA, 19 nt, Homo sapiens
  misc_RNA (1)...(19): siRNA sense strand
caucugugguggugcauug

SEQ ID NO: 1667779 - RNA, 19 nt, Homo sapiens
  misc_RNA (1)...(19): siRNA sense strand
gauuucagguucagugaca

SEQ ID NO: 1667780 - RNA, 19 nt, Homo sapiens
  misc_RNA (1)...(19): siRNA sense strand
agacaauuccugugguaua

SEQ ID NO: 1667781 - RNA, 19 nt, Homo sapiens
  misc_RNA (1)...(19): siRNA sense strand
agaguaaacuagggauauu

SEQ ID NO: 1667782 - RNA, 19 nt, Homo sapiens
  misc_RNA (1)...(19): siRNA sense strand
cuauuugcauucagcuaua

SEQ ID NO: 1667783 - RNA, 19 nt, Homo sapiens
  misc_RNA (1)...(19): siRNA sense strand
cuucagcauucgaguuuaa

SEQ ID NO: 1667784 - RNA, 19 nt, Homo sapiens
  misc_RNA (1)...(19): siRNA sense strand
ucuaagggauggaaauaag

SEQ ID NO: 1667785 - RNA, 19 nt, Homo sapiens
  misc_RNA (1)...(19): siRNA sense strand
ggacaggcacuauuugcau

SEQ ID NO: 1667786 - RNA, 19 nt, Homo sapiens
  misc_RNA (1)...(19): siRNA sense strand
gagagggacccgcauuuua

SEQ ID NO: 1667787 - RNA, 19 nt, Homo sapiens
  misc_RNA (1)...(19): siRNA sense strand
ggaaagucaagcaacgauu

SEQ ID NO: 1667788 - RNA, 19 nt, Homo sapiens
  misc_RNA (1)...(19): siRNA sense strand
caaaugacaaggcaguuuc

SEQ ID NO: 1667789 - RNA, 19 nt, Homo sapiens
  misc_RNA (1)...(19): siRNA sense strand
uggauaagcuuuggacaca

SEQ ID NO: 1667790 - RNA, 19 nt, Homo sapiens
  misc_RNA (1)...(19): siRNA sense strand
ucacaucucuggcuaugcu

SEQ ID NO: 1667791 - RNA, 19 nt, Homo sapiens
  misc_RNA (1)...(19): siRNA sense strand
caacuaguguaaaagauga

SEQ ID NO: 1667792 - RNA, 19 nt, Homo sapiens
  misc_RNA (1)...(19): siRNA sense strand
gaaaaggaguggauaagcu

SEQ ID NO: 1667793 - RNA, 19 nt, Homo sapiens
  misc_RNA (1)...(19): siRNA sense strand
acaggaccauuaaaggauu

SEQ ID NO: 1667794 - RNA, 19 nt, Homo sapiens
  misc_RNA (1)...(19): siRNA sense strand
uggaggauaugaaagugaa

SEQ ID NO: 1667795 - RNA, 19 nt, Homo sapiens
  misc_RNA (1)...(19): siRNA sense strand
acuugcggcuugcuuauaa

SEQ ID NO: 1667796 - RNA, 19 nt, Homo sapiens
  misc_RNA (1)...(19): siRNA sense strand
agacaaaggguggaggaua

SEQ ID NO: 1667797 - RNA, 19 nt, Homo sapiens
  misc_RNA (1)...(19): siRNA sense strand
uccaguaucugaauauaag

SEQ ID NO: 1667798 - RNA, 19 nt, Homo sapiens
  misc_RNA (1)...(19): siRNA sense strand
acuuuaagcuguacuucaa

SEQ ID NO: 1667799 - RNA, 19 nt, Homo sapiens
  misc_RNA (1)...(19): siRNA sense strand
cuacaggaccauuaaagga

SEQ ID NO: 1667800 - RNA, 19 nt, Homo sapiens
  misc_RNA (1)...(19): siRNA sense strand
gcauuggcuggaauauaua

SEQ ID NO: 1667801 - RNA, 19 nt, Homo sapiens
  misc_RNA (1)...(19): siRNA sense strand
cagagucccuguguuguca

SEQ ID NO: 1667802 - RNA, 19 nt, Homo sapiens
  misc_RNA (1)...(19): siRNA sense strand
cagguucagugacaucaga

SEQ ID NO: 1667803 - RNA, 19 nt, Homo sapiens
  misc_RNA (1)...(19): siRNA sense strand
aaacaggaagaacagagua

SEQ ID NO: 1667804 - RNA, 19 nt, Homo sapiens
  misc_RNA (1)...(19): siRNA sense strand
acagagccauggagacaau

SEQ ID NO: 1667805 - RNA, 19 nt, Homo sapiens
  misc_RNA (1)...(19): siRNA sense strand
gaguaaacuagggauauuu

SEQ ID NO: 1667806 - RNA, 19 nt, Homo sapiens
  misc_RNA (1)...(19): siRNA sense strand
ugaaugguguaaacagcuu

SEQ ID NO: 1667807 - RNA, 19 nt, Homo sapiens
  misc_RNA (1)...(19): siRNA sense strand
cagaaaauguguccagaga

SEQ ID NO: 1667808 - RNA, 19 nt, Homo sapiens
  misc_RNA (1)...(19): siRNA sense strand
cagcccagcucacaucucu

SEQ ID NO: 1667809 - RNA, 19 nt, Homo sapiens
  misc_RNA (1)...(19): siRNA sense strand
gagauuguguacccuucga

SEQ ID NO: 1667810 - RNA, 19 nt, Homo sapiens
  misc_RNA (1)...(19): siRNA sense strand
ccucaacaaacaugcauuu

SEQ ID NO: 1667811 - RNA, 19 nt, Homo sapiens
  misc_RNA (1)...(19): siRNA sense strand
acaagcuuaucaucuuuga

SEQ ID NO: 1667812 - RNA, 19 nt, Homo sapiens
  misc_RNA (1)...(19): siRNA sense strand
guauaucugcccauuuaug

SEQ ID NO: 1667813 - RNA, 19 nt, Homo sapiens
  misc_RNA (1)...(19): siRNA sense strand
caggaccauuaaaggauuu

SEQ ID NO: 1667814 - RNA, 19 nt, Homo sapiens
  misc_RNA (1)...(19): siRNA sense strand
guaaacuagggauauuuga

SEQ ID NO: 1667815 - RNA, 19 nt, Homo sapiens
  misc_RNA (1)...(19): siRNA sense strand
ucccauauuucugcaguuu

SEQ ID NO: 1667816 - RNA, 19 nt, Homo sapiens
  misc_RNA (1)...(19): siRNA sense strand
gugaaagugcuuacccaaa

SEQ ID NO: 1667817 - RNA, 19 nt, Homo sapiens
  misc_RNA (1)...(19): siRNA sense strand
caaacaauaauggaugcua

SEQ ID NO: 1667818 - RNA, 19 nt, Homo sapiens
  misc_RNA (1)...(19): siRNA sense strand
gaaugguguaaacagcuua

SEQ ID NO: 1667819 - RNA, 19 nt, Homo sapiens
  misc_RNA (1)...(19): siRNA sense strand
guuacuacaggaccauuaa

SEQ ID NO: 1667820 - RNA, 19 nt, Homo sapiens
  misc_RNA (1)...(19): siRNA sense strand
cgaguuuaaugagcuauuc

SEQ ID NO: 1667821 - RNA, 19 nt, Homo sapiens
  misc_RNA (1)...(19): siRNA sense strand
gauuugaaacucucguaga

SEQ ID NO: 1667822 - RNA, 19 nt, Homo sapiens
  misc_RNA (1)...(19): siRNA sense strand
gaagagagauggcuuauca

SEQ ID NO: 1667823 - RNA, 19 nt, Homo sapiens
  misc_RNA (1)...(19): siRNA sense strand
gaaaguggcuuauccaaug

SEQ ID NO: 1667824 - RNA, 19 nt, Homo sapiens
  misc_RNA (1)...(19): siRNA sense strand
gaaggcaguuucugggaua

SEQ ID NO: 1667825 - RNA, 19 nt, Homo sapiens
  misc_RNA (1)...(19): siRNA sense strand
gcuauaauauggacagauu

SEQ ID NO: 1667826 - RNA, 19 nt, Homo sapiens
  misc_RNA (1)...(19): siRNA sense strand
gcaaagggaucggaagaga

SEQ ID NO: 1667827 - RNA, 19 nt, Homo sapiens
  misc_RNA (1)...(19): siRNA sense strand
gaagaaguguauuaugaca

SEQ ID NO: 1667828 - RNA, 19 nt, Homo sapiens
  misc_RNA (1)...(19): siRNA sense strand
ggaaagaaagugauuguca

SEQ ID NO: 1667829 - RNA, 19 nt, Homo sapiens
  misc_RNA (1)...(19): siRNA sense strand
gaauuucucuacucaacga

SEQ ID NO: 1667830 - RNA, 19 nt, Homo sapiens
  misc_RNA (1)...(19): siRNA sense strand
ucaacgagcuauaauaugg

SEQ ID NO: 1667831 - RNA, 19 nt, Homo sapiens
  misc_RNA (1)...(19): siRNA sense strand
ggaagauccuggaauuucu

SEQ ID NO: 1667832 - RNA, 19 nt, Homo sapiens
  misc_RNA (1)...(19): siRNA sense strand
gccaagaagaaguguauua

SEQ ID NO: 1667833 - RNA, 19 nt, Homo sapiens
  misc_RNA (1)...(19): siRNA sense strand
caccaacacuucuuugaau

SEQ ID NO: 1667834 - RNA, 19 nt, Homo sapiens
  misc_RNA (1)...(19): siRNA sense strand
cagagaugcuccaaggaaa

SEQ ID NO: 1667835 - RNA, 19 nt, Homo sapiens
  misc_RNA (1)...(19): siRNA sense strand
agaaauccaugcaggaaga

SEQ ID NO: 1667836 - RNA, 19 nt, Homo sapiens
  misc_RNA (1)...(19): siRNA sense strand
ggacuagacaugcucauuc

SEQ ID NO: 1667837 - RNA, 19 nt, Homo sapiens
  misc_RNA (1)...(19): siRNA sense strand
ggaaaguggcuuauccaau

SEQ ID NO: 1667838 - RNA, 19 nt, Homo sapiens
  misc_RNA (1)...(19): siRNA sense strand
gaccuucgcagagcaauuu

SEQ ID NO: 1667839 - RNA, 19 nt, Homo sapiens
  misc_RNA (1)...(19): siRNA sense strand
caacacuucuuugaaucuu

SEQ ID NO: 1667840 - RNA, 19 nt, Homo sapiens
  misc_RNA (1)...(19): siRNA sense strand
agaaaggaauauucagugu

SEQ ID NO: 1667841 - RNA, 19 nt, Homo sapiens
  misc_RNA (1)...(19): siRNA sense strand
ggacagauucauaaacaag

SEQ ID NO: 1667842 - RNA, 19 nt, Homo sapiens
  misc_RNA (1)...(19): siRNA sense strand
ccagagaugcuccaaggaa

SEQ ID NO: 1667843 - RNA, 19 nt, Homo sapiens
  misc_RNA (1)...(19): siRNA sense strand
ggaccacucuucugaucag

SEQ ID NO: 1667844 - RNA, 19 nt, Homo sapiens
  misc_RNA (1)...(19): siRNA sense strand
caagaagaaguguauuaug

SEQ ID NO: 1667845 - RNA, 19 nt, Homo sapiens
  misc_RNA (1)...(19): siRNA sense strand
caucagaaaggaauauuca

SEQ ID NO: 1667846 - RNA, 19 nt, Homo sapiens
  misc_RNA (1)...(19): siRNA sense strand
ccaagaagaaguguauuau

SEQ ID NO: 1667847 - RNA, 19 nt, Homo sapiens
  misc_RNA (1)...(19): siRNA sense strand
ggaauucagaccagagaug

SEQ ID NO: 1667848 - RNA, 19 nt, Homo sapiens
  misc_RNA (1)...(19): siRNA sense strand
caaaagaaacucuacagaa

SEQ ID NO: 1667849 - RNA, 19 nt, Homo sapiens
  misc_RNA (1)...(19): siRNA sense strand
ccaaggaaagaaagugauu

SEQ ID NO: 1667850 - RNA, 19 nt, Homo sapiens
  misc_RNA (1)...(19): siRNA sense strand
gacuagacaugcucauucu

SEQ ID NO: 1667851 - RNA, 19 nt, Homo sapiens
  misc_RNA (1)...(19): siRNA sense strand
aaaagaaacucuacagaag

SEQ ID NO: 1667852 - RNA, 19 nt, Homo sapiens
  misc_RNA (1)...(19): siRNA sense strand
gcaaaagcauggaagucaa

SEQ ID NO: 1667853 - RNA, 19 nt, Homo sapiens
  misc_RNA (1)...(19): siRNA sense strand
aaagggaucggaagagaga

SEQ ID NO: 1667854 - RNA, 19 nt, Homo sapiens
  misc_RNA (1)...(19): siRNA sense strand
aagaaacucuacagaaggu

SEQ ID NO: 1667855 - RNA, 19 nt, Homo sapiens
  misc_RNA (1)...(19): siRNA sense strand
ccucauagacacagaaaca

SEQ ID NO: 1667856 - RNA, 19 nt, Homo sapiens
  misc_RNA (1)...(19): siRNA sense strand
gcgccaagaagaaguguau

SEQ ID NO: 1667857 - RNA, 19 nt, Homo sapiens
  misc_RNA (1)...(19): siRNA sense strand
gagaugcuccaaggaaaga

SEQ ID NO: 1667858 - RNA, 19 nt, Homo sapiens
  misc_RNA (1)...(19): siRNA sense strand
ucaccaacacuucuuugaa

SEQ ID NO: 1667859 - RNA, 19 nt, Homo sapiens
  misc_RNA (1)...(19): siRNA sense strand
guucuucuccuccaucaga

SEQ ID NO: 1667860 - RNA, 19 nt, Homo sapiens
  misc_RNA (1)...(19): siRNA sense strand
gaaugugcccuggagauca

SEQ ID NO: 1667861 - RNA, 19 nt, Homo sapiens
  misc_RNA (1)...(19): siRNA sense strand
acacagaaacagccaugaa

SEQ ID NO: 1667862 - RNA, 19 nt, Homo sapiens
  misc_RNA (1)...(19): siRNA sense strand
guucuuggccucauagaca

SEQ ID NO: 1667863 - RNA, 19 nt, Homo sapiens
  misc_RNA (1)...(19): siRNA sense strand
cagcaaagggaucggaaga

SEQ ID NO: 1667864 - RNA, 19 nt, Homo sapiens
  misc_RNA (1)...(19): siRNA sense strand
cuacuacuauucugcaaac

SEQ ID NO: 1667865 - RNA, 19 nt, Homo sapiens
  misc_RNA (1)...(19): siRNA sense strand
gaggaauucagaccagaga

SEQ ID NO: 1667866 - RNA, 19 nt, Homo sapiens
  misc_RNA (1)...(19): siRNA sense strand
acucaacgagcuauaauau

SEQ ID NO: 1667867 - RNA, 19 nt, Homo sapiens
  misc_RNA (1)...(19): siRNA sense strand
ccuggaauuucucuacuca

SEQ ID NO: 1667868 - RNA, 19 nt, Homo sapiens
  misc_RNA (1)...(19): siRNA sense strand
ggaaugugcccuggagauc

SEQ ID NO: 1667869 - RNA, 19 nt, Homo sapiens
  misc_RNA (1)...(19): siRNA sense strand
gauaguccauaugcaagca

SEQ ID NO: 1667870 - RNA, 19 nt, Homo sapiens
  misc_RNA (1)...(19): siRNA sense strand
gagcuauaauauggacaga

SEQ ID NO: 1667871 - RNA, 19 nt, Homo sapiens
  misc_RNA (1)...(19): siRNA sense strand
ucagaaauccaugcaggaa

SEQ ID NO: 1667872 - RNA, 19 nt, Homo sapiens
  misc_RNA (1)...(19): siRNA sense strand
uagacaugcucauucucaa

SEQ ID NO: 1667873 - RNA, 19 nt, Homo sapiens
  misc_RNA (1)...(19): siRNA sense strand
auggacagauucauaaaca

SEQ ID NO: 1667874 - RNA, 19 nt, Homo sapiens
  misc_RNA (1)...(19): siRNA sense strand
augaugauauucaccaugu

SEQ ID NO: 1667875 - RNA, 19 nt, Homo sapiens
  misc_RNA (1)...(19): siRNA sense strand
gagcagccucagcacacua

SEQ ID NO: 1667876 - RNA, 19 nt, Homo sapiens
  misc_RNA (1)...(19): siRNA sense strand
ucagaaaggaauauucagu

SEQ ID NO: 1667877 - RNA, 19 nt, Homo sapiens
  misc_RNA (1)...(19): siRNA sense strand
cuagacaugcucauucuca

SEQ ID NO: 1667878 - RNA, 19 nt, Homo sapiens
  misc_RNA (1)...(19): siRNA sense strand
uuucugggauaguccauau

SEQ ID NO: 1667879 - RNA, 19 nt, Homo sapiens
  misc_RNA (1)...(19): siRNA sense strand
gggaaaguggcuuauccaa

SEQ ID NO: 1667880 - RNA, 19 nt, Homo sapiens
  misc_RNA (1)...(19): siRNA sense strand
ccacaucaccaacacuucu

SEQ ID NO: 1667881 - RNA, 19 nt, Homo sapiens
  misc_RNA (1)...(19): siRNA sense strand
caaggaaagaaagugauug

SEQ ID NO: 1667882 - RNA, 19 nt, Homo sapiens
  misc_RNA (1)...(19): siRNA sense strand
caacgagcuauaauaugga

SEQ ID NO: 1667883 - RNA, 19 nt, Homo sapiens
  misc_RNA (1)...(19): siRNA sense strand
uggaauuucucuacucaac

SEQ ID NO: 1667884 - RNA, 19 nt, Homo sapiens
  misc_RNA (1)...(19): siRNA sense strand
gagcucugcgccaagaaga

SEQ ID NO: 1667885 - RNA, 19 nt, Homo sapiens
  misc_RNA (1)...(19): siRNA sense strand
cuucauggccuacuacuac

SEQ ID NO: 1667886 - RNA, 19 nt, Homo sapiens
  misc_RNA (1)...(19): siRNA sense strand
uccaaugguugcugccuau

SEQ ID NO: 1667887 - RNA, 19 nt, Homo sapiens
  misc_RNA (1)...(19): siRNA sense strand
gaugcuccaaggaaagaaa

SEQ ID NO: 1667888 - RNA, 19 nt, Homo sapiens
  misc_RNA (1)...(19): siRNA sense strand
gauccuggaauuucucuac

SEQ ID NO: 1667889 - RNA, 19 nt, Homo sapiens
  misc_RNA (1)...(19): siRNA sense strand
gaagauccuggaauuucuc

SEQ ID NO: 1667890 - RNA, 19 nt, Homo sapiens
  misc_RNA (1)...(19): siRNA sense strand
acagcgaggucaaaagaaa

SEQ ID NO: 1667891 - RNA, 19 nt, Homo sapiens
  misc_RNA (1)...(19): siRNA sense strand
ucaaucacucucuguguuc

SEQ ID NO: 1667892 - RNA, 19 nt, Homo sapiens
  misc_RNA (1)...(19): siRNA sense strand
aaaguggcuuauccaaugg

SEQ ID NO: 1667893 - RNA, 19 nt, Homo sapiens
  misc_RNA (1)...(19): siRNA sense strand
guuacgugguccugacugu

SEQ ID NO: 1667894 - RNA, 19 nt, Homo sapiens
  misc_RNA (1)...(19): siRNA sense strand
aaugguugcugccuauucu

SEQ ID NO: 1667895 - RNA, 19 nt, Homo sapiens
  misc_RNA (1)...(19): siRNA sense strand
ggagcagccucagcacacu

SEQ ID NO: 1667896 - RNA, 19 nt, Homo sapiens
  misc_RNA (1)...(19): siRNA sense strand
aucaaucacucucuguguu

SEQ ID NO: 1667897 - RNA, 19 nt, Homo sapiens
  misc_RNA (1)...(19): siRNA sense strand
ggaagagagauggcuuauc

SEQ ID NO: 1667898 - RNA, 19 nt, Homo sapiens
  misc_RNA (1)...(19): siRNA sense strand
gacagauucauaaacaagu

SEQ ID NO: 1667899 - RNA, 19 nt, Homo sapiens
  misc_RNA (1)...(19): siRNA sense strand
uggacagauucauaaacaa

SEQ ID NO: 1667900 - RNA, 19 nt, Homo sapiens
  misc_RNA (1)...(19): siRNA sense strand
ucggaagagagauggcuua

SEQ ID NO: 1667901 - RNA, 19 nt, Homo sapiens
  misc_RNA (1)...(19): siRNA sense strand
caaugguugcugccuauuc

SEQ ID NO: 1667902 - RNA, 19 nt, Homo sapiens
  misc_RNA (1)...(19): siRNA sense strand
ggguucuucuccuccauca

SEQ ID NO: 1667903 - RNA, 19 nt, Homo sapiens
  misc_RNA (1)...(19): siRNA sense strand
cuacucaacgagcuauaau

SEQ ID NO: 1667904 - RNA, 19 nt, Homo sapiens
  misc_RNA (1)...(19): siRNA sense strand
gaagagagauggcuuauca

SEQ ID NO: 1667905 - RNA, 19 nt, Homo sapiens
  misc_RNA (1)...(19): siRNA sense strand
gaaaguggcuuauccaaug

SEQ ID NO: 1667906 - RNA, 19 nt, Homo sapiens
  misc_RNA (1)...(19): siRNA sense strand
gaaggcaguuucugggaua

SEQ ID NO: 1667907 - RNA, 19 nt, Homo sapiens
  misc_RNA (1)...(19): siRNA sense strand
gcuauaauauggacagauu

SEQ ID NO: 1667908 - RNA, 19 nt, Homo sapiens
  misc_RNA (1)...(19): siRNA sense strand
gcaaagggaucggaagaga

SEQ ID NO: 1667909 - RNA, 19 nt, Homo sapiens
  misc_RNA (1)...(19): siRNA sense strand
gaagaaguguauuaugaca

SEQ ID NO: 1667910 - RNA, 19 nt, Homo sapiens
  misc_RNA (1)...(19): siRNA sense strand
ggaaagaaagugauuguca

SEQ ID NO: 1667911 - RNA, 19 nt, Homo sapiens
  misc_RNA (1)...(19): siRNA sense strand
gaauuucucuacucaacga

SEQ ID NO: 1667912 - RNA, 19 nt, Homo sapiens
  misc_RNA (1)...(19): siRNA sense strand
ucaacgagcuauaauaugg

SEQ ID NO: 1667913 - RNA, 19 nt, Homo sapiens
  misc_RNA (1)...(19): siRNA sense strand
ggaagauccuggaauuucu

SEQ ID NO: 1667914 - RNA, 19 nt, Homo sapiens
  misc_RNA (1)...(19): siRNA sense strand
gccaagaagaaguguauua

SEQ ID NO: 1667915 - RNA, 19 nt, Homo sapiens
  misc_RNA (1)...(19): siRNA sense strand
caccaacacuucuuugaau

SEQ ID NO: 1667916 - RNA, 19 nt, Homo sapiens
  misc_RNA (1)...(19): siRNA sense strand
cagagaugcuccaaggaaa

SEQ ID NO: 1667917 - RNA, 19 nt, Homo sapiens
  misc_RNA (1)...(19): siRNA sense strand
agaaauccaugcaggaaga

SEQ ID NO: 1667918 - RNA, 19 nt, Homo sapiens
  misc_RNA (1)...(19): siRNA sense strand
ggacuagacaugcucauuc

SEQ ID NO: 1667919 - RNA, 19 nt, Homo sapiens
  misc_RNA (1)...(19): siRNA sense strand
ggaaaguggcuuauccaau

SEQ ID NO: 1667920 - RNA, 19 nt, Homo sapiens
  misc_RNA (1)...(19): siRNA sense strand
gaccuucgcagagcaauuu

SEQ ID NO: 1667921 - RNA, 19 nt, Homo sapiens
  misc_RNA (1)...(19): siRNA sense strand
caacacuucuuugaaucuu

SEQ ID NO: 1667922 - RNA, 19 nt, Homo sapiens
  misc_RNA (1)...(19): siRNA sense strand
agaaaggaauauucagugu

SEQ ID NO: 1667923 - RNA, 19 nt, Homo sapiens
  misc_RNA (1)...(19): siRNA sense strand
ggacagauucauaaacaag

SEQ ID NO: 1667924 - RNA, 19 nt, Homo sapiens
  misc_RNA (1)...(19): siRNA sense strand
ccagagaugcuccaaggaa

SEQ ID NO: 1667925 - RNA, 19 nt, Homo sapiens
  misc_RNA (1)...(19): siRNA sense strand
ggaccacucuucugaucag

SEQ ID NO: 1667926 - RNA, 19 nt, Homo sapiens
  misc_RNA (1)...(19): siRNA sense strand
caagaagaaguguauuaug

SEQ ID NO: 1667927 - RNA, 19 nt, Homo sapiens
  misc_RNA (1)...(19): siRNA sense strand
caucagaaaggaauauuca

SEQ ID NO: 1667928 - RNA, 19 nt, Homo sapiens
  misc_RNA (1)...(19): siRNA sense strand
ccaagaagaaguguauuau

SEQ ID NO: 1667929 - RNA, 19 nt, Homo sapiens
  misc_RNA (1)...(19): siRNA sense strand
ggaauucagaccagagaug

SEQ ID NO: 1667930 - RNA, 19 nt, Homo sapiens
  misc_RNA (1)...(19): siRNA sense strand
caaaagaaacucuacagaa

SEQ ID NO: 1667931 - RNA, 19 nt, Homo sapiens
  misc_RNA (1)...(19): siRNA sense strand
ccaaggaaagaaagugauu

SEQ ID NO: 1667932 - RNA, 19 nt, Homo sapiens
  misc_RNA (1)...(19): siRNA sense strand
gacuagacaugcucauucu

SEQ ID NO: 1667933 - RNA, 19 nt, Homo sapiens
  misc_RNA (1)...(19): siRNA sense strand
aaaagaaacucuacagaag

SEQ ID NO: 1667934 - RNA, 19 nt, Homo sapiens
  misc_RNA (1)...(19): siRNA sense strand
gcaaaagcauggaagucaa

SEQ ID NO: 1667935 - RNA, 19 nt, Homo sapiens
  misc_RNA (1)...(19): siRNA sense strand
aaagggaucggaagagaga

SEQ ID NO: 1667936 - RNA, 19 nt, Homo sapiens
  misc_RNA (1)...(19): siRNA sense strand
aagaaacucuacagaaggu

SEQ ID NO: 1667937 - RNA, 19 nt, Homo sapiens
  misc_RNA (1)...(19): siRNA sense strand
ccucauagacacagaaaca

SEQ ID NO: 1667938 - RNA, 19 nt, Homo sapiens
  misc_RNA (1)...(19): siRNA sense strand
gcgccaagaagaaguguau

SEQ ID NO: 1667939 - RNA, 19 nt, Homo sapiens
  misc_RNA (1)...(19): siRNA sense strand
gagaugcuccaaggaaaga

SEQ ID NO: 1667940 - RNA, 19 nt, Homo sapiens
  misc_RNA (1)...(19): siRNA sense strand
ucaccaacacuucuuugaa

SEQ ID NO: 1667941 - RNA, 19 nt, Homo sapiens
  misc_RNA (1)...(19): siRNA sense strand
guucuucuccuccaucaga

SEQ ID NO: 1667942 - RNA, 19 nt, Homo sapiens
  misc_RNA (1)...(19): siRNA sense strand
gaaugugcccuggagauca

SEQ ID NO: 1667943 - RNA, 19 nt, Homo sapiens
  misc_RNA (1)...(19): siRNA sense strand
acacagaaacagccaugaa

SEQ ID NO: 1667944 - RNA, 19 nt, Homo sapiens
  misc_RNA (1)...(19): siRNA sense strand
guucuuggccucauagaca

SEQ ID NO: 1667945 - RNA, 19 nt, Homo sapiens
  misc_RNA (1)...(19): siRNA sense strand
cagcaaagggaucggaaga

SEQ ID NO: 1667946 - RNA, 19 nt, Homo sapiens
  misc_RNA (1)...(19): siRNA sense strand
cuacuacuauucugcaaac

SEQ ID NO: 1667947 - RNA, 19 nt, Homo sapiens
  misc_RNA (1)...(19): siRNA sense strand
gaggaauucagaccagaga

SEQ ID NO: 1667948 - RNA, 19 nt, Homo sapiens
  misc_RNA (1)...(19): siRNA sense strand
acucaacgagcuauaauau

SEQ ID NO: 1667949 - RNA, 19 nt, Homo sapiens
  misc_RNA (1)...(19): siRNA sense strand
ccuggaauuucucuacuca

SEQ ID NO: 1667950 - RNA, 19 nt, Homo sapiens
  misc_RNA (1)...(19): siRNA sense strand
ggaaugugcccuggagauc

SEQ ID NO: 1667951 - RNA, 19 nt, Homo sapiens
  misc_RNA (1)...(19): siRNA sense strand
gauaguccauaugcaagca

SEQ ID NO: 1667952 - RNA, 19 nt, Homo sapiens
  misc_RNA (1)...(19): siRNA sense strand
gagcuauaauauggacaga

SEQ ID NO: 1667953 - RNA, 19 nt, Homo sapiens
  misc_RNA (1)...(19): siRNA sense strand
ucagaaauccaugcaggaa

SEQ ID NO: 1667954 - RNA, 19 nt, Homo sapiens
  misc_RNA (1)...(19): siRNA sense strand
uagacaugcucauucucaa

SEQ ID NO: 1667955 - RNA, 19 nt, Homo sapiens
  misc_RNA (1)...(19): siRNA sense strand
auggacagauucauaaaca

SEQ ID NO: 1667956 - RNA, 19 nt, Homo sapiens
  misc_RNA (1)...(19): siRNA sense strand
augaugauauucaccaugu

SEQ ID NO: 1667957 - RNA, 19 nt, Homo sapiens
  misc_RNA (1)...(19): siRNA sense strand
gagcagccucagcacacua

SEQ ID NO: 1667958 - RNA, 19 nt, Homo sapiens
  misc_RNA (1)...(19): siRNA sense strand
ucagaaaggaauauucagu

SEQ ID NO: 1667959 - RNA, 19 nt, Homo sapiens
  misc_RNA (1)...(19): siRNA sense strand
cuagacaugcucauucuca

SEQ ID NO: 1667960 - RNA, 19 nt, Homo sapiens
  misc_RNA (1)...(19): siRNA sense strand
uuucugggauaguccauau

SEQ ID NO: 1667961 - RNA, 19 nt, Homo sapiens
  misc_RNA (1)...(19): siRNA sense strand
gggaaaguggcuuauccaa

SEQ ID NO: 1667962 - RNA, 19 nt, Homo sapiens
  misc_RNA (1)...(19): siRNA sense strand
ccacaucaccaacacuucu

SEQ ID NO: 1667963 - RNA, 19 nt, Homo sapiens
  misc_RNA (1)...(19): siRNA sense strand
caaggaaagaaagugauug

SEQ ID NO: 1667964 - RNA, 19 nt, Homo sapiens
  misc_RNA (1)...(19): siRNA sense strand
caacgagcuauaauaugga

SEQ ID NO: 1667965 - RNA, 19 nt, Homo sapiens
  misc_RNA (1)...(19): siRNA sense strand
uggaauuucucuacucaac

SEQ ID NO: 1667966 - RNA, 19 nt, Homo sapiens
  misc_RNA (1)...(19): siRNA sense strand
gagcucugcgccaagaaga

SEQ ID NO: 1667967 - RNA, 19 nt, Homo sapiens
  misc_RNA (1)...(19): siRNA sense strand
cuucauggccuacuacuac

SEQ ID NO: 1667968 - RNA, 19 nt, Homo sapiens
  misc_RNA (1)...(19): siRNA sense strand
uccaaugguugcugccuau

SEQ ID NO: 1667969 - RNA, 19 nt, Homo sapiens
  misc_RNA (1)...(19): siRNA sense strand
gaugcuccaaggaaagaaa

SEQ ID NO: 1667970 - RNA, 19 nt, Homo sapiens
  misc_RNA (1)...(19): siRNA sense strand
gauccuggaauuucucuac

SEQ ID NO: 1667971 - RNA, 19 nt, Homo sapiens
  misc_RNA (1)...(19): siRNA sense strand
gaagauccuggaauuucuc

SEQ ID NO: 1667972 - RNA, 19 nt, Homo sapiens
  misc_RNA (1)...(19): siRNA sense strand
acagcgaggucaaaagaaa

SEQ ID NO: 1667973 - RNA, 19 nt, Homo sapiens
  misc_RNA (1)...(19): siRNA sense strand
ucaaucacucucuguguuc

SEQ ID NO: 1667974 - RNA, 19 nt, Homo sapiens
  misc_RNA (1)...(19): siRNA sense strand
aaaguggcuuauccaaugg

SEQ ID NO: 1667975 - RNA, 19 nt, Homo sapiens
  misc_RNA (1)...(19): siRNA sense strand
guuacgugguccugacugu

SEQ ID NO: 1667976 - RNA, 19 nt, Homo sapiens
  misc_RNA (1)...(19): siRNA sense strand
aaugguugcugccuauucu

SEQ ID NO: 1667977 - RNA, 19 nt, Homo sapiens
  misc_RNA (1)...(19): siRNA sense strand
ggagcagccucagcacacu

SEQ ID NO: 1667978 - RNA, 19 nt, Homo sapiens
  misc_RNA (1)...(19): siRNA sense strand
aucaaucacucucuguguu

SEQ ID NO: 1667979 - RNA, 19 nt, Homo sapiens
  misc_RNA (1)...(19): siRNA sense strand
ggaagagagauggcuuauc

SEQ ID NO: 1667980 - RNA, 19 nt, Homo sapiens
  misc_RNA (1)...(19): siRNA sense strand
gacagauucauaaacaagu

SEQ ID NO: 1667981 - RNA, 19 nt, Homo sapiens
  misc_RNA (1)...(19): siRNA sense strand
uggacagauucauaaacaa

SEQ ID NO: 1667982 - RNA, 19 nt, Homo sapiens
  misc_RNA (1)...(19): siRNA sense strand
ucggaagagagauggcuua

SEQ ID NO: 1667983 - RNA, 19 nt, Homo sapiens
  misc_RNA (1)...(19): siRNA sense strand
caaugguugcugccuauuc

SEQ ID NO: 1667984 - RNA, 19 nt, Homo sapiens
  misc_RNA (1)...(19): siRNA sense strand
ggguucuucuccuccauca

SEQ ID NO: 1667985 - RNA, 19 nt, Homo sapiens
  misc_RNA (1)...(19): siRNA sense strand
cuacucaacgagcuauaau

SEQ ID NO: 1667986 - RNA, 19 nt, Homo sapiens
  misc_RNA (1)...(19): siRNA sense strand
ggacagaccugcugccuua

SEQ ID NO: 1667987 - RNA, 19 nt, Homo sapiens
  misc_RNA (1)...(19): siRNA sense strand
cugcauaucuucugguuua

SEQ ID NO: 1667988 - RNA, 19 nt, Homo sapiens
  misc_RNA (1)...(19): siRNA sense strand
gaagaagacagcaacauga

SEQ ID NO: 1667989 - RNA, 19 nt, Homo sapiens
  misc_RNA (1)...(19): siRNA sense strand
ggaaugcuguggauggaaa

SEQ ID NO: 1667990 - RNA, 19 nt, Homo sapiens
  misc_RNA (1)...(19): siRNA sense strand
gaagaagacccgugggaaa

SEQ ID NO: 1667991 - RNA, 19 nt, Homo sapiens
  misc_RNA (1)...(19): siRNA sense strand
ggaaacaggucuugaagcu

SEQ ID NO: 1667992 - RNA, 19 nt, Homo sapiens
  misc_RNA (1)...(19): siRNA sense strand
gaagacagcaacaugaaga

SEQ ID NO: 1667993 - RNA, 19 nt, Homo sapiens
  misc_RNA (1)...(19): siRNA sense strand
ggaauucacagacgagaaa

SEQ ID NO: 1667994 - RNA, 19 nt, Homo sapiens
  misc_RNA (1)...(19): siRNA sense strand
ggaagaagacagcaacaug

SEQ ID NO: 1667995 - RNA, 19 nt, Homo sapiens
  misc_RNA (1)...(19): siRNA sense strand
ucuugaagcugacccauuu

SEQ ID NO: 1667996 - RNA, 19 nt, Homo sapiens
  misc_RNA (1)...(19): siRNA sense strand
gggaagacauccaguguac

SEQ ID NO: 1667997 - RNA, 19 nt, Homo sapiens
  misc_RNA (1)...(19): siRNA sense strand
ggacuucaccaggauauug

SEQ ID NO: 1667998 - RNA, 19 nt, Homo sapiens
  misc_RNA (1)...(19): siRNA sense strand
acaugaagauggagugcua

SEQ ID NO: 1667999 - RNA, 19 nt, Homo sapiens
  misc_RNA (1)...(19): siRNA sense strand
ucuggaaccugauuaagga

SEQ ID NO: 1668000 - RNA, 19 nt, Homo sapiens
  misc_RNA (1)...(19): siRNA sense strand
cuacggaaauccuaacuac

SEQ ID NO: 1668001 - RNA, 19 nt, Homo sapiens
  misc_RNA (1)...(19): siRNA sense strand
caaugaagcgagagucuug

SEQ ID NO: 1668002 - RNA, 19 nt, Homo sapiens
  misc_RNA (1)...(19): siRNA sense strand
ucaaugacuccaauauuug

SEQ ID NO: 1668003 - RNA, 19 nt, Homo sapiens
  misc_RNA (1)...(19): siRNA sense strand
ugccuuaacuccuugauuc

SEQ ID NO: 1668004 - RNA, 19 nt, Homo sapiens
  misc_RNA (1)...(19): siRNA sense strand
ggagaagcgucccuuucca

SEQ ID NO: 1668005 - RNA, 19 nt, Homo sapiens
  misc_RNA (1)...(19): siRNA sense strand
ggagggcaguaugagcuuu

SEQ ID NO: 1668006 - RNA, 19 nt, Homo sapiens
  misc_RNA (1)...(19): siRNA sense strand
gcaacgugcccuuguuugu

SEQ ID NO: 1668007 - RNA, 19 nt, Homo sapiens
  misc_RNA (1)...(19): siRNA sense strand
uuaaggaccagaucacuga

SEQ ID NO: 1668008 - RNA, 19 nt, Homo sapiens
  misc_RNA (1)...(19): siRNA sense strand
gaaaaugguucugcuucaa

SEQ ID NO: 1668009 - RNA, 19 nt, Homo sapiens
  misc_RNA (1)...(19): siRNA sense strand
gccagauccuuccaaugaa

SEQ ID NO: 1668010 - RNA, 19 nt, Homo sapiens
  misc_RNA (1)...(19): siRNA sense strand
ccagggaguuaucaagcaa

SEQ ID NO: 1668011 - RNA, 19 nt, Homo sapiens
  misc_RNA (1)...(19): siRNA sense strand
ucacugaugugcacuuggu

SEQ ID NO: 1668012 - RNA, 19 nt, Homo sapiens
  misc_RNA (1)...(19): siRNA sense strand
aagcgucccuuuccagaug

SEQ ID NO: 1668013 - RNA, 19 nt, Homo sapiens
  misc_RNA (1)...(19): siRNA sense strand
ggaaaaugguucugcuuca

SEQ ID NO: 1668014 - RNA, 19 nt, Homo sapiens
  misc_RNA (1)...(19): siRNA sense strand
agagagagcagcccagaga

SEQ ID NO: 1668015 - RNA, 19 nt, Homo sapiens
  misc_RNA (1)...(19): siRNA sense strand
gaggagaagcgucccuuuc

SEQ ID NO: 1668016 - RNA, 19 nt, Homo sapiens
  misc_RNA (1)...(19): siRNA sense strand
agacuccggucauuacugu

SEQ ID NO: 1668017 - RNA, 19 nt, Homo sapiens
  misc_RNA (1)...(19): siRNA sense strand
agccagauccuuccaauga

SEQ ID NO: 1668018 - RNA, 19 nt, Homo sapiens
  misc_RNA (1)...(19): siRNA sense strand
ugugagaacugugggaaga

SEQ ID NO: 1668019 - RNA, 19 nt, Homo sapiens
  misc_RNA (1)...(19): siRNA sense strand
acagcaacaugaagagaga

SEQ ID NO: 1668020 - RNA, 19 nt, Homo sapiens
  misc_RNA (1)...(19): siRNA sense strand
aaaugguucugcuucaaug

SEQ ID NO: 1668021 - RNA, 19 nt, Homo sapiens
  misc_RNA (1)...(19): siRNA sense strand
ggaaacugcauaucuucug

SEQ ID NO: 1668022 - RNA, 19 nt, Homo sapiens
  misc_RNA (1)...(19): siRNA sense strand
gaagcgagagucuugugau

SEQ ID NO: 1668023 - RNA, 19 nt, Homo sapiens
  misc_RNA (1)...(19): siRNA sense strand
ugauucagguguucguaau

SEQ ID NO: 1668024 - RNA, 19 nt, Homo sapiens
  misc_RNA (1)...(19): siRNA sense strand
gaagacauccaguguaccu

SEQ ID NO: 1668025 - RNA, 19 nt, Homo sapiens
  misc_RNA (1)...(19): siRNA sense strand
gcgagagucuugugaugcu

SEQ ID NO: 1668026 - RNA, 19 nt, Homo sapiens
  misc_RNA (1)...(19): siRNA sense strand
caacuguaccucaaacucu

SEQ ID NO: 1668027 - RNA, 19 nt, Homo sapiens
  misc_RNA (1)...(19): siRNA sense strand
cguaaugaauguggacuuc

SEQ ID NO: 1668028 - RNA, 19 nt, Homo sapiens
  misc_RNA (1)...(19): siRNA sense strand
ggucauuacugugucuaca

SEQ ID NO: 1668029 - RNA, 19 nt, Homo sapiens
  misc_RNA (1)...(19): siRNA sense strand
guaccuacggaaauccuaa

SEQ ID NO: 1668030 - RNA, 19 nt, Homo sapiens
  misc_RNA (1)...(19): siRNA sense strand
gugcaacgugcccuuguuu

SEQ ID NO: 1668031 - RNA, 19 nt, Homo sapiens
  misc_RNA (1)...(19): siRNA sense strand
cauaucuucugguuuacau

SEQ ID NO: 1668032 - RNA, 19 nt, Homo sapiens
  misc_RNA (1)...(19): siRNA sense strand
aagcgagagucuugugaug

SEQ ID NO: 1668033 - RNA, 19 nt, Homo sapiens
  misc_RNA (1)...(19): siRNA sense strand
cucauggccugguugguuu

SEQ ID NO: 1668034 - RNA, 19 nt, Homo sapiens
  misc_RNA (1)...(19): siRNA sense strand
gaagacccgugggaaacag

SEQ ID NO: 1668035 - RNA, 19 nt, Homo sapiens
  misc_RNA (1)...(19): siRNA sense strand
ucaccaggauauugaagag

SEQ ID NO: 1668036 - RNA, 19 nt, Homo sapiens
  misc_RNA (1)...(19): siRNA sense strand
aagaagacagcaacaugaa

SEQ ID NO: 1668037 - RNA, 19 nt, Homo sapiens
  misc_RNA (1)...(19): siRNA sense strand
ucauuacugugucuacauc

SEQ ID NO: 1668038 - RNA, 19 nt, Homo sapiens
  misc_RNA (1)...(19): siRNA sense strand
ucagccagauccuuccaau

SEQ ID NO: 1668039 - RNA, 19 nt, Homo sapiens
  misc_RNA (1)...(19): siRNA sense strand
ucacagacgagaaagaucu

SEQ ID NO: 1668040 - RNA, 19 nt, Homo sapiens
  misc_RNA (1)...(19): siRNA sense strand
aaacucuggaaccugauua

SEQ ID NO: 1668041 - RNA, 19 nt, Homo sapiens
  misc_RNA (1)...(19): siRNA sense strand
uaucuucugguuuacauga

SEQ ID NO: 1668042 - RNA, 19 nt, Homo sapiens
  misc_RNA (1)...(19): siRNA sense strand
auucagguguucguaauga

SEQ ID NO: 1668043 - RNA, 19 nt, Homo sapiens
  misc_RNA (1)...(19): siRNA sense strand
uggcagacuccggucauua

SEQ ID NO: 1668044 - RNA, 19 nt, Homo sapiens
  misc_RNA (1)...(19): siRNA sense strand
caggacagccggcagaaag

SEQ ID NO: 1668045 - RNA, 19 nt, Homo sapiens
  misc_RNA (1)...(19): siRNA sense strand
gcaggacagccggcagaaa

SEQ ID NO: 1668046 - RNA, 19 nt, Homo sapiens
  misc_RNA (1)...(19): siRNA sense strand
gaagcgucccuuuccagau

SEQ ID NO: 1668047 - RNA, 19 nt, Homo sapiens
  misc_RNA (1)...(19): siRNA sense strand
ccucauggccugguugguu

SEQ ID NO: 1668048 - RNA, 19 nt, Homo sapiens
  misc_RNA (1)...(19): siRNA sense strand
cuucaaugacuccaauauu

SEQ ID NO: 1668049 - RNA, 19 nt, Homo sapiens
  misc_RNA (1)...(19): siRNA sense strand
gugggaaacaggucuugaa

SEQ ID NO: 1668050 - RNA, 19 nt, Homo sapiens
  misc_RNA (1)...(19): siRNA sense strand
gacuucaccaggauauuga

SEQ ID NO: 1668051 - RNA, 19 nt, Homo sapiens
  misc_RNA (1)...(19): siRNA sense strand
gaucugccacucccuguac

SEQ ID NO: 1668052 - RNA, 19 nt, Homo sapiens
  misc_RNA (1)...(19): siRNA sense strand
caaacucuggaaccugauu

SEQ ID NO: 1668053 - RNA, 19 nt, Homo sapiens
  misc_RNA (1)...(19): siRNA sense strand
caacgugcccuuguuuguc

SEQ ID NO: 1668054 - RNA, 19 nt, Homo sapiens
  misc_RNA (1)...(19): siRNA sense strand
uaacuaccacuggcaggaa

SEQ ID NO: 1668055 - RNA, 19 nt, Homo sapiens
  misc_RNA (1)...(19): siRNA sense strand
cucaugcgauucuccauca

SEQ ID NO: 1668056 - RNA, 19 nt, Homo sapiens
  misc_RNA (1)...(19): siRNA sense strand
ugagaacugugggaagaag

SEQ ID NO: 1668057 - RNA, 19 nt, Homo sapiens
  misc_RNA (1)...(19): siRNA sense strand
ccaguguaccuacggaaau

SEQ ID NO: 1668058 - RNA, 19 nt, Homo sapiens
  misc_RNA (1)...(19): siRNA sense strand
caguguaccuacggaaauc

SEQ ID NO: 1668059 - RNA, 19 nt, Homo sapiens
  misc_RNA (1)...(19): siRNA sense strand
acaugaugcugcccaacug

SEQ ID NO: 1668060 - RNA, 19 nt, Homo sapiens
  misc_RNA (1)...(19): siRNA sense strand
ugguuuacaugaagaugga

SEQ ID NO: 1668061 - RNA, 19 nt, Homo sapiens
  misc_RNA (1)...(19): siRNA sense strand
caggaaacugcauaucuuc

SEQ ID NO: 1668062 - RNA, 19 nt, Homo sapiens
  misc_RNA (1)...(19): siRNA sense strand
ccauggagaguagcagaaa

SEQ ID NO: 1668063 - RNA, 19 nt, Homo sapiens
  misc_RNA (1)...(19): siRNA sense strand
uuacacaacauuggacaga

SEQ ID NO: 1668064 - RNA, 19 nt, Homo sapiens
  misc_RNA (1)...(19): siRNA sense strand
gcuucaaugacuccaauau

SEQ ID NO: 1668065 - RNA, 19 nt, Homo sapiens
  misc_RNA (1)...(19): siRNA sense strand
ggacagccggcagaaagca

SEQ ID NO: 1668066 - RNA, 19 nt, Homo sapiens
  misc_RNA (1)...(19): siRNA sense strand
ccugcugccuuaacuccuu

SEQ ID NO: 1668067 - RNA, 19 nt, Homo sapiens
  misc_RNA (1)...(19): siRNA sense strand
gagaacugugggaagaaga

SEQ ID NO: 1668068 - RNA, 19 nt, Homo sapiens
  misc_RNA (1)...(19): siRNA sense strand
gcccaacuguaccucaaac

SEQ ID NO: 1668069 - RNA, 19 nt, Homo sapiens
  misc_RNA (1)...(19): siRNA sense strand
uguauacgauccgggugaa

SEQ ID NO: 1668070 - RNA, 19 nt, Homo sapiens
  misc_RNA (1)...(19): siRNA sense strand
cugcuucaaugacuccaau

SEQ ID NO: 1668071 - RNA, 19 nt, Homo sapiens
  misc_RNA (1)...(19): siRNA sense strand
ccggaaugcuguggaugga

SEQ ID NO: 1668072 - RNA, 19 nt, Homo sapiens
  misc_RNA (1)...(19): siRNA sense strand
ccaggauauugaagaggau

SEQ ID NO: 1668073 - RNA, 19 nt, Homo sapiens
  misc_RNA (1)...(19): siRNA sense strand
gaagagauguuacccagua

SEQ ID NO: 1668074 - RNA, 19 nt, Homo sapiens
  misc_RNA (1)...(19): siRNA sense strand
ccuaugaggugcucuguua

SEQ ID NO: 1668075 - RNA, 19 nt, Homo sapiens
  misc_RNA (1)...(19): siRNA sense strand
gcacaaacacacucaauga

SEQ ID NO: 1668076 - RNA, 19 nt, Homo sapiens
  misc_RNA (1)...(19): siRNA sense strand
ucaauaagguugccaugaa

SEQ ID NO: 1668077 - RNA, 19 nt, Homo sapiens
  misc_RNA (1)...(19): siRNA sense strand
ucaauaagaugaucagcaa

SEQ ID NO: 1668078 - RNA, 19 nt, Homo sapiens
  misc_RNA (1)...(19): siRNA sense strand
gaggguggcuuugaguaua

SEQ ID NO: 1668079 - RNA, 19 nt, Homo sapiens
  misc_RNA (1)...(19): siRNA sense strand
ucagaaauauccucgcaaa

SEQ ID NO: 1668080 - RNA, 19 nt, Homo sapiens
  misc_RNA (1)...(19): siRNA sense strand
ugaagaaauucgacaagaa

SEQ ID NO: 1668081 - RNA, 19 nt, Homo sapiens
  misc_RNA (1)...(19): siRNA sense strand
gagcagagaacagaaagua

SEQ ID NO: 1668082 - RNA, 19 nt, Homo sapiens
  misc_RNA (1)...(19): siRNA sense strand
ccaccaaucccucaaagua

SEQ ID NO: 1668083 - RNA, 19 nt, Homo sapiens
  misc_RNA (1)...(19): siRNA sense strand
gaccagaccuuggagaaug

SEQ ID NO: 1668084 - RNA, 19 nt, Homo sapiens
  misc_RNA (1)...(19): siRNA sense strand
ccaggaggcccguguauuu

SEQ ID NO: 1668085 - RNA, 19 nt, Homo sapiens
  misc_RNA (1)...(19): siRNA sense strand
gaggaaacguucaccuugu

SEQ ID NO: 1668086 - RNA, 19 nt, Homo sapiens
  misc_RNA (1)...(19): siRNA sense strand
ggaaugcacccuugugaga

SEQ ID NO: 1668087 - RNA, 19 nt, Homo sapiens
  misc_RNA (1)...(19): siRNA sense strand
gcaccaugcugcaggcuau

SEQ ID NO: 1668088 - RNA, 19 nt, Homo sapiens
  misc_RNA (1)...(19): siRNA sense strand
cagacaaagugccggauaa

SEQ ID NO: 1668089 - RNA, 19 nt, Homo sapiens
  misc_RNA (1)...(19): siRNA sense strand
uaaauguccuggagcagaa

SEQ ID NO: 1668090 - RNA, 19 nt, Homo sapiens
  misc_RNA (1)...(19): siRNA sense strand
ugucagaaaucucggauga

SEQ ID NO: 1668091 - RNA, 19 nt, Homo sapiens
  misc_RNA (1)...(19): siRNA sense strand
gcagaucuccuccuucaug

SEQ ID NO: 1668092 - RNA, 19 nt, Homo sapiens
  misc_RNA (1)...(19): siRNA sense strand
gcaguacacucuagaacca

SEQ ID NO: 1668093 - RNA, 19 nt, Homo sapiens
  misc_RNA (1)...(19): siRNA sense strand
agacaugacugggaaagaa

SEQ ID NO: 1668094 - RNA, 19 nt, Homo sapiens
  misc_RNA (1)...(19): siRNA sense strand
gggaugaauuugagaagga

SEQ ID NO: 1668095 - RNA, 19 nt, Homo sapiens
  misc_RNA (1)...(19): siRNA sense strand
caagaaggaugaggaguca

SEQ ID NO: 1668096 - RNA, 19 nt, Homo sapiens
  misc_RNA (1)...(19): siRNA sense strand
ucagaaaucucggaugaau

SEQ ID NO: 1668097 - RNA, 19 nt, Homo sapiens
  misc_RNA (1)...(19): siRNA sense strand
gaggcagcauccagugaua

SEQ ID NO: 1668098 - RNA, 19 nt, Homo sapiens
  misc_RNA (1)...(19): siRNA sense strand
ucaaacagccugagaaagu

SEQ ID NO: 1668099 - RNA, 19 nt, Homo sapiens
  misc_RNA (1)...(19): siRNA sense strand
ggaagaggguggcuuugag

SEQ ID NO: 1668100 - RNA, 19 nt, Homo sapiens
  misc_RNA (1)...(19): siRNA sense strand
gaaauauccucgcaaacac

SEQ ID NO: 1668101 - RNA, 19 nt, Homo sapiens
  misc_RNA (1)...(19): siRNA sense strand
gaagaaauucgacaagaag

SEQ ID NO: 1668102 - RNA, 19 nt, Homo sapiens
  misc_RNA (1)...(19): siRNA sense strand
gcccguguauuuaaugaaa

SEQ ID NO: 1668103 - RNA, 19 nt, Homo sapiens
  misc_RNA (1)...(19): siRNA sense strand
ggaaguuacuguagcugau

SEQ ID NO: 1668104 - RNA, 19 nt, Homo sapiens
  misc_RNA (1)...(19): siRNA sense strand
gcuggaagaucuggaaguu

SEQ ID NO: 1668105 - RNA, 19 nt, Homo sapiens
  misc_RNA (1)...(19): siRNA sense strand
acauucagcugcaugauga

SEQ ID NO: 1668106 - RNA, 19 nt, Homo sapiens
  misc_RNA (1)...(19): siRNA sense strand
gauggaugaugacaaugaa

SEQ ID NO: 1668107 - RNA, 19 nt, Homo sapiens
  misc_RNA (1)...(19): siRNA sense strand
gcucugcccucgugucuuc

SEQ ID NO: 1668108 - RNA, 19 nt, Homo sapiens
  misc_RNA (1)...(19): siRNA sense strand
gaagaggugugugauggau

SEQ ID NO: 1668109 - RNA, 19 nt, Homo sapiens
  misc_RNA (1)...(19): siRNA sense strand
gauguuacccaguaucuug

SEQ ID NO: 1668110 - RNA, 19 nt, Homo sapiens
  misc_RNA (1)...(19): siRNA sense strand
ugagugcucuggcgaaguu

SEQ ID NO: 1668111 - RNA, 19 nt, Homo sapiens
  misc_RNA (1)...(19): siRNA sense strand
uacauccgcuucaucuaua

SEQ ID NO: 1668112 - RNA, 19 nt, Homo sapiens
  misc_RNA (1)...(19): siRNA sense strand
guacauccgcuucaucuau

SEQ ID NO: 1668113 - RNA, 19 nt, Homo sapiens
  misc_RNA (1)...(19): siRNA sense strand
aagcagaucuccuccuuca

SEQ ID NO: 1668114 - RNA, 19 nt, Homo sapiens
  misc_RNA (1)...(19): siRNA sense strand
gcuccuggcugguguguuc

SEQ ID NO: 1668115 - RNA, 19 nt, Homo sapiens
  misc_RNA (1)...(19): siRNA sense strand
cgagccaccuucuaccuaa

SEQ ID NO: 1668116 - RNA, 19 nt, Homo sapiens
  misc_RNA (1)...(19): siRNA sense strand
caucaacccucggaaaugu

SEQ ID NO: 1668117 - RNA, 19 nt, Homo sapiens
  misc_RNA (1)...(19): siRNA sense strand
aaggagaugucuugcauug

SEQ ID NO: 1668118 - RNA, 19 nt, Homo sapiens
  misc_RNA (1)...(19): siRNA sense strand
uacuguagcugaucacauu

SEQ ID NO: 1668119 - RNA, 19 nt, Homo sapiens
  misc_RNA (1)...(19): siRNA sense strand
gcaaacacgccguccuuau

SEQ ID NO: 1668120 - RNA, 19 nt, Homo sapiens
  misc_RNA (1)...(19): siRNA sense strand
gaagaggcuguggguaaua

SEQ ID NO: 1668121 - RNA, 19 nt, Homo sapiens
  misc_RNA (1)...(19): siRNA sense strand
ugaagcagaucuccuccuu

SEQ ID NO: 1668122 - RNA, 19 nt, Homo sapiens
  misc_RNA (1)...(19): siRNA sense strand
caaacagccugagaaagug

SEQ ID NO: 1668123 - RNA, 19 nt, Homo sapiens
  misc_RNA (1)...(19): siRNA sense strand
caaacacgccguccuuaug

SEQ ID NO: 1668124 - RNA, 19 nt, Homo sapiens
  misc_RNA (1)...(19): siRNA sense strand
ggccuuaagucucccuuug

SEQ ID NO: 1668125 - RNA, 19 nt, Homo sapiens
  misc_RNA (1)...(19): siRNA sense strand
gcuaugaggaugaguaugu

SEQ ID NO: 1668126 - RNA, 19 nt, Homo sapiens
  misc_RNA (1)...(19): siRNA sense strand
gcagagcagagaacagaaa

SEQ ID NO: 1668127 - RNA, 19 nt, Homo sapiens
  misc_RNA (1)...(19): siRNA sense strand
ggugugugauggaugauga

SEQ ID NO: 1668128 - RNA, 19 nt, Homo sapiens
  misc_RNA (1)...(19): siRNA sense strand
uggagaaccuggucacaga

SEQ ID NO: 1668129 - RNA, 19 nt, Homo sapiens
  misc_RNA (1)...(19): siRNA sense strand
uaaugaaacucccaucaac

SEQ ID NO: 1668130 - RNA, 19 nt, Homo sapiens
  misc_RNA (1)...(19): siRNA sense strand
uggaggagcugccaguaga

SEQ ID NO: 1668131 - RNA, 19 nt, Homo sapiens
  misc_RNA (1)...(19): siRNA sense strand
ggaggcccguguauuuaau

SEQ ID NO: 1668132 - RNA, 19 nt, Homo sapiens
  misc_RNA (1)...(19): siRNA sense strand
uggguaauauugugaaguu

SEQ ID NO: 1668133 - RNA, 19 nt, Homo sapiens
  misc_RNA (1)...(19): siRNA sense strand
caauaagguugccaugaag

SEQ ID NO: 1668134 - RNA, 19 nt, Homo sapiens
  misc_RNA (1)...(19): siRNA sense strand
aaacacgccguccuuauga

SEQ ID NO: 1668135 - RNA, 19 nt, Homo sapiens
  misc_RNA (1)...(19): siRNA sense strand
agaaaucucggaugaauuc

SEQ ID NO: 1668136 - RNA, 19 nt, Homo sapiens
  misc_RNA (1)...(19): siRNA sense strand
cgucggaugugcuacuuga

SEQ ID NO: 1668137 - RNA, 19 nt, Homo sapiens
  misc_RNA (1)...(19): siRNA sense strand
uggaagaucuggaaguuac

SEQ ID NO: 1668138 - RNA, 19 nt, Homo sapiens
  misc_RNA (1)...(19): siRNA sense strand
gagagcugcuugcgcaaca

SEQ ID NO: 1668139 - RNA, 19 nt, Homo sapiens
  misc_RNA (1)...(19): siRNA sense strand
gaaacugaacuucgaagca

SEQ ID NO: 1668140 - RNA, 19 nt, Homo sapiens
  misc_RNA (1)...(19): siRNA sense strand
ucaugaaacugaacuucga

SEQ ID NO: 1668141 - RNA, 19 nt, Homo sapiens
  misc_RNA (1)...(19): siRNA sense strand
caaaguacauccgcuucau

SEQ ID NO: 1668142 - RNA, 19 nt, Homo sapiens
  misc_RNA (1)...(19): siRNA sense strand
caaggcugcucuccgcuau

SEQ ID NO: 1668143 - RNA, 19 nt, Homo sapiens
  misc_RNA (1)...(19): siRNA sense strand
caggaggcccguguauuua

SEQ ID NO: 1668144 - RNA, 19 nt, Homo sapiens
  misc_RNA (1)...(19): siRNA sense strand
ugaagaggcuguggguaau

SEQ ID NO: 1668145 - RNA, 19 nt, Homo sapiens
  misc_RNA (1)...(19): siRNA sense strand
ggaugaugacaaugaagua

SEQ ID NO: 1668146 - RNA, 19 nt, Homo sapiens
  misc_RNA (1)...(19): siRNA sense strand
gcaacaagcacgagauggu

SEQ ID NO: 1668147 - RNA, 19 nt, Homo sapiens
  misc_RNA (1)...(19): siRNA sense strand
acaaagugccggauaacaa

SEQ ID NO: 1668148 - RNA, 19 nt, Homo sapiens
  misc_RNA (1)...(19): siRNA sense strand
ggaccgagccaccuucuac

SEQ ID NO: 1668149 - RNA, 19 nt, Homo sapiens
  misc_RNA (1)...(19): siRNA sense strand
gaugaugacaaugaaguaa

SEQ ID NO: 1668150 - RNA, 19 nt, Homo sapiens
  misc_RNA (1)...(19): siRNA sense strand
agaggugugugauggauga

SEQ ID NO: 1668151 - RNA, 19 nt, Homo sapiens
  misc_RNA (1)...(19): siRNA sense strand
agaaauauccucgcaaaca

SEQ ID NO: 1668152 - RNA, 19 nt, Homo sapiens
  misc_RNA (1)...(19): siRNA sense strand
gcuauugagcgcuacauga

SEQ ID NO: 1668153 - RNA, 19 nt, Homo sapiens
  misc_RNA (1)...(19): siRNA sense strand
gagccaccuucuaccuaaa

SEQ ID NO: 1668154 - RNA, 19 nt, Homo sapiens
  misc_RNA (1)...(19): siRNA sense strand
ugugauggaugaugacaau

SEQ ID NO: 1668155 - RNA, 19 nt, Homo sapiens
  misc_RNA (1)...(19): siRNA sense strand
gaucuccuccuucauguca

SEQ ID NO: 1668156 - RNA, 19 nt, Homo sapiens
  misc_RNA (1)...(19): siRNA sense strand
gauucaaaccgcagcauug

SEQ ID NO: 1668157 - RNA, 19 nt, Homo sapiens
  misc_RNA (1)...(19): siRNA sense strand
gaaauucgacaagaaggau

SEQ ID NO: 1668158 - RNA, 19 nt, Homo sapiens
  misc_RNA (1)...(19): siRNA sense strand
ggugacagccagaaguuug

SEQ ID NO: 1668159 - RNA, 19 nt, Homo sapiens
  misc_RNA (1)...(19): siRNA sense strand
ccagaaugaagagauguua

SEQ ID NO: 1668160 - RNA, 19 nt, Homo sapiens
  misc_RNA (1)...(19): siRNA sense strand
gucaagcgcugggugaaug

SEQ ID NO: 1668161 - RNA, 19 nt, Homo sapiens
  misc_RNA (1)...(19): siRNA sense strand
gccaguagacaucaucuug

SEQ ID NO: 1668162 - RNA, 19 nt, Homo sapiens
  misc_RNA (1)...(19): siRNA sense strand
gaaacguucaccuugucua

SEQ ID NO: 1668163 - RNA, 19 nt, Homo sapiens
  misc_RNA (1)...(19): siRNA sense strand
ggaugaguaugugcuggaa

SEQ ID NO: 1668164 - RNA, 19 nt, Homo sapiens
  misc_RNA (1)...(19): siRNA sense strand
ucagcugcaugaugaaguu

SEQ ID NO: 1668165 - RNA, 19 nt, Homo sapiens
  misc_RNA (1)...(19): siRNA sense strand
gggaagaggguggcuuuga

SEQ ID NO: 1668166 - RNA, 19 nt, Homo sapiens
  misc_RNA (1)...(19): siRNA sense strand
ugugacagcuuguaaucug

SEQ ID NO: 1668167 - RNA, 19 nt, Homo sapiens
  misc_RNA (1)...(19): siRNA sense strand
gaagaggguggcuuugagu

SEQ ID NO: 1668168 - RNA, 19 nt, Homo sapiens
  misc_RNA (1)...(19): siRNA sense strand
caaaaggucaugaaacuga

SEQ ID NO: 1668169 - RNA, 19 nt, Homo sapiens
  misc_RNA (1)...(19): siRNA sense strand
ugacgaaggcuaugaggau

SEQ ID NO: 1668170 - RNA, 19 nt, Homo sapiens
  misc_RNA (1)...(19): siRNA sense strand
ccaaacacaccuucaccaa

SEQ ID NO: 1668171 - RNA, 19 nt, Homo sapiens
  misc_RNA (1)...(19): siRNA sense strand
aaugcaggcuauauccuaa

SEQ ID NO: 1668172 - RNA, 19 nt, Homo sapiens
  misc_RNA (1)...(19): siRNA sense strand
uaaugcaggcuauauccua

SEQ ID NO: 1668173 - RNA, 19 nt, Homo sapiens
  misc_RNA (1)...(19): siRNA sense strand
gcacaccacugaagagauu

SEQ ID NO: 1668174 - RNA, 19 nt, Homo sapiens
  misc_RNA (1)...(19): siRNA sense strand
ggaagagucuccaaggaaa

SEQ ID NO: 1668175 - RNA, 19 nt, Homo sapiens
  misc_RNA (1)...(19): siRNA sense strand
gaaagcagauguccugagu

SEQ ID NO: 1668176 - RNA, 19 nt, Homo sapiens
  misc_RNA (1)...(19): siRNA sense strand
gcagugagcacacguauga

SEQ ID NO: 1668177 - RNA, 19 nt, Homo sapiens
  misc_RNA (1)...(19): siRNA sense strand
ggacagugguaccagauga

SEQ ID NO: 1668178 - RNA, 19 nt, Homo sapiens
  misc_RNA (1)...(19): siRNA sense strand
ggacucggcugaugaugga

SEQ ID NO: 1668179 - RNA, 19 nt, Homo sapiens
  misc_RNA (1)...(19): siRNA sense strand
ccagaucacuccaagaaga

SEQ ID NO: 1668180 - RNA, 19 nt, Homo sapiens
  misc_RNA (1)...(19): siRNA sense strand
uccaggaacugcucaaaua

SEQ ID NO: 1668181 - RNA, 19 nt, Homo sapiens
  misc_RNA (1)...(19): siRNA sense strand
gaacaucggcaaugggauu

SEQ ID NO: 1668182 - RNA, 19 nt, Homo sapiens
  misc_RNA (1)...(19): siRNA sense strand
gaaaggagcagaaggucuu

SEQ ID NO: 1668183 - RNA, 19 nt, Homo sapiens
  misc_RNA (1)...(19): siRNA sense strand
ggacugagaccgugguuga

SEQ ID NO: 1668184 - RNA, 19 nt, Homo sapiens
  misc_RNA (1)...(19): siRNA sense strand
cagaacauccaacgucuua

SEQ ID NO: 1668185 - RNA, 19 nt, Homo sapiens
  misc_RNA (1)...(19): siRNA sense strand
cagaaagccugccugaaug

SEQ ID NO: 1668186 - RNA, 19 nt, Homo sapiens
  misc_RNA (1)...(19): siRNA sense strand
ggaagaggaagaagaagaa

SEQ ID NO: 1668187 - RNA, 19 nt, Homo sapiens
  misc_RNA (1)...(19): siRNA sense strand
gaagaucaccaaggaugua

SEQ ID NO: 1668188 - RNA, 19 nt, Homo sapiens
  misc_RNA (1)...(19): siRNA sense strand
ccacauugcuguccaguac

SEQ ID NO: 1668189 - RNA, 19 nt, Homo sapiens
  misc_RNA (1)...(19): siRNA sense strand
ggcaacaccugcuuucuca

SEQ ID NO: 1668190 - RNA, 19 nt, Homo sapiens
  misc_RNA (1)...(19): siRNA sense strand
gcacacagccacaggugaa

SEQ ID NO: 1668191 - RNA, 19 nt, Homo sapiens
  misc_RNA (1)...(19): siRNA sense strand
ccguauaugucccagaaua

SEQ ID NO: 1668192 - RNA, 19 nt, Homo sapiens
  misc_RNA (1)...(19): siRNA sense strand
ccaacuaccugcucuccaa

SEQ ID NO: 1668193 - RNA, 19 nt, Homo sapiens
  misc_RNA (1)...(19): siRNA sense strand
gcaaggacucggcugauga

SEQ ID NO: 1668194 - RNA, 19 nt, Homo sapiens
  misc_RNA (1)...(19): siRNA sense strand
gaccugggauggcaagaug

SEQ ID NO: 1668195 - RNA, 19 nt, Homo sapiens
  misc_RNA (1)...(19): siRNA sense strand
gauguaggcuauccggaau

SEQ ID NO: 1668196 - RNA, 19 nt, Homo sapiens
  misc_RNA (1)...(19): siRNA sense strand
ugacugggacgaagaguuu

SEQ ID NO: 1668197 - RNA, 19 nt, Homo sapiens
  misc_RNA (1)...(19): siRNA sense strand
caccaaggauguaggcuau

SEQ ID NO: 1668198 - RNA, 19 nt, Homo sapiens
  misc_RNA (1)...(19): siRNA sense strand
cucaaauacucaucugaua

SEQ ID NO: 1668199 - RNA, 19 nt, Homo sapiens
  misc_RNA (1)...(19): siRNA sense strand
aaagaucgcccgacacuuc

SEQ ID NO: 1668200 - RNA, 19 nt, Homo sapiens
  misc_RNA (1)...(19): siRNA sense strand
ugucauguauggacucuau

SEQ ID NO: 1668201 - RNA, 19 nt, Homo sapiens
  misc_RNA (1)...(19): siRNA sense strand
cagcaggugggauguguua

SEQ ID NO: 1668202 - RNA, 19 nt, Homo sapiens
  misc_RNA (1)...(19): siRNA sense strand
cuaagacggugaagcugaa

SEQ ID NO: 1668203 - RNA, 19 nt, Homo sapiens
  misc_RNA (1)...(19): siRNA sense strand
ggaggacgcgcaugaguuc

SEQ ID NO: 1668204 - RNA, 19 nt, Homo sapiens
  misc_RNA (1)...(19): siRNA sense strand
caucucaaaugcccaagga

SEQ ID NO: 1668205 - RNA, 19 nt, Homo sapiens
  misc_RNA (1)...(19): siRNA sense strand
caaguuggaucgucaaacg

SEQ ID NO: 1668206 - RNA, 19 nt, Homo sapiens
  misc_RNA (1)...(19): siRNA sense strand
cuacaugugugcuaaaugc

SEQ ID NO: 1668207 - RNA, 19 nt, Homo sapiens
  misc_RNA (1)...(19): siRNA sense strand
gcccgacacuuccgcuuug

SEQ ID NO: 1668208 - RNA, 19 nt, Homo sapiens
  misc_RNA (1)...(19): siRNA sense strand
ggaagaggaagaggaagaa

SEQ ID NO: 1668209 - RNA, 19 nt, Homo sapiens
  misc_RNA (1)...(19): siRNA sense strand
ccacuuggcccguccauag

SEQ ID NO: 1668210 - RNA, 19 nt, Homo sapiens
  misc_RNA (1)...(19): siRNA sense strand
gagagaaugccuacaugug

SEQ ID NO: 1668211 - RNA, 19 nt, Homo sapiens
  misc_RNA (1)...(19): siRNA sense strand
gcaagagcuucuccuacca

SEQ ID NO: 1668212 - RNA, 19 nt, Homo sapiens
  misc_RNA (1)...(19): siRNA sense strand
gcaggaagcggaggaggaa

SEQ ID NO: 1668213 - RNA, 19 nt, Homo sapiens
  misc_RNA (1)...(19): siRNA sense strand
caaguggagcagauucuaa

SEQ ID NO: 1668214 - RNA, 19 nt, Homo sapiens
  misc_RNA (1)...(19): siRNA sense strand
ccacacacaugccaaccau

SEQ ID NO: 1668215 - RNA, 19 nt, Homo sapiens
  misc_RNA (1)...(19): siRNA sense strand
gccaauaguggauaaguug

SEQ ID NO: 1668216 - RNA, 19 nt, Homo sapiens
  misc_RNA (1)...(19): siRNA sense strand
gaacauccaacgucuuaac

SEQ ID NO: 1668217 - RNA, 19 nt, Homo sapiens
  misc_RNA (1)...(19): siRNA sense strand
guccguauaugucccagaa

SEQ ID NO: 1668218 - RNA, 19 nt, Homo sapiens
  misc_RNA (1)...(19): siRNA sense strand
cuucaacgccuuccagaaa

SEQ ID NO: 1668219 - RNA, 19 nt, Homo sapiens
  misc_RNA (1)...(19): siRNA sense strand
caacaccugcuuucucaau

SEQ ID NO: 1668220 - RNA, 19 nt, Homo sapiens
  misc_RNA (1)...(19): siRNA sense strand
ggagagaaugccuacaugu

SEQ ID NO: 1668221 - RNA, 19 nt, Homo sapiens
  misc_RNA (1)...(19): siRNA sense strand
caccaccucuagccaacua

SEQ ID NO: 1668222 - RNA, 19 nt, Homo sapiens
  misc_RNA (1)...(19): siRNA sense strand
agacgacccuggaaagaag

SEQ ID NO: 1668223 - RNA, 19 nt, Homo sapiens
  misc_RNA (1)...(19): siRNA sense strand
gagagaagaggagaaacuu

SEQ ID NO: 1668224 - RNA, 19 nt, Homo sapiens
  misc_RNA (1)...(19): siRNA sense strand
gcucaaauacucaucugau

SEQ ID NO: 1668225 - RNA, 19 nt, Homo sapiens
  misc_RNA (1)...(19): siRNA sense strand
ucucugcgauucucaggaa

SEQ ID NO: 1668226 - RNA, 19 nt, Homo sapiens
  misc_RNA (1)...(19): siRNA sense strand
uccaacgucuuaacccuuu

SEQ ID NO: 1668227 - RNA, 19 nt, Homo sapiens
  misc_RNA (1)...(19): siRNA sense strand
cggaacuucuggucuguga

SEQ ID NO: 1668228 - RNA, 19 nt, Homo sapiens
  misc_RNA (1)...(19): siRNA sense strand
gauaaagcuuacgggagaa

SEQ ID NO: 1668229 - RNA, 19 nt, Homo sapiens
  misc_RNA (1)...(19): siRNA sense strand
gggaagaggaagaggaaga

SEQ ID NO: 1668230 - RNA, 19 nt, Homo sapiens
  misc_RNA (1)...(19): siRNA sense strand
caucggcaaugggauuauu

SEQ ID NO: 1668231 - RNA, 19 nt, Homo sapiens
  misc_RNA (1)...(19): siRNA sense strand
gcuguucuaucugcgaauu

SEQ ID NO: 1668232 - RNA, 19 nt, Homo sapiens
  misc_RNA (1)...(19): siRNA sense strand
aaagagcaaauauguguug

SEQ ID NO: 1668233 - RNA, 19 nt, Homo sapiens
  misc_RNA (1)...(19): siRNA sense strand
gaggaaaggagcagaaggu

SEQ ID NO: 1668234 - RNA, 19 nt, Homo sapiens
  misc_RNA (1)...(19): siRNA sense strand
gggaccagcaacucgaaua

SEQ ID NO: 1668235 - RNA, 19 nt, Homo sapiens
  misc_RNA (1)...(19): siRNA sense strand
ggagcuagucgccacaaga

SEQ ID NO: 1668236 - RNA, 19 nt, Homo sapiens
  misc_RNA (1)...(19): siRNA sense strand
uaauggugauccugucaug

SEQ ID NO: 1668237 - RNA, 19 nt, Homo sapiens
  misc_RNA (1)...(19): siRNA sense strand
ccggcaagcugcgaauauu

SEQ ID NO: 1668238 - RNA, 19 nt, Homo sapiens
  misc_RNA (1)...(19): siRNA sense strand
gcgcaggacuccacaaccu

SEQ ID NO: 1668239 - RNA, 19 nt, Homo sapiens
  misc_RNA (1)...(19): siRNA sense strand
agaggaagaggaagaagaa

SEQ ID NO: 1668240 - RNA, 19 nt, Homo sapiens
  misc_RNA (1)...(19): siRNA sense strand
ggaagaucaccaaggaugu

SEQ ID NO: 1668241 - RNA, 19 nt, Homo sapiens
  misc_RNA (1)...(19): siRNA sense strand
cgaauuccaggcucuaaga

SEQ ID NO: 1668242 - RNA, 19 nt, Homo sapiens
  misc_RNA (1)...(19): siRNA sense strand
agaagaacaucggcaaugg

SEQ ID NO: 1668243 - RNA, 19 nt, Homo sapiens
  misc_RNA (1)...(19): siRNA sense strand
cuacuaccuugguccauca

SEQ ID NO: 1668244 - RNA, 19 nt, Homo sapiens
  misc_RNA (1)...(19): siRNA sense strand
aaacgcaggcuacuaccuu

SEQ ID NO: 1668245 - RNA, 19 nt, Homo sapiens
  misc_RNA (1)...(19): siRNA sense strand
gaacugcucaaauacucau

SEQ ID NO: 1668246 - RNA, 19 nt, Homo sapiens
  misc_RNA (1)...(19): siRNA sense strand
ggagagcgggagucugaug

SEQ ID NO: 1668247 - RNA, 19 nt, Homo sapiens
  misc_RNA (1)...(19): siRNA sense strand
gaauuccaggcucuaagaa

SEQ ID NO: 1668248 - RNA, 19 nt, Homo sapiens
  misc_RNA (1)...(19): siRNA sense strand
cguauaugucccagaauaa

SEQ ID NO: 1668249 - RNA, 19 nt, Homo sapiens
  misc_RNA (1)...(19): siRNA sense strand
gaacuucuggucugugacu

SEQ ID NO: 1668250 - RNA, 19 nt, Homo sapiens
  misc_RNA (1)...(19): siRNA sense strand
auacucaucugauaaagcu

SEQ ID NO: 1668251 - RNA, 19 nt, Homo sapiens
  misc_RNA (1)...(19): siRNA sense strand
ggaccagcaacucgaauag

SEQ ID NO: 1668252 - RNA, 19 nt, Homo sapiens
  misc_RNA (1)...(19): siRNA sense strand
caauaguggauaaguugaa

SEQ ID NO: 1668253 - RNA, 19 nt, Homo sapiens
  misc_RNA (1)...(19): siRNA sense strand
gggaaggaaaagaaaauua

SEQ ID NO: 1668254 - RNA, 19 nt, Homo sapiens
  misc_RNA (1)...(19): siRNA sense strand
cugagaccgugguugauga

SEQ ID NO: 1668255 - RNA, 19 nt, Homo sapiens
  misc_RNA (1)...(19): siRNA sense strand
ucagucaggaugcuauuga

SEQ ID NO: 1668256 - RNA, 19 nt, Homo sapiens
  misc_RNA (1)...(19): siRNA sense strand
acucaucugauaaagcuua

SEQ ID NO: 1668257 - RNA, 19 nt, Homo sapiens
  misc_RNA (1)...(19): siRNA sense strand
agacacagcgggcaguaga

SEQ ID NO: 1668258 - RNA, 19 nt, Homo sapiens
  misc_RNA (1)...(19): siRNA sense strand
ggagacacagcgggcagua

SEQ ID NO: 1668259 - RNA, 19 nt, Homo sapiens
  misc_RNA (1)...(19): siRNA sense strand
ccagacacccacacacaug

SEQ ID NO: 1668260 - RNA, 19 nt, Homo sapiens
  misc_RNA (1)...(19): siRNA sense strand
guauaugucccagaauaau

SEQ ID NO: 1668261 - RNA, 19 nt, Homo sapiens
  misc_RNA (1)...(19): siRNA sense strand
agagaaugccuacaugugu

SEQ ID NO: 1668262 - RNA, 19 nt, Homo sapiens
  misc_RNA (1)...(19): siRNA sense strand
ccuuaaagagcaaauaugu

SEQ ID NO: 1668263 - RNA, 19 nt, Homo sapiens
  misc_RNA (1)...(19): siRNA sense strand
cuaccuugguccaucaaau

SEQ ID NO: 1668264 - RNA, 19 nt, Homo sapiens
  misc_RNA (1)...(19): siRNA sense strand
ggccuuaaagagcaaauau

SEQ ID NO: 1668265 - RNA, 19 nt, Homo sapiens
  misc_RNA (1)...(19): siRNA sense strand
gaggaggaaaggagcagaa

SEQ ID NO: 1668266 - RNA, 19 nt, Homo sapiens
  misc_RNA (1)...(19): siRNA sense strand
caacgggcaugggcugaag

SEQ ID NO: 1668267 - RNA, 19 nt, Homo sapiens
  misc_RNA (1)...(19): siRNA sense strand
ccagcaagagcuucuccua

SEQ ID NO: 1668268 - RNA, 19 nt, Homo sapiens
  misc_RNA (1)...(19): siRNA sense strand
uggagagaaugccuacaug

SEQ ID NO: 1668269 - RNA, 19 nt, Homo sapiens
  misc_RNA (1)...(19): siRNA sense strand
caagcaauggacaguggua

SEQ ID NO: 1668270 - RNA, 19 nt, Homo sapiens
  misc_RNA (1)...(19): siRNA sense strand
agagagagaagaggagaaa

SEQ ID NO: 1668271 - RNA, 19 nt, Homo sapiens
  misc_RNA (1)...(19): siRNA sense strand
cagucaggaugcuauugaa

SEQ ID NO: 1668272 - RNA, 19 nt, Homo sapiens
  misc_RNA (1)...(19): siRNA sense strand
ccuacgugcuguucuaucu

SEQ ID NO: 1668273 - RNA, 19 nt, Homo sapiens
  misc_RNA (1)...(19): siRNA sense strand
cagaugacaugucuaauua

SEQ ID NO: 1668274 - RNA, 19 nt, Homo sapiens
  misc_RNA (1)...(19): siRNA sense strand
ggauaaaguucgucaguuu

SEQ ID NO: 1668275 - RNA, 19 nt, Homo sapiens
  misc_RNA (1)...(19): siRNA sense strand
gaaagaaccaggacgauuu

SEQ ID NO: 1668276 - RNA, 19 nt, Homo sapiens
  misc_RNA (1)...(19): siRNA sense strand
gaacagcuguacaauagau

SEQ ID NO: 1668277 - RNA, 19 nt, Homo sapiens
  misc_RNA (1)...(19): siRNA sense strand
gaacaagaauugaaagaac

SEQ ID NO: 1668278 - RNA, 19 nt, Homo sapiens
  misc_RNA (1)...(19): siRNA sense strand
uagaacagcuguacaauag

SEQ ID NO: 1668279 - RNA, 19 nt, Homo sapiens
  misc_RNA (1)...(19): siRNA sense strand
gcagaugacaugucuaauu

SEQ ID NO: 1668280 - RNA, 19 nt, Homo sapiens
  misc_RNA (1)...(19): siRNA sense strand
gaugacaugucuaauuaug

SEQ ID NO: 1668281 - RNA, 19 nt, Homo sapiens
  misc_RNA (1)...(19): siRNA sense strand
guacgaugauugcagauga

SEQ ID NO: 1668282 - RNA, 19 nt, Homo sapiens
  misc_RNA (1)...(19): siRNA sense strand
cauaaacgaucaauaccaa

SEQ ID NO: 1668283 - RNA, 19 nt, Homo sapiens
  misc_RNA (1)...(19): siRNA sense strand
gagcauggccuguucuuau

SEQ ID NO: 1668284 - RNA, 19 nt, Homo sapiens
  misc_RNA (1)...(19): siRNA sense strand
gaaggagcauggccuguuc

SEQ ID NO: 1668285 - RNA, 19 nt, Homo sapiens
  misc_RNA (1)...(19): siRNA sense strand
acaaagacccucaagauga

SEQ ID NO: 1668286 - RNA, 19 nt, Homo sapiens
  misc_RNA (1)...(19): siRNA sense strand
caagauggaacaagaauug

SEQ ID NO: 1668287 - RNA, 19 nt, Homo sapiens
  misc_RNA (1)...(19): siRNA sense strand
gcauuaguguguugauuau

SEQ ID NO: 1668288 - RNA, 19 nt, Homo sapiens
  misc_RNA (1)...(19): siRNA sense strand
gaacuuagugcuuaaugga

SEQ ID NO: 1668289 - RNA, 19 nt, Homo sapiens
  misc_RNA (1)...(19): siRNA sense strand
ccaggacgauuuaaggauu

SEQ ID NO: 1668290 - RNA, 19 nt, Homo sapiens
  misc_RNA (1)...(19): siRNA sense strand
aggauuagaucuagaaaug

SEQ ID NO: 1668291 - RNA, 19 nt, Homo sapiens
  misc_RNA (1)...(19): siRNA sense strand
gcaaagaauccaggacaaa

SEQ ID NO: 1668292 - RNA, 19 nt, Homo sapiens
  misc_RNA (1)...(19): siRNA sense strand
gcaguaaguugucuuucuc

SEQ ID NO: 1668293 - RNA, 19 nt, Homo sapiens
  misc_RNA (1)...(19): siRNA sense strand
ggaacaagaauugaaagaa

SEQ ID NO: 1668294 - RNA, 19 nt, Homo sapiens
  misc_RNA (1)...(19): siRNA sense strand
aaucaucgcagaaggauaa

SEQ ID NO: 1668295 - RNA, 19 nt, Homo sapiens
  misc_RNA (1)...(19): siRNA sense strand
ggccuguucuuauugauga

SEQ ID NO: 1668296 - RNA, 19 nt, Homo sapiens
  misc_RNA (1)...(19): siRNA sense strand
aaagaaccaggacgauuua

SEQ ID NO: 1668297 - RNA, 19 nt, Homo sapiens
  misc_RNA (1)...(19): siRNA sense strand
gauggaacaagaauugaaa

SEQ ID NO: 1668298 - RNA, 19 nt, Homo sapiens
  misc_RNA (1)...(19): siRNA sense strand
caucauaaacgaucaauac

SEQ ID NO: 1668299 - RNA, 19 nt, Homo sapiens
  misc_RNA (1)...(19): siRNA sense strand
caaaaugacuggaaguuag

SEQ ID NO: 1668300 - RNA, 19 nt, Homo sapiens
  misc_RNA (1)...(19): siRNA sense strand
gcagaaggauaaaguucgu

SEQ ID NO: 1668301 - RNA, 19 nt, Homo sapiens
  misc_RNA (1)...(19): siRNA sense strand
ggaacuuagugcuuaaugg

SEQ ID NO: 1668302 - RNA, 19 nt, Homo sapiens
  misc_RNA (1)...(19): siRNA sense strand
gaaccaggacgauuuaagg

SEQ ID NO: 1668303 - RNA, 19 nt, Homo sapiens
  misc_RNA (1)...(19): siRNA sense strand
ugacagaauuaggauguga

SEQ ID NO: 1668304 - RNA, 19 nt, Homo sapiens
  misc_RNA (1)...(19): siRNA sense strand
gugcuuaauggaagauuua

SEQ ID NO: 1668305 - RNA, 19 nt, Homo sapiens
  misc_RNA (1)...(19): siRNA sense strand
ggaugugacagcauagaaa

SEQ ID NO: 1668306 - RNA, 19 nt, Homo sapiens
  misc_RNA (1)...(19): siRNA sense strand
caggacgauuuaaggauuu

SEQ ID NO: 1668307 - RNA, 19 nt, Homo sapiens
  misc_RNA (1)...(19): siRNA sense strand
guaaguugucuuucucaaa

SEQ ID NO: 1668308 - RNA, 19 nt, Homo sapiens
  misc_RNA (1)...(19): siRNA sense strand
uuagaacagcuguacaaua

SEQ ID NO: 1668309 - RNA, 19 nt, Homo sapiens
  misc_RNA (1)...(19): siRNA sense strand
ccaaaauccugaacuuuau

SEQ ID NO: 1668310 - RNA, 19 nt, Homo sapiens
  misc_RNA (1)...(19): siRNA sense strand
gaugauugcagaugacaug

SEQ ID NO: 1668311 - RNA, 19 nt, Homo sapiens
  misc_RNA (1)...(19): siRNA sense strand
ggaacaucauaaacgauca

SEQ ID NO: 1668312 - RNA, 19 nt, Homo sapiens
  misc_RNA (1)...(19): siRNA sense strand
guuggaacaucauaaacga

SEQ ID NO: 1668313 - RNA, 19 nt, Homo sapiens
  misc_RNA (1)...(19): siRNA sense strand
uggaauagauggcauacag

SEQ ID NO: 1668314 - RNA, 19 nt, Homo sapiens
  misc_RNA (1)...(19): siRNA sense strand
gauugcagaugacaugucu

SEQ ID NO: 1668315 - RNA, 19 nt, Homo sapiens
  misc_RNA (1)...(19): siRNA sense strand
auacaaagacccucaagau

SEQ ID NO: 1668316 - RNA, 19 nt, Homo sapiens
  misc_RNA (1)...(19): siRNA sense strand
gaacaucauaaacgaucaa

SEQ ID NO: 1668317 - RNA, 19 nt, Homo sapiens
  misc_RNA (1)...(19): siRNA sense strand
uacuggaacuuagugcuua

SEQ ID NO: 1668318 - RNA, 19 nt, Homo sapiens
  misc_RNA (1)...(19): siRNA sense strand
gaaaucaucgcagaaggau

SEQ ID NO: 1668319 - RNA, 19 nt, Homo sapiens
  misc_RNA (1)...(19): siRNA sense strand
uacccaagauggaacaaga

SEQ ID NO: 1668320 - RNA, 19 nt, Homo sapiens
  misc_RNA (1)...(19): siRNA sense strand
gaaguuagaacagcuguac

SEQ ID NO: 1668321 - RNA, 19 nt, Homo sapiens
  misc_RNA (1)...(19): siRNA sense strand
auuaggaugugacagcaua

SEQ ID NO: 1668322 - RNA, 19 nt, Homo sapiens
  misc_RNA (1)...(19): siRNA sense strand
gaacuuuauauacgagaga

SEQ ID NO: 1668323 - RNA, 19 nt, Homo sapiens
  misc_RNA (1)...(19): siRNA sense strand
ggauggcaugacagaauua

SEQ ID NO: 1668324 - RNA, 19 nt, Homo sapiens
  misc_RNA (1)...(19): siRNA sense strand
uggauggcaugacagaauu

SEQ ID NO: 1668325 - RNA, 19 nt, Homo sapiens
  misc_RNA (1)...(19): siRNA sense strand
cagcauuaguguguugauu

SEQ ID NO: 1668326 - RNA, 19 nt, Homo sapiens
  misc_RNA (1)...(19): siRNA sense strand
gacuggaaguuagauguug

SEQ ID NO: 1668327 - RNA, 19 nt, Homo sapiens
  misc_RNA (1)...(19): siRNA sense strand
ccaaacaggaguucaugga

SEQ ID NO: 1668328 - RNA, 19 nt, Homo sapiens
  misc_RNA (1)...(19): siRNA sense strand
ggacaggaagaaguuagaa

SEQ ID NO: 1668329 - RNA, 19 nt, Homo sapiens
  misc_RNA (1)...(19): siRNA sense strand
cauggccuguucuuauuga

SEQ ID NO: 1668330 - RNA, 19 nt, Homo sapiens
  misc_RNA (1)...(19): siRNA sense strand
ggagcauggccuguucuua

SEQ ID NO: 1668331 - RNA, 19 nt, Homo sapiens
  misc_RNA (1)...(19): siRNA sense strand
ugaaagaaccaggacgauu

SEQ ID NO: 1668332 - RNA, 19 nt, Homo sapiens
  misc_RNA (1)...(19): siRNA sense strand
gauacaaagacccucaaga

SEQ ID NO: 1668333 - RNA, 19 nt, Homo sapiens
  misc_RNA (1)...(19): siRNA sense strand
aaaguucgucaguuuauga

SEQ ID NO: 1668334 - RNA, 19 nt, Homo sapiens
  misc_RNA (1)...(19): siRNA sense strand
guucgucaguuuaugaucu

SEQ ID NO: 1668335 - RNA, 19 nt, Homo sapiens
  misc_RNA (1)...(19): siRNA sense strand
ugaugacuuuguggaauuu

SEQ ID NO: 1668336 - RNA, 19 nt, Homo sapiens
  misc_RNA (1)...(19): siRNA sense strand
uugaugacuuuguggaauu

SEQ ID NO: 1668337 - RNA, 19 nt, Homo sapiens
  misc_RNA (1)...(19): siRNA sense strand
gaaguucagagcagcaaca

SEQ ID NO: 1668338 - RNA, 19 nt, Homo sapiens
  misc_RNA (1)...(19): siRNA sense strand
ggaauuugcacgcccucaa

SEQ ID NO: 1668339 - RNA, 19 nt, Homo sapiens
  misc_RNA (1)...(19): siRNA sense strand
ccagauacccaagauggaa

SEQ ID NO: 1668340 - RNA, 19 nt, Homo sapiens
  misc_RNA (1)...(19): siRNA sense strand
uauauacgagagaguguaa

SEQ ID NO: 1668341 - RNA, 19 nt, Homo sapiens
  misc_RNA (1)...(19): siRNA sense strand
ucaaauugcugggacaaaa

SEQ ID NO: 1668342 - RNA, 19 nt, Homo sapiens
  misc_RNA (1)...(19): siRNA sense strand
agcauggccuguucuuauu

SEQ ID NO: 1668343 - RNA, 19 nt, Homo sapiens
  misc_RNA (1)...(19): siRNA sense strand
gaucauuggacaggaagaa

SEQ ID NO: 1668344 - RNA, 19 nt, Homo sapiens
  misc_RNA (1)...(19): siRNA sense strand
ugaaaucaucgcagaagga

SEQ ID NO: 1668345 - RNA, 19 nt, Homo sapiens
  misc_RNA (1)...(19): siRNA sense strand
gaucuucacacaaucuagu

SEQ ID NO: 1668346 - RNA, 19 nt, Homo sapiens
  misc_RNA (1)...(19): siRNA sense strand
uacaaagacccucaagaug

SEQ ID NO: 1668347 - RNA, 19 nt, Homo sapiens
  misc_RNA (1)...(19): siRNA sense strand
ggaaucuucuuuuagacuu

SEQ ID NO: 1668348 - RNA, 19 nt, Homo sapiens
  misc_RNA (1)...(19): siRNA sense strand
uagauggcauacagcaguu

SEQ ID NO: 1668349 - RNA, 19 nt, Homo sapiens
  misc_RNA (1)...(19): siRNA sense strand
gauccagccagcauuagug

SEQ ID NO: 1668350 - RNA, 19 nt, Homo sapiens
  misc_RNA (1)...(19): siRNA sense strand
agacuucaguacgaugauu

SEQ ID NO: 1668351 - RNA, 19 nt, Homo sapiens
  misc_RNA (1)...(19): siRNA sense strand
agcauuaguguguugauua

SEQ ID NO: 1668352 - RNA, 19 nt, Homo sapiens
  misc_RNA (1)...(19): siRNA sense strand
caugacagaauuaggaugu

SEQ ID NO: 1668353 - RNA, 19 nt, Homo sapiens
  misc_RNA (1)...(19): siRNA sense strand
gcauggccuguucuuauug

SEQ ID NO: 1668354 - RNA, 19 nt, Homo sapiens
  misc_RNA (1)...(19): siRNA sense strand
uugcagaugacaugucuaa

SEQ ID NO: 1668355 - RNA, 19 nt, Homo sapiens
  misc_RNA (1)...(19): siRNA sense strand
caaacaggaguucauggau

SEQ ID NO: 1668356 - RNA, 19 nt, Homo sapiens
  misc_RNA (1)...(19): siRNA sense strand
aaacagcaguaaguugucu

SEQ ID NO: 1668357 - RNA, 19 nt, Homo sapiens
  misc_RNA (1)...(19): siRNA sense strand
aaggaucauuggacaggaa

SEQ ID NO: 1668358 - RNA, 19 nt, Homo sapiens
  misc_RNA (1)...(19): siRNA sense strand
aggauaaaguucgucaguu

SEQ ID NO: 1668359 - RNA, 19 nt, Homo sapiens
  misc_RNA (1)...(19): siRNA sense strand
uccaaaauccugaacuuua

SEQ ID NO: 1668360 - RNA, 19 nt, Homo sapiens
  misc_RNA (1)...(19): siRNA sense strand
ugacuggaaguuagauguu

SEQ ID NO: 1668361 - RNA, 19 nt, Homo sapiens
  misc_RNA (1)...(19): siRNA sense strand
ccaagauggaacaagaauu

SEQ ID NO: 1668362 - RNA, 19 nt, Homo sapiens
  misc_RNA (1)...(19): siRNA sense strand
aaacuaaaggcccagauac

SEQ ID NO: 1668363 - RNA, 19 nt, Homo sapiens
  misc_RNA (1)...(19): siRNA sense strand
uggcaugacagaauuagga

SEQ ID NO: 1668364 - RNA, 19 nt, Homo sapiens
  misc_RNA (1)...(19): siRNA sense strand
caucgcagaaggauaaagu

SEQ ID NO: 1668365 - RNA, 19 nt, Homo sapiens
  misc_RNA (1)...(19): siRNA sense strand
ugcaaagaauccaggacaa

SEQ ID NO: 1668366 - RNA, 19 nt, Homo sapiens
  misc_RNA (1)...(19): siRNA sense strand
gcaacacagugcgaguucu

SEQ ID NO: 1668367 - RNA, 19 nt, Homo sapiens
  misc_RNA (1)...(19): siRNA sense strand
caaagaauccaggacaaaa

SEQ ID NO: 1668368 - RNA, 19 nt, Homo sapiens
  misc_RNA (1)...(19): siRNA sense strand
ccagccagcauuagugugu

SEQ ID NO: 1668369 - RNA, 19 nt, Homo sapiens
  misc_RNA (1)...(19): siRNA sense strand
acaggaagaaguuagaaca

SEQ ID NO: 1668370 - RNA, 19 nt, Homo sapiens
  misc_RNA (1)...(19): siRNA sense strand
ucaaaaugacuggaaguua

SEQ ID NO: 1668371 - RNA, 19 nt, Homo sapiens
  misc_RNA (1)...(19): siRNA sense strand
gccauugccuacuggaacu

SEQ ID NO: 1668372 - RNA, 19 nt, Homo sapiens
  misc_RNA (1)...(19): siRNA sense strand
cuacuggaacuuagugcuu

SEQ ID NO: 1668373 - RNA, 19 nt, Homo sapiens
  misc_RNA (1)...(19): siRNA sense strand
gaagaaacagguagaugua

SEQ ID NO: 1668374 - RNA, 19 nt, Homo sapiens
  misc_RNA (1)...(19): siRNA sense strand
ucaaagaaguccuccguuu

SEQ ID NO: 1668375 - RNA, 19 nt, Homo sapiens
  misc_RNA (1)...(19): siRNA sense strand
aagaagagguggacguuaa

SEQ ID NO: 1668376 - RNA, 19 nt, Homo sapiens
  misc_RNA (1)...(19): siRNA sense strand
ccaaggaucucaaagaagu

SEQ ID NO: 1668377 - RNA, 19 nt, Homo sapiens
  misc_RNA (1)...(19): siRNA sense strand
gaaauauguuugucuacga

SEQ ID NO: 1668378 - RNA, 19 nt, Homo sapiens
  misc_RNA (1)...(19): siRNA sense strand
gaaacaggaucugauaauc

SEQ ID NO: 1668379 - RNA, 19 nt, Homo sapiens
  misc_RNA (1)...(19): siRNA sense strand
gaagguuaguuccaaaugu

SEQ ID NO: 1668380 - RNA, 19 nt, Homo sapiens
  misc_RNA (1)...(19): siRNA sense strand
gauaaucaaccucuuggua

SEQ ID NO: 1668381 - RNA, 19 nt, Homo sapiens
  misc_RNA (1)...(19): siRNA sense strand
caacgacgauuucagaagu

SEQ ID NO: 1668382 - RNA, 19 nt, Homo sapiens
  misc_RNA (1)...(19): siRNA sense strand
agacguagauaaccucaaa

SEQ ID NO: 1668383 - RNA, 19 nt, Homo sapiens
  misc_RNA (1)...(19): siRNA sense strand
gaagaauggguuugugaaa

SEQ ID NO: 1668384 - RNA, 19 nt, Homo sapiens
  misc_RNA (1)...(19): siRNA sense strand
agaaacagguagauguaaa

SEQ ID NO: 1668385 - RNA, 19 nt, Homo sapiens
  misc_RNA (1)...(19): siRNA sense strand
ggaagaagcagauuuacag

SEQ ID NO: 1668386 - RNA, 19 nt, Homo sapiens
  misc_RNA (1)...(19): siRNA sense strand
uaccaaggaucucaaagaa

SEQ ID NO: 1668387 - RNA, 19 nt, Homo sapiens
  misc_RNA (1)...(19): siRNA sense strand
guagauaaccucaaaagua

SEQ ID NO: 1668388 - RNA, 19 nt, Homo sapiens
  misc_RNA (1)...(19): siRNA sense strand
gaagcagauuuacagaaug

SEQ ID NO: 1668389 - RNA, 19 nt, Homo sapiens
  misc_RNA (1)...(19): siRNA sense strand
agaagcagauuuacagaau

SEQ ID NO: 1668390 - RNA, 19 nt, Homo sapiens
  misc_RNA (1)...(19): siRNA sense strand
gcaaagaauauugaaguug

SEQ ID NO: 1668391 - RNA, 19 nt, Homo sapiens
  misc_RNA (1)...(19): siRNA sense strand
gaacaacuuggaacccauu

SEQ ID NO: 1668392 - RNA, 19 nt, Homo sapiens
  misc_RNA (1)...(19): siRNA sense strand
gaaacagguagauguaaau

SEQ ID NO: 1668393 - RNA, 19 nt, Homo sapiens
  misc_RNA (1)...(19): siRNA sense strand
aaaggauuguccagaaauu

SEQ ID NO: 1668394 - RNA, 19 nt, Homo sapiens
  misc_RNA (1)...(19): siRNA sense strand
gaagaagcagauuuacaga

SEQ ID NO: 1668395 - RNA, 19 nt, Homo sapiens
  misc_RNA (1)...(19): siRNA sense strand
uaaucaaccucuugguaau

SEQ ID NO: 1668396 - RNA, 19 nt, Homo sapiens
  misc_RNA (1)...(19): siRNA sense strand
gaguaagccauaucaaaga

SEQ ID NO: 1668397 - RNA, 19 nt, Homo sapiens
  misc_RNA (1)...(19): siRNA sense strand
ucagaagguuaguuccaaa

SEQ ID NO: 1668398 - RNA, 19 nt, Homo sapiens
  misc_RNA (1)...(19): siRNA sense strand
uagaguaagccauaucaaa

SEQ ID NO: 1668399 - RNA, 19 nt, Homo sapiens
  misc_RNA (1)...(19): siRNA sense strand
ggauuguccagaaauuuaa

SEQ ID NO: 1668400 - RNA, 19 nt, Homo sapiens
  misc_RNA (1)...(19): siRNA sense strand
gagguggacguuaaaguug

SEQ ID NO: 1668401 - RNA, 19 nt, Homo sapiens
  misc_RNA (1)...(19): siRNA sense strand
ugaaacaggaucugauaau

SEQ ID NO: 1668402 - RNA, 19 nt, Homo sapiens
  misc_RNA (1)...(19): siRNA sense strand
ggacagggucacagacuag

SEQ ID NO: 1668403 - RNA, 19 nt, Homo sapiens
  misc_RNA (1)...(19): siRNA sense strand
uaagccauaucaaagacuu

SEQ ID NO: 1668404 - RNA, 19 nt, Homo sapiens
  misc_RNA (1)...(19): siRNA sense strand
gaggaagcucagaagguua

SEQ ID NO: 1668405 - RNA, 19 nt, Homo sapiens
  misc_RNA (1)...(19): siRNA sense strand
auaaucaaccucuugguaa

SEQ ID NO: 1668406 - RNA, 19 nt, Homo sapiens
  misc_RNA (1)...(19): siRNA sense strand
agaagaaacagguagaugu

SEQ ID NO: 1668407 - RNA, 19 nt, Homo sapiens
  misc_RNA (1)...(19): siRNA sense strand
aggauuguccagaaauuua

SEQ ID NO: 1668408 - RNA, 19 nt, Homo sapiens
  misc_RNA (1)...(19): siRNA sense strand
uaaagaagagguggacguu

SEQ ID NO: 1668409 - RNA, 19 nt, Homo sapiens
  misc_RNA (1)...(19): siRNA sense strand
guccucagguugcuagaug

SEQ ID NO: 1668410 - RNA, 19 nt, Homo sapiens
  misc_RNA (1)...(19): siRNA sense strand
gguggacguuaaaguugaa

SEQ ID NO: 1668411 - RNA, 19 nt, Homo sapiens
  misc_RNA (1)...(19): siRNA sense strand
acuggaagaagcagauuua

SEQ ID NO: 1668412 - RNA, 19 nt, Homo sapiens
  misc_RNA (1)...(19): siRNA sense strand
ugugaaacaggaucugaua

SEQ ID NO: 1668413 - RNA, 19 nt, Homo sapiens
  misc_RNA (1)...(19): siRNA sense strand
aaagaagaauggguuugug

SEQ ID NO: 1668414 - RNA, 19 nt, Homo sapiens
  misc_RNA (1)...(19): siRNA sense strand
gacgauuucagaaguuauu

SEQ ID NO: 1668415 - RNA, 19 nt, Homo sapiens
  misc_RNA (1)...(19): siRNA sense strand
aagguuaguuccaaaugug

SEQ ID NO: 1668416 - RNA, 19 nt, Homo sapiens
  misc_RNA (1)...(19): siRNA sense strand
caaagaaguccuccguuuu

SEQ ID NO: 1668417 - RNA, 19 nt, Homo sapiens
  misc_RNA (1)...(19): siRNA sense strand
uaauuugucugcuguucca

SEQ ID NO: 1668418 - RNA, 19 nt, Homo sapiens
  misc_RNA (1)...(19): siRNA sense strand
ggucacagacuaggaagug

SEQ ID NO: 1668419 - RNA, 19 nt, Homo sapiens
  misc_RNA (1)...(19): siRNA sense strand
cguuaaaguugaagacaag

SEQ ID NO: 1668420 - RNA, 19 nt, Homo sapiens
  misc_RNA (1)...(19): siRNA sense strand
agagguggacguuaaaguu

SEQ ID NO: 1668421 - RNA, 19 nt, Homo sapiens
  misc_RNA (1)...(19): siRNA sense strand
gugaaacaggaucugauaa

SEQ ID NO: 1668422 - RNA, 19 nt, Homo sapiens
  misc_RNA (1)...(19): siRNA sense strand
ccauaucaaagacuucauu

SEQ ID NO: 1668423 - RNA, 19 nt, Homo sapiens
  misc_RNA (1)...(19): siRNA sense strand
acgacgauuucagaaguua

SEQ ID NO: 1668424 - RNA, 19 nt, Homo sapiens
  misc_RNA (1)...(19): siRNA sense strand
agaguaagccauaucaaag

SEQ ID NO: 1668425 - RNA, 19 nt, Homo sapiens
  misc_RNA (1)...(19): siRNA sense strand
aaagaagagguggacguua

SEQ ID NO: 1668426 - RNA, 19 nt, Homo sapiens
  misc_RNA (1)...(19): siRNA sense strand
aaucaaccucuugguaaua

SEQ ID NO: 1668427 - RNA, 19 nt, Homo sapiens
  misc_RNA (1)...(19): siRNA sense strand
cuacgaagccuguguucca

SEQ ID NO: 1668428 - RNA, 19 nt, Homo sapiens
  misc_RNA (1)...(19): siRNA sense strand
acuuggaacccauuacuaa

SEQ ID NO: 1668429 - RNA, 19 nt, Homo sapiens
  misc_RNA (1)...(19): siRNA sense strand
aagaagaauggguuuguga

SEQ ID NO: 1668430 - RNA, 19 nt, Homo sapiens
  misc_RNA (1)...(19): siRNA sense strand
ccgcugaacagaagaaaca

SEQ ID NO: 1668431 - RNA, 19 nt, Homo sapiens
  misc_RNA (1)...(19): siRNA sense strand
cauagaguaagccauauca

SEQ ID NO: 1668432 - RNA, 19 nt, Homo sapiens
  misc_RNA (1)...(19): siRNA sense strand
aucaaccucuugguaauaa

SEQ ID NO: 1668433 - RNA, 19 nt, Homo sapiens
  misc_RNA (1)...(19): siRNA sense strand
aagcagauuuacagaaugc

SEQ ID NO: 1668434 - RNA, 19 nt, Homo sapiens
  misc_RNA (1)...(19): siRNA sense strand
caacuuggaacccauuacu

SEQ ID NO: 1668435 - RNA, 19 nt, Homo sapiens
  misc_RNA (1)...(19): siRNA sense strand
cagaaguuauuccgauggu

SEQ ID NO: 1668436 - RNA, 19 nt, Homo sapiens
  misc_RNA (1)...(19): siRNA sense strand
auaccaaggaucucaaaga

SEQ ID NO: 1668437 - RNA, 19 nt, Homo sapiens
  misc_RNA (1)...(19): siRNA sense strand
agaagaauggguuugugaa

SEQ ID NO: 1668438 - RNA, 19 nt, Homo sapiens
  misc_RNA (1)...(19): siRNA sense strand
agaagagguggacguuaaa

SEQ ID NO: 1668439 - RNA, 19 nt, Homo sapiens
  misc_RNA (1)...(19): siRNA sense strand
cauaucaaagacuucauug

SEQ ID NO: 1668440 - RNA, 19 nt, Homo sapiens
  misc_RNA (1)...(19): siRNA sense strand
cuaauauacagaucugguu

SEQ ID NO: 1668441 - RNA, 19 nt, Homo sapiens
  misc_RNA (1)...(19): siRNA sense strand
ugucugcuguuccacugaa

SEQ ID NO: 1668442 - RNA, 19 nt, Homo sapiens
  misc_RNA (1)...(19): siRNA sense strand
aggacagggucacagacua

SEQ ID NO: 1668443 - RNA, 19 nt, Homo sapiens
  misc_RNA (1)...(19): siRNA sense strand
gaagagguggacguuaaag

SEQ ID NO: 1668444 - RNA, 19 nt, Homo sapiens
  misc_RNA (1)...(19): siRNA sense strand
cagaagaaacagguagaug

SEQ ID NO: 1668445 - RNA, 19 nt, Homo sapiens
  misc_RNA (1)...(19): siRNA sense strand
aauaauuugucugcuguuc

SEQ ID NO: 1668446 - RNA, 19 nt, Homo sapiens
  misc_RNA (1)...(19): siRNA sense strand
caaccucuugguaauaauc

SEQ ID NO: 1668447 - RNA, 19 nt, Homo sapiens
  misc_RNA (1)...(19): siRNA sense strand
aagaagcagauuuacagaa

SEQ ID NO: 1668448 - RNA, 19 nt, Homo sapiens
  misc_RNA (1)...(19): siRNA sense strand
aagaaacagguagauguaa

SEQ ID NO: 1668449 - RNA, 19 nt, Homo sapiens
  misc_RNA (1)...(19): siRNA sense strand
cuucagaauuacagggaau

SEQ ID NO: 1668450 - RNA, 19 nt, Homo sapiens
  misc_RNA (1)...(19): siRNA sense strand
gcucagaagguuaguucca

SEQ ID NO: 1668451 - RNA, 19 nt, Homo sapiens
  misc_RNA (1)...(19): siRNA sense strand
agguggacguuaaaguuga

SEQ ID NO: 1668452 - RNA, 19 nt, Homo sapiens
  misc_RNA (1)...(19): siRNA sense strand
uaggaagugccacaccaaa

SEQ ID NO: 1668453 - RNA, 19 nt, Homo sapiens
  misc_RNA (1)...(19): siRNA sense strand
acguuaaaguugaagacaa

SEQ ID NO: 1668454 - RNA, 19 nt, Homo sapiens
  misc_RNA (1)...(19): siRNA sense strand
aaauaccaaggaucucaaa

SEQ ID NO: 1668455 - RNA, 19 nt, Homo sapiens
  misc_RNA (1)...(19): siRNA sense strand
gaacaaagaugggacagaa

SEQ ID NO: 1668456 - RNA, 19 nt, Homo sapiens
  misc_RNA (1)...(19): siRNA sense strand
gaaguuaucugugcuguga

SEQ ID NO: 1668457 - RNA, 19 nt, Homo sapiens
  misc_RNA (1)...(19): siRNA sense strand
caaaugaaguggagacuga

SEQ ID NO: 1668458 - RNA, 19 nt, Homo sapiens
  misc_RNA (1)...(19): siRNA sense strand
gaaaggauccucgggcuua

SEQ ID NO: 1668459 - RNA, 19 nt, Homo sapiens
  misc_RNA (1)...(19): siRNA sense strand
ggaggaagauggcggauau

SEQ ID NO: 1668460 - RNA, 19 nt, Homo sapiens
  misc_RNA (1)...(19): siRNA sense strand
gcuagaagauccaguaaau

SEQ ID NO: 1668461 - RNA, 19 nt, Homo sapiens
  misc_RNA (1)...(19): siRNA sense strand
gaggaucugugcccuuaua

SEQ ID NO: 1668462 - RNA, 19 nt, Homo sapiens
  misc_RNA (1)...(19): siRNA sense strand
gaagauugauagaacagaa

SEQ ID NO: 1668463 - RNA, 19 nt, Homo sapiens
  misc_RNA (1)...(19): siRNA sense strand
ggaauuaaccucucagaug

SEQ ID NO: 1668464 - RNA, 19 nt, Homo sapiens
  misc_RNA (1)...(19): siRNA sense strand
gaagcuagguaucuacgaa

SEQ ID NO: 1668465 - RNA, 19 nt, Homo sapiens
  misc_RNA (1)...(19): siRNA sense strand
ugaccuaucucaaccaauu

SEQ ID NO: 1668466 - RNA, 19 nt, Homo sapiens
  misc_RNA (1)...(19): siRNA sense strand
gaacagaaccaaaagauuu

SEQ ID NO: 1668467 - RNA, 19 nt, Homo sapiens
  misc_RNA (1)...(19): siRNA sense strand
caagagagcuuugacaucu

SEQ ID NO: 1668468 - RNA, 19 nt, Homo sapiens
  misc_RNA (1)...(19): siRNA sense strand
ccacaaauaugaagaagag

SEQ ID NO: 1668469 - RNA, 19 nt, Homo sapiens
  misc_RNA (1)...(19): siRNA sense strand
gugcucagauggaguuaua

SEQ ID NO: 1668470 - RNA, 19 nt, Homo sapiens
  misc_RNA (1)...(19): siRNA sense strand
guagugagccuuauaugaa

SEQ ID NO: 1668471 - RNA, 19 nt, Homo sapiens
  misc_RNA (1)...(19): siRNA sense strand
uagagaagaagcuguauua

SEQ ID NO: 1668472 - RNA, 19 nt, Homo sapiens
  misc_RNA (1)...(19): siRNA sense strand
gaacuaggaggauguguga

SEQ ID NO: 1668473 - RNA, 19 nt, Homo sapiens
  misc_RNA (1)...(19): siRNA sense strand
ggucgaagauacaaauaug

SEQ ID NO: 1668474 - RNA, 19 nt, Homo sapiens
  misc_RNA (1)...(19): siRNA sense strand
gaagauggcggauauugga

SEQ ID NO: 1668475 - RNA, 19 nt, Homo sapiens
  misc_RNA (1)...(19): siRNA sense strand
gugaagaaauuccacaaau

SEQ ID NO: 1668476 - RNA, 19 nt, Homo sapiens
  misc_RNA (1)...(19): siRNA sense strand
gauaacaucuaugaaguuc

SEQ ID NO: 1668477 - RNA, 19 nt, Homo sapiens
  misc_RNA (1)...(19): siRNA sense strand
ugaaggagcuauauggaau

SEQ ID NO: 1668478 - RNA, 19 nt, Homo sapiens
  misc_RNA (1)...(19): siRNA sense strand
cgaaauaucgugucuugaa

SEQ ID NO: 1668479 - RNA, 19 nt, Homo sapiens
  misc_RNA (1)...(19): siRNA sense strand
cagaaaguguggugaagaa

SEQ ID NO: 1668480 - RNA, 19 nt, Homo sapiens
  misc_RNA (1)...(19): siRNA sense strand
uaaaccaccuauuacauug

SEQ ID NO: 1668481 - RNA, 19 nt, Homo sapiens
  misc_RNA (1)...(19): siRNA sense strand
uagaggaucugugcccuua

SEQ ID NO: 1668482 - RNA, 19 nt, Homo sapiens
  misc_RNA (1)...(19): siRNA sense strand
gaaauaucgugucuugaag

SEQ ID NO: 1668483 - RNA, 19 nt, Homo sapiens
  misc_RNA (1)...(19): siRNA sense strand
ggacugaucgggaagaaga

SEQ ID NO: 1668484 - RNA, 19 nt, Homo sapiens
  misc_RNA (1)...(19): siRNA sense strand
uaucugugcugugaacuua

SEQ ID NO: 1668485 - RNA, 19 nt, Homo sapiens
  misc_RNA (1)...(19): siRNA sense strand
ccaacaagaagaaguuaua

SEQ ID NO: 1668486 - RNA, 19 nt, Homo sapiens
  misc_RNA (1)...(19): siRNA sense strand
cuuugaagaugaaggauua

SEQ ID NO: 1668487 - RNA, 19 nt, Homo sapiens
  misc_RNA (1)...(19): siRNA sense strand
ggaccuaucuagcaauuuu

SEQ ID NO: 1668488 - RNA, 19 nt, Homo sapiens
  misc_RNA (1)...(19): siRNA sense strand
ugcaaacccugucuagaua

SEQ ID NO: 1668489 - RNA, 19 nt, Homo sapiens
  misc_RNA (1)...(19): siRNA sense strand
ccaaagacaucaugcaaac

SEQ ID NO: 1668490 - RNA, 19 nt, Homo sapiens
  misc_RNA (1)...(19): siRNA sense strand
gcaauaaugcagaaacgaa

SEQ ID NO: 1668491 - RNA, 19 nt, Homo sapiens
  misc_RNA (1)...(19): siRNA sense strand
ccaacuguguggacuguuu

SEQ ID NO: 1668492 - RNA, 19 nt, Homo sapiens
  misc_RNA (1)...(19): siRNA sense strand
aaagcaagcuguguaaugu

SEQ ID NO: 1668493 - RNA, 19 nt, Homo sapiens
  misc_RNA (1)...(19): siRNA sense strand
uaaaagaggugcaaacugu

SEQ ID NO: 1668494 - RNA, 19 nt, Homo sapiens
  misc_RNA (1)...(19): siRNA sense strand
gaaaaucaguauugggaaa

SEQ ID NO: 1668495 - RNA, 19 nt, Homo sapiens
  misc_RNA (1)...(19): siRNA sense strand
gauagacaagauuccauua

SEQ ID NO: 1668496 - RNA, 19 nt, Homo sapiens
  misc_RNA (1)...(19): siRNA sense strand
ugacaaaccuaaucuacag

SEQ ID NO: 1668497 - RNA, 19 nt, Homo sapiens
  misc_RNA (1)...(19): siRNA sense strand
gaaagaauucugagugaag

SEQ ID NO: 1668498 - RNA, 19 nt, Homo sapiens
  misc_RNA (1)...(19): siRNA sense strand
gcagauccauuugcacaug

SEQ ID NO: 1668499 - RNA, 19 nt, Homo sapiens
  misc_RNA (1)...(19): siRNA sense strand
caggacauuucaacuauga

SEQ ID NO: 1668500 - RNA, 19 nt, Homo sapiens
  misc_RNA (1)...(19): siRNA sense strand
caaauacucugcgaugcuu

SEQ ID NO: 1668501 - RNA, 19 nt, Homo sapiens
  misc_RNA (1)...(19): siRNA sense strand
aguggagacugaacaaaua

SEQ ID NO: 1668502 - RNA, 19 nt, Homo sapiens
  misc_RNA (1)...(19): siRNA sense strand
gaaaagaaagcaugaaaga

SEQ ID NO: 1668503 - RNA, 19 nt, Homo sapiens
  misc_RNA (1)...(19): siRNA sense strand
cagcuuugaugauaccuuu

SEQ ID NO: 1668504 - RNA, 19 nt, Homo sapiens
  misc_RNA (1)...(19): siRNA sense strand
uaaaccgcccugauucuua

SEQ ID NO: 1668505 - RNA, 19 nt, Homo sapiens
  misc_RNA (1)...(19): siRNA sense strand
cccacucacuucaauauaa

SEQ ID NO: 1668506 - RNA, 19 nt, Homo sapiens
  misc_RNA (1)...(19): siRNA sense strand
cagauggccucucagaaga

SEQ ID NO: 1668507 - RNA, 19 nt, Homo sapiens
  misc_RNA (1)...(19): siRNA sense strand
caauagagaagaagcugua

SEQ ID NO: 1668508 - RNA, 19 nt, Homo sapiens
  misc_RNA (1)...(19): siRNA sense strand
caaacccugucuagauauu

SEQ ID NO: 1668509 - RNA, 19 nt, Homo sapiens
  misc_RNA (1)...(19): siRNA sense strand
gaugaaggauuaauuacac

SEQ ID NO: 1668510 - RNA, 19 nt, Homo sapiens
  misc_RNA (1)...(19): siRNA sense strand
gauucuuacuguagcauuu

SEQ ID NO: 1668511 - RNA, 19 nt, Homo sapiens
  misc_RNA (1)...(19): siRNA sense strand
ggacccagcacuccaaaga

SEQ ID NO: 1668512 - RNA, 19 nt, Homo sapiens
  misc_RNA (1)...(19): siRNA sense strand
agagagcuuugacaucuuu

SEQ ID NO: 1668513 - RNA, 19 nt, Homo sapiens
  misc_RNA (1)...(19): siRNA sense strand
uaaaugugauugcagaaag

SEQ ID NO: 1668514 - RNA, 19 nt, Homo sapiens
  misc_RNA (1)...(19): siRNA sense strand
caacacagcacaguuuaug

SEQ ID NO: 1668515 - RNA, 19 nt, Homo sapiens
  misc_RNA (1)...(19): siRNA sense strand
cagaggugauaaagcauuu

SEQ ID NO: 1668516 - RNA, 19 nt, Homo sapiens
  misc_RNA (1)...(19): siRNA sense strand
ccacucacuucaauauaau

SEQ ID NO: 1668517 - RNA, 19 nt, Homo sapiens
  misc_RNA (1)...(19): siRNA sense strand
ggagcuauauggaauuaac

SEQ ID NO: 1668518 - RNA, 19 nt, Homo sapiens
  misc_RNA (1)...(19): siRNA sense strand
ccugggacauggccaagua

SEQ ID NO: 1668519 - RNA, 19 nt, Homo sapiens
  misc_RNA (1)...(19): siRNA sense strand
gauguuaaagucagaaaug

SEQ ID NO: 1668520 - RNA, 19 nt, Homo sapiens
  misc_RNA (1)...(19): siRNA sense strand
gaggucaugcaaucuauaa

SEQ ID NO: 1668521 - RNA, 19 nt, Homo sapiens
  misc_RNA (1)...(19): siRNA sense strand
gaagggaaaccucaucucu

SEQ ID NO: 1668522 - RNA, 19 nt, Homo sapiens
  misc_RNA (1)...(19): siRNA sense strand
aaccuaaucuacaguuuga

SEQ ID NO: 1668523 - RNA, 19 nt, Homo sapiens
  misc_RNA (1)...(19): siRNA sense strand
aaaguggaaugaacuagga

SEQ ID NO: 1668524 - RNA, 19 nt, Homo sapiens
  misc_RNA (1)...(19): siRNA sense strand
cuaaaccaccuauuacauu

SEQ ID NO: 1668525 - RNA, 19 nt, Homo sapiens
  misc_RNA (1)...(19): siRNA sense strand
ugaaauauguauggaaugg

SEQ ID NO: 1668526 - RNA, 19 nt, Homo sapiens
  misc_RNA (1)...(19): siRNA sense strand
cagcagcccuguucuaggu

SEQ ID NO: 1668527 - RNA, 19 nt, Homo sapiens
  misc_RNA (1)...(19): siRNA sense strand
caacauaaacaagacaaga

SEQ ID NO: 1668528 - RNA, 19 nt, Homo sapiens
  misc_RNA (1)...(19): siRNA sense strand
ggagacagugccaaaguga

SEQ ID NO: 1668529 - RNA, 19 nt, Homo sapiens
  misc_RNA (1)...(19): siRNA sense strand
uugagcagcuuugaugaua

SEQ ID NO: 1668530 - RNA, 19 nt, Homo sapiens
  misc_RNA (1)...(19): siRNA sense strand
gcaugucuauacucaacaa

SEQ ID NO: 1668531 - RNA, 19 nt, Homo sapiens
  misc_RNA (1)...(19): siRNA sense strand
cuagguaucuacgaauauu

SEQ ID NO: 1668532 - RNA, 19 nt, Homo sapiens
  misc_RNA (1)...(19): siRNA sense strand
aaggagcuauauggaauua

SEQ ID NO: 1668533 - RNA, 19 nt, Homo sapiens
  misc_RNA (1)...(19): siRNA sense strand
caaaagcaauagagaagaa

SEQ ID NO: 1668534 - RNA, 19 nt, Homo sapiens
  misc_RNA (1)...(19): siRNA sense strand
uugaggaacucuaugaaga

SEQ ID NO: 1668535 - RNA, 19 nt, Homo sapiens
  misc_RNA (1)...(19): siRNA sense strand
gcuuggaucuuggaaauag

SEQ ID NO: 1668536 - RNA, 19 nt, Homo sapiens
  misc_RNA (1)...(19): siRNA sense strand
uagugagccuuauaugaaa

SEQ ID NO: 1668537 - RNA, 19 nt, Homo sapiens
  misc_RNA (1)...(19): siRNA sense strand
ugaaagaauucugagugaa

SEQ ID NO: 1668538 - RNA, 19 nt, Homo sapiens
  misc_RNA (1)...(19): siRNA sense strand
gcucagcacgugacuuuau

SEQ ID NO: 1668539 - RNA, 19 nt, Homo sapiens
  misc_RNA (1)...(19): siRNA sense strand
aagaagagauugauaucca

SEQ ID NO: 1668540 - RNA, 19 nt, Homo sapiens
  misc_RNA (1)...(19): siRNA sense strand
ucuauaaggucgaagauac

SEQ ID NO: 1668541 - RNA, 19 nt, Homo sapiens
  misc_RNA (1)...(19): siRNA sense strand
gcucagauggaguuauaaa

SEQ ID NO: 1668542 - RNA, 19 nt, Homo sapiens
  misc_RNA (1)...(19): siRNA sense strand
gaaggagcuauauggaauu

SEQ ID NO: 1668543 - RNA, 19 nt, Homo sapiens
  misc_RNA (1)...(19): siRNA sense strand
agaaguugauagugaagaa

SEQ ID NO: 1668544 - RNA, 19 nt, Homo sapiens
  misc_RNA (1)...(19): siRNA sense strand
ugucuauacucaacaagaa

SEQ ID NO: 1668545 - RNA, 19 nt, Homo sapiens
  misc_RNA (1)...(19): siRNA sense strand
aaagaauucugagugaaga

SEQ ID NO: 1668546 - RNA, 19 nt, Homo sapiens
  misc_RNA (1)...(19): siRNA sense strand
uggcugcccuucacuuuga

SEQ ID NO: 1668547 - RNA, 19 nt, Homo sapiens
  misc_RNA (1)...(19): siRNA sense strand
ggacauuucaacuaugaug

SEQ ID NO: 1668548 - RNA, 19 nt, Homo sapiens
  misc_RNA (1)...(19): siRNA sense strand
ugaugaagcuagguaucua

SEQ ID NO: 1668549 - RNA, 19 nt, Homo sapiens
  misc_RNA (1)...(19): siRNA sense strand
uuucaacuaugaugccuaa

SEQ ID NO: 1668550 - RNA, 19 nt, Homo sapiens
  misc_RNA (1)...(19): siRNA sense strand
ccaaagugaccgagaaugu

SEQ ID NO: 1668551 - RNA, 19 nt, Homo sapiens
  misc_RNA (1)...(19): siRNA sense strand
gaauugauccaaguccauu

SEQ ID NO: 1668552 - RNA, 19 nt, Homo sapiens
  misc_RNA (1)...(19): siRNA sense strand
gaguugagcagcuuugaug

SEQ ID NO: 1668553 - RNA, 19 nt, Homo sapiens
  misc_RNA (1)...(19): siRNA sense strand
caacuguguggacuguuua

SEQ ID NO: 1668554 - RNA, 19 nt, Homo sapiens
  misc_RNA (1)...(19): siRNA sense strand
caucuugaauuuagugaag

SEQ ID NO: 1668555 - RNA, 19 nt, Homo sapiens
  misc_RNA (1)...(19): siRNA sense strand
agaagucgguggacaagaa

SEQ ID NO: 1668556 - RNA, 19 nt, Homo sapiens
  misc_RNA (1)...(19): siRNA sense strand
acaagaacagcaacgagua

SEQ ID NO: 1668557 - RNA, 19 nt, Homo sapiens
  misc_RNA (1)...(19): siRNA sense strand
ccaagaagucgguggacaa

SEQ ID NO: 1668558 - RNA, 19 nt, Homo sapiens
  misc_RNA (1)...(19): siRNA sense strand
gagcugaccagugacaaug

SEQ ID NO: 1668559 - RNA, 19 nt, Homo sapiens
  misc_RNA (1)...(19): siRNA sense strand
cgacaucagcgccuacauc

SEQ ID NO: 1668560 - RNA, 19 nt, Homo sapiens
  misc_RNA (1)...(19): siRNA sense strand
ggagcugaccagugacaau

SEQ ID NO: 1668561 - RNA, 19 nt, Homo sapiens
  misc_RNA (1)...(19): siRNA sense strand
caagaacagcaacgaguac

SEQ ID NO: 1668562 - RNA, 19 nt, Homo sapiens
  misc_RNA (1)...(19): siRNA sense strand
guuccuggccgaccuguuc

SEQ ID NO: 1668563 - RNA, 19 nt, Homo sapiens
  misc_RNA (1)...(19): siRNA sense strand
ucaaggccaugggcaacug

SEQ ID NO: 1668564 - RNA, 19 nt, Homo sapiens
  misc_RNA (1)...(19): siRNA sense strand
gcaccugcaguuccagauc

SEQ ID NO: 1668565 - RNA, 19 nt, Homo sapiens
  misc_RNA (1)...(19): siRNA sense strand
caagaagucgguggacaag

SEQ ID NO: 1668566 - RNA, 19 nt, Homo sapiens
  misc_RNA (1)...(19): siRNA sense strand
ggaguucccuuuccucuua

SEQ ID NO: 1668567 - RNA, 19 nt, Homo sapiens
  misc_RNA (1)...(19): siRNA sense strand
gaaaucgugucuauguuua

SEQ ID NO: 1668568 - RNA, 19 nt, Homo sapiens
  misc_RNA (1)...(19): siRNA sense strand
gcaauuugaugaugcauuu

SEQ ID NO: 1668569 - RNA, 19 nt, Homo sapiens
  misc_RNA (1)...(19): siRNA sense strand
gaaaguaaauacacaugga

SEQ ID NO: 1668570 - RNA, 19 nt, Homo sapiens
  misc_RNA (1)...(19): siRNA sense strand
gcaaggagcuaauucaucu

SEQ ID NO: 1668571 - RNA, 19 nt, Homo sapiens
  misc_RNA (1)...(19): siRNA sense strand
uaacaacacugaucucuuc

SEQ ID NO: 1668572 - RNA, 19 nt, Homo sapiens
  misc_RNA (1)...(19): siRNA sense strand
gcagagagcauguuuacaa

SEQ ID NO: 1668573 - RNA, 19 nt, Homo sapiens
  misc_RNA (1)...(19): siRNA sense strand
ccagacaucucucuaguga

SEQ ID NO: 1668574 - RNA, 19 nt, Homo sapiens
  misc_RNA (1)...(19): siRNA sense strand
gagaccacguuuauacaua

SEQ ID NO: 1668575 - RNA, 19 nt, Homo sapiens
  misc_RNA (1)...(19): siRNA sense strand
ggaaugacuccucaguuua

SEQ ID NO: 1668576 - RNA, 19 nt, Homo sapiens
  misc_RNA (1)...(19): siRNA sense strand
uaucagacauuauggcuuu

SEQ ID NO: 1668577 - RNA, 19 nt, Homo sapiens
  misc_RNA (1)...(19): siRNA sense strand
acaagaaacucuacaacaa

SEQ ID NO: 1668578 - RNA, 19 nt, Homo sapiens
  misc_RNA (1)...(19): siRNA sense strand
gagagcauguuuacaaaug

SEQ ID NO: 1668579 - RNA, 19 nt, Homo sapiens
  misc_RNA (1)...(19): siRNA sense strand
gaagauuaguguuguuugu

SEQ ID NO: 1668580 - RNA, 19 nt, Homo sapiens
  misc_RNA (1)...(19): siRNA sense strand
ucaguugacuacucaguua

SEQ ID NO: 1668581 - RNA, 19 nt, Homo sapiens
  misc_RNA (1)...(19): siRNA sense strand
caacacugaucucuucaaa

SEQ ID NO: 1668582 - RNA, 19 nt, Homo sapiens
  misc_RNA (1)...(19): siRNA sense strand
ggauaaacauagaacaaga

SEQ ID NO: 1668583 - RNA, 19 nt, Homo sapiens
  misc_RNA (1)...(19): siRNA sense strand
gaaaaugacucagaagaaa

SEQ ID NO: 1668584 - RNA, 19 nt, Homo sapiens
  misc_RNA (1)...(19): siRNA sense strand
cagaugcacuuuacgaauu

SEQ ID NO: 1668585 - RNA, 19 nt, Homo sapiens
  misc_RNA (1)...(19): siRNA sense strand
gaagcucucuuuccacuag

SEQ ID NO: 1668586 - RNA, 19 nt, Homo sapiens
  misc_RNA (1)...(19): siRNA sense strand
gcaaagaugaccucacuga

SEQ ID NO: 1668587 - RNA, 19 nt, Homo sapiens
  misc_RNA (1)...(19): siRNA sense strand
gagcaaagaugaccucacu

SEQ ID NO: 1668588 - RNA, 19 nt, Homo sapiens
  misc_RNA (1)...(19): siRNA sense strand
ggaagaggcuagaugucaa

SEQ ID NO: 1668589 - RNA, 19 nt, Homo sapiens
  misc_RNA (1)...(19): siRNA sense strand
uauggcagcuggcuugaua

SEQ ID NO: 1668590 - RNA, 19 nt, Homo sapiens
  misc_RNA (1)...(19): siRNA sense strand
cagcauacuucuuucauug

SEQ ID NO: 1668591 - RNA, 19 nt, Homo sapiens
  misc_RNA (1)...(19): siRNA sense strand
ggaaaauccuguagaguuu

SEQ ID NO: 1668592 - RNA, 19 nt, Homo sapiens
  misc_RNA (1)...(19): siRNA sense strand
ccugggaauugaaguauua

SEQ ID NO: 1668593 - RNA, 19 nt, Homo sapiens
  misc_RNA (1)...(19): siRNA sense strand
uggaaugacuccucaguuu

SEQ ID NO: 1668594 - RNA, 19 nt, Homo sapiens
  misc_RNA (1)...(19): siRNA sense strand
ggacaagcaucagccacua

SEQ ID NO: 1668595 - RNA, 19 nt, Homo sapiens
  misc_RNA (1)...(19): siRNA sense strand
uguaacaucucucaugaaa

SEQ ID NO: 1668596 - RNA, 19 nt, Homo sapiens
  misc_RNA (1)...(19): siRNA sense strand
cauuuaaacugcuuucuga

SEQ ID NO: 1668597 - RNA, 19 nt, Homo sapiens
  misc_RNA (1)...(19): siRNA sense strand
gaaguggucucccuuugca

SEQ ID NO: 1668598 - RNA, 19 nt, Homo sapiens
  misc_RNA (1)...(19): siRNA sense strand
gagcaccguuuauuaggaa

SEQ ID NO: 1668599 - RNA, 19 nt, Homo sapiens
  misc_RNA (1)...(19): siRNA sense strand
gguaugcgguucuaagaga

SEQ ID NO: 1668600 - RNA, 19 nt, Homo sapiens
  misc_RNA (1)...(19): siRNA sense strand
ucacacauaugacagauuc

SEQ ID NO: 1668601 - RNA, 19 nt, Homo sapiens
  misc_RNA (1)...(19): siRNA sense strand
gcuaauucaucuugcauug

SEQ ID NO: 1668602 - RNA, 19 nt, Homo sapiens
  misc_RNA (1)...(19): siRNA sense strand
gccaaaggauggaaggaaa

SEQ ID NO: 1668603 - RNA, 19 nt, Homo sapiens
  misc_RNA (1)...(19): siRNA sense strand
guauccaguucucuuauaa

SEQ ID NO: 1668604 - RNA, 19 nt, Homo sapiens
  misc_RNA (1)...(19): siRNA sense strand
gaagagcuauugguacauc

SEQ ID NO: 1668605 - RNA, 19 nt, Homo sapiens
  misc_RNA (1)...(19): siRNA sense strand
gggcgucaauguuguuauu

SEQ ID NO: 1668606 - RNA, 19 nt, Homo sapiens
  misc_RNA (1)...(19): siRNA sense strand
ugggauugcuuauacauuu

SEQ ID NO: 1668607 - RNA, 19 nt, Homo sapiens
  misc_RNA (1)...(19): siRNA sense strand
ccagauauccugccuaugu

SEQ ID NO: 1668608 - RNA, 19 nt, Homo sapiens
  misc_RNA (1)...(19): siRNA sense strand
guuaaggacuucuuucauc

SEQ ID NO: 1668609 - RNA, 19 nt, Homo sapiens
  misc_RNA (1)...(19): siRNA sense strand
gaagaaacucagacuaugu

SEQ ID NO: 1668610 - RNA, 19 nt, Homo sapiens
  misc_RNA (1)...(19): siRNA sense strand
gcagcuggcuugauauugg

SEQ ID NO: 1668611 - RNA, 19 nt, Homo sapiens
  misc_RNA (1)...(19): siRNA sense strand
gaucuugccucugucuauu

SEQ ID NO: 1668612 - RNA, 19 nt, Homo sapiens
  misc_RNA (1)...(19): siRNA sense strand
gaugauggaguuaaagaaa

SEQ ID NO: 1668613 - RNA, 19 nt, Homo sapiens
  misc_RNA (1)...(19): siRNA sense strand
cgaagaaacucagacuaug

SEQ ID NO: 1668614 - RNA, 19 nt, Homo sapiens
  misc_RNA (1)...(19): siRNA sense strand
cagagagcauguuuacaaa

SEQ ID NO: 1668615 - RNA, 19 nt, Homo sapiens
  misc_RNA (1)...(19): siRNA sense strand
guaaagaagugaagaaacc

SEQ ID NO: 1668616 - RNA, 19 nt, Homo sapiens
  misc_RNA (1)...(19): siRNA sense strand
ccacuaguguugucuuguu

SEQ ID NO: 1668617 - RNA, 19 nt, Homo sapiens
  misc_RNA (1)...(19): siRNA sense strand
guuguaacaucucucauga

SEQ ID NO: 1668618 - RNA, 19 nt, Homo sapiens
  misc_RNA (1)...(19): siRNA sense strand
aaagaaaucgugucuaugu

SEQ ID NO: 1668619 - RNA, 19 nt, Homo sapiens
  misc_RNA (1)...(19): siRNA sense strand
ccauguauguuguguauag

SEQ ID NO: 1668620 - RNA, 19 nt, Homo sapiens
  misc_RNA (1)...(19): siRNA sense strand
gaguggagauuggagaauu

SEQ ID NO: 1668621 - RNA, 19 nt, Homo sapiens
  misc_RNA (1)...(19): siRNA sense strand
guucuucgccuccaucuuu

SEQ ID NO: 1668622 - RNA, 19 nt, Homo sapiens
  misc_RNA (1)...(19): siRNA sense strand
cugaugauguggaagauuu

SEQ ID NO: 1668623 - RNA, 19 nt, Homo sapiens
  misc_RNA (1)...(19): siRNA sense strand
gauauugcaccauugauga

SEQ ID NO: 1668624 - RNA, 19 nt, Homo sapiens
  misc_RNA (1)...(19): siRNA sense strand
aguaucagcucagcaauuu

SEQ ID NO: 1668625 - RNA, 19 nt, Homo sapiens
  misc_RNA (1)...(19): siRNA sense strand
agaugcacuuuacgaauua

SEQ ID NO: 1668626 - RNA, 19 nt, Homo sapiens
  misc_RNA (1)...(19): siRNA sense strand
gcuauugguacaucuguua

SEQ ID NO: 1668627 - RNA, 19 nt, Homo sapiens
  misc_RNA (1)...(19): siRNA sense strand
ccaaacaguucaacauuuu

SEQ ID NO: 1668628 - RNA, 19 nt, Homo sapiens
  misc_RNA (1)...(19): siRNA sense strand
gcccagauauccugccuau

SEQ ID NO: 1668629 - RNA, 19 nt, Homo sapiens
  misc_RNA (1)...(19): siRNA sense strand
gaagaugucagugcaguug

SEQ ID NO: 1668630 - RNA, 19 nt, Homo sapiens
  misc_RNA (1)...(19): siRNA sense strand
ccagaaacaaccagucuuu

SEQ ID NO: 1668631 - RNA, 19 nt, Homo sapiens
  misc_RNA (1)...(19): siRNA sense strand
ccuauuaucacacauauga

SEQ ID NO: 1668632 - RNA, 19 nt, Homo sapiens
  misc_RNA (1)...(19): siRNA sense strand
uuaaacugcuuucugauuc

SEQ ID NO: 1668633 - RNA, 19 nt, Homo sapiens
  misc_RNA (1)...(19): siRNA sense strand
gcuuugaucuugccucugu

SEQ ID NO: 1668634 - RNA, 19 nt, Homo sapiens
  misc_RNA (1)...(19): siRNA sense strand
guaugaagcucucuuucca

SEQ ID NO: 1668635 - RNA, 19 nt, Homo sapiens
  misc_RNA (1)...(19): siRNA sense strand
ggaauugaaguauuaguuc

SEQ ID NO: 1668636 - RNA, 19 nt, Homo sapiens
  misc_RNA (1)...(19): siRNA sense strand
caaagcagagagcauguuu

SEQ ID NO: 1668637 - RNA, 19 nt, Homo sapiens
  misc_RNA (1)...(19): siRNA sense strand
aaaggaagagcuauuggua

SEQ ID NO: 1668638 - RNA, 19 nt, Homo sapiens
  misc_RNA (1)...(19): siRNA sense strand
acagaaaguuugaugaagu

SEQ ID NO: 1668639 - RNA, 19 nt, Homo sapiens
  misc_RNA (1)...(19): siRNA sense strand
gacuacaagcacaauauua

SEQ ID NO: 1668640 - RNA, 19 nt, Homo sapiens
  misc_RNA (1)...(19): siRNA sense strand
caagaaacucuacaacaau

SEQ ID NO: 1668641 - RNA, 19 nt, Homo sapiens
  misc_RNA (1)...(19): siRNA sense strand
caaccuaccuacuucuaag

SEQ ID NO: 1668642 - RNA, 19 nt, Homo sapiens
  misc_RNA (1)...(19): siRNA sense strand
uaacaucucucaugaaaag

SEQ ID NO: 1668643 - RNA, 19 nt, Homo sapiens
  misc_RNA (1)...(19): siRNA sense strand
gcgagaagauuaguguugu

SEQ ID NO: 1668644 - RNA, 19 nt, Homo sapiens
  misc_RNA (1)...(19): siRNA sense strand
cagaaaguuugaugaagug

SEQ ID NO: 1668645 - RNA, 19 nt, Homo sapiens
  misc_RNA (1)...(19): siRNA sense strand
uccaaacaguucaacauuu

SEQ ID NO: 1668646 - RNA, 19 nt, Homo sapiens
  misc_RNA (1)...(19): siRNA sense strand
ccacuucuauggaaaugau

SEQ ID NO: 1668647 - RNA, 19 nt, Homo sapiens
  misc_RNA (1)...(19): siRNA sense strand
gcucagcaauuugaugaug

SEQ ID NO: 1668648 - RNA, 19 nt, Homo sapiens
  misc_RNA (1)...(19): siRNA sense strand
ucucauuguucucgucaua

SEQ ID NO: 1668649 - RNA, 19 nt, Homo sapiens
  misc_RNA (1)...(19): siRNA sense strand
gagaagauuaguguuguuu

SEQ ID NO: 1668650 - RNA, 19 nt, Homo sapiens
  misc_RNA (1)...(19): siRNA sense strand
acacugaucucuucaaagc

SEQ ID NO: 1668651 - RNA, 19 nt, Homo sapiens
  misc_RNA (1)...(19): siRNA sense strand
ucagagacuuuaacuccuu

SEQ ID NO: 1668652 - RNA, 19 nt, Homo sapiens
  misc_RNA (1)...(19): siRNA sense strand
gcaguucaguugacuacuc

SEQ ID NO: 1668653 - RNA, 19 nt, Homo sapiens
  misc_RNA (1)...(19): siRNA sense strand
ucacugaguuggacuuucu

SEQ ID NO: 1668654 - RNA, 19 nt, Homo sapiens
  misc_RNA (1)...(19): siRNA sense strand
ucuagagcaccguuuauua

SEQ ID NO: 1668655 - RNA, 19 nt, Homo sapiens
  misc_RNA (1)...(19): siRNA sense strand
cuacucaguuaucgucaaa

SEQ ID NO: 1668656 - RNA, 19 nt, Homo sapiens
  misc_RNA (1)...(19): siRNA sense strand
ccaguucucuuauaauacu

SEQ ID NO: 1668657 - RNA, 19 nt, Homo sapiens
  misc_RNA (1)...(19): siRNA sense strand
gaacaagaaacucuacaac

SEQ ID NO: 1668658 - RNA, 19 nt, Homo sapiens
  misc_RNA (1)...(19): siRNA sense strand
gcauacuucuuucauugau

SEQ ID NO: 1668659 - RNA, 19 nt, Homo sapiens
  misc_RNA (1)...(19): siRNA sense strand
gagacuacaagcacaauau

SEQ ID NO: 1668660 - RNA, 19 nt, Homo sapiens
  misc_RNA (1)...(19): siRNA sense strand
aaacggacaugcucaucga

SEQ ID NO: 1668661 - RNA, 19 nt, Homo sapiens
  misc_RNA (1)...(19): siRNA sense strand
cgaauuagaugaaaaugga

SEQ ID NO: 1668662 - RNA, 19 nt, Homo sapiens
  misc_RNA (1)...(19): siRNA sense strand
cagauauccugccuauguu

SEQ ID NO: 1668663 - RNA, 19 nt, Homo sapiens
  misc_RNA (1)...(19): siRNA sense strand
gaugucaaccuaccuacuu

SEQ ID NO: 1668664 - RNA, 19 nt, Homo sapiens
  misc_RNA (1)...(19): siRNA sense strand
caaaugcaguacagauucu

SEQ ID NO: 1668665 - RNA, 19 nt, Homo sapiens
  misc_RNA (1)...(19): siRNA sense strand
uuaaggacuucuuucauca

SEQ ID NO: 1668666 - RNA, 19 nt, Homo sapiens
  misc_RNA (1)...(19): siRNA sense strand
ggaguucccuuuccucuua

SEQ ID NO: 1668667 - RNA, 19 nt, Homo sapiens
  misc_RNA (1)...(19): siRNA sense strand
gaaaucgugucuauguuua

SEQ ID NO: 1668668 - RNA, 19 nt, Homo sapiens
  misc_RNA (1)...(19): siRNA sense strand
gcaauuugaugaugcauuu

SEQ ID NO: 1668669 - RNA, 19 nt, Homo sapiens
  misc_RNA (1)...(19): siRNA sense strand
gaaaguaaauacacaugga

SEQ ID NO: 1668670 - RNA, 19 nt, Homo sapiens
  misc_RNA (1)...(19): siRNA sense strand
gcaaggagcuaauucaucu

SEQ ID NO: 1668671 - RNA, 19 nt, Homo sapiens
  misc_RNA (1)...(19): siRNA sense strand
uaacaacacugaucucuuc

SEQ ID NO: 1668672 - RNA, 19 nt, Homo sapiens
  misc_RNA (1)...(19): siRNA sense strand
gcagagagcauguuuacaa

SEQ ID NO: 1668673 - RNA, 19 nt, Homo sapiens
  misc_RNA (1)...(19): siRNA sense strand
ccagacaucucucuaguga

SEQ ID NO: 1668674 - RNA, 19 nt, Homo sapiens
  misc_RNA (1)...(19): siRNA sense strand
gagaccacguuuauacaua

SEQ ID NO: 1668675 - RNA, 19 nt, Homo sapiens
  misc_RNA (1)...(19): siRNA sense strand
ggaaugacuccucaguuua

SEQ ID NO: 1668676 - RNA, 19 nt, Homo sapiens
  misc_RNA (1)...(19): siRNA sense strand
uaucagacauuauggcuuu

SEQ ID NO: 1668677 - RNA, 19 nt, Homo sapiens
  misc_RNA (1)...(19): siRNA sense strand
acaagaaacucuacaacaa

SEQ ID NO: 1668678 - RNA, 19 nt, Homo sapiens
  misc_RNA (1)...(19): siRNA sense strand
gagagcauguuuacaaaug

SEQ ID NO: 1668679 - RNA, 19 nt, Homo sapiens
  misc_RNA (1)...(19): siRNA sense strand
gaagauuaguguuguuugu

SEQ ID NO: 1668680 - RNA, 19 nt, Homo sapiens
  misc_RNA (1)...(19): siRNA sense strand
ucaguugacuacucaguua

SEQ ID NO: 1668681 - RNA, 19 nt, Homo sapiens
  misc_RNA (1)...(19): siRNA sense strand
caacacugaucucuucaaa

SEQ ID NO: 1668682 - RNA, 19 nt, Homo sapiens
  misc_RNA (1)...(19): siRNA sense strand
ggauaaacauagaacaaga

SEQ ID NO: 1668683 - RNA, 19 nt, Homo sapiens
  misc_RNA (1)...(19): siRNA sense strand
gaaaaugacucagaagaaa

SEQ ID NO: 1668684 - RNA, 19 nt, Homo sapiens
  misc_RNA (1)...(19): siRNA sense strand
cagaugcacuuuacgaauu

SEQ ID NO: 1668685 - RNA, 19 nt, Homo sapiens
  misc_RNA (1)...(19): siRNA sense strand
gaagcucucuuuccacuag

SEQ ID NO: 1668686 - RNA, 19 nt, Homo sapiens
  misc_RNA (1)...(19): siRNA sense strand
gcaaagaugaccucacuga

SEQ ID NO: 1668687 - RNA, 19 nt, Homo sapiens
  misc_RNA (1)...(19): siRNA sense strand
gagcaaagaugaccucacu

SEQ ID NO: 1668688 - RNA, 19 nt, Homo sapiens
  misc_RNA (1)...(19): siRNA sense strand
ggaagaggcuagaugucaa

SEQ ID NO: 1668689 - RNA, 19 nt, Homo sapiens
  misc_RNA (1)...(19): siRNA sense strand
uauggcagcuggcuugaua

SEQ ID NO: 1668690 - RNA, 19 nt, Homo sapiens
  misc_RNA (1)...(19): siRNA sense strand
cagcauacuucuuucauug

SEQ ID NO: 1668691 - RNA, 19 nt, Homo sapiens
  misc_RNA (1)...(19): siRNA sense strand
ggaaaauccuguagaguuu

SEQ ID NO: 1668692 - RNA, 19 nt, Homo sapiens
  misc_RNA (1)...(19): siRNA sense strand
ccugggaauugaaguauua

SEQ ID NO: 1668693 - RNA, 19 nt, Homo sapiens
  misc_RNA (1)...(19): siRNA sense strand
uggaaugacuccucaguuu

SEQ ID NO: 1668694 - RNA, 19 nt, Homo sapiens
  misc_RNA (1)...(19): siRNA sense strand
ggacaagcaucagccacua

SEQ ID NO: 1668695 - RNA, 19 nt, Homo sapiens
  misc_RNA (1)...(19): siRNA sense strand
uguaacaucucucaugaaa

SEQ ID NO: 1668696 - RNA, 19 nt, Homo sapiens
  misc_RNA (1)...(19): siRNA sense strand
cauuuaaacugcuuucuga

SEQ ID NO: 1668697 - RNA, 19 nt, Homo sapiens
  misc_RNA (1)...(19): siRNA sense strand
gaaguggucucccuuugca

SEQ ID NO: 1668698 - RNA, 19 nt, Homo sapiens
  misc_RNA (1)...(19): siRNA sense strand
gagcaccguuuauuaggaa

SEQ ID NO: 1668699 - RNA, 19 nt, Homo sapiens
  misc_RNA (1)...(19): siRNA sense strand
gguaugcgguucuaagaga

SEQ ID NO: 1668700 - RNA, 19 nt, Homo sapiens
  misc_RNA (1)...(19): siRNA sense strand
ucacacauaugacagauuc

SEQ ID NO: 1668701 - RNA, 19 nt, Homo sapiens
  misc_RNA (1)...(19): siRNA sense strand
gcuaauucaucuugcauug

SEQ ID NO: 1668702 - RNA, 19 nt, Homo sapiens
  misc_RNA (1)...(19): siRNA sense strand
gccaaaggauggaaggaaa

SEQ ID NO: 1668703 - RNA, 19 nt, Homo sapiens
  misc_RNA (1)...(19): siRNA sense strand
guauccaguucucuuauaa

SEQ ID NO: 1668704 - RNA, 19 nt, Homo sapiens
  misc_RNA (1)...(19): siRNA sense strand
gaagagcuauugguacauc

SEQ ID NO: 1668705 - RNA, 19 nt, Homo sapiens
  misc_RNA (1)...(19): siRNA sense strand
gggcgucaauguuguuauu

SEQ ID NO: 1668706 - RNA, 19 nt, Homo sapiens
  misc_RNA (1)...(19): siRNA sense strand
ugggauugcuuauacauuu

SEQ ID NO: 1668707 - RNA, 19 nt, Homo sapiens
  misc_RNA (1)...(19): siRNA sense strand
ccagauauccugccuaugu

SEQ ID NO: 1668708 - RNA, 19 nt, Homo sapiens
  misc_RNA (1)...(19): siRNA sense strand
guuaaggacuucuuucauc

SEQ ID NO: 1668709 - RNA, 19 nt, Homo sapiens
  misc_RNA (1)...(19): siRNA sense strand
gaagaaacucagacuaugu

SEQ ID NO: 1668710 - RNA, 19 nt, Homo sapiens
  misc_RNA (1)...(19): siRNA sense strand
gcagcuggcuugauauugg

SEQ ID NO: 1668711 - RNA, 19 nt, Homo sapiens
  misc_RNA (1)...(19): siRNA sense strand
gaucuugccucugucuauu

SEQ ID NO: 1668712 - RNA, 19 nt, Homo sapiens
  misc_RNA (1)...(19): siRNA sense strand
gaugauggaguuaaagaaa

SEQ ID NO: 1668713 - RNA, 19 nt, Homo sapiens
  misc_RNA (1)...(19): siRNA sense strand
cgaagaaacucagacuaug

SEQ ID NO: 1668714 - RNA, 19 nt, Homo sapiens
  misc_RNA (1)...(19): siRNA sense strand
cagagagcauguuuacaaa

SEQ ID NO: 1668715 - RNA, 19 nt, Homo sapiens
  misc_RNA (1)...(19): siRNA sense strand
guaaagaagugaagaaacc

SEQ ID NO: 1668716 - RNA, 19 nt, Homo sapiens
  misc_RNA (1)...(19): siRNA sense strand
ccacuaguguugucuuguu

SEQ ID NO: 1668717 - RNA, 19 nt, Homo sapiens
  misc_RNA (1)...(19): siRNA sense strand
guuguaacaucucucauga

SEQ ID NO: 1668718 - RNA, 19 nt, Homo sapiens
  misc_RNA (1)...(19): siRNA sense strand
aaagaaaucgugucuaugu

SEQ ID NO: 1668719 - RNA, 19 nt, Homo sapiens
  misc_RNA (1)...(19): siRNA sense strand
ccauguauguuguguauag

SEQ ID NO: 1668720 - RNA, 19 nt, Homo sapiens
  misc_RNA (1)...(19): siRNA sense strand
gaguggagauuggagaauu

SEQ ID NO: 1668721 - RNA, 19 nt, Homo sapiens
  misc_RNA (1)...(19): siRNA sense strand
guucuucgccuccaucuuu

SEQ ID NO: 1668722 - RNA, 19 nt, Homo sapiens
  misc_RNA (1)...(19): siRNA sense strand
cugaugauguggaagauuu

SEQ ID NO: 1668723 - RNA, 19 nt, Homo sapiens
  misc_RNA (1)...(19): siRNA sense strand
gauauugcaccauugauga

SEQ ID NO: 1668724 - RNA, 19 nt, Homo sapiens
  misc_RNA (1)...(19): siRNA sense strand
aguaucagcucagcaauuu

SEQ ID NO: 1668725 - RNA, 19 nt, Homo sapiens
  misc_RNA (1)...(19): siRNA sense strand
agaugcacuuuacgaauua

SEQ ID NO: 1668726 - RNA, 19 nt, Homo sapiens
  misc_RNA (1)...(19): siRNA sense strand
gcuauugguacaucuguua

SEQ ID NO: 1668727 - RNA, 19 nt, Homo sapiens
  misc_RNA (1)...(19): siRNA sense strand
ccaaacaguucaacauuuu

SEQ ID NO: 1668728 - RNA, 19 nt, Homo sapiens
  misc_RNA (1)...(19): siRNA sense strand
gcccagauauccugccuau

SEQ ID NO: 1668729 - RNA, 19 nt, Homo sapiens
  misc_RNA (1)...(19): siRNA sense strand
gaagaugucagugcaguug

SEQ ID NO: 1668730 - RNA, 19 nt, Homo sapiens
  misc_RNA (1)...(19): siRNA sense strand
ccagaaacaaccagucuuu

SEQ ID NO: 1668731 - RNA, 19 nt, Homo sapiens
  misc_RNA (1)...(19): siRNA sense strand
ccuauuaucacacauauga

SEQ ID NO: 1668732 - RNA, 19 nt, Homo sapiens
  misc_RNA (1)...(19): siRNA sense strand
uuaaacugcuuucugauuc

SEQ ID NO: 1668733 - RNA, 19 nt, Homo sapiens
  misc_RNA (1)...(19): siRNA sense strand
gcuuugaucuugccucugu

SEQ ID NO: 1668734 - RNA, 19 nt, Homo sapiens
  misc_RNA (1)...(19): siRNA sense strand
guaugaagcucucuuucca

SEQ ID NO: 1668735 - RNA, 19 nt, Homo sapiens
  misc_RNA (1)...(19): siRNA sense strand
ggaauugaaguauuaguuc

SEQ ID NO: 1668736 - RNA, 19 nt, Homo sapiens
  misc_RNA (1)...(19): siRNA sense strand
caaagcagagagcauguuu

SEQ ID NO: 1668737 - RNA, 19 nt, Homo sapiens
  misc_RNA (1)...(19): siRNA sense strand
aaaggaagagcuauuggua

SEQ ID NO: 1668738 - RNA, 19 nt, Homo sapiens
  misc_RNA (1)...(19): siRNA sense strand
acagaaaguuugaugaagu

SEQ ID NO: 1668739 - RNA, 19 nt, Homo sapiens
  misc_RNA (1)...(19): siRNA sense strand
gacuacaagcacaauauua

SEQ ID NO: 1668740 - RNA, 19 nt, Homo sapiens
  misc_RNA (1)...(19): siRNA sense strand
caagaaacucuacaacaau

SEQ ID NO: 1668741 - RNA, 19 nt, Homo sapiens
  misc_RNA (1)...(19): siRNA sense strand
caaccuaccuacuucuaag

SEQ ID NO: 1668742 - RNA, 19 nt, Homo sapiens
  misc_RNA (1)...(19): siRNA sense strand
uaacaucucucaugaaaag

SEQ ID NO: 1668743 - RNA, 19 nt, Homo sapiens
  misc_RNA (1)...(19): siRNA sense strand
gcgagaagauuaguguugu

SEQ ID NO: 1668744 - RNA, 19 nt, Homo sapiens
  misc_RNA (1)...(19): siRNA sense strand
cagaaaguuugaugaagug

SEQ ID NO: 1668745 - RNA, 19 nt, Homo sapiens
  misc_RNA (1)...(19): siRNA sense strand
uccaaacaguucaacauuu

SEQ ID NO: 1668746 - RNA, 19 nt, Homo sapiens
  misc_RNA (1)...(19): siRNA sense strand
ccacuucuauggaaaugau

SEQ ID NO: 1668747 - RNA, 19 nt, Homo sapiens
  misc_RNA (1)...(19): siRNA sense strand
gcucagcaauuugaugaug

SEQ ID NO: 1668748 - RNA, 19 nt, Homo sapiens
  misc_RNA (1)...(19): siRNA sense strand
ucucauuguucucgucaua

SEQ ID NO: 1668749 - RNA, 19 nt, Homo sapiens
  misc_RNA (1)...(19): siRNA sense strand
gagaagauuaguguuguuu

SEQ ID NO: 1668750 - RNA, 19 nt, Homo sapiens
  misc_RNA (1)...(19): siRNA sense strand
acacugaucucuucaaagc

SEQ ID NO: 1668751 - RNA, 19 nt, Homo sapiens
  misc_RNA (1)...(19): siRNA sense strand
ucagagacuuuaacuccuu

SEQ ID NO: 1668752 - RNA, 19 nt, Homo sapiens
  misc_RNA (1)...(19): siRNA sense strand
gcaguucaguugacuacuc

SEQ ID NO: 1668753 - RNA, 19 nt, Homo sapiens
  misc_RNA (1)...(19): siRNA sense strand
ucacugaguuggacuuucu

SEQ ID NO: 1668754 - RNA, 19 nt, Homo sapiens
  misc_RNA (1)...(19): siRNA sense strand
ucuagagcaccguuuauua

SEQ ID NO: 1668755 - RNA, 19 nt, Homo sapiens
  misc_RNA (1)...(19): siRNA sense strand
cuacucaguuaucgucaaa

SEQ ID NO: 1668756 - RNA, 19 nt, Homo sapiens
  misc_RNA (1)...(19): siRNA sense strand
ccaguucucuuauaauacu

SEQ ID NO: 1668757 - RNA, 19 nt, Homo sapiens
  misc_RNA (1)...(19): siRNA sense strand
gaacaagaaacucuacaac

SEQ ID NO: 1668758 - RNA, 19 nt, Homo sapiens
  misc_RNA (1)...(19): siRNA sense strand
gcauacuucuuucauugau

SEQ ID NO: 1668759 - RNA, 19 nt, Homo sapiens
  misc_RNA (1)...(19): siRNA sense strand
gagacuacaagcacaauau

SEQ ID NO: 1668760 - RNA, 19 nt, Homo sapiens
  misc_RNA (1)...(19): siRNA sense strand
aaacggacaugcucaucga

SEQ ID NO: 1668761 - RNA, 19 nt, Homo sapiens
  misc_RNA (1)...(19): siRNA sense strand
cgaauuagaugaaaaugga

SEQ ID NO: 1668762 - RNA, 19 nt, Homo sapiens
  misc_RNA (1)...(19): siRNA sense strand
cagauauccugccuauguu

SEQ ID NO: 1668763 - RNA, 19 nt, Homo sapiens
  misc_RNA (1)...(19): siRNA sense strand
gaugucaaccuaccuacuu

SEQ ID NO: 1668764 - RNA, 19 nt, Homo sapiens
  misc_RNA (1)...(19): siRNA sense strand
caaaugcaguacagauucu

SEQ ID NO: 1668765 - RNA, 19 nt, Homo sapiens
  misc_RNA (1)...(19): siRNA sense strand
uuaaggacuucuuucauca

SEQ ID NO: 1668766 - RNA, 19 nt, Homo sapiens
  misc_RNA (1)...(19): siRNA sense strand
cgaauucgcuucauccauu

SEQ ID NO: 1668767 - RNA, 19 nt, Homo sapiens
  misc_RNA (1)...(19): siRNA sense strand
gaaagguucugcccaagug

SEQ ID NO: 1668768 - RNA, 19 nt, Homo sapiens
  misc_RNA (1)...(19): siRNA sense strand
gcacuggccuaucaacuau

SEQ ID NO: 1668769 - RNA, 19 nt, Homo sapiens
  misc_RNA (1)...(19): siRNA sense strand
ggaacaaccugcacaaugc

SEQ ID NO: 1668770 - RNA, 19 nt, Homo sapiens
  misc_RNA (1)...(19): siRNA sense strand
uaagguggcuggacucaug

SEQ ID NO: 1668771 - RNA, 19 nt, Homo sapiens
  misc_RNA (1)...(19): siRNA sense strand
gaacaccauugcagaccuu

SEQ ID NO: 1668772 - RNA, 19 nt, Homo sapiens
  misc_RNA (1)...(19): siRNA sense strand
gaauucgcuucauccauuu

SEQ ID NO: 1668773 - RNA, 19 nt, Homo sapiens
  misc_RNA (1)...(19): siRNA sense strand
uguaagacauggagacauu

SEQ ID NO: 1668774 - RNA, 19 nt, Homo sapiens
  misc_RNA (1)...(19): siRNA sense strand
caaguuuguuggccucuuu

SEQ ID NO: 1668775 - RNA, 19 nt, Homo sapiens
  misc_RNA (1)...(19): siRNA sense strand
uacaacaaccuguggauua

SEQ ID NO: 1668776 - RNA, 19 nt, Homo sapiens
  misc_RNA (1)...(19): siRNA sense strand
caagaaacauaacacaaac

SEQ ID NO: 1668777 - RNA, 19 nt, Homo sapiens
  misc_RNA (1)...(19): siRNA sense strand
ccauaucaaucccaaguug

SEQ ID NO: 1668778 - RNA, 19 nt, Homo sapiens
  misc_RNA (1)...(19): siRNA sense strand
gaacuugcacagucacuau

SEQ ID NO: 1668779 - RNA, 19 nt, Homo sapiens
  misc_RNA (1)...(19): siRNA sense strand
ggauugaggucguaaacag

SEQ ID NO: 1668780 - RNA, 19 nt, Homo sapiens
  misc_RNA (1)...(19): siRNA sense strand
gcacaaggacuacaacaac

SEQ ID NO: 1668781 - RNA, 19 nt, Homo sapiens
  misc_RNA (1)...(19): siRNA sense strand
gaacaggggacucaaauga

SEQ ID NO: 1668782 - RNA, 19 nt, Homo sapiens
  misc_RNA (1)...(19): siRNA sense strand
gggaacaaccugcacaaug

SEQ ID NO: 1668783 - RNA, 19 nt, Homo sapiens
  misc_RNA (1)...(19): siRNA sense strand
acaaugaguucacguccaa

SEQ ID NO: 1668784 - RNA, 19 nt, Homo sapiens
  misc_RNA (1)...(19): siRNA sense strand
guaaacaggaaauuuggaa

SEQ ID NO: 1668785 - RNA, 19 nt, Homo sapiens
  misc_RNA (1)...(19): siRNA sense strand
ccugagaucuugcuggaau

SEQ ID NO: 1668786 - RNA, 19 nt, Homo sapiens
  misc_RNA (1)...(19): siRNA sense strand
ccaccuauuugcacaagga

SEQ ID NO: 1668787 - RNA, 19 nt, Homo sapiens
  misc_RNA (1)...(19): siRNA sense strand
gcauacauguggcgggaau

SEQ ID NO: 1668788 - RNA, 19 nt, Homo sapiens
  misc_RNA (1)...(19): siRNA sense strand
acaacaaccuguggauuau

SEQ ID NO: 1668789 - RNA, 19 nt, Homo sapiens
  misc_RNA (1)...(19): siRNA sense strand
agacauuauucgacuagaa

SEQ ID NO: 1668790 - RNA, 19 nt, Homo sapiens
  misc_RNA (1)...(19): siRNA sense strand
aauaugagcaucacagcua

SEQ ID NO: 1668791 - RNA, 19 nt, Homo sapiens
  misc_RNA (1)...(19): siRNA sense strand
ggucguaaacaggaaauuu

SEQ ID NO: 1668792 - RNA, 19 nt, Homo sapiens
  misc_RNA (1)...(19): siRNA sense strand
caccuuugcuguucacuuc

SEQ ID NO: 1668793 - RNA, 19 nt, Homo sapiens
  misc_RNA (1)...(19): siRNA sense strand
gagaggauucugugcauuc

SEQ ID NO: 1668794 - RNA, 19 nt, Homo sapiens
  misc_RNA (1)...(19): siRNA sense strand
ggaauguggaggaccauau

SEQ ID NO: 1668795 - RNA, 19 nt, Homo sapiens
  misc_RNA (1)...(19): siRNA sense strand
ggaucaaagugcugagaag

SEQ ID NO: 1668796 - RNA, 19 nt, Homo sapiens
  misc_RNA (1)...(19): siRNA sense strand
ggugacgguuucuucaguu

SEQ ID NO: 1668797 - RNA, 19 nt, Homo sapiens
  misc_RNA (1)...(19): siRNA sense strand
aaugauuucuggcggauug

SEQ ID NO: 1668798 - RNA, 19 nt, Homo sapiens
  misc_RNA (1)...(19): siRNA sense strand
uggauaugaugguaccuuu

SEQ ID NO: 1668799 - RNA, 19 nt, Homo sapiens
  misc_RNA (1)...(19): siRNA sense strand
ggcacuggccuaucaacua

SEQ ID NO: 1668800 - RNA, 19 nt, Homo sapiens
  misc_RNA (1)...(19): siRNA sense strand
ugggagcaguuggaaguua

SEQ ID NO: 1668801 - RNA, 19 nt, Homo sapiens
  misc_RNA (1)...(19): siRNA sense strand
cagcugcccuccucaccuu

SEQ ID NO: 1668802 - RNA, 19 nt, Homo sapiens
  misc_RNA (1)...(19): siRNA sense strand
guaagacauggagacauua

SEQ ID NO: 1668803 - RNA, 19 nt, Homo sapiens
  misc_RNA (1)...(19): siRNA sense strand
ggaacugccuacagcuucu

SEQ ID NO: 1668804 - RNA, 19 nt, Homo sapiens
  misc_RNA (1)...(19): siRNA sense strand
cgacuagaacacaaagaaa

SEQ ID NO: 1668805 - RNA, 19 nt, Homo sapiens
  misc_RNA (1)...(19): siRNA sense strand
uagucuugcuggugcuuua

SEQ ID NO: 1668806 - RNA, 19 nt, Homo sapiens
  misc_RNA (1)...(19): siRNA sense strand
gugcugagaagucgaauuc

SEQ ID NO: 1668807 - RNA, 19 nt, Homo sapiens
  misc_RNA (1)...(19): siRNA sense strand
ggaaagguucugcccaagu

SEQ ID NO: 1668808 - RNA, 19 nt, Homo sapiens
  misc_RNA (1)...(19): siRNA sense strand
acacagauuuccgagucua

SEQ ID NO: 1668809 - RNA, 19 nt, Homo sapiens
  misc_RNA (1)...(19): siRNA sense strand
cuauaucaaccguacauuu

SEQ ID NO: 1668810 - RNA, 19 nt, Homo sapiens
  misc_RNA (1)...(19): siRNA sense strand
aagaaacccucaacuccau

SEQ ID NO: 1668811 - RNA, 19 nt, Homo sapiens
  misc_RNA (1)...(19): siRNA sense strand
ugaaagaaacccucaacuc

SEQ ID NO: 1668812 - RNA, 19 nt, Homo sapiens
  misc_RNA (1)...(19): siRNA sense strand
cuaccucacuguacuggau

SEQ ID NO: 1668813 - RNA, 19 nt, Homo sapiens
  misc_RNA (1)...(19): siRNA sense strand
ucaaacccaaggacaauga

SEQ ID NO: 1668814 - RNA, 19 nt, Homo sapiens
  misc_RNA (1)...(19): siRNA sense strand
gaaacauaacacaaacuca

SEQ ID NO: 1668815 - RNA, 19 nt, Homo sapiens
  misc_RNA (1)...(19): siRNA sense strand
aaugggaaguuacuauauc

SEQ ID NO: 1668816 - RNA, 19 nt, Homo sapiens
  misc_RNA (1)...(19): siRNA sense strand
cccaguacauccuccuuga

SEQ ID NO: 1668817 - RNA, 19 nt, Homo sapiens
  misc_RNA (1)...(19): siRNA sense strand
agacauggagacauuauuc

SEQ ID NO: 1668818 - RNA, 19 nt, Homo sapiens
  misc_RNA (1)...(19): siRNA sense strand
gaccauaucaaucccaagu

SEQ ID NO: 1668819 - RNA, 19 nt, Homo sapiens
  misc_RNA (1)...(19): siRNA sense strand
gaauguggaggaccauauc

SEQ ID NO: 1668820 - RNA, 19 nt, Homo sapiens
  misc_RNA (1)...(19): siRNA sense strand
ggagacauuauucgacuag

SEQ ID NO: 1668821 - RNA, 19 nt, Homo sapiens
  misc_RNA (1)...(19): siRNA sense strand
ugggaaagaugcugauagg

SEQ ID NO: 1668822 - RNA, 19 nt, Homo sapiens
  misc_RNA (1)...(19): siRNA sense strand
gcucuucucaagcauguug

SEQ ID NO: 1668823 - RNA, 19 nt, Homo sapiens
  misc_RNA (1)...(19): siRNA sense strand
gggagcaguuggaaguuac

SEQ ID NO: 1668824 - RNA, 19 nt, Homo sapiens
  misc_RNA (1)...(19): siRNA sense strand
caguggaguuuguaagaca

SEQ ID NO: 1668825 - RNA, 19 nt, Homo sapiens
  misc_RNA (1)...(19): siRNA sense strand
ggauaaauaugagcaucac

SEQ ID NO: 1668826 - RNA, 19 nt, Homo sapiens
  misc_RNA (1)...(19): siRNA sense strand
aacaaccuguggauuauca

SEQ ID NO: 1668827 - RNA, 19 nt, Homo sapiens
  misc_RNA (1)...(19): siRNA sense strand
gccucacucugucccagua

SEQ ID NO: 1668828 - RNA, 19 nt, Homo sapiens
  misc_RNA (1)...(19): siRNA sense strand
gaacugccuacagcuucua

SEQ ID NO: 1668829 - RNA, 19 nt, Homo sapiens
  misc_RNA (1)...(19): siRNA sense strand
cagccaugcucuucucaag

SEQ ID NO: 1668830 - RNA, 19 nt, Homo sapiens
  misc_RNA (1)...(19): siRNA sense strand
gcugggagcaguuggaagu

SEQ ID NO: 1668831 - RNA, 19 nt, Homo sapiens
  misc_RNA (1)...(19): siRNA sense strand
gggauaaauaugagcauca

SEQ ID NO: 1668832 - RNA, 19 nt, Homo sapiens
  misc_RNA (1)...(19): siRNA sense strand
gaucaaagugcugagaagu

SEQ ID NO: 1668833 - RNA, 19 nt, Homo sapiens
  misc_RNA (1)...(19): siRNA sense strand
gcacagucacuaucaugag

SEQ ID NO: 1668834 - RNA, 19 nt, Homo sapiens
  misc_RNA (1)...(19): siRNA sense strand
ggaacuugcacagucacua

SEQ ID NO: 1668835 - RNA, 19 nt, Homo sapiens
  misc_RNA (1)...(19): siRNA sense strand
uaagacauggagacauuau

SEQ ID NO: 1668836 - RNA, 19 nt, Homo sapiens
  misc_RNA (1)...(19): siRNA sense strand
ugagcauggucaaguacaa

SEQ ID NO: 1668837 - RNA, 19 nt, Homo sapiens
  misc_RNA (1)...(19): siRNA sense strand
cagccugacuggcguuagu

SEQ ID NO: 1668838 - RNA, 19 nt, Homo sapiens
  misc_RNA (1)...(19): siRNA sense strand
ugagaggauucugugcauu

SEQ ID NO: 1668839 - RNA, 19 nt, Homo sapiens
  misc_RNA (1)...(19): siRNA sense strand
ggcugaaucuguugagcau

SEQ ID NO: 1668840 - RNA, 19 nt, Homo sapiens
  misc_RNA (1)...(19): siRNA sense strand
gucguaaacaggaaauuug

SEQ ID NO: 1668841 - RNA, 19 nt, Homo sapiens
  misc_RNA (1)...(19): siRNA sense strand
gacgguuucuucaguucug

SEQ ID NO: 1668842 - RNA, 19 nt, Homo sapiens
  misc_RNA (1)...(19): siRNA sense strand
uuugguggcugaaucuguu

SEQ ID NO: 1668843 - RNA, 19 nt, Homo sapiens
  misc_RNA (1)...(19): siRNA sense strand
cuaccugaguggauaugau

SEQ ID NO: 1668844 - RNA, 19 nt, Homo sapiens
  misc_RNA (1)...(19): siRNA sense strand
cugaguggauaugauggua

SEQ ID NO: 1668845 - RNA, 19 nt, Homo sapiens
  misc_RNA (1)...(19): siRNA sense strand
cuacuuccaccacuacuuc

SEQ ID NO: 1668846 - RNA, 19 nt, Homo sapiens
  misc_RNA (1)...(19): siRNA sense strand
uaucagggccuacgcuucu

SEQ ID NO: 1668847 - RNA, 19 nt, Homo sapiens
  misc_RNA (1)...(19): siRNA sense strand
gaacaaccugcacaaugcu

SEQ ID NO: 1668848 - RNA, 19 nt, Homo sapiens
  misc_RNA (1)...(19): siRNA sense strand
cuacagcuucuaccucuuc

SEQ ID NO: 1668849 - RNA, 19 nt, Homo sapiens
  misc_RNA (1)...(19): siRNA sense strand
acaggggacucaaaugauu

SEQ ID NO: 1668850 - RNA, 19 nt, Homo sapiens
  misc_RNA (1)...(19): siRNA sense strand
ucgacuagaacacaaagaa

SEQ ID NO: 1668851 - RNA, 19 nt, Homo sapiens
  misc_RNA (1)...(19): siRNA sense strand
gagacauuauucgacuaga

SEQ ID NO: 1668852 - RNA, 19 nt, Homo sapiens
  misc_RNA (1)...(19): siRNA sense strand
ccuauuugcacaaggacua

SEQ ID NO: 1668853 - RNA, 19 nt, Homo sapiens
  misc_RNA (1)...(19): siRNA sense strand
uuuguuggccucuuuauca

SEQ ID NO: 1668854 - RNA, 19 nt, Homo sapiens
  misc_RNA (1)...(19): siRNA sense strand
gcuggacucaugggacuuu

SEQ ID NO: 1668855 - RNA, 19 nt, Homo sapiens
  misc_RNA (1)...(19): siRNA sense strand
cuggcuaccugaguggaua

SEQ ID NO: 1668856 - RNA, 19 nt, Homo sapiens
  misc_RNA (1)...(19): siRNA sense strand
ggggaacaguggccucaaa

SEQ ID NO: 1668857 - RNA, 19 nt, Homo sapiens
  misc_RNA (1)...(19): siRNA sense strand
aaucccaaguugccaaaca

SEQ ID NO: 1668858 - RNA, 19 nt, Homo sapiens
  misc_RNA (1)...(19): siRNA sense strand
ccuguggauuaucaagaaa

SEQ ID NO: 1668859 - RNA, 19 nt, Homo sapiens
  misc_RNA (1)...(19): siRNA sense strand
gugacgguuucuucaguuc

SEQ ID NO: 1668860 - RNA, 19 nt, Homo sapiens
  misc_RNA (1)...(19): siRNA sense strand
aaacaggaaauuuggaaac

SEQ ID NO: 1668861 - RNA, 19 nt, Homo sapiens
  misc_RNA (1)...(19): siRNA sense strand
gacuagaacacaaagaaac

SEQ ID NO: 1668862 - RNA, 19 nt, Homo sapiens
  misc_RNA (1)...(19): siRNA sense strand
cuacaacaaccuguggauu

SEQ ID NO: 1668863 - RNA, 19 nt, Homo sapiens
  misc_RNA (1)...(19): siRNA sense strand
gccuacggcucugugauca

SEQ ID NO: 1668864 - RNA, 19 nt, Homo sapiens
  misc_RNA (1)...(19): siRNA sense strand
gacauuauucgacuagaac

SEQ ID NO: 1668865 - RNA, 19 nt, Homo sapiens
  misc_RNA (1)...(19): siRNA sense strand
uggagacauuauucgacua

SEQ ID NO: 1668866 - RNA, 19 nt, Homo sapiens
  misc_RNA (1)...(19): siRNA sense strand
cagcaagacuucgugauuu

SEQ ID NO: 1668867 - RNA, 19 nt, Homo sapiens
  misc_RNA (1)...(19): siRNA sense strand
gagaaugacuaucuucaag

SEQ ID NO: 1668868 - RNA, 19 nt, Homo sapiens
  misc_RNA (1)...(19): siRNA sense strand
gagaagauguacgccauga

SEQ ID NO: 1668869 - RNA, 19 nt, Homo sapiens
  misc_RNA (1)...(19): siRNA sense strand
guacauggcuccggagauc

SEQ ID NO: 1668870 - RNA, 19 nt, Homo sapiens
  misc_RNA (1)...(19): siRNA sense strand
ugaaguacaugaacaagca

SEQ ID NO: 1668871 - RNA, 19 nt, Homo sapiens
  misc_RNA (1)...(19): siRNA sense strand
gaggauggaggcccuauga

SEQ ID NO: 1668872 - RNA, 19 nt, Homo sapiens
  misc_RNA (1)...(19): siRNA sense strand
gaagauguacgccaugaag

SEQ ID NO: 1668873 - RNA, 19 nt, Homo sapiens
  misc_RNA (1)...(19): siRNA sense strand
agaagcgucuggccaagaa

SEQ ID NO: 1668874 - RNA, 19 nt, Homo sapiens
  misc_RNA (1)...(19): siRNA sense strand
ggagaucgagcacgucuuc

SEQ ID NO: 1668875 - RNA, 19 nt, Homo sapiens
  misc_RNA (1)...(19): siRNA sense strand
ggacgaggaggacauguuc

SEQ ID NO: 1668876 - RNA, 19 nt, Homo sapiens
  misc_RNA (1)...(19): siRNA sense strand
caacauugccaccaucauc

SEQ ID NO: 1668877 - RNA, 19 nt, Homo sapiens
  misc_RNA (1)...(19): siRNA sense strand
ccagcaagacuucgugauu

SEQ ID NO: 1668878 - RNA, 19 nt, Homo sapiens
  misc_RNA (1)...(19): siRNA sense strand
acaacauucuccuggauga

SEQ ID NO: 1668879 - RNA, 19 nt, Homo sapiens
  misc_RNA (1)...(19): siRNA sense strand
gcaaguggaagaagaggau

SEQ ID NO: 1668880 - RNA, 19 nt, Homo sapiens
  misc_RNA (1)...(19): siRNA sense strand
ccggagaucuuccacucuu

SEQ ID NO: 1668881 - RNA, 19 nt, Homo sapiens
  misc_RNA (1)...(19): siRNA sense strand
gcacaucauccacagagau

SEQ ID NO: 1668882 - RNA, 19 nt, Homo sapiens
  misc_RNA (1)...(19): siRNA sense strand
ugacaacauucuccuggau

SEQ ID NO: 1668883 - RNA, 19 nt, Homo sapiens
  misc_RNA (1)...(19): siRNA sense strand
ggauggaggcccuaugaca

SEQ ID NO: 1668884 - RNA, 19 nt, Homo sapiens
  misc_RNA (1)...(19): siRNA sense strand
ccuuugagcuggaggagau

SEQ ID NO: 1668885 - RNA, 19 nt, Homo sapiens
  misc_RNA (1)...(19): siRNA sense strand
agauguacgccaugaagua

SEQ ID NO: 1668886 - RNA, 19 nt, Homo sapiens
  misc_RNA (1)...(19): siRNA sense strand
gauggaggcccuaugacau

SEQ ID NO: 1668887 - RNA, 19 nt, Homo sapiens
  misc_RNA (1)...(19): siRNA sense strand
ugcggaagcuccucacugu

SEQ ID NO: 1668888 - RNA, 19 nt, Homo sapiens
  misc_RNA (1)...(19): siRNA sense strand
acaaggaggacgugaacuu

SEQ ID NO: 1668889 - RNA, 19 nt, Homo sapiens
  misc_RNA (1)...(19): siRNA sense strand
cgagaaugacuaucuucaa

SEQ ID NO: 1668890 - RNA, 19 nt, Homo sapiens
  misc_RNA (1)...(19): siRNA sense strand
gcaccgugagcguccagua

SEQ ID NO: 1668891 - RNA, 19 nt, Homo sapiens
  misc_RNA (1)...(19): siRNA sense strand
gggaccaccugagcgagaa

SEQ ID NO: 1668892 - RNA, 19 nt, Homo sapiens
  misc_RNA (1)...(19): siRNA sense strand
gcucccaguccgagaauga

SEQ ID NO: 1668893 - RNA, 19 nt, Homo sapiens
  misc_RNA (1)...(19): siRNA sense strand
uggagcaaguggaagaaga

SEQ ID NO: 1668894 - RNA, 19 nt, Homo sapiens
  misc_RNA (1)...(19): siRNA sense strand
gggacacggagaagaugua

SEQ ID NO: 1668895 - RNA, 19 nt, Homo sapiens
  misc_RNA (1)...(19): siRNA sense strand
cggagaucuuccacucuuu

SEQ ID NO: 1668896 - RNA, 19 nt, Homo sapiens
  misc_RNA (1)...(19): siRNA sense strand
caaggaggacgugaacuuc

SEQ ID NO: 1668897 - RNA, 19 nt, Homo sapiens
  misc_RNA (1)...(19): siRNA sense strand
gcacugcgaccccaccuuu

SEQ ID NO: 1668898 - RNA, 19 nt, Homo sapiens
  misc_RNA (1)...(19): siRNA sense strand
ccagauccuucgggccauu

SEQ ID NO: 1668899 - RNA, 19 nt, Homo sapiens
  misc_RNA (1)...(19): siRNA sense strand
guccgagaaugacuaucuu

SEQ ID NO: 1668900 - RNA, 19 nt, Homo sapiens
  misc_RNA (1)...(19): siRNA sense strand
cugaccgacuucaacauug

SEQ ID NO: 1668901 - RNA, 19 nt, Homo sapiens
  misc_RNA (1)...(19): siRNA sense strand
ugaacaagcagcagugcau

SEQ ID NO: 1668902 - RNA, 19 nt, Homo sapiens
  misc_RNA (1)...(19): siRNA sense strand
ccugaccgacuucaacauu

SEQ ID NO: 1668903 - RNA, 19 nt, Homo sapiens
  misc_RNA (1)...(19): siRNA sense strand
cgacaaggaggacgugaac

SEQ ID NO: 1668904 - RNA, 19 nt, Homo sapiens
  misc_RNA (1)...(19): siRNA sense strand
ugaccgacuucaacauugc

SEQ ID NO: 1668905 - RNA, 19 nt, Homo sapiens
  misc_RNA (1)...(19): siRNA sense strand
augcacaccugaccgacuu

SEQ ID NO: 1668906 - RNA, 19 nt, Homo sapiens
  misc_RNA (1)...(19): siRNA sense strand
ggagcaaguggaagaagag

SEQ ID NO: 1668907 - RNA, 19 nt, Homo sapiens
  misc_RNA (1)...(19): siRNA sense strand
ggagaucuuccacucuuuu

SEQ ID NO: 1668908 - RNA, 19 nt, Homo sapiens
  misc_RNA (1)...(19): siRNA sense strand
ccacgugguccaaggagau

SEQ ID NO: 1668909 - RNA, 19 nt, Homo sapiens
  misc_RNA (1)...(19): siRNA sense strand
cggugaggcuguacaucug

SEQ ID NO: 1668910 - RNA, 19 nt, Homo sapiens
  misc_RNA (1)...(19): siRNA sense strand
ggcacuggcucuggacuac

SEQ ID NO: 1668911 - RNA, 19 nt, Homo sapiens
  misc_RNA (1)...(19): siRNA sense strand
gaacaaacgggaauaugaa

SEQ ID NO: 1668912 - RNA, 19 nt, Homo sapiens
  misc_RNA (1)...(19): siRNA sense strand
gaugaacccaaucccaaua

SEQ ID NO: 1668913 - RNA, 19 nt, Homo sapiens
  misc_RNA (1)...(19): siRNA sense strand
gcguguuucugcaauagua

SEQ ID NO: 1668914 - RNA, 19 nt, Homo sapiens
  misc_RNA (1)...(19): siRNA sense strand
cuaugcagaugguaguaua

SEQ ID NO: 1668915 - RNA, 19 nt, Homo sapiens
  misc_RNA (1)...(19): siRNA sense strand
gaugugucuuccauucuaa

SEQ ID NO: 1668916 - RNA, 19 nt, Homo sapiens
  misc_RNA (1)...(19): siRNA sense strand
ugaugugucuuccauucua

SEQ ID NO: 1668917 - RNA, 19 nt, Homo sapiens
  misc_RNA (1)...(19): siRNA sense strand
uaacauccauacagucucu

SEQ ID NO: 1668918 - RNA, 19 nt, Homo sapiens
  misc_RNA (1)...(19): siRNA sense strand
agaacaaacgggaauauga

SEQ ID NO: 1668919 - RNA, 19 nt, Homo sapiens
  misc_RNA (1)...(19): siRNA sense strand
uaugaugugucuuccauuc

SEQ ID NO: 1668920 - RNA, 19 nt, Homo sapiens
  misc_RNA (1)...(19): siRNA sense strand
aaagcguguuucugcaaua

SEQ ID NO: 1668921 - RNA, 19 nt, Homo sapiens
  misc_RNA (1)...(19): siRNA sense strand
ggagaacaaacgggaauau

SEQ ID NO: 1668922 - RNA, 19 nt, Homo sapiens
  misc_RNA (1)...(19): siRNA sense strand
caaccuaugaugugucuuc

SEQ ID NO: 1668923 - RNA, 19 nt, Homo sapiens
  misc_RNA (1)...(19): siRNA sense strand
gagaacaaacgggaauaug

SEQ ID NO: 1668924 - RNA, 19 nt, Homo sapiens
  misc_RNA (1)...(19): siRNA sense strand
ccuaugaugugucuuccau

SEQ ID NO: 1668925 - RNA, 19 nt, Homo sapiens
  misc_RNA (1)...(19): siRNA sense strand
gaacccaaucccaauaguc

SEQ ID NO: 1668926 - RNA, 19 nt, Homo sapiens
  misc_RNA (1)...(19): siRNA sense strand
gcagaugguaguauauguc

SEQ ID NO: 1668927 - RNA, 19 nt, Homo sapiens
  misc_RNA (1)...(19): siRNA sense strand
ggaguccaaccuaugaugu

SEQ ID NO: 1668928 - RNA, 19 nt, Homo sapiens
  misc_RNA (1)...(19): siRNA sense strand
ugucuuccauucuaacauc

SEQ ID NO: 1668929 - RNA, 19 nt, Homo sapiens
  misc_RNA (1)...(19): siRNA sense strand
auucuaacauccauacagu

SEQ ID NO: 1668930 - RNA, 19 nt, Homo sapiens
  misc_RNA (1)...(19): siRNA sense strand
gaauaugaaaagcguguuu

SEQ ID NO: 1668931 - RNA, 19 nt, Homo sapiens
  misc_RNA (1)...(19): siRNA sense strand
ugaacccaaucccaauagu

SEQ ID NO: 1668932 - RNA, 19 nt, Homo sapiens
  misc_RNA (1)...(19): siRNA sense strand
ccaauaguccagcaaacag

SEQ ID NO: 1668933 - RNA, 19 nt, Homo sapiens
  misc_RNA (1)...(19): siRNA sense strand
gaacaaacgggaauaugaa

SEQ ID NO: 1668934 - RNA, 19 nt, Homo sapiens
  misc_RNA (1)...(19): siRNA sense strand
gaugaacccaaucccaaua

SEQ ID NO: 1668935 - RNA, 19 nt, Homo sapiens
  misc_RNA (1)...(19): siRNA sense strand
gcguguuucugcaauagua

SEQ ID NO: 1668936 - RNA, 19 nt, Homo sapiens
  misc_RNA (1)...(19): siRNA sense strand
cuaugcagaugguaguaua

SEQ ID NO: 1668937 - RNA, 19 nt, Homo sapiens
  misc_RNA (1)...(19): siRNA sense strand
gaugugucuuccauucuaa

SEQ ID NO: 1668938 - RNA, 19 nt, Homo sapiens
  misc_RNA (1)...(19): siRNA sense strand
ugaugugucuuccauucua

SEQ ID NO: 1668939 - RNA, 19 nt, Homo sapiens
  misc_RNA (1)...(19): siRNA sense strand
uaacauccauacagucucu

SEQ ID NO: 1668940 - RNA, 19 nt, Homo sapiens
  misc_RNA (1)...(19): siRNA sense strand
agaacaaacgggaauauga

SEQ ID NO: 1668941 - RNA, 19 nt, Homo sapiens
  misc_RNA (1)...(19): siRNA sense strand
uaugaugugucuuccauuc

SEQ ID NO: 1668942 - RNA, 19 nt, Homo sapiens
  misc_RNA (1)...(19): siRNA sense strand
aaagcguguuucugcaaua

SEQ ID NO: 1668943 - RNA, 19 nt, Homo sapiens
  misc_RNA (1)...(19): siRNA sense strand
ggagaacaaacgggaauau

SEQ ID NO: 1668944 - RNA, 19 nt, Homo sapiens
  misc_RNA (1)...(19): siRNA sense strand
caaccuaugaugugucuuc

SEQ ID NO: 1668945 - RNA, 19 nt, Homo sapiens
  misc_RNA (1)...(19): siRNA sense strand
gagaacaaacgggaauaug

SEQ ID NO: 1668946 - RNA, 19 nt, Homo sapiens
  misc_RNA (1)...(19): siRNA sense strand
ccuaugaugugucuuccau

SEQ ID NO: 1668947 - RNA, 19 nt, Homo sapiens
  misc_RNA (1)...(19): siRNA sense strand
gaacccaaucccaauaguc

SEQ ID NO: 1668948 - RNA, 19 nt, Homo sapiens
  misc_RNA (1)...(19): siRNA sense strand
gcagaugguaguauauguc

SEQ ID NO: 1668949 - RNA, 19 nt, Homo sapiens
  misc_RNA (1)...(19): siRNA sense strand
ggaguccaaccuaugaugu

SEQ ID NO: 1668950 - RNA, 19 nt, Homo sapiens
  misc_RNA (1)...(19): siRNA sense strand
ugucuuccauucuaacauc

SEQ ID NO: 1668951 - RNA, 19 nt, Homo sapiens
  misc_RNA (1)...(19): siRNA sense strand
auucuaacauccauacagu

SEQ ID NO: 1668952 - RNA, 19 nt, Homo sapiens
  misc_RNA (1)...(19): siRNA sense strand
gaauaugaaaagcguguuu

SEQ ID NO: 1668953 - RNA, 19 nt, Homo sapiens
  misc_RNA (1)...(19): siRNA sense strand
ugaacccaaucccaauagu

SEQ ID NO: 1668954 - RNA, 19 nt, Homo sapiens
  misc_RNA (1)...(19): siRNA sense strand
ccaauaguccagcaaacag

SEQ ID NO: 1668955 - RNA, 19 nt, Homo sapiens
  misc_RNA (1)...(19): siRNA sense strand
gaacaaacgggaauaugaa

SEQ ID NO: 1668956 - RNA, 19 nt, Homo sapiens
  misc_RNA (1)...(19): siRNA sense strand
gaugaacccaaucccaaua

SEQ ID NO: 1668957 - RNA, 19 nt, Homo sapiens
  misc_RNA (1)...(19): siRNA sense strand
gcguguuucugcaauagua

SEQ ID NO: 1668958 - RNA, 19 nt, Homo sapiens
  misc_RNA (1)...(19): siRNA sense strand
cuaugcagaugguaguaua

SEQ ID NO: 1668959 - RNA, 19 nt, Homo sapiens
  misc_RNA (1)...(19): siRNA sense strand
gaugugucuuccauucuaa

SEQ ID NO: 1668960 - RNA, 19 nt, Homo sapiens
  misc_RNA (1)...(19): siRNA sense strand
ugaugugucuuccauucua

SEQ ID NO: 1668961 - RNA, 19 nt, Homo sapiens
  misc_RNA (1)...(19): siRNA sense strand
uaacauccauacagucucu

SEQ ID NO: 1668962 - RNA, 19 nt, Homo sapiens
  misc_RNA (1)...(19): siRNA sense strand
agaacaaacgggaauauga

SEQ ID NO: 1668963 - RNA, 19 nt, Homo sapiens
  misc_RNA (1)...(19): siRNA sense strand
uaugaugugucuuccauuc

SEQ ID NO: 1668964 - RNA, 19 nt, Homo sapiens
  misc_RNA (1)...(19): siRNA sense strand
aaagcguguuucugcaaua

SEQ ID NO: 1668965 - RNA, 19 nt, Homo sapiens
  misc_RNA (1)...(19): siRNA sense strand
ggagaacaaacgggaauau

SEQ ID NO: 1668966 - RNA, 19 nt, Homo sapiens
  misc_RNA (1)...(19): siRNA sense strand
caaccuaugaugugucuuc

SEQ ID NO: 1668967 - RNA, 19 nt, Homo sapiens
  misc_RNA (1)...(19): siRNA sense strand
gagaacaaacgggaauaug

SEQ ID NO: 1668968 - RNA, 19 nt, Homo sapiens
  misc_RNA (1)...(19): siRNA sense strand
ccuaugaugugucuuccau

SEQ ID NO: 1668969 - RNA, 19 nt, Homo sapiens
  misc_RNA (1)...(19): siRNA sense strand
gaacccaaucccaauaguc

SEQ ID NO: 1668970 - RNA, 19 nt, Homo sapiens
  misc_RNA (1)...(19): siRNA sense strand
gcagaugguaguauauguc

SEQ ID NO: 1668971 - RNA, 19 nt, Homo sapiens
  misc_RNA (1)...(19): siRNA sense strand
ggaguccaaccuaugaugu

SEQ ID NO: 1668972 - RNA, 19 nt, Homo sapiens
  misc_RNA (1)...(19): siRNA sense strand
ugucuuccauucuaacauc

SEQ ID NO: 1668973 - RNA, 19 nt, Homo sapiens
  misc_RNA (1)...(19): siRNA sense strand
auucuaacauccauacagu

SEQ ID NO: 1668974 - RNA, 19 nt, Homo sapiens
  misc_RNA (1)...(19): siRNA sense strand
gaauaugaaaagcguguuu

SEQ ID NO: 1668975 - RNA, 19 nt, Homo sapiens
  misc_RNA (1)...(19): siRNA sense strand
ugaacccaaucccaauagu

SEQ ID NO: 1668976 - RNA, 19 nt, Homo sapiens
  misc_RNA (1)...(19): siRNA sense strand
ccaauaguccagcaaacag

SEQ ID NO: 1668977 - RNA, 19 nt, Homo sapiens
  misc_RNA (1)...(19): siRNA sense strand
gcaaacaaaugcaguauug

SEQ ID NO: 1668978 - RNA, 19 nt, Homo sapiens
  misc_RNA (1)...(19): siRNA sense strand
gaaagaaucuggaugucau

SEQ ID NO: 1668979 - RNA, 19 nt, Homo sapiens
  misc_RNA (1)...(19): siRNA sense strand
ggaagcggcugcugagauu

SEQ ID NO: 1668980 - RNA, 19 nt, Homo sapiens
  misc_RNA (1)...(19): siRNA sense strand
ggacauaucugccauugac

SEQ ID NO: 1668981 - RNA, 19 nt, Homo sapiens
  misc_RNA (1)...(19): siRNA sense strand
ucaccaaccuggccaagua

SEQ ID NO: 1668982 - RNA, 19 nt, Homo sapiens
  misc_RNA (1)...(19): siRNA sense strand
gagaagaaacgcuuaaaga

SEQ ID NO: 1668983 - RNA, 19 nt, Homo sapiens
  misc_RNA (1)...(19): siRNA sense strand
ggagagauaccacgaaaga

SEQ ID NO: 1668984 - RNA, 19 nt, Homo sapiens
  misc_RNA (1)...(19): siRNA sense strand
gaagaaacgcuuaaagaag

SEQ ID NO: 1668985 - RNA, 19 nt, Homo sapiens
  misc_RNA (1)...(19): siRNA sense strand
gccagagccuacacacuua

SEQ ID NO: 1668986 - RNA, 19 nt, Homo sapiens
  misc_RNA (1)...(19): siRNA sense strand
cuaggaagcuggagaaaca

SEQ ID NO: 1668987 - RNA, 19 nt, Homo sapiens
  misc_RNA (1)...(19): siRNA sense strand
ggagaagcuucgagaacaa

SEQ ID NO: 1668988 - RNA, 19 nt, Homo sapiens
  misc_RNA (1)...(19): siRNA sense strand
ggacaucaauaccuucucu

SEQ ID NO: 1668989 - RNA, 19 nt, Homo sapiens
  misc_RNA (1)...(19): siRNA sense strand
gccauugacuugauaaaca

SEQ ID NO: 1668990 - RNA, 19 nt, Homo sapiens
  misc_RNA (1)...(19): siRNA sense strand
cuaugagacuggagagaua

SEQ ID NO: 1668991 - RNA, 19 nt, Homo sapiens
  misc_RNA (1)...(19): siRNA sense strand
gggagaagcuucgagaaca

SEQ ID NO: 1668992 - RNA, 19 nt, Homo sapiens
  misc_RNA (1)...(19): siRNA sense strand
cgacuguccuucuaugaga

SEQ ID NO: 1668993 - RNA, 19 nt, Homo sapiens
  misc_RNA (1)...(19): siRNA sense strand
caacgacaaugccacauac

SEQ ID NO: 1668994 - RNA, 19 nt, Homo sapiens
  misc_RNA (1)...(19): siRNA sense strand
uaccugcgcuccaagauga

SEQ ID NO: 1668995 - RNA, 19 nt, Homo sapiens
  misc_RNA (1)...(19): siRNA sense strand
gaaucuggaugucaugaag

SEQ ID NO: 1668996 - RNA, 19 nt, Homo sapiens
  misc_RNA (1)...(19): siRNA sense strand
agaagaaacgcuuaaagaa

SEQ ID NO: 1668997 - RNA, 19 nt, Homo sapiens
  misc_RNA (1)...(19): siRNA sense strand
uggaggagcugacaaugga

SEQ ID NO: 1668998 - RNA, 19 nt, Homo sapiens
  misc_RNA (1)...(19): siRNA sense strand
gagcgacuguccuucuaug

SEQ ID NO: 1668999 - RNA, 19 nt, Homo sapiens
  misc_RNA (1)...(19): siRNA sense strand
aagcaucccaggaagauua

SEQ ID NO: 1669000 - RNA, 19 nt, Homo sapiens
  misc_RNA (1)...(19): siRNA sense strand
cugcugagauuacuaggaa

SEQ ID NO: 1669001 - RNA, 19 nt, Homo sapiens
  misc_RNA (1)...(19): siRNA sense strand
ggagaaacaggagaagaaa

SEQ ID NO: 1669002 - RNA, 19 nt, Homo sapiens
  misc_RNA (1)...(19): siRNA sense strand
ugaaggaaguggaggagau

SEQ ID NO: 1669003 - RNA, 19 nt, Homo sapiens
  misc_RNA (1)...(19): siRNA sense strand
ccauaaagcaucccaggaa

SEQ ID NO: 1669004 - RNA, 19 nt, Homo sapiens
  misc_RNA (1)...(19): siRNA sense strand
agaggaaauucuccaaaga

SEQ ID NO: 1669005 - RNA, 19 nt, Homo sapiens
  misc_RNA (1)...(19): siRNA sense strand
ugauaaacaucgagagcuu

SEQ ID NO: 1669006 - RNA, 19 nt, Homo sapiens
  misc_RNA (1)...(19): siRNA sense strand
gcaccaguauucccaagag

SEQ ID NO: 1669007 - RNA, 19 nt, Homo sapiens
  misc_RNA (1)...(19): siRNA sense strand
ccagucguguggugucuuu

SEQ ID NO: 1669008 - RNA, 19 nt, Homo sapiens
  misc_RNA (1)...(19): siRNA sense strand
ugaaccggguggacaauau

SEQ ID NO: 1669009 - RNA, 19 nt, Homo sapiens
  misc_RNA (1)...(19): siRNA sense strand
ccaaggaggaaacaguuaa

SEQ ID NO: 1669010 - RNA, 19 nt, Homo sapiens
  misc_RNA (1)...(19): siRNA sense strand
aaggaggaguugaugagua

SEQ ID NO: 1669011 - RNA, 19 nt, Homo sapiens
  misc_RNA (1)...(19): siRNA sense strand
gagcagcugccaagaacaa

SEQ ID NO: 1669012 - RNA, 19 nt, Homo sapiens
  misc_RNA (1)...(19): siRNA sense strand
cccgauaccuggcaaacaa

SEQ ID NO: 1669013 - RNA, 19 nt, Homo sapiens
  misc_RNA (1)...(19): siRNA sense strand
ucaggagaauggaauggaa

SEQ ID NO: 1669014 - RNA, 19 nt, Homo sapiens
  misc_RNA (1)...(19): siRNA sense strand
gaagaucaucaacgacaau

SEQ ID NO: 1669015 - RNA, 19 nt, Homo sapiens
  misc_RNA (1)...(19): siRNA sense strand
agaaguggcuccaagaaaa

SEQ ID NO: 1669016 - RNA, 19 nt, Homo sapiens
  misc_RNA (1)...(19): siRNA sense strand
ggccaaggcuaaggcuauu

SEQ ID NO: 1669017 - RNA, 19 nt, Homo sapiens
  misc_RNA (1)...(19): siRNA sense strand
ggagaagaaacgcuuaaag

SEQ ID NO: 1669018 - RNA, 19 nt, Homo sapiens
  misc_RNA (1)...(19): siRNA sense strand
ggaagacccaucuaucucu

SEQ ID NO: 1669019 - RNA, 19 nt, Homo sapiens
  misc_RNA (1)...(19): siRNA sense strand
ucaacgacaaugccacaua

SEQ ID NO: 1669020 - RNA, 19 nt, Homo sapiens
  misc_RNA (1)...(19): siRNA sense strand
acacuuaccugcgcuccaa

SEQ ID NO: 1669021 - RNA, 19 nt, Homo sapiens
  misc_RNA (1)...(19): siRNA sense strand
ggaaaccgaagggaacuga

SEQ ID NO: 1669022 - RNA, 19 nt, Homo sapiens
  misc_RNA (1)...(19): siRNA sense strand
cgucugcacuuccacaauc

SEQ ID NO: 1669023 - RNA, 19 nt, Homo sapiens
  misc_RNA (1)...(19): siRNA sense strand
aagaggaaauucuccaaag

SEQ ID NO: 1669024 - RNA, 19 nt, Homo sapiens
  misc_RNA (1)...(19): siRNA sense strand
cagaaguggcuccaagaaa

SEQ ID NO: 1669025 - RNA, 19 nt, Homo sapiens
  misc_RNA (1)...(19): siRNA sense strand
uggaccagcuggauaagga

SEQ ID NO: 1669026 - RNA, 19 nt, Homo sapiens
  misc_RNA (1)...(19): siRNA sense strand
gaaccggguggacaauaug

SEQ ID NO: 1669027 - RNA, 19 nt, Homo sapiens
  misc_RNA (1)...(19): siRNA sense strand
caaauuccacagcaucguu

SEQ ID NO: 1669028 - RNA, 19 nt, Homo sapiens
  misc_RNA (1)...(19): siRNA sense strand
gagauaccacgaaagaauc

SEQ ID NO: 1669029 - RNA, 19 nt, Homo sapiens
  misc_RNA (1)...(19): siRNA sense strand
agagauaccacgaaagaau

SEQ ID NO: 1669030 - RNA, 19 nt, Homo sapiens
  misc_RNA (1)...(19): siRNA sense strand
ugaagaucaucaacgacaa

SEQ ID NO: 1669031 - RNA, 19 nt, Homo sapiens
  misc_RNA (1)...(19): siRNA sense strand
cuggagagauaccacgaaa

SEQ ID NO: 1669032 - RNA, 19 nt, Homo sapiens
  misc_RNA (1)...(19): siRNA sense strand
aagagcgacuguccuucua

SEQ ID NO: 1669033 - RNA, 19 nt, Homo sapiens
  misc_RNA (1)...(19): siRNA sense strand
ggaggagucugugcucaac

SEQ ID NO: 1669034 - RNA, 19 nt, Homo sapiens
  misc_RNA (1)...(19): siRNA sense strand
ccauugacuugauaaacau

SEQ ID NO: 1669035 - RNA, 19 nt, Homo sapiens
  misc_RNA (1)...(19): siRNA sense strand
ggaacugaaugaggacaag

SEQ ID NO: 1669036 - RNA, 19 nt, Homo sapiens
  misc_RNA (1)...(19): siRNA sense strand
gaaucgauugcuucucuga

SEQ ID NO: 1669037 - RNA, 19 nt, Homo sapiens
  misc_RNA (1)...(19): siRNA sense strand
gaggaaauucuccaaagag

SEQ ID NO: 1669038 - RNA, 19 nt, Homo sapiens
  misc_RNA (1)...(19): siRNA sense strand
ucagaaaacagcaguagua

SEQ ID NO: 1669039 - RNA, 19 nt, Homo sapiens
  misc_RNA (1)...(19): siRNA sense strand
ggaggaaacaguuaaugac

SEQ ID NO: 1669040 - RNA, 19 nt, Homo sapiens
  misc_RNA (1)...(19): siRNA sense strand
gggccaaggcuaaggcuau

SEQ ID NO: 1669041 - RNA, 19 nt, Homo sapiens
  misc_RNA (1)...(19): siRNA sense strand
uaaagcaucccaggaagau

SEQ ID NO: 1669042 - RNA, 19 nt, Homo sapiens
  misc_RNA (1)...(19): siRNA sense strand
ggaggcaggccacagaagu

SEQ ID NO: 1669043 - RNA, 19 nt, Homo sapiens
  misc_RNA (1)...(19): siRNA sense strand
gcccucgcgucuucagaaa

SEQ ID NO: 1669044 - RNA, 19 nt, Homo sapiens
  misc_RNA (1)...(19): siRNA sense strand
uggagaaacaggagaagaa

SEQ ID NO: 1669045 - RNA, 19 nt, Homo sapiens
  misc_RNA (1)...(19): siRNA sense strand
cgaaagaaucuggauguca

SEQ ID NO: 1669046 - RNA, 19 nt, Homo sapiens
  misc_RNA (1)...(19): siRNA sense strand
gcacgucucaucgcacaug

SEQ ID NO: 1669047 - RNA, 19 nt, Homo sapiens
  misc_RNA (1)...(19): siRNA sense strand
cgccagagccuacacacuu

SEQ ID NO: 1669048 - RNA, 19 nt, Homo sapiens
  misc_RNA (1)...(19): siRNA sense strand
uguggugucuuuaucugaa

SEQ ID NO: 1669049 - RNA, 19 nt, Homo sapiens
  misc_RNA (1)...(19): siRNA sense strand
uaucugccauugacuugau

SEQ ID NO: 1669050 - RNA, 19 nt, Homo sapiens
  misc_RNA (1)...(19): siRNA sense strand
caucaauaccuucucuaug

SEQ ID NO: 1669051 - RNA, 19 nt, Homo sapiens
  misc_RNA (1)...(19): siRNA sense strand
aaagaggaaauucuccaaa

SEQ ID NO: 1669052 - RNA, 19 nt, Homo sapiens
  misc_RNA (1)...(19): siRNA sense strand
gaugaguagcgaucuugaa

SEQ ID NO: 1669053 - RNA, 19 nt, Homo sapiens
  misc_RNA (1)...(19): siRNA sense strand
gaggugcccacgaguguau

SEQ ID NO: 1669054 - RNA, 19 nt, Homo sapiens
  misc_RNA (1)...(19): siRNA sense strand
acgaaucgauugcuucucu

SEQ ID NO: 1669055 - RNA, 19 nt, Homo sapiens
  misc_RNA (1)...(19): siRNA sense strand
ggcuaaggcuauucuggau

SEQ ID NO: 1669056 - RNA, 19 nt, Homo sapiens
  misc_RNA (1)...(19): siRNA sense strand
cgucuugcccaguuuauug

SEQ ID NO: 1669057 - RNA, 19 nt, Homo sapiens
  misc_RNA (1)...(19): siRNA sense strand
gccacauacugccgucuug

SEQ ID NO: 1669058 - RNA, 19 nt, Homo sapiens
  misc_RNA (1)...(19): siRNA sense strand
caucccagguugccuugga

SEQ ID NO: 1669059 - RNA, 19 nt, Homo sapiens
  misc_RNA (1)...(19): siRNA sense strand
uuccggagcuggugaagau

SEQ ID NO: 1669060 - RNA, 19 nt, Homo sapiens
  misc_RNA (1)...(19): siRNA sense strand
gauaaggacaucaauaccu

SEQ ID NO: 1669061 - RNA, 19 nt, Homo sapiens
  misc_RNA (1)...(19): siRNA sense strand
gcagcuccaagaagaagaa

SEQ ID NO: 1669062 - RNA, 19 nt, Homo sapiens
  misc_RNA (1)...(19): siRNA sense strand
aggaggaguugaugaguag

SEQ ID NO: 1669063 - RNA, 19 nt, Homo sapiens
  misc_RNA (1)...(19): siRNA sense strand
gaagcggcugcugagauua

SEQ ID NO: 1669064 - RNA, 19 nt, Homo sapiens
  misc_RNA (1)...(19): siRNA sense strand
ccgagcagcugccaagaac

SEQ ID NO: 1669065 - RNA, 19 nt, Homo sapiens
  misc_RNA (1)...(19): siRNA sense strand
gcuauucccgugccaaagu

SEQ ID NO: 1669066 - RNA, 19 nt, Homo sapiens
  misc_RNA (1)...(19): siRNA sense strand
agacccaucuaucucuuuc

SEQ ID NO: 1669067 - RNA, 19 nt, Homo sapiens
  misc_RNA (1)...(19): siRNA sense strand
ggaggagucauagcugaga

SEQ ID NO: 1669068 - RNA, 19 nt, Homo sapiens
  misc_RNA (1)...(19): siRNA sense strand
caugaaggaagcaaugguu

SEQ ID NO: 1669069 - RNA, 19 nt, Homo sapiens
  misc_RNA (1)...(19): siRNA sense strand
gaagcuucgagaacaaguu

SEQ ID NO: 1669070 - RNA, 19 nt, Homo sapiens
  misc_RNA (1)...(19): siRNA sense strand
gaaggaaguggaggagauc

SEQ ID NO: 1669071 - RNA, 19 nt, Homo sapiens
  misc_RNA (1)...(19): siRNA sense strand
uggugaagaucaucaacga

SEQ ID NO: 1669072 - RNA, 19 nt, Homo sapiens
  misc_RNA (1)...(19): siRNA sense strand
cgcaauacaggaggaguua

SEQ ID NO: 1669073 - RNA, 19 nt, Homo sapiens
  misc_RNA (1)...(19): siRNA sense strand
agaaacgcuuaaagaagga

SEQ ID NO: 1669074 - RNA, 19 nt, Homo sapiens
  misc_RNA (1)...(19): siRNA sense strand
gaggagucauagcugagau

SEQ ID NO: 1669075 - RNA, 19 nt, Homo sapiens
  misc_RNA (1)...(19): siRNA sense strand
ccucacgaaucgauugcuu

SEQ ID NO: 1669076 - RNA, 19 nt, Homo sapiens
  misc_RNA (1)...(19): siRNA sense strand
agacccaccugccguccaa

SEQ ID NO: 1669077 - RNA, 19 nt, Homo sapiens
  misc_RNA (1)...(19): siRNA sense strand
ggaaggcccucuuguguua

SEQ ID NO: 1669078 - RNA, 19 nt, Homo sapiens
  misc_RNA (1)...(19): siRNA sense strand
gcuaccaagucaccuguua

SEQ ID NO: 1669079 - RNA, 19 nt, Homo sapiens
  misc_RNA (1)...(19): siRNA sense strand
aaagugccaugcagaaauu

SEQ ID NO: 1669080 - RNA, 19 nt, Homo sapiens
  misc_RNA (1)...(19): siRNA sense strand
acauuccgcuuacaguuua

SEQ ID NO: 1669081 - RNA, 19 nt, Homo sapiens
  misc_RNA (1)...(19): siRNA sense strand
guuaacagccgaaacauuc

SEQ ID NO: 1669082 - RNA, 19 nt, Homo sapiens
  misc_RNA (1)...(19): siRNA sense strand
caucaaggcucacgaccau

SEQ ID NO: 1669083 - RNA, 19 nt, Homo sapiens
  misc_RNA (1)...(19): siRNA sense strand
ccugggagcugguugacuu

SEQ ID NO: 1669084 - RNA, 19 nt, Homo sapiens
  misc_RNA (1)...(19): siRNA sense strand
ggagcugguugacuucauc

SEQ ID NO: 1669085 - RNA, 19 nt, Homo sapiens
  misc_RNA (1)...(19): siRNA sense strand
gaaacauuccgcuuacagu

SEQ ID NO: 1669086 - RNA, 19 nt, Homo sapiens
  misc_RNA (1)...(19): siRNA sense strand
aaacauuccgcuuacaguu

SEQ ID NO: 1669087 - RNA, 19 nt, Homo sapiens
  misc_RNA (1)...(19): siRNA sense strand
uuaacgagaucaaguccau

SEQ ID NO: 1669088 - RNA, 19 nt, Homo sapiens
  misc_RNA (1)...(19): siRNA sense strand
guuagaggagcuagauaaa

SEQ ID NO: 1669089 - RNA, 19 nt, Homo sapiens
  misc_RNA (1)...(19): siRNA sense strand
gccgaaacauuccgcuuac

SEQ ID NO: 1669090 - RNA, 19 nt, Homo sapiens
  misc_RNA (1)...(19): siRNA sense strand
uguuagaggagcuagauaa

SEQ ID NO: 1669091 - RNA, 19 nt, Homo sapiens
  misc_RNA (1)...(19): siRNA sense strand
gauguuagaggagcuagau

SEQ ID NO: 1669092 - RNA, 19 nt, Homo sapiens
  misc_RNA (1)...(19): siRNA sense strand
cagcugacgccgcagaaug

SEQ ID NO: 1669093 - RNA, 19 nt, Homo sapiens
  misc_RNA (1)...(19): siRNA sense strand
acgcagugcuaccaaguca

SEQ ID NO: 1669094 - RNA, 19 nt, Homo sapiens
  misc_RNA (1)...(19): siRNA sense strand
agccgaaacauuccgcuua

SEQ ID NO: 1669095 - RNA, 19 nt, Homo sapiens
  misc_RNA (1)...(19): siRNA sense strand
ccaugggacuggacgaaac

SEQ ID NO: 1669096 - RNA, 19 nt, Homo sapiens
  misc_RNA (1)...(19): siRNA sense strand
caugcagaaauuugcuuua

SEQ ID NO: 1669097 - RNA, 19 nt, Homo sapiens
  misc_RNA (1)...(19): siRNA sense strand
aacauuccgcuuacaguuu

SEQ ID NO: 1669098 - RNA, 19 nt, Homo sapiens
  misc_RNA (1)...(19): siRNA sense strand
ccaugcagaaauuugcuuu

SEQ ID NO: 1669099 - RNA, 19 nt, Homo sapiens
  misc_RNA (1)...(19): siRNA sense strand
gaggcuacuuugaaaacaa

SEQ ID NO: 1669100 - RNA, 19 nt, Homo sapiens
  misc_RNA (1)...(19): siRNA sense strand
caaccccuauaagauguua

SEQ ID NO: 1669101 - RNA, 19 nt, Homo sapiens
  misc_RNA (1)...(19): siRNA sense strand
ggaggcaagucauuuauua

SEQ ID NO: 1669102 - RNA, 19 nt, Homo sapiens
  misc_RNA (1)...(19): siRNA sense strand
gagccuaucuacacauuua

SEQ ID NO: 1669103 - RNA, 19 nt, Homo sapiens
  misc_RNA (1)...(19): siRNA sense strand
gaaguagguuauacagaua

SEQ ID NO: 1669104 - RNA, 19 nt, Homo sapiens
  misc_RNA (1)...(19): siRNA sense strand
ggaaguagguuauacagau

SEQ ID NO: 1669105 - RNA, 19 nt, Homo sapiens
  misc_RNA (1)...(19): siRNA sense strand
agaaugggcugaaccaaua

SEQ ID NO: 1669106 - RNA, 19 nt, Homo sapiens
  misc_RNA (1)...(19): siRNA sense strand
gaaagaaauuggaugaauc

SEQ ID NO: 1669107 - RNA, 19 nt, Homo sapiens
  misc_RNA (1)...(19): siRNA sense strand
gauguuagaguaugcauua

SEQ ID NO: 1669108 - RNA, 19 nt, Homo sapiens
  misc_RNA (1)...(19): siRNA sense strand
gaccauacccugaaacuuu

SEQ ID NO: 1669109 - RNA, 19 nt, Homo sapiens
  misc_RNA (1)...(19): siRNA sense strand
acagguagauucugguuua

SEQ ID NO: 1669110 - RNA, 19 nt, Homo sapiens
  misc_RNA (1)...(19): siRNA sense strand
gaagauagacacaucaaau

SEQ ID NO: 1669111 - RNA, 19 nt, Homo sapiens
  misc_RNA (1)...(19): siRNA sense strand
ccaaauggaucaguagaaa

SEQ ID NO: 1669112 - RNA, 19 nt, Homo sapiens
  misc_RNA (1)...(19): siRNA sense strand
gaaauaacagcucacagaa

SEQ ID NO: 1669113 - RNA, 19 nt, Homo sapiens
  misc_RNA (1)...(19): siRNA sense strand
ugaaggagcuggagaagca

SEQ ID NO: 1669114 - RNA, 19 nt, Homo sapiens
  misc_RNA (1)...(19): siRNA sense strand
ggaggaggcaagucauuua

SEQ ID NO: 1669115 - RNA, 19 nt, Homo sapiens
  misc_RNA (1)...(19): siRNA sense strand
uacaauaacugcucaugaa

SEQ ID NO: 1669116 - RNA, 19 nt, Homo sapiens
  misc_RNA (1)...(19): siRNA sense strand
guagugcaguaauuuauga

SEQ ID NO: 1669117 - RNA, 19 nt, Homo sapiens
  misc_RNA (1)...(19): siRNA sense strand
cuacaucaguugacuuuau

SEQ ID NO: 1669118 - RNA, 19 nt, Homo sapiens
  misc_RNA (1)...(19): siRNA sense strand
uaacaaaugaugcagacua

SEQ ID NO: 1669119 - RNA, 19 nt, Homo sapiens
  misc_RNA (1)...(19): siRNA sense strand
caagacaugugugcaagaa

SEQ ID NO: 1669120 - RNA, 19 nt, Homo sapiens
  misc_RNA (1)...(19): siRNA sense strand
gcaaaagggacaagaaaua

SEQ ID NO: 1669121 - RNA, 19 nt, Homo sapiens
  misc_RNA (1)...(19): siRNA sense strand
gcacuuacaauggagauaa

SEQ ID NO: 1669122 - RNA, 19 nt, Homo sapiens
  misc_RNA (1)...(19): siRNA sense strand
gcacugaaagaauuugauu

SEQ ID NO: 1669123 - RNA, 19 nt, Homo sapiens
  misc_RNA (1)...(19): siRNA sense strand
aagagaaccugaagaagga

SEQ ID NO: 1669124 - RNA, 19 nt, Homo sapiens
  misc_RNA (1)...(19): siRNA sense strand
gguagauucugguuuacaa

SEQ ID NO: 1669125 - RNA, 19 nt, Homo sapiens
  misc_RNA (1)...(19): siRNA sense strand
guuaugauuugccugcuaa

SEQ ID NO: 1669126 - RNA, 19 nt, Homo sapiens
  misc_RNA (1)...(19): siRNA sense strand
aauaacagcucacagaaag

SEQ ID NO: 1669127 - RNA, 19 nt, Homo sapiens
  misc_RNA (1)...(19): siRNA sense strand
agauggcacuguuagguua

SEQ ID NO: 1669128 - RNA, 19 nt, Homo sapiens
  misc_RNA (1)...(19): siRNA sense strand
gagugccucuuuagaugua

SEQ ID NO: 1669129 - RNA, 19 nt, Homo sapiens
  misc_RNA (1)...(19): siRNA sense strand
gacauggaaucccaaguau

SEQ ID NO: 1669130 - RNA, 19 nt, Homo sapiens
  misc_RNA (1)...(19): siRNA sense strand
ugauuugccugcuaauaaa

SEQ ID NO: 1669131 - RNA, 19 nt, Homo sapiens
  misc_RNA (1)...(19): siRNA sense strand
ccacagcaccucagaauag

SEQ ID NO: 1669132 - RNA, 19 nt, Homo sapiens
  misc_RNA (1)...(19): siRNA sense strand
uggaauaccuacaucaguu

SEQ ID NO: 1669133 - RNA, 19 nt, Homo sapiens
  misc_RNA (1)...(19): siRNA sense strand
aggaagcacugaaagaauu

SEQ ID NO: 1669134 - RNA, 19 nt, Homo sapiens
  misc_RNA (1)...(19): siRNA sense strand
uagaacagauccugaaugg

SEQ ID NO: 1669135 - RNA, 19 nt, Homo sapiens
  misc_RNA (1)...(19): siRNA sense strand
gcagacagcuuuuaagaca

SEQ ID NO: 1669136 - RNA, 19 nt, Homo sapiens
  misc_RNA (1)...(19): siRNA sense strand
ccaauaacguuuccaucug

SEQ ID NO: 1669137 - RNA, 19 nt, Homo sapiens
  misc_RNA (1)...(19): siRNA sense strand
ugauccagcucauauggua

SEQ ID NO: 1669138 - RNA, 19 nt, Homo sapiens
  misc_RNA (1)...(19): siRNA sense strand
guucugucauuagcuauua

SEQ ID NO: 1669139 - RNA, 19 nt, Homo sapiens
  misc_RNA (1)...(19): siRNA sense strand
caaaugaugcagacuauag

SEQ ID NO: 1669140 - RNA, 19 nt, Homo sapiens
  misc_RNA (1)...(19): siRNA sense strand
uaugguagcucacuuggau

SEQ ID NO: 1669141 - RNA, 19 nt, Homo sapiens
  misc_RNA (1)...(19): siRNA sense strand
uguucuagcuggcacuuua

SEQ ID NO: 1669142 - RNA, 19 nt, Homo sapiens
  misc_RNA (1)...(19): siRNA sense strand
agacaugugugcaagaaau

SEQ ID NO: 1669143 - RNA, 19 nt, Homo sapiens
  misc_RNA (1)...(19): siRNA sense strand
agacauggaaucccaagua

SEQ ID NO: 1669144 - RNA, 19 nt, Homo sapiens
  misc_RNA (1)...(19): siRNA sense strand
ucacuuggaugcuguuaca

SEQ ID NO: 1669145 - RNA, 19 nt, Homo sapiens
  misc_RNA (1)...(19): siRNA sense strand
agaaauaacagcucacaga

SEQ ID NO: 1669146 - RNA, 19 nt, Homo sapiens
  misc_RNA (1)...(19): siRNA sense strand
agaaccaaauggaucagua

SEQ ID NO: 1669147 - RNA, 19 nt, Homo sapiens
  misc_RNA (1)...(19): siRNA sense strand
caucggcccuguucuguca

SEQ ID NO: 1669148 - RNA, 19 nt, Homo sapiens
  misc_RNA (1)...(19): siRNA sense strand
ggaagcacugaaagaauuu

SEQ ID NO: 1669149 - RNA, 19 nt, Homo sapiens
  misc_RNA (1)...(19): siRNA sense strand
gaucgaaggcaucccagaa

SEQ ID NO: 1669150 - RNA, 19 nt, Homo sapiens
  misc_RNA (1)...(19): siRNA sense strand
gaauuuagacagcaagaca

SEQ ID NO: 1669151 - RNA, 19 nt, Homo sapiens
  misc_RNA (1)...(19): siRNA sense strand
ugacuguuccaucagauua

SEQ ID NO: 1669152 - RNA, 19 nt, Homo sapiens
  misc_RNA (1)...(19): siRNA sense strand
gaugcagacuauaguuaug

SEQ ID NO: 1669153 - RNA, 19 nt, Homo sapiens
  misc_RNA (1)...(19): siRNA sense strand
cacacuuccuguuacaaua

SEQ ID NO: 1669154 - RNA, 19 nt, Homo sapiens
  misc_RNA (1)...(19): siRNA sense strand
gaaggcaucccagaaggaa

SEQ ID NO: 1669155 - RNA, 19 nt, Homo sapiens
  misc_RNA (1)...(19): siRNA sense strand
uaacagcucacagaaagaa

SEQ ID NO: 1669156 - RNA, 19 nt, Homo sapiens
  misc_RNA (1)...(19): siRNA sense strand
gguaaccucuuucaacacu

SEQ ID NO: 1669157 - RNA, 19 nt, Homo sapiens
  misc_RNA (1)...(19): siRNA sense strand
gauccugaauggaggugaa

SEQ ID NO: 1669158 - RNA, 19 nt, Homo sapiens
  misc_RNA (1)...(19): siRNA sense strand
ugccauguauuugcacuua

SEQ ID NO: 1669159 - RNA, 19 nt, Homo sapiens
  misc_RNA (1)...(19): siRNA sense strand
gaaccugaagaaggacuua

SEQ ID NO: 1669160 - RNA, 19 nt, Homo sapiens
  misc_RNA (1)...(19): siRNA sense strand
gggcugaaccaauaacguu

SEQ ID NO: 1669161 - RNA, 19 nt, Homo sapiens
  misc_RNA (1)...(19): siRNA sense strand
gugauguucuugagacguu

SEQ ID NO: 1669162 - RNA, 19 nt, Homo sapiens
  misc_RNA (1)...(19): siRNA sense strand
aauaacugcucaugaagau

SEQ ID NO: 1669163 - RNA, 19 nt, Homo sapiens
  misc_RNA (1)...(19): siRNA sense strand
ggaauaccuacaucaguug

SEQ ID NO: 1669164 - RNA, 19 nt, Homo sapiens
  misc_RNA (1)...(19): siRNA sense strand
gaaccaaauggaucaguag

SEQ ID NO: 1669165 - RNA, 19 nt, Homo sapiens
  misc_RNA (1)...(19): siRNA sense strand
ccuaauggaaucuauuuga

SEQ ID NO: 1669166 - RNA, 19 nt, Homo sapiens
  misc_RNA (1)...(19): siRNA sense strand
uaacugcucaugaagauag

SEQ ID NO: 1669167 - RNA, 19 nt, Homo sapiens
  misc_RNA (1)...(19): siRNA sense strand
uggacuaucuaauucagaa

SEQ ID NO: 1669168 - RNA, 19 nt, Homo sapiens
  misc_RNA (1)...(19): siRNA sense strand
caauaacugcucaugaaga

SEQ ID NO: 1669169 - RNA, 19 nt, Homo sapiens
  misc_RNA (1)...(19): siRNA sense strand
caguguagauccauaugau

SEQ ID NO: 1669170 - RNA, 19 nt, Homo sapiens
  misc_RNA (1)...(19): siRNA sense strand
gucauuagcuauuaguucu

SEQ ID NO: 1669171 - RNA, 19 nt, Homo sapiens
  misc_RNA (1)...(19): siRNA sense strand
ggcaagucauuuauuaugg

SEQ ID NO: 1669172 - RNA, 19 nt, Homo sapiens
  misc_RNA (1)...(19): siRNA sense strand
cagaauagccaguuaacgu

SEQ ID NO: 1669173 - RNA, 19 nt, Homo sapiens
  misc_RNA (1)...(19): siRNA sense strand
acagaaagaaauuggauga

SEQ ID NO: 1669174 - RNA, 19 nt, Homo sapiens
  misc_RNA (1)...(19): siRNA sense strand
gacaugugugcaagaaaua

SEQ ID NO: 1669175 - RNA, 19 nt, Homo sapiens
  misc_RNA (1)...(19): siRNA sense strand
caucccacacuuccuguua

SEQ ID NO: 1669176 - RNA, 19 nt, Homo sapiens
  misc_RNA (1)...(19): siRNA sense strand
gucaagagaaccugaagaa

SEQ ID NO: 1669177 - RNA, 19 nt, Homo sapiens
  misc_RNA (1)...(19): siRNA sense strand
ucauacagaugcaguuugg

SEQ ID NO: 1669178 - RNA, 19 nt, Homo sapiens
  misc_RNA (1)...(19): siRNA sense strand
gaggaagcacugaaagaau

SEQ ID NO: 1669179 - RNA, 19 nt, Homo sapiens
  misc_RNA (1)...(19): siRNA sense strand
ugacagugaugaagaugag

SEQ ID NO: 1669180 - RNA, 19 nt, Homo sapiens
  misc_RNA (1)...(19): siRNA sense strand
aacaaaugaugcagacuau

SEQ ID NO: 1669181 - RNA, 19 nt, Homo sapiens
  misc_RNA (1)...(19): siRNA sense strand
gaaccaauaacguuuccau

SEQ ID NO: 1669182 - RNA, 19 nt, Homo sapiens
  misc_RNA (1)...(19): siRNA sense strand
ugaggaagcacugaaagaa

SEQ ID NO: 1669183 - RNA, 19 nt, Homo sapiens
  misc_RNA (1)...(19): siRNA sense strand
ccaugacuguuccaucaga

SEQ ID NO: 1669184 - RNA, 19 nt, Homo sapiens
  misc_RNA (1)...(19): siRNA sense strand
gcaguagauccuaauggaa

SEQ ID NO: 1669185 - RNA, 19 nt, Homo sapiens
  misc_RNA (1)...(19): siRNA sense strand
ucaugaagauagacacauc

SEQ ID NO: 1669186 - RNA, 19 nt, Homo sapiens
  misc_RNA (1)...(19): siRNA sense strand
gauacuuucaucacaggua

SEQ ID NO: 1669187 - RNA, 19 nt, Homo sapiens
  misc_RNA (1)...(19): siRNA sense strand
cauggaaucccaaguauac

SEQ ID NO: 1669188 - RNA, 19 nt, Homo sapiens
  misc_RNA (1)...(19): siRNA sense strand
gaaagaaaaggucaagaga

SEQ ID NO: 1669189 - RNA, 19 nt, Homo sapiens
  misc_RNA (1)...(19): siRNA sense strand
gaacugaaccaaggugacu

SEQ ID NO: 1669190 - RNA, 19 nt, Homo sapiens
  misc_RNA (1)...(19): siRNA sense strand
aaauaacagcucacagaaa

SEQ ID NO: 1669191 - RNA, 19 nt, Homo sapiens
  misc_RNA (1)...(19): siRNA sense strand
uguuacaagucuagcagua

SEQ ID NO: 1669192 - RNA, 19 nt, Homo sapiens
  misc_RNA (1)...(19): siRNA sense strand
cauaucaacagaguaguaa

SEQ ID NO: 1669193 - RNA, 19 nt, Homo sapiens
  misc_RNA (1)...(19): siRNA sense strand
gcacuuuaguuggucauac

SEQ ID NO: 1669194 - RNA, 19 nt, Homo sapiens
  misc_RNA (1)...(19): siRNA sense strand
ugaggaccauacccugaaa

SEQ ID NO: 1669195 - RNA, 19 nt, Homo sapiens
  misc_RNA (1)...(19): siRNA sense strand
gaggaggcaagucauuuau

SEQ ID NO: 1669196 - RNA, 19 nt, Homo sapiens
  misc_RNA (1)...(19): siRNA sense strand
gaaugggcugaaccaauaa

SEQ ID NO: 1669197 - RNA, 19 nt, Homo sapiens
  misc_RNA (1)...(19): siRNA sense strand
caaaagggacaagaaauaa

SEQ ID NO: 1669198 - RNA, 19 nt, Homo sapiens
  misc_RNA (1)...(19): siRNA sense strand
gaauaccuacaucaguuga

SEQ ID NO: 1669199 - RNA, 19 nt, Homo sapiens
  misc_RNA (1)...(19): siRNA sense strand
ccuguucugucauuagcua

SEQ ID NO: 1669200 - RNA, 19 nt, Homo sapiens
  misc_RNA (1)...(19): siRNA sense strand
cgaugacagugaugaagau

SEQ ID NO: 1669201 - RNA, 19 nt, Homo sapiens
  misc_RNA (1)...(19): siRNA sense strand
gaacaaacgggaauaugaa

SEQ ID NO: 1669202 - RNA, 19 nt, Homo sapiens
  misc_RNA (1)...(19): siRNA sense strand
gaugaacccaaucccaaua

SEQ ID NO: 1669203 - RNA, 19 nt, Homo sapiens
  misc_RNA (1)...(19): siRNA sense strand
gcguguuucugcaauagua

SEQ ID NO: 1669204 - RNA, 19 nt, Homo sapiens
  misc_RNA (1)...(19): siRNA sense strand
cuaugcagaugguaguaua

SEQ ID NO: 1669205 - RNA, 19 nt, Homo sapiens
  misc_RNA (1)...(19): siRNA sense strand
gaugugucuuccauucuaa

SEQ ID NO: 1669206 - RNA, 19 nt, Homo sapiens
  misc_RNA (1)...(19): siRNA sense strand
ugaugugucuuccauucua

SEQ ID NO: 1669207 - RNA, 19 nt, Homo sapiens
  misc_RNA (1)...(19): siRNA sense strand
uaacauccauacagucucu

SEQ ID NO: 1669208 - RNA, 19 nt, Homo sapiens
  misc_RNA (1)...(19): siRNA sense strand
agaacaaacgggaauauga

SEQ ID NO: 1669209 - RNA, 19 nt, Homo sapiens
  misc_RNA (1)...(19): siRNA sense strand
uaugaugugucuuccauuc

SEQ ID NO: 1669210 - RNA, 19 nt, Homo sapiens
  misc_RNA (1)...(19): siRNA sense strand
aaagcguguuucugcaaua

SEQ ID NO: 1669211 - RNA, 19 nt, Homo sapiens
  misc_RNA (1)...(19): siRNA sense strand
ggagaacaaacgggaauau

SEQ ID NO: 1669212 - RNA, 19 nt, Homo sapiens
  misc_RNA (1)...(19): siRNA sense strand
caaccuaugaugugucuuc

SEQ ID NO: 1669213 - RNA, 19 nt, Homo sapiens
  misc_RNA (1)...(19): siRNA sense strand
gagaacaaacgggaauaug

SEQ ID NO: 1669214 - RNA, 19 nt, Homo sapiens
  misc_RNA (1)...(19): siRNA sense strand
ccuaugaugugucuuccau

SEQ ID NO: 1669215 - RNA, 19 nt, Homo sapiens
  misc_RNA (1)...(19): siRNA sense strand
gaacccaaucccaauaguc

SEQ ID NO: 1669216 - RNA, 19 nt, Homo sapiens
  misc_RNA (1)...(19): siRNA sense strand
gcagaugguaguauauguc

SEQ ID NO: 1669217 - RNA, 19 nt, Homo sapiens
  misc_RNA (1)...(19): siRNA sense strand
ggaguccaaccuaugaugu

SEQ ID NO: 1669218 - RNA, 19 nt, Homo sapiens
  misc_RNA (1)...(19): siRNA sense strand
ugucuuccauucuaacauc

SEQ ID NO: 1669219 - RNA, 19 nt, Homo sapiens
  misc_RNA (1)...(19): siRNA sense strand
auucuaacauccauacagu

SEQ ID NO: 1669220 - RNA, 19 nt, Homo sapiens
  misc_RNA (1)...(19): siRNA sense strand
gaauaugaaaagcguguuu

SEQ ID NO: 1669221 - RNA, 19 nt, Homo sapiens
  misc_RNA (1)...(19): siRNA sense strand
ugaacccaaucccaauagu

SEQ ID NO: 1669222 - RNA, 19 nt, Homo sapiens
  misc_RNA (1)...(19): siRNA sense strand
ccaauaguccagcaaacag

SEQ ID NO: 1669223 - RNA, 19 nt, Homo sapiens
  misc_RNA (1)...(19): siRNA sense strand
gaacaaacgggaauaugaa

SEQ ID NO: 1669224 - RNA, 19 nt, Homo sapiens
  misc_RNA (1)...(19): siRNA sense strand
gaugaacccaaucccaaua

SEQ ID NO: 1669225 - RNA, 19 nt, Homo sapiens
  misc_RNA (1)...(19): siRNA sense strand
gcguguuucugcaauagua

SEQ ID NO: 1669226 - RNA, 19 nt, Homo sapiens
  misc_RNA (1)...(19): siRNA sense strand
cuaugcagaugguaguaua

SEQ ID NO: 1669227 - RNA, 19 nt, Homo sapiens
  misc_RNA (1)...(19): siRNA sense strand
gaugugucuuccauucuaa

SEQ ID NO: 1669228 - RNA, 19 nt, Homo sapiens
  misc_RNA (1)...(19): siRNA sense strand
ugaugugucuuccauucua

SEQ ID NO: 1669229 - RNA, 19 nt, Homo sapiens
  misc_RNA (1)...(19): siRNA sense strand
uaacauccauacagucucu

SEQ ID NO: 1669230 - RNA, 19 nt, Homo sapiens
  misc_RNA (1)...(19): siRNA sense strand
agaacaaacgggaauauga

SEQ ID NO: 1669231 - RNA, 19 nt, Homo sapiens
  misc_RNA (1)...(19): siRNA sense strand
uaugaugugucuuccauuc

SEQ ID NO: 1669232 - RNA, 19 nt, Homo sapiens
  misc_RNA (1)...(19): siRNA sense strand
aaagcguguuucugcaaua

SEQ ID NO: 1669233 - RNA, 19 nt, Homo sapiens
  misc_RNA (1)...(19): siRNA sense strand
ggagaacaaacgggaauau

SEQ ID NO: 1669234 - RNA, 19 nt, Homo sapiens
  misc_RNA (1)...(19): siRNA sense strand
caaccuaugaugugucuuc

SEQ ID NO: 1669235 - RNA, 19 nt, Homo sapiens
  misc_RNA (1)...(19): siRNA sense strand
gagaacaaacgggaauaug

SEQ ID NO: 1669236 - RNA, 19 nt, Homo sapiens
  misc_RNA (1)...(19): siRNA sense strand
ccuaugaugugucuuccau

SEQ ID NO: 1669237 - RNA, 19 nt, Homo sapiens
  misc_RNA (1)...(19): siRNA sense strand
gaacccaaucccaauaguc

SEQ ID NO: 1669238 - RNA, 19 nt, Homo sapiens
  misc_RNA (1)...(19): siRNA sense strand
gcagaugguaguauauguc

SEQ ID NO: 1669239 - RNA, 19 nt, Homo sapiens
  misc_RNA (1)...(19): siRNA sense strand
ggaguccaaccuaugaugu

SEQ ID NO: 1669240 - RNA, 19 nt, Homo sapiens
  misc_RNA (1)...(19): siRNA sense strand
ugucuuccauucuaacauc

SEQ ID NO: 1669241 - RNA, 19 nt, Homo sapiens
  misc_RNA (1)...(19): siRNA sense strand
auucuaacauccauacagu

SEQ ID NO: 1669242 - RNA, 19 nt, Homo sapiens
  misc_RNA (1)...(19): siRNA sense strand
gaauaugaaaagcguguuu

SEQ ID NO: 1669243 - RNA, 19 nt, Homo sapiens
  misc_RNA (1)...(19): siRNA sense strand
ugaacccaaucccaauagu

SEQ ID NO: 1669244 - RNA, 19 nt, Homo sapiens
  misc_RNA (1)...(19): siRNA sense strand
ccaauaguccagcaaacag

SEQ ID NO: 1669245 - RNA, 19 nt, Homo sapiens
  misc_RNA (1)...(19): siRNA sense strand
gaacaaacgggaauaugaa

SEQ ID NO: 1669246 - RNA, 19 nt, Homo sapiens
  misc_RNA (1)...(19): siRNA sense strand
gaugaacccaaucccaaua

SEQ ID NO: 1669247 - RNA, 19 nt, Homo sapiens
  misc_RNA (1)...(19): siRNA sense strand
gcguguuucugcaauagua

SEQ ID NO: 1669248 - RNA, 19 nt, Homo sapiens
  misc_RNA (1)...(19): siRNA sense strand
cuaugcagaugguaguaua

SEQ ID NO: 1669249 - RNA, 19 nt, Homo sapiens
  misc_RNA (1)...(19): siRNA sense strand
gaugugucuuccauucuaa

SEQ ID NO: 1669250 - RNA, 19 nt, Homo sapiens
  misc_RNA (1)...(19): siRNA sense strand
ugaugugucuuccauucua

SEQ ID NO: 1669251 - RNA, 19 nt, Homo sapiens
  misc_RNA (1)...(19): siRNA sense strand
uaacauccauacagucucu

SEQ ID NO: 1669252 - RNA, 19 nt, Homo sapiens
  misc_RNA (1)...(19): siRNA sense strand
agaacaaacgggaauauga

SEQ ID NO: 1669253 - RNA, 19 nt, Homo sapiens
  misc_RNA (1)...(19): siRNA sense strand
uaugaugugucuuccauuc

SEQ ID NO: 1669254 - RNA, 19 nt, Homo sapiens
  misc_RNA (1)...(19): siRNA sense strand
aaagcguguuucugcaaua

SEQ ID NO: 1669255 - RNA, 19 nt, Homo sapiens
  misc_RNA (1)...(19): siRNA sense strand
ggagaacaaacgggaauau

SEQ ID NO: 1669256 - RNA, 19 nt, Homo sapiens
  misc_RNA (1)...(19): siRNA sense strand
caaccuaugaugugucuuc

SEQ ID NO: 1669257 - RNA, 19 nt, Homo sapiens
  misc_RNA (1)...(19): siRNA sense strand
gagaacaaacgggaauaug

SEQ ID NO: 1669258 - RNA, 19 nt, Homo sapiens
  misc_RNA (1)...(19): siRNA sense strand
ccuaugaugugucuuccau

SEQ ID NO: 1669259 - RNA, 19 nt, Homo sapiens
  misc_RNA (1)...(19): siRNA sense strand
gaacccaaucccaauaguc

SEQ ID NO: 1669260 - RNA, 19 nt, Homo sapiens
  misc_RNA (1)...(19): siRNA sense strand
gcagaugguaguauauguc

SEQ ID NO: 1669261 - RNA, 19 nt, Homo sapiens
  misc_RNA (1)...(19): siRNA sense strand
ggaguccaaccuaugaugu

SEQ ID NO: 1669262 - RNA, 19 nt, Homo sapiens
  misc_RNA (1)...(19): siRNA sense strand
ugucuuccauucuaacauc

SEQ ID NO: 1669263 - RNA, 19 nt, Homo sapiens
  misc_RNA (1)...(19): siRNA sense strand
auucuaacauccauacagu

SEQ ID NO: 1669264 - RNA, 19 nt, Homo sapiens
  misc_RNA (1)...(19): siRNA sense strand
gaauaugaaaagcguguuu

SEQ ID NO: 1669265 - RNA, 19 nt, Homo sapiens
  misc_RNA (1)...(19): siRNA sense strand
ugaacccaaucccaauagu

SEQ ID NO: 1669266 - RNA, 19 nt, Homo sapiens
  misc_RNA (1)...(19): siRNA sense strand
ccaauaguccagcaaacag

SEQ ID NO: 1669267 - RNA, 19 nt, Homo sapiens
  misc_RNA (1)...(19): siRNA sense strand
gaccagagcuucaccauuc

SEQ ID NO: 1669268 - RNA, 19 nt, Homo sapiens
  misc_RNA (1)...(19): siRNA sense strand
gcaagacuguggccauuaa

SEQ ID NO: 1669269 - RNA, 19 nt, Homo sapiens
  misc_RNA (1)...(19): siRNA sense strand
gggcgaaccugaccuauga

SEQ ID NO: 1669270 - RNA, 19 nt, Homo sapiens
  misc_RNA (1)...(19): siRNA sense strand
gauuguagccgucaucuuu

SEQ ID NO: 1669271 - RNA, 19 nt, Homo sapiens
  misc_RNA (1)...(19): siRNA sense strand
gaacagcaacagauacuga

SEQ ID NO: 1669272 - RNA, 19 nt, Homo sapiens
  misc_RNA (1)...(19): siRNA sense strand
ucacagaauuuauggagaa

SEQ ID NO: 1669273 - RNA, 19 nt, Homo sapiens
  misc_RNA (1)...(19): siRNA sense strand
ggcaugaacuaccucagua

SEQ ID NO: 1669274 - RNA, 19 nt, Homo sapiens
  misc_RNA (1)...(19): siRNA sense strand
ccacauacaucgucagagu

SEQ ID NO: 1669275 - RNA, 19 nt, Homo sapiens
  misc_RNA (1)...(19): siRNA sense strand
gaugucagauacaguguga

SEQ ID NO: 1669276 - RNA, 19 nt, Homo sapiens
  misc_RNA (1)...(19): siRNA sense strand
ccagaaacaucuuggugaa

SEQ ID NO: 1669277 - RNA, 19 nt, Homo sapiens
  misc_RNA (1)...(19): siRNA sense strand
gaucaucacagaauuuaug

SEQ ID NO: 1669278 - RNA, 19 nt, Homo sapiens
  misc_RNA (1)...(19): siRNA sense strand
caaggaaguuacucugaug

SEQ ID NO: 1669279 - RNA, 19 nt, Homo sapiens
  misc_RNA (1)...(19): siRNA sense strand
gaaacaucuuggugaauca

SEQ ID NO: 1669280 - RNA, 19 nt, Homo sapiens
  misc_RNA (1)...(19): siRNA sense strand
gaaagaaccgaggcaacua

SEQ ID NO: 1669281 - RNA, 19 nt, Homo sapiens
  misc_RNA (1)...(19): siRNA sense strand
ugaacuaccucaguaauca

SEQ ID NO: 1669282 - RNA, 19 nt, Homo sapiens
  misc_RNA (1)...(19): siRNA sense strand
caacuacaccuuuaaugug

SEQ ID NO: 1669283 - RNA, 19 nt, Homo sapiens
  misc_RNA (1)...(19): siRNA sense strand
gcaaucaggagguuaugaa

SEQ ID NO: 1669284 - RNA, 19 nt, Homo sapiens
  misc_RNA (1)...(19): siRNA sense strand
cauaggagaaggagaguuu

SEQ ID NO: 1669285 - RNA, 19 nt, Homo sapiens
  misc_RNA (1)...(19): siRNA sense strand
gaugggaucccguaucgaa

SEQ ID NO: 1669286 - RNA, 19 nt, Homo sapiens
  misc_RNA (1)...(19): siRNA sense strand
uaccagcgcuguccugaga

SEQ ID NO: 1669287 - RNA, 19 nt, Homo sapiens
  misc_RNA (1)...(19): siRNA sense strand
ugacucgccuccuggauga

SEQ ID NO: 1669288 - RNA, 19 nt, Homo sapiens
  misc_RNA (1)...(19): siRNA sense strand
ccaaggaaguuacucugau

SEQ ID NO: 1669289 - RNA, 19 nt, Homo sapiens
  misc_RNA (1)...(19): siRNA sense strand
cagggagccuuggacuuua

SEQ ID NO: 1669290 - RNA, 19 nt, Homo sapiens
  misc_RNA (1)...(19): siRNA sense strand
gaagaacugcugggcauau

SEQ ID NO: 1669291 - RNA, 19 nt, Homo sapiens
  misc_RNA (1)...(19): siRNA sense strand
gugcgggacugcaagaguu

SEQ ID NO: 1669292 - RNA, 19 nt, Homo sapiens
  misc_RNA (1)...(19): siRNA sense strand
gaugagcaaucaggagguu

SEQ ID NO: 1669293 - RNA, 19 nt, Homo sapiens
  misc_RNA (1)...(19): siRNA sense strand
agaaacaucuuggugaauc

SEQ ID NO: 1669294 - RNA, 19 nt, Homo sapiens
  misc_RNA (1)...(19): siRNA sense strand
gagugaacagcaacagaua

SEQ ID NO: 1669295 - RNA, 19 nt, Homo sapiens
  misc_RNA (1)...(19): siRNA sense strand
ggagugaacagcaacagau

SEQ ID NO: 1669296 - RNA, 19 nt, Homo sapiens
  misc_RNA (1)...(19): siRNA sense strand
ugagacuggugaagaaaga

SEQ ID NO: 1669297 - RNA, 19 nt, Homo sapiens
  misc_RNA (1)...(19): siRNA sense strand
ccaacuacaccuuuaaugu

SEQ ID NO: 1669298 - RNA, 19 nt, Homo sapiens
  misc_RNA (1)...(19): siRNA sense strand
uaugccaacuacaccuuua

SEQ ID NO: 1669299 - RNA, 19 nt, Homo sapiens
  misc_RNA (1)...(19): siRNA sense strand
cagaauuuauggagaaugg

SEQ ID NO: 1669300 - RNA, 19 nt, Homo sapiens
  misc_RNA (1)...(19): siRNA sense strand
gcugcaaggugucugacuu

SEQ ID NO: 1669301 - RNA, 19 nt, Homo sapiens
  misc_RNA (1)...(19): siRNA sense strand
gcggaccauugccaacuuu

SEQ ID NO: 1669302 - RNA, 19 nt, Homo sapiens
  misc_RNA (1)...(19): siRNA sense strand
guguggagcuuugggauug

SEQ ID NO: 1669303 - RNA, 19 nt, Homo sapiens
  misc_RNA (1)...(19): siRNA sense strand
uggaaggcgucgucacaaa

SEQ ID NO: 1669304 - RNA, 19 nt, Homo sapiens
  misc_RNA (1)...(19): siRNA sense strand
aaagauggguggagugaac

SEQ ID NO: 1669305 - RNA, 19 nt, Homo sapiens
  misc_RNA (1)...(19): siRNA sense strand
gcaugaacuaccucaguaa

SEQ ID NO: 1669306 - RNA, 19 nt, Homo sapiens
  misc_RNA (1)...(19): siRNA sense strand
acagggagccuuggacuuu

SEQ ID NO: 1669307 - RNA, 19 nt, Homo sapiens
  misc_RNA (1)...(19): siRNA sense strand
gcgcauucuuugcaguauu

SEQ ID NO: 1669308 - RNA, 19 nt, Homo sapiens
  misc_RNA (1)...(19): siRNA sense strand
cauagcaucuggcaugaac

SEQ ID NO: 1669309 - RNA, 19 nt, Homo sapiens
  misc_RNA (1)...(19): siRNA sense strand
ugacuuugauggcacauac

SEQ ID NO: 1669310 - RNA, 19 nt, Homo sapiens
  misc_RNA (1)...(19): siRNA sense strand
ugagagcggccauuacaga

SEQ ID NO: 1669311 - RNA, 19 nt, Homo sapiens
  misc_RNA (1)...(19): siRNA sense strand
cagaugggaucccguaucg

SEQ ID NO: 1669312 - RNA, 19 nt, Homo sapiens
  misc_RNA (1)...(19): siRNA sense strand
ggaccauugccaacuuuga

SEQ ID NO: 1669313 - RNA, 19 nt, Homo sapiens
  misc_RNA (1)...(19): siRNA sense strand
gcuuugggauugugaugug

SEQ ID NO: 1669314 - RNA, 19 nt, Homo sapiens
  misc_RNA (1)...(19): siRNA sense strand
caguuuagccacccgcaua

SEQ ID NO: 1669315 - RNA, 19 nt, Homo sapiens
  misc_RNA (1)...(19): siRNA sense strand
gauacagugugagguguuc

SEQ ID NO: 1669316 - RNA, 19 nt, Homo sapiens
  misc_RNA (1)...(19): siRNA sense strand
caauggccuugaaccuuau

SEQ ID NO: 1669317 - RNA, 19 nt, Homo sapiens
  misc_RNA (1)...(19): siRNA sense strand
ggaaggcgucgucacaaag

SEQ ID NO: 1669318 - RNA, 19 nt, Homo sapiens
  misc_RNA (1)...(19): siRNA sense strand
cuaccucgcuuuccacaac

SEQ ID NO: 1669319 - RNA, 19 nt, Homo sapiens
  misc_RNA (1)...(19): siRNA sense strand
gagguuaugaagagcauug

SEQ ID NO: 1669320 - RNA, 19 nt, Homo sapiens
  misc_RNA (1)...(19): siRNA sense strand
guaccaggacugcccaaug

SEQ ID NO: 1669321 - RNA, 19 nt, Homo sapiens
  misc_RNA (1)...(19): siRNA sense strand
ggcauagcaucuggcauga

SEQ ID NO: 1669322 - RNA, 19 nt, Homo sapiens
  misc_RNA (1)...(19): siRNA sense strand
gcugaaccaggaugaagaa

SEQ ID NO: 1669323 - RNA, 19 nt, Homo sapiens
  misc_RNA (1)...(19): siRNA sense strand
uagcaucuggcaugaacua

SEQ ID NO: 1669324 - RNA, 19 nt, Homo sapiens
  misc_RNA (1)...(19): siRNA sense strand
uaccaggacugcccaaugc

SEQ ID NO: 1669325 - RNA, 19 nt, Homo sapiens
  misc_RNA (1)...(19): siRNA sense strand
cugaggaccugacgcagau

SEQ ID NO: 1669326 - RNA, 19 nt, Homo sapiens
  misc_RNA (1)...(19): siRNA sense strand
aagcgaaagccgaucauga

SEQ ID NO: 1669327 - RNA, 19 nt, Homo sapiens
  misc_RNA (1)...(19): siRNA sense strand
ugaagaacgguaccagaug

SEQ ID NO: 1669328 - RNA, 19 nt, Homo sapiens
  misc_RNA (1)...(19): siRNA sense strand
gccaaggaaguuacucuga

SEQ ID NO: 1669329 - RNA, 19 nt, Homo sapiens
  misc_RNA (1)...(19): siRNA sense strand
ugaccaggaugugggcauu

SEQ ID NO: 1669330 - RNA, 19 nt, Homo sapiens
  misc_RNA (1)...(19): siRNA sense strand
ccacuggcuucgcuccaau

SEQ ID NO: 1669331 - RNA, 19 nt, Homo sapiens
  misc_RNA (1)...(19): siRNA sense strand
gcaugcagagucacuguca

SEQ ID NO: 1669332 - RNA, 19 nt, Homo sapiens
  misc_RNA (1)...(19): siRNA sense strand
cuacaccuuuaauguggaa

SEQ ID NO: 1669333 - RNA, 19 nt, Homo sapiens
  misc_RNA (1)...(19): siRNA sense strand
cagcaacagauacugaaug

SEQ ID NO: 1669334 - RNA, 19 nt, Homo sapiens
  misc_RNA (1)...(19): siRNA sense strand
ugugggaggugcugagcuu

SEQ ID NO: 1669335 - RNA, 19 nt, Homo sapiens
  misc_RNA (1)...(19): siRNA sense strand
cugcaagacuguggccauu

SEQ ID NO: 1669336 - RNA, 19 nt, Homo sapiens
  misc_RNA (1)...(19): siRNA sense strand
gacgccaggaugucagaua

SEQ ID NO: 1669337 - RNA, 19 nt, Homo sapiens
  misc_RNA (1)...(19): siRNA sense strand
cgcauucuuugcaguauuc

SEQ ID NO: 1669338 - RNA, 19 nt, Homo sapiens
  misc_RNA (1)...(19): siRNA sense strand
gggaggugcugagcuuugg

SEQ ID NO: 1669339 - RNA, 19 nt, Homo sapiens
  misc_RNA (1)...(19): siRNA sense strand
gcaaggacgcagagacacu

SEQ ID NO: 1669340 - RNA, 19 nt, Homo sapiens
  misc_RNA (1)...(19): siRNA sense strand
gcaaggugucugacuuugg

SEQ ID NO: 1669341 - RNA, 19 nt, Homo sapiens
  misc_RNA (1)...(19): siRNA sense strand
cuaccucaguaaucacaau

SEQ ID NO: 1669342 - RNA, 19 nt, Homo sapiens
  misc_RNA (1)...(19): siRNA sense strand
ccugugagagcggccauua

SEQ ID NO: 1669343 - RNA, 19 nt, Homo sapiens
  misc_RNA (1)...(19): siRNA sense strand
ccuccuggaugacuuugau

SEQ ID NO: 1669344 - RNA, 19 nt, Homo sapiens
  misc_RNA (1)...(19): siRNA sense strand
ugugagguguucccagugu

SEQ ID NO: 1669345 - RNA, 19 nt, Homo sapiens
  misc_RNA (1)...(19): siRNA sense strand
gaacugcugggcauaugac

SEQ ID NO: 1669346 - RNA, 19 nt, Homo sapiens
  misc_RNA (1)...(19): siRNA sense strand
cauggagagugaccaggau

SEQ ID NO: 1669347 - RNA, 19 nt, Homo sapiens
  misc_RNA (1)...(19): siRNA sense strand
ggacugcccaaugcaagga

SEQ ID NO: 1669348 - RNA, 19 nt, Homo sapiens
  misc_RNA (1)...(19): siRNA sense strand
ucaaccuucuguacaugga

SEQ ID NO: 1669349 - RNA, 19 nt, Homo sapiens
  misc_RNA (1)...(19): siRNA sense strand
ggacuuuacccgggagcuu

SEQ ID NO: 1669350 - RNA, 19 nt, Homo sapiens
  misc_RNA (1)...(19): siRNA sense strand
cugaguggcucgaguccau

SEQ ID NO: 1669351 - RNA, 19 nt, Homo sapiens
  misc_RNA (1)...(19): siRNA sense strand
aagaacugcugggcauaug

SEQ ID NO: 1669352 - RNA, 19 nt, Homo sapiens
  misc_RNA (1)...(19): siRNA sense strand
ggagaauggagcccuggau

SEQ ID NO: 1669353 - RNA, 19 nt, Homo sapiens
  misc_RNA (1)...(19): siRNA sense strand
guguggcccuggugucugu

SEQ ID NO: 1669354 - RNA, 19 nt, Homo sapiens
  misc_RNA (1)...(19): siRNA sense strand
uaucgaaccgucucugagu

SEQ ID NO: 1669355 - RNA, 19 nt, Homo sapiens
  misc_RNA (1)...(19): siRNA sense strand
ugagcaaucaggagguuau

SEQ ID NO: 1669356 - RNA, 19 nt, Homo sapiens
  misc_RNA (1)...(19): siRNA sense strand
ggaggaaagaucccuaucc

SEQ ID NO: 1669357 - RNA, 19 nt, Homo sapiens
  misc_RNA (1)...(19): siRNA sense strand
ccuucaaccuucuguacau

SEQ ID NO: 1669358 - RNA, 19 nt, Homo sapiens
  misc_RNA (1)...(19): siRNA sense strand
guccugagacccugaaugg

SEQ ID NO: 1669359 - RNA, 19 nt, Homo sapiens
  misc_RNA (1)...(19): siRNA sense strand
ggagagugaccaggaugug

SEQ ID NO: 1669360 - RNA, 19 nt, Homo sapiens
  misc_RNA (1)...(19): siRNA sense strand
aggcacaucuggagcaacu

SEQ ID NO: 1669361 - RNA, 19 nt, Homo sapiens
  misc_RNA (1)...(19): siRNA sense strand
gaaacccagggaggaaaga

SEQ ID NO: 1669362 - RNA, 19 nt, Homo sapiens
  misc_RNA (1)...(19): siRNA sense strand
caugaacuaccucaguaau

SEQ ID NO: 1669363 - RNA, 19 nt, Homo sapiens
  misc_RNA (1)...(19): siRNA sense strand
gaaggcgucgucacaaagc

SEQ ID NO: 1669364 - RNA, 19 nt, Homo sapiens
  misc_RNA (1)...(19): siRNA sense strand
aggacaagcuguggcugaa

SEQ ID NO: 1669365 - RNA, 19 nt, Homo sapiens
  misc_RNA (1)...(19): siRNA sense strand
ccagggucuugcugacaga

SEQ ID NO: 1669366 - RNA, 19 nt, Homo sapiens
  misc_RNA (1)...(19): siRNA sense strand
gaccuucaaccuucuguac

SEQ ID NO: 1669367 - RNA, 19 nt, Homo sapiens
  misc_RNA (1)...(19): siRNA sense strand
gaacgaagguguaaaucua

SEQ ID NO: 1669368 - RNA, 19 nt, Homo sapiens
  misc_RNA (1)...(19): siRNA sense strand
gcaguacccugugcaaaua

SEQ ID NO: 1669369 - RNA, 19 nt, Homo sapiens
  misc_RNA (1)...(19): siRNA sense strand
gaaaggcuguuguucauca

SEQ ID NO: 1669370 - RNA, 19 nt, Homo sapiens
  misc_RNA (1)...(19): siRNA sense strand
gaugaagcguuucuuguuu

SEQ ID NO: 1669371 - RNA, 19 nt, Homo sapiens
  misc_RNA (1)...(19): siRNA sense strand
ggaaagaguuguccugaag

SEQ ID NO: 1669372 - RNA, 19 nt, Homo sapiens
  misc_RNA (1)...(19): siRNA sense strand
caagaaauuucacaagcua

SEQ ID NO: 1669373 - RNA, 19 nt, Homo sapiens
  misc_RNA (1)...(19): siRNA sense strand
caagaaauuucacaagcua

SEQ ID NO: 1669374 - RNA, 19 nt, Homo sapiens
  misc_RNA (1)...(19): siRNA sense strand
acacaaagcucugcaaaga

SEQ ID NO: 1669375 - RNA, 19 nt, Homo sapiens
  misc_RNA (1)...(19): siRNA sense strand
cagagaagcucaagucaga

SEQ ID NO: 1669376 - RNA, 19 nt, Homo sapiens
  misc_RNA (1)...(19): siRNA sense strand
gaaaagacauucaccagaa

SEQ ID NO: 1669377 - RNA, 19 nt, Homo sapiens
  misc_RNA (1)...(19): siRNA sense strand
gcacccaccugaaggaaga

SEQ ID NO: 1669378 - RNA, 19 nt, Homo sapiens
  misc_RNA (1)...(19): siRNA sense strand
gaagaucucccaaauccuu

SEQ ID NO: 1669379 - RNA, 19 nt, Homo sapiens
  misc_RNA (1)...(19): siRNA sense strand
gcucuguccucaacaauga

SEQ ID NO: 1669380 - RNA, 19 nt, Homo sapiens
  misc_RNA (1)...(19): siRNA sense strand
gagagucuguccuguguga

SEQ ID NO: 1669381 - RNA, 19 nt, Homo sapiens
  misc_RNA (1)...(19): siRNA sense strand
auacagacccugauguuua

SEQ ID NO: 1669382 - RNA, 19 nt, Homo sapiens
  misc_RNA (1)...(19): siRNA sense strand
gacagaagaacaagaaauu

SEQ ID NO: 1669383 - RNA, 19 nt, Homo sapiens
  misc_RNA (1)...(19): siRNA sense strand
gcacgccgcuuuuguguuu

SEQ ID NO: 1669384 - RNA, 19 nt, Homo sapiens
  misc_RNA (1)...(19): siRNA sense strand
uaacuucagucccaaagga

SEQ ID NO: 1669385 - RNA, 19 nt, Homo sapiens
  misc_RNA (1)...(19): siRNA sense strand
gaauaggaagucaguguuu

SEQ ID NO: 1669386 - RNA, 19 nt, Homo sapiens
  misc_RNA (1)...(19): siRNA sense strand
gcacggaaagucaggaauu

SEQ ID NO: 1669387 - RNA, 19 nt, Homo sapiens
  misc_RNA (1)...(19): siRNA sense strand
uaaaccuggugcagaauaa

SEQ ID NO: 1669388 - RNA, 19 nt, Homo sapiens
  misc_RNA (1)...(19): siRNA sense strand
gggauaagacccucauuga

SEQ ID NO: 1669389 - RNA, 19 nt, Homo sapiens
  misc_RNA (1)...(19): siRNA sense strand
gcacagagaagcucaaguc

SEQ ID NO: 1669390 - RNA, 19 nt, Homo sapiens
  misc_RNA (1)...(19): siRNA sense strand
gaucaugucccgaccagaa

SEQ ID NO: 1669391 - RNA, 19 nt, Homo sapiens
  misc_RNA (1)...(19): siRNA sense strand
cagaaaggcuguuguucau

SEQ ID NO: 1669392 - RNA, 19 nt, Homo sapiens
  misc_RNA (1)...(19): siRNA sense strand
gaacaagaaauuucacaag

SEQ ID NO: 1669393 - RNA, 19 nt, Homo sapiens
  misc_RNA (1)...(19): siRNA sense strand
ggaagacaauggcgugaag

SEQ ID NO: 1669394 - RNA, 19 nt, Homo sapiens
  misc_RNA (1)...(19): siRNA sense strand
gauggcgugugaagccuua

SEQ ID NO: 1669395 - RNA, 19 nt, Homo sapiens
  misc_RNA (1)...(19): siRNA sense strand
ggaugaagcguuucuuguu

SEQ ID NO: 1669396 - RNA, 19 nt, Homo sapiens
  misc_RNA (1)...(19): siRNA sense strand
gaacaagaaauuucacaag

SEQ ID NO: 1669397 - RNA, 19 nt, Homo sapiens
  misc_RNA (1)...(19): siRNA sense strand
guuuagaaaugcacagauu

SEQ ID NO: 1669398 - RNA, 19 nt, Homo sapiens
  misc_RNA (1)...(19): siRNA sense strand
cauguggacugacuucuga

SEQ ID NO: 1669399 - RNA, 19 nt, Homo sapiens
  misc_RNA (1)...(19): siRNA sense strand
gguccuacuugcucuauau

SEQ ID NO: 1669400 - RNA, 19 nt, Homo sapiens
  misc_RNA (1)...(19): siRNA sense strand
caagauggaaggagacaaa

SEQ ID NO: 1669401 - RNA, 19 nt, Homo sapiens
  misc_RNA (1)...(19): siRNA sense strand
ccuaagaucccucaacuug

SEQ ID NO: 1669402 - RNA, 19 nt, Homo sapiens
  misc_RNA (1)...(19): siRNA sense strand
agacaaaucgcucaccuuu

SEQ ID NO: 1669403 - RNA, 19 nt, Homo sapiens
  misc_RNA (1)...(19): siRNA sense strand
gcaauggugucucuaugag

SEQ ID NO: 1669404 - RNA, 19 nt, Homo sapiens
  misc_RNA (1)...(19): siRNA sense strand
uaauugggcuguggaaaug

SEQ ID NO: 1669405 - RNA, 19 nt, Homo sapiens
  misc_RNA (1)...(19): siRNA sense strand
cuacaagagucacgugaug

SEQ ID NO: 1669406 - RNA, 19 nt, Homo sapiens
  misc_RNA (1)...(19): siRNA sense strand
ggaagcugcuggaggaagu

SEQ ID NO: 1669407 - RNA, 19 nt, Homo sapiens
  misc_RNA (1)...(19): siRNA sense strand
gcaugaacccuguggaaga

SEQ ID NO: 1669408 - RNA, 19 nt, Homo sapiens
  misc_RNA (1)...(19): siRNA sense strand
gaaggaagaggauguaagg

SEQ ID NO: 1669409 - RNA, 19 nt, Homo sapiens
  misc_RNA (1)...(19): siRNA sense strand
gcacugggucucucuguug

SEQ ID NO: 1669410 - RNA, 19 nt, Homo sapiens
  misc_RNA (1)...(19): siRNA sense strand
caccugagccuuagcauga

SEQ ID NO: 1669411 - RNA, 19 nt, Homo sapiens
  misc_RNA (1)...(19): siRNA sense strand
gcuagacaaggaagaauuu

SEQ ID NO: 1669412 - RNA, 19 nt, Homo sapiens
  misc_RNA (1)...(19): siRNA sense strand
gaagcuguguucggccuuu

SEQ ID NO: 1669413 - RNA, 19 nt, Homo sapiens
  misc_RNA (1)...(19): siRNA sense strand
aaguguggcuuccgauuaa

SEQ ID NO: 1669414 - RNA, 19 nt, Homo sapiens
  misc_RNA (1)...(19): siRNA sense strand
gagggaguguggaauagga

SEQ ID NO: 1669415 - RNA, 19 nt, Homo sapiens
  misc_RNA (1)...(19): siRNA sense strand
gcaaagacugggcugagaa

SEQ ID NO: 1669416 - RNA, 19 nt, Homo sapiens
  misc_RNA (1)...(19): siRNA sense strand
ggccggaaaugcaaacguu

SEQ ID NO: 1669417 - RNA, 19 nt, Homo sapiens
  misc_RNA (1)...(19): siRNA sense strand
gauugacccaugccuguua

SEQ ID NO: 1669418 - RNA, 19 nt, Homo sapiens
  misc_RNA (1)...(19): siRNA sense strand
gaggagcagugggaagauu

SEQ ID NO: 1669419 - RNA, 19 nt, Homo sapiens
  misc_RNA (1)...(19): siRNA sense strand
aggaagaauuucagacauu

SEQ ID NO: 1669420 - RNA, 19 nt, Homo sapiens
  misc_RNA (1)...(19): siRNA sense strand
gaaggcauguggacugacu

SEQ ID NO: 1669421 - RNA, 19 nt, Homo sapiens
  misc_RNA (1)...(19): siRNA sense strand
cacaagcuauggaacaaga

SEQ ID NO: 1669422 - RNA, 19 nt, Homo sapiens
  misc_RNA (1)...(19): siRNA sense strand
ccaaaggaaugaugaagcu

SEQ ID NO: 1669423 - RNA, 19 nt, Homo sapiens
  misc_RNA (1)...(19): siRNA sense strand
gaguaaugccucucaguga

SEQ ID NO: 1669424 - RNA, 19 nt, Homo sapiens
  misc_RNA (1)...(19): siRNA sense strand
gcagcagcauccugacaga

SEQ ID NO: 1669425 - RNA, 19 nt, Homo sapiens
  misc_RNA (1)...(19): siRNA sense strand
ggaauaggaagucaguguu

SEQ ID NO: 1669426 - RNA, 19 nt, Homo sapiens
  misc_RNA (1)...(19): siRNA sense strand
ccagaaaggcuguuguuca

SEQ ID NO: 1669427 - RNA, 19 nt, Homo sapiens
  misc_RNA (1)...(19): siRNA sense strand
cacaagcuauggaacaaga

SEQ ID NO: 1669428 - RNA, 19 nt, Homo sapiens
  misc_RNA (1)...(19): siRNA sense strand
gugagagucuguccugugu

SEQ ID NO: 1669429 - RNA, 19 nt, Homo sapiens
  misc_RNA (1)...(19): siRNA sense strand
gcacucuccuuggcccuuu

SEQ ID NO: 1669430 - RNA, 19 nt, Homo sapiens
  misc_RNA (1)...(19): siRNA sense strand
ggcacgggaugacaugaaa

SEQ ID NO: 1669431 - RNA, 19 nt, Homo sapiens
  misc_RNA (1)...(19): siRNA sense strand
cacuugcgcuuauggguaa

SEQ ID NO: 1669432 - RNA, 19 nt, Homo sapiens
  misc_RNA (1)...(19): siRNA sense strand
acaaagcucugcaaagacu

SEQ ID NO: 1669433 - RNA, 19 nt, Homo sapiens
  misc_RNA (1)...(19): siRNA sense strand
caaggaagaauuucagaca

SEQ ID NO: 1669434 - RNA, 19 nt, Homo sapiens
  misc_RNA (1)...(19): siRNA sense strand
gacgguaguuggcauucuu

SEQ ID NO: 1669435 - RNA, 19 nt, Homo sapiens
  misc_RNA (1)...(19): siRNA sense strand
guaaaucuacugugucgau

SEQ ID NO: 1669436 - RNA, 19 nt, Homo sapiens
  misc_RNA (1)...(19): siRNA sense strand
ggccaaccguaaccuaaga

SEQ ID NO: 1669437 - RNA, 19 nt, Homo sapiens
  misc_RNA (1)...(19): siRNA sense strand
gauacagacccugauguuu

SEQ ID NO: 1669438 - RNA, 19 nt, Homo sapiens
  misc_RNA (1)...(19): siRNA sense strand
cagaagaacaagaaauuuc

SEQ ID NO: 1669439 - RNA, 19 nt, Homo sapiens
  misc_RNA (1)...(19): siRNA sense strand
uuucgagacucaagacaaa

SEQ ID NO: 1669440 - RNA, 19 nt, Homo sapiens
  misc_RNA (1)...(19): siRNA sense strand
gucuaaaccuggugcagaa

SEQ ID NO: 1669441 - RNA, 19 nt, Homo sapiens
  misc_RNA (1)...(19): siRNA sense strand
gcaggaggacuugaacuug

SEQ ID NO: 1669442 - RNA, 19 nt, Homo sapiens
  misc_RNA (1)...(19): siRNA sense strand
ugagagaaccaucuuguca

SEQ ID NO: 1669443 - RNA, 19 nt, Homo sapiens
  misc_RNA (1)...(19): siRNA sense strand
acaaaucgcucaccuuuuc

SEQ ID NO: 1669444 - RNA, 19 nt, Homo sapiens
  misc_RNA (1)...(19): siRNA sense strand
aaacaggcaggcuuccaua

SEQ ID NO: 1669445 - RNA, 19 nt, Homo sapiens
  misc_RNA (1)...(19): siRNA sense strand
gaauccacuugcuccuuga

SEQ ID NO: 1669446 - RNA, 19 nt, Homo sapiens
  misc_RNA (1)...(19): siRNA sense strand
ggaacaaagaauccacuug

SEQ ID NO: 1669447 - RNA, 19 nt, Homo sapiens
  misc_RNA (1)...(19): siRNA sense strand
ggaagaaggagagcagugu

SEQ ID NO: 1669448 - RNA, 19 nt, Homo sapiens
  misc_RNA (1)...(19): siRNA sense strand
ccucagcccucgucagcaa

SEQ ID NO: 1669449 - RNA, 19 nt, Homo sapiens
  misc_RNA (1)...(19): siRNA sense strand
agagguccauggagcuuaa

SEQ ID NO: 1669450 - RNA, 19 nt, Homo sapiens
  misc_RNA (1)...(19): siRNA sense strand
gugacgaccucaugguuca

SEQ ID NO: 1669451 - RNA, 19 nt, Homo sapiens
  misc_RNA (1)...(19): siRNA sense strand
gaaucgaccacaugcucua

SEQ ID NO: 1669452 - RNA, 19 nt, Homo sapiens
  misc_RNA (1)...(19): siRNA sense strand
acgucuaacuuacagauaa

SEQ ID NO: 1669453 - RNA, 19 nt, Homo sapiens
  misc_RNA (1)...(19): siRNA sense strand
gaagguugcaggaggacuu

SEQ ID NO: 1669454 - RNA, 19 nt, Homo sapiens
  misc_RNA (1)...(19): siRNA sense strand
ggaacgaagguguaaaucu

SEQ ID NO: 1669455 - RNA, 19 nt, Homo sapiens
  misc_RNA (1)...(19): siRNA sense strand
gaccagaaaggcuguuguu

SEQ ID NO: 1669456 - RNA, 19 nt, Homo sapiens
  misc_RNA (1)...(19): siRNA sense strand
uccauuagcaucuuugaaa

SEQ ID NO: 1669457 - RNA, 19 nt, Homo sapiens
  misc_RNA (1)...(19): siRNA sense strand
ggaaugaugaagcuguguu

SEQ ID NO: 1669458 - RNA, 19 nt, Homo sapiens
  misc_RNA (1)...(19): siRNA sense strand
agagaaccaucuugucauc

SEQ ID NO: 1669459 - RNA, 19 nt, Homo sapiens
  misc_RNA (1)...(19): siRNA sense strand
uacagacccugauguuuag

SEQ ID NO: 1669460 - RNA, 19 nt, Homo sapiens
  misc_RNA (1)...(19): siRNA sense strand
gcaucccaccugcaagaua

SEQ ID NO: 1669461 - RNA, 19 nt, Homo sapiens
  misc_RNA (1)...(19): siRNA sense strand
ccucaacaaugacacaaag

SEQ ID NO: 1669462 - RNA, 19 nt, Homo sapiens
  misc_RNA (1)...(19): siRNA sense strand
ccacagcugcagagacaaa

SEQ ID NO: 1669463 - RNA, 19 nt, Homo sapiens
  misc_RNA (1)...(19): siRNA sense strand
gcucuauauuaccaaagaa

SEQ ID NO: 1669464 - RNA, 19 nt, Homo sapiens
  misc_RNA (1)...(19): siRNA sense strand
ggcaguacccugugcaaau

SEQ ID NO: 1669465 - RNA, 19 nt, Homo sapiens
  misc_RNA (1)...(19): siRNA sense strand
gaauaacuucagucccaaa

SEQ ID NO: 1669466 - RNA, 19 nt, Homo sapiens
  misc_RNA (1)...(19): siRNA sense strand
gcgagggacugaagcaaaa

SEQ ID NO: 1669467 - RNA, 19 nt, Homo sapiens
  misc_RNA (1)...(19): siRNA sense strand
ggagggaucuggcaacuug

SEQ ID NO: 1669468 - RNA, 19 nt, Homo sapiens
  misc_RNA (1)...(19): siRNA sense strand
gcagcaaggugcacgaauu

SEQ ID NO: 1669469 - RNA, 19 nt, Homo sapiens
  misc_RNA (1)...(19): siRNA sense strand
ggagaaggauggcgaguuc

SEQ ID NO: 1669470 - RNA, 19 nt, Homo sapiens
  misc_RNA (1)...(19): siRNA sense strand
gaucggagcaggagaguuu

SEQ ID NO: 1669471 - RNA, 19 nt, Homo sapiens
  misc_RNA (1)...(19): siRNA sense strand
gaucaucacugaguacaug

SEQ ID NO: 1669472 - RNA, 19 nt, Homo sapiens
  misc_RNA (1)...(19): siRNA sense strand
ugaaugacaugccgaucua

SEQ ID NO: 1669473 - RNA, 19 nt, Homo sapiens
  misc_RNA (1)...(19): siRNA sense strand
gaaguucacuaccgagauc

SEQ ID NO: 1669474 - RNA, 19 nt, Homo sapiens
  misc_RNA (1)...(19): siRNA sense strand
ggaguuggcuucuuuaucc

SEQ ID NO: 1669475 - RNA, 19 nt, Homo sapiens
  misc_RNA (1)...(19): siRNA sense strand
ggcaggaguuggcuucuuu

SEQ ID NO: 1669476 - RNA, 19 nt, Homo sapiens
  misc_RNA (1)...(19): siRNA sense strand
ggugggaccugaugcagaa

SEQ ID NO: 1669477 - RNA, 19 nt, Homo sapiens
  misc_RNA (1)...(19): siRNA sense strand
ugaaguaccuggccaacau

SEQ ID NO: 1669478 - RNA, 19 nt, Homo sapiens
  misc_RNA (1)...(19): siRNA sense strand
gcugaaagccggcuacaca

SEQ ID NO: 1669479 - RNA, 19 nt, Homo sapiens
  misc_RNA (1)...(19): siRNA sense strand
ucaagacccuggcugacuu

SEQ ID NO: 1669480 - RNA, 19 nt, Homo sapiens
  misc_RNA (1)...(19): siRNA sense strand
caucgcagcuggcaugaag

SEQ ID NO: 1669481 - RNA, 19 nt, Homo sapiens
  misc_RNA (1)...(19): siRNA sense strand
gagaagguggugcagauga

SEQ ID NO: 1669482 - RNA, 19 nt, Homo sapiens
  misc_RNA (1)...(19): siRNA sense strand
gcaaggagacuuucaaccu

SEQ ID NO: 1669483 - RNA, 19 nt, Homo sapiens
  misc_RNA (1)...(19): siRNA sense strand
ggacuacggcaccaacuuc

SEQ ID NO: 1669484 - RNA, 19 nt, Homo sapiens
  misc_RNA (1)...(19): siRNA sense strand
ucaccaagauugacaccau

SEQ ID NO: 1669485 - RNA, 19 nt, Homo sapiens
  misc_RNA (1)...(19): siRNA sense strand
guguggagcuuuggcauug

SEQ ID NO: 1669486 - RNA, 19 nt, Homo sapiens
  misc_RNA (1)...(19): siRNA sense strand
gcaggaguuggcuucuuua

SEQ ID NO: 1669487 - RNA, 19 nt, Homo sapiens
  misc_RNA (1)...(19): siRNA sense strand
gcagggcaaggaaguggua

SEQ ID NO: 1669488 - RNA, 19 nt, Homo sapiens
  misc_RNA (1)...(19): siRNA sense strand
caaauacaagcccaugaug

SEQ ID NO: 1669489 - RNA, 19 nt, Homo sapiens
  misc_RNA (1)...(19): siRNA sense strand
gcaacauccucgucaacag

SEQ ID NO: 1669490 - RNA, 19 nt, Homo sapiens
  misc_RNA (1)...(19): siRNA sense strand
caccaagauugacaccauu

SEQ ID NO: 1669491 - RNA, 19 nt, Homo sapiens
  misc_RNA (1)...(19): siRNA sense strand
ccaaauacaagcccaugau

SEQ ID NO: 1669492 - RNA, 19 nt, Homo sapiens
  misc_RNA (1)...(19): siRNA sense strand
ugaagccccugaagacaua

SEQ ID NO: 1669493 - RNA, 19 nt, Homo sapiens
  misc_RNA (1)...(19): siRNA sense strand
ucgagaagguggugcagau

SEQ ID NO: 1669494 - RNA, 19 nt, Homo sapiens
  misc_RNA (1)...(19): siRNA sense strand
acagcaaccuggucugcaa

SEQ ID NO: 1669495 - RNA, 19 nt, Homo sapiens
  misc_RNA (1)...(19): siRNA sense strand
ggcgucaucuccaaauaca

SEQ ID NO: 1669496 - RNA, 19 nt, Homo sapiens
  misc_RNA (1)...(19): siRNA sense strand
aaauacaagcccaugauga

SEQ ID NO: 1669497 - RNA, 19 nt, Homo sapiens
  misc_RNA (1)...(19): siRNA sense strand
gaccaacgacgacaucaag

SEQ ID NO: 1669498 - RNA, 19 nt, Homo sapiens
  misc_RNA (1)...(19): siRNA sense strand
agaagcgccuguucaccaa

SEQ ID NO: 1669499 - RNA, 19 nt, Homo sapiens
  misc_RNA (1)...(19): siRNA sense strand
ucacugaguacauggagaa

SEQ ID NO: 1669500 - RNA, 19 nt, Homo sapiens
  misc_RNA (1)...(19): siRNA sense strand
caccuucccuggccacugu

SEQ ID NO: 1669501 - RNA, 19 nt, Homo sapiens
  misc_RNA (1)...(19): siRNA sense strand
guccgugucuacuacaaga

SEQ ID NO: 1669502 - RNA, 19 nt, Homo sapiens
  misc_RNA (1)...(19): siRNA sense strand
cugaguacauggagaaugg

SEQ ID NO: 1669503 - RNA, 19 nt, Homo sapiens
  misc_RNA (1)...(19): siRNA sense strand
gaggucacuuaccgcaaga

SEQ ID NO: 1669504 - RNA, 19 nt, Homo sapiens
  misc_RNA (1)...(19): siRNA sense strand
gaaguaccuggccaacaug

SEQ ID NO: 1669505 - RNA, 19 nt, Homo sapiens
  misc_RNA (1)...(19): siRNA sense strand
caaagggugggaccugaug

SEQ ID NO: 1669506 - RNA, 19 nt, Homo sapiens
  misc_RNA (1)...(19): siRNA sense strand
gacgacaucaagaggauug

SEQ ID NO: 1669507 - RNA, 19 nt, Homo sapiens
  misc_RNA (1)...(19): siRNA sense strand
gacccuggcugacuuugac

SEQ ID NO: 1669508 - RNA, 19 nt, Homo sapiens
  misc_RNA (1)...(19): siRNA sense strand
aaagccggcuacacagaga

SEQ ID NO: 1669509 - RNA, 19 nt, Homo sapiens
  misc_RNA (1)...(19): siRNA sense strand
ggccugcucgccuggauuu

SEQ ID NO: 1669510 - RNA, 19 nt, Homo sapiens
  misc_RNA (1)...(19): siRNA sense strand
cagcaaggugcacgaauuc

SEQ ID NO: 1669511 - RNA, 19 nt, Homo sapiens
  misc_RNA (1)...(19): siRNA sense strand
acacugccaucgagaaggu

SEQ ID NO: 1669512 - RNA, 19 nt, Homo sapiens
  misc_RNA (1)...(19): siRNA sense strand
uacaagggcaugcugaaga

SEQ ID NO: 1669513 - RNA, 19 nt, Homo sapiens
  misc_RNA (1)...(19): siRNA sense strand
aauacaagcccaugaugau

SEQ ID NO: 1669514 - RNA, 19 nt, Homo sapiens
  misc_RNA (1)...(19): siRNA sense strand
gcaaagggugggaccugau

SEQ ID NO: 1669515 - RNA, 19 nt, Homo sapiens
  misc_RNA (1)...(19): siRNA sense strand
caaccacgaggugaugaaa

SEQ ID NO: 1669516 - RNA, 19 nt, Homo sapiens
  misc_RNA (1)...(19): siRNA sense strand
gagcuuuggcauugucaug

SEQ ID NO: 1669517 - RNA, 19 nt, Homo sapiens
  misc_RNA (1)...(19): siRNA sense strand
acaaguuccuucgggagaa

SEQ ID NO: 1669518 - RNA, 19 nt, Homo sapiens
  misc_RNA (1)...(19): siRNA sense strand
ugaaagccggcuacacaga

SEQ ID NO: 1669519 - RNA, 19 nt, Homo sapiens
  misc_RNA (1)...(19): siRNA sense strand
ucaagaugcagcaguauac

SEQ ID NO: 1669520 - RNA, 19 nt, Homo sapiens
  misc_RNA (1)...(19): siRNA sense strand
caagacccuggcugacuuu

SEQ ID NO: 1669521 - RNA, 19 nt, Homo sapiens
  misc_RNA (1)...(19): siRNA sense strand
gcuuuggcauugucaugug

SEQ ID NO: 1669522 - RNA, 19 nt, Homo sapiens
  misc_RNA (1)...(19): siRNA sense strand
acaacuggcuccgcaccaa

SEQ ID NO: 1669523 - RNA, 19 nt, Homo sapiens
  misc_RNA (1)...(19): siRNA sense strand
gcaaggugucugacuuugg

SEQ ID NO: 1669524 - RNA, 19 nt, Homo sapiens
  misc_RNA (1)...(19): siRNA sense strand
gcaaggugcacgaauucca

SEQ ID NO: 1669525 - RNA, 19 nt, Homo sapiens
  misc_RNA (1)...(19): siRNA sense strand
ucuaccagcucaugaugca

SEQ ID NO: 1669526 - RNA, 19 nt, Homo sapiens
  misc_RNA (1)...(19): siRNA sense strand
ucgcagcuggcaugaagua

SEQ ID NO: 1669527 - RNA, 19 nt, Homo sapiens
  misc_RNA (1)...(19): siRNA sense strand
ucugcaaggugucugacuu

SEQ ID NO: 1669528 - RNA, 19 nt, Homo sapiens
  misc_RNA (1)...(19): siRNA sense strand
cggaggacguuuacuucuc

SEQ ID NO: 1669529 - RNA, 19 nt, Homo sapiens
  misc_RNA (1)...(19): siRNA sense strand
gggagaaggauggcgaguu

SEQ ID NO: 1669530 - RNA, 19 nt, Homo sapiens
  misc_RNA (1)...(19): siRNA sense strand
gcaacuuggcggugauugg

SEQ ID NO: 1669531 - RNA, 19 nt, Homo sapiens
  misc_RNA (1)...(19): siRNA sense strand
gacuuucaaccucuacuau

SEQ ID NO: 1669532 - RNA, 19 nt, Homo sapiens
  misc_RNA (1)...(19): siRNA sense strand
acaagggcaugcugaagac

SEQ ID NO: 1669533 - RNA, 19 nt, Homo sapiens
  misc_RNA (1)...(19): siRNA sense strand
caacugaagccccugaaga

SEQ ID NO: 1669534 - RNA, 19 nt, Homo sapiens
  misc_RNA (1)...(19): siRNA sense strand
guauacggagcacuucaug

SEQ ID NO: 1669535 - RNA, 19 nt, Homo sapiens
  misc_RNA (1)...(19): siRNA sense strand
gcuacacugccaucgagaa

SEQ ID NO: 1669536 - RNA, 19 nt, Homo sapiens
  misc_RNA (1)...(19): siRNA sense strand
accaggcuguguugaaguu

SEQ ID NO: 1669537 - RNA, 19 nt, Homo sapiens
  misc_RNA (1)...(19): siRNA sense strand
cugcaaggugucugacuuu

SEQ ID NO: 1669538 - RNA, 19 nt, Homo sapiens
  misc_RNA (1)...(19): siRNA sense strand
augcagaacaucaugaaug

SEQ ID NO: 1669539 - RNA, 19 nt, Homo sapiens
  misc_RNA (1)...(19): siRNA sense strand
guaccuggccaacaugaac

SEQ ID NO: 1669540 - RNA, 19 nt, Homo sapiens
  misc_RNA (1)...(19): siRNA sense strand
aagcgccuguucaccaaga

SEQ ID NO: 1669541 - RNA, 19 nt, Homo sapiens
  misc_RNA (1)...(19): siRNA sense strand
cgucaucuccaaauacaag

SEQ ID NO: 1669542 - RNA, 19 nt, Homo sapiens
  misc_RNA (1)...(19): siRNA sense strand
guucagccaccacaacauc

SEQ ID NO: 1669543 - RNA, 19 nt, Homo sapiens
  misc_RNA (1)...(19): siRNA sense strand
guacaagggcaugcugaag

SEQ ID NO: 1669544 - RNA, 19 nt, Homo sapiens
  misc_RNA (1)...(19): siRNA sense strand
cgcagcaccaccucgcuua

SEQ ID NO: 1669545 - RNA, 19 nt, Homo sapiens
  misc_RNA (1)...(19): siRNA sense strand
ggaaaagccucaaaaugaa

SEQ ID NO: 1669546 - RNA, 19 nt, Homo sapiens
  misc_RNA (1)...(19): siRNA sense strand
gaaggaagaugcaaaagag

SEQ ID NO: 1669547 - RNA, 19 nt, Homo sapiens
  misc_RNA (1)...(19): siRNA sense strand
gaggacagauucaucaaaa

SEQ ID NO: 1669548 - RNA, 19 nt, Homo sapiens
  misc_RNA (1)...(19): siRNA sense strand
agacggaaccucagauuug

SEQ ID NO: 1669549 - RNA, 19 nt, Homo sapiens
  misc_RNA (1)...(19): siRNA sense strand
uaccagacauccagaguuc

SEQ ID NO: 1669550 - RNA, 19 nt, Homo sapiens
  misc_RNA (1)...(19): siRNA sense strand
aaacaacacaagaccaauu

SEQ ID NO: 1669551 - RNA, 19 nt, Homo sapiens
  misc_RNA (1)...(19): siRNA sense strand
cggaaugccuuaccagaca

SEQ ID NO: 1669552 - RNA, 19 nt, Homo sapiens
  misc_RNA (1)...(19): siRNA sense strand
caacacaagaccaauugga

SEQ ID NO: 1669553 - RNA, 19 nt, Homo sapiens
  misc_RNA (1)...(19): siRNA sense strand
acacaagaccaauuggaaa

SEQ ID NO: 1669554 - RNA, 19 nt, Homo sapiens
  misc_RNA (1)...(19): siRNA sense strand
uggaaaagccucaaaauga

SEQ ID NO: 1669555 - RNA, 19 nt, Homo sapiens
  misc_RNA (1)...(19): siRNA sense strand
ggaaugccuuaccagacau

SEQ ID NO: 1669556 - RNA, 19 nt, Homo sapiens
  misc_RNA (1)...(19): siRNA sense strand
ccacagacggaaccucaga

SEQ ID NO: 1669557 - RNA, 19 nt, Homo sapiens
  misc_RNA (1)...(19): siRNA sense strand
cagacggaaccucagauuu

SEQ ID NO: 1669558 - RNA, 19 nt, Homo sapiens
  misc_RNA (1)...(19): siRNA sense strand
gacggaaccucagauuugc

SEQ ID NO: 1669559 - RNA, 19 nt, Homo sapiens
  misc_RNA (1)...(19): siRNA sense strand
ggaagaugcaaaagagaaa

SEQ ID NO: 1669560 - RNA, 19 nt, Homo sapiens
  misc_RNA (1)...(19): siRNA sense strand
aacaacacaagaccaauug

SEQ ID NO: 1669561 - RNA, 19 nt, Homo sapiens
  misc_RNA (1)...(19): siRNA sense strand
acagacggaaccucagauu

SEQ ID NO: 1669562 - RNA, 19 nt, Homo sapiens
  misc_RNA (1)...(19): siRNA sense strand
aacacaagaccaauuggaa

SEQ ID NO: 1669563 - RNA, 19 nt, Homo sapiens
  misc_RNA (1)...(19): siRNA sense strand
agucuggggucgccaauuu

SEQ ID NO: 1669564 - RNA, 19 nt, Homo sapiens
  misc_RNA (1)...(19): siRNA sense strand
ggaaaagccucaaaaugaa

SEQ ID NO: 1669565 - RNA, 19 nt, Homo sapiens
  misc_RNA (1)...(19): siRNA sense strand
gaaggaagaugcaaaagag

SEQ ID NO: 1669566 - RNA, 19 nt, Homo sapiens
  misc_RNA (1)...(19): siRNA sense strand
gaggacagauucaucaaaa

SEQ ID NO: 1669567 - RNA, 19 nt, Homo sapiens
  misc_RNA (1)...(19): siRNA sense strand
agacggaaccucagauuug

SEQ ID NO: 1669568 - RNA, 19 nt, Homo sapiens
  misc_RNA (1)...(19): siRNA sense strand
uaccagacauccagaguuc

SEQ ID NO: 1669569 - RNA, 19 nt, Homo sapiens
  misc_RNA (1)...(19): siRNA sense strand
aaacaacacaagaccaauu

SEQ ID NO: 1669570 - RNA, 19 nt, Homo sapiens
  misc_RNA (1)...(19): siRNA sense strand
cggaaugccuuaccagaca

SEQ ID NO: 1669571 - RNA, 19 nt, Homo sapiens
  misc_RNA (1)...(19): siRNA sense strand
caacacaagaccaauugga

SEQ ID NO: 1669572 - RNA, 19 nt, Homo sapiens
  misc_RNA (1)...(19): siRNA sense strand
acacaagaccaauuggaaa

SEQ ID NO: 1669573 - RNA, 19 nt, Homo sapiens
  misc_RNA (1)...(19): siRNA sense strand
uggaaaagccucaaaauga

SEQ ID NO: 1669574 - RNA, 19 nt, Homo sapiens
  misc_RNA (1)...(19): siRNA sense strand
ggaaugccuuaccagacau

SEQ ID NO: 1669575 - RNA, 19 nt, Homo sapiens
  misc_RNA (1)...(19): siRNA sense strand
ccacagacggaaccucaga

SEQ ID NO: 1669576 - RNA, 19 nt, Homo sapiens
  misc_RNA (1)...(19): siRNA sense strand
cagacggaaccucagauuu

SEQ ID NO: 1669577 - RNA, 19 nt, Homo sapiens
  misc_RNA (1)...(19): siRNA sense strand
gacggaaccucagauuugc

SEQ ID NO: 1669578 - RNA, 19 nt, Homo sapiens
  misc_RNA (1)...(19): siRNA sense strand
ggaagaugcaaaagagaaa

SEQ ID NO: 1669579 - RNA, 19 nt, Homo sapiens
  misc_RNA (1)...(19): siRNA sense strand
aacaacacaagaccaauug

SEQ ID NO: 1669580 - RNA, 19 nt, Homo sapiens
  misc_RNA (1)...(19): siRNA sense strand
acagacggaaccucagauu

SEQ ID NO: 1669581 - RNA, 19 nt, Homo sapiens
  misc_RNA (1)...(19): siRNA sense strand
aacacaagaccaauuggaa

SEQ ID NO: 1669582 - RNA, 19 nt, Homo sapiens
  misc_RNA (1)...(19): siRNA sense strand
agucuggggucgccaauuu

SEQ ID NO: 1669583 - RNA, 19 nt, Homo sapiens
  misc_RNA (1)...(19): siRNA sense strand
ggaaaagccucaaaaugaa

SEQ ID NO: 1669584 - RNA, 19 nt, Homo sapiens
  misc_RNA (1)...(19): siRNA sense strand
gaaggaagaugcaaaagag

SEQ ID NO: 1669585 - RNA, 19 nt, Homo sapiens
  misc_RNA (1)...(19): siRNA sense strand
gaggacagauucaucaaaa

SEQ ID NO: 1669586 - RNA, 19 nt, Homo sapiens
  misc_RNA (1)...(19): siRNA sense strand
agacggaaccucagauuug

SEQ ID NO: 1669587 - RNA, 19 nt, Homo sapiens
  misc_RNA (1)...(19): siRNA sense strand
uaccagacauccagaguuc

SEQ ID NO: 1669588 - RNA, 19 nt, Homo sapiens
  misc_RNA (1)...(19): siRNA sense strand
aaacaacacaagaccaauu

SEQ ID NO: 1669589 - RNA, 19 nt, Homo sapiens
  misc_RNA (1)...(19): siRNA sense strand
cggaaugccuuaccagaca

SEQ ID NO: 1669590 - RNA, 19 nt, Homo sapiens
  misc_RNA (1)...(19): siRNA sense strand
caacacaagaccaauugga

SEQ ID NO: 1669591 - RNA, 19 nt, Homo sapiens
  misc_RNA (1)...(19): siRNA sense strand
acacaagaccaauuggaaa

SEQ ID NO: 1669592 - RNA, 19 nt, Homo sapiens
  misc_RNA (1)...(19): siRNA sense strand
uggaaaagccucaaaauga

SEQ ID NO: 1669593 - RNA, 19 nt, Homo sapiens
  misc_RNA (1)...(19): siRNA sense strand
ggaaugccuuaccagacau

SEQ ID NO: 1669594 - RNA, 19 nt, Homo sapiens
  misc_RNA (1)...(19): siRNA sense strand
ccacagacggaaccucaga

SEQ ID NO: 1669595 - RNA, 19 nt, Homo sapiens
  misc_RNA (1)...(19): siRNA sense strand
cagacggaaccucagauuu

SEQ ID NO: 1669596 - RNA, 19 nt, Homo sapiens
  misc_RNA (1)...(19): siRNA sense strand
gacggaaccucagauuugc

SEQ ID NO: 1669597 - RNA, 19 nt, Homo sapiens
  misc_RNA (1)...(19): siRNA sense strand
ggaagaugcaaaagagaaa

SEQ ID NO: 1669598 - RNA, 19 nt, Homo sapiens
  misc_RNA (1)...(19): siRNA sense strand
aacaacacaagaccaauug

SEQ ID NO: 1669599 - RNA, 19 nt, Homo sapiens
  misc_RNA (1)...(19): siRNA sense strand
acagacggaaccucagauu

SEQ ID NO: 1669600 - RNA, 19 nt, Homo sapiens
  misc_RNA (1)...(19): siRNA sense strand
aacacaagaccaauuggaa

SEQ ID NO: 1669601 - RNA, 19 nt, Homo sapiens
  misc_RNA (1)...(19): siRNA sense strand
agucuggggucgccaauuu

SEQ ID NO: 1669602 - RNA, 19 nt, Homo sapiens
  misc_RNA (1)...(19): siRNA sense strand
gagcagcuuuggauaauga

SEQ ID NO: 1669603 - RNA, 19 nt, Homo sapiens
  misc_RNA (1)...(19): siRNA sense strand
gaaaugagcagcuuuggau

SEQ ID NO: 1669604 - RNA, 19 nt, Homo sapiens
  misc_RNA (1)...(19): siRNA sense strand
caagauguaucaccuauag

SEQ ID NO: 1669605 - RNA, 19 nt, Homo sapiens
  misc_RNA (1)...(19): siRNA sense strand
gagaugugaugguggagaa

SEQ ID NO: 1669606 - RNA, 19 nt, Homo sapiens
  misc_RNA (1)...(19): siRNA sense strand
ccgaagacagggaaauuua

SEQ ID NO: 1669607 - RNA, 19 nt, Homo sapiens
  misc_RNA (1)...(19): siRNA sense strand
uguaucaccuauagaaaga

SEQ ID NO: 1669608 - RNA, 19 nt, Homo sapiens
  misc_RNA (1)...(19): siRNA sense strand
agaaagaaaugagcagcuu

SEQ ID NO: 1669609 - RNA, 19 nt, Homo sapiens
  misc_RNA (1)...(19): siRNA sense strand
uuaggaaccugcugucagu

SEQ ID NO: 1669610 - RNA, 19 nt, Homo sapiens
  misc_RNA (1)...(19): siRNA sense strand
gauguaucaccuauagaaa

SEQ ID NO: 1669611 - RNA, 19 nt, Homo sapiens
  misc_RNA (1)...(19): siRNA sense strand
cauccacccuucaaacaag

SEQ ID NO: 1669612 - RNA, 19 nt, Homo sapiens
  misc_RNA (1)...(19): siRNA sense strand
aacaagauguaucaccuau

SEQ ID NO: 1669613 - RNA, 19 nt, Homo sapiens
  misc_RNA (1)...(19): siRNA sense strand
aaacaagauguaucaccua

SEQ ID NO: 1669614 - RNA, 19 nt, Homo sapiens
  misc_RNA (1)...(19): siRNA sense strand
gcauccacccuucaaacaa

SEQ ID NO: 1669615 - RNA, 19 nt, Homo sapiens
  misc_RNA (1)...(19): siRNA sense strand
agauguaucaccuauagaa

SEQ ID NO: 1669616 - RNA, 19 nt, Homo sapiens
  misc_RNA (1)...(19): siRNA sense strand
aaugagcagcuuuggauaa

SEQ ID NO: 1669617 - RNA, 19 nt, Homo sapiens
  misc_RNA (1)...(19): siRNA sense strand
gaagcuguaccgagaugug

SEQ ID NO: 1669618 - RNA, 19 nt, Homo sapiens
  misc_RNA (1)...(19): siRNA sense strand
cuucaaacaagauguauca

SEQ ID NO: 1669619 - RNA, 19 nt, Homo sapiens
  misc_RNA (1)...(19): siRNA sense strand
gacgacagcaacccgaaga

SEQ ID NO: 1669620 - RNA, 19 nt, Homo sapiens
  misc_RNA (1)...(19): siRNA sense strand
cgaagacagggaaauuuag

SEQ ID NO: 1669621 - RNA, 19 nt, Homo sapiens
  misc_RNA (1)...(19): siRNA sense strand
ucaccuauagaaagaaaug

SEQ ID NO: 1669622 - RNA, 19 nt, Homo sapiens
  misc_RNA (1)...(19): siRNA sense strand
gugaugguggagaacuuua

SEQ ID NO: 1669623 - RNA, 19 nt, Homo sapiens
  misc_RNA (1)...(19): siRNA sense strand
aaaugagcagcuuuggaua

SEQ ID NO: 1669624 - RNA, 19 nt, Homo sapiens
  misc_RNA (1)...(19): siRNA sense strand
acaagauguaucaccuaua

SEQ ID NO: 1669625 - RNA, 19 nt, Homo sapiens
  misc_RNA (1)...(19): siRNA sense strand
augagcagcuuuggauaau

SEQ ID NO: 1669626 - RNA, 19 nt, Homo sapiens
  misc_RNA (1)...(19): siRNA sense strand
ggcauccacccuucaaaca

SEQ ID NO: 1669627 - RNA, 19 nt, Homo sapiens
  misc_RNA (1)...(19): siRNA sense strand
aggaagcuguaccgagaug

SEQ ID NO: 1669628 - RNA, 19 nt, Homo sapiens
  misc_RNA (1)...(19): siRNA sense strand
gagcagcuuuggauaauga

SEQ ID NO: 1669629 - RNA, 19 nt, Homo sapiens
  misc_RNA (1)...(19): siRNA sense strand
gaaaugagcagcuuuggau

SEQ ID NO: 1669630 - RNA, 19 nt, Homo sapiens
  misc_RNA (1)...(19): siRNA sense strand
caagauguaucaccuauag

SEQ ID NO: 1669631 - RNA, 19 nt, Homo sapiens
  misc_RNA (1)...(19): siRNA sense strand
gagaugugaugguggagaa

SEQ ID NO: 1669632 - RNA, 19 nt, Homo sapiens
  misc_RNA (1)...(19): siRNA sense strand
ccgaagacagggaaauuua

SEQ ID NO: 1669633 - RNA, 19 nt, Homo sapiens
  misc_RNA (1)...(19): siRNA sense strand
uguaucaccuauagaaaga

SEQ ID NO: 1669634 - RNA, 19 nt, Homo sapiens
  misc_RNA (1)...(19): siRNA sense strand
agaaagaaaugagcagcuu

SEQ ID NO: 1669635 - RNA, 19 nt, Homo sapiens
  misc_RNA (1)...(19): siRNA sense strand
uuaggaaccugcugucagu

SEQ ID NO: 1669636 - RNA, 19 nt, Homo sapiens
  misc_RNA (1)...(19): siRNA sense strand
gauguaucaccuauagaaa

SEQ ID NO: 1669637 - RNA, 19 nt, Homo sapiens
  misc_RNA (1)...(19): siRNA sense strand
cauccacccuucaaacaag

SEQ ID NO: 1669638 - RNA, 19 nt, Homo sapiens
  misc_RNA (1)...(19): siRNA sense strand
aacaagauguaucaccuau

SEQ ID NO: 1669639 - RNA, 19 nt, Homo sapiens
  misc_RNA (1)...(19): siRNA sense strand
aaacaagauguaucaccua

SEQ ID NO: 1669640 - RNA, 19 nt, Homo sapiens
  misc_RNA (1)...(19): siRNA sense strand
gcauccacccuucaaacaa

SEQ ID NO: 1669641 - RNA, 19 nt, Homo sapiens
  misc_RNA (1)...(19): siRNA sense strand
agauguaucaccuauagaa

SEQ ID NO: 1669642 - RNA, 19 nt, Homo sapiens
  misc_RNA (1)...(19): siRNA sense strand
aaugagcagcuuuggauaa

SEQ ID NO: 1669643 - RNA, 19 nt, Homo sapiens
  misc_RNA (1)...(19): siRNA sense strand
gaagcuguaccgagaugug

SEQ ID NO: 1669644 - RNA, 19 nt, Homo sapiens
  misc_RNA (1)...(19): siRNA sense strand
cuucaaacaagauguauca

SEQ ID NO: 1669645 - RNA, 19 nt, Homo sapiens
  misc_RNA (1)...(19): siRNA sense strand
gacgacagcaacccgaaga

SEQ ID NO: 1669646 - RNA, 19 nt, Homo sapiens
  misc_RNA (1)...(19): siRNA sense strand
cgaagacagggaaauuuag

SEQ ID NO: 1669647 - RNA, 19 nt, Homo sapiens
  misc_RNA (1)...(19): siRNA sense strand
ucaccuauagaaagaaaug

SEQ ID NO: 1669648 - RNA, 19 nt, Homo sapiens
  misc_RNA (1)...(19): siRNA sense strand
gugaugguggagaacuuua

SEQ ID NO: 1669649 - RNA, 19 nt, Homo sapiens
  misc_RNA (1)...(19): siRNA sense strand
aaaugagcagcuuuggaua

SEQ ID NO: 1669650 - RNA, 19 nt, Homo sapiens
  misc_RNA (1)...(19): siRNA sense strand
acaagauguaucaccuaua

SEQ ID NO: 1669651 - RNA, 19 nt, Homo sapiens
  misc_RNA (1)...(19): siRNA sense strand
augagcagcuuuggauaau

SEQ ID NO: 1669652 - RNA, 19 nt, Homo sapiens
  misc_RNA (1)...(19): siRNA sense strand
ggcauccacccuucaaaca

SEQ ID NO: 1669653 - RNA, 19 nt, Homo sapiens
  misc_RNA (1)...(19): siRNA sense strand
aggaagcuguaccgagaug

SEQ ID NO: 1669654 - RNA, 19 nt, Homo sapiens
  misc_RNA (1)...(19): siRNA sense strand
gaagaccucuguaccaaga

SEQ ID NO: 1669655 - RNA, 19 nt, Homo sapiens
  misc_RNA (1)...(19): siRNA sense strand
acacucaaaucucuaagua

SEQ ID NO: 1669656 - RNA, 19 nt, Homo sapiens
  misc_RNA (1)...(19): siRNA sense strand
ggaagaaacagcaggagaa

SEQ ID NO: 1669657 - RNA, 19 nt, Homo sapiens
  misc_RNA (1)...(19): siRNA sense strand
gcagauaccucggauugag

SEQ ID NO: 1669658 - RNA, 19 nt, Homo sapiens
  misc_RNA (1)...(19): siRNA sense strand
gaagauuucugagcuggau

SEQ ID NO: 1669659 - RNA, 19 nt, Homo sapiens
  misc_RNA (1)...(19): siRNA sense strand
gaaagaggagcggaagaaa

SEQ ID NO: 1669660 - RNA, 19 nt, Homo sapiens
  misc_RNA (1)...(19): siRNA sense strand
uuucugagcuggaugcauu

SEQ ID NO: 1669661 - RNA, 19 nt, Homo sapiens
  misc_RNA (1)...(19): siRNA sense strand
gugaagaccucuguaccaa

SEQ ID NO: 1669662 - RNA, 19 nt, Homo sapiens
  misc_RNA (1)...(19): siRNA sense strand
gaaggaagacaaggaugaa

SEQ ID NO: 1669663 - RNA, 19 nt, Homo sapiens
  misc_RNA (1)...(19): siRNA sense strand
gaacugcaaugaaaagauc

SEQ ID NO: 1669664 - RNA, 19 nt, Homo sapiens
  misc_RNA (1)...(19): siRNA sense strand
gaagguguuugagcugaug

SEQ ID NO: 1669665 - RNA, 19 nt, Homo sapiens
  misc_RNA (1)...(19): siRNA sense strand
agaaacagcaggagaagga

SEQ ID NO: 1669666 - RNA, 19 nt, Homo sapiens
  misc_RNA (1)...(19): siRNA sense strand
ucaaggagaaagagaaaga

SEQ ID NO: 1669667 - RNA, 19 nt, Homo sapiens
  misc_RNA (1)...(19): siRNA sense strand
ggagaaggaagacaaggau

SEQ ID NO: 1669668 - RNA, 19 nt, Homo sapiens
  misc_RNA (1)...(19): siRNA sense strand
gaagaaacagcaggagaag

SEQ ID NO: 1669669 - RNA, 19 nt, Homo sapiens
  misc_RNA (1)...(19): siRNA sense strand
ggagauccgcaaugcuuau

SEQ ID NO: 1669670 - RNA, 19 nt, Homo sapiens
  misc_RNA (1)...(19): siRNA sense strand
ugaccagccuccacaccaa

SEQ ID NO: 1669671 - RNA, 19 nt, Homo sapiens
  misc_RNA (1)...(19): siRNA sense strand
gaguggcuguccaggagaa

SEQ ID NO: 1669672 - RNA, 19 nt, Homo sapiens
  misc_RNA (1)...(19): siRNA sense strand
agaaggaagacaaggauga

SEQ ID NO: 1669673 - RNA, 19 nt, Homo sapiens
  misc_RNA (1)...(19): siRNA sense strand
aagccaagguggauguguu

SEQ ID NO: 1669674 - RNA, 19 nt, Homo sapiens
  misc_RNA (1)...(19): siRNA sense strand
agaaagaggagcggaagaa

SEQ ID NO: 1669675 - RNA, 19 nt, Homo sapiens
  misc_RNA (1)...(19): siRNA sense strand
aagaggagcggaagaaaca

SEQ ID NO: 1669676 - RNA, 19 nt, Homo sapiens
  misc_RNA (1)...(19): siRNA sense strand
ugagaucaaggaugucauu

SEQ ID NO: 1669677 - RNA, 19 nt, Homo sapiens
  misc_RNA (1)...(19): siRNA sense strand
ggauugaggaugguaacaa

SEQ ID NO: 1669678 - RNA, 19 nt, Homo sapiens
  misc_RNA (1)...(19): siRNA sense strand
guggauguguuucgugaag

SEQ ID NO: 1669679 - RNA, 19 nt, Homo sapiens
  misc_RNA (1)...(19): siRNA sense strand
ggagcuauuuccccaagaa

SEQ ID NO: 1669680 - RNA, 19 nt, Homo sapiens
  misc_RNA (1)...(19): siRNA sense strand
uugaggaugguaacaauuu

SEQ ID NO: 1669681 - RNA, 19 nt, Homo sapiens
  misc_RNA (1)...(19): siRNA sense strand
agccugagaucaaggaugu

SEQ ID NO: 1669682 - RNA, 19 nt, Homo sapiens
  misc_RNA (1)...(19): siRNA sense strand
gagaaagaggagcggaaga

SEQ ID NO: 1669683 - RNA, 19 nt, Homo sapiens
  misc_RNA (1)...(19): siRNA sense strand
ucucuaaguauuucucuga

SEQ ID NO: 1669684 - RNA, 19 nt, Homo sapiens
  misc_RNA (1)...(19): siRNA sense strand
cugcagauaccucggauug

SEQ ID NO: 1669685 - RNA, 19 nt, Homo sapiens
  misc_RNA (1)...(19): siRNA sense strand
gaaacagcaggagaaggaa

SEQ ID NO: 1669686 - RNA, 19 nt, Homo sapiens
  misc_RNA (1)...(19): siRNA sense strand
guggugaugcagugacuaa

SEQ ID NO: 1669687 - RNA, 19 nt, Homo sapiens
  misc_RNA (1)...(19): siRNA sense strand
ggauguguuucgugaagac

SEQ ID NO: 1669688 - RNA, 19 nt, Homo sapiens
  misc_RNA (1)...(19): siRNA sense strand
caagguggauguguuucgu

SEQ ID NO: 1669689 - RNA, 19 nt, Homo sapiens
  misc_RNA (1)...(19): siRNA sense strand
agacaaggaugaaaagaag

SEQ ID NO: 1669690 - RNA, 19 nt, Homo sapiens
  misc_RNA (1)...(19): siRNA sense strand
ggacaucccagugccugau

SEQ ID NO: 1669691 - RNA, 19 nt, Homo sapiens
  misc_RNA (1)...(19): siRNA sense strand
gugaugcagugacuaaagc

SEQ ID NO: 1669692 - RNA, 19 nt, Homo sapiens
  misc_RNA (1)...(19): siRNA sense strand
gcaggagaaggaagacaag

SEQ ID NO: 1669693 - RNA, 19 nt, Homo sapiens
  misc_RNA (1)...(19): siRNA sense strand
aaagggaaugaucuauuga

SEQ ID NO: 1669694 - RNA, 19 nt, Homo sapiens
  misc_RNA (1)...(19): siRNA sense strand
ucauggagauccgcaaugc

SEQ ID NO: 1669695 - RNA, 19 nt, Homo sapiens
  misc_RNA (1)...(19): siRNA sense strand
ggaggaugaagacaaaggu

SEQ ID NO: 1669696 - RNA, 19 nt, Homo sapiens
  misc_RNA (1)...(19): siRNA sense strand
ugacuaaagcagccaagca

SEQ ID NO: 1669697 - RNA, 19 nt, Homo sapiens
  misc_RNA (1)...(19): siRNA sense strand
ggugaugcagugacuaaag

SEQ ID NO: 1669698 - RNA, 19 nt, Homo sapiens
  misc_RNA (1)...(19): siRNA sense strand
uggagauccgcaaugcuua

SEQ ID NO: 1669699 - RNA, 19 nt, Homo sapiens
  misc_RNA (1)...(19): siRNA sense strand
gagaucaaggaugucauug

SEQ ID NO: 1669700 - RNA, 19 nt, Homo sapiens
  misc_RNA (1)...(19): siRNA sense strand
ggucauggagauccgcaau

SEQ ID NO: 1669701 - RNA, 19 nt, Homo sapiens
  misc_RNA (1)...(19): siRNA sense strand
gaagaccucuguaccaaga

SEQ ID NO: 1669702 - RNA, 19 nt, Homo sapiens
  misc_RNA (1)...(19): siRNA sense strand
acacucaaaucucuaagua

SEQ ID NO: 1669703 - RNA, 19 nt, Homo sapiens
  misc_RNA (1)...(19): siRNA sense strand
ggaagaaacagcaggagaa

SEQ ID NO: 1669704 - RNA, 19 nt, Homo sapiens
  misc_RNA (1)...(19): siRNA sense strand
gcagauaccucggauugag

SEQ ID NO: 1669705 - RNA, 19 nt, Homo sapiens
  misc_RNA (1)...(19): siRNA sense strand
gaagauuucugagcuggau

SEQ ID NO: 1669706 - RNA, 19 nt, Homo sapiens
  misc_RNA (1)...(19): siRNA sense strand
gaaagaggagcggaagaaa

SEQ ID NO: 1669707 - RNA, 19 nt, Homo sapiens
  misc_RNA (1)...(19): siRNA sense strand
uuucugagcuggaugcauu

SEQ ID NO: 1669708 - RNA, 19 nt, Homo sapiens
  misc_RNA (1)...(19): siRNA sense strand
gugaagaccucuguaccaa

SEQ ID NO: 1669709 - RNA, 19 nt, Homo sapiens
  misc_RNA (1)...(19): siRNA sense strand
gaaggaagacaaggaugaa

SEQ ID NO: 1669710 - RNA, 19 nt, Homo sapiens
  misc_RNA (1)...(19): siRNA sense strand
gaacugcaaugaaaagauc

SEQ ID NO: 1669711 - RNA, 19 nt, Homo sapiens
  misc_RNA (1)...(19): siRNA sense strand
gaagguguuugagcugaug

SEQ ID NO: 1669712 - RNA, 19 nt, Homo sapiens
  misc_RNA (1)...(19): siRNA sense strand
agaaacagcaggagaagga

SEQ ID NO: 1669713 - RNA, 19 nt, Homo sapiens
  misc_RNA (1)...(19): siRNA sense strand
ucaaggagaaagagaaaga

SEQ ID NO: 1669714 - RNA, 19 nt, Homo sapiens
  misc_RNA (1)...(19): siRNA sense strand
ggagaaggaagacaaggau

SEQ ID NO: 1669715 - RNA, 19 nt, Homo sapiens
  misc_RNA (1)...(19): siRNA sense strand
gaagaaacagcaggagaag

SEQ ID NO: 1669716 - RNA, 19 nt, Homo sapiens
  misc_RNA (1)...(19): siRNA sense strand
ggagauccgcaaugcuuau

SEQ ID NO: 1669717 - RNA, 19 nt, Homo sapiens
  misc_RNA (1)...(19): siRNA sense strand
ugaccagccuccacaccaa

SEQ ID NO: 1669718 - RNA, 19 nt, Homo sapiens
  misc_RNA (1)...(19): siRNA sense strand
gaguggcuguccaggagaa

SEQ ID NO: 1669719 - RNA, 19 nt, Homo sapiens
  misc_RNA (1)...(19): siRNA sense strand
agaaggaagacaaggauga

SEQ ID NO: 1669720 - RNA, 19 nt, Homo sapiens
  misc_RNA (1)...(19): siRNA sense strand
aagccaagguggauguguu

SEQ ID NO: 1669721 - RNA, 19 nt, Homo sapiens
  misc_RNA (1)...(19): siRNA sense strand
agaaagaggagcggaagaa

SEQ ID NO: 1669722 - RNA, 19 nt, Homo sapiens
  misc_RNA (1)...(19): siRNA sense strand
aagaggagcggaagaaaca

SEQ ID NO: 1669723 - RNA, 19 nt, Homo sapiens
  misc_RNA (1)...(19): siRNA sense strand
ugagaucaaggaugucauu

SEQ ID NO: 1669724 - RNA, 19 nt, Homo sapiens
  misc_RNA (1)...(19): siRNA sense strand
ggauugaggaugguaacaa

SEQ ID NO: 1669725 - RNA, 19 nt, Homo sapiens
  misc_RNA (1)...(19): siRNA sense strand
guggauguguuucgugaag

SEQ ID NO: 1669726 - RNA, 19 nt, Homo sapiens
  misc_RNA (1)...(19): siRNA sense strand
ggagcuauuuccccaagaa

SEQ ID NO: 1669727 - RNA, 19 nt, Homo sapiens
  misc_RNA (1)...(19): siRNA sense strand
uugaggaugguaacaauuu

SEQ ID NO: 1669728 - RNA, 19 nt, Homo sapiens
  misc_RNA (1)...(19): siRNA sense strand
agccugagaucaaggaugu

SEQ ID NO: 1669729 - RNA, 19 nt, Homo sapiens
  misc_RNA (1)...(19): siRNA sense strand
gagaaagaggagcggaaga

SEQ ID NO: 1669730 - RNA, 19 nt, Homo sapiens
  misc_RNA (1)...(19): siRNA sense strand
ucucuaaguauuucucuga

SEQ ID NO: 1669731 - RNA, 19 nt, Homo sapiens
  misc_RNA (1)...(19): siRNA sense strand
cugcagauaccucggauug

SEQ ID NO: 1669732 - RNA, 19 nt, Homo sapiens
  misc_RNA (1)...(19): siRNA sense strand
gaaacagcaggagaaggaa

SEQ ID NO: 1669733 - RNA, 19 nt, Homo sapiens
  misc_RNA (1)...(19): siRNA sense strand
guggugaugcagugacuaa

SEQ ID NO: 1669734 - RNA, 19 nt, Homo sapiens
  misc_RNA (1)...(19): siRNA sense strand
ggauguguuucgugaagac

SEQ ID NO: 1669735 - RNA, 19 nt, Homo sapiens
  misc_RNA (1)...(19): siRNA sense strand
caagguggauguguuucgu

SEQ ID NO: 1669736 - RNA, 19 nt, Homo sapiens
  misc_RNA (1)...(19): siRNA sense strand
agacaaggaugaaaagaag

SEQ ID NO: 1669737 - RNA, 19 nt, Homo sapiens
  misc_RNA (1)...(19): siRNA sense strand
ggacaucccagugccugau

SEQ ID NO: 1669738 - RNA, 19 nt, Homo sapiens
  misc_RNA (1)...(19): siRNA sense strand
gugaugcagugacuaaagc

SEQ ID NO: 1669739 - RNA, 19 nt, Homo sapiens
  misc_RNA (1)...(19): siRNA sense strand
gcaggagaaggaagacaag

SEQ ID NO: 1669740 - RNA, 19 nt, Homo sapiens
  misc_RNA (1)...(19): siRNA sense strand
ucauggagauccgcaaugc

SEQ ID NO: 1669741 - RNA, 19 nt, Homo sapiens
  misc_RNA (1)...(19): siRNA sense strand
ggaggaugaagacaaaggu

SEQ ID NO: 1669742 - RNA, 19 nt, Homo sapiens
  misc_RNA (1)...(19): siRNA sense strand
ugacuaaagcagccaagca

SEQ ID NO: 1669743 - RNA, 19 nt, Homo sapiens
  misc_RNA (1)...(19): siRNA sense strand
ggugaugcagugacuaaag

SEQ ID NO: 1669744 - RNA, 19 nt, Homo sapiens
  misc_RNA (1)...(19): siRNA sense strand
uggagauccgcaaugcuua

SEQ ID NO: 1669745 - RNA, 19 nt, Homo sapiens
  misc_RNA (1)...(19): siRNA sense strand
gagaucaaggaugucauug

SEQ ID NO: 1669746 - RNA, 19 nt, Homo sapiens
  misc_RNA (1)...(19): siRNA sense strand
ggucauggagauccgcaau

SEQ ID NO: 1669747 - RNA, 19 nt, Homo sapiens
  misc_RNA (1)...(19): siRNA sense strand
gcuaugagcuggccuucaa

SEQ ID NO: 1669748 - RNA, 19 nt, Homo sapiens
  misc_RNA (1)...(19): siRNA sense strand
gcacagggaucacauuguc

SEQ ID NO: 1669749 - RNA, 19 nt, Homo sapiens
  misc_RNA (1)...(19): siRNA sense strand
ccacugcacugcucacuug

SEQ ID NO: 1669750 - RNA, 19 nt, Homo sapiens
  misc_RNA (1)...(19): siRNA sense strand
ugaccuggcuuauacuuga

SEQ ID NO: 1669751 - RNA, 19 nt, Homo sapiens
  misc_RNA (1)...(19): siRNA sense strand
ggacaagggccaaggucua

SEQ ID NO: 1669752 - RNA, 19 nt, Homo sapiens
  misc_RNA (1)...(19): siRNA sense strand
cgaccuaccuccuguucaa

SEQ ID NO: 1669753 - RNA, 19 nt, Homo sapiens
  misc_RNA (1)...(19): siRNA sense strand
gcauguugcucccuucugu

SEQ ID NO: 1669754 - RNA, 19 nt, Homo sapiens
  misc_RNA (1)...(19): siRNA sense strand
ugaccacacuucucagcua

SEQ ID NO: 1669755 - RNA, 19 nt, Homo sapiens
  misc_RNA (1)...(19): siRNA sense strand
ccacacuucucagcuauga

SEQ ID NO: 1669756 - RNA, 19 nt, Homo sapiens
  misc_RNA (1)...(19): siRNA sense strand
gagcuggacccuggcuuua

SEQ ID NO: 1669757 - RNA, 19 nt, Homo sapiens
  misc_RNA (1)...(19): siRNA sense strand
ccaacaacauucucaggau

SEQ ID NO: 1669758 - RNA, 19 nt, Homo sapiens
  misc_RNA (1)...(19): siRNA sense strand
ccaaugaccacacuucuca

SEQ ID NO: 1669759 - RNA, 19 nt, Homo sapiens
  misc_RNA (1)...(19): siRNA sense strand
ucaccugccucaccaacaa

SEQ ID NO: 1669760 - RNA, 19 nt, Homo sapiens
  misc_RNA (1)...(19): siRNA sense strand
gaccacacuucucagcuau

SEQ ID NO: 1669761 - RNA, 19 nt, Homo sapiens
  misc_RNA (1)...(19): siRNA sense strand
ccuguggccuuucuuguga

SEQ ID NO: 1669762 - RNA, 19 nt, Homo sapiens
  misc_RNA (1)...(19): siRNA sense strand
ucucagcccucccaggaaa

SEQ ID NO: 1669763 - RNA, 19 nt, Homo sapiens
  misc_RNA (1)...(19): siRNA sense strand
gcuccuggcggcacacaua

SEQ ID NO: 1669764 - RNA, 19 nt, Homo sapiens
  misc_RNA (1)...(19): siRNA sense strand
uacagacgcuugccuaucu

SEQ ID NO: 1669765 - RNA, 19 nt, Homo sapiens
  misc_RNA (1)...(19): siRNA sense strand
gcuggacccuggcuuuauc

SEQ ID NO: 1669766 - RNA, 19 nt, Homo sapiens
  misc_RNA (1)...(19): siRNA sense strand
gcuggaccuuggagaguga

SEQ ID NO: 1669767 - RNA, 19 nt, Homo sapiens
  misc_RNA (1)...(19): siRNA sense strand
gagacaaggcccucugauc

SEQ ID NO: 1669768 - RNA, 19 nt, Homo sapiens
  misc_RNA (1)...(19): siRNA sense strand
ggagccagccugugugcuu

SEQ ID NO: 1669769 - RNA, 19 nt, Homo sapiens
  misc_RNA (1)...(19): siRNA sense strand
acuggaggaugauguggua

SEQ ID NO: 1669770 - RNA, 19 nt, Homo sapiens
  misc_RNA (1)...(19): siRNA sense strand
gaccuggcuuauacuugaa

SEQ ID NO: 1669771 - RNA, 19 nt, Homo sapiens
  misc_RNA (1)...(19): siRNA sense strand
acaauuucaccaucacuuu

SEQ ID NO: 1669772 - RNA, 19 nt, Homo sapiens
  misc_RNA (1)...(19): siRNA sense strand
uggccacacuggaggauga

SEQ ID NO: 1669773 - RNA, 19 nt, Homo sapiens
  misc_RNA (1)...(19): siRNA sense strand
ggaggaugaugugguagag

SEQ ID NO: 1669774 - RNA, 19 nt, Homo sapiens
  misc_RNA (1)...(19): siRNA sense strand
gaguggagccagccugugu

SEQ ID NO: 1669775 - RNA, 19 nt, Homo sapiens
  misc_RNA (1)...(19): siRNA sense strand
ggaccuccagggcauguug

SEQ ID NO: 1669776 - RNA, 19 nt, Homo sapiens
  misc_RNA (1)...(19): siRNA sense strand
caagggccaaggucuagaa

SEQ ID NO: 1669777 - RNA, 19 nt, Homo sapiens
  misc_RNA (1)...(19): siRNA sense strand
cgugccaucugacaauuuc

SEQ ID NO: 1669778 - RNA, 19 nt, Homo sapiens
  misc_RNA (1)...(19): siRNA sense strand
cagcacagggaucacauug

SEQ ID NO: 1669779 - RNA, 19 nt, Homo sapiens
  misc_RNA (1)...(19): siRNA sense strand
gagccaaugaccacacuuc

SEQ ID NO: 1669780 - RNA, 19 nt, Homo sapiens
  misc_RNA (1)...(19): siRNA sense strand
gcucgugccaucugacaau

SEQ ID NO: 1669781 - RNA, 19 nt, Homo sapiens
  misc_RNA (1)...(19): siRNA sense strand
gacaauuucaccaucacuu

SEQ ID NO: 1669782 - RNA, 19 nt, Homo sapiens
  misc_RNA (1)...(19): siRNA sense strand
gaaggacaagggccaaggu

SEQ ID NO: 1669783 - RNA, 19 nt, Homo sapiens
  misc_RNA (1)...(19): siRNA sense strand
ggagacccagcaaggaguu

SEQ ID NO: 1669784 - RNA, 19 nt, Homo sapiens
  misc_RNA (1)...(19): siRNA sense strand
guacagacgcuugccuauc

SEQ ID NO: 1669785 - RNA, 19 nt, Homo sapiens
  misc_RNA (1)...(19): siRNA sense strand
ucugacaauuucaccauca

SEQ ID NO: 1669786 - RNA, 19 nt, Homo sapiens
  misc_RNA (1)...(19): siRNA sense strand
gacaagggccaaggucuag

SEQ ID NO: 1669787 - RNA, 19 nt, Homo sapiens
  misc_RNA (1)...(19): siRNA sense strand
caauuucaccaucacuuuc

SEQ ID NO: 1669788 - RNA, 19 nt, Homo sapiens
  misc_RNA (1)...(19): siRNA sense strand
ggggugaccuggcuuauac

SEQ ID NO: 1669789 - RNA, 19 nt, Homo sapiens
  misc_RNA (1)...(19): siRNA sense strand
gcagugcucgugccaucug

SEQ ID NO: 1669790 - RNA, 19 nt, Homo sapiens
  misc_RNA (1)...(19): siRNA sense strand
gcgcguccuuggaaaucug

SEQ ID NO: 1669791 - RNA, 19 nt, Homo sapiens
  misc_RNA (1)...(19): siRNA sense strand
gcaucaguccugccuugga

SEQ ID NO: 1669792 - RNA, 19 nt, Homo sapiens
  misc_RNA (1)...(19): siRNA sense strand
ugagcuggacccuggcuuu

SEQ ID NO: 1669793 - RNA, 19 nt, Homo sapiens
  misc_RNA (1)...(19): siRNA sense strand
auccugaccuggagcauca

SEQ ID NO: 1669794 - RNA, 19 nt, Homo sapiens
  misc_RNA (1)...(19): siRNA sense strand
gguacagacgcuugccuau

SEQ ID NO: 1669795 - RNA, 19 nt, Homo sapiens
  misc_RNA (1)...(19): siRNA sense strand
gcuaugagcuggccuucaa

SEQ ID NO: 1669796 - RNA, 19 nt, Homo sapiens
  misc_RNA (1)...(19): siRNA sense strand
gcacagggaucacauuguc

SEQ ID NO: 1669797 - RNA, 19 nt, Homo sapiens
  misc_RNA (1)...(19): siRNA sense strand
ugaccuggcuuauacuuga

SEQ ID NO: 1669798 - RNA, 19 nt, Homo sapiens
  misc_RNA (1)...(19): siRNA sense strand
ggacaagggccaaggucua

SEQ ID NO: 1669799 - RNA, 19 nt, Homo sapiens
  misc_RNA (1)...(19): siRNA sense strand
cgaccuaccuccuguucaa

SEQ ID NO: 1669800 - RNA, 19 nt, Homo sapiens
  misc_RNA (1)...(19): siRNA sense strand
ugaccacacuucucagcua

SEQ ID NO: 1669801 - RNA, 19 nt, Homo sapiens
  misc_RNA (1)...(19): siRNA sense strand
ccacacuucucagcuauga

SEQ ID NO: 1669802 - RNA, 19 nt, Homo sapiens
  misc_RNA (1)...(19): siRNA sense strand
gagcuggacccuggcuuua

SEQ ID NO: 1669803 - RNA, 19 nt, Homo sapiens
  misc_RNA (1)...(19): siRNA sense strand
ccaacaacauucucaggau

SEQ ID NO: 1669804 - RNA, 19 nt, Homo sapiens
  misc_RNA (1)...(19): siRNA sense strand
ccaaugaccacacuucuca

SEQ ID NO: 1669805 - RNA, 19 nt, Homo sapiens
  misc_RNA (1)...(19): siRNA sense strand
ucaccugccucaccaacaa

SEQ ID NO: 1669806 - RNA, 19 nt, Homo sapiens
  misc_RNA (1)...(19): siRNA sense strand
gaccacacuucucagcuau

SEQ ID NO: 1669807 - RNA, 19 nt, Homo sapiens
  misc_RNA (1)...(19): siRNA sense strand
gcuccuggcggcacacaua

SEQ ID NO: 1669808 - RNA, 19 nt, Homo sapiens
  misc_RNA (1)...(19): siRNA sense strand
gcuggacccuggcuuuauc

SEQ ID NO: 1669809 - RNA, 19 nt, Homo sapiens
  misc_RNA (1)...(19): siRNA sense strand
gcuggaccuuggagaguga

SEQ ID NO: 1669810 - RNA, 19 nt, Homo sapiens
  misc_RNA (1)...(19): siRNA sense strand
gagacaaggcccucugauc

SEQ ID NO: 1669811 - RNA, 19 nt, Homo sapiens
  misc_RNA (1)...(19): siRNA sense strand
ggagccagccugugugcuu

SEQ ID NO: 1669812 - RNA, 19 nt, Homo sapiens
  misc_RNA (1)...(19): siRNA sense strand
acuggaggaugauguggua

SEQ ID NO: 1669813 - RNA, 19 nt, Homo sapiens
  misc_RNA (1)...(19): siRNA sense strand
gaccuggcuuauacuugaa

SEQ ID NO: 1669814 - RNA, 19 nt, Homo sapiens
  misc_RNA (1)...(19): siRNA sense strand
acaauuucaccaucacuuu

SEQ ID NO: 1669815 - RNA, 19 nt, Homo sapiens
  misc_RNA (1)...(19): siRNA sense strand
uggccacacuggaggauga

SEQ ID NO: 1669816 - RNA, 19 nt, Homo sapiens
  misc_RNA (1)...(19): siRNA sense strand
ggaggaugaugugguagag

SEQ ID NO: 1669817 - RNA, 19 nt, Homo sapiens
  misc_RNA (1)...(19): siRNA sense strand
gaguggagccagccugugu

SEQ ID NO: 1669818 - RNA, 19 nt, Homo sapiens
  misc_RNA (1)...(19): siRNA sense strand
caagggccaaggucuagaa

SEQ ID NO: 1669819 - RNA, 19 nt, Homo sapiens
  misc_RNA (1)...(19): siRNA sense strand
cgugccaucugacaauuuc

SEQ ID NO: 1669820 - RNA, 19 nt, Homo sapiens
  misc_RNA (1)...(19): siRNA sense strand
cagcacagggaucacauug

SEQ ID NO: 1669821 - RNA, 19 nt, Homo sapiens
  misc_RNA (1)...(19): siRNA sense strand
gagccaaugaccacacuuc

SEQ ID NO: 1669822 - RNA, 19 nt, Homo sapiens
  misc_RNA (1)...(19): siRNA sense strand
gcucgugccaucugacaau

SEQ ID NO: 1669823 - RNA, 19 nt, Homo sapiens
  misc_RNA (1)...(19): siRNA sense strand
gacaauuucaccaucacuu

SEQ ID NO: 1669824 - RNA, 19 nt, Homo sapiens
  misc_RNA (1)...(19): siRNA sense strand
gaaggacaagggccaaggu

SEQ ID NO: 1669825 - RNA, 19 nt, Homo sapiens
  misc_RNA (1)...(19): siRNA sense strand
ucugacaauuucaccauca

SEQ ID NO: 1669826 - RNA, 19 nt, Homo sapiens
  misc_RNA (1)...(19): siRNA sense strand
gacaagggccaaggucuag

SEQ ID NO: 1669827 - RNA, 19 nt, Homo sapiens
  misc_RNA (1)...(19): siRNA sense strand
caauuucaccaucacuuuc

SEQ ID NO: 1669828 - RNA, 19 nt, Homo sapiens
  misc_RNA (1)...(19): siRNA sense strand
ggggugaccuggcuuauac

SEQ ID NO: 1669829 - RNA, 19 nt, Homo sapiens
  misc_RNA (1)...(19): siRNA sense strand
gcagugcucgugccaucug

SEQ ID NO: 1669830 - RNA, 19 nt, Homo sapiens
  misc_RNA (1)...(19): siRNA sense strand
gcaucaguccugccuugga

SEQ ID NO: 1669831 - RNA, 19 nt, Homo sapiens
  misc_RNA (1)...(19): siRNA sense strand
ugagcuggacccuggcuuu

SEQ ID NO: 1669832 - RNA, 19 nt, Homo sapiens
  misc_RNA (1)...(19): siRNA sense strand
auccugaccuggagcauca

SEQ ID NO: 1669833 - RNA, 19 nt, Homo sapiens
  misc_RNA (1)...(19): siRNA sense strand
ggaaaagccucaaaaugaa

SEQ ID NO: 1669834 - RNA, 19 nt, Homo sapiens
  misc_RNA (1)...(19): siRNA sense strand
gaaggaagaugcaaaagag

SEQ ID NO: 1669835 - RNA, 19 nt, Homo sapiens
  misc_RNA (1)...(19): siRNA sense strand
gaggacagauucaucaaaa

SEQ ID NO: 1669836 - RNA, 19 nt, Homo sapiens
  misc_RNA (1)...(19): siRNA sense strand
agacggaaccucagauuug

SEQ ID NO: 1669837 - RNA, 19 nt, Homo sapiens
  misc_RNA (1)...(19): siRNA sense strand
uaccagacauccagaguuc

SEQ ID NO: 1669838 - RNA, 19 nt, Homo sapiens
  misc_RNA (1)...(19): siRNA sense strand
aaacaacacaagaccaauu

SEQ ID NO: 1669839 - RNA, 19 nt, Homo sapiens
  misc_RNA (1)...(19): siRNA sense strand
cggaaugccuuaccagaca

SEQ ID NO: 1669840 - RNA, 19 nt, Homo sapiens
  misc_RNA (1)...(19): siRNA sense strand
caacacaagaccaauugga

SEQ ID NO: 1669841 - RNA, 19 nt, Homo sapiens
  misc_RNA (1)...(19): siRNA sense strand
acacaagaccaauuggaaa

SEQ ID NO: 1669842 - RNA, 19 nt, Homo sapiens
  misc_RNA (1)...(19): siRNA sense strand
uggaaaagccucaaaauga

SEQ ID NO: 1669843 - RNA, 19 nt, Homo sapiens
  misc_RNA (1)...(19): siRNA sense strand
ggaaugccuuaccagacau

SEQ ID NO: 1669844 - RNA, 19 nt, Homo sapiens
  misc_RNA (1)...(19): siRNA sense strand
ccacagacggaaccucaga

SEQ ID NO: 1669845 - RNA, 19 nt, Homo sapiens
  misc_RNA (1)...(19): siRNA sense strand
cagacggaaccucagauuu

SEQ ID NO: 1669846 - RNA, 19 nt, Homo sapiens
  misc_RNA (1)...(19): siRNA sense strand
gacggaaccucagauuugc

SEQ ID NO: 1669847 - RNA, 19 nt, Homo sapiens
  misc_RNA (1)...(19): siRNA sense strand
ggaagaugcaaaagagaaa

SEQ ID NO: 1669848 - RNA, 19 nt, Homo sapiens
  misc_RNA (1)...(19): siRNA sense strand
aacaacacaagaccaauug

SEQ ID NO: 1669849 - RNA, 19 nt, Homo sapiens
  misc_RNA (1)...(19): siRNA sense strand
acagacggaaccucagauu

SEQ ID NO: 1669850 - RNA, 19 nt, Homo sapiens
  misc_RNA (1)...(19): siRNA sense strand
aacacaagaccaauuggaa

SEQ ID NO: 1669851 - RNA, 19 nt, Homo sapiens
  misc_RNA (1)...(19): siRNA sense strand
agucuggggucgccaauuu

SEQ ID NO: 1669852 - RNA, 19 nt, Homo sapiens
  misc_RNA (1)...(19): siRNA sense strand
ggaaaagccucaaaaugaa

SEQ ID NO: 1669853 - RNA, 19 nt, Homo sapiens
  misc_RNA (1)...(19): siRNA sense strand
gaaggaagaugcaaaagag

SEQ ID NO: 1669854 - RNA, 19 nt, Homo sapiens
  misc_RNA (1)...(19): siRNA sense strand
gaggacagauucaucaaaa

SEQ ID NO: 1669855 - RNA, 19 nt, Homo sapiens
  misc_RNA (1)...(19): siRNA sense strand
agacggaaccucagauuug

SEQ ID NO: 1669856 - RNA, 19 nt, Homo sapiens
  misc_RNA (1)...(19): siRNA sense strand
uaccagacauccagaguuc

SEQ ID NO: 1669857 - RNA, 19 nt, Homo sapiens
  misc_RNA (1)...(19): siRNA sense strand
aaacaacacaagaccaauu

SEQ ID NO: 1669858 - RNA, 19 nt, Homo sapiens
  misc_RNA (1)...(19): siRNA sense strand
cggaaugccuuaccagaca

SEQ ID NO: 1669859 - RNA, 19 nt, Homo sapiens
  misc_RNA (1)...(19): siRNA sense strand
caacacaagaccaauugga

SEQ ID NO: 1669860 - RNA, 19 nt, Homo sapiens
  misc_RNA (1)...(19): siRNA sense strand
acacaagaccaauuggaaa

SEQ ID NO: 1669861 - RNA, 19 nt, Homo sapiens
  misc_RNA (1)...(19): siRNA sense strand
uggaaaagccucaaaauga

SEQ ID NO: 1669862 - RNA, 19 nt, Homo sapiens
  misc_RNA (1)...(19): siRNA sense strand
ggaaugccuuaccagacau

SEQ ID NO: 1669863 - RNA, 19 nt, Homo sapiens
  misc_RNA (1)...(19): siRNA sense strand
ccacagacggaaccucaga

SEQ ID NO: 1669864 - RNA, 19 nt, Homo sapiens
  misc_RNA (1)...(19): siRNA sense strand
cagacggaaccucagauuu

SEQ ID NO: 1669865 - RNA, 19 nt, Homo sapiens
  misc_RNA (1)...(19): siRNA sense strand
gacggaaccucagauuugc

SEQ ID NO: 1669866 - RNA, 19 nt, Homo sapiens
  misc_RNA (1)...(19): siRNA sense strand
ggaagaugcaaaagagaaa

SEQ ID NO: 1669867 - RNA, 19 nt, Homo sapiens
  misc_RNA (1)...(19): siRNA sense strand
aacaacacaagaccaauug

SEQ ID NO: 1669868 - RNA, 19 nt, Homo sapiens
  misc_RNA (1)...(19): siRNA sense strand
acagacggaaccucagauu

SEQ ID NO: 1669869 - RNA, 19 nt, Homo sapiens
  misc_RNA (1)...(19): siRNA sense strand
aacacaagaccaauuggaa

SEQ ID NO: 1669870 - RNA, 19 nt, Homo sapiens
  misc_RNA (1)...(19): siRNA sense strand
agucuggggucgccaauuu

SEQ ID NO: 1669871 - RNA, 19 nt, Homo sapiens
  misc_RNA (1)...(19): siRNA sense strand
ggaaaagccucaaaaugaa

SEQ ID NO: 1669872 - RNA, 19 nt, Homo sapiens
  misc_RNA (1)...(19): siRNA sense strand
gaaggaagaugcaaaagag

SEQ ID NO: 1669873 - RNA, 19 nt, Homo sapiens
  misc_RNA (1)...(19): siRNA sense strand
gaggacagauucaucaaaa

SEQ ID NO: 1669874 - RNA, 19 nt, Homo sapiens
  misc_RNA (1)...(19): siRNA sense strand
agacggaaccucagauuug

SEQ ID NO: 1669875 - RNA, 19 nt, Homo sapiens
  misc_RNA (1)...(19): siRNA sense strand
uaccagacauccagaguuc

SEQ ID NO: 1669876 - RNA, 19 nt, Homo sapiens
  misc_RNA (1)...(19): siRNA sense strand
aaacaacacaagaccaauu

SEQ ID NO: 1669877 - RNA, 19 nt, Homo sapiens
  misc_RNA (1)...(19): siRNA sense strand
cggaaugccuuaccagaca

SEQ ID NO: 1669878 - RNA, 19 nt, Homo sapiens
  misc_RNA (1)...(19): siRNA sense strand
caacacaagaccaauugga

SEQ ID NO: 1669879 - RNA, 19 nt, Homo sapiens
  misc_RNA (1)...(19): siRNA sense strand
acacaagaccaauuggaaa

SEQ ID NO: 1669880 - RNA, 19 nt, Homo sapiens
  misc_RNA (1)...(19): siRNA sense strand
uggaaaagccucaaaauga

SEQ ID NO: 1669881 - RNA, 19 nt, Homo sapiens
  misc_RNA (1)...(19): siRNA sense strand
ggaaugccuuaccagacau

SEQ ID NO: 1669882 - RNA, 19 nt, Homo sapiens
  misc_RNA (1)...(19): siRNA sense strand
ccacagacggaaccucaga

SEQ ID NO: 1669883 - RNA, 19 nt, Homo sapiens
  misc_RNA (1)...(19): siRNA sense strand
cagacggaaccucagauuu

SEQ ID NO: 1669884 - RNA, 19 nt, Homo sapiens
  misc_RNA (1)...(19): siRNA sense strand
gacggaaccucagauuugc

SEQ ID NO: 1669885 - RNA, 19 nt, Homo sapiens
  misc_RNA (1)...(19): siRNA sense strand
ggaagaugcaaaagagaaa

SEQ ID NO: 1669886 - RNA, 19 nt, Homo sapiens
  misc_RNA (1)...(19): siRNA sense strand
aacaacacaagaccaauug

SEQ ID NO: 1669887 - RNA, 19 nt, Homo sapiens
  misc_RNA (1)...(19): siRNA sense strand
acagacggaaccucagauu

SEQ ID NO: 1669888 - RNA, 19 nt, Homo sapiens
  misc_RNA (1)...(19): siRNA sense strand
aacacaagaccaauuggaa

SEQ ID NO: 1669889 - RNA, 19 nt, Homo sapiens
  misc_RNA (1)...(19): siRNA sense strand
agucuggggucgccaauuu

SEQ ID NO: 1669890 - RNA, 19 nt, Homo sapiens
  misc_RNA (1)...(19): siRNA sense strand
caagaagucugugguggua

SEQ ID NO: 1669891 - RNA, 19 nt, Homo sapiens
  misc_RNA (1)...(19): siRNA sense strand
gagagaagaugcucacagu

SEQ ID NO: 1669892 - RNA, 19 nt, Homo sapiens
  misc_RNA (1)...(19): siRNA sense strand
gcaacacccugcccaccua

SEQ ID NO: 1669893 - RNA, 19 nt, Homo sapiens
  misc_RNA (1)...(19): siRNA sense strand
gggaagcccucacuguuca

SEQ ID NO: 1669894 - RNA, 19 nt, Homo sapiens
  misc_RNA (1)...(19): siRNA sense strand
gcggaagccuuacgaugug

SEQ ID NO: 1669895 - RNA, 19 nt, Homo sapiens
  misc_RNA (1)...(19): siRNA sense strand
agaagucuguggugguaaa

SEQ ID NO: 1669896 - RNA, 19 nt, Homo sapiens
  misc_RNA (1)...(19): siRNA sense strand
gcccaacacugcuggaagu

SEQ ID NO: 1669897 - RNA, 19 nt, Homo sapiens
  misc_RNA (1)...(19): siRNA sense strand
caccaucgggccaccauua

SEQ ID NO: 1669898 - RNA, 19 nt, Homo sapiens
  misc_RNA (1)...(19): siRNA sense strand
guucaucuccgucucagaa

SEQ ID NO: 1669899 - RNA, 19 nt, Homo sapiens
  misc_RNA (1)...(19): siRNA sense strand
gagccacacucugcuguca

SEQ ID NO: 1669900 - RNA, 19 nt, Homo sapiens
  misc_RNA (1)...(19): siRNA sense strand
gaaccgaguagaagacaag

SEQ ID NO: 1669901 - RNA, 19 nt, Homo sapiens
  misc_RNA (1)...(19): siRNA sense strand
caucuucuccucguacuuu

SEQ ID NO: 1669902 - RNA, 19 nt, Homo sapiens
  misc_RNA (1)...(19): siRNA sense strand
gaagugagcaugccccauu

SEQ ID NO: 1669903 - RNA, 19 nt, Homo sapiens
  misc_RNA (1)...(19): siRNA sense strand
gggacgucauugagcagua

SEQ ID NO: 1669904 - RNA, 19 nt, Homo sapiens
  misc_RNA (1)...(19): siRNA sense strand
aguucaagcuggacaaaga

SEQ ID NO: 1669905 - RNA, 19 nt, Homo sapiens
  misc_RNA (1)...(19): siRNA sense strand
caagaagaaauuccagcaa

SEQ ID NO: 1669906 - RNA, 19 nt, Homo sapiens
  misc_RNA (1)...(19): siRNA sense strand
gcaaggaucgcggcagcaa

SEQ ID NO: 1669907 - RNA, 19 nt, Homo sapiens
  misc_RNA (1)...(19): siRNA sense strand
gaagcccauuuccaucauc

SEQ ID NO: 1669908 - RNA, 19 nt, Homo sapiens
  misc_RNA (1)...(19): siRNA sense strand
ggacgucauugagcaguac

SEQ ID NO: 1669909 - RNA, 19 nt, Homo sapiens
  misc_RNA (1)...(19): siRNA sense strand
cgacggcuaugacaguucu

SEQ ID NO: 1669910 - RNA, 19 nt, Homo sapiens
  misc_RNA (1)...(19): siRNA sense strand
gcugauaaccacccuguac

SEQ ID NO: 1669911 - RNA, 19 nt, Homo sapiens
  misc_RNA (1)...(19): siRNA sense strand
agucuguggugguaaagaa

SEQ ID NO: 1669912 - RNA, 19 nt, Homo sapiens
  misc_RNA (1)...(19): siRNA sense strand
ucucacagcugcgggaaca

SEQ ID NO: 1669913 - RNA, 19 nt, Homo sapiens
  misc_RNA (1)...(19): siRNA sense strand
gauaaccacccuguacauc

SEQ ID NO: 1669914 - RNA, 19 nt, Homo sapiens
  misc_RNA (1)...(19): siRNA sense strand
agcaagcgcggaagccuua

SEQ ID NO: 1669915 - RNA, 19 nt, Homo sapiens
  misc_RNA (1)...(19): siRNA sense strand
gugcuaugcugccgagaac

SEQ ID NO: 1669916 - RNA, 19 nt, Homo sapiens
  misc_RNA (1)...(19): siRNA sense strand
ugacacccaucacccacau

SEQ ID NO: 1669917 - RNA, 19 nt, Homo sapiens
  misc_RNA (1)...(19): siRNA sense strand
gcguggaguucggcagcua

SEQ ID NO: 1669918 - RNA, 19 nt, Homo sapiens
  misc_RNA (1)...(19): siRNA sense strand
cgucgacccugagcucuuc

SEQ ID NO: 1669919 - RNA, 19 nt, Homo sapiens
  misc_RNA (1)...(19): siRNA sense strand
gcacuucaaccggcagauc

SEQ ID NO: 1669920 - RNA, 19 nt, Homo sapiens
  misc_RNA (1)...(19): siRNA sense strand
guccuggucugccucaucu

SEQ ID NO: 1669921 - RNA, 19 nt, Homo sapiens
  misc_RNA (1)...(19): siRNA sense strand
caagcuggacaaagacaau

SEQ ID NO: 1669922 - RNA, 19 nt, Homo sapiens
  misc_RNA (1)...(19): siRNA sense strand
uuguguaccuggcugagaa

SEQ ID NO: 1669923 - RNA, 19 nt, Homo sapiens
  misc_RNA (1)...(19): siRNA sense strand
cgacgcaugcaguacuuug

SEQ ID NO: 1669924 - RNA, 19 nt, Homo sapiens
  misc_RNA (1)...(19): siRNA sense strand
cccugaaggugcagcagaa

SEQ ID NO: 1669925 - RNA, 19 nt, Homo sapiens
  misc_RNA (1)...(19): siRNA sense strand
ccaaacccaagaagucugu

SEQ ID NO: 1669926 - RNA, 19 nt, Homo sapiens
  misc_RNA (1)...(19): siRNA sense strand
agaaggacgcggugaacga

SEQ ID NO: 1669927 - RNA, 19 nt, Homo sapiens
  misc_RNA (1)...(19): siRNA sense strand
cgcggaagccuuacgaugu

SEQ ID NO: 1669928 - RNA, 19 nt, Homo sapiens
  misc_RNA (1)...(19): siRNA sense strand
uaaggaagagcccaacacu

SEQ ID NO: 1669929 - RNA, 19 nt, Homo sapiens
  misc_RNA (1)...(19): siRNA sense strand
ggugcuaugcugccgagaa

SEQ ID NO: 1669930 - RNA, 19 nt, Homo sapiens
  misc_RNA (1)...(19): siRNA sense strand
caagaagucugugguggua

SEQ ID NO: 1669931 - RNA, 19 nt, Homo sapiens
  misc_RNA (1)...(19): siRNA sense strand
gagagaagaugcucacagu

SEQ ID NO: 1669932 - RNA, 19 nt, Homo sapiens
  misc_RNA (1)...(19): siRNA sense strand
gcaacacccugcccaccua

SEQ ID NO: 1669933 - RNA, 19 nt, Homo sapiens
  misc_RNA (1)...(19): siRNA sense strand
gggaagcccucacuguuca

SEQ ID NO: 1669934 - RNA, 19 nt, Homo sapiens
  misc_RNA (1)...(19): siRNA sense strand
gcggaagccuuacgaugug

SEQ ID NO: 1669935 - RNA, 19 nt, Homo sapiens
  misc_RNA (1)...(19): siRNA sense strand
agaagucuguggugguaaa

SEQ ID NO: 1669936 - RNA, 19 nt, Homo sapiens
  misc_RNA (1)...(19): siRNA sense strand
gcccaacacugcuggaagu

SEQ ID NO: 1669937 - RNA, 19 nt, Homo sapiens
  misc_RNA (1)...(19): siRNA sense strand
caccaucgggccaccauua

SEQ ID NO: 1669938 - RNA, 19 nt, Homo sapiens
  misc_RNA (1)...(19): siRNA sense strand
guucaucuccgucucagaa

SEQ ID NO: 1669939 - RNA, 19 nt, Homo sapiens
  misc_RNA (1)...(19): siRNA sense strand
gagccacacucugcuguca

SEQ ID NO: 1669940 - RNA, 19 nt, Homo sapiens
  misc_RNA (1)...(19): siRNA sense strand
gaaccgaguagaagacaag

SEQ ID NO: 1669941 - RNA, 19 nt, Homo sapiens
  misc_RNA (1)...(19): siRNA sense strand
caucuucuccucguacuuu

SEQ ID NO: 1669942 - RNA, 19 nt, Homo sapiens
  misc_RNA (1)...(19): siRNA sense strand
gaagugagcaugccccauu

SEQ ID NO: 1669943 - RNA, 19 nt, Homo sapiens
  misc_RNA (1)...(19): siRNA sense strand
gggacgucauugagcagua

SEQ ID NO: 1669944 - RNA, 19 nt, Homo sapiens
  misc_RNA (1)...(19): siRNA sense strand
aguucaagcuggacaaaga

SEQ ID NO: 1669945 - RNA, 19 nt, Homo sapiens
  misc_RNA (1)...(19): siRNA sense strand
caagaagaaauuccagcaa

SEQ ID NO: 1669946 - RNA, 19 nt, Homo sapiens
  misc_RNA (1)...(19): siRNA sense strand
gcaaggaucgcggcagcaa

SEQ ID NO: 1669947 - RNA, 19 nt, Homo sapiens
  misc_RNA (1)...(19): siRNA sense strand
gaagcccauuuccaucauc

SEQ ID NO: 1669948 - RNA, 19 nt, Homo sapiens
  misc_RNA (1)...(19): siRNA sense strand
ggacgucauugagcaguac

SEQ ID NO: 1669949 - RNA, 19 nt, Homo sapiens
  misc_RNA (1)...(19): siRNA sense strand
cgacggcuaugacaguucu

SEQ ID NO: 1669950 - RNA, 19 nt, Homo sapiens
  misc_RNA (1)...(19): siRNA sense strand
gcugauaaccacccuguac

SEQ ID NO: 1669951 - RNA, 19 nt, Homo sapiens
  misc_RNA (1)...(19): siRNA sense strand
agucuguggugguaaagaa

SEQ ID NO: 1669952 - RNA, 19 nt, Homo sapiens
  misc_RNA (1)...(19): siRNA sense strand
ucucacagcugcgggaaca

SEQ ID NO: 1669953 - RNA, 19 nt, Homo sapiens
  misc_RNA (1)...(19): siRNA sense strand
gauaaccacccuguacauc

SEQ ID NO: 1669954 - RNA, 19 nt, Homo sapiens
  misc_RNA (1)...(19): siRNA sense strand
agcaagcgcggaagccuua

SEQ ID NO: 1669955 - RNA, 19 nt, Homo sapiens
  misc_RNA (1)...(19): siRNA sense strand
gugcuaugcugccgagaac

SEQ ID NO: 1669956 - RNA, 19 nt, Homo sapiens
  misc_RNA (1)...(19): siRNA sense strand
ugacacccaucacccacau

SEQ ID NO: 1669957 - RNA, 19 nt, Homo sapiens
  misc_RNA (1)...(19): siRNA sense strand
gcguggaguucggcagcua

SEQ ID NO: 1669958 - RNA, 19 nt, Homo sapiens
  misc_RNA (1)...(19): siRNA sense strand
cgucgacccugagcucuuc

SEQ ID NO: 1669959 - RNA, 19 nt, Homo sapiens
  misc_RNA (1)...(19): siRNA sense strand
gcacuucaaccggcagauc

SEQ ID NO: 1669960 - RNA, 19 nt, Homo sapiens
  misc_RNA (1)...(19): siRNA sense strand
guccuggucugccucaucu

SEQ ID NO: 1669961 - RNA, 19 nt, Homo sapiens
  misc_RNA (1)...(19): siRNA sense strand
caagcuggacaaagacaau

SEQ ID NO: 1669962 - RNA, 19 nt, Homo sapiens
  misc_RNA (1)...(19): siRNA sense strand
uuguguaccuggcugagaa

SEQ ID NO: 1669963 - RNA, 19 nt, Homo sapiens
  misc_RNA (1)...(19): siRNA sense strand
cgacgcaugcaguacuuug

SEQ ID NO: 1669964 - RNA, 19 nt, Homo sapiens
  misc_RNA (1)...(19): siRNA sense strand
cccugaaggugcagcagaa

SEQ ID NO: 1669965 - RNA, 19 nt, Homo sapiens
  misc_RNA (1)...(19): siRNA sense strand
ccaaacccaagaagucugu

SEQ ID NO: 1669966 - RNA, 19 nt, Homo sapiens
  misc_RNA (1)...(19): siRNA sense strand
agaaggacgcggugaacga

SEQ ID NO: 1669967 - RNA, 19 nt, Homo sapiens
  misc_RNA (1)...(19): siRNA sense strand
cgcggaagccuuacgaugu

SEQ ID NO: 1669968 - RNA, 19 nt, Homo sapiens
  misc_RNA (1)...(19): siRNA sense strand
uaaggaagagcccaacacu

SEQ ID NO: 1669969 - RNA, 19 nt, Homo sapiens
  misc_RNA (1)...(19): siRNA sense strand
ggugcuaugcugccgagaa

SEQ ID NO: 1669970 - RNA, 19 nt, Homo sapiens
  misc_RNA (1)...(19): siRNA sense strand
caagaagucugugguggua

SEQ ID NO: 1669971 - RNA, 19 nt, Homo sapiens
  misc_RNA (1)...(19): siRNA sense strand
gagagaagaugcucacagu

SEQ ID NO: 1669972 - RNA, 19 nt, Homo sapiens
  misc_RNA (1)...(19): siRNA sense strand
gcaacacccugcccaccua

SEQ ID NO: 1669973 - RNA, 19 nt, Homo sapiens
  misc_RNA (1)...(19): siRNA sense strand
gggaagcccucacuguuca

SEQ ID NO: 1669974 - RNA, 19 nt, Homo sapiens
  misc_RNA (1)...(19): siRNA sense strand
gcggaagccuuacgaugug

SEQ ID NO: 1669975 - RNA, 19 nt, Homo sapiens
  misc_RNA (1)...(19): siRNA sense strand
agaagucuguggugguaaa

SEQ ID NO: 1669976 - RNA, 19 nt, Homo sapiens
  misc_RNA (1)...(19): siRNA sense strand
gcccaacacugcuggaagu

SEQ ID NO: 1669977 - RNA, 19 nt, Homo sapiens
  misc_RNA (1)...(19): siRNA sense strand
caccaucgggccaccauua

SEQ ID NO: 1669978 - RNA, 19 nt, Homo sapiens
  misc_RNA (1)...(19): siRNA sense strand
guucaucuccgucucagaa

SEQ ID NO: 1669979 - RNA, 19 nt, Homo sapiens
  misc_RNA (1)...(19): siRNA sense strand
gagccacacucugcuguca

SEQ ID NO: 1669980 - RNA, 19 nt, Homo sapiens
  misc_RNA (1)...(19): siRNA sense strand
gaaccgaguagaagacaag

SEQ ID NO: 1669981 - RNA, 19 nt, Homo sapiens
  misc_RNA (1)...(19): siRNA sense strand
caucuucuccucguacuuu

SEQ ID NO: 1669982 - RNA, 19 nt, Homo sapiens
  misc_RNA (1)...(19): siRNA sense strand
gaagugagcaugccccauu

SEQ ID NO: 1669983 - RNA, 19 nt, Homo sapiens
  misc_RNA (1)...(19): siRNA sense strand
gggacgucauugagcagua

SEQ ID NO: 1669984 - RNA, 19 nt, Homo sapiens
  misc_RNA (1)...(19): siRNA sense strand
aguucaagcuggacaaaga

SEQ ID NO: 1669985 - RNA, 19 nt, Homo sapiens
  misc_RNA (1)...(19): siRNA sense strand
caagaagaaauuccagcaa

SEQ ID NO: 1669986 - RNA, 19 nt, Homo sapiens
  misc_RNA (1)...(19): siRNA sense strand
gcaaggaucgcggcagcaa

SEQ ID NO: 1669987 - RNA, 19 nt, Homo sapiens
  misc_RNA (1)...(19): siRNA sense strand
gaagcccauuuccaucauc

SEQ ID NO: 1669988 - RNA, 19 nt, Homo sapiens
  misc_RNA (1)...(19): siRNA sense strand
ggacgucauugagcaguac

SEQ ID NO: 1669989 - RNA, 19 nt, Homo sapiens
  misc_RNA (1)...(19): siRNA sense strand
cgacggcuaugacaguucu

SEQ ID NO: 1669990 - RNA, 19 nt, Homo sapiens
  misc_RNA (1)...(19): siRNA sense strand
gcugauaaccacccuguac

SEQ ID NO: 1669991 - RNA, 19 nt, Homo sapiens
  misc_RNA (1)...(19): siRNA sense strand
agucuguggugguaaagaa

SEQ ID NO: 1669992 - RNA, 19 nt, Homo sapiens
  misc_RNA (1)...(19): siRNA sense strand
ucucacagcugcgggaaca

SEQ ID NO: 1669993 - RNA, 19 nt, Homo sapiens
  misc_RNA (1)...(19): siRNA sense strand
gauaaccacccuguacauc

SEQ ID NO: 1669994 - RNA, 19 nt, Homo sapiens
  misc_RNA (1)...(19): siRNA sense strand
agcaagcgcggaagccuua

SEQ ID NO: 1669995 - RNA, 19 nt, Homo sapiens
  misc_RNA (1)...(19): siRNA sense strand
gugcuaugcugccgagaac

SEQ ID NO: 1669996 - RNA, 19 nt, Homo sapiens
  misc_RNA (1)...(19): siRNA sense strand
ugacacccaucacccacau

SEQ ID NO: 1669997 - RNA, 19 nt, Homo sapiens
  misc_RNA (1)...(19): siRNA sense strand
gcguggaguucggcagcua

SEQ ID NO: 1669998 - RNA, 19 nt, Homo sapiens
  misc_RNA (1)...(19): siRNA sense strand
cgucgacccugagcucuuc

SEQ ID NO: 1669999 - RNA, 19 nt, Homo sapiens
  misc_RNA (1)...(19): siRNA sense strand
gcacuucaaccggcagauc

SEQ ID NO: 1670000 - RNA, 19 nt, Homo sapiens
  misc_RNA (1)...(19): siRNA sense strand
guccuggucugccucaucu

SEQ ID NO: 1670001 - RNA, 19 nt, Homo sapiens
  misc_RNA (1)...(19): siRNA sense strand
caagcuggacaaagacaau

SEQ ID NO: 1670002 - RNA, 19 nt, Homo sapiens
  misc_RNA (1)...(19): siRNA sense strand
uuguguaccuggcugagaa

SEQ ID NO: 1670003 - RNA, 19 nt, Homo sapiens
  misc_RNA (1)...(19): siRNA sense strand
cgacgcaugcaguacuuug

SEQ ID NO: 1670004 - RNA, 19 nt, Homo sapiens
  misc_RNA (1)...(19): siRNA sense strand
cccugaaggugcagcagaa

SEQ ID NO: 1670005 - RNA, 19 nt, Homo sapiens
  misc_RNA (1)...(19): siRNA sense strand
ccaaacccaagaagucugu

SEQ ID NO: 1670006 - RNA, 19 nt, Homo sapiens
  misc_RNA (1)...(19): siRNA sense strand
agaaggacgcggugaacga

SEQ ID NO: 1670007 - RNA, 19 nt, Homo sapiens
  misc_RNA (1)...(19): siRNA sense strand
cgcggaagccuuacgaugu

SEQ ID NO: 1670008 - RNA, 19 nt, Homo sapiens
  misc_RNA (1)...(19): siRNA sense strand
uaaggaagagcccaacacu

SEQ ID NO: 1670009 - RNA, 19 nt, Homo sapiens
  misc_RNA (1)...(19): siRNA sense strand
ggugcuaugcugccgagaa

SEQ ID NO: 1670010 - RNA, 19 nt, Homo sapiens
  misc_RNA (1)...(19): siRNA sense strand
caagaagucugugguggua

SEQ ID NO: 1670011 - RNA, 19 nt, Homo sapiens
  misc_RNA (1)...(19): siRNA sense strand
gagagaagaugcucacagu

SEQ ID NO: 1670012 - RNA, 19 nt, Homo sapiens
  misc_RNA (1)...(19): siRNA sense strand
gcaacacccugcccaccua

SEQ ID NO: 1670013 - RNA, 19 nt, Homo sapiens
  misc_RNA (1)...(19): siRNA sense strand
gggaagcccucacuguuca

SEQ ID NO: 1670014 - RNA, 19 nt, Homo sapiens
  misc_RNA (1)...(19): siRNA sense strand
gcggaagccuuacgaugug

SEQ ID NO: 1670015 - RNA, 19 nt, Homo sapiens
  misc_RNA (1)...(19): siRNA sense strand
agaagucuguggugguaaa

SEQ ID NO: 1670016 - RNA, 19 nt, Homo sapiens
  misc_RNA (1)...(19): siRNA sense strand
gcccaacacugcuggaagu

SEQ ID NO: 1670017 - RNA, 19 nt, Homo sapiens
  misc_RNA (1)...(19): siRNA sense strand
caccaucgggccaccauua

SEQ ID NO: 1670018 - RNA, 19 nt, Homo sapiens
  misc_RNA (1)...(19): siRNA sense strand
guucaucuccgucucagaa

SEQ ID NO: 1670019 - RNA, 19 nt, Homo sapiens
  misc_RNA (1)...(19): siRNA sense strand
gagccacacucugcuguca

SEQ ID NO: 1670020 - RNA, 19 nt, Homo sapiens
  misc_RNA (1)...(19): siRNA sense strand
gaaccgaguagaagacaag

SEQ ID NO: 1670021 - RNA, 19 nt, Homo sapiens
  misc_RNA (1)...(19): siRNA sense strand
caucuucuccucguacuuu

SEQ ID NO: 1670022 - RNA, 19 nt, Homo sapiens
  misc_RNA (1)...(19): siRNA sense strand
gaagugagcaugccccauu

SEQ ID NO: 1670023 - RNA, 19 nt, Homo sapiens
  misc_RNA (1)...(19): siRNA sense strand
gggacgucauugagcagua

SEQ ID NO: 1670024 - RNA, 19 nt, Homo sapiens
  misc_RNA (1)...(19): siRNA sense strand
aguucaagcuggacaaaga

SEQ ID NO: 1670025 - RNA, 19 nt, Homo sapiens
  misc_RNA (1)...(19): siRNA sense strand
caagaagaaauuccagcaa

SEQ ID NO: 1670026 - RNA, 19 nt, Homo sapiens
  misc_RNA (1)...(19): siRNA sense strand
gcaaggaucgcggcagcaa

SEQ ID NO: 1670027 - RNA, 19 nt, Homo sapiens
  misc_RNA (1)...(19): siRNA sense strand
gaagcccauuuccaucauc

SEQ ID NO: 1670028 - RNA, 19 nt, Homo sapiens
  misc_RNA (1)...(19): siRNA sense strand
ggacgucauugagcaguac

SEQ ID NO: 1670029 - RNA, 19 nt, Homo sapiens
  misc_RNA (1)...(19): siRNA sense strand
cgacggcuaugacaguucu

SEQ ID NO: 1670030 - RNA, 19 nt, Homo sapiens
  misc_RNA (1)...(19): siRNA sense strand
gcugauaaccacccuguac

SEQ ID NO: 1670031 - RNA, 19 nt, Homo sapiens
  misc_RNA (1)...(19): siRNA sense strand
agucuguggugguaaagaa

SEQ ID NO: 1670032 - RNA, 19 nt, Homo sapiens
  misc_RNA (1)...(19): siRNA sense strand
ucucacagcugcgggaaca

SEQ ID NO: 1670033 - RNA, 19 nt, Homo sapiens
  misc_RNA (1)...(19): siRNA sense strand
gauaaccacccuguacauc

SEQ ID NO: 1670034 - RNA, 19 nt, Homo sapiens
  misc_RNA (1)...(19): siRNA sense strand
agcaagcgcggaagccuua

SEQ ID NO: 1670035 - RNA, 19 nt, Homo sapiens
  misc_RNA (1)...(19): siRNA sense strand
gugcuaugcugccgagaac

SEQ ID NO: 1670036 - RNA, 19 nt, Homo sapiens
  misc_RNA (1)...(19): siRNA sense strand
ugacacccaucacccacau

SEQ ID NO: 1670037 - RNA, 19 nt, Homo sapiens
  misc_RNA (1)...(19): siRNA sense strand
gcguggaguucggcagcua

SEQ ID NO: 1670038 - RNA, 19 nt, Homo sapiens
  misc_RNA (1)...(19): siRNA sense strand
cgucgacccugagcucuuc

SEQ ID NO: 1670039 - RNA, 19 nt, Homo sapiens
  misc_RNA (1)...(19): siRNA sense strand
gcacuucaaccggcagauc

SEQ ID NO: 1670040 - RNA, 19 nt, Homo sapiens
  misc_RNA (1)...(19): siRNA sense strand
guccuggucugccucaucu

SEQ ID NO: 1670041 - RNA, 19 nt, Homo sapiens
  misc_RNA (1)...(19): siRNA sense strand
caagcuggacaaagacaau

SEQ ID NO: 1670042 - RNA, 19 nt, Homo sapiens
  misc_RNA (1)...(19): siRNA sense strand
uuguguaccuggcugagaa

SEQ ID NO: 1670043 - RNA, 19 nt, Homo sapiens
  misc_RNA (1)...(19): siRNA sense strand
cgacgcaugcaguacuuug

SEQ ID NO: 1670044 - RNA, 19 nt, Homo sapiens
  misc_RNA (1)...(19): siRNA sense strand
cccugaaggugcagcagaa

SEQ ID NO: 1670045 - RNA, 19 nt, Homo sapiens
  misc_RNA (1)...(19): siRNA sense strand
ccaaacccaagaagucugu

SEQ ID NO: 1670046 - RNA, 19 nt, Homo sapiens
  misc_RNA (1)...(19): siRNA sense strand
agaaggacgcggugaacga

SEQ ID NO: 1670047 - RNA, 19 nt, Homo sapiens
  misc_RNA (1)...(19): siRNA sense strand
cgcggaagccuuacgaugu

SEQ ID NO: 1670048 - RNA, 19 nt, Homo sapiens
  misc_RNA (1)...(19): siRNA sense strand
uaaggaagagcccaacacu

SEQ ID NO: 1670049 - RNA, 19 nt, Homo sapiens
  misc_RNA (1)...(19): siRNA sense strand
ggugcuaugcugccgagaa

SEQ ID NO: 1670050 - RNA, 19 nt, Homo sapiens
  misc_RNA (1)...(19): siRNA sense strand
caagaagucugugguggua

SEQ ID NO: 1670051 - RNA, 19 nt, Homo sapiens
  misc_RNA (1)...(19): siRNA sense strand
gagagaagaugcucacagu

SEQ ID NO: 1670052 - RNA, 19 nt, Homo sapiens
  misc_RNA (1)...(19): siRNA sense strand
gcaacacccugcccaccua

SEQ ID NO: 1670053 - RNA, 19 nt, Homo sapiens
  misc_RNA (1)...(19): siRNA sense strand
gggaagcccucacuguuca

SEQ ID NO: 1670054 - RNA, 19 nt, Homo sapiens
  misc_RNA (1)...(19): siRNA sense strand
gcggaagccuuacgaugug

SEQ ID NO: 1670055 - RNA, 19 nt, Homo sapiens
  misc_RNA (1)...(19): siRNA sense strand
agaagucuguggugguaaa

SEQ ID NO: 1670056 - RNA, 19 nt, Homo sapiens
  misc_RNA (1)...(19): siRNA sense strand
gcccaacacugcuggaagu

SEQ ID NO: 1670057 - RNA, 19 nt, Homo sapiens
  misc_RNA (1)...(19): siRNA sense strand
caccaucgggccaccauua

SEQ ID NO: 1670058 - RNA, 19 nt, Homo sapiens
  misc_RNA (1)...(19): siRNA sense strand
guucaucuccgucucagaa

SEQ ID NO: 1670059 - RNA, 19 nt, Homo sapiens
  misc_RNA (1)...(19): siRNA sense strand
gagccacacucugcuguca

SEQ ID NO: 1670060 - RNA, 19 nt, Homo sapiens
  misc_RNA (1)...(19): siRNA sense strand
gaaccgaguagaagacaag

SEQ ID NO: 1670061 - RNA, 19 nt, Homo sapiens
  misc_RNA (1)...(19): siRNA sense strand
caucuucuccucguacuuu

SEQ ID NO: 1670062 - RNA, 19 nt, Homo sapiens
  misc_RNA (1)...(19): siRNA sense strand
gaagugagcaugccccauu

SEQ ID NO: 1670063 - RNA, 19 nt, Homo sapiens
  misc_RNA (1)...(19): siRNA sense strand
gggacgucauugagcagua

SEQ ID NO: 1670064 - RNA, 19 nt, Homo sapiens
  misc_RNA (1)...(19): siRNA sense strand
aguucaagcuggacaaaga

SEQ ID NO: 1670065 - RNA, 19 nt, Homo sapiens
  misc_RNA (1)...(19): siRNA sense strand
caagaagaaauuccagcaa

SEQ ID NO: 1670066 - RNA, 19 nt, Homo sapiens
  misc_RNA (1)...(19): siRNA sense strand
gcaaggaucgcggcagcaa

SEQ ID NO: 1670067 - RNA, 19 nt, Homo sapiens
  misc_RNA (1)...(19): siRNA sense strand
gaagcccauuuccaucauc

SEQ ID NO: 1670068 - RNA, 19 nt, Homo sapiens
  misc_RNA (1)...(19): siRNA sense strand
ggacgucauugagcaguac

SEQ ID NO: 1670069 - RNA, 19 nt, Homo sapiens
  misc_RNA (1)...(19): siRNA sense strand
cgacggcuaugacaguucu

SEQ ID NO: 1670070 - RNA, 19 nt, Homo sapiens
  misc_RNA (1)...(19): siRNA sense strand
gcugauaaccacccuguac

SEQ ID NO: 1670071 - RNA, 19 nt, Homo sapiens
  misc_RNA (1)...(19): siRNA sense strand
agucuguggugguaaagaa

SEQ ID NO: 1670072 - RNA, 19 nt, Homo sapiens
  misc_RNA (1)...(19): siRNA sense strand
ucucacagcugcgggaaca

SEQ ID NO: 1670073 - RNA, 19 nt, Homo sapiens
  misc_RNA (1)...(19): siRNA sense strand
gauaaccacccuguacauc

SEQ ID NO: 1670074 - RNA, 19 nt, Homo sapiens
  misc_RNA (1)...(19): siRNA sense strand
agcaagcgcggaagccuua

SEQ ID NO: 1670075 - RNA, 19 nt, Homo sapiens
  misc_RNA (1)...(19): siRNA sense strand
gugcuaugcugccgagaac

SEQ ID NO: 1670076 - RNA, 19 nt, Homo sapiens
  misc_RNA (1)...(19): siRNA sense strand
ugacacccaucacccacau

SEQ ID NO: 1670077 - RNA, 19 nt, Homo sapiens
  misc_RNA (1)...(19): siRNA sense strand
gcguggaguucggcagcua

SEQ ID NO: 1670078 - RNA, 19 nt, Homo sapiens
  misc_RNA (1)...(19): siRNA sense strand
cgucgacccugagcucuuc

SEQ ID NO: 1670079 - RNA, 19 nt, Homo sapiens
  misc_RNA (1)...(19): siRNA sense strand
gcacuucaaccggcagauc

SEQ ID NO: 1670080 - RNA, 19 nt, Homo sapiens
  misc_RNA (1)...(19): siRNA sense strand
guccuggucugccucaucu

SEQ ID NO: 1670081 - RNA, 19 nt, Homo sapiens
  misc_RNA (1)...(19): siRNA sense strand
caagcuggacaaagacaau

SEQ ID NO: 1670082 - RNA, 19 nt, Homo sapiens
  misc_RNA (1)...(19): siRNA sense strand
uuguguaccuggcugagaa

SEQ ID NO: 1670083 - RNA, 19 nt, Homo sapiens
  misc_RNA (1)...(19): siRNA sense strand
cgacgcaugcaguacuuug

SEQ ID NO: 1670084 - RNA, 19 nt, Homo sapiens
  misc_RNA (1)...(19): siRNA sense strand
cccugaaggugcagcagaa

SEQ ID NO: 1670085 - RNA, 19 nt, Homo sapiens
  misc_RNA (1)...(19): siRNA sense strand
ccaaacccaagaagucugu

SEQ ID NO: 1670086 - RNA, 19 nt, Homo sapiens
  misc_RNA (1)...(19): siRNA sense strand
agaaggacgcggugaacga

SEQ ID NO: 1670087 - RNA, 19 nt, Homo sapiens
  misc_RNA (1)...(19): siRNA sense strand
cgcggaagccuuacgaugu

SEQ ID NO: 1670088 - RNA, 19 nt, Homo sapiens
  misc_RNA (1)...(19): siRNA sense strand
uaaggaagagcccaacacu

SEQ ID NO: 1670089 - RNA, 19 nt, Homo sapiens
  misc_RNA (1)...(19): siRNA sense strand
ggugcuaugcugccgagaa

SEQ ID NO: 1670090 - RNA, 19 nt, Homo sapiens
  misc_RNA (1)...(19): siRNA sense strand
caagaagucugugguggua

SEQ ID NO: 1670091 - RNA, 19 nt, Homo sapiens
  misc_RNA (1)...(19): siRNA sense strand
gagagaagaugcucacagu

SEQ ID NO: 1670092 - RNA, 19 nt, Homo sapiens
  misc_RNA (1)...(19): siRNA sense strand
gcaacacccugcccaccua

SEQ ID NO: 1670093 - RNA, 19 nt, Homo sapiens
  misc_RNA (1)...(19): siRNA sense strand
gggaagcccucacuguuca

SEQ ID NO: 1670094 - RNA, 19 nt, Homo sapiens
  misc_RNA (1)...(19): siRNA sense strand
gcggaagccuuacgaugug

SEQ ID NO: 1670095 - RNA, 19 nt, Homo sapiens
  misc_RNA (1)...(19): siRNA sense strand
agaagucuguggugguaaa

SEQ ID NO: 1670096 - RNA, 19 nt, Homo sapiens
  misc_RNA (1)...(19): siRNA sense strand
gcccaacacugcuggaagu

SEQ ID NO: 1670097 - RNA, 19 nt, Homo sapiens
  misc_RNA (1)...(19): siRNA sense strand
caccaucgggccaccauua

SEQ ID NO: 1670098 - RNA, 19 nt, Homo sapiens
  misc_RNA (1)...(19): siRNA sense strand
guucaucuccgucucagaa

SEQ ID NO: 1670099 - RNA, 19 nt, Homo sapiens
  misc_RNA (1)...(19): siRNA sense strand
gagccacacucugcuguca

SEQ ID NO: 1670100 - RNA, 19 nt, Homo sapiens
  misc_RNA (1)...(19): siRNA sense strand
gaaccgaguagaagacaag

SEQ ID NO: 1670101 - RNA, 19 nt, Homo sapiens
  misc_RNA (1)...(19): siRNA sense strand
caucuucuccucguacuuu

SEQ ID NO: 1670102 - RNA, 19 nt, Homo sapiens
  misc_RNA (1)...(19): siRNA sense strand
gaagugagcaugccccauu

SEQ ID NO: 1670103 - RNA, 19 nt, Homo sapiens
  misc_RNA (1)...(19): siRNA sense strand
gggacgucauugagcagua

SEQ ID NO: 1670104 - RNA, 19 nt, Homo sapiens
  misc_RNA (1)...(19): siRNA sense strand
aguucaagcuggacaaaga

SEQ ID NO: 1670105 - RNA, 19 nt, Homo sapiens
  misc_RNA (1)...(19): siRNA sense strand
caagaagaaauuccagcaa

SEQ ID NO: 1670106 - RNA, 19 nt, Homo sapiens
  misc_RNA (1)...(19): siRNA sense strand
gcaaggaucgcggcagcaa

SEQ ID NO: 1670107 - RNA, 19 nt, Homo sapiens
  misc_RNA (1)...(19): siRNA sense strand
gaagcccauuuccaucauc

SEQ ID NO: 1670108 - RNA, 19 nt, Homo sapiens
  misc_RNA (1)...(19): siRNA sense strand
ggacgucauugagcaguac

SEQ ID NO: 1670109 - RNA, 19 nt, Homo sapiens
  misc_RNA (1)...(19): siRNA sense strand
cgacggcuaugacaguucu

SEQ ID NO: 1670110 - RNA, 19 nt, Homo sapiens
  misc_RNA (1)...(19): siRNA sense strand
gcugauaaccacccuguac

SEQ ID NO: 1670111 - RNA, 19 nt, Homo sapiens
  misc_RNA (1)...(19): siRNA sense strand
agucuguggugguaaagaa

SEQ ID NO: 1670112 - RNA, 19 nt, Homo sapiens
  misc_RNA (1)...(19): siRNA sense strand
ucucacagcugcgggaaca

SEQ ID NO: 1670113 - RNA, 19 nt, Homo sapiens
  misc_RNA (1)...(19): siRNA sense strand
gauaaccacccuguacauc

SEQ ID NO: 1670114 - RNA, 19 nt, Homo sapiens
  misc_RNA (1)...(19): siRNA sense strand
agcaagcgcggaagccuua

SEQ ID NO: 1670115 - RNA, 19 nt, Homo sapiens
  misc_RNA (1)...(19): siRNA sense strand
gugcuaugcugccgagaac

SEQ ID NO: 1670116 - RNA, 19 nt, Homo sapiens
  misc_RNA (1)...(19): siRNA sense strand
ugacacccaucacccacau

SEQ ID NO: 1670117 - RNA, 19 nt, Homo sapiens
  misc_RNA (1)...(19): siRNA sense strand
gcguggaguucggcagcua

SEQ ID NO: 1670118 - RNA, 19 nt, Homo sapiens
  misc_RNA (1)...(19): siRNA sense strand
cgucgacccugagcucuuc

SEQ ID NO: 1670119 - RNA, 19 nt, Homo sapiens
  misc_RNA (1)...(19): siRNA sense strand
gcacuucaaccggcagauc

SEQ ID NO: 1670120 - RNA, 19 nt, Homo sapiens
  misc_RNA (1)...(19): siRNA sense strand
guccuggucugccucaucu

SEQ ID NO: 1670121 - RNA, 19 nt, Homo sapiens
  misc_RNA (1)...(19): siRNA sense strand
caagcuggacaaagacaau

SEQ ID NO: 1670122 - RNA, 19 nt, Homo sapiens
  misc_RNA (1)...(19): siRNA sense strand
uuguguaccuggcugagaa

SEQ ID NO: 1670123 - RNA, 19 nt, Homo sapiens
  misc_RNA (1)...(19): siRNA sense strand
cgacgcaugcaguacuuug

SEQ ID NO: 1670124 - RNA, 19 nt, Homo sapiens
  misc_RNA (1)...(19): siRNA sense strand
cccugaaggugcagcagaa

SEQ ID NO: 1670125 - RNA, 19 nt, Homo sapiens
  misc_RNA (1)...(19): siRNA sense strand
ccaaacccaagaagucugu

SEQ ID NO: 1670126 - RNA, 19 nt, Homo sapiens
  misc_RNA (1)...(19): siRNA sense strand
agaaggacgcggugaacga

SEQ ID NO: 1670127 - RNA, 19 nt, Homo sapiens
  misc_RNA (1)...(19): siRNA sense strand
cgcggaagccuuacgaugu

SEQ ID NO: 1670128 - RNA, 19 nt, Homo sapiens
  misc_RNA (1)...(19): siRNA sense strand
uaaggaagagcccaacacu

SEQ ID NO: 1670129 - RNA, 19 nt, Homo sapiens
  misc_RNA (1)...(19): siRNA sense strand
ggugcuaugcugccgagaa

SEQ ID NO: 1670130 - RNA, 19 nt, Homo sapiens
  misc_RNA (1)...(19): siRNA sense strand
gcauaaaggucaagaguua

SEQ ID NO: 1670131 - RNA, 19 nt, Homo sapiens
  misc_RNA (1)...(19): siRNA sense strand
gaccuuacuugucauaaua

SEQ ID NO: 1670132 - RNA, 19 nt, Homo sapiens
  misc_RNA (1)...(19): siRNA sense strand
uuaccaggauccuuuauua

SEQ ID NO: 1670133 - RNA, 19 nt, Homo sapiens
  misc_RNA (1)...(19): siRNA sense strand
gaucgugcauucauggaua

SEQ ID NO: 1670134 - RNA, 19 nt, Homo sapiens
  misc_RNA (1)...(19): siRNA sense strand
gaauugcucuuuacuaugg

SEQ ID NO: 1670135 - RNA, 19 nt, Homo sapiens
  misc_RNA (1)...(19): siRNA sense strand
ucagcaagcucgaguuaaa

SEQ ID NO: 1670136 - RNA, 19 nt, Homo sapiens
  misc_RNA (1)...(19): siRNA sense strand
caugaaagcugugguucua

SEQ ID NO: 1670137 - RNA, 19 nt, Homo sapiens
  misc_RNA (1)...(19): siRNA sense strand
gauaugcuaggaaacauua

SEQ ID NO: 1670138 - RNA, 19 nt, Homo sapiens
  misc_RNA (1)...(19): siRNA sense strand
gugaaucgcuacaucaaga

SEQ ID NO: 1670139 - RNA, 19 nt, Homo sapiens
  misc_RNA (1)...(19): siRNA sense strand
ggaacaggaacugaaauua

SEQ ID NO: 1670140 - RNA, 19 nt, Homo sapiens
  misc_RNA (1)...(19): siRNA sense strand
gaacaggaacugaaauuac

SEQ ID NO: 1670141 - RNA, 19 nt, Homo sapiens
  misc_RNA (1)...(19): siRNA sense strand
gaagaugaaacaagaauag

SEQ ID NO: 1670142 - RNA, 19 nt, Homo sapiens
  misc_RNA (1)...(19): siRNA sense strand
gauacaggaugaccaugaa

SEQ ID NO: 1670143 - RNA, 19 nt, Homo sapiens
  misc_RNA (1)...(19): siRNA sense strand
uagaggaccuuacuuguca

SEQ ID NO: 1670144 - RNA, 19 nt, Homo sapiens
  misc_RNA (1)...(19): siRNA sense strand
ggaccuuacuugucauaau

SEQ ID NO: 1670145 - RNA, 19 nt, Homo sapiens
  misc_RNA (1)...(19): siRNA sense strand
auacaaauguuccuucaga

SEQ ID NO: 1670146 - RNA, 19 nt, Homo sapiens
  misc_RNA (1)...(19): siRNA sense strand
aaaccuaaauuccaagaug

SEQ ID NO: 1670147 - RNA, 19 nt, Homo sapiens
  misc_RNA (1)...(19): siRNA sense strand
uggaauugcucuuuacuau

SEQ ID NO: 1670148 - RNA, 19 nt, Homo sapiens
  misc_RNA (1)...(19): siRNA sense strand
ggacaaaacuggguucaga

SEQ ID NO: 1670149 - RNA, 19 nt, Homo sapiens
  misc_RNA (1)...(19): siRNA sense strand
gaucaacaacugccuaugu

SEQ ID NO: 1670150 - RNA, 19 nt, Homo sapiens
  misc_RNA (1)...(19): siRNA sense strand
uaucacagaucaacaacug

SEQ ID NO: 1670151 - RNA, 19 nt, Homo sapiens
  misc_RNA (1)...(19): siRNA sense strand
uaaagaaggcgaaauagag

SEQ ID NO: 1670152 - RNA, 19 nt, Homo sapiens
  misc_RNA (1)...(19): siRNA sense strand
gaaggauccuauuguuucu

SEQ ID NO: 1670153 - RNA, 19 nt, Homo sapiens
  misc_RNA (1)...(19): siRNA sense strand
ugaaagcugugguucuaau

SEQ ID NO: 1670154 - RNA, 19 nt, Homo sapiens
  misc_RNA (1)...(19): siRNA sense strand
ucagaacucgucuucauuu

SEQ ID NO: 1670155 - RNA, 19 nt, Homo sapiens
  misc_RNA (1)...(19): siRNA sense strand
gcagaauguuauacaguag

SEQ ID NO: 1670156 - RNA, 19 nt, Homo sapiens
  misc_RNA (1)...(19): siRNA sense strand
gaucuacagcuuucacuau

SEQ ID NO: 1670157 - RNA, 19 nt, Homo sapiens
  misc_RNA (1)...(19): siRNA sense strand
uacaguaggugaauuaugg

SEQ ID NO: 1670158 - RNA, 19 nt, Homo sapiens
  misc_RNA (1)...(19): siRNA sense strand
ugcagaauguuauacagua

SEQ ID NO: 1670159 - RNA, 19 nt, Homo sapiens
  misc_RNA (1)...(19): siRNA sense strand
ggauacaggaugaccauga

SEQ ID NO: 1670160 - RNA, 19 nt, Homo sapiens
  misc_RNA (1)...(19): siRNA sense strand
ugaaggauccuauuguuuc

SEQ ID NO: 1670161 - RNA, 19 nt, Homo sapiens
  misc_RNA (1)...(19): siRNA sense strand
caacuuggaauugcucuuu

SEQ ID NO: 1670162 - RNA, 19 nt, Homo sapiens
  misc_RNA (1)...(19): siRNA sense strand
gaaugccagugguaaaaua

SEQ ID NO: 1670163 - RNA, 19 nt, Homo sapiens
  misc_RNA (1)...(19): siRNA sense strand
uaaguggacauauucauga

SEQ ID NO: 1670164 - RNA, 19 nt, Homo sapiens
  misc_RNA (1)...(19): siRNA sense strand
caucaaccaugcaucaaca

SEQ ID NO: 1670165 - RNA, 19 nt, Homo sapiens
  misc_RNA (1)...(19): siRNA sense strand
ccaggauccuuuauuauac

SEQ ID NO: 1670166 - RNA, 19 nt, Homo sapiens
  misc_RNA (1)...(19): siRNA sense strand
ggauauuucugcaacugau

SEQ ID NO: 1670167 - RNA, 19 nt, Homo sapiens
  misc_RNA (1)...(19): siRNA sense strand
gaaagcugugguucuaauu

SEQ ID NO: 1670168 - RNA, 19 nt, Homo sapiens
  misc_RNA (1)...(19): siRNA sense strand
ugccugcaauugugaguua

SEQ ID NO: 1670169 - RNA, 19 nt, Homo sapiens
  misc_RNA (1)...(19): siRNA sense strand
agaguuauauucacagcaa

SEQ ID NO: 1670170 - RNA, 19 nt, Homo sapiens
  misc_RNA (1)...(19): siRNA sense strand
gaaacuuaaggaugggaua

SEQ ID NO: 1670171 - RNA, 19 nt, Homo sapiens
  misc_RNA (1)...(19): siRNA sense strand
cauuacagguucugaagau

SEQ ID NO: 1670172 - RNA, 19 nt, Homo sapiens
  misc_RNA (1)...(19): siRNA sense strand
gaaauagaggaccuuacuu

SEQ ID NO: 1670173 - RNA, 19 nt, Homo sapiens
  misc_RNA (1)...(19): siRNA sense strand
uccuacagauccugacuua

SEQ ID NO: 1670174 - RNA, 19 nt, Homo sapiens
  misc_RNA (1)...(19): siRNA sense strand
uuaaugagcuaugugaauc

SEQ ID NO: 1670175 - RNA, 19 nt, Homo sapiens
  misc_RNA (1)...(19): siRNA sense strand
gaacucgucuucauuuuac

SEQ ID NO: 1670176 - RNA, 19 nt, Homo sapiens
  misc_RNA (1)...(19): siRNA sense strand
gaaacaagaauagauaugc

SEQ ID NO: 1670177 - RNA, 19 nt, Homo sapiens
  misc_RNA (1)...(19): siRNA sense strand
aaauagaggaccuuacuug

SEQ ID NO: 1670178 - RNA, 19 nt, Homo sapiens
  misc_RNA (1)...(19): siRNA sense strand
gauuagacgaguuguaaau

SEQ ID NO: 1670179 - RNA, 19 nt, Homo sapiens
  misc_RNA (1)...(19): siRNA sense strand
cugccuauguuuauucgua

SEQ ID NO: 1670180 - RNA, 19 nt, Homo sapiens
  misc_RNA (1)...(19): siRNA sense strand
gugcauucauggauauuuc

SEQ ID NO: 1670181 - RNA, 19 nt, Homo sapiens
  misc_RNA (1)...(19): siRNA sense strand
ggaacgauccugcaucaac

SEQ ID NO: 1670182 - RNA, 19 nt, Homo sapiens
  misc_RNA (1)...(19): siRNA sense strand
guacaguuugucuugauaa

SEQ ID NO: 1670183 - RNA, 19 nt, Homo sapiens
  misc_RNA (1)...(19): siRNA sense strand
aagaugauaucguccuuuc

SEQ ID NO: 1670184 - RNA, 19 nt, Homo sapiens
  misc_RNA (1)...(19): siRNA sense strand
aaaguuggaugugcuggaa

SEQ ID NO: 1670185 - RNA, 19 nt, Homo sapiens
  misc_RNA (1)...(19): siRNA sense strand
ggaauugcucuuuacuaug

SEQ ID NO: 1670186 - RNA, 19 nt, Homo sapiens
  misc_RNA (1)...(19): siRNA sense strand
accaggauccuuuauuaua

SEQ ID NO: 1670187 - RNA, 19 nt, Homo sapiens
  misc_RNA (1)...(19): siRNA sense strand
ucaauacuauggaaugcau

SEQ ID NO: 1670188 - RNA, 19 nt, Homo sapiens
  misc_RNA (1)...(19): siRNA sense strand
gucaagaguuauauucaca

SEQ ID NO: 1670189 - RNA, 19 nt, Homo sapiens
  misc_RNA (1)...(19): siRNA sense strand
gcucuuuacuauggagaaa

SEQ ID NO: 1670190 - RNA, 19 nt, Homo sapiens
  misc_RNA (1)...(19): siRNA sense strand
cuucagaacucgucuucau

SEQ ID NO: 1670191 - RNA, 19 nt, Homo sapiens
  misc_RNA (1)...(19): siRNA sense strand
gaagaugauaucguccuuu

SEQ ID NO: 1670192 - RNA, 19 nt, Homo sapiens
  misc_RNA (1)...(19): siRNA sense strand
gacgaguuguaaauaaugu

SEQ ID NO: 1670193 - RNA, 19 nt, Homo sapiens
  misc_RNA (1)...(19): siRNA sense strand
ugacuuaccaccagguuau

SEQ ID NO: 1670194 - RNA, 19 nt, Homo sapiens
  misc_RNA (1)...(19): siRNA sense strand
ggaacugaaauuaccauuc

SEQ ID NO: 1670195 - RNA, 19 nt, Homo sapiens
  misc_RNA (1)...(19): siRNA sense strand
uauauucacagcaagauga

SEQ ID NO: 1670196 - RNA, 19 nt, Homo sapiens
  misc_RNA (1)...(19): siRNA sense strand
cgaaauagaggaccuuacu

SEQ ID NO: 1670197 - RNA, 19 nt, Homo sapiens
  misc_RNA (1)...(19): siRNA sense strand
caacugccuauguuuauuc

SEQ ID NO: 1670198 - RNA, 19 nt, Homo sapiens
  misc_RNA (1)...(19): siRNA sense strand
cgucggaucuacagcuuuc

SEQ ID NO: 1670199 - RNA, 19 nt, Homo sapiens
  misc_RNA (1)...(19): siRNA sense strand
gcugagaaagguuaucaau

SEQ ID NO: 1670200 - RNA, 19 nt, Homo sapiens
  misc_RNA (1)...(19): siRNA sense strand
caagcucgaguuaaaguug

SEQ ID NO: 1670201 - RNA, 19 nt, Homo sapiens
  misc_RNA (1)...(19): siRNA sense strand
uuaaagaaggcgaaauaga

SEQ ID NO: 1670202 - RNA, 19 nt, Homo sapiens
  misc_RNA (1)...(19): siRNA sense strand
uguacaguuugucuugaua

SEQ ID NO: 1670203 - RNA, 19 nt, Homo sapiens
  misc_RNA (1)...(19): siRNA sense strand
caggauccuuuauuauaca

SEQ ID NO: 1670204 - RNA, 19 nt, Homo sapiens
  misc_RNA (1)...(19): siRNA sense strand
uuugaaggauccuauuguu

SEQ ID NO: 1670205 - RNA, 19 nt, Homo sapiens
  misc_RNA (1)...(19): siRNA sense strand
cagguuaugugcagagucu

SEQ ID NO: 1670206 - RNA, 19 nt, Homo sapiens
  misc_RNA (1)...(19): siRNA sense strand
ugggaacgauccugcauca

SEQ ID NO: 1670207 - RNA, 19 nt, Homo sapiens
  misc_RNA (1)...(19): siRNA sense strand
ucaugggccugguccuuug

SEQ ID NO: 1670208 - RNA, 19 nt, Homo sapiens
  misc_RNA (1)...(19): siRNA sense strand
ggucaagaguuauauucac

SEQ ID NO: 1670209 - RNA, 19 nt, Homo sapiens
  misc_RNA (1)...(19): siRNA sense strand
cuaggaaacauuacagguu

SEQ ID NO: 1670210 - RNA, 19 nt, Homo sapiens
  misc_RNA (1)...(19): siRNA sense strand
aaacggaaugccaguggua

SEQ ID NO: 1670211 - RNA, 19 nt, Homo sapiens
  misc_RNA (1)...(19): siRNA sense strand
ugaagaugauaucguccuu

SEQ ID NO: 1670212 - RNA, 19 nt, Homo sapiens
  misc_RNA (1)...(19): siRNA sense strand
aggcaacggugacuuucaa

SEQ ID NO: 1670213 - RNA, 19 nt, Homo sapiens
  misc_RNA (1)...(19): siRNA sense strand
aagcacagacuuugaagga

SEQ ID NO: 1670214 - RNA, 19 nt, Homo sapiens
  misc_RNA (1)...(19): siRNA sense strand
aaagauaugcuaggaaaca

SEQ ID NO: 1670215 - RNA, 19 nt, Homo sapiens
  misc_RNA (1)...(19): siRNA sense strand
gcuggaacaggaacugaaa

SEQ ID NO: 1670216 - RNA, 19 nt, Homo sapiens
  misc_RNA (1)...(19): siRNA sense strand
uacaaauguuccuucagaa

SEQ ID NO: 1670217 - RNA, 19 nt, Homo sapiens
  misc_RNA (1)...(19): siRNA sense strand
cugauuuggugcugagaaa

SEQ ID NO: 1670218 - RNA, 19 nt, Homo sapiens
  misc_RNA (1)...(19): siRNA sense strand
uacagguucugaagaugaa

SEQ ID NO: 1670219 - RNA, 19 nt, Homo sapiens
  misc_RNA (1)...(19): siRNA sense strand
gaggaccuuacuugucaua

SEQ ID NO: 1670220 - RNA, 19 nt, Homo sapiens
  misc_RNA (1)...(19): siRNA sense strand
acaacugccuauguuuauu

SEQ ID NO: 1670221 - RNA, 19 nt, Homo sapiens
  misc_RNA (1)...(19): siRNA sense strand
cugauuagacgaguuguaa

SEQ ID NO: 1670222 - RNA, 19 nt, Homo sapiens
  misc_RNA (1)...(19): siRNA sense strand
aaacauuacagguucugaa

SEQ ID NO: 1670223 - RNA, 19 nt, Homo sapiens
  misc_RNA (1)...(19): siRNA sense strand
ggaucuacagcuuucacua

SEQ ID NO: 1670224 - RNA, 19 nt, Homo sapiens
  misc_RNA (1)...(19): siRNA sense strand
gccuauguuuauucguaua

SEQ ID NO: 1670225 - RNA, 19 nt, Homo sapiens
  misc_RNA (1)...(19): siRNA sense strand
guuauacaguaggugaauu

SEQ ID NO: 1670226 - RNA, 19 nt, Homo sapiens
  misc_RNA (1)...(19): siRNA sense strand
agucauauguaacuccaau

SEQ ID NO: 1670227 - RNA, 19 nt, Homo sapiens
  misc_RNA (1)...(19): siRNA sense strand
uuacagguucugaagauga

SEQ ID NO: 1670228 - RNA, 19 nt, Homo sapiens
  misc_RNA (1)...(19): siRNA sense strand
aggaugggauacaggauga

SEQ ID NO: 1670229 - RNA, 19 nt, Homo sapiens
  misc_RNA (1)...(19): siRNA sense strand
ggauccuauuguuucuaua

SEQ ID NO: 1670230 - RNA, 19 nt, Homo sapiens
  misc_RNA (1)...(19): siRNA sense strand
gcauaaaggucaagaguua

SEQ ID NO: 1670231 - RNA, 19 nt, Homo sapiens
  misc_RNA (1)...(19): siRNA sense strand
gaccuuacuugucauaaua

SEQ ID NO: 1670232 - RNA, 19 nt, Homo sapiens
  misc_RNA (1)...(19): siRNA sense strand
uuaccaggauccuuuauua

SEQ ID NO: 1670233 - RNA, 19 nt, Homo sapiens
  misc_RNA (1)...(19): siRNA sense strand
gaucgugcauucauggaua

SEQ ID NO: 1670234 - RNA, 19 nt, Homo sapiens
  misc_RNA (1)...(19): siRNA sense strand
gaauugcucuuuacuaugg

SEQ ID NO: 1670235 - RNA, 19 nt, Homo sapiens
  misc_RNA (1)...(19): siRNA sense strand
ucagcaagcucgaguuaaa

SEQ ID NO: 1670236 - RNA, 19 nt, Homo sapiens
  misc_RNA (1)...(19): siRNA sense strand
caugaaagcugugguucua

SEQ ID NO: 1670237 - RNA, 19 nt, Homo sapiens
  misc_RNA (1)...(19): siRNA sense strand
gauaugcuaggaaacauua

SEQ ID NO: 1670238 - RNA, 19 nt, Homo sapiens
  misc_RNA (1)...(19): siRNA sense strand
gugaaucgcuacaucaaga

SEQ ID NO: 1670239 - RNA, 19 nt, Homo sapiens
  misc_RNA (1)...(19): siRNA sense strand
ggaacaggaacugaaauua

SEQ ID NO: 1670240 - RNA, 19 nt, Homo sapiens
  misc_RNA (1)...(19): siRNA sense strand
gaacaggaacugaaauuac

SEQ ID NO: 1670241 - RNA, 19 nt, Homo sapiens
  misc_RNA (1)...(19): siRNA sense strand
gaagaugaaacaagaauag

SEQ ID NO: 1670242 - RNA, 19 nt, Homo sapiens
  misc_RNA (1)...(19): siRNA sense strand
gauacaggaugaccaugaa

SEQ ID NO: 1670243 - RNA, 19 nt, Homo sapiens
  misc_RNA (1)...(19): siRNA sense strand
uagaggaccuuacuuguca

SEQ ID NO: 1670244 - RNA, 19 nt, Homo sapiens
  misc_RNA (1)...(19): siRNA sense strand
ggaccuuacuugucauaau

SEQ ID NO: 1670245 - RNA, 19 nt, Homo sapiens
  misc_RNA (1)...(19): siRNA sense strand
auacaaauguuccuucaga

SEQ ID NO: 1670246 - RNA, 19 nt, Homo sapiens
  misc_RNA (1)...(19): siRNA sense strand
aaaccuaaauuccaagaug

SEQ ID NO: 1670247 - RNA, 19 nt, Homo sapiens
  misc_RNA (1)...(19): siRNA sense strand
uggaauugcucuuuacuau

SEQ ID NO: 1670248 - RNA, 19 nt, Homo sapiens
  misc_RNA (1)...(19): siRNA sense strand
ggacaaaacuggguucaga

SEQ ID NO: 1670249 - RNA, 19 nt, Homo sapiens
  misc_RNA (1)...(19): siRNA sense strand
gaucaacaacugccuaugu

SEQ ID NO: 1670250 - RNA, 19 nt, Homo sapiens
  misc_RNA (1)...(19): siRNA sense strand
uaucacagaucaacaacug

SEQ ID NO: 1670251 - RNA, 19 nt, Homo sapiens
  misc_RNA (1)...(19): siRNA sense strand
uaaagaaggcgaaauagag

SEQ ID NO: 1670252 - RNA, 19 nt, Homo sapiens
  misc_RNA (1)...(19): siRNA sense strand
gaaggauccuauuguuucu

SEQ ID NO: 1670253 - RNA, 19 nt, Homo sapiens
  misc_RNA (1)...(19): siRNA sense strand
ugaaagcugugguucuaau

SEQ ID NO: 1670254 - RNA, 19 nt, Homo sapiens
  misc_RNA (1)...(19): siRNA sense strand
ucagaacucgucuucauuu

SEQ ID NO: 1670255 - RNA, 19 nt, Homo sapiens
  misc_RNA (1)...(19): siRNA sense strand
gcagaauguuauacaguag

SEQ ID NO: 1670256 - RNA, 19 nt, Homo sapiens
  misc_RNA (1)...(19): siRNA sense strand
gaucuacagcuuucacuau

SEQ ID NO: 1670257 - RNA, 19 nt, Homo sapiens
  misc_RNA (1)...(19): siRNA sense strand
uacaguaggugaauuaugg

SEQ ID NO: 1670258 - RNA, 19 nt, Homo sapiens
  misc_RNA (1)...(19): siRNA sense strand
ugcagaauguuauacagua

SEQ ID NO: 1670259 - RNA, 19 nt, Homo sapiens
  misc_RNA (1)...(19): siRNA sense strand
ggauacaggaugaccauga

SEQ ID NO: 1670260 - RNA, 19 nt, Homo sapiens
  misc_RNA (1)...(19): siRNA sense strand
ugaaggauccuauuguuuc

SEQ ID NO: 1670261 - RNA, 19 nt, Homo sapiens
  misc_RNA (1)...(19): siRNA sense strand
caacuuggaauugcucuuu

SEQ ID NO: 1670262 - RNA, 19 nt, Homo sapiens
  misc_RNA (1)...(19): siRNA sense strand
gaaugccagugguaaaaua

SEQ ID NO: 1670263 - RNA, 19 nt, Homo sapiens
  misc_RNA (1)...(19): siRNA sense strand
uaaguggacauauucauga

SEQ ID NO: 1670264 - RNA, 19 nt, Homo sapiens
  misc_RNA (1)...(19): siRNA sense strand
caucaaccaugcaucaaca

SEQ ID NO: 1670265 - RNA, 19 nt, Homo sapiens
  misc_RNA (1)...(19): siRNA sense strand
ccaggauccuuuauuauac

SEQ ID NO: 1670266 - RNA, 19 nt, Homo sapiens
  misc_RNA (1)...(19): siRNA sense strand
ggauauuucugcaacugau

SEQ ID NO: 1670267 - RNA, 19 nt, Homo sapiens
  misc_RNA (1)...(19): siRNA sense strand
gaaagcugugguucuaauu

SEQ ID NO: 1670268 - RNA, 19 nt, Homo sapiens
  misc_RNA (1)...(19): siRNA sense strand
ugccugcaauugugaguua

SEQ ID NO: 1670269 - RNA, 19 nt, Homo sapiens
  misc_RNA (1)...(19): siRNA sense strand
agaguuauauucacagcaa

SEQ ID NO: 1670270 - RNA, 19 nt, Homo sapiens
  misc_RNA (1)...(19): siRNA sense strand
gaaacuuaaggaugggaua

SEQ ID NO: 1670271 - RNA, 19 nt, Homo sapiens
  misc_RNA (1)...(19): siRNA sense strand
cauuacagguucugaagau

SEQ ID NO: 1670272 - RNA, 19 nt, Homo sapiens
  misc_RNA (1)...(19): siRNA sense strand
gaaauagaggaccuuacuu

SEQ ID NO: 1670273 - RNA, 19 nt, Homo sapiens
  misc_RNA (1)...(19): siRNA sense strand
uccuacagauccugacuua

SEQ ID NO: 1670274 - RNA, 19 nt, Homo sapiens
  misc_RNA (1)...(19): siRNA sense strand
uuaaugagcuaugugaauc

SEQ ID NO: 1670275 - RNA, 19 nt, Homo sapiens
  misc_RNA (1)...(19): siRNA sense strand
gaacucgucuucauuuuac

SEQ ID NO: 1670276 - RNA, 19 nt, Homo sapiens
  misc_RNA (1)...(19): siRNA sense strand
gaaacaagaauagauaugc

SEQ ID NO: 1670277 - RNA, 19 nt, Homo sapiens
  misc_RNA (1)...(19): siRNA sense strand
aaauagaggaccuuacuug

SEQ ID NO: 1670278 - RNA, 19 nt, Homo sapiens
  misc_RNA (1)...(19): siRNA sense strand
gauuagacgaguuguaaau

SEQ ID NO: 1670279 - RNA, 19 nt, Homo sapiens
  misc_RNA (1)...(19): siRNA sense strand
cugccuauguuuauucgua

SEQ ID NO: 1670280 - RNA, 19 nt, Homo sapiens
  misc_RNA (1)...(19): siRNA sense strand
gugcauucauggauauuuc

SEQ ID NO: 1670281 - RNA, 19 nt, Homo sapiens
  misc_RNA (1)...(19): siRNA sense strand
ggaacgauccugcaucaac

SEQ ID NO: 1670282 - RNA, 19 nt, Homo sapiens
  misc_RNA (1)...(19): siRNA sense strand
guacaguuugucuugauaa

SEQ ID NO: 1670283 - RNA, 19 nt, Homo sapiens
  misc_RNA (1)...(19): siRNA sense strand
aagaugauaucguccuuuc

SEQ ID NO: 1670284 - RNA, 19 nt, Homo sapiens
  misc_RNA (1)...(19): siRNA sense strand
aaaguuggaugugcuggaa

SEQ ID NO: 1670285 - RNA, 19 nt, Homo sapiens
  misc_RNA (1)...(19): siRNA sense strand
ggaauugcucuuuacuaug

SEQ ID NO: 1670286 - RNA, 19 nt, Homo sapiens
  misc_RNA (1)...(19): siRNA sense strand
accaggauccuuuauuaua

SEQ ID NO: 1670287 - RNA, 19 nt, Homo sapiens
  misc_RNA (1)...(19): siRNA sense strand
ucaauacuauggaaugcau

SEQ ID NO: 1670288 - RNA, 19 nt, Homo sapiens
  misc_RNA (1)...(19): siRNA sense strand
gucaagaguuauauucaca

SEQ ID NO: 1670289 - RNA, 19 nt, Homo sapiens
  misc_RNA (1)...(19): siRNA sense strand
gcucuuuacuauggagaaa

SEQ ID NO: 1670290 - RNA, 19 nt, Homo sapiens
  misc_RNA (1)...(19): siRNA sense strand
cuucagaacucgucuucau

SEQ ID NO: 1670291 - RNA, 19 nt, Homo sapiens
  misc_RNA (1)...(19): siRNA sense strand
gaagaugauaucguccuuu

SEQ ID NO: 1670292 - RNA, 19 nt, Homo sapiens
  misc_RNA (1)...(19): siRNA sense strand
gacgaguuguaaauaaugu

SEQ ID NO: 1670293 - RNA, 19 nt, Homo sapiens
  misc_RNA (1)...(19): siRNA sense strand
ugacuuaccaccagguuau

SEQ ID NO: 1670294 - RNA, 19 nt, Homo sapiens
  misc_RNA (1)...(19): siRNA sense strand
ggaacugaaauuaccauuc

SEQ ID NO: 1670295 - RNA, 19 nt, Homo sapiens
  misc_RNA (1)...(19): siRNA sense strand
uauauucacagcaagauga

SEQ ID NO: 1670296 - RNA, 19 nt, Homo sapiens
  misc_RNA (1)...(19): siRNA sense strand
cgaaauagaggaccuuacu

SEQ ID NO: 1670297 - RNA, 19 nt, Homo sapiens
  misc_RNA (1)...(19): siRNA sense strand
caacugccuauguuuauuc

SEQ ID NO: 1670298 - RNA, 19 nt, Homo sapiens
  misc_RNA (1)...(19): siRNA sense strand
cgucggaucuacagcuuuc

SEQ ID NO: 1670299 - RNA, 19 nt, Homo sapiens
  misc_RNA (1)...(19): siRNA sense strand
gcugagaaagguuaucaau

SEQ ID NO: 1670300 - RNA, 19 nt, Homo sapiens
  misc_RNA (1)...(19): siRNA sense strand
caagcucgaguuaaaguug

SEQ ID NO: 1670301 - RNA, 19 nt, Homo sapiens
  misc_RNA (1)...(19): siRNA sense strand
uuaaagaaggcgaaauaga

SEQ ID NO: 1670302 - RNA, 19 nt, Homo sapiens
  misc_RNA (1)...(19): siRNA sense strand
uguacaguuugucuugaua

SEQ ID NO: 1670303 - RNA, 19 nt, Homo sapiens
  misc_RNA (1)...(19): siRNA sense strand
caggauccuuuauuauaca

SEQ ID NO: 1670304 - RNA, 19 nt, Homo sapiens
  misc_RNA (1)...(19): siRNA sense strand
uuugaaggauccuauuguu

SEQ ID NO: 1670305 - RNA, 19 nt, Homo sapiens
  misc_RNA (1)...(19): siRNA sense strand
cagguuaugugcagagucu

SEQ ID NO: 1670306 - RNA, 19 nt, Homo sapiens
  misc_RNA (1)...(19): siRNA sense strand
ugggaacgauccugcauca

SEQ ID NO: 1670307 - RNA, 19 nt, Homo sapiens
  misc_RNA (1)...(19): siRNA sense strand
ucaugggccugguccuuug

SEQ ID NO: 1670308 - RNA, 19 nt, Homo sapiens
  misc_RNA (1)...(19): siRNA sense strand
ggucaagaguuauauucac

SEQ ID NO: 1670309 - RNA, 19 nt, Homo sapiens
  misc_RNA (1)...(19): siRNA sense strand
cuaggaaacauuacagguu

SEQ ID NO: 1670310 - RNA, 19 nt, Homo sapiens
  misc_RNA (1)...(19): siRNA sense strand
aaacggaaugccaguggua

SEQ ID NO: 1670311 - RNA, 19 nt, Homo sapiens
  misc_RNA (1)...(19): siRNA sense strand
ugaagaugauaucguccuu

SEQ ID NO: 1670312 - RNA, 19 nt, Homo sapiens
  misc_RNA (1)...(19): siRNA sense strand
aggcaacggugacuuucaa

SEQ ID NO: 1670313 - RNA, 19 nt, Homo sapiens
  misc_RNA (1)...(19): siRNA sense strand
aagcacagacuuugaagga

SEQ ID NO: 1670314 - RNA, 19 nt, Homo sapiens
  misc_RNA (1)...(19): siRNA sense strand
aaagauaugcuaggaaaca

SEQ ID NO: 1670315 - RNA, 19 nt, Homo sapiens
  misc_RNA (1)...(19): siRNA sense strand
gcuggaacaggaacugaaa

SEQ ID NO: 1670316 - RNA, 19 nt, Homo sapiens
  misc_RNA (1)...(19): siRNA sense strand
uacaaauguuccuucagaa

SEQ ID NO: 1670317 - RNA, 19 nt, Homo sapiens
  misc_RNA (1)...(19): siRNA sense strand
cugauuuggugcugagaaa

SEQ ID NO: 1670318 - RNA, 19 nt, Homo sapiens
  misc_RNA (1)...(19): siRNA sense strand
uacagguucugaagaugaa

SEQ ID NO: 1670319 - RNA, 19 nt, Homo sapiens
  misc_RNA (1)...(19): siRNA sense strand
gaggaccuuacuugucaua

SEQ ID NO: 1670320 - RNA, 19 nt, Homo sapiens
  misc_RNA (1)...(19): siRNA sense strand
acaacugccuauguuuauu

SEQ ID NO: 1670321 - RNA, 19 nt, Homo sapiens
  misc_RNA (1)...(19): siRNA sense strand
cugauuagacgaguuguaa

SEQ ID NO: 1670322 - RNA, 19 nt, Homo sapiens
  misc_RNA (1)...(19): siRNA sense strand
aaacauuacagguucugaa

SEQ ID NO: 1670323 - RNA, 19 nt, Homo sapiens
  misc_RNA (1)...(19): siRNA sense strand
ggaucuacagcuuucacua

SEQ ID NO: 1670324 - RNA, 19 nt, Homo sapiens
  misc_RNA (1)...(19): siRNA sense strand
gccuauguuuauucguaua

SEQ ID NO: 1670325 - RNA, 19 nt, Homo sapiens
  misc_RNA (1)...(19): siRNA sense strand
guuauacaguaggugaauu

SEQ ID NO: 1670326 - RNA, 19 nt, Homo sapiens
  misc_RNA (1)...(19): siRNA sense strand
agucauauguaacuccaau

SEQ ID NO: 1670327 - RNA, 19 nt, Homo sapiens
  misc_RNA (1)...(19): siRNA sense strand
uuacagguucugaagauga

SEQ ID NO: 1670328 - RNA, 19 nt, Homo sapiens
  misc_RNA (1)...(19): siRNA sense strand
aggaugggauacaggauga

SEQ ID NO: 1670329 - RNA, 19 nt, Homo sapiens
  misc_RNA (1)...(19): siRNA sense strand
ggauccuauuguuucuaua

SEQ ID NO: 1670330 - RNA, 19 nt, Homo sapiens
  misc_RNA (1)...(19): siRNA sense strand
gcauaaaggucaagaguua

SEQ ID NO: 1670331 - RNA, 19 nt, Homo sapiens
  misc_RNA (1)...(19): siRNA sense strand
gaccuuacuugucauaaua

SEQ ID NO: 1670332 - RNA, 19 nt, Homo sapiens
  misc_RNA (1)...(19): siRNA sense strand
uuaccaggauccuuuauua

SEQ ID NO: 1670333 - RNA, 19 nt, Homo sapiens
  misc_RNA (1)...(19): siRNA sense strand
gaucgugcauucauggaua

SEQ ID NO: 1670334 - RNA, 19 nt, Homo sapiens
  misc_RNA (1)...(19): siRNA sense strand
gaauugcucuuuacuaugg

SEQ ID NO: 1670335 - RNA, 19 nt, Homo sapiens
  misc_RNA (1)...(19): siRNA sense strand
ucagcaagcucgaguuaaa

SEQ ID NO: 1670336 - RNA, 19 nt, Homo sapiens
  misc_RNA (1)...(19): siRNA sense strand
caugaaagcugugguucua

SEQ ID NO: 1670337 - RNA, 19 nt, Homo sapiens
  misc_RNA (1)...(19): siRNA sense strand
gauaugcuaggaaacauua

SEQ ID NO: 1670338 - RNA, 19 nt, Homo sapiens
  misc_RNA (1)...(19): siRNA sense strand
gugaaucgcuacaucaaga

SEQ ID NO: 1670339 - RNA, 19 nt, Homo sapiens
  misc_RNA (1)...(19): siRNA sense strand
ggaacaggaacugaaauua

SEQ ID NO: 1670340 - RNA, 19 nt, Homo sapiens
  misc_RNA (1)...(19): siRNA sense strand
gaacaggaacugaaauuac

SEQ ID NO: 1670341 - RNA, 19 nt, Homo sapiens
  misc_RNA (1)...(19): siRNA sense strand
gaagaugaaacaagaauag

SEQ ID NO: 1670342 - RNA, 19 nt, Homo sapiens
  misc_RNA (1)...(19): siRNA sense strand
gauacaggaugaccaugaa

SEQ ID NO: 1670343 - RNA, 19 nt, Homo sapiens
  misc_RNA (1)...(19): siRNA sense strand
uagaggaccuuacuuguca

SEQ ID NO: 1670344 - RNA, 19 nt, Homo sapiens
  misc_RNA (1)...(19): siRNA sense strand
ggaccuuacuugucauaau

SEQ ID NO: 1670345 - RNA, 19 nt, Homo sapiens
  misc_RNA (1)...(19): siRNA sense strand
auacaaauguuccuucaga

SEQ ID NO: 1670346 - RNA, 19 nt, Homo sapiens
  misc_RNA (1)...(19): siRNA sense strand
aaaccuaaauuccaagaug

SEQ ID NO: 1670347 - RNA, 19 nt, Homo sapiens
  misc_RNA (1)...(19): siRNA sense strand
uggaauugcucuuuacuau

SEQ ID NO: 1670348 - RNA, 19 nt, Homo sapiens
  misc_RNA (1)...(19): siRNA sense strand
ggacaaaacuggguucaga

SEQ ID NO: 1670349 - RNA, 19 nt, Homo sapiens
  misc_RNA (1)...(19): siRNA sense strand
gaucaacaacugccuaugu

SEQ ID NO: 1670350 - RNA, 19 nt, Homo sapiens
  misc_RNA (1)...(19): siRNA sense strand
uaucacagaucaacaacug

SEQ ID NO: 1670351 - RNA, 19 nt, Homo sapiens
  misc_RNA (1)...(19): siRNA sense strand
uaaagaaggcgaaauagag

SEQ ID NO: 1670352 - RNA, 19 nt, Homo sapiens
  misc_RNA (1)...(19): siRNA sense strand
gaaggauccuauuguuucu

SEQ ID NO: 1670353 - RNA, 19 nt, Homo sapiens
  misc_RNA (1)...(19): siRNA sense strand
ugaaagcugugguucuaau

SEQ ID NO: 1670354 - RNA, 19 nt, Homo sapiens
  misc_RNA (1)...(19): siRNA sense strand
ucagaacucgucuucauuu

SEQ ID NO: 1670355 - RNA, 19 nt, Homo sapiens
  misc_RNA (1)...(19): siRNA sense strand
gcagaauguuauacaguag

SEQ ID NO: 1670356 - RNA, 19 nt, Homo sapiens
  misc_RNA (1)...(19): siRNA sense strand
gaucuacagcuuucacuau

SEQ ID NO: 1670357 - RNA, 19 nt, Homo sapiens
  misc_RNA (1)...(19): siRNA sense strand
uacaguaggugaauuaugg

SEQ ID NO: 1670358 - RNA, 19 nt, Homo sapiens
  misc_RNA (1)...(19): siRNA sense strand
ugcagaauguuauacagua

SEQ ID NO: 1670359 - RNA, 19 nt, Homo sapiens
  misc_RNA (1)...(19): siRNA sense strand
ggauacaggaugaccauga

SEQ ID NO: 1670360 - RNA, 19 nt, Homo sapiens
  misc_RNA (1)...(19): siRNA sense strand
ugaaggauccuauuguuuc

SEQ ID NO: 1670361 - RNA, 19 nt, Homo sapiens
  misc_RNA (1)...(19): siRNA sense strand
caacuuggaauugcucuuu

SEQ ID NO: 1670362 - RNA, 19 nt, Homo sapiens
  misc_RNA (1)...(19): siRNA sense strand
gaaugccagugguaaaaua

SEQ ID NO: 1670363 - RNA, 19 nt, Homo sapiens
  misc_RNA (1)...(19): siRNA sense strand
uaaguggacauauucauga

SEQ ID NO: 1670364 - RNA, 19 nt, Homo sapiens
  misc_RNA (1)...(19): siRNA sense strand
caucaaccaugcaucaaca

SEQ ID NO: 1670365 - RNA, 19 nt, Homo sapiens
  misc_RNA (1)...(19): siRNA sense strand
ccaggauccuuuauuauac

SEQ ID NO: 1670366 - RNA, 19 nt, Homo sapiens
  misc_RNA (1)...(19): siRNA sense strand
ggauauuucugcaacugau

SEQ ID NO: 1670367 - RNA, 19 nt, Homo sapiens
  misc_RNA (1)...(19): siRNA sense strand
gaaagcugugguucuaauu

SEQ ID NO: 1670368 - RNA, 19 nt, Homo sapiens
  misc_RNA (1)...(19): siRNA sense strand
ugccugcaauugugaguua

SEQ ID NO: 1670369 - RNA, 19 nt, Homo sapiens
  misc_RNA (1)...(19): siRNA sense strand
agaguuauauucacagcaa

SEQ ID NO: 1670370 - RNA, 19 nt, Homo sapiens
  misc_RNA (1)...(19): siRNA sense strand
gaaacuuaaggaugggaua

SEQ ID NO: 1670371 - RNA, 19 nt, Homo sapiens
  misc_RNA (1)...(19): siRNA sense strand
cauuacagguucugaagau

SEQ ID NO: 1670372 - RNA, 19 nt, Homo sapiens
  misc_RNA (1)...(19): siRNA sense strand
gaaauagaggaccuuacuu

SEQ ID NO: 1670373 - RNA, 19 nt, Homo sapiens
  misc_RNA (1)...(19): siRNA sense strand
uccuacagauccugacuua

SEQ ID NO: 1670374 - RNA, 19 nt, Homo sapiens
  misc_RNA (1)...(19): siRNA sense strand
uuaaugagcuaugugaauc

SEQ ID NO: 1670375 - RNA, 19 nt, Homo sapiens
  misc_RNA (1)...(19): siRNA sense strand
gaacucgucuucauuuuac

SEQ ID NO: 1670376 - RNA, 19 nt, Homo sapiens
  misc_RNA (1)...(19): siRNA sense strand
gaaacaagaauagauaugc

SEQ ID NO: 1670377 - RNA, 19 nt, Homo sapiens
  misc_RNA (1)...(19): siRNA sense strand
aaauagaggaccuuacuug

SEQ ID NO: 1670378 - RNA, 19 nt, Homo sapiens
  misc_RNA (1)...(19): siRNA sense strand
gauuagacgaguuguaaau

SEQ ID NO: 1670379 - RNA, 19 nt, Homo sapiens
  misc_RNA (1)...(19): siRNA sense strand
cugccuauguuuauucgua

SEQ ID NO: 1670380 - RNA, 19 nt, Homo sapiens
  misc_RNA (1)...(19): siRNA sense strand
gugcauucauggauauuuc

SEQ ID NO: 1670381 - RNA, 19 nt, Homo sapiens
  misc_RNA (1)...(19): siRNA sense strand
ggaacgauccugcaucaac

SEQ ID NO: 1670382 - RNA, 19 nt, Homo sapiens
  misc_RNA (1)...(19): siRNA sense strand
guacaguuugucuugauaa

SEQ ID NO: 1670383 - RNA, 19 nt, Homo sapiens
  misc_RNA (1)...(19): siRNA sense strand
aagaugauaucguccuuuc

SEQ ID NO: 1670384 - RNA, 19 nt, Homo sapiens
  misc_RNA (1)...(19): siRNA sense strand
aaaguuggaugugcuggaa

SEQ ID NO: 1670385 - RNA, 19 nt, Homo sapiens
  misc_RNA (1)...(19): siRNA sense strand
ggaauugcucuuuacuaug

SEQ ID NO: 1670386 - RNA, 19 nt, Homo sapiens
  misc_RNA (1)...(19): siRNA sense strand
accaggauccuuuauuaua

SEQ ID NO: 1670387 - RNA, 19 nt, Homo sapiens
  misc_RNA (1)...(19): siRNA sense strand
ucaauacuauggaaugcau

SEQ ID NO: 1670388 - RNA, 19 nt, Homo sapiens
  misc_RNA (1)...(19): siRNA sense strand
gucaagaguuauauucaca

SEQ ID NO: 1670389 - RNA, 19 nt, Homo sapiens
  misc_RNA (1)...(19): siRNA sense strand
gcucuuuacuauggagaaa

SEQ ID NO: 1670390 - RNA, 19 nt, Homo sapiens
  misc_RNA (1)...(19): siRNA sense strand
cuucagaacucgucuucau

SEQ ID NO: 1670391 - RNA, 19 nt, Homo sapiens
  misc_RNA (1)...(19): siRNA sense strand
gaagaugauaucguccuuu

SEQ ID NO: 1670392 - RNA, 19 nt, Homo sapiens
  misc_RNA (1)...(19): siRNA sense strand
gacgaguuguaaauaaugu

SEQ ID NO: 1670393 - RNA, 19 nt, Homo sapiens
  misc_RNA (1)...(19): siRNA sense strand
ugacuuaccaccagguuau

SEQ ID NO: 1670394 - RNA, 19 nt, Homo sapiens
  misc_RNA (1)...(19): siRNA sense strand
ggaacugaaauuaccauuc

SEQ ID NO: 1670395 - RNA, 19 nt, Homo sapiens
  misc_RNA (1)...(19): siRNA sense strand
uauauucacagcaagauga

SEQ ID NO: 1670396 - RNA, 19 nt, Homo sapiens
  misc_RNA (1)...(19): siRNA sense strand
cgaaauagaggaccuuacu

SEQ ID NO: 1670397 - RNA, 19 nt, Homo sapiens
  misc_RNA (1)...(19): siRNA sense strand
caacugccuauguuuauuc

SEQ ID NO: 1670398 - RNA, 19 nt, Homo sapiens
  misc_RNA (1)...(19): siRNA sense strand
cgucggaucuacagcuuuc

SEQ ID NO: 1670399 - RNA, 19 nt, Homo sapiens
  misc_RNA (1)...(19): siRNA sense strand
gcugagaaagguuaucaau

SEQ ID NO: 1670400 - RNA, 19 nt, Homo sapiens
  misc_RNA (1)...(19): siRNA sense strand
caagcucgaguuaaaguug

SEQ ID NO: 1670401 - RNA, 19 nt, Homo sapiens
  misc_RNA (1)...(19): siRNA sense strand
uuaaagaaggcgaaauaga

SEQ ID NO: 1670402 - RNA, 19 nt, Homo sapiens
  misc_RNA (1)...(19): siRNA sense strand
uguacaguuugucuugaua

SEQ ID NO: 1670403 - RNA, 19 nt, Homo sapiens
  misc_RNA (1)...(19): siRNA sense strand
caggauccuuuauuauaca

SEQ ID NO: 1670404 - RNA, 19 nt, Homo sapiens
  misc_RNA (1)...(19): siRNA sense strand
uuugaaggauccuauuguu

SEQ ID NO: 1670405 - RNA, 19 nt, Homo sapiens
  misc_RNA (1)...(19): siRNA sense strand
cagguuaugugcagagucu

SEQ ID NO: 1670406 - RNA, 19 nt, Homo sapiens
  misc_RNA (1)...(19): siRNA sense strand
ugggaacgauccugcauca

SEQ ID NO: 1670407 - RNA, 19 nt, Homo sapiens
  misc_RNA (1)...(19): siRNA sense strand
ucaugggccugguccuuug

SEQ ID NO: 1670408 - RNA, 19 nt, Homo sapiens
  misc_RNA (1)...(19): siRNA sense strand
ggucaagaguuauauucac

SEQ ID NO: 1670409 - RNA, 19 nt, Homo sapiens
  misc_RNA (1)...(19): siRNA sense strand
cuaggaaacauuacagguu

SEQ ID NO: 1670410 - RNA, 19 nt, Homo sapiens
  misc_RNA (1)...(19): siRNA sense strand
aaacggaaugccaguggua

SEQ ID NO: 1670411 - RNA, 19 nt, Homo sapiens
  misc_RNA (1)...(19): siRNA sense strand
ugaagaugauaucguccuu

SEQ ID NO: 1670412 - RNA, 19 nt, Homo sapiens
  misc_RNA (1)...(19): siRNA sense strand
aggcaacggugacuuucaa

SEQ ID NO: 1670413 - RNA, 19 nt, Homo sapiens
  misc_RNA (1)...(19): siRNA sense strand
aagcacagacuuugaagga

SEQ ID NO: 1670414 - RNA, 19 nt, Homo sapiens
  misc_RNA (1)...(19): siRNA sense strand
aaagauaugcuaggaaaca

SEQ ID NO: 1670415 - RNA, 19 nt, Homo sapiens
  misc_RNA (1)...(19): siRNA sense strand
gcuggaacaggaacugaaa

SEQ ID NO: 1670416 - RNA, 19 nt, Homo sapiens
  misc_RNA (1)...(19): siRNA sense strand
uacaaauguuccuucagaa

SEQ ID NO: 1670417 - RNA, 19 nt, Homo sapiens
  misc_RNA (1)...(19): siRNA sense strand
cugauuuggugcugagaaa

SEQ ID NO: 1670418 - RNA, 19 nt, Homo sapiens
  misc_RNA (1)...(19): siRNA sense strand
uacagguucugaagaugaa

SEQ ID NO: 1670419 - RNA, 19 nt, Homo sapiens
  misc_RNA (1)...(19): siRNA sense strand
gaggaccuuacuugucaua

SEQ ID NO: 1670420 - RNA, 19 nt, Homo sapiens
  misc_RNA (1)...(19): siRNA sense strand
acaacugccuauguuuauu

SEQ ID NO: 1670421 - RNA, 19 nt, Homo sapiens
  misc_RNA (1)...(19): siRNA sense strand
cugauuagacgaguuguaa

SEQ ID NO: 1670422 - RNA, 19 nt, Homo sapiens
  misc_RNA (1)...(19): siRNA sense strand
aaacauuacagguucugaa

SEQ ID NO: 1670423 - RNA, 19 nt, Homo sapiens
  misc_RNA (1)...(19): siRNA sense strand
ggaucuacagcuuucacua

SEQ ID NO: 1670424 - RNA, 19 nt, Homo sapiens
  misc_RNA (1)...(19): siRNA sense strand
gccuauguuuauucguaua

SEQ ID NO: 1670425 - RNA, 19 nt, Homo sapiens
  misc_RNA (1)...(19): siRNA sense strand
guuauacaguaggugaauu

SEQ ID NO: 1670426 - RNA, 19 nt, Homo sapiens
  misc_RNA (1)...(19): siRNA sense strand
agucauauguaacuccaau

SEQ ID NO: 1670427 - RNA, 19 nt, Homo sapiens
  misc_RNA (1)...(19): siRNA sense strand
uuacagguucugaagauga

SEQ ID NO: 1670428 - RNA, 19 nt, Homo sapiens
  misc_RNA (1)...(19): siRNA sense strand
aggaugggauacaggauga

SEQ ID NO: 1670429 - RNA, 19 nt, Homo sapiens
  misc_RNA (1)...(19): siRNA sense strand
ggauccuauuguuucuaua

SEQ ID NO: 1670430 - RNA, 19 nt, Homo sapiens
  misc_RNA (1)...(19): siRNA sense strand
gcauaaaggucaagaguua

SEQ ID NO: 1670431 - RNA, 19 nt, Homo sapiens
  misc_RNA (1)...(19): siRNA sense strand
gaccuuacuugucauaaua

SEQ ID NO: 1670432 - RNA, 19 nt, Homo sapiens
  misc_RNA (1)...(19): siRNA sense strand
uuaccaggauccuuuauua

SEQ ID NO: 1670433 - RNA, 19 nt, Homo sapiens
  misc_RNA (1)...(19): siRNA sense strand
gaucgugcauucauggaua

SEQ ID NO: 1670434 - RNA, 19 nt, Homo sapiens
  misc_RNA (1)...(19): siRNA sense strand
gaauugcucuuuacuaugg

SEQ ID NO: 1670435 - RNA, 19 nt, Homo sapiens
  misc_RNA (1)...(19): siRNA sense strand
ucagcaagcucgaguuaaa

SEQ ID NO: 1670436 - RNA, 19 nt, Homo sapiens
  misc_RNA (1)...(19): siRNA sense strand
caugaaagcugugguucua

SEQ ID NO: 1670437 - RNA, 19 nt, Homo sapiens
  misc_RNA (1)...(19): siRNA sense strand
gauaugcuaggaaacauua

SEQ ID NO: 1670438 - RNA, 19 nt, Homo sapiens
  misc_RNA (1)...(19): siRNA sense strand
gugaaucgcuacaucaaga

SEQ ID NO: 1670439 - RNA, 19 nt, Homo sapiens
  misc_RNA (1)...(19): siRNA sense strand
ggaacaggaacugaaauua

SEQ ID NO: 1670440 - RNA, 19 nt, Homo sapiens
  misc_RNA (1)...(19): siRNA sense strand
gaacaggaacugaaauuac

SEQ ID NO: 1670441 - RNA, 19 nt, Homo sapiens
  misc_RNA (1)...(19): siRNA sense strand
gaagaugaaacaagaauag

SEQ ID NO: 1670442 - RNA, 19 nt, Homo sapiens
  misc_RNA (1)...(19): siRNA sense strand
gauacaggaugaccaugaa

SEQ ID NO: 1670443 - RNA, 19 nt, Homo sapiens
  misc_RNA (1)...(19): siRNA sense strand
uagaggaccuuacuuguca

SEQ ID NO: 1670444 - RNA, 19 nt, Homo sapiens
  misc_RNA (1)...(19): siRNA sense strand
ggaccuuacuugucauaau

SEQ ID NO: 1670445 - RNA, 19 nt, Homo sapiens
  misc_RNA (1)...(19): siRNA sense strand
auacaaauguuccuucaga

SEQ ID NO: 1670446 - RNA, 19 nt, Homo sapiens
  misc_RNA (1)...(19): siRNA sense strand
aaaccuaaauuccaagaug

SEQ ID NO: 1670447 - RNA, 19 nt, Homo sapiens
  misc_RNA (1)...(19): siRNA sense strand
uggaauugcucuuuacuau

SEQ ID NO: 1670448 - RNA, 19 nt, Homo sapiens
  misc_RNA (1)...(19): siRNA sense strand
ggacaaaacuggguucaga

SEQ ID NO: 1670449 - RNA, 19 nt, Homo sapiens
  misc_RNA (1)...(19): siRNA sense strand
gaucaacaacugccuaugu

SEQ ID NO: 1670450 - RNA, 19 nt, Homo sapiens
  misc_RNA (1)...(19): siRNA sense strand
uaucacagaucaacaacug

SEQ ID NO: 1670451 - RNA, 19 nt, Homo sapiens
  misc_RNA (1)...(19): siRNA sense strand
uaaagaaggcgaaauagag

SEQ ID NO: 1670452 - RNA, 19 nt, Homo sapiens
  misc_RNA (1)...(19): siRNA sense strand
gaaggauccuauuguuucu

SEQ ID NO: 1670453 - RNA, 19 nt, Homo sapiens
  misc_RNA (1)...(19): siRNA sense strand
ugaaagcugugguucuaau

SEQ ID NO: 1670454 - RNA, 19 nt, Homo sapiens
  misc_RNA (1)...(19): siRNA sense strand
ucagaacucgucuucauuu

SEQ ID NO: 1670455 - RNA, 19 nt, Homo sapiens
  misc_RNA (1)...(19): siRNA sense strand
gcagaauguuauacaguag

SEQ ID NO: 1670456 - RNA, 19 nt, Homo sapiens
  misc_RNA (1)...(19): siRNA sense strand
gaucuacagcuuucacuau

SEQ ID NO: 1670457 - RNA, 19 nt, Homo sapiens
  misc_RNA (1)...(19): siRNA sense strand
uacaguaggugaauuaugg

SEQ ID NO: 1670458 - RNA, 19 nt, Homo sapiens
  misc_RNA (1)...(19): siRNA sense strand
ugcagaauguuauacagua

SEQ ID NO: 1670459 - RNA, 19 nt, Homo sapiens
  misc_RNA (1)...(19): siRNA sense strand
ggauacaggaugaccauga

SEQ ID NO: 1670460 - RNA, 19 nt, Homo sapiens
  misc_RNA (1)...(19): siRNA sense strand
ugaaggauccuauuguuuc

SEQ ID NO: 1670461 - RNA, 19 nt, Homo sapiens
  misc_RNA (1)...(19): siRNA sense strand
caacuuggaauugcucuuu

SEQ ID NO: 1670462 - RNA, 19 nt, Homo sapiens
  misc_RNA (1)...(19): siRNA sense strand
gaaugccagugguaaaaua

SEQ ID NO: 1670463 - RNA, 19 nt, Homo sapiens
  misc_RNA (1)...(19): siRNA sense strand
uaaguggacauauucauga

SEQ ID NO: 1670464 - RNA, 19 nt, Homo sapiens
  misc_RNA (1)...(19): siRNA sense strand
caucaaccaugcaucaaca

SEQ ID NO: 1670465 - RNA, 19 nt, Homo sapiens
  misc_RNA (1)...(19): siRNA sense strand
ccaggauccuuuauuauac

SEQ ID NO: 1670466 - RNA, 19 nt, Homo sapiens
  misc_RNA (1)...(19): siRNA sense strand
ggauauuucugcaacugau

SEQ ID NO: 1670467 - RNA, 19 nt, Homo sapiens
  misc_RNA (1)...(19): siRNA sense strand
gaaagcugugguucuaauu

SEQ ID NO: 1670468 - RNA, 19 nt, Homo sapiens
  misc_RNA (1)...(19): siRNA sense strand
ugccugcaauugugaguua

SEQ ID NO: 1670469 - RNA, 19 nt, Homo sapiens
  misc_RNA (1)...(19): siRNA sense strand
agaguuauauucacagcaa

SEQ ID NO: 1670470 - RNA, 19 nt, Homo sapiens
  misc_RNA (1)...(19): siRNA sense strand
gaaacuuaaggaugggaua

SEQ ID NO: 1670471 - RNA, 19 nt, Homo sapiens
  misc_RNA (1)...(19): siRNA sense strand
cauuacagguucugaagau

SEQ ID NO: 1670472 - RNA, 19 nt, Homo sapiens
  misc_RNA (1)...(19): siRNA sense strand
gaaauagaggaccuuacuu

SEQ ID NO: 1670473 - RNA, 19 nt, Homo sapiens
  misc_RNA (1)...(19): siRNA sense strand
uccuacagauccugacuua

SEQ ID NO: 1670474 - RNA, 19 nt, Homo sapiens
  misc_RNA (1)...(19): siRNA sense strand
uuaaugagcuaugugaauc

SEQ ID NO: 1670475 - RNA, 19 nt, Homo sapiens
  misc_RNA (1)...(19): siRNA sense strand
gaacucgucuucauuuuac

SEQ ID NO: 1670476 - RNA, 19 nt, Homo sapiens
  misc_RNA (1)...(19): siRNA sense strand
gaaacaagaauagauaugc

SEQ ID NO: 1670477 - RNA, 19 nt, Homo sapiens
  misc_RNA (1)...(19): siRNA sense strand
aaauagaggaccuuacuug

SEQ ID NO: 1670478 - RNA, 19 nt, Homo sapiens
  misc_RNA (1)...(19): siRNA sense strand
gauuagacgaguuguaaau

SEQ ID NO: 1670479 - RNA, 19 nt, Homo sapiens
  misc_RNA (1)...(19): siRNA sense strand
cugccuauguuuauucgua

SEQ ID NO: 1670480 - RNA, 19 nt, Homo sapiens
  misc_RNA (1)...(19): siRNA sense strand
gugcauucauggauauuuc

SEQ ID NO: 1670481 - RNA, 19 nt, Homo sapiens
  misc_RNA (1)...(19): siRNA sense strand
ggaacgauccugcaucaac

SEQ ID NO: 1670482 - RNA, 19 nt, Homo sapiens
  misc_RNA (1)...(19): siRNA sense strand
guacaguuugucuugauaa

SEQ ID NO: 1670483 - RNA, 19 nt, Homo sapiens
  misc_RNA (1)...(19): siRNA sense strand
aagaugauaucguccuuuc

SEQ ID NO: 1670484 - RNA, 19 nt, Homo sapiens
  misc_RNA (1)...(19): siRNA sense strand
aaaguuggaugugcuggaa

SEQ ID NO: 1670485 - RNA, 19 nt, Homo sapiens
  misc_RNA (1)...(19): siRNA sense strand
ggaauugcucuuuacuaug

SEQ ID NO: 1670486 - RNA, 19 nt, Homo sapiens
  misc_RNA (1)...(19): siRNA sense strand
accaggauccuuuauuaua

SEQ ID NO: 1670487 - RNA, 19 nt, Homo sapiens
  misc_RNA (1)...(19): siRNA sense strand
ucaauacuauggaaugcau

SEQ ID NO: 1670488 - RNA, 19 nt, Homo sapiens
  misc_RNA (1)...(19): siRNA sense strand
gucaagaguuauauucaca

SEQ ID NO: 1670489 - RNA, 19 nt, Homo sapiens
  misc_RNA (1)...(19): siRNA sense strand
gcucuuuacuauggagaaa

SEQ ID NO: 1670490 - RNA, 19 nt, Homo sapiens
  misc_RNA (1)...(19): siRNA sense strand
cuucagaacucgucuucau

SEQ ID NO: 1670491 - RNA, 19 nt, Homo sapiens
  misc_RNA (1)...(19): siRNA sense strand
gaagaugauaucguccuuu

SEQ ID NO: 1670492 - RNA, 19 nt, Homo sapiens
  misc_RNA (1)...(19): siRNA sense strand
gacgaguuguaaauaaugu

SEQ ID NO: 1670493 - RNA, 19 nt, Homo sapiens
  misc_RNA (1)...(19): siRNA sense strand
ugacuuaccaccagguuau

SEQ ID NO: 1670494 - RNA, 19 nt, Homo sapiens
  misc_RNA (1)...(19): siRNA sense strand
ggaacugaaauuaccauuc

SEQ ID NO: 1670495 - RNA, 19 nt, Homo sapiens
  misc_RNA (1)...(19): siRNA sense strand
uauauucacagcaagauga

SEQ ID NO: 1670496 - RNA, 19 nt, Homo sapiens
  misc_RNA (1)...(19): siRNA sense strand
cgaaauagaggaccuuacu

SEQ ID NO: 1670497 - RNA, 19 nt, Homo sapiens
  misc_RNA (1)...(19): siRNA sense strand
caacugccuauguuuauuc

SEQ ID NO: 1670498 - RNA, 19 nt, Homo sapiens
  misc_RNA (1)...(19): siRNA sense strand
cgucggaucuacagcuuuc

SEQ ID NO: 1670499 - RNA, 19 nt, Homo sapiens
  misc_RNA (1)...(19): siRNA sense strand
gcugagaaagguuaucaau

SEQ ID NO: 1670500 - RNA, 19 nt, Homo sapiens
  misc_RNA (1)...(19): siRNA sense strand
caagcucgaguuaaaguug

SEQ ID NO: 1670501 - RNA, 19 nt, Homo sapiens
  misc_RNA (1)...(19): siRNA sense strand
uuaaagaaggcgaaauaga

SEQ ID NO: 1670502 - RNA, 19 nt, Homo sapiens
  misc_RNA (1)...(19): siRNA sense strand
uguacaguuugucuugaua

SEQ ID NO: 1670503 - RNA, 19 nt, Homo sapiens
  misc_RNA (1)...(19): siRNA sense strand
caggauccuuuauuauaca

SEQ ID NO: 1670504 - RNA, 19 nt, Homo sapiens
  misc_RNA (1)...(19): siRNA sense strand
uuugaaggauccuauuguu

SEQ ID NO: 1670505 - RNA, 19 nt, Homo sapiens
  misc_RNA (1)...(19): siRNA sense strand
cagguuaugugcagagucu

SEQ ID NO: 1670506 - RNA, 19 nt, Homo sapiens
  misc_RNA (1)...(19): siRNA sense strand
ugggaacgauccugcauca

SEQ ID NO: 1670507 - RNA, 19 nt, Homo sapiens
  misc_RNA (1)...(19): siRNA sense strand
ucaugggccugguccuuug

SEQ ID NO: 1670508 - RNA, 19 nt, Homo sapiens
  misc_RNA (1)...(19): siRNA sense strand
ggucaagaguuauauucac

SEQ ID NO: 1670509 - RNA, 19 nt, Homo sapiens
  misc_RNA (1)...(19): siRNA sense strand
cuaggaaacauuacagguu

SEQ ID NO: 1670510 - RNA, 19 nt, Homo sapiens
  misc_RNA (1)...(19): siRNA sense strand
aaacggaaugccaguggua

SEQ ID NO: 1670511 - RNA, 19 nt, Homo sapiens
  misc_RNA (1)...(19): siRNA sense strand
ugaagaugauaucguccuu

SEQ ID NO: 1670512 - RNA, 19 nt, Homo sapiens
  misc_RNA (1)...(19): siRNA sense strand
aggcaacggugacuuucaa

SEQ ID NO: 1670513 - RNA, 19 nt, Homo sapiens
  misc_RNA (1)...(19): siRNA sense strand
aagcacagacuuugaagga

SEQ ID NO: 1670514 - RNA, 19 nt, Homo sapiens
  misc_RNA (1)...(19): siRNA sense strand
aaagauaugcuaggaaaca

SEQ ID NO: 1670515 - RNA, 19 nt, Homo sapiens
  misc_RNA (1)...(19): siRNA sense strand
gcuggaacaggaacugaaa

SEQ ID NO: 1670516 - RNA, 19 nt, Homo sapiens
  misc_RNA (1)...(19): siRNA sense strand
uacaaauguuccuucagaa

SEQ ID NO: 1670517 - RNA, 19 nt, Homo sapiens
  misc_RNA (1)...(19): siRNA sense strand
cugauuuggugcugagaaa

SEQ ID NO: 1670518 - RNA, 19 nt, Homo sapiens
  misc_RNA (1)...(19): siRNA sense strand
uacagguucugaagaugaa

SEQ ID NO: 1670519 - RNA, 19 nt, Homo sapiens
  misc_RNA (1)...(19): siRNA sense strand
gaggaccuuacuugucaua

SEQ ID NO: 1670520 - RNA, 19 nt, Homo sapiens
  misc_RNA (1)...(19): siRNA sense strand
acaacugccuauguuuauu

SEQ ID NO: 1670521 - RNA, 19 nt, Homo sapiens
  misc_RNA (1)...(19): siRNA sense strand
cugauuagacgaguuguaa

SEQ ID NO: 1670522 - RNA, 19 nt, Homo sapiens
  misc_RNA (1)...(19): siRNA sense strand
aaacauuacagguucugaa

SEQ ID NO: 1670523 - RNA, 19 nt, Homo sapiens
  misc_RNA (1)...(19): siRNA sense strand
ggaucuacagcuuucacua

SEQ ID NO: 1670524 - RNA, 19 nt, Homo sapiens
  misc_RNA (1)...(19): siRNA sense strand
gccuauguuuauucguaua

SEQ ID NO: 1670525 - RNA, 19 nt, Homo sapiens
  misc_RNA (1)...(19): siRNA sense strand
guuauacaguaggugaauu

SEQ ID NO: 1670526 - RNA, 19 nt, Homo sapiens
  misc_RNA (1)...(19): siRNA sense strand
agucauauguaacuccaau

SEQ ID NO: 1670527 - RNA, 19 nt, Homo sapiens
  misc_RNA (1)...(19): siRNA sense strand
uuacagguucugaagauga

SEQ ID NO: 1670528 - RNA, 19 nt, Homo sapiens
  misc_RNA (1)...(19): siRNA sense strand
aggaugggauacaggauga

SEQ ID NO: 1670529 - RNA, 19 nt, Homo sapiens
  misc_RNA (1)...(19): siRNA sense strand
ggauccuauuguuucuaua

SEQ ID NO: 1670530 - RNA, 19 nt, Homo sapiens
  misc_RNA (1)...(19): siRNA sense strand
gcauaaaggucaagaguua

SEQ ID NO: 1670531 - RNA, 19 nt, Homo sapiens
  misc_RNA (1)...(19): siRNA sense strand
gaccuuacuugucauaaua

SEQ ID NO: 1670532 - RNA, 19 nt, Homo sapiens
  misc_RNA (1)...(19): siRNA sense strand
uuaccaggauccuuuauua

SEQ ID NO: 1670533 - RNA, 19 nt, Homo sapiens
  misc_RNA (1)...(19): siRNA sense strand
gaucgugcauucauggaua

SEQ ID NO: 1670534 - RNA, 19 nt, Homo sapiens
  misc_RNA (1)...(19): siRNA sense strand
gaauugcucuuuacuaugg

SEQ ID NO: 1670535 - RNA, 19 nt, Homo sapiens
  misc_RNA (1)...(19): siRNA sense strand
ucagcaagcucgaguuaaa

SEQ ID NO: 1670536 - RNA, 19 nt, Homo sapiens
  misc_RNA (1)...(19): siRNA sense strand
caugaaagcugugguucua

SEQ ID NO: 1670537 - RNA, 19 nt, Homo sapiens
  misc_RNA (1)...(19): siRNA sense strand
gauaugcuaggaaacauua

SEQ ID NO: 1670538 - RNA, 19 nt, Homo sapiens
  misc_RNA (1)...(19): siRNA sense strand
gugaaucgcuacaucaaga

SEQ ID NO: 1670539 - RNA, 19 nt, Homo sapiens
  misc_RNA (1)...(19): siRNA sense strand
ggaacaggaacugaaauua

SEQ ID NO: 1670540 - RNA, 19 nt, Homo sapiens
  misc_RNA (1)...(19): siRNA sense strand
gaacaggaacugaaauuac

SEQ ID NO: 1670541 - RNA, 19 nt, Homo sapiens
  misc_RNA (1)...(19): siRNA sense strand
gaagaugaaacaagaauag

SEQ ID NO: 1670542 - RNA, 19 nt, Homo sapiens
  misc_RNA (1)...(19): siRNA sense strand
gauacaggaugaccaugaa

SEQ ID NO: 1670543 - RNA, 19 nt, Homo sapiens
  misc_RNA (1)...(19): siRNA sense strand
uagaggaccuuacuuguca

SEQ ID NO: 1670544 - RNA, 19 nt, Homo sapiens
  misc_RNA (1)...(19): siRNA sense strand
ggaccuuacuugucauaau

SEQ ID NO: 1670545 - RNA, 19 nt, Homo sapiens
  misc_RNA (1)...(19): siRNA sense strand
auacaaauguuccuucaga

SEQ ID NO: 1670546 - RNA, 19 nt, Homo sapiens
  misc_RNA (1)...(19): siRNA sense strand
aaaccuaaauuccaagaug

SEQ ID NO: 1670547 - RNA, 19 nt, Homo sapiens
  misc_RNA (1)...(19): siRNA sense strand
uggaauugcucuuuacuau

SEQ ID NO: 1670548 - RNA, 19 nt, Homo sapiens
  misc_RNA (1)...(19): siRNA sense strand
ggacaaaacuggguucaga

SEQ ID NO: 1670549 - RNA, 19 nt, Homo sapiens
  misc_RNA (1)...(19): siRNA sense strand
gaucaacaacugccuaugu

SEQ ID NO: 1670550 - RNA, 19 nt, Homo sapiens
  misc_RNA (1)...(19): siRNA sense strand
uaucacagaucaacaacug

SEQ ID NO: 1670551 - RNA, 19 nt, Homo sapiens
  misc_RNA (1)...(19): siRNA sense strand
uaaagaaggcgaaauagag

SEQ ID NO: 1670552 - RNA, 19 nt, Homo sapiens
  misc_RNA (1)...(19): siRNA sense strand
gaaggauccuauuguuucu

SEQ ID NO: 1670553 - RNA, 19 nt, Homo sapiens
  misc_RNA (1)...(19): siRNA sense strand
ugaaagcugugguucuaau

SEQ ID NO: 1670554 - RNA, 19 nt, Homo sapiens
  misc_RNA (1)...(19): siRNA sense strand
ucagaacucgucuucauuu

SEQ ID NO: 1670555 - RNA, 19 nt, Homo sapiens
  misc_RNA (1)...(19): siRNA sense strand
gcagaauguuauacaguag

SEQ ID NO: 1670556 - RNA, 19 nt, Homo sapiens
  misc_RNA (1)...(19): siRNA sense strand
gaucuacagcuuucacuau

SEQ ID NO: 1670557 - RNA, 19 nt, Homo sapiens
  misc_RNA (1)...(19): siRNA sense strand
uacaguaggugaauuaugg

SEQ ID NO: 1670558 - RNA, 19 nt, Homo sapiens
  misc_RNA (1)...(19): siRNA sense strand
ugcagaauguuauacagua

SEQ ID NO: 1670559 - RNA, 19 nt, Homo sapiens
  misc_RNA (1)...(19): siRNA sense strand
ggauacaggaugaccauga

SEQ ID NO: 1670560 - RNA, 19 nt, Homo sapiens
  misc_RNA (1)...(19): siRNA sense strand
ugaaggauccuauuguuuc

SEQ ID NO: 1670561 - RNA, 19 nt, Homo sapiens
  misc_RNA (1)...(19): siRNA sense strand
caacuuggaauugcucuuu

SEQ ID NO: 1670562 - RNA, 19 nt, Homo sapiens
  misc_RNA (1)...(19): siRNA sense strand
gaaugccagugguaaaaua

SEQ ID NO: 1670563 - RNA, 19 nt, Homo sapiens
  misc_RNA (1)...(19): siRNA sense strand
uaaguggacauauucauga

SEQ ID NO: 1670564 - RNA, 19 nt, Homo sapiens
  misc_RNA (1)...(19): siRNA sense strand
caucaaccaugcaucaaca

SEQ ID NO: 1670565 - RNA, 19 nt, Homo sapiens
  misc_RNA (1)...(19): siRNA sense strand
ccaggauccuuuauuauac

SEQ ID NO: 1670566 - RNA, 19 nt, Homo sapiens
  misc_RNA (1)...(19): siRNA sense strand
ggauauuucugcaacugau

SEQ ID NO: 1670567 - RNA, 19 nt, Homo sapiens
  misc_RNA (1)...(19): siRNA sense strand
gaaagcugugguucuaauu

SEQ ID NO: 1670568 - RNA, 19 nt, Homo sapiens
  misc_RNA (1)...(19): siRNA sense strand
ugccugcaauugugaguua

SEQ ID NO: 1670569 - RNA, 19 nt, Homo sapiens
  misc_RNA (1)...(19): siRNA sense strand
agaguuauauucacagcaa

SEQ ID NO: 1670570 - RNA, 19 nt, Homo sapiens
  misc_RNA (1)...(19): siRNA sense strand
gaaacuuaaggaugggaua

SEQ ID NO: 1670571 - RNA, 19 nt, Homo sapiens
  misc_RNA (1)...(19): siRNA sense strand
cauuacagguucugaagau

SEQ ID NO: 1670572 - RNA, 19 nt, Homo sapiens
  misc_RNA (1)...(19): siRNA sense strand
gaaauagaggaccuuacuu

SEQ ID NO: 1670573 - RNA, 19 nt, Homo sapiens
  misc_RNA (1)...(19): siRNA sense strand
uccuacagauccugacuua

SEQ ID NO: 1670574 - RNA, 19 nt, Homo sapiens
  misc_RNA (1)...(19): siRNA sense strand
uuaaugagcuaugugaauc

SEQ ID NO: 1670575 - RNA, 19 nt, Homo sapiens
  misc_RNA (1)...(19): siRNA sense strand
gaacucgucuucauuuuac

SEQ ID NO: 1670576 - RNA, 19 nt, Homo sapiens
  misc_RNA (1)...(19): siRNA sense strand
gaaacaagaauagauaugc

SEQ ID NO: 1670577 - RNA, 19 nt, Homo sapiens
  misc_RNA (1)...(19): siRNA sense strand
aaauagaggaccuuacuug

SEQ ID NO: 1670578 - RNA, 19 nt, Homo sapiens
  misc_RNA (1)...(19): siRNA sense strand
gauuagacgaguuguaaau

SEQ ID NO: 1670579 - RNA, 19 nt, Homo sapiens
  misc_RNA (1)...(19): siRNA sense strand
cugccuauguuuauucgua

SEQ ID NO: 1670580 - RNA, 19 nt, Homo sapiens
  misc_RNA (1)...(19): siRNA sense strand
gugcauucauggauauuuc

SEQ ID NO: 1670581 - RNA, 19 nt, Homo sapiens
  misc_RNA (1)...(19): siRNA sense strand
ggaacgauccugcaucaac

SEQ ID NO: 1670582 - RNA, 19 nt, Homo sapiens
  misc_RNA (1)...(19): siRNA sense strand
guacaguuugucuugauaa

SEQ ID NO: 1670583 - RNA, 19 nt, Homo sapiens
  misc_RNA (1)...(19): siRNA sense strand
aagaugauaucguccuuuc

SEQ ID NO: 1670584 - RNA, 19 nt, Homo sapiens
  misc_RNA (1)...(19): siRNA sense strand
aaaguuggaugugcuggaa

SEQ ID NO: 1670585 - RNA, 19 nt, Homo sapiens
  misc_RNA (1)...(19): siRNA sense strand
ggaauugcucuuuacuaug

SEQ ID NO: 1670586 - RNA, 19 nt, Homo sapiens
  misc_RNA (1)...(19): siRNA sense strand
accaggauccuuuauuaua

SEQ ID NO: 1670587 - RNA, 19 nt, Homo sapiens
  misc_RNA (1)...(19): siRNA sense strand
ucaauacuauggaaugcau

SEQ ID NO: 1670588 - RNA, 19 nt, Homo sapiens
  misc_RNA (1)...(19): siRNA sense strand
gucaagaguuauauucaca

SEQ ID NO: 1670589 - RNA, 19 nt, Homo sapiens
  misc_RNA (1)...(19): siRNA sense strand
gcucuuuacuauggagaaa

SEQ ID NO: 1670590 - RNA, 19 nt, Homo sapiens
  misc_RNA (1)...(19): siRNA sense strand
cuucagaacucgucuucau

SEQ ID NO: 1670591 - RNA, 19 nt, Homo sapiens
  misc_RNA (1)...(19): siRNA sense strand
gaagaugauaucguccuuu

SEQ ID NO: 1670592 - RNA, 19 nt, Homo sapiens
  misc_RNA (1)...(19): siRNA sense strand
gacgaguuguaaauaaugu

SEQ ID NO: 1670593 - RNA, 19 nt, Homo sapiens
  misc_RNA (1)...(19): siRNA sense strand
ugacuuaccaccagguuau

SEQ ID NO: 1670594 - RNA, 19 nt, Homo sapiens
  misc_RNA (1)...(19): siRNA sense strand
ggaacugaaauuaccauuc

SEQ ID NO: 1670595 - RNA, 19 nt, Homo sapiens
  misc_RNA (1)...(19): siRNA sense strand
uauauucacagcaagauga

SEQ ID NO: 1670596 - RNA, 19 nt, Homo sapiens
  misc_RNA (1)...(19): siRNA sense strand
cgaaauagaggaccuuacu

SEQ ID NO: 1670597 - RNA, 19 nt, Homo sapiens
  misc_RNA (1)...(19): siRNA sense strand
caacugccuauguuuauuc

SEQ ID NO: 1670598 - RNA, 19 nt, Homo sapiens
  misc_RNA (1)...(19): siRNA sense strand
cgucggaucuacagcuuuc

SEQ ID NO: 1670599 - RNA, 19 nt, Homo sapiens
  misc_RNA (1)...(19): siRNA sense strand
gcugagaaagguuaucaau

SEQ ID NO: 1670600 - RNA, 19 nt, Homo sapiens
  misc_RNA (1)...(19): siRNA sense strand
caagcucgaguuaaaguug

SEQ ID NO: 1670601 - RNA, 19 nt, Homo sapiens
  misc_RNA (1)...(19): siRNA sense strand
uuaaagaaggcgaaauaga

SEQ ID NO: 1670602 - RNA, 19 nt, Homo sapiens
  misc_RNA (1)...(19): siRNA sense strand
uguacaguuugucuugaua

SEQ ID NO: 1670603 - RNA, 19 nt, Homo sapiens
  misc_RNA (1)...(19): siRNA sense strand
caggauccuuuauuauaca

SEQ ID NO: 1670604 - RNA, 19 nt, Homo sapiens
  misc_RNA (1)...(19): siRNA sense strand
uuugaaggauccuauuguu

SEQ ID NO: 1670605 - RNA, 19 nt, Homo sapiens
  misc_RNA (1)...(19): siRNA sense strand
cagguuaugugcagagucu

SEQ ID NO: 1670606 - RNA, 19 nt, Homo sapiens
  misc_RNA (1)...(19): siRNA sense strand
ugggaacgauccugcauca

SEQ ID NO: 1670607 - RNA, 19 nt, Homo sapiens
  misc_RNA (1)...(19): siRNA sense strand
ucaugggccugguccuuug

SEQ ID NO: 1670608 - RNA, 19 nt, Homo sapiens
  misc_RNA (1)...(19): siRNA sense strand
ggucaagaguuauauucac

SEQ ID NO: 1670609 - RNA, 19 nt, Homo sapiens
  misc_RNA (1)...(19): siRNA sense strand
cuaggaaacauuacagguu

SEQ ID NO: 1670610 - RNA, 19 nt, Homo sapiens
  misc_RNA (1)...(19): siRNA sense strand
aaacggaaugccaguggua

SEQ ID NO: 1670611 - RNA, 19 nt, Homo sapiens
  misc_RNA (1)...(19): siRNA sense strand
ugaagaugauaucguccuu

SEQ ID NO: 1670612 - RNA, 19 nt, Homo sapiens
  misc_RNA (1)...(19): siRNA sense strand
aggcaacggugacuuucaa

SEQ ID NO: 1670613 - RNA, 19 nt, Homo sapiens
  misc_RNA (1)...(19): siRNA sense strand
aagcacagacuuugaagga

SEQ ID NO: 1670614 - RNA, 19 nt, Homo sapiens
  misc_RNA (1)...(19): siRNA sense strand
aaagauaugcuaggaaaca

SEQ ID NO: 1670615 - RNA, 19 nt, Homo sapiens
  misc_RNA (1)...(19): siRNA sense strand
gcuggaacaggaacugaaa

SEQ ID NO: 1670616 - RNA, 19 nt, Homo sapiens
  misc_RNA (1)...(19): siRNA sense strand
uacaaauguuccuucagaa

SEQ ID NO: 1670617 - RNA, 19 nt, Homo sapiens
  misc_RNA (1)...(19): siRNA sense strand
cugauuuggugcugagaaa

SEQ ID NO: 1670618 - RNA, 19 nt, Homo sapiens
  misc_RNA (1)...(19): siRNA sense strand
uacagguucugaagaugaa

SEQ ID NO: 1670619 - RNA, 19 nt, Homo sapiens
  misc_RNA (1)...(19): siRNA sense strand
gaggaccuuacuugucaua

SEQ ID NO: 1670620 - RNA, 19 nt, Homo sapiens
  misc_RNA (1)...(19): siRNA sense strand
acaacugccuauguuuauu

SEQ ID NO: 1670621 - RNA, 19 nt, Homo sapiens
  misc_RNA (1)...(19): siRNA sense strand
cugauuagacgaguuguaa

SEQ ID NO: 1670622 - RNA, 19 nt, Homo sapiens
  misc_RNA (1)...(19): siRNA sense strand
aaacauuacagguucugaa

SEQ ID NO: 1670623 - RNA, 19 nt, Homo sapiens
  misc_RNA (1)...(19): siRNA sense strand
ggaucuacagcuuucacua

SEQ ID NO: 1670624 - RNA, 19 nt, Homo sapiens
  misc_RNA (1)...(19): siRNA sense strand
gccuauguuuauucguaua

SEQ ID NO: 1670625 - RNA, 19 nt, Homo sapiens
  misc_RNA (1)...(19): siRNA sense strand
guuauacaguaggugaauu

SEQ ID NO: 1670626 - RNA, 19 nt, Homo sapiens
  misc_RNA (1)...(19): siRNA sense strand
agucauauguaacuccaau

SEQ ID NO: 1670627 - RNA, 19 nt, Homo sapiens
  misc_RNA (1)...(19): siRNA sense strand
uuacagguucugaagauga

SEQ ID NO: 1670628 - RNA, 19 nt, Homo sapiens
  misc_RNA (1)...(19): siRNA sense strand
aggaugggauacaggauga

SEQ ID NO: 1670629 - RNA, 19 nt, Homo sapiens
  misc_RNA (1)...(19): siRNA sense strand
ggauccuauuguuucuaua

SEQ ID NO: 1670630 - RNA, 19 nt, Homo sapiens
  misc_RNA (1)...(19): siRNA sense strand
gcauaaaggucaagaguua

SEQ ID NO: 1670631 - RNA, 19 nt, Homo sapiens
  misc_RNA (1)...(19): siRNA sense strand
gaccuuacuugucauaaua

SEQ ID NO: 1670632 - RNA, 19 nt, Homo sapiens
  misc_RNA (1)...(19): siRNA sense strand
uuaccaggauccuuuauua

SEQ ID NO: 1670633 - RNA, 19 nt, Homo sapiens
  misc_RNA (1)...(19): siRNA sense strand
gaucgugcauucauggaua

SEQ ID NO: 1670634 - RNA, 19 nt, Homo sapiens
  misc_RNA (1)...(19): siRNA sense strand
gaauugcucuuuacuaugg

SEQ ID NO: 1670635 - RNA, 19 nt, Homo sapiens
  misc_RNA (1)...(19): siRNA sense strand
ucagcaagcucgaguuaaa

SEQ ID NO: 1670636 - RNA, 19 nt, Homo sapiens
  misc_RNA (1)...(19): siRNA sense strand
caugaaagcugugguucua

SEQ ID NO: 1670637 - RNA, 19 nt, Homo sapiens
  misc_RNA (1)...(19): siRNA sense strand
gauaugcuaggaaacauua

SEQ ID NO: 1670638 - RNA, 19 nt, Homo sapiens
  misc_RNA (1)...(19): siRNA sense strand
gugaaucgcuacaucaaga

SEQ ID NO: 1670639 - RNA, 19 nt, Homo sapiens
  misc_RNA (1)...(19): siRNA sense strand
ggaacaggaacugaaauua

SEQ ID NO: 1670640 - RNA, 19 nt, Homo sapiens
  misc_RNA (1)...(19): siRNA sense strand
gaacaggaacugaaauuac

SEQ ID NO: 1670641 - RNA, 19 nt, Homo sapiens
  misc_RNA (1)...(19): siRNA sense strand
gaagaugaaacaagaauag

SEQ ID NO: 1670642 - RNA, 19 nt, Homo sapiens
  misc_RNA (1)...(19): siRNA sense strand
gauacaggaugaccaugaa

SEQ ID NO: 1670643 - RNA, 19 nt, Homo sapiens
  misc_RNA (1)...(19): siRNA sense strand
uagaggaccuuacuuguca

SEQ ID NO: 1670644 - RNA, 19 nt, Homo sapiens
  misc_RNA (1)...(19): siRNA sense strand
ggaccuuacuugucauaau

SEQ ID NO: 1670645 - RNA, 19 nt, Homo sapiens
  misc_RNA (1)...(19): siRNA sense strand
auacaaauguuccuucaga

SEQ ID NO: 1670646 - RNA, 19 nt, Homo sapiens
  misc_RNA (1)...(19): siRNA sense strand
aaaccuaaauuccaagaug

SEQ ID NO: 1670647 - RNA, 19 nt, Homo sapiens
  misc_RNA (1)...(19): siRNA sense strand
uggaauugcucuuuacuau

SEQ ID NO: 1670648 - RNA, 19 nt, Homo sapiens
  misc_RNA (1)...(19): siRNA sense strand
ggacaaaacuggguucaga

SEQ ID NO: 1670649 - RNA, 19 nt, Homo sapiens
  misc_RNA (1)...(19): siRNA sense strand
gaucaacaacugccuaugu

SEQ ID NO: 1670650 - RNA, 19 nt, Homo sapiens
  misc_RNA (1)...(19): siRNA sense strand
uaucacagaucaacaacug

SEQ ID NO: 1670651 - RNA, 19 nt, Homo sapiens
  misc_RNA (1)...(19): siRNA sense strand
uaaagaaggcgaaauagag

SEQ ID NO: 1670652 - RNA, 19 nt, Homo sapiens
  misc_RNA (1)...(19): siRNA sense strand
gaaggauccuauuguuucu

SEQ ID NO: 1670653 - RNA, 19 nt, Homo sapiens
  misc_RNA (1)...(19): siRNA sense strand
ugaaagcugugguucuaau

SEQ ID NO: 1670654 - RNA, 19 nt, Homo sapiens
  misc_RNA (1)...(19): siRNA sense strand
ucagaacucgucuucauuu

SEQ ID NO: 1670655 - RNA, 19 nt, Homo sapiens
  misc_RNA (1)...(19): siRNA sense strand
gcagaauguuauacaguag

SEQ ID NO: 1670656 - RNA, 19 nt, Homo sapiens
  misc_RNA (1)...(19): siRNA sense strand
gaucuacagcuuucacuau

SEQ ID NO: 1670657 - RNA, 19 nt, Homo sapiens
  misc_RNA (1)...(19): siRNA sense strand
uacaguaggugaauuaugg

SEQ ID NO: 1670658 - RNA, 19 nt, Homo sapiens
  misc_RNA (1)...(19): siRNA sense strand
ugcagaauguuauacagua

SEQ ID NO: 1670659 - RNA, 19 nt, Homo sapiens
  misc_RNA (1)...(19): siRNA sense strand
ggauacaggaugaccauga

SEQ ID NO: 1670660 - RNA, 19 nt, Homo sapiens
  misc_RNA (1)...(19): siRNA sense strand
ugaaggauccuauuguuuc

SEQ ID NO: 1670661 - RNA, 19 nt, Homo sapiens
  misc_RNA (1)...(19): siRNA sense strand
caacuuggaauugcucuuu

SEQ ID NO: 1670662 - RNA, 19 nt, Homo sapiens
  misc_RNA (1)...(19): siRNA sense strand
gaaugccagugguaaaaua

SEQ ID NO: 1670663 - RNA, 19 nt, Homo sapiens
  misc_RNA (1)...(19): siRNA sense strand
uaaguggacauauucauga

SEQ ID NO: 1670664 - RNA, 19 nt, Homo sapiens
  misc_RNA (1)...(19): siRNA sense strand
caucaaccaugcaucaaca

SEQ ID NO: 1670665 - RNA, 19 nt, Homo sapiens
  misc_RNA (1)...(19): siRNA sense strand
ccaggauccuuuauuauac

SEQ ID NO: 1670666 - RNA, 19 nt, Homo sapiens
  misc_RNA (1)...(19): siRNA sense strand
ggauauuucugcaacugau

SEQ ID NO: 1670667 - RNA, 19 nt, Homo sapiens
  misc_RNA (1)...(19): siRNA sense strand
gaaagcugugguucuaauu

SEQ ID NO: 1670668 - RNA, 19 nt, Homo sapiens
  misc_RNA (1)...(19): siRNA sense strand
ugccugcaauugugaguua

SEQ ID NO: 1670669 - RNA, 19 nt, Homo sapiens
  misc_RNA (1)...(19): siRNA sense strand
agaguuauauucacagcaa

SEQ ID NO: 1670670 - RNA, 19 nt, Homo sapiens
  misc_RNA (1)...(19): siRNA sense strand
gaaacuuaaggaugggaua

SEQ ID NO: 1670671 - RNA, 19 nt, Homo sapiens
  misc_RNA (1)...(19): siRNA sense strand
cauuacagguucugaagau

SEQ ID NO: 1670672 - RNA, 19 nt, Homo sapiens
  misc_RNA (1)...(19): siRNA sense strand
gaaauagaggaccuuacuu

SEQ ID NO: 1670673 - RNA, 19 nt, Homo sapiens
  misc_RNA (1)...(19): siRNA sense strand
uccuacagauccugacuua

SEQ ID NO: 1670674 - RNA, 19 nt, Homo sapiens
  misc_RNA (1)...(19): siRNA sense strand
uuaaugagcuaugugaauc

SEQ ID NO: 1670675 - RNA, 19 nt, Homo sapiens
  misc_RNA (1)...(19): siRNA sense strand
gaacucgucuucauuuuac

SEQ ID NO: 1670676 - RNA, 19 nt, Homo sapiens
  misc_RNA (1)...(19): siRNA sense strand
gaaacaagaauagauaugc

SEQ ID NO: 1670677 - RNA, 19 nt, Homo sapiens
  misc_RNA (1)...(19): siRNA sense strand
aaauagaggaccuuacuug

SEQ ID NO: 1670678 - RNA, 19 nt, Homo sapiens
  misc_RNA (1)...(19): siRNA sense strand
gauuagacgaguuguaaau

SEQ ID NO: 1670679 - RNA, 19 nt, Homo sapiens
  misc_RNA (1)...(19): siRNA sense strand
cugccuauguuuauucgua

SEQ ID NO: 1670680 - RNA, 19 nt, Homo sapiens
  misc_RNA (1)...(19): siRNA sense strand
gugcauucauggauauuuc

SEQ ID NO: 1670681 - RNA, 19 nt, Homo sapiens
  misc_RNA (1)...(19): siRNA sense strand
ggaacgauccugcaucaac

SEQ ID NO: 1670682 - RNA, 19 nt, Homo sapiens
  misc_RNA (1)...(19): siRNA sense strand
guacaguuugucuugauaa

SEQ ID NO: 1670683 - RNA, 19 nt, Homo sapiens
  misc_RNA (1)...(19): siRNA sense strand
aagaugauaucguccuuuc

SEQ ID NO: 1670684 - RNA, 19 nt, Homo sapiens
  misc_RNA (1)...(19): siRNA sense strand
aaaguuggaugugcuggaa

SEQ ID NO: 1670685 - RNA, 19 nt, Homo sapiens
  misc_RNA (1)...(19): siRNA sense strand
ggaauugcucuuuacuaug

SEQ ID NO: 1670686 - RNA, 19 nt, Homo sapiens
  misc_RNA (1)...(19): siRNA sense strand
accaggauccuuuauuaua

SEQ ID NO: 1670687 - RNA, 19 nt, Homo sapiens
  misc_RNA (1)...(19): siRNA sense strand
ucaauacuauggaaugcau

SEQ ID NO: 1670688 - RNA, 19 nt, Homo sapiens
  misc_RNA (1)...(19): siRNA sense strand
gucaagaguuauauucaca

SEQ ID NO: 1670689 - RNA, 19 nt, Homo sapiens
  misc_RNA (1)...(19): siRNA sense strand
gcucuuuacuauggagaaa

SEQ ID NO: 1670690 - RNA, 19 nt, Homo sapiens
  misc_RNA (1)...(19): siRNA sense strand
cuucagaacucgucuucau

SEQ ID NO: 1670691 - RNA, 19 nt, Homo sapiens
  misc_RNA (1)...(19): siRNA sense strand
gaagaugauaucguccuuu

SEQ ID NO: 1670692 - RNA, 19 nt, Homo sapiens
  misc_RNA (1)...(19): siRNA sense strand
gacgaguuguaaauaaugu

SEQ ID NO: 1670693 - RNA, 19 nt, Homo sapiens
  misc_RNA (1)...(19): siRNA sense strand
ugacuuaccaccagguuau

SEQ ID NO: 1670694 - RNA, 19 nt, Homo sapiens
  misc_RNA (1)...(19): siRNA sense strand
ggaacugaaauuaccauuc

SEQ ID NO: 1670695 - RNA, 19 nt, Homo sapiens
  misc_RNA (1)...(19): siRNA sense strand
uauauucacagcaagauga

SEQ ID NO: 1670696 - RNA, 19 nt, Homo sapiens
  misc_RNA (1)...(19): siRNA sense strand
cgaaauagaggaccuuacu

SEQ ID NO: 1670697 - RNA, 19 nt, Homo sapiens
  misc_RNA (1)...(19): siRNA sense strand
caacugccuauguuuauuc

SEQ ID NO: 1670698 - RNA, 19 nt, Homo sapiens
  misc_RNA (1)...(19): siRNA sense strand
cgucggaucuacagcuuuc

SEQ ID NO: 1670699 - RNA, 19 nt, Homo sapiens
  misc_RNA (1)...(19): siRNA sense strand
gcugagaaagguuaucaau

SEQ ID NO: 1670700 - RNA, 19 nt, Homo sapiens
  misc_RNA (1)...(19): siRNA sense strand
caagcucgaguuaaaguug

SEQ ID NO: 1670701 - RNA, 19 nt, Homo sapiens
  misc_RNA (1)...(19): siRNA sense strand
uuaaagaaggcgaaauaga

SEQ ID NO: 1670702 - RNA, 19 nt, Homo sapiens
  misc_RNA (1)...(19): siRNA sense strand
uguacaguuugucuugaua

SEQ ID NO: 1670703 - RNA, 19 nt, Homo sapiens
  misc_RNA (1)...(19): siRNA sense strand
caggauccuuuauuauaca

SEQ ID NO: 1670704 - RNA, 19 nt, Homo sapiens
  misc_RNA (1)...(19): siRNA sense strand
uuugaaggauccuauuguu

SEQ ID NO: 1670705 - RNA, 19 nt, Homo sapiens
  misc_RNA (1)...(19): siRNA sense strand
cagguuaugugcagagucu

SEQ ID NO: 1670706 - RNA, 19 nt, Homo sapiens
  misc_RNA (1)...(19): siRNA sense strand
ugggaacgauccugcauca

SEQ ID NO: 1670707 - RNA, 19 nt, Homo sapiens
  misc_RNA (1)...(19): siRNA sense strand
ucaugggccugguccuuug

SEQ ID NO: 1670708 - RNA, 19 nt, Homo sapiens
  misc_RNA (1)...(19): siRNA sense strand
ggucaagaguuauauucac

SEQ ID NO: 1670709 - RNA, 19 nt, Homo sapiens
  misc_RNA (1)...(19): siRNA sense strand
cuaggaaacauuacagguu

SEQ ID NO: 1670710 - RNA, 19 nt, Homo sapiens
  misc_RNA (1)...(19): siRNA sense strand
aaacggaaugccaguggua

SEQ ID NO: 1670711 - RNA, 19 nt, Homo sapiens
  misc_RNA (1)...(19): siRNA sense strand
ugaagaugauaucguccuu

SEQ ID NO: 1670712 - RNA, 19 nt, Homo sapiens
  misc_RNA (1)...(19): siRNA sense strand
aggcaacggugacuuucaa

SEQ ID NO: 1670713 - RNA, 19 nt, Homo sapiens
  misc_RNA (1)...(19): siRNA sense strand
aagcacagacuuugaagga

SEQ ID NO: 1670714 - RNA, 19 nt, Homo sapiens
  misc_RNA (1)...(19): siRNA sense strand
aaagauaugcuaggaaaca

SEQ ID NO: 1670715 - RNA, 19 nt, Homo sapiens
  misc_RNA (1)...(19): siRNA sense strand
gcuggaacaggaacugaaa

SEQ ID NO: 1670716 - RNA, 19 nt, Homo sapiens
  misc_RNA (1)...(19): siRNA sense strand
uacaaauguuccuucagaa

SEQ ID NO: 1670717 - RNA, 19 nt, Homo sapiens
  misc_RNA (1)...(19): siRNA sense strand
cugauuuggugcugagaaa

SEQ ID NO: 1670718 - RNA, 19 nt, Homo sapiens
  misc_RNA (1)...(19): siRNA sense strand
uacagguucugaagaugaa

SEQ ID NO: 1670719 - RNA, 19 nt, Homo sapiens
  misc_RNA (1)...(19): siRNA sense strand
gaggaccuuacuugucaua

SEQ ID NO: 1670720 - RNA, 19 nt, Homo sapiens
  misc_RNA (1)...(19): siRNA sense strand
acaacugccuauguuuauu

SEQ ID NO: 1670721 - RNA, 19 nt, Homo sapiens
  misc_RNA (1)...(19): siRNA sense strand
cugauuagacgaguuguaa

SEQ ID NO: 1670722 - RNA, 19 nt, Homo sapiens
  misc_RNA (1)...(19): siRNA sense strand
aaacauuacagguucugaa

SEQ ID NO: 1670723 - RNA, 19 nt, Homo sapiens
  misc_RNA (1)...(19): siRNA sense strand
ggaucuacagcuuucacua

SEQ ID NO: 1670724 - RNA, 19 nt, Homo sapiens
  misc_RNA (1)...(19): siRNA sense strand
gccuauguuuauucguaua

SEQ ID NO: 1670725 - RNA, 19 nt, Homo sapiens
  misc_RNA (1)...(19): siRNA sense strand
guuauacaguaggugaauu

SEQ ID NO: 1670726 - RNA, 19 nt, Homo sapiens
  misc_RNA (1)...(19): siRNA sense strand
agucauauguaacuccaau

SEQ ID NO: 1670727 - RNA, 19 nt, Homo sapiens
  misc_RNA (1)...(19): siRNA sense strand
uuacagguucugaagauga

SEQ ID NO: 1670728 - RNA, 19 nt, Homo sapiens
  misc_RNA (1)...(19): siRNA sense strand
aggaugggauacaggauga

SEQ ID NO: 1670729 - RNA, 19 nt, Homo sapiens
  misc_RNA (1)...(19): siRNA sense strand
ggauccuauuguuucuaua

SEQ ID NO: 1670730 - RNA, 19 nt, Homo sapiens
  misc_RNA (1)...(19): siRNA sense strand
gcauaaaggucaagaguua

SEQ ID NO: 1670731 - RNA, 19 nt, Homo sapiens
  misc_RNA (1)...(19): siRNA sense strand
gaccuuacuugucauaaua

SEQ ID NO: 1670732 - RNA, 19 nt, Homo sapiens
  misc_RNA (1)...(19): siRNA sense strand
uuaccaggauccuuuauua

SEQ ID NO: 1670733 - RNA, 19 nt, Homo sapiens
  misc_RNA (1)...(19): siRNA sense strand
gaucgugcauucauggaua

SEQ ID NO: 1670734 - RNA, 19 nt, Homo sapiens
  misc_RNA (1)...(19): siRNA sense strand
gaauugcucuuuacuaugg

SEQ ID NO: 1670735 - RNA, 19 nt, Homo sapiens
  misc_RNA (1)...(19): siRNA sense strand
ucagcaagcucgaguuaaa

SEQ ID NO: 1670736 - RNA, 19 nt, Homo sapiens
  misc_RNA (1)...(19): siRNA sense strand
caugaaagcugugguucua

SEQ ID NO: 1670737 - RNA, 19 nt, Homo sapiens
  misc_RNA (1)...(19): siRNA sense strand
gauaugcuaggaaacauua

SEQ ID NO: 1670738 - RNA, 19 nt, Homo sapiens
  misc_RNA (1)...(19): siRNA sense strand
gugaaucgcuacaucaaga

SEQ ID NO: 1670739 - RNA, 19 nt, Homo sapiens
  misc_RNA (1)...(19): siRNA sense strand
ggaacaggaacugaaauua

SEQ ID NO: 1670740 - RNA, 19 nt, Homo sapiens
  misc_RNA (1)...(19): siRNA sense strand
gaacaggaacugaaauuac

SEQ ID NO: 1670741 - RNA, 19 nt, Homo sapiens
  misc_RNA (1)...(19): siRNA sense strand
gaagaugaaacaagaauag

SEQ ID NO: 1670742 - RNA, 19 nt, Homo sapiens
  misc_RNA (1)...(19): siRNA sense strand
gauacaggaugaccaugaa

SEQ ID NO: 1670743 - RNA, 19 nt, Homo sapiens
  misc_RNA (1)...(19): siRNA sense strand
uagaggaccuuacuuguca

SEQ ID NO: 1670744 - RNA, 19 nt, Homo sapiens
  misc_RNA (1)...(19): siRNA sense strand
ggaccuuacuugucauaau

SEQ ID NO: 1670745 - RNA, 19 nt, Homo sapiens
  misc_RNA (1)...(19): siRNA sense strand
auacaaauguuccuucaga

SEQ ID NO: 1670746 - RNA, 19 nt, Homo sapiens
  misc_RNA (1)...(19): siRNA sense strand
aaaccuaaauuccaagaug

SEQ ID NO: 1670747 - RNA, 19 nt, Homo sapiens
  misc_RNA (1)...(19): siRNA sense strand
uggaauugcucuuuacuau

SEQ ID NO: 1670748 - RNA, 19 nt, Homo sapiens
  misc_RNA (1)...(19): siRNA sense strand
ggacaaaacuggguucaga

SEQ ID NO: 1670749 - RNA, 19 nt, Homo sapiens
  misc_RNA (1)...(19): siRNA sense strand
gaucaacaacugccuaugu

SEQ ID NO: 1670750 - RNA, 19 nt, Homo sapiens
  misc_RNA (1)...(19): siRNA sense strand
uaucacagaucaacaacug

SEQ ID NO: 1670751 - RNA, 19 nt, Homo sapiens
  misc_RNA (1)...(19): siRNA sense strand
uaaagaaggcgaaauagag

SEQ ID NO: 1670752 - RNA, 19 nt, Homo sapiens
  misc_RNA (1)...(19): siRNA sense strand
gaaggauccuauuguuucu

SEQ ID NO: 1670753 - RNA, 19 nt, Homo sapiens
  misc_RNA (1)...(19): siRNA sense strand
ugaaagcugugguucuaau

SEQ ID NO: 1670754 - RNA, 19 nt, Homo sapiens
  misc_RNA (1)...(19): siRNA sense strand
ucagaacucgucuucauuu

SEQ ID NO: 1670755 - RNA, 19 nt, Homo sapiens
  misc_RNA (1)...(19): siRNA sense strand
gcagaauguuauacaguag

SEQ ID NO: 1670756 - RNA, 19 nt, Homo sapiens
  misc_RNA (1)...(19): siRNA sense strand
gaucuacagcuuucacuau

SEQ ID NO: 1670757 - RNA, 19 nt, Homo sapiens
  misc_RNA (1)...(19): siRNA sense strand
uacaguaggugaauuaugg

SEQ ID NO: 1670758 - RNA, 19 nt, Homo sapiens
  misc_RNA (1)...(19): siRNA sense strand
ugcagaauguuauacagua

SEQ ID NO: 1670759 - RNA, 19 nt, Homo sapiens
  misc_RNA (1)...(19): siRNA sense strand
ggauacaggaugaccauga

SEQ ID NO: 1670760 - RNA, 19 nt, Homo sapiens
  misc_RNA (1)...(19): siRNA sense strand
ugaaggauccuauuguuuc

SEQ ID NO: 1670761 - RNA, 19 nt, Homo sapiens
  misc_RNA (1)...(19): siRNA sense strand
caacuuggaauugcucuuu

SEQ ID NO: 1670762 - RNA, 19 nt, Homo sapiens
  misc_RNA (1)...(19): siRNA sense strand
gaaugccagugguaaaaua

SEQ ID NO: 1670763 - RNA, 19 nt, Homo sapiens
  misc_RNA (1)...(19): siRNA sense strand
uaaguggacauauucauga

SEQ ID NO: 1670764 - RNA, 19 nt, Homo sapiens
  misc_RNA (1)...(19): siRNA sense strand
caucaaccaugcaucaaca

SEQ ID NO: 1670765 - RNA, 19 nt, Homo sapiens
  misc_RNA (1)...(19): siRNA sense strand
ccaggauccuuuauuauac

SEQ ID NO: 1670766 - RNA, 19 nt, Homo sapiens
  misc_RNA (1)...(19): siRNA sense strand
ggauauuucugcaacugau

SEQ ID NO: 1670767 - RNA, 19 nt, Homo sapiens
  misc_RNA (1)...(19): siRNA sense strand
gaaagcugugguucuaauu

SEQ ID NO: 1670768 - RNA, 19 nt, Homo sapiens
  misc_RNA (1)...(19): siRNA sense strand
ugccugcaauugugaguua

SEQ ID NO: 1670769 - RNA, 19 nt, Homo sapiens
  misc_RNA (1)...(19): siRNA sense strand
agaguuauauucacagcaa

SEQ ID NO: 1670770 - RNA, 19 nt, Homo sapiens
  misc_RNA (1)...(19): siRNA sense strand
gaaacuuaaggaugggaua

SEQ ID NO: 1670771 - RNA, 19 nt, Homo sapiens
  misc_RNA (1)...(19): siRNA sense strand
cauuacagguucugaagau

SEQ ID NO: 1670772 - RNA, 19 nt, Homo sapiens
  misc_RNA (1)...(19): siRNA sense strand
gaaauagaggaccuuacuu

SEQ ID NO: 1670773 - RNA, 19 nt, Homo sapiens
  misc_RNA (1)...(19): siRNA sense strand
uccuacagauccugacuua

SEQ ID NO: 1670774 - RNA, 19 nt, Homo sapiens
  misc_RNA (1)...(19): siRNA sense strand
uuaaugagcuaugugaauc

SEQ ID NO: 1670775 - RNA, 19 nt, Homo sapiens
  misc_RNA (1)...(19): siRNA sense strand
gaacucgucuucauuuuac

SEQ ID NO: 1670776 - RNA, 19 nt, Homo sapiens
  misc_RNA (1)...(19): siRNA sense strand
gaaacaagaauagauaugc

SEQ ID NO: 1670777 - RNA, 19 nt, Homo sapiens
  misc_RNA (1)...(19): siRNA sense strand
aaauagaggaccuuacuug

SEQ ID NO: 1670778 - RNA, 19 nt, Homo sapiens
  misc_RNA (1)...(19): siRNA sense strand
gauuagacgaguuguaaau

SEQ ID NO: 1670779 - RNA, 19 nt, Homo sapiens
  misc_RNA (1)...(19): siRNA sense strand
cugccuauguuuauucgua

SEQ ID NO: 1670780 - RNA, 19 nt, Homo sapiens
  misc_RNA (1)...(19): siRNA sense strand
gugcauucauggauauuuc

SEQ ID NO: 1670781 - RNA, 19 nt, Homo sapiens
  misc_RNA (1)...(19): siRNA sense strand
ggaacgauccugcaucaac

SEQ ID NO: 1670782 - RNA, 19 nt, Homo sapiens
  misc_RNA (1)...(19): siRNA sense strand
guacaguuugucuugauaa

SEQ ID NO: 1670783 - RNA, 19 nt, Homo sapiens
  misc_RNA (1)...(19): siRNA sense strand
aagaugauaucguccuuuc

SEQ ID NO: 1670784 - RNA, 19 nt, Homo sapiens
  misc_RNA (1)...(19): siRNA sense strand
aaaguuggaugugcuggaa

SEQ ID NO: 1670785 - RNA, 19 nt, Homo sapiens
  misc_RNA (1)...(19): siRNA sense strand
ggaauugcucuuuacuaug

SEQ ID NO: 1670786 - RNA, 19 nt, Homo sapiens
  misc_RNA (1)...(19): siRNA sense strand
accaggauccuuuauuaua

SEQ ID NO: 1670787 - RNA, 19 nt, Homo sapiens
  misc_RNA (1)...(19): siRNA sense strand
ucaauacuauggaaugcau

SEQ ID NO: 1670788 - RNA, 19 nt, Homo sapiens
  misc_RNA (1)...(19): siRNA sense strand
gucaagaguuauauucaca

SEQ ID NO: 1670789 - RNA, 19 nt, Homo sapiens
  misc_RNA (1)...(19): siRNA sense strand
gcucuuuacuauggagaaa

SEQ ID NO: 1670790 - RNA, 19 nt, Homo sapiens
  misc_RNA (1)...(19): siRNA sense strand
cuucagaacucgucuucau

SEQ ID NO: 1670791 - RNA, 19 nt, Homo sapiens
  misc_RNA (1)...(19): siRNA sense strand
gaagaugauaucguccuuu

SEQ ID NO: 1670792 - RNA, 19 nt, Homo sapiens
  misc_RNA (1)...(19): siRNA sense strand
gacgaguuguaaauaaugu

SEQ ID NO: 1670793 - RNA, 19 nt, Homo sapiens
  misc_RNA (1)...(19): siRNA sense strand
ugacuuaccaccagguuau

SEQ ID NO: 1670794 - RNA, 19 nt, Homo sapiens
  misc_RNA (1)...(19): siRNA sense strand
ggaacugaaauuaccauuc

SEQ ID NO: 1670795 - RNA, 19 nt, Homo sapiens
  misc_RNA (1)...(19): siRNA sense strand
uauauucacagcaagauga

SEQ ID NO: 1670796 - RNA, 19 nt, Homo sapiens
  misc_RNA (1)...(19): siRNA sense strand
cgaaauagaggaccuuacu

SEQ ID NO: 1670797 - RNA, 19 nt, Homo sapiens
  misc_RNA (1)...(19): siRNA sense strand
caacugccuauguuuauuc

SEQ ID NO: 1670798 - RNA, 19 nt, Homo sapiens
  misc_RNA (1)...(19): siRNA sense strand
cgucggaucuacagcuuuc

SEQ ID NO: 1670799 - RNA, 19 nt, Homo sapiens
  misc_RNA (1)...(19): siRNA sense strand
gcugagaaagguuaucaau

SEQ ID NO: 1670800 - RNA, 19 nt, Homo sapiens
  misc_RNA (1)...(19): siRNA sense strand
caagcucgaguuaaaguug

SEQ ID NO: 1670801 - RNA, 19 nt, Homo sapiens
  misc_RNA (1)...(19): siRNA sense strand
uuaaagaaggcgaaauaga

SEQ ID NO: 1670802 - RNA, 19 nt, Homo sapiens
  misc_RNA (1)...(19): siRNA sense strand
uguacaguuugucuugaua

SEQ ID NO: 1670803 - RNA, 19 nt, Homo sapiens
  misc_RNA (1)...(19): siRNA sense strand
caggauccuuuauuauaca

SEQ ID NO: 1670804 - RNA, 19 nt, Homo sapiens
  misc_RNA (1)...(19): siRNA sense strand
uuugaaggauccuauuguu

SEQ ID NO: 1670805 - RNA, 19 nt, Homo sapiens
  misc_RNA (1)...(19): siRNA sense strand
cagguuaugugcagagucu

SEQ ID NO: 1670806 - RNA, 19 nt, Homo sapiens
  misc_RNA (1)...(19): siRNA sense strand
ugggaacgauccugcauca

SEQ ID NO: 1670807 - RNA, 19 nt, Homo sapiens
  misc_RNA (1)...(19): siRNA sense strand
ucaugggccugguccuuug

SEQ ID NO: 1670808 - RNA, 19 nt, Homo sapiens
  misc_RNA (1)...(19): siRNA sense strand
ggucaagaguuauauucac

SEQ ID NO: 1670809 - RNA, 19 nt, Homo sapiens
  misc_RNA (1)...(19): siRNA sense strand
cuaggaaacauuacagguu

SEQ ID NO: 1670810 - RNA, 19 nt, Homo sapiens
  misc_RNA (1)...(19): siRNA sense strand
aaacggaaugccaguggua

SEQ ID NO: 1670811 - RNA, 19 nt, Homo sapiens
  misc_RNA (1)...(19): siRNA sense strand
ugaagaugauaucguccuu

SEQ ID NO: 1670812 - RNA, 19 nt, Homo sapiens
  misc_RNA (1)...(19): siRNA sense strand
aggcaacggugacuuucaa

SEQ ID NO: 1670813 - RNA, 19 nt, Homo sapiens
  misc_RNA (1)...(19): siRNA sense strand
aagcacagacuuugaagga

SEQ ID NO: 1670814 - RNA, 19 nt, Homo sapiens
  misc_RNA (1)...(19): siRNA sense strand
aaagauaugcuaggaaaca

SEQ ID NO: 1670815 - RNA, 19 nt, Homo sapiens
  misc_RNA (1)...(19): siRNA sense strand
gcuggaacaggaacugaaa

SEQ ID NO: 1670816 - RNA, 19 nt, Homo sapiens
  misc_RNA (1)...(19): siRNA sense strand
uacaaauguuccuucagaa

SEQ ID NO: 1670817 - RNA, 19 nt, Homo sapiens
  misc_RNA (1)...(19): siRNA sense strand
cugauuuggugcugagaaa

SEQ ID NO: 1670818 - RNA, 19 nt, Homo sapiens
  misc_RNA (1)...(19): siRNA sense strand
uacagguucugaagaugaa

SEQ ID NO: 1670819 - RNA, 19 nt, Homo sapiens
  misc_RNA (1)...(19): siRNA sense strand
gaggaccuuacuugucaua

SEQ ID NO: 1670820 - RNA, 19 nt, Homo sapiens
  misc_RNA (1)...(19): siRNA sense strand
acaacugccuauguuuauu

SEQ ID NO: 1670821 - RNA, 19 nt, Homo sapiens
  misc_RNA (1)...(19): siRNA sense strand
cugauuagacgaguuguaa

SEQ ID NO: 1670822 - RNA, 19 nt, Homo sapiens
  misc_RNA (1)...(19): siRNA sense strand
aaacauuacagguucugaa

SEQ ID NO: 1670823 - RNA, 19 nt, Homo sapiens
  misc_RNA (1)...(19): siRNA sense strand
ggaucuacagcuuucacua

SEQ ID NO: 1670824 - RNA, 19 nt, Homo sapiens
  misc_RNA (1)...(19): siRNA sense strand
gccuauguuuauucguaua

SEQ ID NO: 1670825 - RNA, 19 nt, Homo sapiens
  misc_RNA (1)...(19): siRNA sense strand
guuauacaguaggugaauu

SEQ ID NO: 1670826 - RNA, 19 nt, Homo sapiens
  misc_RNA (1)...(19): siRNA sense strand
agucauauguaacuccaau

SEQ ID NO: 1670827 - RNA, 19 nt, Homo sapiens
  misc_RNA (1)...(19): siRNA sense strand
uuacagguucugaagauga

SEQ ID NO: 1670828 - RNA, 19 nt, Homo sapiens
  misc_RNA (1)...(19): siRNA sense strand
aggaugggauacaggauga

SEQ ID NO: 1670829 - RNA, 19 nt, Homo sapiens
  misc_RNA (1)...(19): siRNA sense strand
ggauccuauuguuucuaua

SEQ ID NO: 1670830 - RNA, 19 nt, Homo sapiens
  misc_RNA (1)...(19): siRNA sense strand
gcauaaaggucaagaguua

SEQ ID NO: 1670831 - RNA, 19 nt, Homo sapiens
  misc_RNA (1)...(19): siRNA sense strand
gaccuuacuugucauaaua

SEQ ID NO: 1670832 - RNA, 19 nt, Homo sapiens
  misc_RNA (1)...(19): siRNA sense strand
uuaccaggauccuuuauua

SEQ ID NO: 1670833 - RNA, 19 nt, Homo sapiens
  misc_RNA (1)...(19): siRNA sense strand
gaucgugcauucauggaua

SEQ ID NO: 1670834 - RNA, 19 nt, Homo sapiens
  misc_RNA (1)...(19): siRNA sense strand
gaauugcucuuuacuaugg

SEQ ID NO: 1670835 - RNA, 19 nt, Homo sapiens
  misc_RNA (1)...(19): siRNA sense strand
ucagcaagcucgaguuaaa

SEQ ID NO: 1670836 - RNA, 19 nt, Homo sapiens
  misc_RNA (1)...(19): siRNA sense strand
caugaaagcugugguucua

SEQ ID NO: 1670837 - RNA, 19 nt, Homo sapiens
  misc_RNA (1)...(19): siRNA sense strand
gauaugcuaggaaacauua

SEQ ID NO: 1670838 - RNA, 19 nt, Homo sapiens
  misc_RNA (1)...(19): siRNA sense strand
gugaaucgcuacaucaaga

SEQ ID NO: 1670839 - RNA, 19 nt, Homo sapiens
  misc_RNA (1)...(19): siRNA sense strand
ggaacaggaacugaaauua

SEQ ID NO: 1670840 - RNA, 19 nt, Homo sapiens
  misc_RNA (1)...(19): siRNA sense strand
gaacaggaacugaaauuac

SEQ ID NO: 1670841 - RNA, 19 nt, Homo sapiens
  misc_RNA (1)...(19): siRNA sense strand
gaagaugaaacaagaauag

SEQ ID NO: 1670842 - RNA, 19 nt, Homo sapiens
  misc_RNA (1)...(19): siRNA sense strand
gauacaggaugaccaugaa

SEQ ID NO: 1670843 - RNA, 19 nt, Homo sapiens
  misc_RNA (1)...(19): siRNA sense strand
uagaggaccuuacuuguca

SEQ ID NO: 1670844 - RNA, 19 nt, Homo sapiens
  misc_RNA (1)...(19): siRNA sense strand
ggaccuuacuugucauaau

SEQ ID NO: 1670845 - RNA, 19 nt, Homo sapiens
  misc_RNA (1)...(19): siRNA sense strand
auacaaauguuccuucaga

SEQ ID NO: 1670846 - RNA, 19 nt, Homo sapiens
  misc_RNA (1)...(19): siRNA sense strand
aaaccuaaauuccaagaug

SEQ ID NO: 1670847 - RNA, 19 nt, Homo sapiens
  misc_RNA (1)...(19): siRNA sense strand
uggaauugcucuuuacuau

SEQ ID NO: 1670848 - RNA, 19 nt, Homo sapiens
  misc_RNA (1)...(19): siRNA sense strand
ggacaaaacuggguucaga

SEQ ID NO: 1670849 - RNA, 19 nt, Homo sapiens
  misc_RNA (1)...(19): siRNA sense strand
gaucaacaacugccuaugu

SEQ ID NO: 1670850 - RNA, 19 nt, Homo sapiens
  misc_RNA (1)...(19): siRNA sense strand
uaucacagaucaacaacug

SEQ ID NO: 1670851 - RNA, 19 nt, Homo sapiens
  misc_RNA (1)...(19): siRNA sense strand
uaaagaaggcgaaauagag

SEQ ID NO: 1670852 - RNA, 19 nt, Homo sapiens
  misc_RNA (1)...(19): siRNA sense strand
gaaggauccuauuguuucu

SEQ ID NO: 1670853 - RNA, 19 nt, Homo sapiens
  misc_RNA (1)...(19): siRNA sense strand
ugaaagcugugguucuaau

SEQ ID NO: 1670854 - RNA, 19 nt, Homo sapiens
  misc_RNA (1)...(19): siRNA sense strand
ucagaacucgucuucauuu

SEQ ID NO: 1670855 - RNA, 19 nt, Homo sapiens
  misc_RNA (1)...(19): siRNA sense strand
gcagaauguuauacaguag

SEQ ID NO: 1670856 - RNA, 19 nt, Homo sapiens
  misc_RNA (1)...(19): siRNA sense strand
gaucuacagcuuucacuau

SEQ ID NO: 1670857 - RNA, 19 nt, Homo sapiens
  misc_RNA (1)...(19): siRNA sense strand
uacaguaggugaauuaugg

SEQ ID NO: 1670858 - RNA, 19 nt, Homo sapiens
  misc_RNA (1)...(19): siRNA sense strand
ugcagaauguuauacagua

SEQ ID NO: 1670859 - RNA, 19 nt, Homo sapiens
  misc_RNA (1)...(19): siRNA sense strand
ggauacaggaugaccauga

SEQ ID NO: 1670860 - RNA, 19 nt, Homo sapiens
  misc_RNA (1)...(19): siRNA sense strand
ugaaggauccuauuguuuc

SEQ ID NO: 1670861 - RNA, 19 nt, Homo sapiens
  misc_RNA (1)...(19): siRNA sense strand
caacuuggaauugcucuuu

SEQ ID NO: 1670862 - RNA, 19 nt, Homo sapiens
  misc_RNA (1)...(19): siRNA sense strand
gaaugccagugguaaaaua

SEQ ID NO: 1670863 - RNA, 19 nt, Homo sapiens
  misc_RNA (1)...(19): siRNA sense strand
uaaguggacauauucauga

SEQ ID NO: 1670864 - RNA, 19 nt, Homo sapiens
  misc_RNA (1)...(19): siRNA sense strand
caucaaccaugcaucaaca

SEQ ID NO: 1670865 - RNA, 19 nt, Homo sapiens
  misc_RNA (1)...(19): siRNA sense strand
ccaggauccuuuauuauac

SEQ ID NO: 1670866 - RNA, 19 nt, Homo sapiens
  misc_RNA (1)...(19): siRNA sense strand
ggauauuucugcaacugau

SEQ ID NO: 1670867 - RNA, 19 nt, Homo sapiens
  misc_RNA (1)...(19): siRNA sense strand
gaaagcugugguucuaauu

SEQ ID NO: 1670868 - RNA, 19 nt, Homo sapiens
  misc_RNA (1)...(19): siRNA sense strand
ugccugcaauugugaguua

SEQ ID NO: 1670869 - RNA, 19 nt, Homo sapiens
  misc_RNA (1)...(19): siRNA sense strand
agaguuauauucacagcaa

SEQ ID NO: 1670870 - RNA, 19 nt, Homo sapiens
  misc_RNA (1)...(19): siRNA sense strand
gaaacuuaaggaugggaua

SEQ ID NO: 1670871 - RNA, 19 nt, Homo sapiens
  misc_RNA (1)...(19): siRNA sense strand
cauuacagguucugaagau

SEQ ID NO: 1670872 - RNA, 19 nt, Homo sapiens
  misc_RNA (1)...(19): siRNA sense strand
gaaauagaggaccuuacuu

SEQ ID NO: 1670873 - RNA, 19 nt, Homo sapiens
  misc_RNA (1)...(19): siRNA sense strand
uccuacagauccugacuua

SEQ ID NO: 1670874 - RNA, 19 nt, Homo sapiens
  misc_RNA (1)...(19): siRNA sense strand
uuaaugagcuaugugaauc

SEQ ID NO: 1670875 - RNA, 19 nt, Homo sapiens
  misc_RNA (1)...(19): siRNA sense strand
gaacucgucuucauuuuac

SEQ ID NO: 1670876 - RNA, 19 nt, Homo sapiens
  misc_RNA (1)...(19): siRNA sense strand
gaaacaagaauagauaugc

SEQ ID NO: 1670877 - RNA, 19 nt, Homo sapiens
  misc_RNA (1)...(19): siRNA sense strand
aaauagaggaccuuacuug

SEQ ID NO: 1670878 - RNA, 19 nt, Homo sapiens
  misc_RNA (1)...(19): siRNA sense strand
gauuagacgaguuguaaau

SEQ ID NO: 1670879 - RNA, 19 nt, Homo sapiens
  misc_RNA (1)...(19): siRNA sense strand
cugccuauguuuauucgua

SEQ ID NO: 1670880 - RNA, 19 nt, Homo sapiens
  misc_RNA (1)...(19): siRNA sense strand
gugcauucauggauauuuc

SEQ ID NO: 1670881 - RNA, 19 nt, Homo sapiens
  misc_RNA (1)...(19): siRNA sense strand
ggaacgauccugcaucaac

SEQ ID NO: 1670882 - RNA, 19 nt, Homo sapiens
  misc_RNA (1)...(19): siRNA sense strand
guacaguuugucuugauaa

SEQ ID NO: 1670883 - RNA, 19 nt, Homo sapiens
  misc_RNA (1)...(19): siRNA sense strand
aagaugauaucguccuuuc

SEQ ID NO: 1670884 - RNA, 19 nt, Homo sapiens
  misc_RNA (1)...(19): siRNA sense strand
aaaguuggaugugcuggaa

SEQ ID NO: 1670885 - RNA, 19 nt, Homo sapiens
  misc_RNA (1)...(19): siRNA sense strand
ggaauugcucuuuacuaug

SEQ ID NO: 1670886 - RNA, 19 nt, Homo sapiens
  misc_RNA (1)...(19): siRNA sense strand
accaggauccuuuauuaua

SEQ ID NO: 1670887 - RNA, 19 nt, Homo sapiens
  misc_RNA (1)...(19): siRNA sense strand
ucaauacuauggaaugcau

SEQ ID NO: 1670888 - RNA, 19 nt, Homo sapiens
  misc_RNA (1)...(19): siRNA sense strand
gucaagaguuauauucaca

SEQ ID NO: 1670889 - RNA, 19 nt, Homo sapiens
  misc_RNA (1)...(19): siRNA sense strand
gcucuuuacuauggagaaa

SEQ ID NO: 1670890 - RNA, 19 nt, Homo sapiens
  misc_RNA (1)...(19): siRNA sense strand
cuucagaacucgucuucau

SEQ ID NO: 1670891 - RNA, 19 nt, Homo sapiens
  misc_RNA (1)...(19): siRNA sense strand
gaagaugauaucguccuuu

SEQ ID NO: 1670892 - RNA, 19 nt, Homo sapiens
  misc_RNA (1)...(19): siRNA sense strand
gacgaguuguaaauaaugu

SEQ ID NO: 1670893 - RNA, 19 nt, Homo sapiens
  misc_RNA (1)...(19): siRNA sense strand
ugacuuaccaccagguuau

SEQ ID NO: 1670894 - RNA, 19 nt, Homo sapiens
  misc_RNA (1)...(19): siRNA sense strand
ggaacugaaauuaccauuc

SEQ ID NO: 1670895 - RNA, 19 nt, Homo sapiens
  misc_RNA (1)...(19): siRNA sense strand
uauauucacagcaagauga

SEQ ID NO: 1670896 - RNA, 19 nt, Homo sapiens
  misc_RNA (1)...(19): siRNA sense strand
cgaaauagaggaccuuacu

SEQ ID NO: 1670897 - RNA, 19 nt, Homo sapiens
  misc_RNA (1)...(19): siRNA sense strand
caacugccuauguuuauuc

SEQ ID NO: 1670898 - RNA, 19 nt, Homo sapiens
  misc_RNA (1)...(19): siRNA sense strand
cgucggaucuacagcuuuc

SEQ ID NO: 1670899 - RNA, 19 nt, Homo sapiens
  misc_RNA (1)...(19): siRNA sense strand
gcugagaaagguuaucaau

SEQ ID NO: 1670900 - RNA, 19 nt, Homo sapiens
  misc_RNA (1)...(19): siRNA sense strand
caagcucgaguuaaaguug

SEQ ID NO: 1670901 - RNA, 19 nt, Homo sapiens
  misc_RNA (1)...(19): siRNA sense strand
uuaaagaaggcgaaauaga

SEQ ID NO: 1670902 - RNA, 19 nt, Homo sapiens
  misc_RNA (1)...(19): siRNA sense strand
uguacaguuugucuugaua

SEQ ID NO: 1670903 - RNA, 19 nt, Homo sapiens
  misc_RNA (1)...(19): siRNA sense strand
caggauccuuuauuauaca

SEQ ID NO: 1670904 - RNA, 19 nt, Homo sapiens
  misc_RNA (1)...(19): siRNA sense strand
uuugaaggauccuauuguu

SEQ ID NO: 1670905 - RNA, 19 nt, Homo sapiens
  misc_RNA (1)...(19): siRNA sense strand
cagguuaugugcagagucu

SEQ ID NO: 1670906 - RNA, 19 nt, Homo sapiens
  misc_RNA (1)...(19): siRNA sense strand
ugggaacgauccugcauca

SEQ ID NO: 1670907 - RNA, 19 nt, Homo sapiens
  misc_RNA (1)...(19): siRNA sense strand
ucaugggccugguccuuug

SEQ ID NO: 1670908 - RNA, 19 nt, Homo sapiens
  misc_RNA (1)...(19): siRNA sense strand
ggucaagaguuauauucac

SEQ ID NO: 1670909 - RNA, 19 nt, Homo sapiens
  misc_RNA (1)...(19): siRNA sense strand
cuaggaaacauuacagguu

SEQ ID NO: 1670910 - RNA, 19 nt, Homo sapiens
  misc_RNA (1)...(19): siRNA sense strand
aaacggaaugccaguggua

SEQ ID NO: 1670911 - RNA, 19 nt, Homo sapiens
  misc_RNA (1)...(19): siRNA sense strand
ugaagaugauaucguccuu

SEQ ID NO: 1670912 - RNA, 19 nt, Homo sapiens
  misc_RNA (1)...(19): siRNA sense strand
aggcaacggugacuuucaa

SEQ ID NO: 1670913 - RNA, 19 nt, Homo sapiens
  misc_RNA (1)...(19): siRNA sense strand
aagcacagacuuugaagga

SEQ ID NO: 1670914 - RNA, 19 nt, Homo sapiens
  misc_RNA (1)...(19): siRNA sense strand
aaagauaugcuaggaaaca

SEQ ID NO: 1670915 - RNA, 19 nt, Homo sapiens
  misc_RNA (1)...(19): siRNA sense strand
gcuggaacaggaacugaaa

SEQ ID NO: 1670916 - RNA, 19 nt, Homo sapiens
  misc_RNA (1)...(19): siRNA sense strand
uacaaauguuccuucagaa

SEQ ID NO: 1670917 - RNA, 19 nt, Homo sapiens
  misc_RNA (1)...(19): siRNA sense strand
cugauuuggugcugagaaa

SEQ ID NO: 1670918 - RNA, 19 nt, Homo sapiens
  misc_RNA (1)...(19): siRNA sense strand
uacagguucugaagaugaa

SEQ ID NO: 1670919 - RNA, 19 nt, Homo sapiens
  misc_RNA (1)...(19): siRNA sense strand
gaggaccuuacuugucaua

SEQ ID NO: 1670920 - RNA, 19 nt, Homo sapiens
  misc_RNA (1)...(19): siRNA sense strand
acaacugccuauguuuauu

SEQ ID NO: 1670921 - RNA, 19 nt, Homo sapiens
  misc_RNA (1)...(19): siRNA sense strand
cugauuagacgaguuguaa

SEQ ID NO: 1670922 - RNA, 19 nt, Homo sapiens
  misc_RNA (1)...(19): siRNA sense strand
aaacauuacagguucugaa

SEQ ID NO: 1670923 - RNA, 19 nt, Homo sapiens
  misc_RNA (1)...(19): siRNA sense strand
ggaucuacagcuuucacua

SEQ ID NO: 1670924 - RNA, 19 nt, Homo sapiens
  misc_RNA (1)...(19): siRNA sense strand
gccuauguuuauucguaua

SEQ ID NO: 1670925 - RNA, 19 nt, Homo sapiens
  misc_RNA (1)...(19): siRNA sense strand
guuauacaguaggugaauu

SEQ ID NO: 1670926 - RNA, 19 nt, Homo sapiens
  misc_RNA (1)...(19): siRNA sense strand
agucauauguaacuccaau

SEQ ID NO: 1670927 - RNA, 19 nt, Homo sapiens
  misc_RNA (1)...(19): siRNA sense strand
uuacagguucugaagauga

SEQ ID NO: 1670928 - RNA, 19 nt, Homo sapiens
  misc_RNA (1)...(19): siRNA sense strand
aggaugggauacaggauga

SEQ ID NO: 1670929 - RNA, 19 nt, Homo sapiens
  misc_RNA (1)...(19): siRNA sense strand
ggauccuauuguuucuaua

SEQ ID NO: 1670930 - RNA, 19 nt, Homo sapiens
  misc_RNA (1)...(19): siRNA sense strand
gcauaaaggucaagaguua

SEQ ID NO: 1670931 - RNA, 19 nt, Homo sapiens
  misc_RNA (1)...(19): siRNA sense strand
gaccuuacuugucauaaua

SEQ ID NO: 1670932 - RNA, 19 nt, Homo sapiens
  misc_RNA (1)...(19): siRNA sense strand
uuaccaggauccuuuauua

SEQ ID NO: 1670933 - RNA, 19 nt, Homo sapiens
  misc_RNA (1)...(19): siRNA sense strand
gaucgugcauucauggaua

SEQ ID NO: 1670934 - RNA, 19 nt, Homo sapiens
  misc_RNA (1)...(19): siRNA sense strand
gaauugcucuuuacuaugg

SEQ ID NO: 1670935 - RNA, 19 nt, Homo sapiens
  misc_RNA (1)...(19): siRNA sense strand
ucagcaagcucgaguuaaa

SEQ ID NO: 1670936 - RNA, 19 nt, Homo sapiens
  misc_RNA (1)...(19): siRNA sense strand
caugaaagcugugguucua

SEQ ID NO: 1670937 - RNA, 19 nt, Homo sapiens
  misc_RNA (1)...(19): siRNA sense strand
gauaugcuaggaaacauua

SEQ ID NO: 1670938 - RNA, 19 nt, Homo sapiens
  misc_RNA (1)...(19): siRNA sense strand
gugaaucgcuacaucaaga

SEQ ID NO: 1670939 - RNA, 19 nt, Homo sapiens
  misc_RNA (1)...(19): siRNA sense strand
ggaacaggaacugaaauua

SEQ ID NO: 1670940 - RNA, 19 nt, Homo sapiens
  misc_RNA (1)...(19): siRNA sense strand
gaacaggaacugaaauuac

SEQ ID NO: 1670941 - RNA, 19 nt, Homo sapiens
  misc_RNA (1)...(19): siRNA sense strand
gaagaugaaacaagaauag

SEQ ID NO: 1670942 - RNA, 19 nt, Homo sapiens
  misc_RNA (1)...(19): siRNA sense strand
gauacaggaugaccaugaa

SEQ ID NO: 1670943 - RNA, 19 nt, Homo sapiens
  misc_RNA (1)...(19): siRNA sense strand
uagaggaccuuacuuguca

SEQ ID NO: 1670944 - RNA, 19 nt, Homo sapiens
  misc_RNA (1)...(19): siRNA sense strand
ggaccuuacuugucauaau

SEQ ID NO: 1670945 - RNA, 19 nt, Homo sapiens
  misc_RNA (1)...(19): siRNA sense strand
auacaaauguuccuucaga

SEQ ID NO: 1670946 - RNA, 19 nt, Homo sapiens
  misc_RNA (1)...(19): siRNA sense strand
aaaccuaaauuccaagaug

SEQ ID NO: 1670947 - RNA, 19 nt, Homo sapiens
  misc_RNA (1)...(19): siRNA sense strand
uggaauugcucuuuacuau

SEQ ID NO: 1670948 - RNA, 19 nt, Homo sapiens
  misc_RNA (1)...(19): siRNA sense strand
ggacaaaacuggguucaga

SEQ ID NO: 1670949 - RNA, 19 nt, Homo sapiens
  misc_RNA (1)...(19): siRNA sense strand
gaucaacaacugccuaugu

SEQ ID NO: 1670950 - RNA, 19 nt, Homo sapiens
  misc_RNA (1)...(19): siRNA sense strand
uaucacagaucaacaacug

SEQ ID NO: 1670951 - RNA, 19 nt, Homo sapiens
  misc_RNA (1)...(19): siRNA sense strand
uaaagaaggcgaaauagag

SEQ ID NO: 1670952 - RNA, 19 nt, Homo sapiens
  misc_RNA (1)...(19): siRNA sense strand
gaaggauccuauuguuucu

SEQ ID NO: 1670953 - RNA, 19 nt, Homo sapiens
  misc_RNA (1)...(19): siRNA sense strand
ugaaagcugugguucuaau

SEQ ID NO: 1670954 - RNA, 19 nt, Homo sapiens
  misc_RNA (1)...(19): siRNA sense strand
ucagaacucgucuucauuu

SEQ ID NO: 1670955 - RNA, 19 nt, Homo sapiens
  misc_RNA (1)...(19): siRNA sense strand
gcagaauguuauacaguag

SEQ ID NO: 1670956 - RNA, 19 nt, Homo sapiens
  misc_RNA (1)...(19): siRNA sense strand
gaucuacagcuuucacuau

SEQ ID NO: 1670957 - RNA, 19 nt, Homo sapiens
  misc_RNA (1)...(19): siRNA sense strand
uacaguaggugaauuaugg

SEQ ID NO: 1670958 - RNA, 19 nt, Homo sapiens
  misc_RNA (1)...(19): siRNA sense strand
ugcagaauguuauacagua

SEQ ID NO: 1670959 - RNA, 19 nt, Homo sapiens
  misc_RNA (1)...(19): siRNA sense strand
ggauacaggaugaccauga

SEQ ID NO: 1670960 - RNA, 19 nt, Homo sapiens
  misc_RNA (1)...(19): siRNA sense strand
ugaaggauccuauuguuuc

SEQ ID NO: 1670961 - RNA, 19 nt, Homo sapiens
  misc_RNA (1)...(19): siRNA sense strand
caacuuggaauugcucuuu

SEQ ID NO: 1670962 - RNA, 19 nt, Homo sapiens
  misc_RNA (1)...(19): siRNA sense strand
gaaugccagugguaaaaua

SEQ ID NO: 1670963 - RNA, 19 nt, Homo sapiens
  misc_RNA (1)...(19): siRNA sense strand
uaaguggacauauucauga

SEQ ID NO: 1670964 - RNA, 19 nt, Homo sapiens
  misc_RNA (1)...(19): siRNA sense strand
caucaaccaugcaucaaca

SEQ ID NO: 1670965 - RNA, 19 nt, Homo sapiens
  misc_RNA (1)...(19): siRNA sense strand
ccaggauccuuuauuauac

SEQ ID NO: 1670966 - RNA, 19 nt, Homo sapiens
  misc_RNA (1)...(19): siRNA sense strand
ggauauuucugcaacugau

SEQ ID NO: 1670967 - RNA, 19 nt, Homo sapiens
  misc_RNA (1)...(19): siRNA sense strand
gaaagcugugguucuaauu

SEQ ID NO: 1670968 - RNA, 19 nt, Homo sapiens
  misc_RNA (1)...(19): siRNA sense strand
ugccugcaauugugaguua

SEQ ID NO: 1670969 - RNA, 19 nt, Homo sapiens
  misc_RNA (1)...(19): siRNA sense strand
agaguuauauucacagcaa

SEQ ID NO: 1670970 - RNA, 19 nt, Homo sapiens
  misc_RNA (1)...(19): siRNA sense strand
gaaacuuaaggaugggaua

SEQ ID NO: 1670971 - RNA, 19 nt, Homo sapiens
  misc_RNA (1)...(19): siRNA sense strand
cauuacagguucugaagau

SEQ ID NO: 1670972 - RNA, 19 nt, Homo sapiens
  misc_RNA (1)...(19): siRNA sense strand
gaaauagaggaccuuacuu

SEQ ID NO: 1670973 - RNA, 19 nt, Homo sapiens
  misc_RNA (1)...(19): siRNA sense strand
uccuacagauccugacuua

SEQ ID NO: 1670974 - RNA, 19 nt, Homo sapiens
  misc_RNA (1)...(19): siRNA sense strand
uuaaugagcuaugugaauc

SEQ ID NO: 1670975 - RNA, 19 nt, Homo sapiens
  misc_RNA (1)...(19): siRNA sense strand
gaacucgucuucauuuuac

SEQ ID NO: 1670976 - RNA, 19 nt, Homo sapiens
  misc_RNA (1)...(19): siRNA sense strand
gaaacaagaauagauaugc

SEQ ID NO: 1670977 - RNA, 19 nt, Homo sapiens
  misc_RNA (1)...(19): siRNA sense strand
aaauagaggaccuuacuug

SEQ ID NO: 1670978 - RNA, 19 nt, Homo sapiens
  misc_RNA (1)...(19): siRNA sense strand
gauuagacgaguuguaaau

SEQ ID NO: 1670979 - RNA, 19 nt, Homo sapiens
  misc_RNA (1)...(19): siRNA sense strand
cugccuauguuuauucgua

SEQ ID NO: 1670980 - RNA, 19 nt, Homo sapiens
  misc_RNA (1)...(19): siRNA sense strand
gugcauucauggauauuuc

SEQ ID NO: 1670981 - RNA, 19 nt, Homo sapiens
  misc_RNA (1)...(19): siRNA sense strand
ggaacgauccugcaucaac

SEQ ID NO: 1670982 - RNA, 19 nt, Homo sapiens
  misc_RNA (1)...(19): siRNA sense strand
guacaguuugucuugauaa

SEQ ID NO: 1670983 - RNA, 19 nt, Homo sapiens
  misc_RNA (1)...(19): siRNA sense strand
aagaugauaucguccuuuc

SEQ ID NO: 1670984 - RNA, 19 nt, Homo sapiens
  misc_RNA (1)...(19): siRNA sense strand
aaaguuggaugugcuggaa

SEQ ID NO: 1670985 - RNA, 19 nt, Homo sapiens
  misc_RNA (1)...(19): siRNA sense strand
ggaauugcucuuuacuaug

SEQ ID NO: 1670986 - RNA, 19 nt, Homo sapiens
  misc_RNA (1)...(19): siRNA sense strand
accaggauccuuuauuaua

SEQ ID NO: 1670987 - RNA, 19 nt, Homo sapiens
  misc_RNA (1)...(19): siRNA sense strand
ucaauacuauggaaugcau

SEQ ID NO: 1670988 - RNA, 19 nt, Homo sapiens
  misc_RNA (1)...(19): siRNA sense strand
gucaagaguuauauucaca

SEQ ID NO: 1670989 - RNA, 19 nt, Homo sapiens
  misc_RNA (1)...(19): siRNA sense strand
gcucuuuacuauggagaaa

SEQ ID NO: 1670990 - RNA, 19 nt, Homo sapiens
  misc_RNA (1)...(19): siRNA sense strand
cuucagaacucgucuucau

SEQ ID NO: 1670991 - RNA, 19 nt, Homo sapiens
  misc_RNA (1)...(19): siRNA sense strand
gaagaugauaucguccuuu

SEQ ID NO: 1670992 - RNA, 19 nt, Homo sapiens
  misc_RNA (1)...(19): siRNA sense strand
gacgaguuguaaauaaugu

SEQ ID NO: 1670993 - RNA, 19 nt, Homo sapiens
  misc_RNA (1)...(19): siRNA sense strand
ugacuuaccaccagguuau

SEQ ID NO: 1670994 - RNA, 19 nt, Homo sapiens
  misc_RNA (1)...(19): siRNA sense strand
ggaacugaaauuaccauuc

SEQ ID NO: 1670995 - RNA, 19 nt, Homo sapiens
  misc_RNA (1)...(19): siRNA sense strand
uauauucacagcaagauga

SEQ ID NO: 1670996 - RNA, 19 nt, Homo sapiens
  misc_RNA (1)...(19): siRNA sense strand
cgaaauagaggaccuuacu

SEQ ID NO: 1670997 - RNA, 19 nt, Homo sapiens
  misc_RNA (1)...(19): siRNA sense strand
caacugccuauguuuauuc

SEQ ID NO: 1670998 - RNA, 19 nt, Homo sapiens
  misc_RNA (1)...(19): siRNA sense strand
cgucggaucuacagcuuuc

SEQ ID NO: 1670999 - RNA, 19 nt, Homo sapiens
  misc_RNA (1)...(19): siRNA sense strand
gcugagaaagguuaucaau

SEQ ID NO: 1671000 - RNA, 19 nt, Homo sapiens
  misc_RNA (1)...(19): siRNA sense strand
caagcucgaguuaaaguug

SEQ ID NO: 1671001 - RNA, 19 nt, Homo sapiens
  misc_RNA (1)...(19): siRNA sense strand
uuaaagaaggcgaaauaga

SEQ ID NO: 1671002 - RNA, 19 nt, Homo sapiens
  misc_RNA (1)...(19): siRNA sense strand
uguacaguuugucuugaua

SEQ ID NO: 1671003 - RNA, 19 nt, Homo sapiens
  misc_RNA (1)...(19): siRNA sense strand
caggauccuuuauuauaca

SEQ ID NO: 1671004 - RNA, 19 nt, Homo sapiens
  misc_RNA (1)...(19): siRNA sense strand
uuugaaggauccuauuguu

SEQ ID NO: 1671005 - RNA, 19 nt, Homo sapiens
  misc_RNA (1)...(19): siRNA sense strand
cagguuaugugcagagucu

SEQ ID NO: 1671006 - RNA, 19 nt, Homo sapiens
  misc_RNA (1)...(19): siRNA sense strand
ugggaacgauccugcauca

SEQ ID NO: 1671007 - RNA, 19 nt, Homo sapiens
  misc_RNA (1)...(19): siRNA sense strand
ucaugggccugguccuuug

SEQ ID NO: 1671008 - RNA, 19 nt, Homo sapiens
  misc_RNA (1)...(19): siRNA sense strand
ggucaagaguuauauucac

SEQ ID NO: 1671009 - RNA, 19 nt, Homo sapiens
  misc_RNA (1)...(19): siRNA sense strand
cuaggaaacauuacagguu

SEQ ID NO: 1671010 - RNA, 19 nt, Homo sapiens
  misc_RNA (1)...(19): siRNA sense strand
aaacggaaugccaguggua

SEQ ID NO: 1671011 - RNA, 19 nt, Homo sapiens
  misc_RNA (1)...(19): siRNA sense strand
ugaagaugauaucguccuu

SEQ ID NO: 1671012 - RNA, 19 nt, Homo sapiens
  misc_RNA (1)...(19): siRNA sense strand
aggcaacggugacuuucaa

SEQ ID NO: 1671013 - RNA, 19 nt, Homo sapiens
  misc_RNA (1)...(19): siRNA sense strand
aagcacagacuuugaagga

SEQ ID NO: 1671014 - RNA, 19 nt, Homo sapiens
  misc_RNA (1)...(19): siRNA sense strand
aaagauaugcuaggaaaca

SEQ ID NO: 1671015 - RNA, 19 nt, Homo sapiens
  misc_RNA (1)...(19): siRNA sense strand
gcuggaacaggaacugaaa

SEQ ID NO: 1671016 - RNA, 19 nt, Homo sapiens
  misc_RNA (1)...(19): siRNA sense strand
uacaaauguuccuucagaa

SEQ ID NO: 1671017 - RNA, 19 nt, Homo sapiens
  misc_RNA (1)...(19): siRNA sense strand
cugauuuggugcugagaaa

SEQ ID NO: 1671018 - RNA, 19 nt, Homo sapiens
  misc_RNA (1)...(19): siRNA sense strand
uacagguucugaagaugaa

SEQ ID NO: 1671019 - RNA, 19 nt, Homo sapiens
  misc_RNA (1)...(19): siRNA sense strand
gaggaccuuacuugucaua

SEQ ID NO: 1671020 - RNA, 19 nt, Homo sapiens
  misc_RNA (1)...(19): siRNA sense strand
acaacugccuauguuuauu

SEQ ID NO: 1671021 - RNA, 19 nt, Homo sapiens
  misc_RNA (1)...(19): siRNA sense strand
cugauuagacgaguuguaa

SEQ ID NO: 1671022 - RNA, 19 nt, Homo sapiens
  misc_RNA (1)...(19): siRNA sense strand
aaacauuacagguucugaa

SEQ ID NO: 1671023 - RNA, 19 nt, Homo sapiens
  misc_RNA (1)...(19): siRNA sense strand
ggaucuacagcuuucacua

SEQ ID NO: 1671024 - RNA, 19 nt, Homo sapiens
  misc_RNA (1)...(19): siRNA sense strand
gccuauguuuauucguaua

SEQ ID NO: 1671025 - RNA, 19 nt, Homo sapiens
  misc_RNA (1)...(19): siRNA sense strand
guuauacaguaggugaauu

SEQ ID NO: 1671026 - RNA, 19 nt, Homo sapiens
  misc_RNA (1)...(19): siRNA sense strand
agucauauguaacuccaau

SEQ ID NO: 1671027 - RNA, 19 nt, Homo sapiens
  misc_RNA (1)...(19): siRNA sense strand
uuacagguucugaagauga

SEQ ID NO: 1671028 - RNA, 19 nt, Homo sapiens
  misc_RNA (1)...(19): siRNA sense strand
aggaugggauacaggauga

SEQ ID NO: 1671029 - RNA, 19 nt, Homo sapiens
  misc_RNA (1)...(19): siRNA sense strand
ggauccuauuguuucuaua

SEQ ID NO: 1671030 - RNA, 19 nt, Homo sapiens
  misc_RNA (1)...(19): siRNA sense strand
gcauaaaggucaagaguua

SEQ ID NO: 1671031 - RNA, 19 nt, Homo sapiens
  misc_RNA (1)...(19): siRNA sense strand
gaccuuacuugucauaaua

SEQ ID NO: 1671032 - RNA, 19 nt, Homo sapiens
  misc_RNA (1)...(19): siRNA sense strand
uuaccaggauccuuuauua

SEQ ID NO: 1671033 - RNA, 19 nt, Homo sapiens
  misc_RNA (1)...(19): siRNA sense strand
gaucgugcauucauggaua

SEQ ID NO: 1671034 - RNA, 19 nt, Homo sapiens
  misc_RNA (1)...(19): siRNA sense strand
gaauugcucuuuacuaugg

SEQ ID NO: 1671035 - RNA, 19 nt, Homo sapiens
  misc_RNA (1)...(19): siRNA sense strand
ucagcaagcucgaguuaaa

SEQ ID NO: 1671036 - RNA, 19 nt, Homo sapiens
  misc_RNA (1)...(19): siRNA sense strand
caugaaagcugugguucua

SEQ ID NO: 1671037 - RNA, 19 nt, Homo sapiens
  misc_RNA (1)...(19): siRNA sense strand
gauaugcuaggaaacauua

SEQ ID NO: 1671038 - RNA, 19 nt, Homo sapiens
  misc_RNA (1)...(19): siRNA sense strand
gugaaucgcuacaucaaga

SEQ ID NO: 1671039 - RNA, 19 nt, Homo sapiens
  misc_RNA (1)...(19): siRNA sense strand
ggaacaggaacugaaauua

SEQ ID NO: 1671040 - RNA, 19 nt, Homo sapiens
  misc_RNA (1)...(19): siRNA sense strand
gaacaggaacugaaauuac

SEQ ID NO: 1671041 - RNA, 19 nt, Homo sapiens
  misc_RNA (1)...(19): siRNA sense strand
gaagaugaaacaagaauag

SEQ ID NO: 1671042 - RNA, 19 nt, Homo sapiens
  misc_RNA (1)...(19): siRNA sense strand
gauacaggaugaccaugaa

SEQ ID NO: 1671043 - RNA, 19 nt, Homo sapiens
  misc_RNA (1)...(19): siRNA sense strand
uagaggaccuuacuuguca

SEQ ID NO: 1671044 - RNA, 19 nt, Homo sapiens
  misc_RNA (1)...(19): siRNA sense strand
ggaccuuacuugucauaau

SEQ ID NO: 1671045 - RNA, 19 nt, Homo sapiens
  misc_RNA (1)...(19): siRNA sense strand
auacaaauguuccuucaga

SEQ ID NO: 1671046 - RNA, 19 nt, Homo sapiens
  misc_RNA (1)...(19): siRNA sense strand
aaaccuaaauuccaagaug

SEQ ID NO: 1671047 - RNA, 19 nt, Homo sapiens
  misc_RNA (1)...(19): siRNA sense strand
uggaauugcucuuuacuau

SEQ ID NO: 1671048 - RNA, 19 nt, Homo sapiens
  misc_RNA (1)...(19): siRNA sense strand
ggacaaaacuggguucaga

SEQ ID NO: 1671049 - RNA, 19 nt, Homo sapiens
  misc_RNA (1)...(19): siRNA sense strand
gaucaacaacugccuaugu

SEQ ID NO: 1671050 - RNA, 19 nt, Homo sapiens
  misc_RNA (1)...(19): siRNA sense strand
uaucacagaucaacaacug

SEQ ID NO: 1671051 - RNA, 19 nt, Homo sapiens
  misc_RNA (1)...(19): siRNA sense strand
uaaagaaggcgaaauagag

SEQ ID NO: 1671052 - RNA, 19 nt, Homo sapiens
  misc_RNA (1)...(19): siRNA sense strand
gaaggauccuauuguuucu

SEQ ID NO: 1671053 - RNA, 19 nt, Homo sapiens
  misc_RNA (1)...(19): siRNA sense strand
ugaaagcugugguucuaau

SEQ ID NO: 1671054 - RNA, 19 nt, Homo sapiens
  misc_RNA (1)...(19): siRNA sense strand
ucagaacucgucuucauuu

SEQ ID NO: 1671055 - RNA, 19 nt, Homo sapiens
  misc_RNA (1)...(19): siRNA sense strand
gcagaauguuauacaguag

SEQ ID NO: 1671056 - RNA, 19 nt, Homo sapiens
  misc_RNA (1)...(19): siRNA sense strand
gaucuacagcuuucacuau

SEQ ID NO: 1671057 - RNA, 19 nt, Homo sapiens
  misc_RNA (1)...(19): siRNA sense strand
uacaguaggugaauuaugg

SEQ ID NO: 1671058 - RNA, 19 nt, Homo sapiens
  misc_RNA (1)...(19): siRNA sense strand
ugcagaauguuauacagua

SEQ ID NO: 1671059 - RNA, 19 nt, Homo sapiens
  misc_RNA (1)...(19): siRNA sense strand
ggauacaggaugaccauga

SEQ ID NO: 1671060 - RNA, 19 nt, Homo sapiens
  misc_RNA (1)...(19): siRNA sense strand
ugaaggauccuauuguuuc

SEQ ID NO: 1671061 - RNA, 19 nt, Homo sapiens
  misc_RNA (1)...(19): siRNA sense strand
caacuuggaauugcucuuu

SEQ ID NO: 1671062 - RNA, 19 nt, Homo sapiens
  misc_RNA (1)...(19): siRNA sense strand
gaaugccagugguaaaaua

SEQ ID NO: 1671063 - RNA, 19 nt, Homo sapiens
  misc_RNA (1)...(19): siRNA sense strand
uaaguggacauauucauga

SEQ ID NO: 1671064 - RNA, 19 nt, Homo sapiens
  misc_RNA (1)...(19): siRNA sense strand
caucaaccaugcaucaaca

SEQ ID NO: 1671065 - RNA, 19 nt, Homo sapiens
  misc_RNA (1)...(19): siRNA sense strand
ccaggauccuuuauuauac

SEQ ID NO: 1671066 - RNA, 19 nt, Homo sapiens
  misc_RNA (1)...(19): siRNA sense strand
ggauauuucugcaacugau

SEQ ID NO: 1671067 - RNA, 19 nt, Homo sapiens
  misc_RNA (1)...(19): siRNA sense strand
gaaagcugugguucuaauu

SEQ ID NO: 1671068 - RNA, 19 nt, Homo sapiens
  misc_RNA (1)...(19): siRNA sense strand
ugccugcaauugugaguua

SEQ ID NO: 1671069 - RNA, 19 nt, Homo sapiens
  misc_RNA (1)...(19): siRNA sense strand
agaguuauauucacagcaa

SEQ ID NO: 1671070 - RNA, 19 nt, Homo sapiens
  misc_RNA (1)...(19): siRNA sense strand
gaaacuuaaggaugggaua

SEQ ID NO: 1671071 - RNA, 19 nt, Homo sapiens
  misc_RNA (1)...(19): siRNA sense strand
cauuacagguucugaagau

SEQ ID NO: 1671072 - RNA, 19 nt, Homo sapiens
  misc_RNA (1)...(19): siRNA sense strand
gaaauagaggaccuuacuu

SEQ ID NO: 1671073 - RNA, 19 nt, Homo sapiens
  misc_RNA (1)...(19): siRNA sense strand
uccuacagauccugacuua

SEQ ID NO: 1671074 - RNA, 19 nt, Homo sapiens
  misc_RNA (1)...(19): siRNA sense strand
uuaaugagcuaugugaauc

SEQ ID NO: 1671075 - RNA, 19 nt, Homo sapiens
  misc_RNA (1)...(19): siRNA sense strand
gaacucgucuucauuuuac

SEQ ID NO: 1671076 - RNA, 19 nt, Homo sapiens
  misc_RNA (1)...(19): siRNA sense strand
gaaacaagaauagauaugc

SEQ ID NO: 1671077 - RNA, 19 nt, Homo sapiens
  misc_RNA (1)...(19): siRNA sense strand
aaauagaggaccuuacuug

SEQ ID NO: 1671078 - RNA, 19 nt, Homo sapiens
  misc_RNA (1)...(19): siRNA sense strand
gauuagacgaguuguaaau

SEQ ID NO: 1671079 - RNA, 19 nt, Homo sapiens
  misc_RNA (1)...(19): siRNA sense strand
cugccuauguuuauucgua

SEQ ID NO: 1671080 - RNA, 19 nt, Homo sapiens
  misc_RNA (1)...(19): siRNA sense strand
gugcauucauggauauuuc

SEQ ID NO: 1671081 - RNA, 19 nt, Homo sapiens
  misc_RNA (1)...(19): siRNA sense strand
ggaacgauccugcaucaac

SEQ ID NO: 1671082 - RNA, 19 nt, Homo sapiens
  misc_RNA (1)...(19): siRNA sense strand
guacaguuugucuugauaa

SEQ ID NO: 1671083 - RNA, 19 nt, Homo sapiens
  misc_RNA (1)...(19): siRNA sense strand
aagaugauaucguccuuuc

SEQ ID NO: 1671084 - RNA, 19 nt, Homo sapiens
  misc_RNA (1)...(19): siRNA sense strand
aaaguuggaugugcuggaa

SEQ ID NO: 1671085 - RNA, 19 nt, Homo sapiens
  misc_RNA (1)...(19): siRNA sense strand
ggaauugcucuuuacuaug

SEQ ID NO: 1671086 - RNA, 19 nt, Homo sapiens
  misc_RNA (1)...(19): siRNA sense strand
accaggauccuuuauuaua

SEQ ID NO: 1671087 - RNA, 19 nt, Homo sapiens
  misc_RNA (1)...(19): siRNA sense strand
ucaauacuauggaaugcau

SEQ ID NO: 1671088 - RNA, 19 nt, Homo sapiens
  misc_RNA (1)...(19): siRNA sense strand
gucaagaguuauauucaca

SEQ ID NO: 1671089 - RNA, 19 nt, Homo sapiens
  misc_RNA (1)...(19): siRNA sense strand
gcucuuuacuauggagaaa

SEQ ID NO: 1671090 - RNA, 19 nt, Homo sapiens
  misc_RNA (1)...(19): siRNA sense strand
cuucagaacucgucuucau

SEQ ID NO: 1671091 - RNA, 19 nt, Homo sapiens
  misc_RNA (1)...(19): siRNA sense strand
gaagaugauaucguccuuu

SEQ ID NO: 1671092 - RNA, 19 nt, Homo sapiens
  misc_RNA (1)...(19): siRNA sense strand
gacgaguuguaaauaaugu

SEQ ID NO: 1671093 - RNA, 19 nt, Homo sapiens
  misc_RNA (1)...(19): siRNA sense strand
ugacuuaccaccagguuau

SEQ ID NO: 1671094 - RNA, 19 nt, Homo sapiens
  misc_RNA (1)...(19): siRNA sense strand
ggaacugaaauuaccauuc

SEQ ID NO: 1671095 - RNA, 19 nt, Homo sapiens
  misc_RNA (1)...(19): siRNA sense strand
uauauucacagcaagauga

SEQ ID NO: 1671096 - RNA, 19 nt, Homo sapiens
  misc_RNA (1)...(19): siRNA sense strand
cgaaauagaggaccuuacu

SEQ ID NO: 1671097 - RNA, 19 nt, Homo sapiens
  misc_RNA (1)...(19): siRNA sense strand
caacugccuauguuuauuc

SEQ ID NO: 1671098 - RNA, 19 nt, Homo sapiens
  misc_RNA (1)...(19): siRNA sense strand
cgucggaucuacagcuuuc

SEQ ID NO: 1671099 - RNA, 19 nt, Homo sapiens
  misc_RNA (1)...(19): siRNA sense strand
gcugagaaagguuaucaau

SEQ ID NO: 1671100 - RNA, 19 nt, Homo sapiens
  misc_RNA (1)...(19): siRNA sense strand
caagcucgaguuaaaguug

SEQ ID NO: 1671101 - RNA, 19 nt, Homo sapiens
  misc_RNA (1)...(19): siRNA sense strand
uuaaagaaggcgaaauaga

SEQ ID NO: 1671102 - RNA, 19 nt, Homo sapiens
  misc_RNA (1)...(19): siRNA sense strand
uguacaguuugucuugaua

SEQ ID NO: 1671103 - RNA, 19 nt, Homo sapiens
  misc_RNA (1)...(19): siRNA sense strand
caggauccuuuauuauaca

SEQ ID NO: 1671104 - RNA, 19 nt, Homo sapiens
  misc_RNA (1)...(19): siRNA sense strand
uuugaaggauccuauuguu

SEQ ID NO: 1671105 - RNA, 19 nt, Homo sapiens
  misc_RNA (1)...(19): siRNA sense strand
cagguuaugugcagagucu

SEQ ID NO: 1671106 - RNA, 19 nt, Homo sapiens
  misc_RNA (1)...(19): siRNA sense strand
ugggaacgauccugcauca

SEQ ID NO: 1671107 - RNA, 19 nt, Homo sapiens
  misc_RNA (1)...(19): siRNA sense strand
ucaugggccugguccuuug

SEQ ID NO: 1671108 - RNA, 19 nt, Homo sapiens
  misc_RNA (1)...(19): siRNA sense strand
ggucaagaguuauauucac

SEQ ID NO: 1671109 - RNA, 19 nt, Homo sapiens
  misc_RNA (1)...(19): siRNA sense strand
cuaggaaacauuacagguu

SEQ ID NO: 1671110 - RNA, 19 nt, Homo sapiens
  misc_RNA (1)...(19): siRNA sense strand
aaacggaaugccaguggua

SEQ ID NO: 1671111 - RNA, 19 nt, Homo sapiens
  misc_RNA (1)...(19): siRNA sense strand
ugaagaugauaucguccuu

SEQ ID NO: 1671112 - RNA, 19 nt, Homo sapiens
  misc_RNA (1)...(19): siRNA sense strand
aggcaacggugacuuucaa

SEQ ID NO: 1671113 - RNA, 19 nt, Homo sapiens
  misc_RNA (1)...(19): siRNA sense strand
aagcacagacuuugaagga

SEQ ID NO: 1671114 - RNA, 19 nt, Homo sapiens
  misc_RNA (1)...(19): siRNA sense strand
aaagauaugcuaggaaaca

SEQ ID NO: 1671115 - RNA, 19 nt, Homo sapiens
  misc_RNA (1)...(19): siRNA sense strand
gcuggaacaggaacugaaa

SEQ ID NO: 1671116 - RNA, 19 nt, Homo sapiens
  misc_RNA (1)...(19): siRNA sense strand
uacaaauguuccuucagaa

SEQ ID NO: 1671117 - RNA, 19 nt, Homo sapiens
  misc_RNA (1)...(19): siRNA sense strand
cugauuuggugcugagaaa

SEQ ID NO: 1671118 - RNA, 19 nt, Homo sapiens
  misc_RNA (1)...(19): siRNA sense strand
uacagguucugaagaugaa

SEQ ID NO: 1671119 - RNA, 19 nt, Homo sapiens
  misc_RNA (1)...(19): siRNA sense strand
gaggaccuuacuugucaua

SEQ ID NO: 1671120 - RNA, 19 nt, Homo sapiens
  misc_RNA (1)...(19): siRNA sense strand
acaacugccuauguuuauu

SEQ ID NO: 1671121 - RNA, 19 nt, Homo sapiens
  misc_RNA (1)...(19): siRNA sense strand
cugauuagacgaguuguaa

SEQ ID NO: 1671122 - RNA, 19 nt, Homo sapiens
  misc_RNA (1)...(19): siRNA sense strand
aaacauuacagguucugaa

SEQ ID NO: 1671123 - RNA, 19 nt, Homo sapiens
  misc_RNA (1)...(19): siRNA sense strand
ggaucuacagcuuucacua

SEQ ID NO: 1671124 - RNA, 19 nt, Homo sapiens
  misc_RNA (1)...(19): siRNA sense strand
gccuauguuuauucguaua

SEQ ID NO: 1671125 - RNA, 19 nt, Homo sapiens
  misc_RNA (1)...(19): siRNA sense strand
guuauacaguaggugaauu

SEQ ID NO: 1671126 - RNA, 19 nt, Homo sapiens
  misc_RNA (1)...(19): siRNA sense strand
agucauauguaacuccaau

SEQ ID NO: 1671127 - RNA, 19 nt, Homo sapiens
  misc_RNA (1)...(19): siRNA sense strand
uuacagguucugaagauga

SEQ ID NO: 1671128 - RNA, 19 nt, Homo sapiens
  misc_RNA (1)...(19): siRNA sense strand
aggaugggauacaggauga

SEQ ID NO: 1671129 - RNA, 19 nt, Homo sapiens
  misc_RNA (1)...(19): siRNA sense strand
ggauccuauuguuucuaua

SEQ ID NO: 1671130 - RNA, 19 nt, Homo sapiens
  misc_RNA (1)...(19): siRNA sense strand
gcaagaaaccuacucaaag

SEQ ID NO: 1671131 - RNA, 19 nt, Homo sapiens
  misc_RNA (1)...(19): siRNA sense strand
caagaaaccuacucaaagc

SEQ ID NO: 1671132 - RNA, 19 nt, Homo sapiens
  misc_RNA (1)...(19): siRNA sense strand
agaaguaccugcaagaaac

SEQ ID NO: 1671133 - RNA, 19 nt, Homo sapiens
  misc_RNA (1)...(19): siRNA sense strand
ccacagcuuuuaagaagua

SEQ ID NO: 1671134 - RNA, 19 nt, Homo sapiens
  misc_RNA (1)...(19): siRNA sense strand
uaagaaguaccugcaagaa

SEQ ID NO: 1671135 - RNA, 19 nt, Homo sapiens
  misc_RNA (1)...(19): siRNA sense strand
aagaaguaccugcaagaaa

SEQ ID NO: 1671136 - RNA, 19 nt, Homo sapiens
  misc_RNA (1)...(19): siRNA sense strand
gaacccaacauugauaguc

SEQ ID NO: 1671137 - RNA, 19 nt, Homo sapiens
  misc_RNA (1)...(19): siRNA sense strand
ugcaagaaaccuacucaaa

SEQ ID NO: 1671138 - RNA, 19 nt, Homo sapiens
  misc_RNA (1)...(19): siRNA sense strand
uuaagaaguaccugcaaga

SEQ ID NO: 1671139 - RNA, 19 nt, Homo sapiens
  misc_RNA (1)...(19): siRNA sense strand
gcaagaaaccuacucaaag

SEQ ID NO: 1671140 - RNA, 19 nt, Homo sapiens
  misc_RNA (1)...(19): siRNA sense strand
caagaaaccuacucaaagc

SEQ ID NO: 1671141 - RNA, 19 nt, Homo sapiens
  misc_RNA (1)...(19): siRNA sense strand
agaaguaccugcaagaaac

SEQ ID NO: 1671142 - RNA, 19 nt, Homo sapiens
  misc_RNA (1)...(19): siRNA sense strand
ccacagcuuuuaagaagua

SEQ ID NO: 1671143 - RNA, 19 nt, Homo sapiens
  misc_RNA (1)...(19): siRNA sense strand
uaagaaguaccugcaagaa

SEQ ID NO: 1671144 - RNA, 19 nt, Homo sapiens
  misc_RNA (1)...(19): siRNA sense strand
aagaaguaccugcaagaaa

SEQ ID NO: 1671145 - RNA, 19 nt, Homo sapiens
  misc_RNA (1)...(19): siRNA sense strand
gaacccaacauugauaguc

SEQ ID NO: 1671146 - RNA, 19 nt, Homo sapiens
  misc_RNA (1)...(19): siRNA sense strand
ugcaagaaaccuacucaaa

SEQ ID NO: 1671147 - RNA, 19 nt, Homo sapiens
  misc_RNA (1)...(19): siRNA sense strand
uuaagaaguaccugcaaga

SEQ ID NO: 1671148 - RNA, 19 nt, Homo sapiens
  misc_RNA (1)...(19): siRNA sense strand
gcaagaaaccuacucaaag

SEQ ID NO: 1671149 - RNA, 19 nt, Homo sapiens
  misc_RNA (1)...(19): siRNA sense strand
caagaaaccuacucaaagc

SEQ ID NO: 1671150 - RNA, 19 nt, Homo sapiens
  misc_RNA (1)...(19): siRNA sense strand
agaaguaccugcaagaaac

SEQ ID NO: 1671151 - RNA, 19 nt, Homo sapiens
  misc_RNA (1)...(19): siRNA sense strand
ccacagcuuuuaagaagua

SEQ ID NO: 1671152 - RNA, 19 nt, Homo sapiens
  misc_RNA (1)...(19): siRNA sense strand
uaagaaguaccugcaagaa

SEQ ID NO: 1671153 - RNA, 19 nt, Homo sapiens
  misc_RNA (1)...(19): siRNA sense strand
aagaaguaccugcaagaaa

SEQ ID NO: 1671154 - RNA, 19 nt, Homo sapiens
  misc_RNA (1)...(19): siRNA sense strand
gaacccaacauugauaguc

SEQ ID NO: 1671155 - RNA, 19 nt, Homo sapiens
  misc_RNA (1)...(19): siRNA sense strand
ugcaagaaaccuacucaaa

SEQ ID NO: 1671156 - RNA, 19 nt, Homo sapiens
  misc_RNA (1)...(19): siRNA sense strand
uuaagaaguaccugcaaga

SEQ ID NO: 1671157 - RNA, 19 nt, Homo sapiens
  misc_RNA (1)...(19): siRNA sense strand
gcaagaaaccuacucaaag

SEQ ID NO: 1671158 - RNA, 19 nt, Homo sapiens
  misc_RNA (1)...(19): siRNA sense strand
caagaaaccuacucaaagc

SEQ ID NO: 1671159 - RNA, 19 nt, Homo sapiens
  misc_RNA (1)...(19): siRNA sense strand
agaaguaccugcaagaaac

SEQ ID NO: 1671160 - RNA, 19 nt, Homo sapiens
  misc_RNA (1)...(19): siRNA sense strand
ccacagcuuuuaagaagua

SEQ ID NO: 1671161 - RNA, 19 nt, Homo sapiens
  misc_RNA (1)...(19): siRNA sense strand
uaagaaguaccugcaagaa

SEQ ID NO: 1671162 - RNA, 19 nt, Homo sapiens
  misc_RNA (1)...(19): siRNA sense strand
aagaaguaccugcaagaaa

SEQ ID NO: 1671163 - RNA, 19 nt, Homo sapiens
  misc_RNA (1)...(19): siRNA sense strand
gaacccaacauugauaguc

SEQ ID NO: 1671164 - RNA, 19 nt, Homo sapiens
  misc_RNA (1)...(19): siRNA sense strand
ugcaagaaaccuacucaaa

SEQ ID NO: 1671165 - RNA, 19 nt, Homo sapiens
  misc_RNA (1)...(19): siRNA sense strand
uuaagaaguaccugcaaga

SEQ ID NO: 1671166 - RNA, 19 nt, Homo sapiens
  misc_RNA (1)...(19): siRNA sense strand
gcaagaaaccuacucaaag

SEQ ID NO: 1671167 - RNA, 19 nt, Homo sapiens
  misc_RNA (1)...(19): siRNA sense strand
caagaaaccuacucaaagc

SEQ ID NO: 1671168 - RNA, 19 nt, Homo sapiens
  misc_RNA (1)...(19): siRNA sense strand
agaaguaccugcaagaaac

SEQ ID NO: 1671169 - RNA, 19 nt, Homo sapiens
  misc_RNA (1)...(19): siRNA sense strand
ccacagcuuuuaagaagua

SEQ ID NO: 1671170 - RNA, 19 nt, Homo sapiens
  misc_RNA (1)...(19): siRNA sense strand
uaagaaguaccugcaagaa

SEQ ID NO: 1671171 - RNA, 19 nt, Homo sapiens
  misc_RNA (1)...(19): siRNA sense strand
aagaaguaccugcaagaaa

SEQ ID NO: 1671172 - RNA, 19 nt, Homo sapiens
  misc_RNA (1)...(19): siRNA sense strand
gaacccaacauugauaguc

SEQ ID NO: 1671173 - RNA, 19 nt, Homo sapiens
  misc_RNA (1)...(19): siRNA sense strand
ugcaagaaaccuacucaaa

SEQ ID NO: 1671174 - RNA, 19 nt, Homo sapiens
  misc_RNA (1)...(19): siRNA sense strand
uuaagaaguaccugcaaga

SEQ ID NO: 1671175 - RNA, 19 nt, Homo sapiens
  misc_RNA (1)...(19): siRNA sense strand
gaacccaacauugauaguc

SEQ ID NO: 1671176 - RNA, 19 nt, Homo sapiens
  misc_RNA (1)...(19): siRNA sense strand
gcaagaaaccuacucaaag

SEQ ID NO: 1671177 - RNA, 19 nt, Homo sapiens
  misc_RNA (1)...(19): siRNA sense strand
caagaaaccuacucaaagc

SEQ ID NO: 1671178 - RNA, 19 nt, Homo sapiens
  misc_RNA (1)...(19): siRNA sense strand
agaaguaccugcaagaaac

SEQ ID NO: 1671179 - RNA, 19 nt, Homo sapiens
  misc_RNA (1)...(19): siRNA sense strand
ccacagcuuuuaagaagua

SEQ ID NO: 1671180 - RNA, 19 nt, Homo sapiens
  misc_RNA (1)...(19): siRNA sense strand
uaagaaguaccugcaagaa

SEQ ID NO: 1671181 - RNA, 19 nt, Homo sapiens
  misc_RNA (1)...(19): siRNA sense strand
aagaaguaccugcaagaaa

SEQ ID NO: 1671182 - RNA, 19 nt, Homo sapiens
  misc_RNA (1)...(19): siRNA sense strand
gaacccaacauugauaguc

SEQ ID NO: 1671183 - RNA, 19 nt, Homo sapiens
  misc_RNA (1)...(19): siRNA sense strand
ugcaagaaaccuacucaaa

SEQ ID NO: 1671184 - RNA, 19 nt, Homo sapiens
  misc_RNA (1)...(19): siRNA sense strand
uuaagaaguaccugcaaga

SEQ ID NO: 1671185 - RNA, 19 nt, Homo sapiens
  misc_RNA (1)...(19): siRNA sense strand
gcaagaaaccuacucaaag

SEQ ID NO: 1671186 - RNA, 19 nt, Homo sapiens
  misc_RNA (1)...(19): siRNA sense strand
caagaaaccuacucaaagc

SEQ ID NO: 1671187 - RNA, 19 nt, Homo sapiens
  misc_RNA (1)...(19): siRNA sense strand
agaaguaccugcaagaaac

SEQ ID NO: 1671188 - RNA, 19 nt, Homo sapiens
  misc_RNA (1)...(19): siRNA sense strand
ccacagcuuuuaagaagua

SEQ ID NO: 1671189 - RNA, 19 nt, Homo sapiens
  misc_RNA (1)...(19): siRNA sense strand
uaagaaguaccugcaagaa

SEQ ID NO: 1671190 - RNA, 19 nt, Homo sapiens
  misc_RNA (1)...(19): siRNA sense strand
aagaaguaccugcaagaaa

SEQ ID NO: 1671191 - RNA, 19 nt, Homo sapiens
  misc_RNA (1)...(19): siRNA sense strand
gaacccaacauugauaguc

SEQ ID NO: 1671192 - RNA, 19 nt, Homo sapiens
  misc_RNA (1)...(19): siRNA sense strand
ugcaagaaaccuacucaaa

SEQ ID NO: 1671193 - RNA, 19 nt, Homo sapiens
  misc_RNA (1)...(19): siRNA sense strand
uuaagaaguaccugcaaga

SEQ ID NO: 1671194 - RNA, 19 nt, Homo sapiens
  misc_RNA (1)...(19): siRNA sense strand
gcaagaaaccuacucaaag

SEQ ID NO: 1671195 - RNA, 19 nt, Homo sapiens
  misc_RNA (1)...(19): siRNA sense strand
caagaaaccuacucaaagc

SEQ ID NO: 1671196 - RNA, 19 nt, Homo sapiens
  misc_RNA (1)...(19): siRNA sense strand
agaaguaccugcaagaaac

SEQ ID NO: 1671197 - RNA, 19 nt, Homo sapiens
  misc_RNA (1)...(19): siRNA sense strand
ccacagcuuuuaagaagua

SEQ ID NO: 1671198 - RNA, 19 nt, Homo sapiens
  misc_RNA (1)...(19): siRNA sense strand
uaagaaguaccugcaagaa

SEQ ID NO: 1671199 - RNA, 19 nt, Homo sapiens
  misc_RNA (1)...(19): siRNA sense strand
aagaaguaccugcaagaaa

SEQ ID NO: 1671200 - RNA, 19 nt, Homo sapiens
  misc_RNA (1)...(19): siRNA sense strand
gaacccaacauugauaguc

SEQ ID NO: 1671201 - RNA, 19 nt, Homo sapiens
  misc_RNA (1)...(19): siRNA sense strand
ugcaagaaaccuacucaaa

SEQ ID NO: 1671202 - RNA, 19 nt, Homo sapiens
  misc_RNA (1)...(19): siRNA sense strand
uuaagaaguaccugcaaga

SEQ ID NO: 1671203 - RNA, 19 nt, Homo sapiens
  misc_RNA (1)...(19): siRNA sense strand
gcaagaaaccuacucaaag

SEQ ID NO: 1671204 - RNA, 19 nt, Homo sapiens
  misc_RNA (1)...(19): siRNA sense strand
caagaaaccuacucaaagc

SEQ ID NO: 1671205 - RNA, 19 nt, Homo sapiens
  misc_RNA (1)...(19): siRNA sense strand
agaaguaccugcaagaaac

SEQ ID NO: 1671206 - RNA, 19 nt, Homo sapiens
  misc_RNA (1)...(19): siRNA sense strand
ccacagcuuuuaagaagua

SEQ ID NO: 1671207 - RNA, 19 nt, Homo sapiens
  misc_RNA (1)...(19): siRNA sense strand
uaagaaguaccugcaagaa

SEQ ID NO: 1671208 - RNA, 19 nt, Homo sapiens
  misc_RNA (1)...(19): siRNA sense strand
aagaaguaccugcaagaaa

SEQ ID NO: 1671209 - RNA, 19 nt, Homo sapiens
  misc_RNA (1)...(19): siRNA sense strand
gaacccaacauugauaguc

SEQ ID NO: 1671210 - RNA, 19 nt, Homo sapiens
  misc_RNA (1)...(19): siRNA sense strand
ugcaagaaaccuacucaaa

SEQ ID NO: 1671211 - RNA, 19 nt, Homo sapiens
  misc_RNA (1)...(19): siRNA sense strand
uuaagaaguaccugcaaga

SEQ ID NO: 1671212 - RNA, 19 nt, Homo sapiens
  misc_RNA (1)...(19): siRNA sense strand
gcaagaaaccuacucaaag

SEQ ID NO: 1671213 - RNA, 19 nt, Homo sapiens
  misc_RNA (1)...(19): siRNA sense strand
caagaaaccuacucaaagc

SEQ ID NO: 1671214 - RNA, 19 nt, Homo sapiens
  misc_RNA (1)...(19): siRNA sense strand
agaaguaccugcaagaaac

SEQ ID NO: 1671215 - RNA, 19 nt, Homo sapiens
  misc_RNA (1)...(19): siRNA sense strand
ccacagcuuuuaagaagua

SEQ ID NO: 1671216 - RNA, 19 nt, Homo sapiens
  misc_RNA (1)...(19): siRNA sense strand
uaagaaguaccugcaagaa

SEQ ID NO: 1671217 - RNA, 19 nt, Homo sapiens
  misc_RNA (1)...(19): siRNA sense strand
aagaaguaccugcaagaaa

SEQ ID NO: 1671218 - RNA, 19 nt, Homo sapiens
  misc_RNA (1)...(19): siRNA sense strand
gaacccaacauugauaguc

SEQ ID NO: 1671219 - RNA, 19 nt, Homo sapiens
  misc_RNA (1)...(19): siRNA sense strand
ugcaagaaaccuacucaaa

SEQ ID NO: 1671220 - RNA, 19 nt, Homo sapiens
  misc_RNA (1)...(19): siRNA sense strand
uuaagaaguaccugcaaga

SEQ ID NO: 1671221 - RNA, 19 nt, Homo sapiens
  misc_RNA (1)...(19): siRNA sense strand
gaacccaacauugauaguc

SEQ ID NO: 1671222 - RNA, 19 nt, Homo sapiens
  misc_RNA (1)...(19): siRNA sense strand
gcaagaaaccuacucaaag

SEQ ID NO: 1671223 - RNA, 19 nt, Homo sapiens
  misc_RNA (1)...(19): siRNA sense strand
caagaaaccuacucaaagc

SEQ ID NO: 1671224 - RNA, 19 nt, Homo sapiens
  misc_RNA (1)...(19): siRNA sense strand
agaaguaccugcaagaaac

SEQ ID NO: 1671225 - RNA, 19 nt, Homo sapiens
  misc_RNA (1)...(19): siRNA sense strand
ccacagcuuuuaagaagua

SEQ ID NO: 1671226 - RNA, 19 nt, Homo sapiens
  misc_RNA (1)...(19): siRNA sense strand
uaagaaguaccugcaagaa

SEQ ID NO: 1671227 - RNA, 19 nt, Homo sapiens
  misc_RNA (1)...(19): siRNA sense strand
aagaaguaccugcaagaaa

SEQ ID NO: 1671228 - RNA, 19 nt, Homo sapiens
  misc_RNA (1)...(19): siRNA sense strand
gaacccaacauugauaguc

SEQ ID NO: 1671229 - RNA, 19 nt, Homo sapiens
  misc_RNA (1)...(19): siRNA sense strand
ugcaagaaaccuacucaaa

SEQ ID NO: 1671230 - RNA, 19 nt, Homo sapiens
  misc_RNA (1)...(19): siRNA sense strand
uuaagaaguaccugcaaga

SEQ ID NO: 1671231 - RNA, 19 nt, Homo sapiens
  misc_RNA (1)...(19): siRNA sense strand
gcaagaaaccuacucaaag

SEQ ID NO: 1671232 - RNA, 19 nt, Homo sapiens
  misc_RNA (1)...(19): siRNA sense strand
caagaaaccuacucaaagc

SEQ ID NO: 1671233 - RNA, 19 nt, Homo sapiens
  misc_RNA (1)...(19): siRNA sense strand
agaaguaccugcaagaaac

SEQ ID NO: 1671234 - RNA, 19 nt, Homo sapiens
  misc_RNA (1)...(19): siRNA sense strand
ccacagcuuuuaagaagua

SEQ ID NO: 1671235 - RNA, 19 nt, Homo sapiens
  misc_RNA (1)...(19): siRNA sense strand
uaagaaguaccugcaagaa

SEQ ID NO: 1671236 - RNA, 19 nt, Homo sapiens
  misc_RNA (1)...(19): siRNA sense strand
aagaaguaccugcaagaaa

SEQ ID NO: 1671237 - RNA, 19 nt, Homo sapiens
  misc_RNA (1)...(19): siRNA sense strand
gaacccaacauugauaguc

SEQ ID NO: 1671238 - RNA, 19 nt, Homo sapiens
  misc_RNA (1)...(19): siRNA sense strand
ugcaagaaaccuacucaaa

SEQ ID NO: 1671239 - RNA, 19 nt, Homo sapiens
  misc_RNA (1)...(19): siRNA sense strand
uuaagaaguaccugcaaga

SEQ ID NO: 1671240 - RNA, 19 nt, Homo sapiens
  misc_RNA (1)...(19): siRNA sense strand
gcaagaaaccuacucaaag

SEQ ID NO: 1671241 - RNA, 19 nt, Homo sapiens
  misc_RNA (1)...(19): siRNA sense strand
caagaaaccuacucaaagc

SEQ ID NO: 1671242 - RNA, 19 nt, Homo sapiens
  misc_RNA (1)...(19): siRNA sense strand
agaaguaccugcaagaaac

SEQ ID NO: 1671243 - RNA, 19 nt, Homo sapiens
  misc_RNA (1)...(19): siRNA sense strand
ccacagcuuuuaagaagua

SEQ ID NO: 1671244 - RNA, 19 nt, Homo sapiens
  misc_RNA (1)...(19): siRNA sense strand
uaagaaguaccugcaagaa

SEQ ID NO: 1671245 - RNA, 19 nt, Homo sapiens
  misc_RNA (1)...(19): siRNA sense strand
aagaaguaccugcaagaaa

SEQ ID NO: 1671246 - RNA, 19 nt, Homo sapiens
  misc_RNA (1)...(19): siRNA sense strand
gaacccaacauugauaguc

SEQ ID NO: 1671247 - RNA, 19 nt, Homo sapiens
  misc_RNA (1)...(19): siRNA sense strand
ugcaagaaaccuacucaaa

SEQ ID NO: 1671248 - RNA, 19 nt, Homo sapiens
  misc_RNA (1)...(19): siRNA sense strand
uuaagaaguaccugcaaga

SEQ ID NO: 1671249 - RNA, 19 nt, Homo sapiens
  misc_RNA (1)...(19): siRNA sense strand
gcaagaaaccuacucaaag

SEQ ID NO: 1671250 - RNA, 19 nt, Homo sapiens
  misc_RNA (1)...(19): siRNA sense strand
caagaaaccuacucaaagc

SEQ ID NO: 1671251 - RNA, 19 nt, Homo sapiens
  misc_RNA (1)...(19): siRNA sense strand
agaaguaccugcaagaaac

SEQ ID NO: 1671252 - RNA, 19 nt, Homo sapiens
  misc_RNA (1)...(19): siRNA sense strand
ccacagcuuuuaagaagua

SEQ ID NO: 1671253 - RNA, 19 nt, Homo sapiens
  misc_RNA (1)...(19): siRNA sense strand
uaagaaguaccugcaagaa

SEQ ID NO: 1671254 - RNA, 19 nt, Homo sapiens
  misc_RNA (1)...(19): siRNA sense strand
aagaaguaccugcaagaaa

SEQ ID NO: 1671255 - RNA, 19 nt, Homo sapiens
  misc_RNA (1)...(19): siRNA sense strand
gaacccaacauugauaguc

SEQ ID NO: 1671256 - RNA, 19 nt, Homo sapiens
  misc_RNA (1)...(19): siRNA sense strand
ugcaagaaaccuacucaaa

SEQ ID NO: 1671257 - RNA, 19 nt, Homo sapiens
  misc_RNA (1)...(19): siRNA sense strand
uuaagaaguaccugcaaga

SEQ ID NO: 1671258 - RNA, 19 nt, Homo sapiens
  misc_RNA (1)...(19): siRNA sense strand
gcaagaaaccuacucaaag

SEQ ID NO: 1671259 - RNA, 19 nt, Homo sapiens
  misc_RNA (1)...(19): siRNA sense strand
caagaaaccuacucaaagc

SEQ ID NO: 1671260 - RNA, 19 nt, Homo sapiens
  misc_RNA (1)...(19): siRNA sense strand
agaaguaccugcaagaaac

SEQ ID NO: 1671261 - RNA, 19 nt, Homo sapiens
  misc_RNA (1)...(19): siRNA sense strand
ccacagcuuuuaagaagua

SEQ ID NO: 1671262 - RNA, 19 nt, Homo sapiens
  misc_RNA (1)...(19): siRNA sense strand
uaagaaguaccugcaagaa

SEQ ID NO: 1671263 - RNA, 19 nt, Homo sapiens
  misc_RNA (1)...(19): siRNA sense strand
aagaaguaccugcaagaaa

SEQ ID NO: 1671264 - RNA, 19 nt, Homo sapiens
  misc_RNA (1)...(19): siRNA sense strand
gaacccaacauugauaguc

SEQ ID NO: 1671265 - RNA, 19 nt, Homo sapiens
  misc_RNA (1)...(19): siRNA sense strand
ugcaagaaaccuacucaaa

SEQ ID NO: 1671266 - RNA, 19 nt, Homo sapiens
  misc_RNA (1)...(19): siRNA sense strand
uuaagaaguaccugcaaga

SEQ ID NO: 1671267 - RNA, 19 nt, Homo sapiens
  misc_RNA (1)...(19): siRNA sense strand
gaacccaacauugauaguc

SEQ ID NO: 1671268 - RNA, 19 nt, Homo sapiens
  misc_RNA (1)...(19): siRNA sense strand
gcaagaaaccuacucaaag

SEQ ID NO: 1671269 - RNA, 19 nt, Homo sapiens
  misc_RNA (1)...(19): siRNA sense strand
caagaaaccuacucaaagc

SEQ ID NO: 1671270 - RNA, 19 nt, Homo sapiens
  misc_RNA (1)...(19): siRNA sense strand
agaaguaccugcaagaaac

SEQ ID NO: 1671271 - RNA, 19 nt, Homo sapiens
  misc_RNA (1)...(19): siRNA sense strand
ccacagcuuuuaagaagua

SEQ ID NO: 1671272 - RNA, 19 nt, Homo sapiens
  misc_RNA (1)...(19): siRNA sense strand
uaagaaguaccugcaagaa

SEQ ID NO: 1671273 - RNA, 19 nt, Homo sapiens
  misc_RNA (1)...(19): siRNA sense strand
aagaaguaccugcaagaaa

SEQ ID NO: 1671274 - RNA, 19 nt, Homo sapiens
  misc_RNA (1)...(19): siRNA sense strand
gaacccaacauugauaguc

SEQ ID NO: 1671275 - RNA, 19 nt, Homo sapiens
  misc_RNA (1)...(19): siRNA sense strand
ugcaagaaaccuacucaaa

SEQ ID NO: 1671276 - RNA, 19 nt, Homo sapiens
  misc_RNA (1)...(19): siRNA sense strand
uuaagaaguaccugcaaga

SEQ ID NO: 1671277 - RNA, 19 nt, Homo sapiens
  misc_RNA (1)...(19): siRNA sense strand
gcaagaaaccuacucaaag

SEQ ID NO: 1671278 - RNA, 19 nt, Homo sapiens
  misc_RNA (1)...(19): siRNA sense strand
caagaaaccuacucaaagc

SEQ ID NO: 1671279 - RNA, 19 nt, Homo sapiens
  misc_RNA (1)...(19): siRNA sense strand
agaaguaccugcaagaaac

SEQ ID NO: 1671280 - RNA, 19 nt, Homo sapiens
  misc_RNA (1)...(19): siRNA sense strand
ccacagcuuuuaagaagua

SEQ ID NO: 1671281 - RNA, 19 nt, Homo sapiens
  misc_RNA (1)...(19): siRNA sense strand
uaagaaguaccugcaagaa

SEQ ID NO: 1671282 - RNA, 19 nt, Homo sapiens
  misc_RNA (1)...(19): siRNA sense strand
aagaaguaccugcaagaaa

SEQ ID NO: 1671283 - RNA, 19 nt, Homo sapiens
  misc_RNA (1)...(19): siRNA sense strand
gaacccaacauugauaguc

SEQ ID NO: 1671284 - RNA, 19 nt, Homo sapiens
  misc_RNA (1)...(19): siRNA sense strand
ugcaagaaaccuacucaaa

SEQ ID NO: 1671285 - RNA, 19 nt, Homo sapiens
  misc_RNA (1)...(19): siRNA sense strand
uuaagaaguaccugcaaga

SEQ ID NO: 1671286 - RNA, 19 nt, Homo sapiens
  misc_RNA (1)...(19): siRNA sense strand
gcaagaaaccuacucaaag

SEQ ID NO: 1671287 - RNA, 19 nt, Homo sapiens
  misc_RNA (1)...(19): siRNA sense strand
caagaaaccuacucaaagc

SEQ ID NO: 1671288 - RNA, 19 nt, Homo sapiens
  misc_RNA (1)...(19): siRNA sense strand
agaaguaccugcaagaaac

SEQ ID NO: 1671289 - RNA, 19 nt, Homo sapiens
  misc_RNA (1)...(19): siRNA sense strand
ccacagcuuuuaagaagua

SEQ ID NO: 1671290 - RNA, 19 nt, Homo sapiens
  misc_RNA (1)...(19): siRNA sense strand
uaagaaguaccugcaagaa

SEQ ID NO: 1671291 - RNA, 19 nt, Homo sapiens
  misc_RNA (1)...(19): siRNA sense strand
aagaaguaccugcaagaaa

SEQ ID NO: 1671292 - RNA, 19 nt, Homo sapiens
  misc_RNA (1)...(19): siRNA sense strand
gaacccaacauugauaguc

SEQ ID NO: 1671293 - RNA, 19 nt, Homo sapiens
  misc_RNA (1)...(19): siRNA sense strand
ugcaagaaaccuacucaaa

SEQ ID NO: 1671294 - RNA, 19 nt, Homo sapiens
  misc_RNA (1)...(19): siRNA sense strand
uuaagaaguaccugcaaga

SEQ ID NO: 1671295 - RNA, 19 nt, Homo sapiens
  misc_RNA (1)...(19): siRNA sense strand
gcaagaaaccuacucaaag

SEQ ID NO: 1671296 - RNA, 19 nt, Homo sapiens
  misc_RNA (1)...(19): siRNA sense strand
caagaaaccuacucaaagc

SEQ ID NO: 1671297 - RNA, 19 nt, Homo sapiens
  misc_RNA (1)...(19): siRNA sense strand
agaaguaccugcaagaaac

SEQ ID NO: 1671298 - RNA, 19 nt, Homo sapiens
  misc_RNA (1)...(19): siRNA sense strand
ccacagcuuuuaagaagua

SEQ ID NO: 1671299 - RNA, 19 nt, Homo sapiens
  misc_RNA (1)...(19): siRNA sense strand
uaagaaguaccugcaagaa

SEQ ID NO: 1671300 - RNA, 19 nt, Homo sapiens
  misc_RNA (1)...(19): siRNA sense strand
aagaaguaccugcaagaaa

SEQ ID NO: 1671301 - RNA, 19 nt, Homo sapiens
  misc_RNA (1)...(19): siRNA sense strand
gaacccaacauugauaguc

SEQ ID NO: 1671302 - RNA, 19 nt, Homo sapiens
  misc_RNA (1)...(19): siRNA sense strand
ugcaagaaaccuacucaaa

SEQ ID NO: 1671303 - RNA, 19 nt, Homo sapiens
  misc_RNA (1)...(19): siRNA sense strand
uuaagaaguaccugcaaga

SEQ ID NO: 1671304 - RNA, 19 nt, Homo sapiens
  misc_RNA (1)...(19): siRNA sense strand
gcaagaaaccuacucaaag

SEQ ID NO: 1671305 - RNA, 19 nt, Homo sapiens
  misc_RNA (1)...(19): siRNA sense strand
caagaaaccuacucaaagc

SEQ ID NO: 1671306 - RNA, 19 nt, Homo sapiens
  misc_RNA (1)...(19): siRNA sense strand
agaaguaccugcaagaaac

SEQ ID NO: 1671307 - RNA, 19 nt, Homo sapiens
  misc_RNA (1)...(19): siRNA sense strand
ccacagcuuuuaagaagua

SEQ ID NO: 1671308 - RNA, 19 nt, Homo sapiens
  misc_RNA (1)...(19): siRNA sense strand
uaagaaguaccugcaagaa

SEQ ID NO: 1671309 - RNA, 19 nt, Homo sapiens
  misc_RNA (1)...(19): siRNA sense strand
aagaaguaccugcaagaaa

SEQ ID NO: 1671310 - RNA, 19 nt, Homo sapiens
  misc_RNA (1)...(19): siRNA sense strand
gaacccaacauugauaguc

SEQ ID NO: 1671311 - RNA, 19 nt, Homo sapiens
  misc_RNA (1)...(19): siRNA sense strand
ugcaagaaaccuacucaaa

SEQ ID NO: 1671312 - RNA, 19 nt, Homo sapiens
  misc_RNA (1)...(19): siRNA sense strand
uuaagaaguaccugcaaga

SEQ ID NO: 1671313 - RNA, 19 nt, Homo sapiens
  misc_RNA (1)...(19): siRNA sense strand
gaacccaacauugauaguc

SEQ ID NO: 1671314 - RNA, 19 nt, Homo sapiens
  misc_RNA (1)...(19): siRNA sense strand
gcaagaaaccuacucaaag

SEQ ID NO: 1671315 - RNA, 19 nt, Homo sapiens
  misc_RNA (1)...(19): siRNA sense strand
caagaaaccuacucaaagc

SEQ ID NO: 1671316 - RNA, 19 nt, Homo sapiens
  misc_RNA (1)...(19): siRNA sense strand
agaaguaccugcaagaaac

SEQ ID NO: 1671317 - RNA, 19 nt, Homo sapiens
  misc_RNA (1)...(19): siRNA sense strand
ccacagcuuuuaagaagua

SEQ ID NO: 1671318 - RNA, 19 nt, Homo sapiens
  misc_RNA (1)...(19): siRNA sense strand
uaagaaguaccugcaagaa

SEQ ID NO: 1671319 - RNA, 19 nt, Homo sapiens
  misc_RNA (1)...(19): siRNA sense strand
aagaaguaccugcaagaaa

SEQ ID NO: 1671320 - RNA, 19 nt, Homo sapiens
  misc_RNA (1)...(19): siRNA sense strand
gaacccaacauugauaguc

SEQ ID NO: 1671321 - RNA, 19 nt, Homo sapiens
  misc_RNA (1)...(19): siRNA sense strand
ugcaagaaaccuacucaaa

SEQ ID NO: 1671322 - RNA, 19 nt, Homo sapiens
  misc_RNA (1)...(19): siRNA sense strand
uuaagaaguaccugcaaga

SEQ ID NO: 1671323 - RNA, 19 nt, Homo sapiens
  misc_RNA (1)...(19): siRNA sense strand
gcaagaaaccuacucaaag

SEQ ID NO: 1671324 - RNA, 19 nt, Homo sapiens
  misc_RNA (1)...(19): siRNA sense strand
caagaaaccuacucaaagc

SEQ ID NO: 1671325 - RNA, 19 nt, Homo sapiens
  misc_RNA (1)...(19): siRNA sense strand
agaaguaccugcaagaaac

SEQ ID NO: 1671326 - RNA, 19 nt, Homo sapiens
  misc_RNA (1)...(19): siRNA sense strand
ccacagcuuuuaagaagua

SEQ ID NO: 1671327 - RNA, 19 nt, Homo sapiens
  misc_RNA (1)...(19): siRNA sense strand
uaagaaguaccugcaagaa

SEQ ID NO: 1671328 - RNA, 19 nt, Homo sapiens
  misc_RNA (1)...(19): siRNA sense strand
aagaaguaccugcaagaaa

SEQ ID NO: 1671329 - RNA, 19 nt, Homo sapiens
  misc_RNA (1)...(19): siRNA sense strand
gaacccaacauugauaguc

SEQ ID NO: 1671330 - RNA, 19 nt, Homo sapiens
  misc_RNA (1)...(19): siRNA sense strand
ugcaagaaaccuacucaaa

SEQ ID NO: 1671331 - RNA, 19 nt, Homo sapiens
  misc_RNA (1)...(19): siRNA sense strand
uuaagaaguaccugcaaga

SEQ ID NO: 1671332 - RNA, 19 nt, Homo sapiens
  misc_RNA (1)...(19): siRNA sense strand
gcaagaaaccuacucaaag

SEQ ID NO: 1671333 - RNA, 19 nt, Homo sapiens
  misc_RNA (1)...(19): siRNA sense strand
caagaaaccuacucaaagc

SEQ ID NO: 1671334 - RNA, 19 nt, Homo sapiens
  misc_RNA (1)...(19): siRNA sense strand
agaaguaccugcaagaaac

SEQ ID NO: 1671335 - RNA, 19 nt, Homo sapiens
  misc_RNA (1)...(19): siRNA sense strand
ccacagcuuuuaagaagua

SEQ ID NO: 1671336 - RNA, 19 nt, Homo sapiens
  misc_RNA (1)...(19): siRNA sense strand
uaagaaguaccugcaagaa

SEQ ID NO: 1671337 - RNA, 19 nt, Homo sapiens
  misc_RNA (1)...(19): siRNA sense strand
aagaaguaccugcaagaaa

SEQ ID NO: 1671338 - RNA, 19 nt, Homo sapiens
  misc_RNA (1)...(19): siRNA sense strand
gaacccaacauugauaguc

SEQ ID NO: 1671339 - RNA, 19 nt, Homo sapiens
  misc_RNA (1)...(19): siRNA sense strand
ugcaagaaaccuacucaaa

SEQ ID NO: 1671340 - RNA, 19 nt, Homo sapiens
  misc_RNA (1)...(19): siRNA sense strand
uuaagaaguaccugcaaga

SEQ ID NO: 1671341 - RNA, 19 nt, Homo sapiens
  misc_RNA (1)...(19): siRNA sense strand
gcaagaaaccuacucaaag

SEQ ID NO: 1671342 - RNA, 19 nt, Homo sapiens
  misc_RNA (1)...(19): siRNA sense strand
caagaaaccuacucaaagc

SEQ ID NO: 1671343 - RNA, 19 nt, Homo sapiens
  misc_RNA (1)...(19): siRNA sense strand
agaaguaccugcaagaaac

SEQ ID NO: 1671344 - RNA, 19 nt, Homo sapiens
  misc_RNA (1)...(19): siRNA sense strand
ccacagcuuuuaagaagua

SEQ ID NO: 1671345 - RNA, 19 nt, Homo sapiens
  misc_RNA (1)...(19): siRNA sense strand
uaagaaguaccugcaagaa

SEQ ID NO: 1671346 - RNA, 19 nt, Homo sapiens
  misc_RNA (1)...(19): siRNA sense strand
aagaaguaccugcaagaaa

SEQ ID NO: 1671347 - RNA, 19 nt, Homo sapiens
  misc_RNA (1)...(19): siRNA sense strand
gaacccaacauugauaguc

SEQ ID NO: 1671348 - RNA, 19 nt, Homo sapiens
  misc_RNA (1)...(19): siRNA sense strand
ugcaagaaaccuacucaaa

SEQ ID NO: 1671349 - RNA, 19 nt, Homo sapiens
  misc_RNA (1)...(19): siRNA sense strand
uuaagaaguaccugcaaga

SEQ ID NO: 1671350 - RNA, 19 nt, Homo sapiens
  misc_RNA (1)...(19): siRNA sense strand
gcaagaaaccuacucaaag

SEQ ID NO: 1671351 - RNA, 19 nt, Homo sapiens
  misc_RNA (1)...(19): siRNA sense strand
caagaaaccuacucaaagc

SEQ ID NO: 1671352 - RNA, 19 nt, Homo sapiens
  misc_RNA (1)...(19): siRNA sense strand
agaaguaccugcaagaaac

SEQ ID NO: 1671353 - RNA, 19 nt, Homo sapiens
  misc_RNA (1)...(19): siRNA sense strand
ccacagcuuuuaagaagua

SEQ ID NO: 1671354 - RNA, 19 nt, Homo sapiens
  misc_RNA (1)...(19): siRNA sense strand
uaagaaguaccugcaagaa

SEQ ID NO: 1671355 - RNA, 19 nt, Homo sapiens
  misc_RNA (1)...(19): siRNA sense strand
aagaaguaccugcaagaaa

SEQ ID NO: 1671356 - RNA, 19 nt, Homo sapiens
  misc_RNA (1)...(19): siRNA sense strand
gaacccaacauugauaguc

SEQ ID NO: 1671357 - RNA, 19 nt, Homo sapiens
  misc_RNA (1)...(19): siRNA sense strand
ugcaagaaaccuacucaaa

SEQ ID NO: 1671358 - RNA, 19 nt, Homo sapiens
  misc_RNA (1)...(19): siRNA sense strand
uuaagaaguaccugcaaga

SEQ ID NO: 1671359 - RNA, 19 nt, Homo sapiens
  misc_RNA (1)...(19): siRNA sense strand
gaacccaacauugauaguc

SEQ ID NO: 1671360 - RNA, 19 nt, Homo sapiens
  misc_RNA (1)...(19): siRNA sense strand
gaagcuggcuggagacaug

SEQ ID NO: 1671361 - RNA, 19 nt, Homo sapiens
  misc_RNA (1)...(19): siRNA sense strand
ggaaugcggucccugacau

SEQ ID NO: 1671362 - RNA, 19 nt, Homo sapiens
  misc_RNA (1)...(19): siRNA sense strand
ugacauccagggagacuca

SEQ ID NO: 1671363 - RNA, 19 nt, Homo sapiens
  misc_RNA (1)...(19): siRNA sense strand
gaugggaccaccucgucuu

SEQ ID NO: 1671364 - RNA, 19 nt, Homo sapiens
  misc_RNA (1)...(19): siRNA sense strand
cggacuucaucuccuguga

SEQ ID NO: 1671365 - RNA, 19 nt, Homo sapiens
  misc_RNA (1)...(19): siRNA sense strand
gaagcuggcuggagacaug

SEQ ID NO: 1671366 - RNA, 19 nt, Homo sapiens
  misc_RNA (1)...(19): siRNA sense strand
ggaaugcggucccugacau

SEQ ID NO: 1671367 - RNA, 19 nt, Homo sapiens
  misc_RNA (1)...(19): siRNA sense strand
ugacauccagggagacuca

SEQ ID NO: 1671368 - RNA, 19 nt, Homo sapiens
  misc_RNA (1)...(19): siRNA sense strand
gaugggaccaccucgucuu

SEQ ID NO: 1671369 - RNA, 19 nt, Homo sapiens
  misc_RNA (1)...(19): siRNA sense strand
cggacuucaucuccuguga

SEQ ID NO: 1671370 - RNA, 19 nt, Homo sapiens
  misc_RNA (1)...(19): siRNA sense strand
gaagcuggcuggagacaug

SEQ ID NO: 1671371 - RNA, 19 nt, Homo sapiens
  misc_RNA (1)...(19): siRNA sense strand
ggaaugcggucccugacau

SEQ ID NO: 1671372 - RNA, 19 nt, Homo sapiens
  misc_RNA (1)...(19): siRNA sense strand
ugacauccagggagacuca

SEQ ID NO: 1671373 - RNA, 19 nt, Homo sapiens
  misc_RNA (1)...(19): siRNA sense strand
gaugggaccaccucgucuu

SEQ ID NO: 1671374 - RNA, 19 nt, Homo sapiens
  misc_RNA (1)...(19): siRNA sense strand
cggacuucaucuccuguga

SEQ ID NO: 1671375 - RNA, 19 nt, Homo sapiens
  misc_RNA (1)...(19): siRNA sense strand
gaagcuggcuggagacaug

SEQ ID NO: 1671376 - RNA, 19 nt, Homo sapiens
  misc_RNA (1)...(19): siRNA sense strand
ggaaugcggucccugacau

SEQ ID NO: 1671377 - RNA, 19 nt, Homo sapiens
  misc_RNA (1)...(19): siRNA sense strand
ugacauccagggagacuca

SEQ ID NO: 1671378 - RNA, 19 nt, Homo sapiens
  misc_RNA (1)...(19): siRNA sense strand
gaugggaccaccucgucuu

SEQ ID NO: 1671379 - RNA, 19 nt, Homo sapiens
  misc_RNA (1)...(19): siRNA sense strand
cggacuucaucuccuguga

SEQ ID NO: 1671380 - RNA, 19 nt, Homo sapiens
  misc_RNA (1)...(19): siRNA sense strand
gaagcuggcuggagacaug

SEQ ID NO: 1671381 - RNA, 19 nt, Homo sapiens
  misc_RNA (1)...(19): siRNA sense strand
ggaaugcggucccugacau

SEQ ID NO: 1671382 - RNA, 19 nt, Homo sapiens
  misc_RNA (1)...(19): siRNA sense strand
ugacauccagggagacuca

SEQ ID NO: 1671383 - RNA, 19 nt, Homo sapiens
  misc_RNA (1)...(19): siRNA sense strand
gaugggaccaccucgucuu

SEQ ID NO: 1671384 - RNA, 19 nt, Homo sapiens
  misc_RNA (1)...(19): siRNA sense strand
cggacuucaucuccuguga

SEQ ID NO: 1671385 - RNA, 19 nt, Homo sapiens
  misc_RNA (1)...(19): siRNA sense strand
gaagcuggcuggagacaug

SEQ ID NO: 1671386 - RNA, 19 nt, Homo sapiens
  misc_RNA (1)...(19): siRNA sense strand
ggaaugcggucccugacau

SEQ ID NO: 1671387 - RNA, 19 nt, Homo sapiens
  misc_RNA (1)...(19): siRNA sense strand
ugacauccagggagacuca

SEQ ID NO: 1671388 - RNA, 19 nt, Homo sapiens
  misc_RNA (1)...(19): siRNA sense strand
gaugggaccaccucgucuu

SEQ ID NO: 1671389 - RNA, 19 nt, Homo sapiens
  misc_RNA (1)...(19): siRNA sense strand
cggacuucaucuccuguga

SEQ ID NO: 1671390 - RNA, 19 nt, Homo sapiens
  misc_RNA (1)...(19): siRNA sense strand
gaucggaccuccagaaaua

SEQ ID NO: 1671391 - RNA, 19 nt, Homo sapiens
  misc_RNA (1)...(19): siRNA sense strand
gaacucagcucagaagauu

SEQ ID NO: 1671392 - RNA, 19 nt, Homo sapiens
  misc_RNA (1)...(19): siRNA sense strand
gcaagaggcacaaauguua

SEQ ID NO: 1671393 - RNA, 19 nt, Homo sapiens
  misc_RNA (1)...(19): siRNA sense strand
ggaaagauguuaccuucaa

SEQ ID NO: 1671394 - RNA, 19 nt, Homo sapiens
  misc_RNA (1)...(19): siRNA sense strand
gagcaucaguuuacaaaga

SEQ ID NO: 1671395 - RNA, 19 nt, Homo sapiens
  misc_RNA (1)...(19): siRNA sense strand
gaaacaaguuauaccauuc

SEQ ID NO: 1671396 - RNA, 19 nt, Homo sapiens
  misc_RNA (1)...(19): siRNA sense strand
ugaagaaucuggcuauguu

SEQ ID NO: 1671397 - RNA, 19 nt, Homo sapiens
  misc_RNA (1)...(19): siRNA sense strand
gcaggugugagaauaauua

SEQ ID NO: 1671398 - RNA, 19 nt, Homo sapiens
  misc_RNA (1)...(19): siRNA sense strand
gaaauagcaucucuuuguc

SEQ ID NO: 1671399 - RNA, 19 nt, Homo sapiens
  misc_RNA (1)...(19): siRNA sense strand
aaauguggguggaauauaa

SEQ ID NO: 1671400 - RNA, 19 nt, Homo sapiens
  misc_RNA (1)...(19): siRNA sense strand
gcacaaauguuaccaucag

SEQ ID NO: 1671401 - RNA, 19 nt, Homo sapiens
  misc_RNA (1)...(19): siRNA sense strand
ccucaagccugacacuaua

SEQ ID NO: 1671402 - RNA, 19 nt, Homo sapiens
  misc_RNA (1)...(19): siRNA sense strand
uaacuacaccuuugagauu

SEQ ID NO: 1671403 - RNA, 19 nt, Homo sapiens
  misc_RNA (1)...(19): siRNA sense strand
ucaggaagaugguucaaug

SEQ ID NO: 1671404 - RNA, 19 nt, Homo sapiens
  misc_RNA (1)...(19): siRNA sense strand
acaauuggcugagaacaaa

SEQ ID NO: 1671405 - RNA, 19 nt, Homo sapiens
  misc_RNA (1)...(19): siRNA sense strand
gagcugggcuggaucucuu

SEQ ID NO: 1671406 - RNA, 19 nt, Homo sapiens
  misc_RNA (1)...(19): siRNA sense strand
gaacauuacacacccauca

SEQ ID NO: 1671407 - RNA, 19 nt, Homo sapiens
  misc_RNA (1)...(19): siRNA sense strand
gaacuugcaaggagacauu

SEQ ID NO: 1671408 - RNA, 19 nt, Homo sapiens
  misc_RNA (1)...(19): siRNA sense strand
gcaagaaccugaacauccu

SEQ ID NO: 1671409 - RNA, 19 nt, Homo sapiens
  misc_RNA (1)...(19): siRNA sense strand
gaggucaaauacuaugaaa

SEQ ID NO: 1671410 - RNA, 19 nt, Homo sapiens
  misc_RNA (1)...(19): siRNA sense strand
ccagaaauagcaucucuuu

SEQ ID NO: 1671411 - RNA, 19 nt, Homo sapiens
  misc_RNA (1)...(19): siRNA sense strand
agaaauagcaucucuuugu

SEQ ID NO: 1671412 - RNA, 19 nt, Homo sapiens
  misc_RNA (1)...(19): siRNA sense strand
gagagcaucaguuuacaaa

SEQ ID NO: 1671413 - RNA, 19 nt, Homo sapiens
  misc_RNA (1)...(19): siRNA sense strand
uuacaaagauugacaccau

SEQ ID NO: 1671414 - RNA, 19 nt, Homo sapiens
  misc_RNA (1)...(19): siRNA sense strand
ggacuuaccaggugugcaa

SEQ ID NO: 1671415 - RNA, 19 nt, Homo sapiens
  misc_RNA (1)...(19): siRNA sense strand
ucaccuguccugacgauua

SEQ ID NO: 1671416 - RNA, 19 nt, Homo sapiens
  misc_RNA (1)...(19): siRNA sense strand
caacaauucuaaggaggaa

SEQ ID NO: 1671417 - RNA, 19 nt, Homo sapiens
  misc_RNA (1)...(19): siRNA sense strand
cuaaugggaucauauugga

SEQ ID NO: 1671418 - RNA, 19 nt, Homo sapiens
  misc_RNA (1)...(19): siRNA sense strand
ggcauuggaugguaauaug

SEQ ID NO: 1671419 - RNA, 19 nt, Homo sapiens
  misc_RNA (1)...(19): siRNA sense strand
gaagaaagagguuuuaugu

SEQ ID NO: 1671420 - RNA, 19 nt, Homo sapiens
  misc_RNA (1)...(19): siRNA sense strand
cauacuaacuacaccuuug

SEQ ID NO: 1671421 - RNA, 19 nt, Homo sapiens
  misc_RNA (1)...(19): siRNA sense strand
gaucagugguguggaugaa

SEQ ID NO: 1671422 - RNA, 19 nt, Homo sapiens
  misc_RNA (1)...(19): siRNA sense strand
ggacacaggaggccggaaa

SEQ ID NO: 1671423 - RNA, 19 nt, Homo sapiens
  misc_RNA (1)...(19): siRNA sense strand
acacacccaucaggacuua

SEQ ID NO: 1671424 - RNA, 19 nt, Homo sapiens
  misc_RNA (1)...(19): siRNA sense strand
gagcucaaguucacucuac

SEQ ID NO: 1671425 - RNA, 19 nt, Homo sapiens
  misc_RNA (1)...(19): siRNA sense strand
gaagaaucuggcuauguuu

SEQ ID NO: 1671426 - RNA, 19 nt, Homo sapiens
  misc_RNA (1)...(19): siRNA sense strand
acuacgaggucaaauacua

SEQ ID NO: 1671427 - RNA, 19 nt, Homo sapiens
  misc_RNA (1)...(19): siRNA sense strand
ucacaguucuacucaggaa

SEQ ID NO: 1671428 - RNA, 19 nt, Homo sapiens
  misc_RNA (1)...(19): siRNA sense strand
guuagagggucuuguguca

SEQ ID NO: 1671429 - RNA, 19 nt, Homo sapiens
  misc_RNA (1)...(19): siRNA sense strand
ucacaugggugggaagaga

SEQ ID NO: 1671430 - RNA, 19 nt, Homo sapiens
  misc_RNA (1)...(19): siRNA sense strand
uaaacgagaccucaguuau

SEQ ID NO: 1671431 - RNA, 19 nt, Homo sapiens
  misc_RNA (1)...(19): siRNA sense strand
ggacuacgaggucaaauac

SEQ ID NO: 1671432 - RNA, 19 nt, Homo sapiens
  misc_RNA (1)...(19): siRNA sense strand
gaaccugaacauccuaaug

SEQ ID NO: 1671433 - RNA, 19 nt, Homo sapiens
  misc_RNA (1)...(19): siRNA sense strand
cuacgagacugcaauagca

SEQ ID NO: 1671434 - RNA, 19 nt, Homo sapiens
  misc_RNA (1)...(19): siRNA sense strand
caccuguccugacgauuaa

SEQ ID NO: 1671435 - RNA, 19 nt, Homo sapiens
  misc_RNA (1)...(19): siRNA sense strand
uaaucaggcugcuccauca

SEQ ID NO: 1671436 - RNA, 19 nt, Homo sapiens
  misc_RNA (1)...(19): siRNA sense strand
gaacugcaggugugagaau

SEQ ID NO: 1671437 - RNA, 19 nt, Homo sapiens
  misc_RNA (1)...(19): siRNA sense strand
gaaggcgaauggcuuguac

SEQ ID NO: 1671438 - RNA, 19 nt, Homo sapiens
  misc_RNA (1)...(19): siRNA sense strand
cauugcagcugaugaaagu

SEQ ID NO: 1671439 - RNA, 19 nt, Homo sapiens
  misc_RNA (1)...(19): siRNA sense strand
ggaacaagaaacaaguuau

SEQ ID NO: 1671440 - RNA, 19 nt, Homo sapiens
  misc_RNA (1)...(19): siRNA sense strand
ugagauugaugccguuaau

SEQ ID NO: 1671441 - RNA, 19 nt, Homo sapiens
  misc_RNA (1)...(19): siRNA sense strand
gaaagauguuaccuucaac

SEQ ID NO: 1671442 - RNA, 19 nt, Homo sapiens
  misc_RNA (1)...(19): siRNA sense strand
ccaaugaagucaaucuacu

SEQ ID NO: 1671443 - RNA, 19 nt, Homo sapiens
  misc_RNA (1)...(19): siRNA sense strand
acucagcucagaagauuua

SEQ ID NO: 1671444 - RNA, 19 nt, Homo sapiens
  misc_RNA (1)...(19): siRNA sense strand
ugaagucaaucuacuggau

SEQ ID NO: 1671445 - RNA, 19 nt, Homo sapiens
  misc_RNA (1)...(19): siRNA sense strand
acaaggcauuggaugguaa

SEQ ID NO: 1671446 - RNA, 19 nt, Homo sapiens
  misc_RNA (1)...(19): siRNA sense strand
gcaaugcuggcuaugaaga

SEQ ID NO: 1671447 - RNA, 19 nt, Homo sapiens
  misc_RNA (1)...(19): siRNA sense strand
agaaguagguccugucaac

SEQ ID NO: 1671448 - RNA, 19 nt, Homo sapiens
  misc_RNA (1)...(19): siRNA sense strand
acacugagauuagagaagu

SEQ ID NO: 1671449 - RNA, 19 nt, Homo sapiens
  misc_RNA (1)...(19): siRNA sense strand
cuucucagcugcucuguuc

SEQ ID NO: 1671450 - RNA, 19 nt, Homo sapiens
  misc_RNA (1)...(19): siRNA sense strand
gcggucagcaucacaacua

SEQ ID NO: 1671451 - RNA, 19 nt, Homo sapiens
  misc_RNA (1)...(19): siRNA sense strand
ggugugagaauaauuacuu

SEQ ID NO: 1671452 - RNA, 19 nt, Homo sapiens
  misc_RNA (1)...(19): siRNA sense strand
cugcaaugcuggcuaugaa

SEQ ID NO: 1671453 - RNA, 19 nt, Homo sapiens
  misc_RNA (1)...(19): siRNA sense strand
gguaauaugaagugugcua

SEQ ID NO: 1671454 - RNA, 19 nt, Homo sapiens
  misc_RNA (1)...(19): siRNA sense strand
gacgaacagccgcaaguuu

SEQ ID NO: 1671455 - RNA, 19 nt, Homo sapiens
  misc_RNA (1)...(19): siRNA sense strand
gccgcaaguuugaguuuga

SEQ ID NO: 1671456 - RNA, 19 nt, Homo sapiens
  misc_RNA (1)...(19): siRNA sense strand
cauggagucugaugaugau

SEQ ID NO: 1671457 - RNA, 19 nt, Homo sapiens
  misc_RNA (1)...(19): siRNA sense strand
caaaacaauuggcugagaa

SEQ ID NO: 1671458 - RNA, 19 nt, Homo sapiens
  misc_RNA (1)...(19): siRNA sense strand
ggacgaacagccgcaaguu

SEQ ID NO: 1671459 - RNA, 19 nt, Homo sapiens
  misc_RNA (1)...(19): siRNA sense strand
gccugacacuauauacgua

SEQ ID NO: 1671460 - RNA, 19 nt, Homo sapiens
  misc_RNA (1)...(19): siRNA sense strand
ggcaagaggcacaaauguu

SEQ ID NO: 1671461 - RNA, 19 nt, Homo sapiens
  misc_RNA (1)...(19): siRNA sense strand
caagaaacaaguuauacca

SEQ ID NO: 1671462 - RNA, 19 nt, Homo sapiens
  misc_RNA (1)...(19): siRNA sense strand
ggugaaauuucgagagcau

SEQ ID NO: 1671463 - RNA, 19 nt, Homo sapiens
  misc_RNA (1)...(19): siRNA sense strand
gcaucaguuuacaaagauu

SEQ ID NO: 1671464 - RNA, 19 nt, Homo sapiens
  misc_RNA (1)...(19): siRNA sense strand
ggaacucagcucagaagau

SEQ ID NO: 1671465 - RNA, 19 nt, Homo sapiens
  misc_RNA (1)...(19): siRNA sense strand
gcaggaacaagaaacaagu

SEQ ID NO: 1671466 - RNA, 19 nt, Homo sapiens
  misc_RNA (1)...(19): siRNA sense strand
cuuccucccucgacaguuu

SEQ ID NO: 1671467 - RNA, 19 nt, Homo sapiens
  misc_RNA (1)...(19): siRNA sense strand
aaacgagaccucaguuauc

SEQ ID NO: 1671468 - RNA, 19 nt, Homo sapiens
  misc_RNA (1)...(19): siRNA sense strand
uacaaagauugacaccauu

SEQ ID NO: 1671469 - RNA, 19 nt, Homo sapiens
  misc_RNA (1)...(19): siRNA sense strand
cgaccuccaucuucaccaa

SEQ ID NO: 1671470 - RNA, 19 nt, Homo sapiens
  misc_RNA (1)...(19): siRNA sense strand
gcauuggaugguaauauga

SEQ ID NO: 1671471 - RNA, 19 nt, Homo sapiens
  misc_RNA (1)...(19): siRNA sense strand
uacaaggcauuggauggua

SEQ ID NO: 1671472 - RNA, 19 nt, Homo sapiens
  misc_RNA (1)...(19): siRNA sense strand
cagcucagaagauuuaugu

SEQ ID NO: 1671473 - RNA, 19 nt, Homo sapiens
  misc_RNA (1)...(19): siRNA sense strand
uaccaggugugcaauguca

SEQ ID NO: 1671474 - RNA, 19 nt, Homo sapiens
  misc_RNA (1)...(19): siRNA sense strand
caaauguuaccaucaguag

SEQ ID NO: 1671475 - RNA, 19 nt, Homo sapiens
  misc_RNA (1)...(19): siRNA sense strand
ccaagaaauguuaucucua

SEQ ID NO: 1671476 - RNA, 19 nt, Homo sapiens
  misc_RNA (1)...(19): siRNA sense strand
acaaagacccuccauccau

SEQ ID NO: 1671477 - RNA, 19 nt, Homo sapiens
  misc_RNA (1)...(19): siRNA sense strand
ggcaaguguuccugcaaug

SEQ ID NO: 1671478 - RNA, 19 nt, Homo sapiens
  misc_RNA (1)...(19): siRNA sense strand
gcaaggagacauucaaccu

SEQ ID NO: 1671479 - RNA, 19 nt, Homo sapiens
  misc_RNA (1)...(19): siRNA sense strand
gagguuagagggucuugug

SEQ ID NO: 1671480 - RNA, 19 nt, Homo sapiens
  misc_RNA (1)...(19): siRNA sense strand
aauaugaagugugcuaagu

SEQ ID NO: 1671481 - RNA, 19 nt, Homo sapiens
  misc_RNA (1)...(19): siRNA sense strand
cgaacagccgcaaguuuga

SEQ ID NO: 1671482 - RNA, 19 nt, Homo sapiens
  misc_RNA (1)...(19): siRNA sense strand
acaaauguuaccaucagua

SEQ ID NO: 1671483 - RNA, 19 nt, Homo sapiens
  misc_RNA (1)...(19): siRNA sense strand
gggcaagaggcacaaaugu

SEQ ID NO: 1671484 - RNA, 19 nt, Homo sapiens
  misc_RNA (1)...(19): siRNA sense strand
gaccuucuggcacauacua

SEQ ID NO: 1671485 - RNA, 19 nt, Homo sapiens
  misc_RNA (1)...(19): siRNA sense strand
uagagggucuugugucaac

SEQ ID NO: 1671486 - RNA, 19 nt, Homo sapiens
  misc_RNA (1)...(19): siRNA sense strand
ucaagccugacacuauaua

SEQ ID NO: 1671487 - RNA, 19 nt, Homo sapiens
  misc_RNA (1)...(19): siRNA sense strand
gaaaagcaggaacaagaaa

SEQ ID NO: 1671488 - RNA, 19 nt, Homo sapiens
  misc_RNA (1)...(19): siRNA sense strand
aaagaucggaccuccagaa

SEQ ID NO: 1671489 - RNA, 19 nt, Homo sapiens
  misc_RNA (1)...(19): siRNA sense strand
agagaucagugguguggau

SEQ ID NO: 1671490 - RNA, 19 nt, Homo sapiens
  misc_RNA (1)...(19): siRNA sense strand
gaucggaccuccagaaaua

SEQ ID NO: 1671491 - RNA, 19 nt, Homo sapiens
  misc_RNA (1)...(19): siRNA sense strand
gaacucagcucagaagauu

SEQ ID NO: 1671492 - RNA, 19 nt, Homo sapiens
  misc_RNA (1)...(19): siRNA sense strand
gcaagaggcacaaauguua

SEQ ID NO: 1671493 - RNA, 19 nt, Homo sapiens
  misc_RNA (1)...(19): siRNA sense strand
ggaaagauguuaccuucaa

SEQ ID NO: 1671494 - RNA, 19 nt, Homo sapiens
  misc_RNA (1)...(19): siRNA sense strand
gagcaucaguuuacaaaga

SEQ ID NO: 1671495 - RNA, 19 nt, Homo sapiens
  misc_RNA (1)...(19): siRNA sense strand
gaaacaaguuauaccauuc

SEQ ID NO: 1671496 - RNA, 19 nt, Homo sapiens
  misc_RNA (1)...(19): siRNA sense strand
ugaagaaucuggcuauguu

SEQ ID NO: 1671497 - RNA, 19 nt, Homo sapiens
  misc_RNA (1)...(19): siRNA sense strand
gcaggugugagaauaauua

SEQ ID NO: 1671498 - RNA, 19 nt, Homo sapiens
  misc_RNA (1)...(19): siRNA sense strand
gaaauagcaucucuuuguc

SEQ ID NO: 1671499 - RNA, 19 nt, Homo sapiens
  misc_RNA (1)...(19): siRNA sense strand
aaauguggguggaauauaa

SEQ ID NO: 1671500 - RNA, 19 nt, Homo sapiens
  misc_RNA (1)...(19): siRNA sense strand
gcacaaauguuaccaucag

SEQ ID NO: 1671501 - RNA, 19 nt, Homo sapiens
  misc_RNA (1)...(19): siRNA sense strand
ccucaagccugacacuaua

SEQ ID NO: 1671502 - RNA, 19 nt, Homo sapiens
  misc_RNA (1)...(19): siRNA sense strand
uaacuacaccuuugagauu

SEQ ID NO: 1671503 - RNA, 19 nt, Homo sapiens
  misc_RNA (1)...(19): siRNA sense strand
ucaggaagaugguucaaug

SEQ ID NO: 1671504 - RNA, 19 nt, Homo sapiens
  misc_RNA (1)...(19): siRNA sense strand
acaauuggcugagaacaaa

SEQ ID NO: 1671505 - RNA, 19 nt, Homo sapiens
  misc_RNA (1)...(19): siRNA sense strand
gagcugggcuggaucucuu

SEQ ID NO: 1671506 - RNA, 19 nt, Homo sapiens
  misc_RNA (1)...(19): siRNA sense strand
gaacauuacacacccauca

SEQ ID NO: 1671507 - RNA, 19 nt, Homo sapiens
  misc_RNA (1)...(19): siRNA sense strand
gaacuugcaaggagacauu

SEQ ID NO: 1671508 - RNA, 19 nt, Homo sapiens
  misc_RNA (1)...(19): siRNA sense strand
gcaagaaccugaacauccu

SEQ ID NO: 1671509 - RNA, 19 nt, Homo sapiens
  misc_RNA (1)...(19): siRNA sense strand
gaggucaaauacuaugaaa

SEQ ID NO: 1671510 - RNA, 19 nt, Homo sapiens
  misc_RNA (1)...(19): siRNA sense strand
ccagaaauagcaucucuuu

SEQ ID NO: 1671511 - RNA, 19 nt, Homo sapiens
  misc_RNA (1)...(19): siRNA sense strand
agaaauagcaucucuuugu

SEQ ID NO: 1671512 - RNA, 19 nt, Homo sapiens
  misc_RNA (1)...(19): siRNA sense strand
gagagcaucaguuuacaaa

SEQ ID NO: 1671513 - RNA, 19 nt, Homo sapiens
  misc_RNA (1)...(19): siRNA sense strand
uuacaaagauugacaccau

SEQ ID NO: 1671514 - RNA, 19 nt, Homo sapiens
  misc_RNA (1)...(19): siRNA sense strand
ggacuuaccaggugugcaa

SEQ ID NO: 1671515 - RNA, 19 nt, Homo sapiens
  misc_RNA (1)...(19): siRNA sense strand
ucaccuguccugacgauua

SEQ ID NO: 1671516 - RNA, 19 nt, Homo sapiens
  misc_RNA (1)...(19): siRNA sense strand
caacaauucuaaggaggaa

SEQ ID NO: 1671517 - RNA, 19 nt, Homo sapiens
  misc_RNA (1)...(19): siRNA sense strand
cuaaugggaucauauugga

SEQ ID NO: 1671518 - RNA, 19 nt, Homo sapiens
  misc_RNA (1)...(19): siRNA sense strand
ggcauuggaugguaauaug

SEQ ID NO: 1671519 - RNA, 19 nt, Homo sapiens
  misc_RNA (1)...(19): siRNA sense strand
gaagaaagagguuuuaugu

SEQ ID NO: 1671520 - RNA, 19 nt, Homo sapiens
  misc_RNA (1)...(19): siRNA sense strand
cauacuaacuacaccuuug

SEQ ID NO: 1671521 - RNA, 19 nt, Homo sapiens
  misc_RNA (1)...(19): siRNA sense strand
gaucagugguguggaugaa

SEQ ID NO: 1671522 - RNA, 19 nt, Homo sapiens
  misc_RNA (1)...(19): siRNA sense strand
ggacacaggaggccggaaa

SEQ ID NO: 1671523 - RNA, 19 nt, Homo sapiens
  misc_RNA (1)...(19): siRNA sense strand
acacacccaucaggacuua

SEQ ID NO: 1671524 - RNA, 19 nt, Homo sapiens
  misc_RNA (1)...(19): siRNA sense strand
gagcucaaguucacucuac

SEQ ID NO: 1671525 - RNA, 19 nt, Homo sapiens
  misc_RNA (1)...(19): siRNA sense strand
gaagaaucuggcuauguuu

SEQ ID NO: 1671526 - RNA, 19 nt, Homo sapiens
  misc_RNA (1)...(19): siRNA sense strand
acuacgaggucaaauacua

SEQ ID NO: 1671527 - RNA, 19 nt, Homo sapiens
  misc_RNA (1)...(19): siRNA sense strand
ucacaguucuacucaggaa

SEQ ID NO: 1671528 - RNA, 19 nt, Homo sapiens
  misc_RNA (1)...(19): siRNA sense strand
guuagagggucuuguguca

SEQ ID NO: 1671529 - RNA, 19 nt, Homo sapiens
  misc_RNA (1)...(19): siRNA sense strand
ucacaugggugggaagaga

SEQ ID NO: 1671530 - RNA, 19 nt, Homo sapiens
  misc_RNA (1)...(19): siRNA sense strand
uaaacgagaccucaguuau

SEQ ID NO: 1671531 - RNA, 19 nt, Homo sapiens
  misc_RNA (1)...(19): siRNA sense strand
ggacuacgaggucaaauac

SEQ ID NO: 1671532 - RNA, 19 nt, Homo sapiens
  misc_RNA (1)...(19): siRNA sense strand
gaaccugaacauccuaaug

SEQ ID NO: 1671533 - RNA, 19 nt, Homo sapiens
  misc_RNA (1)...(19): siRNA sense strand
cuacgagacugcaauagca

SEQ ID NO: 1671534 - RNA, 19 nt, Homo sapiens
  misc_RNA (1)...(19): siRNA sense strand
caccuguccugacgauuaa

SEQ ID NO: 1671535 - RNA, 19 nt, Homo sapiens
  misc_RNA (1)...(19): siRNA sense strand
uaaucaggcugcuccauca

SEQ ID NO: 1671536 - RNA, 19 nt, Homo sapiens
  misc_RNA (1)...(19): siRNA sense strand
gaacugcaggugugagaau

SEQ ID NO: 1671537 - RNA, 19 nt, Homo sapiens
  misc_RNA (1)...(19): siRNA sense strand
gaaggcgaauggcuuguac

SEQ ID NO: 1671538 - RNA, 19 nt, Homo sapiens
  misc_RNA (1)...(19): siRNA sense strand
cauugcagcugaugaaagu

SEQ ID NO: 1671539 - RNA, 19 nt, Homo sapiens
  misc_RNA (1)...(19): siRNA sense strand
ggaacaagaaacaaguuau

SEQ ID NO: 1671540 - RNA, 19 nt, Homo sapiens
  misc_RNA (1)...(19): siRNA sense strand
ugagauugaugccguuaau

SEQ ID NO: 1671541 - RNA, 19 nt, Homo sapiens
  misc_RNA (1)...(19): siRNA sense strand
gaaagauguuaccuucaac

SEQ ID NO: 1671542 - RNA, 19 nt, Homo sapiens
  misc_RNA (1)...(19): siRNA sense strand
ccaaugaagucaaucuacu

SEQ ID NO: 1671543 - RNA, 19 nt, Homo sapiens
  misc_RNA (1)...(19): siRNA sense strand
acucagcucagaagauuua

SEQ ID NO: 1671544 - RNA, 19 nt, Homo sapiens
  misc_RNA (1)...(19): siRNA sense strand
ugaagucaaucuacuggau

SEQ ID NO: 1671545 - RNA, 19 nt, Homo sapiens
  misc_RNA (1)...(19): siRNA sense strand
acaaggcauuggaugguaa

SEQ ID NO: 1671546 - RNA, 19 nt, Homo sapiens
  misc_RNA (1)...(19): siRNA sense strand
gcaaugcuggcuaugaaga

SEQ ID NO: 1671547 - RNA, 19 nt, Homo sapiens
  misc_RNA (1)...(19): siRNA sense strand
agaaguagguccugucaac

SEQ ID NO: 1671548 - RNA, 19 nt, Homo sapiens
  misc_RNA (1)...(19): siRNA sense strand
acacugagauuagagaagu

SEQ ID NO: 1671549 - RNA, 19 nt, Homo sapiens
  misc_RNA (1)...(19): siRNA sense strand
cuucucagcugcucuguuc

SEQ ID NO: 1671550 - RNA, 19 nt, Homo sapiens
  misc_RNA (1)...(19): siRNA sense strand
gcggucagcaucacaacua

SEQ ID NO: 1671551 - RNA, 19 nt, Homo sapiens
  misc_RNA (1)...(19): siRNA sense strand
ggugugagaauaauuacuu

SEQ ID NO: 1671552 - RNA, 19 nt, Homo sapiens
  misc_RNA (1)...(19): siRNA sense strand
cugcaaugcuggcuaugaa

SEQ ID NO: 1671553 - RNA, 19 nt, Homo sapiens
  misc_RNA (1)...(19): siRNA sense strand
gguaauaugaagugugcua

SEQ ID NO: 1671554 - RNA, 19 nt, Homo sapiens
  misc_RNA (1)...(19): siRNA sense strand
gacgaacagccgcaaguuu

SEQ ID NO: 1671555 - RNA, 19 nt, Homo sapiens
  misc_RNA (1)...(19): siRNA sense strand
gccgcaaguuugaguuuga

SEQ ID NO: 1671556 - RNA, 19 nt, Homo sapiens
  misc_RNA (1)...(19): siRNA sense strand
cauggagucugaugaugau

SEQ ID NO: 1671557 - RNA, 19 nt, Homo sapiens
  misc_RNA (1)...(19): siRNA sense strand
caaaacaauuggcugagaa

SEQ ID NO: 1671558 - RNA, 19 nt, Homo sapiens
  misc_RNA (1)...(19): siRNA sense strand
ggacgaacagccgcaaguu

SEQ ID NO: 1671559 - RNA, 19 nt, Homo sapiens
  misc_RNA (1)...(19): siRNA sense strand
gccugacacuauauacgua

SEQ ID NO: 1671560 - RNA, 19 nt, Homo sapiens
  misc_RNA (1)...(19): siRNA sense strand
ggcaagaggcacaaauguu

SEQ ID NO: 1671561 - RNA, 19 nt, Homo sapiens
  misc_RNA (1)...(19): siRNA sense strand
caagaaacaaguuauacca

SEQ ID NO: 1671562 - RNA, 19 nt, Homo sapiens
  misc_RNA (1)...(19): siRNA sense strand
ggugaaauuucgagagcau

SEQ ID NO: 1671563 - RNA, 19 nt, Homo sapiens
  misc_RNA (1)...(19): siRNA sense strand
gcaucaguuuacaaagauu

SEQ ID NO: 1671564 - RNA, 19 nt, Homo sapiens
  misc_RNA (1)...(19): siRNA sense strand
ggaacucagcucagaagau

SEQ ID NO: 1671565 - RNA, 19 nt, Homo sapiens
  misc_RNA (1)...(19): siRNA sense strand
gcaggaacaagaaacaagu

SEQ ID NO: 1671566 - RNA, 19 nt, Homo sapiens
  misc_RNA (1)...(19): siRNA sense strand
cuuccucccucgacaguuu

SEQ ID NO: 1671567 - RNA, 19 nt, Homo sapiens
  misc_RNA (1)...(19): siRNA sense strand
aaacgagaccucaguuauc

SEQ ID NO: 1671568 - RNA, 19 nt, Homo sapiens
  misc_RNA (1)...(19): siRNA sense strand
uacaaagauugacaccauu

SEQ ID NO: 1671569 - RNA, 19 nt, Homo sapiens
  misc_RNA (1)...(19): siRNA sense strand
cgaccuccaucuucaccaa

SEQ ID NO: 1671570 - RNA, 19 nt, Homo sapiens
  misc_RNA (1)...(19): siRNA sense strand
gcauuggaugguaauauga

SEQ ID NO: 1671571 - RNA, 19 nt, Homo sapiens
  misc_RNA (1)...(19): siRNA sense strand
uacaaggcauuggauggua

SEQ ID NO: 1671572 - RNA, 19 nt, Homo sapiens
  misc_RNA (1)...(19): siRNA sense strand
cagcucagaagauuuaugu

SEQ ID NO: 1671573 - RNA, 19 nt, Homo sapiens
  misc_RNA (1)...(19): siRNA sense strand
uaccaggugugcaauguca

SEQ ID NO: 1671574 - RNA, 19 nt, Homo sapiens
  misc_RNA (1)...(19): siRNA sense strand
caaauguuaccaucaguag

SEQ ID NO: 1671575 - RNA, 19 nt, Homo sapiens
  misc_RNA (1)...(19): siRNA sense strand
ccaagaaauguuaucucua

SEQ ID NO: 1671576 - RNA, 19 nt, Homo sapiens
  misc_RNA (1)...(19): siRNA sense strand
acaaagacccuccauccau

SEQ ID NO: 1671577 - RNA, 19 nt, Homo sapiens
  misc_RNA (1)...(19): siRNA sense strand
ggcaaguguuccugcaaug

SEQ ID NO: 1671578 - RNA, 19 nt, Homo sapiens
  misc_RNA (1)...(19): siRNA sense strand
gcaaggagacauucaaccu

SEQ ID NO: 1671579 - RNA, 19 nt, Homo sapiens
  misc_RNA (1)...(19): siRNA sense strand
gagguuagagggucuugug

SEQ ID NO: 1671580 - RNA, 19 nt, Homo sapiens
  misc_RNA (1)...(19): siRNA sense strand
aauaugaagugugcuaagu

SEQ ID NO: 1671581 - RNA, 19 nt, Homo sapiens
  misc_RNA (1)...(19): siRNA sense strand
cgaacagccgcaaguuuga

SEQ ID NO: 1671582 - RNA, 19 nt, Homo sapiens
  misc_RNA (1)...(19): siRNA sense strand
acaaauguuaccaucagua

SEQ ID NO: 1671583 - RNA, 19 nt, Homo sapiens
  misc_RNA (1)...(19): siRNA sense strand
gggcaagaggcacaaaugu

SEQ ID NO: 1671584 - RNA, 19 nt, Homo sapiens
  misc_RNA (1)...(19): siRNA sense strand
gaccuucuggcacauacua

SEQ ID NO: 1671585 - RNA, 19 nt, Homo sapiens
  misc_RNA (1)...(19): siRNA sense strand
uagagggucuugugucaac

SEQ ID NO: 1671586 - RNA, 19 nt, Homo sapiens
  misc_RNA (1)...(19): siRNA sense strand
ucaagccugacacuauaua

SEQ ID NO: 1671587 - RNA, 19 nt, Homo sapiens
  misc_RNA (1)...(19): siRNA sense strand
gaaaagcaggaacaagaaa

SEQ ID NO: 1671588 - RNA, 19 nt, Homo sapiens
  misc_RNA (1)...(19): siRNA sense strand
aaagaucggaccuccagaa

SEQ ID NO: 1671589 - RNA, 19 nt, Homo sapiens
  misc_RNA (1)...(19): siRNA sense strand
agagaucagugguguggau

SEQ ID NO: 1671590 - RNA, 19 nt, Homo sapiens
  misc_RNA (1)...(19): siRNA sense strand
gcacagaggccuccacgaa

SEQ ID NO: 1671591 - RNA, 19 nt, Homo sapiens
  misc_RNA (1)...(19): siRNA sense strand
gaaggacaacaccuacuua

SEQ ID NO: 1671592 - RNA, 19 nt, Homo sapiens
  misc_RNA (1)...(19): siRNA sense strand
gauuauagcucuguaugag

SEQ ID NO: 1671593 - RNA, 19 nt, Homo sapiens
  misc_RNA (1)...(19): siRNA sense strand
gguccuacauucacuacuu

SEQ ID NO: 1671594 - RNA, 19 nt, Homo sapiens
  misc_RNA (1)...(19): siRNA sense strand
acagaggccuccacgaaga

SEQ ID NO: 1671595 - RNA, 19 nt, Homo sapiens
  misc_RNA (1)...(19): siRNA sense strand
uuauagcucuguaugagaa

SEQ ID NO: 1671596 - RNA, 19 nt, Homo sapiens
  misc_RNA (1)...(19): siRNA sense strand
gagauuauagcucuguaug

SEQ ID NO: 1671597 - RNA, 19 nt, Homo sapiens
  misc_RNA (1)...(19): siRNA sense strand
guccuacauucacuacuuu

SEQ ID NO: 1671598 - RNA, 19 nt, Homo sapiens
  misc_RNA (1)...(19): siRNA sense strand
cacagcggaugaaggauug

SEQ ID NO: 1671599 - RNA, 19 nt, Homo sapiens
  misc_RNA (1)...(19): siRNA sense strand
ucacagcggaugaaggauu

SEQ ID NO: 1671600 - RNA, 19 nt, Homo sapiens
  misc_RNA (1)...(19): siRNA sense strand
gcacgugcccaucgacauc

SEQ ID NO: 1671601 - RNA, 19 nt, Homo sapiens
  misc_RNA (1)...(19): siRNA sense strand
uacuuucacugccuaagaa

SEQ ID NO: 1671602 - RNA, 19 nt, Homo sapiens
  misc_RNA (1)...(19): siRNA sense strand
ggauuggcaggagauuaua

SEQ ID NO: 1671603 - RNA, 19 nt, Homo sapiens
  misc_RNA (1)...(19): siRNA sense strand
ggagauuauagcucuguau

SEQ ID NO: 1671604 - RNA, 19 nt, Homo sapiens
  misc_RNA (1)...(19): siRNA sense strand
gcacugcagccugaaaugg

SEQ ID NO: 1671605 - RNA, 19 nt, Homo sapiens
  misc_RNA (1)...(19): siRNA sense strand
agaaggacaacaccuacuu

SEQ ID NO: 1671606 - RNA, 19 nt, Homo sapiens
  misc_RNA (1)...(19): siRNA sense strand
cuacuuucacugccuaaga

SEQ ID NO: 1671607 - RNA, 19 nt, Homo sapiens
  misc_RNA (1)...(19): siRNA sense strand
gaaggauuggcaggagauu

SEQ ID NO: 1671608 - RNA, 19 nt, Homo sapiens
  misc_RNA (1)...(19): siRNA sense strand
aauccuggaccuucucaaa

SEQ ID NO: 1671609 - RNA, 19 nt, Homo sapiens
  misc_RNA (1)...(19): siRNA sense strand
aggauuggcaggagauuau

SEQ ID NO: 1671610 - RNA, 19 nt, Homo sapiens
  misc_RNA (1)...(19): siRNA sense strand
uacauucacuacuuucacu

SEQ ID NO: 1671611 - RNA, 19 nt, Homo sapiens
  misc_RNA (1)...(19): siRNA sense strand
gcacagaggccuccacgaa

SEQ ID NO: 1671612 - RNA, 19 nt, Homo sapiens
  misc_RNA (1)...(19): siRNA sense strand
gaaggacaacaccuacuua

SEQ ID NO: 1671613 - RNA, 19 nt, Homo sapiens
  misc_RNA (1)...(19): siRNA sense strand
gauuauagcucuguaugag

SEQ ID NO: 1671614 - RNA, 19 nt, Homo sapiens
  misc_RNA (1)...(19): siRNA sense strand
gguccuacauucacuacuu

SEQ ID NO: 1671615 - RNA, 19 nt, Homo sapiens
  misc_RNA (1)...(19): siRNA sense strand
acagaggccuccacgaaga

SEQ ID NO: 1671616 - RNA, 19 nt, Homo sapiens
  misc_RNA (1)...(19): siRNA sense strand
uuauagcucuguaugagaa

SEQ ID NO: 1671617 - RNA, 19 nt, Homo sapiens
  misc_RNA (1)...(19): siRNA sense strand
gagauuauagcucuguaug

SEQ ID NO: 1671618 - RNA, 19 nt, Homo sapiens
  misc_RNA (1)...(19): siRNA sense strand
guccuacauucacuacuuu

SEQ ID NO: 1671619 - RNA, 19 nt, Homo sapiens
  misc_RNA (1)...(19): siRNA sense strand
cacagcggaugaaggauug

SEQ ID NO: 1671620 - RNA, 19 nt, Homo sapiens
  misc_RNA (1)...(19): siRNA sense strand
ucacagcggaugaaggauu

SEQ ID NO: 1671621 - RNA, 19 nt, Homo sapiens
  misc_RNA (1)...(19): siRNA sense strand
gcacgugcccaucgacauc

SEQ ID NO: 1671622 - RNA, 19 nt, Homo sapiens
  misc_RNA (1)...(19): siRNA sense strand
uacuuucacugccuaagaa

SEQ ID NO: 1671623 - RNA, 19 nt, Homo sapiens
  misc_RNA (1)...(19): siRNA sense strand
ggauuggcaggagauuaua

SEQ ID NO: 1671624 - RNA, 19 nt, Homo sapiens
  misc_RNA (1)...(19): siRNA sense strand
ggagauuauagcucuguau

SEQ ID NO: 1671625 - RNA, 19 nt, Homo sapiens
  misc_RNA (1)...(19): siRNA sense strand
gcacugcagccugaaaugg

SEQ ID NO: 1671626 - RNA, 19 nt, Homo sapiens
  misc_RNA (1)...(19): siRNA sense strand
agaaggacaacaccuacuu

SEQ ID NO: 1671627 - RNA, 19 nt, Homo sapiens
  misc_RNA (1)...(19): siRNA sense strand
cuacuuucacugccuaaga

SEQ ID NO: 1671628 - RNA, 19 nt, Homo sapiens
  misc_RNA (1)...(19): siRNA sense strand
gaaggauuggcaggagauu

SEQ ID NO: 1671629 - RNA, 19 nt, Homo sapiens
  misc_RNA (1)...(19): siRNA sense strand
aauccuggaccuucucaaa

SEQ ID NO: 1671630 - RNA, 19 nt, Homo sapiens
  misc_RNA (1)...(19): siRNA sense strand
aggauuggcaggagauuau

SEQ ID NO: 1671631 - RNA, 19 nt, Homo sapiens
  misc_RNA (1)...(19): siRNA sense strand
uacauucacuacuuucacu

SEQ ID NO: 1671632 - RNA, 19 nt, Homo sapiens
  misc_RNA (1)...(19): siRNA sense strand
gcacagaggccuccacgaa

SEQ ID NO: 1671633 - RNA, 19 nt, Homo sapiens
  misc_RNA (1)...(19): siRNA sense strand
gaaggacaacaccuacuua

SEQ ID NO: 1671634 - RNA, 19 nt, Homo sapiens
  misc_RNA (1)...(19): siRNA sense strand
ugaaggaccugccgaguca

SEQ ID NO: 1671635 - RNA, 19 nt, Homo sapiens
  misc_RNA (1)...(19): siRNA sense strand
gggaagccauugacgugua

SEQ ID NO: 1671636 - RNA, 19 nt, Homo sapiens
  misc_RNA (1)...(19): siRNA sense strand
gaugggaaccucucuguga

SEQ ID NO: 1671637 - RNA, 19 nt, Homo sapiens
  misc_RNA (1)...(19): siRNA sense strand
gauuauagcucuguaugag

SEQ ID NO: 1671638 - RNA, 19 nt, Homo sapiens
  misc_RNA (1)...(19): siRNA sense strand
gaucugauuggcaagcuua

SEQ ID NO: 1671639 - RNA, 19 nt, Homo sapiens
  misc_RNA (1)...(19): siRNA sense strand
ucauggagcuugagaucuu

SEQ ID NO: 1671640 - RNA, 19 nt, Homo sapiens
  misc_RNA (1)...(19): siRNA sense strand
gguccuacauucacuacuu

SEQ ID NO: 1671641 - RNA, 19 nt, Homo sapiens
  misc_RNA (1)...(19): siRNA sense strand
ggaggcagauguccugucu

SEQ ID NO: 1671642 - RNA, 19 nt, Homo sapiens
  misc_RNA (1)...(19): siRNA sense strand
gagcagguguugccaaugc

SEQ ID NO: 1671643 - RNA, 19 nt, Homo sapiens
  misc_RNA (1)...(19): siRNA sense strand
agaagcagauugccaagug

SEQ ID NO: 1671644 - RNA, 19 nt, Homo sapiens
  misc_RNA (1)...(19): siRNA sense strand
agacgaugcuguugcuuug

SEQ ID NO: 1671645 - RNA, 19 nt, Homo sapiens
  misc_RNA (1)...(19): siRNA sense strand
acagaggccuccacgaaga

SEQ ID NO: 1671646 - RNA, 19 nt, Homo sapiens
  misc_RNA (1)...(19): siRNA sense strand
gagacgaugcuguugcuuu

SEQ ID NO: 1671647 - RNA, 19 nt, Homo sapiens
  misc_RNA (1)...(19): siRNA sense strand
uuauagcucuguaugagaa

SEQ ID NO: 1671648 - RNA, 19 nt, Homo sapiens
  misc_RNA (1)...(19): siRNA sense strand
gcugcuggcuuugaagaaa

SEQ ID NO: 1671649 - RNA, 19 nt, Homo sapiens
  misc_RNA (1)...(19): siRNA sense strand
ccagagagcaguggaguug

SEQ ID NO: 1671650 - RNA, 19 nt, Homo sapiens
  misc_RNA (1)...(19): siRNA sense strand
gaagcugacaucuccaaga

SEQ ID NO: 1671651 - RNA, 19 nt, Homo sapiens
  misc_RNA (1)...(19): siRNA sense strand
gaaacucaacgguguacga

SEQ ID NO: 1671652 - RNA, 19 nt, Homo sapiens
  misc_RNA (1)...(19): siRNA sense strand
gagauuauagcucuguaug

SEQ ID NO: 1671653 - RNA, 19 nt, Homo sapiens
  misc_RNA (1)...(19): siRNA sense strand
gagcaguggaguugaguga

SEQ ID NO: 1671654 - RNA, 19 nt, Homo sapiens
  misc_RNA (1)...(19): siRNA sense strand
guccuacauucacuacuuu

SEQ ID NO: 1671655 - RNA, 19 nt, Homo sapiens
  misc_RNA (1)...(19): siRNA sense strand
cagagcagguguugccaau

SEQ ID NO: 1671656 - RNA, 19 nt, Homo sapiens
  misc_RNA (1)...(19): siRNA sense strand
gaaugucaacuaugagauc

SEQ ID NO: 1671657 - RNA, 19 nt, Homo sapiens
  misc_RNA (1)...(19): siRNA sense strand
ccaaagagaagaugguuac

SEQ ID NO: 1671658 - RNA, 19 nt, Homo sapiens
  misc_RNA (1)...(19): siRNA sense strand
ggagcuugagaucuucuua

SEQ ID NO: 1671659 - RNA, 19 nt, Homo sapiens
  misc_RNA (1)...(19): siRNA sense strand
cacagcggaugaaggauug

SEQ ID NO: 1671660 - RNA, 19 nt, Homo sapiens
  misc_RNA (1)...(19): siRNA sense strand
ggaagccauugacguguac

SEQ ID NO: 1671661 - RNA, 19 nt, Homo sapiens
  misc_RNA (1)...(19): siRNA sense strand
ucacagcggaugaaggauu

SEQ ID NO: 1671662 - RNA, 19 nt, Homo sapiens
  misc_RNA (1)...(19): siRNA sense strand
cccugacacugcuugaaua

SEQ ID NO: 1671663 - RNA, 19 nt, Homo sapiens
  misc_RNA (1)...(19): siRNA sense strand
gcagaucacagugcuggaa

SEQ ID NO: 1671664 - RNA, 19 nt, Homo sapiens
  misc_RNA (1)...(19): siRNA sense strand
gcacgugcccaucgacauc

SEQ ID NO: 1671665 - RNA, 19 nt, Homo sapiens
  misc_RNA (1)...(19): siRNA sense strand
ggaccgagugacugaauuc

SEQ ID NO: 1671666 - RNA, 19 nt, Homo sapiens
  misc_RNA (1)...(19): siRNA sense strand
uacuuucacugccuaagaa

SEQ ID NO: 1671667 - RNA, 19 nt, Homo sapiens
  misc_RNA (1)...(19): siRNA sense strand
gcuguugcuuugcagauca

SEQ ID NO: 1671668 - RNA, 19 nt, Homo sapiens
  misc_RNA (1)...(19): siRNA sense strand
ggguagaggcagugucuga

SEQ ID NO: 1671669 - RNA, 19 nt, Homo sapiens
  misc_RNA (1)...(19): siRNA sense strand
ugacacugcuugaauacac

SEQ ID NO: 1671670 - RNA, 19 nt, Homo sapiens
  misc_RNA (1)...(19): siRNA sense strand
aagcugacaucuccaagag

SEQ ID NO: 1671671 - RNA, 19 nt, Homo sapiens
  misc_RNA (1)...(19): siRNA sense strand
uucggaaugucaacuauga

SEQ ID NO: 1671672 - RNA, 19 nt, Homo sapiens
  misc_RNA (1)...(19): siRNA sense strand
ggauuggcaggagauuaua

SEQ ID NO: 1671673 - RNA, 19 nt, Homo sapiens
  misc_RNA (1)...(19): siRNA sense strand
acacugagacccggaauca

SEQ ID NO: 1671674 - RNA, 19 nt, Homo sapiens
  misc_RNA (1)...(19): siRNA sense strand
cugagcagguggcagaaga

SEQ ID NO: 1671675 - RNA, 19 nt, Homo sapiens
  misc_RNA (1)...(19): siRNA sense strand
ucacugaagaagcagauug

SEQ ID NO: 1671676 - RNA, 19 nt, Homo sapiens
  misc_RNA (1)...(19): siRNA sense strand
gguucggaaugucaacuau

SEQ ID NO: 1671677 - RNA, 19 nt, Homo sapiens
  misc_RNA (1)...(19): siRNA sense strand
ggagauuauagcucuguau

SEQ ID NO: 1671678 - RNA, 19 nt, Homo sapiens
  misc_RNA (1)...(19): siRNA sense strand
gagauccccucacugaaga

SEQ ID NO: 1671679 - RNA, 19 nt, Homo sapiens
  misc_RNA (1)...(19): siRNA sense strand
gggagacgaugcuguugcu

SEQ ID NO: 1671680 - RNA, 19 nt, Homo sapiens
  misc_RNA (1)...(19): siRNA sense strand
uccuggaggugaugggaua

SEQ ID NO: 1671681 - RNA, 19 nt, Homo sapiens
  misc_RNA (1)...(19): siRNA sense strand
gcacugcagccugaaaugg

SEQ ID NO: 1671682 - RNA, 19 nt, Homo sapiens
  misc_RNA (1)...(19): siRNA sense strand
gacugacucuggcaucucu

SEQ ID NO: 1671683 - RNA, 19 nt, Homo sapiens
  misc_RNA (1)...(19): siRNA sense strand
uggcagaagaugcgauuga

SEQ ID NO: 1671684 - RNA, 19 nt, Homo sapiens
  misc_RNA (1)...(19): siRNA sense strand
agaaggacaacaccuacuu

SEQ ID NO: 1671685 - RNA, 19 nt, Homo sapiens
  misc_RNA (1)...(19): siRNA sense strand
ggaucugauuggcaagcuu

SEQ ID NO: 1671686 - RNA, 19 nt, Homo sapiens
  misc_RNA (1)...(19): siRNA sense strand
gcccugacacugcuugaau

SEQ ID NO: 1671687 - RNA, 19 nt, Homo sapiens
  misc_RNA (1)...(19): siRNA sense strand
ggaaugucaacuaugagau

SEQ ID NO: 1671688 - RNA, 19 nt, Homo sapiens
  misc_RNA (1)...(19): siRNA sense strand
gagcuugagaucuucuuag

SEQ ID NO: 1671689 - RNA, 19 nt, Homo sapiens
  misc_RNA (1)...(19): siRNA sense strand
ugagugaggaggcagaugu

SEQ ID NO: 1671690 - RNA, 19 nt, Homo sapiens
  misc_RNA (1)...(19): siRNA sense strand
ugccgaggcugcuggaauc

SEQ ID NO: 1671691 - RNA, 19 nt, Homo sapiens
  misc_RNA (1)...(19): siRNA sense strand
gaucuucuuagcccagaga

SEQ ID NO: 1671692 - RNA, 19 nt, Homo sapiens
  misc_RNA (1)...(19): siRNA sense strand
aaaggauccuggaggugau

SEQ ID NO: 1671693 - RNA, 19 nt, Homo sapiens
  misc_RNA (1)...(19): siRNA sense strand
gaaggauuggcaggagauu

SEQ ID NO: 1671694 - RNA, 19 nt, Homo sapiens
  misc_RNA (1)...(19): siRNA sense strand
cuacuuucacugccuaaga

SEQ ID NO: 1671695 - RNA, 19 nt, Homo sapiens
  misc_RNA (1)...(19): siRNA sense strand
cggaaugucaacuaugaga

SEQ ID NO: 1671696 - RNA, 19 nt, Homo sapiens
  misc_RNA (1)...(19): siRNA sense strand
agagagcaguggaguugag

SEQ ID NO: 1671697 - RNA, 19 nt, Homo sapiens
  misc_RNA (1)...(19): siRNA sense strand
aauccuggaccuucucaaa

SEQ ID NO: 1671698 - RNA, 19 nt, Homo sapiens
  misc_RNA (1)...(19): siRNA sense strand
gguggcagaagaugcgauu

SEQ ID NO: 1671699 - RNA, 19 nt, Homo sapiens
  misc_RNA (1)...(19): siRNA sense strand
aggauuggcaggagauuau

SEQ ID NO: 1671700 - RNA, 19 nt, Homo sapiens
  misc_RNA (1)...(19): siRNA sense strand
agaccaaggagcugcagaa

SEQ ID NO: 1671701 - RNA, 19 nt, Homo sapiens
  misc_RNA (1)...(19): siRNA sense strand
gggacugacucuggcaucu

SEQ ID NO: 1671702 - RNA, 19 nt, Homo sapiens
  misc_RNA (1)...(19): siRNA sense strand
gagcagguggcagaagaug

SEQ ID NO: 1671703 - RNA, 19 nt, Homo sapiens
  misc_RNA (1)...(19): siRNA sense strand
ggcagaagaugcgauugac

SEQ ID NO: 1671704 - RNA, 19 nt, Homo sapiens
  misc_RNA (1)...(19): siRNA sense strand
aagagcugauggugcagaa

SEQ ID NO: 1671705 - RNA, 19 nt, Homo sapiens
  misc_RNA (1)...(19): siRNA sense strand
cugcuugaauacacugaga

SEQ ID NO: 1671706 - RNA, 19 nt, Homo sapiens
  misc_RNA (1)...(19): siRNA sense strand
uacauucacuacuuucacu

SEQ ID NO: 1671707 - RNA, 19 nt, Homo sapiens
  misc_RNA (1)...(19): siRNA sense strand
uuggcaagcuuaccagucu

SEQ ID NO: 1671708 - RNA, 19 nt, Homo sapiens
  misc_RNA (1)...(19): siRNA sense strand
gcacagaggccuccacgaa

SEQ ID NO: 1671709 - RNA, 19 nt, Homo sapiens
  misc_RNA (1)...(19): siRNA sense strand
gaaggacaacaccuacuua

SEQ ID NO: 1671710 - RNA, 19 nt, Homo sapiens
  misc_RNA (1)...(19): siRNA sense strand
gauuauagcucuguaugag

SEQ ID NO: 1671711 - RNA, 19 nt, Homo sapiens
  misc_RNA (1)...(19): siRNA sense strand
gguccuacauucacuacuu

SEQ ID NO: 1671712 - RNA, 19 nt, Homo sapiens
  misc_RNA (1)...(19): siRNA sense strand
acagaggccuccacgaaga

SEQ ID NO: 1671713 - RNA, 19 nt, Homo sapiens
  misc_RNA (1)...(19): siRNA sense strand
uuauagcucuguaugagaa

SEQ ID NO: 1671714 - RNA, 19 nt, Homo sapiens
  misc_RNA (1)...(19): siRNA sense strand
gagauuauagcucuguaug

SEQ ID NO: 1671715 - RNA, 19 nt, Homo sapiens
  misc_RNA (1)...(19): siRNA sense strand
guccuacauucacuacuuu

SEQ ID NO: 1671716 - RNA, 19 nt, Homo sapiens
  misc_RNA (1)...(19): siRNA sense strand
cacagcggaugaaggauug

SEQ ID NO: 1671717 - RNA, 19 nt, Homo sapiens
  misc_RNA (1)...(19): siRNA sense strand
ucacagcggaugaaggauu

SEQ ID NO: 1671718 - RNA, 19 nt, Homo sapiens
  misc_RNA (1)...(19): siRNA sense strand
gcacgugcccaucgacauc

SEQ ID NO: 1671719 - RNA, 19 nt, Homo sapiens
  misc_RNA (1)...(19): siRNA sense strand
uacuuucacugccuaagaa

SEQ ID NO: 1671720 - RNA, 19 nt, Homo sapiens
  misc_RNA (1)...(19): siRNA sense strand
ggauuggcaggagauuaua

SEQ ID NO: 1671721 - RNA, 19 nt, Homo sapiens
  misc_RNA (1)...(19): siRNA sense strand
ggagauuauagcucuguau

SEQ ID NO: 1671722 - RNA, 19 nt, Homo sapiens
  misc_RNA (1)...(19): siRNA sense strand
gcacugcagccugaaaugg

SEQ ID NO: 1671723 - RNA, 19 nt, Homo sapiens
  misc_RNA (1)...(19): siRNA sense strand
agaaggacaacaccuacuu

SEQ ID NO: 1671724 - RNA, 19 nt, Homo sapiens
  misc_RNA (1)...(19): siRNA sense strand
cuacuuucacugccuaaga

SEQ ID NO: 1671725 - RNA, 19 nt, Homo sapiens
  misc_RNA (1)...(19): siRNA sense strand
gaaggauuggcaggagauu

SEQ ID NO: 1671726 - RNA, 19 nt, Homo sapiens
  misc_RNA (1)...(19): siRNA sense strand
aauccuggaccuucucaaa

SEQ ID NO: 1671727 - RNA, 19 nt, Homo sapiens
  misc_RNA (1)...(19): siRNA sense strand
aggauuggcaggagauuau

SEQ ID NO: 1671728 - RNA, 19 nt, Homo sapiens
  misc_RNA (1)...(19): siRNA sense strand
uacauucacuacuuucacu

SEQ ID NO: 1671729 - RNA, 19 nt, Homo sapiens
  misc_RNA (1)...(19): siRNA sense strand
gcacagaggccuccacgaa

SEQ ID NO: 1671730 - RNA, 19 nt, Homo sapiens
  misc_RNA (1)...(19): siRNA sense strand
gaaggacaacaccuacuua

SEQ ID NO: 1671731 - RNA, 19 nt, Homo sapiens
  misc_RNA (1)...(19): siRNA sense strand
gauuauagcucuguaugag

SEQ ID NO: 1671732 - RNA, 19 nt, Homo sapiens
  misc_RNA (1)...(19): siRNA sense strand
gguccuacauucacuacuu

SEQ ID NO: 1671733 - RNA, 19 nt, Homo sapiens
  misc_RNA (1)...(19): siRNA sense strand
acagaggccuccacgaaga

SEQ ID NO: 1671734 - RNA, 19 nt, Homo sapiens
  misc_RNA (1)...(19): siRNA sense strand
uuauagcucuguaugagaa

SEQ ID NO: 1671735 - RNA, 19 nt, Homo sapiens
  misc_RNA (1)...(19): siRNA sense strand
gagauuauagcucuguaug

SEQ ID NO: 1671736 - RNA, 19 nt, Homo sapiens
  misc_RNA (1)...(19): siRNA sense strand
guccuacauucacuacuuu

SEQ ID NO: 1671737 - RNA, 19 nt, Homo sapiens
  misc_RNA (1)...(19): siRNA sense strand
cacagcggaugaaggauug

SEQ ID NO: 1671738 - RNA, 19 nt, Homo sapiens
  misc_RNA (1)...(19): siRNA sense strand
ucacagcggaugaaggauu

SEQ ID NO: 1671739 - RNA, 19 nt, Homo sapiens
  misc_RNA (1)...(19): siRNA sense strand
gcacgugcccaucgacauc

SEQ ID NO: 1671740 - RNA, 19 nt, Homo sapiens
  misc_RNA (1)...(19): siRNA sense strand
uacuuucacugccuaagaa

SEQ ID NO: 1671741 - RNA, 19 nt, Homo sapiens
  misc_RNA (1)...(19): siRNA sense strand
ggauuggcaggagauuaua

SEQ ID NO: 1671742 - RNA, 19 nt, Homo sapiens
  misc_RNA (1)...(19): siRNA sense strand
ggagauuauagcucuguau

SEQ ID NO: 1671743 - RNA, 19 nt, Homo sapiens
  misc_RNA (1)...(19): siRNA sense strand
gcacugcagccugaaaugg

SEQ ID NO: 1671744 - RNA, 19 nt, Homo sapiens
  misc_RNA (1)...(19): siRNA sense strand
agaaggacaacaccuacuu

SEQ ID NO: 1671745 - RNA, 19 nt, Homo sapiens
  misc_RNA (1)...(19): siRNA sense strand
cuacuuucacugccuaaga

SEQ ID NO: 1671746 - RNA, 19 nt, Homo sapiens
  misc_RNA (1)...(19): siRNA sense strand
gaaggauuggcaggagauu

SEQ ID NO: 1671747 - RNA, 19 nt, Homo sapiens
  misc_RNA (1)...(19): siRNA sense strand
aauccuggaccuucucaaa

SEQ ID NO: 1671748 - RNA, 19 nt, Homo sapiens
  misc_RNA (1)...(19): siRNA sense strand
aggauuggcaggagauuau

SEQ ID NO: 1671749 - RNA, 19 nt, Homo sapiens
  misc_RNA (1)...(19): siRNA sense strand
uacauucacuacuuucacu

SEQ ID NO: 1671750 - RNA, 19 nt, Homo sapiens
  misc_RNA (1)...(19): siRNA sense strand
gcacagaggccuccacgaa

SEQ ID NO: 1671751 - RNA, 19 nt, Homo sapiens
  misc_RNA (1)...(19): siRNA sense strand
gaaggacaacaccuacuua

SEQ ID NO: 1671752 - RNA, 19 nt, Homo sapiens
  misc_RNA (1)...(19): siRNA sense strand
ugaaggaccugccgaguca

SEQ ID NO: 1671753 - RNA, 19 nt, Homo sapiens
  misc_RNA (1)...(19): siRNA sense strand
gggaagccauugacgugua

SEQ ID NO: 1671754 - RNA, 19 nt, Homo sapiens
  misc_RNA (1)...(19): siRNA sense strand
gaugggaaccucucuguga

SEQ ID NO: 1671755 - RNA, 19 nt, Homo sapiens
  misc_RNA (1)...(19): siRNA sense strand
gauuauagcucuguaugag

SEQ ID NO: 1671756 - RNA, 19 nt, Homo sapiens
  misc_RNA (1)...(19): siRNA sense strand
gaucugauuggcaagcuua

SEQ ID NO: 1671757 - RNA, 19 nt, Homo sapiens
  misc_RNA (1)...(19): siRNA sense strand
ucauggagcuugagaucuu

SEQ ID NO: 1671758 - RNA, 19 nt, Homo sapiens
  misc_RNA (1)...(19): siRNA sense strand
gguccuacauucacuacuu

SEQ ID NO: 1671759 - RNA, 19 nt, Homo sapiens
  misc_RNA (1)...(19): siRNA sense strand
ggaggcagauguccugucu

SEQ ID NO: 1671760 - RNA, 19 nt, Homo sapiens
  misc_RNA (1)...(19): siRNA sense strand
gagcagguguugccaaugc

SEQ ID NO: 1671761 - RNA, 19 nt, Homo sapiens
  misc_RNA (1)...(19): siRNA sense strand
agaagcagauugccaagug

SEQ ID NO: 1671762 - RNA, 19 nt, Homo sapiens
  misc_RNA (1)...(19): siRNA sense strand
agacgaugcuguugcuuug

SEQ ID NO: 1671763 - RNA, 19 nt, Homo sapiens
  misc_RNA (1)...(19): siRNA sense strand
acagaggccuccacgaaga

SEQ ID NO: 1671764 - RNA, 19 nt, Homo sapiens
  misc_RNA (1)...(19): siRNA sense strand
gagacgaugcuguugcuuu

SEQ ID NO: 1671765 - RNA, 19 nt, Homo sapiens
  misc_RNA (1)...(19): siRNA sense strand
uuauagcucuguaugagaa

SEQ ID NO: 1671766 - RNA, 19 nt, Homo sapiens
  misc_RNA (1)...(19): siRNA sense strand
gcugcuggcuuugaagaaa

SEQ ID NO: 1671767 - RNA, 19 nt, Homo sapiens
  misc_RNA (1)...(19): siRNA sense strand
ccagagagcaguggaguug

SEQ ID NO: 1671768 - RNA, 19 nt, Homo sapiens
  misc_RNA (1)...(19): siRNA sense strand
gaagcugacaucuccaaga

SEQ ID NO: 1671769 - RNA, 19 nt, Homo sapiens
  misc_RNA (1)...(19): siRNA sense strand
gaaacucaacgguguacga

SEQ ID NO: 1671770 - RNA, 19 nt, Homo sapiens
  misc_RNA (1)...(19): siRNA sense strand
gagauuauagcucuguaug

SEQ ID NO: 1671771 - RNA, 19 nt, Homo sapiens
  misc_RNA (1)...(19): siRNA sense strand
gagcaguggaguugaguga

SEQ ID NO: 1671772 - RNA, 19 nt, Homo sapiens
  misc_RNA (1)...(19): siRNA sense strand
guccuacauucacuacuuu

SEQ ID NO: 1671773 - RNA, 19 nt, Homo sapiens
  misc_RNA (1)...(19): siRNA sense strand
cagagcagguguugccaau

SEQ ID NO: 1671774 - RNA, 19 nt, Homo sapiens
  misc_RNA (1)...(19): siRNA sense strand
gaaugucaacuaugagauc

SEQ ID NO: 1671775 - RNA, 19 nt, Homo sapiens
  misc_RNA (1)...(19): siRNA sense strand
ccaaagagaagaugguuac

SEQ ID NO: 1671776 - RNA, 19 nt, Homo sapiens
  misc_RNA (1)...(19): siRNA sense strand
ggagcuugagaucuucuua

SEQ ID NO: 1671777 - RNA, 19 nt, Homo sapiens
  misc_RNA (1)...(19): siRNA sense strand
cacagcggaugaaggauug

SEQ ID NO: 1671778 - RNA, 19 nt, Homo sapiens
  misc_RNA (1)...(19): siRNA sense strand
ggaagccauugacguguac

SEQ ID NO: 1671779 - RNA, 19 nt, Homo sapiens
  misc_RNA (1)...(19): siRNA sense strand
ucacagcggaugaaggauu

SEQ ID NO: 1671780 - RNA, 19 nt, Homo sapiens
  misc_RNA (1)...(19): siRNA sense strand
cccugacacugcuugaaua

SEQ ID NO: 1671781 - RNA, 19 nt, Homo sapiens
  misc_RNA (1)...(19): siRNA sense strand
gcagaucacagugcuggaa

SEQ ID NO: 1671782 - RNA, 19 nt, Homo sapiens
  misc_RNA (1)...(19): siRNA sense strand
gcacgugcccaucgacauc

SEQ ID NO: 1671783 - RNA, 19 nt, Homo sapiens
  misc_RNA (1)...(19): siRNA sense strand
ggaccgagugacugaauuc

SEQ ID NO: 1671784 - RNA, 19 nt, Homo sapiens
  misc_RNA (1)...(19): siRNA sense strand
uacuuucacugccuaagaa

SEQ ID NO: 1671785 - RNA, 19 nt, Homo sapiens
  misc_RNA (1)...(19): siRNA sense strand
gcuguugcuuugcagauca

SEQ ID NO: 1671786 - RNA, 19 nt, Homo sapiens
  misc_RNA (1)...(19): siRNA sense strand
ggguagaggcagugucuga

SEQ ID NO: 1671787 - RNA, 19 nt, Homo sapiens
  misc_RNA (1)...(19): siRNA sense strand
ugacacugcuugaauacac

SEQ ID NO: 1671788 - RNA, 19 nt, Homo sapiens
  misc_RNA (1)...(19): siRNA sense strand
aagcugacaucuccaagag

SEQ ID NO: 1671789 - RNA, 19 nt, Homo sapiens
  misc_RNA (1)...(19): siRNA sense strand
uucggaaugucaacuauga

SEQ ID NO: 1671790 - RNA, 19 nt, Homo sapiens
  misc_RNA (1)...(19): siRNA sense strand
ggauuggcaggagauuaua

SEQ ID NO: 1671791 - RNA, 19 nt, Homo sapiens
  misc_RNA (1)...(19): siRNA sense strand
acacugagacccggaauca

SEQ ID NO: 1671792 - RNA, 19 nt, Homo sapiens
  misc_RNA (1)...(19): siRNA sense strand
cugagcagguggcagaaga

SEQ ID NO: 1671793 - RNA, 19 nt, Homo sapiens
  misc_RNA (1)...(19): siRNA sense strand
ucacugaagaagcagauug

SEQ ID NO: 1671794 - RNA, 19 nt, Homo sapiens
  misc_RNA (1)...(19): siRNA sense strand
gguucggaaugucaacuau

SEQ ID NO: 1671795 - RNA, 19 nt, Homo sapiens
  misc_RNA (1)...(19): siRNA sense strand
ggagauuauagcucuguau

SEQ ID NO: 1671796 - RNA, 19 nt, Homo sapiens
  misc_RNA (1)...(19): siRNA sense strand
gagauccccucacugaaga

SEQ ID NO: 1671797 - RNA, 19 nt, Homo sapiens
  misc_RNA (1)...(19): siRNA sense strand
gggagacgaugcuguugcu

SEQ ID NO: 1671798 - RNA, 19 nt, Homo sapiens
  misc_RNA (1)...(19): siRNA sense strand
uccuggaggugaugggaua

SEQ ID NO: 1671799 - RNA, 19 nt, Homo sapiens
  misc_RNA (1)...(19): siRNA sense strand
gcacugcagccugaaaugg

SEQ ID NO: 1671800 - RNA, 19 nt, Homo sapiens
  misc_RNA (1)...(19): siRNA sense strand
gacugacucuggcaucucu

SEQ ID NO: 1671801 - RNA, 19 nt, Homo sapiens
  misc_RNA (1)...(19): siRNA sense strand
uggcagaagaugcgauuga

SEQ ID NO: 1671802 - RNA, 19 nt, Homo sapiens
  misc_RNA (1)...(19): siRNA sense strand
agaaggacaacaccuacuu

SEQ ID NO: 1671803 - RNA, 19 nt, Homo sapiens
  misc_RNA (1)...(19): siRNA sense strand
ggaucugauuggcaagcuu

SEQ ID NO: 1671804 - RNA, 19 nt, Homo sapiens
  misc_RNA (1)...(19): siRNA sense strand
gcccugacacugcuugaau

SEQ ID NO: 1671805 - RNA, 19 nt, Homo sapiens
  misc_RNA (1)...(19): siRNA sense strand
ggaaugucaacuaugagau

SEQ ID NO: 1671806 - RNA, 19 nt, Homo sapiens
  misc_RNA (1)...(19): siRNA sense strand
gagcuugagaucuucuuag

SEQ ID NO: 1671807 - RNA, 19 nt, Homo sapiens
  misc_RNA (1)...(19): siRNA sense strand
ugagugaggaggcagaugu

SEQ ID NO: 1671808 - RNA, 19 nt, Homo sapiens
  misc_RNA (1)...(19): siRNA sense strand
ugccgaggcugcuggaauc

SEQ ID NO: 1671809 - RNA, 19 nt, Homo sapiens
  misc_RNA (1)...(19): siRNA sense strand
gaucuucuuagcccagaga

SEQ ID NO: 1671810 - RNA, 19 nt, Homo sapiens
  misc_RNA (1)...(19): siRNA sense strand
aaaggauccuggaggugau

SEQ ID NO: 1671811 - RNA, 19 nt, Homo sapiens
  misc_RNA (1)...(19): siRNA sense strand
gaaggauuggcaggagauu

SEQ ID NO: 1671812 - RNA, 19 nt, Homo sapiens
  misc_RNA (1)...(19): siRNA sense strand
cuacuuucacugccuaaga

SEQ ID NO: 1671813 - RNA, 19 nt, Homo sapiens
  misc_RNA (1)...(19): siRNA sense strand
cggaaugucaacuaugaga

SEQ ID NO: 1671814 - RNA, 19 nt, Homo sapiens
  misc_RNA (1)...(19): siRNA sense strand
agagagcaguggaguugag

SEQ ID NO: 1671815 - RNA, 19 nt, Homo sapiens
  misc_RNA (1)...(19): siRNA sense strand
aauccuggaccuucucaaa

SEQ ID NO: 1671816 - RNA, 19 nt, Homo sapiens
  misc_RNA (1)...(19): siRNA sense strand
gguggcagaagaugcgauu

SEQ ID NO: 1671817 - RNA, 19 nt, Homo sapiens
  misc_RNA (1)...(19): siRNA sense strand
aggauuggcaggagauuau

SEQ ID NO: 1671818 - RNA, 19 nt, Homo sapiens
  misc_RNA (1)...(19): siRNA sense strand
agaccaaggagcugcagaa

SEQ ID NO: 1671819 - RNA, 19 nt, Homo sapiens
  misc_RNA (1)...(19): siRNA sense strand
gggacugacucuggcaucu

SEQ ID NO: 1671820 - RNA, 19 nt, Homo sapiens
  misc_RNA (1)...(19): siRNA sense strand
gagcagguggcagaagaug

SEQ ID NO: 1671821 - RNA, 19 nt, Homo sapiens
  misc_RNA (1)...(19): siRNA sense strand
ggcagaagaugcgauugac

SEQ ID NO: 1671822 - RNA, 19 nt, Homo sapiens
  misc_RNA (1)...(19): siRNA sense strand
aagagcugauggugcagaa

SEQ ID NO: 1671823 - RNA, 19 nt, Homo sapiens
  misc_RNA (1)...(19): siRNA sense strand
cugcuugaauacacugaga

SEQ ID NO: 1671824 - RNA, 19 nt, Homo sapiens
  misc_RNA (1)...(19): siRNA sense strand
uacauucacuacuuucacu

SEQ ID NO: 1671825 - RNA, 19 nt, Homo sapiens
  misc_RNA (1)...(19): siRNA sense strand
uuggcaagcuuaccagucu

SEQ ID NO: 1671826 - RNA, 19 nt, Homo sapiens
  misc_RNA (1)...(19): siRNA sense strand
gcgauaugcucuucuguua

SEQ ID NO: 1671827 - RNA, 19 nt, Homo sapiens
  misc_RNA (1)...(19): siRNA sense strand
gauaugcucuucuguuaga

SEQ ID NO: 1671828 - RNA, 19 nt, Homo sapiens
  misc_RNA (1)...(19): siRNA sense strand
cagaagaaauucacaggaa

SEQ ID NO: 1671829 - RNA, 19 nt, Homo sapiens
  misc_RNA (1)...(19): siRNA sense strand
caaagucauugcugcgaua

SEQ ID NO: 1671830 - RNA, 19 nt, Homo sapiens
  misc_RNA (1)...(19): siRNA sense strand
gcuugaaacugcagaagaa

SEQ ID NO: 1671831 - RNA, 19 nt, Homo sapiens
  misc_RNA (1)...(19): siRNA sense strand
uugcaaagcuucagucaga

SEQ ID NO: 1671832 - RNA, 19 nt, Homo sapiens
  misc_RNA (1)...(19): siRNA sense strand
gaacguugaaccaaauauu

SEQ ID NO: 1671833 - RNA, 19 nt, Homo sapiens
  misc_RNA (1)...(19): siRNA sense strand
ucaacacugucgcuaauga

SEQ ID NO: 1671834 - RNA, 19 nt, Homo sapiens
  misc_RNA (1)...(19): siRNA sense strand
aaagaacguugaaccaaau

SEQ ID NO: 1671835 - RNA, 19 nt, Homo sapiens
  misc_RNA (1)...(19): siRNA sense strand
caaauucaaggcuacgaua

SEQ ID NO: 1671836 - RNA, 19 nt, Homo sapiens
  misc_RNA (1)...(19): siRNA sense strand
cagaggaugugcagguuga

SEQ ID NO: 1671837 - RNA, 19 nt, Homo sapiens
  misc_RNA (1)...(19): siRNA sense strand
agaagaaauucacaggaaa

SEQ ID NO: 1671838 - RNA, 19 nt, Homo sapiens
  misc_RNA (1)...(19): siRNA sense strand
gacgugaaccaguaucuuu

SEQ ID NO: 1671839 - RNA, 19 nt, Homo sapiens
  misc_RNA (1)...(19): siRNA sense strand
cuacaaaucccuuaccaau

SEQ ID NO: 1671840 - RNA, 19 nt, Homo sapiens
  misc_RNA (1)...(19): siRNA sense strand
uagcuuugauggcagcaua

SEQ ID NO: 1671841 - RNA, 19 nt, Homo sapiens
  misc_RNA (1)...(19): siRNA sense strand
gcucuucuguuagacauug

SEQ ID NO: 1671842 - RNA, 19 nt, Homo sapiens
  misc_RNA (1)...(19): siRNA sense strand
cacugucgcuaaugaagua

SEQ ID NO: 1671843 - RNA, 19 nt, Homo sapiens
  misc_RNA (1)...(19): siRNA sense strand
ugaaacugcagaagaaauu

SEQ ID NO: 1671844 - RNA, 19 nt, Homo sapiens
  misc_RNA (1)...(19): siRNA sense strand
gcugagagaaagcuguaua

SEQ ID NO: 1671845 - RNA, 19 nt, Homo sapiens
  misc_RNA (1)...(19): siRNA sense strand
gaagauaacagugaaacag

SEQ ID NO: 1671846 - RNA, 19 nt, Homo sapiens
  misc_RNA (1)...(19): siRNA sense strand
auucaaggcuacgauauuu

SEQ ID NO: 1671847 - RNA, 19 nt, Homo sapiens
  misc_RNA (1)...(19): siRNA sense strand
gauauuucacuccuaaaga

SEQ ID NO: 1671848 - RNA, 19 nt, Homo sapiens
  misc_RNA (1)...(19): siRNA sense strand
auagugaucucucugugaa

SEQ ID NO: 1671849 - RNA, 19 nt, Homo sapiens
  misc_RNA (1)...(19): siRNA sense strand
caacgugcauguaguagcu

SEQ ID NO: 1671850 - RNA, 19 nt, Homo sapiens
  misc_RNA (1)...(19): siRNA sense strand
agaaauagcaaaucuccuu

SEQ ID NO: 1671851 - RNA, 19 nt, Homo sapiens
  misc_RNA (1)...(19): siRNA sense strand
gauagugaucucucuguga

SEQ ID NO: 1671852 - RNA, 19 nt, Homo sapiens
  misc_RNA (1)...(19): siRNA sense strand
caagaagaacagauaacaa

SEQ ID NO: 1671853 - RNA, 19 nt, Homo sapiens
  misc_RNA (1)...(19): siRNA sense strand
gaagguccgugugcuuuac

SEQ ID NO: 1671854 - RNA, 19 nt, Homo sapiens
  misc_RNA (1)...(19): siRNA sense strand
cggauuuccugagaagaua

SEQ ID NO: 1671855 - RNA, 19 nt, Homo sapiens
  misc_RNA (1)...(19): siRNA sense strand
gaguucggauuuccugaga

SEQ ID NO: 1671856 - RNA, 19 nt, Homo sapiens
  misc_RNA (1)...(19): siRNA sense strand
ucacaagaagaacagauaa

SEQ ID NO: 1671857 - RNA, 19 nt, Homo sapiens
  misc_RNA (1)...(19): siRNA sense strand
ucagagccauuacccuuuc

SEQ ID NO: 1671858 - RNA, 19 nt, Homo sapiens
  misc_RNA (1)...(19): siRNA sense strand
ugucaacacugucgcuaau

SEQ ID NO: 1671859 - RNA, 19 nt, Homo sapiens
  misc_RNA (1)...(19): siRNA sense strand
aaaagaacguugaaccaaa

SEQ ID NO: 1671860 - RNA, 19 nt, Homo sapiens
  misc_RNA (1)...(19): siRNA sense strand
gguugagaauaucuacaaa

SEQ ID NO: 1671861 - RNA, 19 nt, Homo sapiens
  misc_RNA (1)...(19): siRNA sense strand
guucagcccacuuguagaa

SEQ ID NO: 1671862 - RNA, 19 nt, Homo sapiens
  misc_RNA (1)...(19): siRNA sense strand
gaagaacagauaacaaagc

SEQ ID NO: 1671863 - RNA, 19 nt, Homo sapiens
  misc_RNA (1)...(19): siRNA sense strand
cuguauaccugcacaagug

SEQ ID NO: 1671864 - RNA, 19 nt, Homo sapiens
  misc_RNA (1)...(19): siRNA sense strand
gcauacaguguucuggaaa

SEQ ID NO: 1671865 - RNA, 19 nt, Homo sapiens
  misc_RNA (1)...(19): siRNA sense strand
gauggcagcauacaguguu

SEQ ID NO: 1671866 - RNA, 19 nt, Homo sapiens
  misc_RNA (1)...(19): siRNA sense strand
gaaaagaacguugaaccaa

SEQ ID NO: 1671867 - RNA, 19 nt, Homo sapiens
  misc_RNA (1)...(19): siRNA sense strand
guuaucgccuacuuggaaa

SEQ ID NO: 1671868 - RNA, 19 nt, Homo sapiens
  misc_RNA (1)...(19): siRNA sense strand
gaagaaauucacaggaaaa

SEQ ID NO: 1671869 - RNA, 19 nt, Homo sapiens
  misc_RNA (1)...(19): siRNA sense strand
aauaugcaauggauguaga

SEQ ID NO: 1671870 - RNA, 19 nt, Homo sapiens
  misc_RNA (1)...(19): siRNA sense strand
cugagaagauaacagugaa

SEQ ID NO: 1671871 - RNA, 19 nt, Homo sapiens
  misc_RNA (1)...(19): siRNA sense strand
ugcgauauuucacuccuaa

SEQ ID NO: 1671872 - RNA, 19 nt, Homo sapiens
  misc_RNA (1)...(19): siRNA sense strand
gucacaagaagaacagaua

SEQ ID NO: 1671873 - RNA, 19 nt, Homo sapiens
  misc_RNA (1)...(19): siRNA sense strand
gcgcugagagaaagcugua

SEQ ID NO: 1671874 - RNA, 19 nt, Homo sapiens
  misc_RNA (1)...(19): siRNA sense strand
gaaucuguacauccacaaa

SEQ ID NO: 1671875 - RNA, 19 nt, Homo sapiens
  misc_RNA (1)...(19): siRNA sense strand
caacacugucgcuaaugaa

SEQ ID NO: 1671876 - RNA, 19 nt, Homo sapiens
  misc_RNA (1)...(19): siRNA sense strand
gcuaaugaaguauacaagu

SEQ ID NO: 1671877 - RNA, 19 nt, Homo sapiens
  misc_RNA (1)...(19): siRNA sense strand
guucggauuuccugagaag

SEQ ID NO: 1671878 - RNA, 19 nt, Homo sapiens
  misc_RNA (1)...(19): siRNA sense strand
aauagcaaaucuccuugga

SEQ ID NO: 1671879 - RNA, 19 nt, Homo sapiens
  misc_RNA (1)...(19): siRNA sense strand
guuacagacugcagaggau

SEQ ID NO: 1671880 - RNA, 19 nt, Homo sapiens
  misc_RNA (1)...(19): siRNA sense strand
gcaccacgcgcugagagaa

SEQ ID NO: 1671881 - RNA, 19 nt, Homo sapiens
  misc_RNA (1)...(19): siRNA sense strand
ucucaacgugcauguagua

SEQ ID NO: 1671882 - RNA, 19 nt, Homo sapiens
  misc_RNA (1)...(19): siRNA sense strand
uacaaaucccuuaccaauu

SEQ ID NO: 1671883 - RNA, 19 nt, Homo sapiens
  misc_RNA (1)...(19): siRNA sense strand
gaugugcagguugagaaua

SEQ ID NO: 1671884 - RNA, 19 nt, Homo sapiens
  misc_RNA (1)...(19): siRNA sense strand
agaagguccgugugcuuua

SEQ ID NO: 1671885 - RNA, 19 nt, Homo sapiens
  misc_RNA (1)...(19): siRNA sense strand
uagaagguccgugugcuuu

SEQ ID NO: 1671886 - RNA, 19 nt, Homo sapiens
  misc_RNA (1)...(19): siRNA sense strand
guagaagguccgugugcuu

SEQ ID NO: 1671887 - RNA, 19 nt, Homo sapiens
  misc_RNA (1)...(19): siRNA sense strand
ccugagaagauaacaguga

SEQ ID NO: 1671888 - RNA, 19 nt, Homo sapiens
  misc_RNA (1)...(19): siRNA sense strand
gaaacugcagaagaaauuc

SEQ ID NO: 1671889 - RNA, 19 nt, Homo sapiens
  misc_RNA (1)...(19): siRNA sense strand
cguuaucgccuacuuggaa

SEQ ID NO: 1671890 - RNA, 19 nt, Homo sapiens
  misc_RNA (1)...(19): siRNA sense strand
aagaacagauaacaaagcu

SEQ ID NO: 1671891 - RNA, 19 nt, Homo sapiens
  misc_RNA (1)...(19): siRNA sense strand
gaaccaguaucuuuuacca

SEQ ID NO: 1671892 - RNA, 19 nt, Homo sapiens
  misc_RNA (1)...(19): siRNA sense strand
gagagaaagcuguauaccu

SEQ ID NO: 1671893 - RNA, 19 nt, Homo sapiens
  misc_RNA (1)...(19): siRNA sense strand
gcugcgauaugcucuucug

SEQ ID NO: 1671894 - RNA, 19 nt, Homo sapiens
  misc_RNA (1)...(19): siRNA sense strand
aggcuacgauauuuucuua

SEQ ID NO: 1671895 - RNA, 19 nt, Homo sapiens
  misc_RNA (1)...(19): siRNA sense strand
ggauuuccugagaagauaa

SEQ ID NO: 1671896 - RNA, 19 nt, Homo sapiens
  misc_RNA (1)...(19): siRNA sense strand
acaagaagaacagauaaca

SEQ ID NO: 1671897 - RNA, 19 nt, Homo sapiens
  misc_RNA (1)...(19): siRNA sense strand
ccucuugauacaaacaaua

SEQ ID NO: 1671898 - RNA, 19 nt, Homo sapiens
  misc_RNA (1)...(19): siRNA sense strand
gagaagauaacagugaaac

SEQ ID NO: 1671899 - RNA, 19 nt, Homo sapiens
  misc_RNA (1)...(19): siRNA sense strand
ugcgggugcuggagcuaua

SEQ ID NO: 1671900 - RNA, 19 nt, Homo sapiens
  misc_RNA (1)...(19): siRNA sense strand
uaucgccuacuuggaaaua

SEQ ID NO: 1671901 - RNA, 19 nt, Homo sapiens
  misc_RNA (1)...(19): siRNA sense strand
ccucacacacaguuacuug

SEQ ID NO: 1671902 - RNA, 19 nt, Homo sapiens
  misc_RNA (1)...(19): siRNA sense strand
aauugaaucuguacaucca

SEQ ID NO: 1671903 - RNA, 19 nt, Homo sapiens
  misc_RNA (1)...(19): siRNA sense strand
cuuaaacugcgauauuuca

SEQ ID NO: 1671904 - RNA, 19 nt, Homo sapiens
  misc_RNA (1)...(19): siRNA sense strand
gcaauggauguagaaaaua

SEQ ID NO: 1671905 - RNA, 19 nt, Homo sapiens
  misc_RNA (1)...(19): siRNA sense strand
gucagagccauuacccuuu

SEQ ID NO: 1671906 - RNA, 19 nt, Homo sapiens
  misc_RNA (1)...(19): siRNA sense strand
caaccucucuuggcauucc

SEQ ID NO: 1671907 - RNA, 19 nt, Homo sapiens
  misc_RNA (1)...(19): siRNA sense strand
ggaugugcagguugagaau

SEQ ID NO: 1671908 - RNA, 19 nt, Homo sapiens
  misc_RNA (1)...(19): siRNA sense strand
aagaugacacugacgugaa

SEQ ID NO: 1671909 - RNA, 19 nt, Homo sapiens
  misc_RNA (1)...(19): siRNA sense strand
cuacuuggaaauagucuca

SEQ ID NO: 1671910 - RNA, 19 nt, Homo sapiens
  misc_RNA (1)...(19): siRNA sense strand
aaacugcagaagaaauuca

SEQ ID NO: 1671911 - RNA, 19 nt, Homo sapiens
  misc_RNA (1)...(19): siRNA sense strand
augugcagguugagaauau

SEQ ID NO: 1671912 - RNA, 19 nt, Homo sapiens
  misc_RNA (1)...(19): siRNA sense strand
ccaaaggauauggaagcua

SEQ ID NO: 1671913 - RNA, 19 nt, Homo sapiens
  misc_RNA (1)...(19): siRNA sense strand
gcgauaugcucuucuguua

SEQ ID NO: 1671914 - RNA, 19 nt, Homo sapiens
  misc_RNA (1)...(19): siRNA sense strand
gauaugcucuucuguuaga

SEQ ID NO: 1671915 - RNA, 19 nt, Homo sapiens
  misc_RNA (1)...(19): siRNA sense strand
cagaagaaauucacaggaa

SEQ ID NO: 1671916 - RNA, 19 nt, Homo sapiens
  misc_RNA (1)...(19): siRNA sense strand
caaagucauugcugcgaua

SEQ ID NO: 1671917 - RNA, 19 nt, Homo sapiens
  misc_RNA (1)...(19): siRNA sense strand
gcuugaaacugcagaagaa

SEQ ID NO: 1671918 - RNA, 19 nt, Homo sapiens
  misc_RNA (1)...(19): siRNA sense strand
uugcaaagcuucagucaga

SEQ ID NO: 1671919 - RNA, 19 nt, Homo sapiens
  misc_RNA (1)...(19): siRNA sense strand
gaacguugaaccaaauauu

SEQ ID NO: 1671920 - RNA, 19 nt, Homo sapiens
  misc_RNA (1)...(19): siRNA sense strand
ucaacacugucgcuaauga

SEQ ID NO: 1671921 - RNA, 19 nt, Homo sapiens
  misc_RNA (1)...(19): siRNA sense strand
aaagaacguugaaccaaau

SEQ ID NO: 1671922 - RNA, 19 nt, Homo sapiens
  misc_RNA (1)...(19): siRNA sense strand
caaauucaaggcuacgaua

SEQ ID NO: 1671923 - RNA, 19 nt, Homo sapiens
  misc_RNA (1)...(19): siRNA sense strand
cagaggaugugcagguuga

SEQ ID NO: 1671924 - RNA, 19 nt, Homo sapiens
  misc_RNA (1)...(19): siRNA sense strand
agaagaaauucacaggaaa

SEQ ID NO: 1671925 - RNA, 19 nt, Homo sapiens
  misc_RNA (1)...(19): siRNA sense strand
gacgugaaccaguaucuuu

SEQ ID NO: 1671926 - RNA, 19 nt, Homo sapiens
  misc_RNA (1)...(19): siRNA sense strand
cuacaaaucccuuaccaau

SEQ ID NO: 1671927 - RNA, 19 nt, Homo sapiens
  misc_RNA (1)...(19): siRNA sense strand
uagcuuugauggcagcaua

SEQ ID NO: 1671928 - RNA, 19 nt, Homo sapiens
  misc_RNA (1)...(19): siRNA sense strand
gcucuucuguuagacauug

SEQ ID NO: 1671929 - RNA, 19 nt, Homo sapiens
  misc_RNA (1)...(19): siRNA sense strand
cacugucgcuaaugaagua

SEQ ID NO: 1671930 - RNA, 19 nt, Homo sapiens
  misc_RNA (1)...(19): siRNA sense strand
ugaaacugcagaagaaauu

SEQ ID NO: 1671931 - RNA, 19 nt, Homo sapiens
  misc_RNA (1)...(19): siRNA sense strand
gcugagagaaagcuguaua

SEQ ID NO: 1671932 - RNA, 19 nt, Homo sapiens
  misc_RNA (1)...(19): siRNA sense strand
gaagauaacagugaaacag

SEQ ID NO: 1671933 - RNA, 19 nt, Homo sapiens
  misc_RNA (1)...(19): siRNA sense strand
auucaaggcuacgauauuu

SEQ ID NO: 1671934 - RNA, 19 nt, Homo sapiens
  misc_RNA (1)...(19): siRNA sense strand
gauauuucacuccuaaaga

SEQ ID NO: 1671935 - RNA, 19 nt, Homo sapiens
  misc_RNA (1)...(19): siRNA sense strand
auagugaucucucugugaa

SEQ ID NO: 1671936 - RNA, 19 nt, Homo sapiens
  misc_RNA (1)...(19): siRNA sense strand
caacgugcauguaguagcu

SEQ ID NO: 1671937 - RNA, 19 nt, Homo sapiens
  misc_RNA (1)...(19): siRNA sense strand
agaaauagcaaaucuccuu

SEQ ID NO: 1671938 - RNA, 19 nt, Homo sapiens
  misc_RNA (1)...(19): siRNA sense strand
gauagugaucucucuguga

SEQ ID NO: 1671939 - RNA, 19 nt, Homo sapiens
  misc_RNA (1)...(19): siRNA sense strand
caagaagaacagauaacaa

SEQ ID NO: 1671940 - RNA, 19 nt, Homo sapiens
  misc_RNA (1)...(19): siRNA sense strand
gaagguccgugugcuuuac

SEQ ID NO: 1671941 - RNA, 19 nt, Homo sapiens
  misc_RNA (1)...(19): siRNA sense strand
cggauuuccugagaagaua

SEQ ID NO: 1671942 - RNA, 19 nt, Homo sapiens
  misc_RNA (1)...(19): siRNA sense strand
gaguucggauuuccugaga

SEQ ID NO: 1671943 - RNA, 19 nt, Homo sapiens
  misc_RNA (1)...(19): siRNA sense strand
ucacaagaagaacagauaa

SEQ ID NO: 1671944 - RNA, 19 nt, Homo sapiens
  misc_RNA (1)...(19): siRNA sense strand
ucagagccauuacccuuuc

SEQ ID NO: 1671945 - RNA, 19 nt, Homo sapiens
  misc_RNA (1)...(19): siRNA sense strand
ugucaacacugucgcuaau

SEQ ID NO: 1671946 - RNA, 19 nt, Homo sapiens
  misc_RNA (1)...(19): siRNA sense strand
aaaagaacguugaaccaaa

SEQ ID NO: 1671947 - RNA, 19 nt, Homo sapiens
  misc_RNA (1)...(19): siRNA sense strand
gguugagaauaucuacaaa

SEQ ID NO: 1671948 - RNA, 19 nt, Homo sapiens
  misc_RNA (1)...(19): siRNA sense strand
guucagcccacuuguagaa

SEQ ID NO: 1671949 - RNA, 19 nt, Homo sapiens
  misc_RNA (1)...(19): siRNA sense strand
gaagaacagauaacaaagc

SEQ ID NO: 1671950 - RNA, 19 nt, Homo sapiens
  misc_RNA (1)...(19): siRNA sense strand
cuguauaccugcacaagug

SEQ ID NO: 1671951 - RNA, 19 nt, Homo sapiens
  misc_RNA (1)...(19): siRNA sense strand
gcauacaguguucuggaaa

SEQ ID NO: 1671952 - RNA, 19 nt, Homo sapiens
  misc_RNA (1)...(19): siRNA sense strand
gauggcagcauacaguguu

SEQ ID NO: 1671953 - RNA, 19 nt, Homo sapiens
  misc_RNA (1)...(19): siRNA sense strand
gaaaagaacguugaaccaa

SEQ ID NO: 1671954 - RNA, 19 nt, Homo sapiens
  misc_RNA (1)...(19): siRNA sense strand
guuaucgccuacuuggaaa

SEQ ID NO: 1671955 - RNA, 19 nt, Homo sapiens
  misc_RNA (1)...(19): siRNA sense strand
gaagaaauucacaggaaaa

SEQ ID NO: 1671956 - RNA, 19 nt, Homo sapiens
  misc_RNA (1)...(19): siRNA sense strand
aauaugcaauggauguaga

SEQ ID NO: 1671957 - RNA, 19 nt, Homo sapiens
  misc_RNA (1)...(19): siRNA sense strand
cugagaagauaacagugaa

SEQ ID NO: 1671958 - RNA, 19 nt, Homo sapiens
  misc_RNA (1)...(19): siRNA sense strand
ugcgauauuucacuccuaa

SEQ ID NO: 1671959 - RNA, 19 nt, Homo sapiens
  misc_RNA (1)...(19): siRNA sense strand
gucacaagaagaacagaua

SEQ ID NO: 1671960 - RNA, 19 nt, Homo sapiens
  misc_RNA (1)...(19): siRNA sense strand
gcgcugagagaaagcugua

SEQ ID NO: 1671961 - RNA, 19 nt, Homo sapiens
  misc_RNA (1)...(19): siRNA sense strand
gaaucuguacauccacaaa

SEQ ID NO: 1671962 - RNA, 19 nt, Homo sapiens
  misc_RNA (1)...(19): siRNA sense strand
caacacugucgcuaaugaa

SEQ ID NO: 1671963 - RNA, 19 nt, Homo sapiens
  misc_RNA (1)...(19): siRNA sense strand
gcuaaugaaguauacaagu

SEQ ID NO: 1671964 - RNA, 19 nt, Homo sapiens
  misc_RNA (1)...(19): siRNA sense strand
guucggauuuccugagaag

SEQ ID NO: 1671965 - RNA, 19 nt, Homo sapiens
  misc_RNA (1)...(19): siRNA sense strand
aauagcaaaucuccuugga

SEQ ID NO: 1671966 - RNA, 19 nt, Homo sapiens
  misc_RNA (1)...(19): siRNA sense strand
guuacagacugcagaggau

SEQ ID NO: 1671967 - RNA, 19 nt, Homo sapiens
  misc_RNA (1)...(19): siRNA sense strand
gcaccacgcgcugagagaa

SEQ ID NO: 1671968 - RNA, 19 nt, Homo sapiens
  misc_RNA (1)...(19): siRNA sense strand
ucucaacgugcauguagua

SEQ ID NO: 1671969 - RNA, 19 nt, Homo sapiens
  misc_RNA (1)...(19): siRNA sense strand
uacaaaucccuuaccaauu

SEQ ID NO: 1671970 - RNA, 19 nt, Homo sapiens
  misc_RNA (1)...(19): siRNA sense strand
gaugugcagguugagaaua

SEQ ID NO: 1671971 - RNA, 19 nt, Homo sapiens
  misc_RNA (1)...(19): siRNA sense strand
agaagguccgugugcuuua

SEQ ID NO: 1671972 - RNA, 19 nt, Homo sapiens
  misc_RNA (1)...(19): siRNA sense strand
uagaagguccgugugcuuu

SEQ ID NO: 1671973 - RNA, 19 nt, Homo sapiens
  misc_RNA (1)...(19): siRNA sense strand
guagaagguccgugugcuu

SEQ ID NO: 1671974 - RNA, 19 nt, Homo sapiens
  misc_RNA (1)...(19): siRNA sense strand
ccugagaagauaacaguga

SEQ ID NO: 1671975 - RNA, 19 nt, Homo sapiens
  misc_RNA (1)...(19): siRNA sense strand
gaaacugcagaagaaauuc

SEQ ID NO: 1671976 - RNA, 19 nt, Homo sapiens
  misc_RNA (1)...(19): siRNA sense strand
cguuaucgccuacuuggaa

SEQ ID NO: 1671977 - RNA, 19 nt, Homo sapiens
  misc_RNA (1)...(19): siRNA sense strand
aagaacagauaacaaagcu

SEQ ID NO: 1671978 - RNA, 19 nt, Homo sapiens
  misc_RNA (1)...(19): siRNA sense strand
gaaccaguaucuuuuacca

SEQ ID NO: 1671979 - RNA, 19 nt, Homo sapiens
  misc_RNA (1)...(19): siRNA sense strand
gagagaaagcuguauaccu

SEQ ID NO: 1671980 - RNA, 19 nt, Homo sapiens
  misc_RNA (1)...(19): siRNA sense strand
gcugcgauaugcucuucug

SEQ ID NO: 1671981 - RNA, 19 nt, Homo sapiens
  misc_RNA (1)...(19): siRNA sense strand
aggcuacgauauuuucuua

SEQ ID NO: 1671982 - RNA, 19 nt, Homo sapiens
  misc_RNA (1)...(19): siRNA sense strand
ggauuuccugagaagauaa

SEQ ID NO: 1671983 - RNA, 19 nt, Homo sapiens
  misc_RNA (1)...(19): siRNA sense strand
acaagaagaacagauaaca

SEQ ID NO: 1671984 - RNA, 19 nt, Homo sapiens
  misc_RNA (1)...(19): siRNA sense strand
ccucuugauacaaacaaua

SEQ ID NO: 1671985 - RNA, 19 nt, Homo sapiens
  misc_RNA (1)...(19): siRNA sense strand
gagaagauaacagugaaac

SEQ ID NO: 1671986 - RNA, 19 nt, Homo sapiens
  misc_RNA (1)...(19): siRNA sense strand
ugcgggugcuggagcuaua

SEQ ID NO: 1671987 - RNA, 19 nt, Homo sapiens
  misc_RNA (1)...(19): siRNA sense strand
uaucgccuacuuggaaaua

SEQ ID NO: 1671988 - RNA, 19 nt, Homo sapiens
  misc_RNA (1)...(19): siRNA sense strand
ccucacacacaguuacuug

SEQ ID NO: 1671989 - RNA, 19 nt, Homo sapiens
  misc_RNA (1)...(19): siRNA sense strand
aauugaaucuguacaucca

SEQ ID NO: 1671990 - RNA, 19 nt, Homo sapiens
  misc_RNA (1)...(19): siRNA sense strand
cuuaaacugcgauauuuca

SEQ ID NO: 1671991 - RNA, 19 nt, Homo sapiens
  misc_RNA (1)...(19): siRNA sense strand
gcaauggauguagaaaaua

SEQ ID NO: 1671992 - RNA, 19 nt, Homo sapiens
  misc_RNA (1)...(19): siRNA sense strand
gucagagccauuacccuuu

SEQ ID NO: 1671993 - RNA, 19 nt, Homo sapiens
  misc_RNA (1)...(19): siRNA sense strand
caaccucucuuggcauucc

SEQ ID NO: 1671994 - RNA, 19 nt, Homo sapiens
  misc_RNA (1)...(19): siRNA sense strand
ggaugugcagguugagaau

SEQ ID NO: 1671995 - RNA, 19 nt, Homo sapiens
  misc_RNA (1)...(19): siRNA sense strand
aagaugacacugacgugaa

SEQ ID NO: 1671996 - RNA, 19 nt, Homo sapiens
  misc_RNA (1)...(19): siRNA sense strand
cuacuuggaaauagucuca

SEQ ID NO: 1671997 - RNA, 19 nt, Homo sapiens
  misc_RNA (1)...(19): siRNA sense strand
aaacugcagaagaaauuca

SEQ ID NO: 1671998 - RNA, 19 nt, Homo sapiens
  misc_RNA (1)...(19): siRNA sense strand
augugcagguugagaauau

SEQ ID NO: 1671999 - RNA, 19 nt, Homo sapiens
  misc_RNA (1)...(19): siRNA sense strand
ccaaaggauauggaagcua

SEQ ID NO: 1672000 - RNA, 19 nt, Homo sapiens
  misc_RNA (1)...(19): siRNA sense strand
gcgauaugcucuucuguua

SEQ ID NO: 1672001 - RNA, 19 nt, Homo sapiens
  misc_RNA (1)...(19): siRNA sense strand
gauaugcucuucuguuaga

SEQ ID NO: 1672002 - RNA, 19 nt, Homo sapiens
  misc_RNA (1)...(19): siRNA sense strand
cagaagaaauucacaggaa

SEQ ID NO: 1672003 - RNA, 19 nt, Homo sapiens
  misc_RNA (1)...(19): siRNA sense strand
caaagucauugcugcgaua

SEQ ID NO: 1672004 - RNA, 19 nt, Homo sapiens
  misc_RNA (1)...(19): siRNA sense strand
gcuugaaacugcagaagaa

SEQ ID NO: 1672005 - RNA, 19 nt, Homo sapiens
  misc_RNA (1)...(19): siRNA sense strand
uugcaaagcuucagucaga

SEQ ID NO: 1672006 - RNA, 19 nt, Homo sapiens
  misc_RNA (1)...(19): siRNA sense strand
gaacguugaaccaaauauu

SEQ ID NO: 1672007 - RNA, 19 nt, Homo sapiens
  misc_RNA (1)...(19): siRNA sense strand
ucaacacugucgcuaauga

SEQ ID NO: 1672008 - RNA, 19 nt, Homo sapiens
  misc_RNA (1)...(19): siRNA sense strand
aaagaacguugaaccaaau

SEQ ID NO: 1672009 - RNA, 19 nt, Homo sapiens
  misc_RNA (1)...(19): siRNA sense strand
caaauucaaggcuacgaua

SEQ ID NO: 1672010 - RNA, 19 nt, Homo sapiens
  misc_RNA (1)...(19): siRNA sense strand
cagaggaugugcagguuga

SEQ ID NO: 1672011 - RNA, 19 nt, Homo sapiens
  misc_RNA (1)...(19): siRNA sense strand
agaagaaauucacaggaaa

SEQ ID NO: 1672012 - RNA, 19 nt, Homo sapiens
  misc_RNA (1)...(19): siRNA sense strand
gacgugaaccaguaucuuu

SEQ ID NO: 1672013 - RNA, 19 nt, Homo sapiens
  misc_RNA (1)...(19): siRNA sense strand
cuacaaaucccuuaccaau

SEQ ID NO: 1672014 - RNA, 19 nt, Homo sapiens
  misc_RNA (1)...(19): siRNA sense strand
uagcuuugauggcagcaua

SEQ ID NO: 1672015 - RNA, 19 nt, Homo sapiens
  misc_RNA (1)...(19): siRNA sense strand
gcucuucuguuagacauug

SEQ ID NO: 1672016 - RNA, 19 nt, Homo sapiens
  misc_RNA (1)...(19): siRNA sense strand
cacugucgcuaaugaagua

SEQ ID NO: 1672017 - RNA, 19 nt, Homo sapiens
  misc_RNA (1)...(19): siRNA sense strand
ugaaacugcagaagaaauu

SEQ ID NO: 1672018 - RNA, 19 nt, Homo sapiens
  misc_RNA (1)...(19): siRNA sense strand
gcugagagaaagcuguaua

SEQ ID NO: 1672019 - RNA, 19 nt, Homo sapiens
  misc_RNA (1)...(19): siRNA sense strand
gaagauaacagugaaacag

SEQ ID NO: 1672020 - RNA, 19 nt, Homo sapiens
  misc_RNA (1)...(19): siRNA sense strand
auucaaggcuacgauauuu

SEQ ID NO: 1672021 - RNA, 19 nt, Homo sapiens
  misc_RNA (1)...(19): siRNA sense strand
gauauuucacuccuaaaga

SEQ ID NO: 1672022 - RNA, 19 nt, Homo sapiens
  misc_RNA (1)...(19): siRNA sense strand
auagugaucucucugugaa

SEQ ID NO: 1672023 - RNA, 19 nt, Homo sapiens
  misc_RNA (1)...(19): siRNA sense strand
caacgugcauguaguagcu

SEQ ID NO: 1672024 - RNA, 19 nt, Homo sapiens
  misc_RNA (1)...(19): siRNA sense strand
agaaauagcaaaucuccuu

SEQ ID NO: 1672025 - RNA, 19 nt, Homo sapiens
  misc_RNA (1)...(19): siRNA sense strand
gauagugaucucucuguga

SEQ ID NO: 1672026 - RNA, 19 nt, Homo sapiens
  misc_RNA (1)...(19): siRNA sense strand
caagaagaacagauaacaa

SEQ ID NO: 1672027 - RNA, 19 nt, Homo sapiens
  misc_RNA (1)...(19): siRNA sense strand
gaagguccgugugcuuuac

SEQ ID NO: 1672028 - RNA, 19 nt, Homo sapiens
  misc_RNA (1)...(19): siRNA sense strand
cggauuuccugagaagaua

SEQ ID NO: 1672029 - RNA, 19 nt, Homo sapiens
  misc_RNA (1)...(19): siRNA sense strand
gaguucggauuuccugaga

SEQ ID NO: 1672030 - RNA, 19 nt, Homo sapiens
  misc_RNA (1)...(19): siRNA sense strand
ucacaagaagaacagauaa

SEQ ID NO: 1672031 - RNA, 19 nt, Homo sapiens
  misc_RNA (1)...(19): siRNA sense strand
ucagagccauuacccuuuc

SEQ ID NO: 1672032 - RNA, 19 nt, Homo sapiens
  misc_RNA (1)...(19): siRNA sense strand
ugucaacacugucgcuaau

SEQ ID NO: 1672033 - RNA, 19 nt, Homo sapiens
  misc_RNA (1)...(19): siRNA sense strand
aaaagaacguugaaccaaa

SEQ ID NO: 1672034 - RNA, 19 nt, Homo sapiens
  misc_RNA (1)...(19): siRNA sense strand
gguugagaauaucuacaaa

SEQ ID NO: 1672035 - RNA, 19 nt, Homo sapiens
  misc_RNA (1)...(19): siRNA sense strand
guucagcccacuuguagaa

SEQ ID NO: 1672036 - RNA, 19 nt, Homo sapiens
  misc_RNA (1)...(19): siRNA sense strand
gaagaacagauaacaaagc

SEQ ID NO: 1672037 - RNA, 19 nt, Homo sapiens
  misc_RNA (1)...(19): siRNA sense strand
cuguauaccugcacaagug

SEQ ID NO: 1672038 - RNA, 19 nt, Homo sapiens
  misc_RNA (1)...(19): siRNA sense strand
gcauacaguguucuggaaa

SEQ ID NO: 1672039 - RNA, 19 nt, Homo sapiens
  misc_RNA (1)...(19): siRNA sense strand
gauggcagcauacaguguu

SEQ ID NO: 1672040 - RNA, 19 nt, Homo sapiens
  misc_RNA (1)...(19): siRNA sense strand
gaaaagaacguugaaccaa

SEQ ID NO: 1672041 - RNA, 19 nt, Homo sapiens
  misc_RNA (1)...(19): siRNA sense strand
guuaucgccuacuuggaaa

SEQ ID NO: 1672042 - RNA, 19 nt, Homo sapiens
  misc_RNA (1)...(19): siRNA sense strand
gaagaaauucacaggaaaa

SEQ ID NO: 1672043 - RNA, 19 nt, Homo sapiens
  misc_RNA (1)...(19): siRNA sense strand
aauaugcaauggauguaga

SEQ ID NO: 1672044 - RNA, 19 nt, Homo sapiens
  misc_RNA (1)...(19): siRNA sense strand
cugagaagauaacagugaa

SEQ ID NO: 1672045 - RNA, 19 nt, Homo sapiens
  misc_RNA (1)...(19): siRNA sense strand
ugcgauauuucacuccuaa

SEQ ID NO: 1672046 - RNA, 19 nt, Homo sapiens
  misc_RNA (1)...(19): siRNA sense strand
gucacaagaagaacagaua

SEQ ID NO: 1672047 - RNA, 19 nt, Homo sapiens
  misc_RNA (1)...(19): siRNA sense strand
gcgcugagagaaagcugua

SEQ ID NO: 1672048 - RNA, 19 nt, Homo sapiens
  misc_RNA (1)...(19): siRNA sense strand
gaaucuguacauccacaaa

SEQ ID NO: 1672049 - RNA, 19 nt, Homo sapiens
  misc_RNA (1)...(19): siRNA sense strand
caacacugucgcuaaugaa

SEQ ID NO: 1672050 - RNA, 19 nt, Homo sapiens
  misc_RNA (1)...(19): siRNA sense strand
gcuaaugaaguauacaagu

SEQ ID NO: 1672051 - RNA, 19 nt, Homo sapiens
  misc_RNA (1)...(19): siRNA sense strand
guucggauuuccugagaag

SEQ ID NO: 1672052 - RNA, 19 nt, Homo sapiens
  misc_RNA (1)...(19): siRNA sense strand
aauagcaaaucuccuugga

SEQ ID NO: 1672053 - RNA, 19 nt, Homo sapiens
  misc_RNA (1)...(19): siRNA sense strand
guuacagacugcagaggau

SEQ ID NO: 1672054 - RNA, 19 nt, Homo sapiens
  misc_RNA (1)...(19): siRNA sense strand
gcaccacgcgcugagagaa

SEQ ID NO: 1672055 - RNA, 19 nt, Homo sapiens
  misc_RNA (1)...(19): siRNA sense strand
ucucaacgugcauguagua

SEQ ID NO: 1672056 - RNA, 19 nt, Homo sapiens
  misc_RNA (1)...(19): siRNA sense strand
uacaaaucccuuaccaauu

SEQ ID NO: 1672057 - RNA, 19 nt, Homo sapiens
  misc_RNA (1)...(19): siRNA sense strand
gaugugcagguugagaaua

SEQ ID NO: 1672058 - RNA, 19 nt, Homo sapiens
  misc_RNA (1)...(19): siRNA sense strand
agaagguccgugugcuuua

SEQ ID NO: 1672059 - RNA, 19 nt, Homo sapiens
  misc_RNA (1)...(19): siRNA sense strand
uagaagguccgugugcuuu

SEQ ID NO: 1672060 - RNA, 19 nt, Homo sapiens
  misc_RNA (1)...(19): siRNA sense strand
guagaagguccgugugcuu

SEQ ID NO: 1672061 - RNA, 19 nt, Homo sapiens
  misc_RNA (1)...(19): siRNA sense strand
ccugagaagauaacaguga

SEQ ID NO: 1672062 - RNA, 19 nt, Homo sapiens
  misc_RNA (1)...(19): siRNA sense strand
gaaacugcagaagaaauuc

SEQ ID NO: 1672063 - RNA, 19 nt, Homo sapiens
  misc_RNA (1)...(19): siRNA sense strand
cguuaucgccuacuuggaa

SEQ ID NO: 1672064 - RNA, 19 nt, Homo sapiens
  misc_RNA (1)...(19): siRNA sense strand
aagaacagauaacaaagcu

SEQ ID NO: 1672065 - RNA, 19 nt, Homo sapiens
  misc_RNA (1)...(19): siRNA sense strand
gaaccaguaucuuuuacca

SEQ ID NO: 1672066 - RNA, 19 nt, Homo sapiens
  misc_RNA (1)...(19): siRNA sense strand
gagagaaagcuguauaccu

SEQ ID NO: 1672067 - RNA, 19 nt, Homo sapiens
  misc_RNA (1)...(19): siRNA sense strand
gcugcgauaugcucuucug

SEQ ID NO: 1672068 - RNA, 19 nt, Homo sapiens
  misc_RNA (1)...(19): siRNA sense strand
aggcuacgauauuuucuua

SEQ ID NO: 1672069 - RNA, 19 nt, Homo sapiens
  misc_RNA (1)...(19): siRNA sense strand
ggauuuccugagaagauaa

SEQ ID NO: 1672070 - RNA, 19 nt, Homo sapiens
  misc_RNA (1)...(19): siRNA sense strand
acaagaagaacagauaaca

SEQ ID NO: 1672071 - RNA, 19 nt, Homo sapiens
  misc_RNA (1)...(19): siRNA sense strand
ccucuugauacaaacaaua

SEQ ID NO: 1672072 - RNA, 19 nt, Homo sapiens
  misc_RNA (1)...(19): siRNA sense strand
gagaagauaacagugaaac

SEQ ID NO: 1672073 - RNA, 19 nt, Homo sapiens
  misc_RNA (1)...(19): siRNA sense strand
ugcgggugcuggagcuaua

SEQ ID NO: 1672074 - RNA, 19 nt, Homo sapiens
  misc_RNA (1)...(19): siRNA sense strand
uaucgccuacuuggaaaua

SEQ ID NO: 1672075 - RNA, 19 nt, Homo sapiens
  misc_RNA (1)...(19): siRNA sense strand
ccucacacacaguuacuug

SEQ ID NO: 1672076 - RNA, 19 nt, Homo sapiens
  misc_RNA (1)...(19): siRNA sense strand
aauugaaucuguacaucca

SEQ ID NO: 1672077 - RNA, 19 nt, Homo sapiens
  misc_RNA (1)...(19): siRNA sense strand
cuuaaacugcgauauuuca

SEQ ID NO: 1672078 - RNA, 19 nt, Homo sapiens
  misc_RNA (1)...(19): siRNA sense strand
gcaauggauguagaaaaua

SEQ ID NO: 1672079 - RNA, 19 nt, Homo sapiens
  misc_RNA (1)...(19): siRNA sense strand
gucagagccauuacccuuu

SEQ ID NO: 1672080 - RNA, 19 nt, Homo sapiens
  misc_RNA (1)...(19): siRNA sense strand
caaccucucuuggcauucc

SEQ ID NO: 1672081 - RNA, 19 nt, Homo sapiens
  misc_RNA (1)...(19): siRNA sense strand
ggaugugcagguugagaau

SEQ ID NO: 1672082 - RNA, 19 nt, Homo sapiens
  misc_RNA (1)...(19): siRNA sense strand
aagaugacacugacgugaa

SEQ ID NO: 1672083 - RNA, 19 nt, Homo sapiens
  misc_RNA (1)...(19): siRNA sense strand
cuacuuggaaauagucuca

SEQ ID NO: 1672084 - RNA, 19 nt, Homo sapiens
  misc_RNA (1)...(19): siRNA sense strand
aaacugcagaagaaauuca

SEQ ID NO: 1672085 - RNA, 19 nt, Homo sapiens
  misc_RNA (1)...(19): siRNA sense strand
augugcagguugagaauau

SEQ ID NO: 1672086 - RNA, 19 nt, Homo sapiens
  misc_RNA (1)...(19): siRNA sense strand
ccaaaggauauggaagcua

SEQ ID NO: 1672087 - RNA, 19 nt, Homo sapiens
  misc_RNA (1)...(19): siRNA sense strand
ucaacacugucgcuaauga

SEQ ID NO: 1672088 - RNA, 19 nt, Homo sapiens
  misc_RNA (1)...(19): siRNA sense strand
cacugucgcuaaugaagua

SEQ ID NO: 1672089 - RNA, 19 nt, Homo sapiens
  misc_RNA (1)...(19): siRNA sense strand
gcugagagaaagcuguaua

SEQ ID NO: 1672090 - RNA, 19 nt, Homo sapiens
  misc_RNA (1)...(19): siRNA sense strand
ugucaacacugucgcuaau

SEQ ID NO: 1672091 - RNA, 19 nt, Homo sapiens
  misc_RNA (1)...(19): siRNA sense strand
cuguauaccugcacaagug

SEQ ID NO: 1672092 - RNA, 19 nt, Homo sapiens
  misc_RNA (1)...(19): siRNA sense strand
gcgcugagagaaagcugua

SEQ ID NO: 1672093 - RNA, 19 nt, Homo sapiens
  misc_RNA (1)...(19): siRNA sense strand
caacacugucgcuaaugaa

SEQ ID NO: 1672094 - RNA, 19 nt, Homo sapiens
  misc_RNA (1)...(19): siRNA sense strand
gcuaaugaaguauacaagu

SEQ ID NO: 1672095 - RNA, 19 nt, Homo sapiens
  misc_RNA (1)...(19): siRNA sense strand
gcaccacgcgcugagagaa

SEQ ID NO: 1672096 - RNA, 19 nt, Homo sapiens
  misc_RNA (1)...(19): siRNA sense strand
gagagaaagcuguauaccu

SEQ ID NO: 1672097 - RNA, 19 nt, Homo sapiens
  misc_RNA (1)...(19): siRNA sense strand
ugcgggugcuggagcuaua

SEQ ID NO: 1672098 - RNA, 19 nt, Homo sapiens
  misc_RNA (1)...(19): siRNA sense strand
ccucacacacaguuacuug

SEQ ID NO: 1672099 - RNA, 19 nt, Homo sapiens
  misc_RNA (1)...(19): siRNA sense strand
ucaacacugucgcuaauga

SEQ ID NO: 1672100 - RNA, 19 nt, Homo sapiens
  misc_RNA (1)...(19): siRNA sense strand
cacugucgcuaaugaagua

SEQ ID NO: 1672101 - RNA, 19 nt, Homo sapiens
  misc_RNA (1)...(19): siRNA sense strand
gcugagagaaagcuguaua

SEQ ID NO: 1672102 - RNA, 19 nt, Homo sapiens
  misc_RNA (1)...(19): siRNA sense strand
ugucaacacugucgcuaau

SEQ ID NO: 1672103 - RNA, 19 nt, Homo sapiens
  misc_RNA (1)...(19): siRNA sense strand
cuguauaccugcacaagug

SEQ ID NO: 1672104 - RNA, 19 nt, Homo sapiens
  misc_RNA (1)...(19): siRNA sense strand
gcgcugagagaaagcugua

SEQ ID NO: 1672105 - RNA, 19 nt, Homo sapiens
  misc_RNA (1)...(19): siRNA sense strand
caacacugucgcuaaugaa

SEQ ID NO: 1672106 - RNA, 19 nt, Homo sapiens
  misc_RNA (1)...(19): siRNA sense strand
gcuaaugaaguauacaagu

SEQ ID NO: 1672107 - RNA, 19 nt, Homo sapiens
  misc_RNA (1)...(19): siRNA sense strand
gcaccacgcgcugagagaa

SEQ ID NO: 1672108 - RNA, 19 nt, Homo sapiens
  misc_RNA (1)...(19): siRNA sense strand
gagagaaagcuguauaccu

SEQ ID NO: 1672109 - RNA, 19 nt, Homo sapiens
  misc_RNA (1)...(19): siRNA sense strand
ugcgggugcuggagcuaua

SEQ ID NO: 1672110 - RNA, 19 nt, Homo sapiens
  misc_RNA (1)...(19): siRNA sense strand
ccucacacacaguuacuug

SEQ ID NO: 1672111 - RNA, 19 nt, Homo sapiens
  misc_RNA (1)...(19): siRNA sense strand
uugcaaagcuucagucaga

SEQ ID NO: 1672112 - RNA, 19 nt, Homo sapiens
  misc_RNA (1)...(19): siRNA sense strand
ucaacacugucgcuaauga

SEQ ID NO: 1672113 - RNA, 19 nt, Homo sapiens
  misc_RNA (1)...(19): siRNA sense strand
caaauucaaggcuacgaua

SEQ ID NO: 1672114 - RNA, 19 nt, Homo sapiens
  misc_RNA (1)...(19): siRNA sense strand
cacugucgcuaaugaagua

SEQ ID NO: 1672115 - RNA, 19 nt, Homo sapiens
  misc_RNA (1)...(19): siRNA sense strand
gcugagagaaagcuguaua

SEQ ID NO: 1672116 - RNA, 19 nt, Homo sapiens
  misc_RNA (1)...(19): siRNA sense strand
auucaaggcuacgauauuu

SEQ ID NO: 1672117 - RNA, 19 nt, Homo sapiens
  misc_RNA (1)...(19): siRNA sense strand
ugucaacacugucgcuaau

SEQ ID NO: 1672118 - RNA, 19 nt, Homo sapiens
  misc_RNA (1)...(19): siRNA sense strand
ucagagccauuacccuuuc

SEQ ID NO: 1672119 - RNA, 19 nt, Homo sapiens
  misc_RNA (1)...(19): siRNA sense strand
cuguauaccugcacaagug

SEQ ID NO: 1672120 - RNA, 19 nt, Homo sapiens
  misc_RNA (1)...(19): siRNA sense strand
gcgcugagagaaagcugua

SEQ ID NO: 1672121 - RNA, 19 nt, Homo sapiens
  misc_RNA (1)...(19): siRNA sense strand
caacacugucgcuaaugaa

SEQ ID NO: 1672122 - RNA, 19 nt, Homo sapiens
  misc_RNA (1)...(19): siRNA sense strand
gcuaaugaaguauacaagu

SEQ ID NO: 1672123 - RNA, 19 nt, Homo sapiens
  misc_RNA (1)...(19): siRNA sense strand
gcaccacgcgcugagagaa

SEQ ID NO: 1672124 - RNA, 19 nt, Homo sapiens
  misc_RNA (1)...(19): siRNA sense strand
gagagaaagcuguauaccu

SEQ ID NO: 1672125 - RNA, 19 nt, Homo sapiens
  misc_RNA (1)...(19): siRNA sense strand
ccucuugauacaaacaaua

SEQ ID NO: 1672126 - RNA, 19 nt, Homo sapiens
  misc_RNA (1)...(19): siRNA sense strand
aggcuacgauauuuucuua

SEQ ID NO: 1672127 - RNA, 19 nt, Homo sapiens
  misc_RNA (1)...(19): siRNA sense strand
ugcgggugcuggagcuaua

SEQ ID NO: 1672128 - RNA, 19 nt, Homo sapiens
  misc_RNA (1)...(19): siRNA sense strand
ccucacacacaguuacuug

SEQ ID NO: 1672129 - RNA, 19 nt, Homo sapiens
  misc_RNA (1)...(19): siRNA sense strand
caaccucucuuggcauucc

SEQ ID NO: 1672130 - RNA, 19 nt, Homo sapiens
  misc_RNA (1)...(19): siRNA sense strand
gucagagccauuacccuuu

SEQ ID NO: 1672131 - RNA, 19 nt, Homo sapiens
  misc_RNA (1)...(19): siRNA sense strand
guaggaagaugguugaguu

SEQ ID NO: 1672132 - RNA, 19 nt, Homo sapiens
  misc_RNA (1)...(19): siRNA sense strand
gaagaugguugaguugguu

SEQ ID NO: 1672133 - RNA, 19 nt, Homo sapiens
  misc_RNA (1)...(19): siRNA sense strand
gagaguguccucagaaauu

SEQ ID NO: 1672134 - RNA, 19 nt, Homo sapiens
  misc_RNA (1)...(19): siRNA sense strand
gggaggagcugaguauguu

SEQ ID NO: 1672135 - RNA, 19 nt, Homo sapiens
  misc_RNA (1)...(19): siRNA sense strand
cagaaaugcuggagagugu

SEQ ID NO: 1672136 - RNA, 19 nt, Homo sapiens
  misc_RNA (1)...(19): siRNA sense strand
gaaaccagcuaugugaaag

SEQ ID NO: 1672137 - RNA, 19 nt, Homo sapiens
  misc_RNA (1)...(19): siRNA sense strand
ccagggagccggucacaaa

SEQ ID NO: 1672138 - RNA, 19 nt, Homo sapiens
  misc_RNA (1)...(19): siRNA sense strand
gaaauugccaggacuucuu

SEQ ID NO: 1672139 - RNA, 19 nt, Homo sapiens
  misc_RNA (1)...(19): siRNA sense strand
gugaaaguccugcaccaua

SEQ ID NO: 1672140 - RNA, 19 nt, Homo sapiens
  misc_RNA (1)...(19): siRNA sense strand
ggacuucuuucccgugauc

SEQ ID NO: 1672141 - RNA, 19 nt, Homo sapiens
  misc_RNA (1)...(19): siRNA sense strand
ccaagggcccucauugaaa

SEQ ID NO: 1672142 - RNA, 19 nt, Homo sapiens
  misc_RNA (1)...(19): siRNA sense strand
ggaagaugguugaguuggu

SEQ ID NO: 1672143 - RNA, 19 nt, Homo sapiens
  misc_RNA (1)...(19): siRNA sense strand
cagcaaagccuccgaguac

SEQ ID NO: 1672144 - RNA, 19 nt, Homo sapiens
  misc_RNA (1)...(19): siRNA sense strand
gagaaccucacauuuccua

SEQ ID NO: 1672145 - RNA, 19 nt, Homo sapiens
  misc_RNA (1)...(19): siRNA sense strand
gcacugcaagccugaagaa

SEQ ID NO: 1672146 - RNA, 19 nt, Homo sapiens
  misc_RNA (1)...(19): siRNA sense strand
gcagcaaucaguaggaaga

SEQ ID NO: 1672147 - RNA, 19 nt, Homo sapiens
  misc_RNA (1)...(19): siRNA sense strand
gagagagggagaagaguga

SEQ ID NO: 1672148 - RNA, 19 nt, Homo sapiens
  misc_RNA (1)...(19): siRNA sense strand
caagggcccucauugaaac

SEQ ID NO: 1672149 - RNA, 19 nt, Homo sapiens
  misc_RNA (1)...(19): siRNA sense strand
gauaaucguccuggccaua

SEQ ID NO: 1672150 - RNA, 19 nt, Homo sapiens
  misc_RNA (1)...(19): siRNA sense strand
gcaaagccuccgaguacuu

SEQ ID NO: 1672151 - RNA, 19 nt, Homo sapiens
  misc_RNA (1)...(19): siRNA sense strand
ugaaaguccugcaccauac

SEQ ID NO: 1672152 - RNA, 19 nt, Homo sapiens
  misc_RNA (1)...(19): siRNA sense strand
guggagaaccucacauuuc

SEQ ID NO: 1672153 - RNA, 19 nt, Homo sapiens
  misc_RNA (1)...(19): siRNA sense strand
ugguugaguugguucauuu

SEQ ID NO: 1672154 - RNA, 19 nt, Homo sapiens
  misc_RNA (1)...(19): siRNA sense strand
ugaaaccagcuaugugaaa

SEQ ID NO: 1672155 - RNA, 19 nt, Homo sapiens
  misc_RNA (1)...(19): siRNA sense strand
ggucacaaaggcagaaaug

SEQ ID NO: 1672156 - RNA, 19 nt, Homo sapiens
  misc_RNA (1)...(19): siRNA sense strand
gcuggagaguguccucaga

SEQ ID NO: 1672157 - RNA, 19 nt, Homo sapiens
  misc_RNA (1)...(19): siRNA sense strand
gguggagaaccucacauuu

SEQ ID NO: 1672158 - RNA, 19 nt, Homo sapiens
  misc_RNA (1)...(19): siRNA sense strand
uggagaguguccucagaaa

SEQ ID NO: 1672159 - RNA, 19 nt, Homo sapiens
  misc_RNA (1)...(19): siRNA sense strand
ggagaguguccucagaaau

SEQ ID NO: 1672160 - RNA, 19 nt, Homo sapiens
  misc_RNA (1)...(19): siRNA sense strand
caaagccuccgaguacuug

SEQ ID NO: 1672161 - RNA, 19 nt, Homo sapiens
  misc_RNA (1)...(19): siRNA sense strand
agaguguccucagaaauug

SEQ ID NO: 1672162 - RNA, 19 nt, Homo sapiens
  misc_RNA (1)...(19): siRNA sense strand
accaucaacuacacucuuu

SEQ ID NO: 1672163 - RNA, 19 nt, Homo sapiens
  misc_RNA (1)...(19): siRNA sense strand
gaaaguccugcaccauaca

SEQ ID NO: 1672164 - RNA, 19 nt, Homo sapiens
  misc_RNA (1)...(19): siRNA sense strand
gcaugaacgggcuuugaga

SEQ ID NO: 1672165 - RNA, 19 nt, Homo sapiens
  misc_RNA (1)...(19): siRNA sense strand
aaagaucgguggagaaccu

SEQ ID NO: 1672166 - RNA, 19 nt, Homo sapiens
  misc_RNA (1)...(19): siRNA sense strand
gccuccagcuucucgacua

SEQ ID NO: 1672167 - RNA, 19 nt, Homo sapiens
  misc_RNA (1)...(19): siRNA sense strand
gguccaagggcccucauug

SEQ ID NO: 1672168 - RNA, 19 nt, Homo sapiens
  misc_RNA (1)...(19): siRNA sense strand
gggcgacaaucaggucaug

SEQ ID NO: 1672169 - RNA, 19 nt, Homo sapiens
  misc_RNA (1)...(19): siRNA sense strand
cgacuaccaucaacuacac

SEQ ID NO: 1672170 - RNA, 19 nt, Homo sapiens
  misc_RNA (1)...(19): siRNA sense strand
guacuugcagcuggucuuu

SEQ ID NO: 1672171 - RNA, 19 nt, Homo sapiens
  misc_RNA (1)...(19): siRNA sense strand
aagcagcaaucaguaggaa

SEQ ID NO: 1672172 - RNA, 19 nt, Homo sapiens
  misc_RNA (1)...(19): siRNA sense strand
guccaagggcccucauuga

SEQ ID NO: 1672173 - RNA, 19 nt, Homo sapiens
  misc_RNA (1)...(19): siRNA sense strand
ucagcaaagccuccgagua

SEQ ID NO: 1672174 - RNA, 19 nt, Homo sapiens
  misc_RNA (1)...(19): siRNA sense strand
cccgugaucuucagcaaag

SEQ ID NO: 1672175 - RNA, 19 nt, Homo sapiens
  misc_RNA (1)...(19): siRNA sense strand
gcaccauacacuaaagauc

SEQ ID NO: 1672176 - RNA, 19 nt, Homo sapiens
  misc_RNA (1)...(19): siRNA sense strand
guccugcaccauacacuaa

SEQ ID NO: 1672177 - RNA, 19 nt, Homo sapiens
  misc_RNA (1)...(19): siRNA sense strand
uccaagggcccucauugaa

SEQ ID NO: 1672178 - RNA, 19 nt, Homo sapiens
  misc_RNA (1)...(19): siRNA sense strand
ucaguaggaagaugguuga

SEQ ID NO: 1672179 - RNA, 19 nt, Homo sapiens
  misc_RNA (1)...(19): siRNA sense strand
uggagaaccucacauuucc

SEQ ID NO: 1672180 - RNA, 19 nt, Homo sapiens
  misc_RNA (1)...(19): siRNA sense strand
uaaucguccuggccauaau

SEQ ID NO: 1672181 - RNA, 19 nt, Homo sapiens
  misc_RNA (1)...(19): siRNA sense strand
aaauugccaggacuucuuu

SEQ ID NO: 1672182 - RNA, 19 nt, Homo sapiens
  misc_RNA (1)...(19): siRNA sense strand
ucucgacuaccaucaacua

SEQ ID NO: 1672183 - RNA, 19 nt, Homo sapiens
  misc_RNA (1)...(19): siRNA sense strand
ugaguauguuggagguguu

SEQ ID NO: 1672184 - RNA, 19 nt, Homo sapiens
  misc_RNA (1)...(19): siRNA sense strand
aaucaggucaugcccaaga

SEQ ID NO: 1672185 - RNA, 19 nt, Homo sapiens
  misc_RNA (1)...(19): siRNA sense strand
guuccaagcagcaaucagu

SEQ ID NO: 1672186 - RNA, 19 nt, Homo sapiens
  misc_RNA (1)...(19): siRNA sense strand
ucacaaaggcagaaaugcu

SEQ ID NO: 1672187 - RNA, 19 nt, Homo sapiens
  misc_RNA (1)...(19): siRNA sense strand
gaagaggaggggccaagaa

SEQ ID NO: 1672188 - RNA, 19 nt, Homo sapiens
  misc_RNA (1)...(19): siRNA sense strand
ggccauaaucgcaauagag

SEQ ID NO: 1672189 - RNA, 19 nt, Homo sapiens
  misc_RNA (1)...(19): siRNA sense strand
ggaguccgaguuccaagca

SEQ ID NO: 1672190 - RNA, 19 nt, Homo sapiens
  misc_RNA (1)...(19): siRNA sense strand
auugaaaccagcuauguga

SEQ ID NO: 1672191 - RNA, 19 nt, Homo sapiens
  misc_RNA (1)...(19): siRNA sense strand
guauguuggagguguuuga

SEQ ID NO: 1672192 - RNA, 19 nt, Homo sapiens
  misc_RNA (1)...(19): siRNA sense strand
ggaggagcugaguauguug

SEQ ID NO: 1672193 - RNA, 19 nt, Homo sapiens
  misc_RNA (1)...(19): siRNA sense strand
gaaguuaccuuauuggauu

SEQ ID NO: 1672194 - RNA, 19 nt, Homo sapiens
  misc_RNA (1)...(19): siRNA sense strand
cuaaagaagucacaagaua

SEQ ID NO: 1672195 - RNA, 19 nt, Homo sapiens
  misc_RNA (1)...(19): siRNA sense strand
gaacaucauucacuuggaa

SEQ ID NO: 1672196 - RNA, 19 nt, Homo sapiens
  misc_RNA (1)...(19): siRNA sense strand
ggucugggaugaaguauuu

SEQ ID NO: 1672197 - RNA, 19 nt, Homo sapiens
  misc_RNA (1)...(19): siRNA sense strand
gaaugaaguuaccuuauug

SEQ ID NO: 1672198 - RNA, 19 nt, Homo sapiens
  misc_RNA (1)...(19): siRNA sense strand
gaacuuggguggauagcaa

SEQ ID NO: 1672199 - RNA, 19 nt, Homo sapiens
  misc_RNA (1)...(19): siRNA sense strand
gagauuaaauucaccuuga

SEQ ID NO: 1672200 - RNA, 19 nt, Homo sapiens
  misc_RNA (1)...(19): siRNA sense strand
cgaaugaaguuaccuuauu

SEQ ID NO: 1672201 - RNA, 19 nt, Homo sapiens
  misc_RNA (1)...(19): siRNA sense strand
gcaauugccuaucguaaau

SEQ ID NO: 1672202 - RNA, 19 nt, Homo sapiens
  misc_RNA (1)...(19): siRNA sense strand
cagaauaacuggcuacgaa

SEQ ID NO: 1672203 - RNA, 19 nt, Homo sapiens
  misc_RNA (1)...(19): siRNA sense strand
uauaggaguuggugaauuu

SEQ ID NO: 1672204 - RNA, 19 nt, Homo sapiens
  misc_RNA (1)...(19): siRNA sense strand
ggagagacuuccugaguga

SEQ ID NO: 1672205 - RNA, 19 nt, Homo sapiens
  misc_RNA (1)...(19): siRNA sense strand
ugaauucucugcuguggua

SEQ ID NO: 1672206 - RNA, 19 nt, Homo sapiens
  misc_RNA (1)...(19): siRNA sense strand
guacgaagaucccaaccaa

SEQ ID NO: 1672207 - RNA, 19 nt, Homo sapiens
  misc_RNA (1)...(19): siRNA sense strand
gaagucaaguauuaugaga

SEQ ID NO: 1672208 - RNA, 19 nt, Homo sapiens
  misc_RNA (1)...(19): siRNA sense strand
gagaggcccuauugggaua

SEQ ID NO: 1672209 - RNA, 19 nt, Homo sapiens
  misc_RNA (1)...(19): siRNA sense strand
ggacauuggugacagaauc

SEQ ID NO: 1672210 - RNA, 19 nt, Homo sapiens
  misc_RNA (1)...(19): siRNA sense strand
caaagagcguuucaucaga

SEQ ID NO: 1672211 - RNA, 19 nt, Homo sapiens
  misc_RNA (1)...(19): siRNA sense strand
gaaucaagguguaagaaca

SEQ ID NO: 1672212 - RNA, 19 nt, Homo sapiens
  misc_RNA (1)...(19): siRNA sense strand
caacaacucagaagagaaa

SEQ ID NO: 1672213 - RNA, 19 nt, Homo sapiens
  misc_RNA (1)...(19): siRNA sense strand
ggguguauauugagauuaa

SEQ ID NO: 1672214 - RNA, 19 nt, Homo sapiens
  misc_RNA (1)...(19): siRNA sense strand
gcucagaggguguauauug

SEQ ID NO: 1672215 - RNA, 19 nt, Homo sapiens
  misc_RNA (1)...(19): siRNA sense strand
gauggcagauuuacaguca

SEQ ID NO: 1672216 - RNA, 19 nt, Homo sapiens
  misc_RNA (1)...(19): siRNA sense strand
caacgaugcugccucuaug

SEQ ID NO: 1672217 - RNA, 19 nt, Homo sapiens
  misc_RNA (1)...(19): siRNA sense strand
gaagagaaacauuugaauc

SEQ ID NO: 1672218 - RNA, 19 nt, Homo sapiens
  misc_RNA (1)...(19): siRNA sense strand
cgagacaucugugaacuug

SEQ ID NO: 1672219 - RNA, 19 nt, Homo sapiens
  misc_RNA (1)...(19): siRNA sense strand
uggaguagcccucagaaua

SEQ ID NO: 1672220 - RNA, 19 nt, Homo sapiens
  misc_RNA (1)...(19): siRNA sense strand
gaacccaaaugcagcagau

SEQ ID NO: 1672221 - RNA, 19 nt, Homo sapiens
  misc_RNA (1)...(19): siRNA sense strand
ugaggaaggcuaucgguua

SEQ ID NO: 1672222 - RNA, 19 nt, Homo sapiens
  misc_RNA (1)...(19): siRNA sense strand
gauuaaagccauugaggaa

SEQ ID NO: 1672223 - RNA, 19 nt, Homo sapiens
  misc_RNA (1)...(19): siRNA sense strand
ggguaauccuggaauauga

SEQ ID NO: 1672224 - RNA, 19 nt, Homo sapiens
  misc_RNA (1)...(19): siRNA sense strand
ucugaaagcugguuauaca

SEQ ID NO: 1672225 - RNA, 19 nt, Homo sapiens
  misc_RNA (1)...(19): siRNA sense strand
cguuuaaccuguacuacua

SEQ ID NO: 1672226 - RNA, 19 nt, Homo sapiens
  misc_RNA (1)...(19): siRNA sense strand
gcagcaccaucauccauug

SEQ ID NO: 1672227 - RNA, 19 nt, Homo sapiens
  misc_RNA (1)...(19): siRNA sense strand
gaggguguauauugagauu

SEQ ID NO: 1672228 - RNA, 19 nt, Homo sapiens
  misc_RNA (1)...(19): siRNA sense strand
guucgaggcuccuguguca

SEQ ID NO: 1672229 - RNA, 19 nt, Homo sapiens
  misc_RNA (1)...(19): siRNA sense strand
ggaagugaguaucauggau

SEQ ID NO: 1672230 - RNA, 19 nt, Homo sapiens
  misc_RNA (1)...(19): siRNA sense strand
uaacagaguacauggagaa

SEQ ID NO: 1672231 - RNA, 19 nt, Homo sapiens
  misc_RNA (1)...(19): siRNA sense strand
gaucauaacagaguacaug

SEQ ID NO: 1672232 - RNA, 19 nt, Homo sapiens
  misc_RNA (1)...(19): siRNA sense strand
cagaguacauggagaaugg

SEQ ID NO: 1672233 - RNA, 19 nt, Homo sapiens
  misc_RNA (1)...(19): siRNA sense strand
gagcgacaggccuaaauuu

SEQ ID NO: 1672234 - RNA, 19 nt, Homo sapiens
  misc_RNA (1)...(19): siRNA sense strand
caucagagagaaccaguuu

SEQ ID NO: 1672235 - RNA, 19 nt, Homo sapiens
  misc_RNA (1)...(19): siRNA sense strand
ggaugaaguauuuaucuga

SEQ ID NO: 1672236 - RNA, 19 nt, Homo sapiens
  misc_RNA (1)...(19): siRNA sense strand
guaaugaucauaacagagu

SEQ ID NO: 1672237 - RNA, 19 nt, Homo sapiens
  misc_RNA (1)...(19): siRNA sense strand
agaagcggaugaagagaaa

SEQ ID NO: 1672238 - RNA, 19 nt, Homo sapiens
  misc_RNA (1)...(19): siRNA sense strand
ggaauaugaagucaaguau

SEQ ID NO: 1672239 - RNA, 19 nt, Homo sapiens
  misc_RNA (1)...(19): siRNA sense strand
caaccaagcagcaccauca

SEQ ID NO: 1672240 - RNA, 19 nt, Homo sapiens
  misc_RNA (1)...(19): siRNA sense strand
ccaauuacaccuuugaaau

SEQ ID NO: 1672241 - RNA, 19 nt, Homo sapiens
  misc_RNA (1)...(19): siRNA sense strand
gaggaaggcuaucgguuac

SEQ ID NO: 1672242 - RNA, 19 nt, Homo sapiens
  misc_RNA (1)...(19): siRNA sense strand
caguaaagccaaacaagaa

SEQ ID NO: 1672243 - RNA, 19 nt, Homo sapiens
  misc_RNA (1)...(19): siRNA sense strand
guauaaggauaacuucaca

SEQ ID NO: 1672244 - RNA, 19 nt, Homo sapiens
  misc_RNA (1)...(19): siRNA sense strand
uggaaggcguggucacuaa

SEQ ID NO: 1672245 - RNA, 19 nt, Homo sapiens
  misc_RNA (1)...(19): siRNA sense strand
cgacaaagagcguuucauc

SEQ ID NO: 1672246 - RNA, 19 nt, Homo sapiens
  misc_RNA (1)...(19): siRNA sense strand
gcuauggaaucguuaugug

SEQ ID NO: 1672247 - RNA, 19 nt, Homo sapiens
  misc_RNA (1)...(19): siRNA sense strand
caagugauguauggagcua

SEQ ID NO: 1672248 - RNA, 19 nt, Homo sapiens
  misc_RNA (1)...(19): siRNA sense strand
gaagcaauugccuaucgua

SEQ ID NO: 1672249 - RNA, 19 nt, Homo sapiens
  misc_RNA (1)...(19): siRNA sense strand
cauccugcauuaagauuga

SEQ ID NO: 1672250 - RNA, 19 nt, Homo sapiens
  misc_RNA (1)...(19): siRNA sense strand
uaccaagugugcaauguga

SEQ ID NO: 1672251 - RNA, 19 nt, Homo sapiens
  misc_RNA (1)...(19): siRNA sense strand
ccuccuagcucauaccaau

SEQ ID NO: 1672252 - RNA, 19 nt, Homo sapiens
  misc_RNA (1)...(19): siRNA sense strand
gggagaacuuggguggaua

SEQ ID NO: 1672253 - RNA, 19 nt, Homo sapiens
  misc_RNA (1)...(19): siRNA sense strand
ccuauaaugugguaugcaa

SEQ ID NO: 1672254 - RNA, 19 nt, Homo sapiens
  misc_RNA (1)...(19): siRNA sense strand
ggaguagcccucagaauac

SEQ ID NO: 1672255 - RNA, 19 nt, Homo sapiens
  misc_RNA (1)...(19): siRNA sense strand
agacaucugugaacuugga

SEQ ID NO: 1672256 - RNA, 19 nt, Homo sapiens
  misc_RNA (1)...(19): siRNA sense strand
gaacccagccagaauaacu

SEQ ID NO: 1672257 - RNA, 19 nt, Homo sapiens
  misc_RNA (1)...(19): siRNA sense strand
ggcaagaauugguaucaca

SEQ ID NO: 1672258 - RNA, 19 nt, Homo sapiens
  misc_RNA (1)...(19): siRNA sense strand
ggaugaagagaaacauuug

SEQ ID NO: 1672259 - RNA, 19 nt, Homo sapiens
  misc_RNA (1)...(19): siRNA sense strand
gaaccuaccaagugugcaa

SEQ ID NO: 1672260 - RNA, 19 nt, Homo sapiens
  misc_RNA (1)...(19): siRNA sense strand
gcagaugcacggcagaaug

SEQ ID NO: 1672261 - RNA, 19 nt, Homo sapiens
  misc_RNA (1)...(19): siRNA sense strand
ggacugcgccagaagcaau

SEQ ID NO: 1672262 - RNA, 19 nt, Homo sapiens
  misc_RNA (1)...(19): siRNA sense strand
cacuaaauguaaaccagua

SEQ ID NO: 1672263 - RNA, 19 nt, Homo sapiens
  misc_RNA (1)...(19): siRNA sense strand
gcagugggcgucucaaagu

SEQ ID NO: 1672264 - RNA, 19 nt, Homo sapiens
  misc_RNA (1)...(19): siRNA sense strand
caauuacaccuuugaaauc

SEQ ID NO: 1672265 - RNA, 19 nt, Homo sapiens
  misc_RNA (1)...(19): siRNA sense strand
gcaaggagacguuuaaccu

SEQ ID NO: 1672266 - RNA, 19 nt, Homo sapiens
  misc_RNA (1)...(19): siRNA sense strand
ggagcgacaggccuaaauu

SEQ ID NO: 1672267 - RNA, 19 nt, Homo sapiens
  misc_RNA (1)...(19): siRNA sense strand
ggauauguccaaucaagau

SEQ ID NO: 1672268 - RNA, 19 nt, Homo sapiens
  misc_RNA (1)...(19): siRNA sense strand
gggaugaaguauuuaucug

SEQ ID NO: 1672269 - RNA, 19 nt, Homo sapiens
  misc_RNA (1)...(19): siRNA sense strand
ccucucacuuccuauguuu

SEQ ID NO: 1672270 - RNA, 19 nt, Homo sapiens
  misc_RNA (1)...(19): siRNA sense strand
ucauaccaauuacaccuuu

SEQ ID NO: 1672271 - RNA, 19 nt, Homo sapiens
  misc_RNA (1)...(19): siRNA sense strand
gagagaaccaguuugucaa

SEQ ID NO: 1672272 - RNA, 19 nt, Homo sapiens
  misc_RNA (1)...(19): siRNA sense strand
gauccaagcuccccugaau

SEQ ID NO: 1672273 - RNA, 19 nt, Homo sapiens
  misc_RNA (1)...(19): siRNA sense strand
ugugggaagugaugucgua

SEQ ID NO: 1672274 - RNA, 19 nt, Homo sapiens
  misc_RNA (1)...(19): siRNA sense strand
ugaacccucucacuuccua

SEQ ID NO: 1672275 - RNA, 19 nt, Homo sapiens
  misc_RNA (1)...(19): siRNA sense strand
gguccaggcuaaagaaguc

SEQ ID NO: 1672276 - RNA, 19 nt, Homo sapiens
  misc_RNA (1)...(19): siRNA sense strand
caguaaugaucauaacaga

SEQ ID NO: 1672277 - RNA, 19 nt, Homo sapiens
  misc_RNA (1)...(19): siRNA sense strand
ugaaucagacaacgacaaa

SEQ ID NO: 1672278 - RNA, 19 nt, Homo sapiens
  misc_RNA (1)...(19): siRNA sense strand
cagaagcaauugccuaucg

SEQ ID NO: 1672279 - RNA, 19 nt, Homo sapiens
  misc_RNA (1)...(19): siRNA sense strand
ucugcaaagugucugauuu

SEQ ID NO: 1672280 - RNA, 19 nt, Homo sapiens
  misc_RNA (1)...(19): siRNA sense strand
uggcagauuuacagucauu

SEQ ID NO: 1672281 - RNA, 19 nt, Homo sapiens
  misc_RNA (1)...(19): siRNA sense strand
caggaacacagauaucaaa

SEQ ID NO: 1672282 - RNA, 19 nt, Homo sapiens
  misc_RNA (1)...(19): siRNA sense strand
gcaccaucauccauugcuu

SEQ ID NO: 1672283 - RNA, 19 nt, Homo sapiens
  misc_RNA (1)...(19): siRNA sense strand
gacaaagagcguuucauca

SEQ ID NO: 1672284 - RNA, 19 nt, Homo sapiens
  misc_RNA (1)...(19): siRNA sense strand
gggcucagaggguguauau

SEQ ID NO: 1672285 - RNA, 19 nt, Homo sapiens
  misc_RNA (1)...(19): siRNA sense strand
ggaaggcguggucacuaaa

SEQ ID NO: 1672286 - RNA, 19 nt, Homo sapiens
  misc_RNA (1)...(19): siRNA sense strand
ggaaggagggugggaggaa

SEQ ID NO: 1672287 - RNA, 19 nt, Homo sapiens
  misc_RNA (1)...(19): siRNA sense strand
gaauggaguagcccucaga

SEQ ID NO: 1672288 - RNA, 19 nt, Homo sapiens
  misc_RNA (1)...(19): siRNA sense strand
gucaacaacucagaagaga

SEQ ID NO: 1672289 - RNA, 19 nt, Homo sapiens
  misc_RNA (1)...(19): siRNA sense strand
gcaagagagagaucugugu

SEQ ID NO: 1672290 - RNA, 19 nt, Homo sapiens
  misc_RNA (1)...(19): siRNA sense strand
ccaucacgcaccagaauaa

SEQ ID NO: 1672291 - RNA, 19 nt, Homo sapiens
  misc_RNA (1)...(19): siRNA sense strand
ggaacauccuggugaacag

SEQ ID NO: 1672292 - RNA, 19 nt, Homo sapiens
  misc_RNA (1)...(19): siRNA sense strand
ggcauugggucugggauga

SEQ ID NO: 1672293 - RNA, 19 nt, Homo sapiens
  misc_RNA (1)...(19): siRNA sense strand
guacaggaguugcaacaaa

SEQ ID NO: 1672294 - RNA, 19 nt, Homo sapiens
  misc_RNA (1)...(19): siRNA sense strand
ggacagugccuuuggagua

SEQ ID NO: 1672295 - RNA, 19 nt, Homo sapiens
  misc_RNA (1)...(19): siRNA sense strand
gaaggacuguugcugguau

SEQ ID NO: 1672296 - RNA, 19 nt, Homo sapiens
  misc_RNA (1)...(19): siRNA sense strand
gaugguggcuuucaugucu

SEQ ID NO: 1672297 - RNA, 19 nt, Homo sapiens
  misc_RNA (1)...(19): siRNA sense strand
caaaagugcuagaagaaaa

SEQ ID NO: 1672298 - RNA, 19 nt, Homo sapiens
  misc_RNA (1)...(19): siRNA sense strand
gaagcuccauuuaccaaca

SEQ ID NO: 1672299 - RNA, 19 nt, Homo sapiens
  misc_RNA (1)...(19): siRNA sense strand
uaauaaccgugagagauuu

SEQ ID NO: 1672300 - RNA, 19 nt, Homo sapiens
  misc_RNA (1)...(19): siRNA sense strand
gcugagugaugguggcuuu

SEQ ID NO: 1672301 - RNA, 19 nt, Homo sapiens
  misc_RNA (1)...(19): siRNA sense strand
gacugaagcugguaaaggu

SEQ ID NO: 1672302 - RNA, 19 nt, Homo sapiens
  misc_RNA (1)...(19): siRNA sense strand
uuucaugucuugucuguug

SEQ ID NO: 1672303 - RNA, 19 nt, Homo sapiens
  misc_RNA (1)...(19): siRNA sense strand
gagagggucaagaugguua

SEQ ID NO: 1672304 - RNA, 19 nt, Homo sapiens
  misc_RNA (1)...(19): siRNA sense strand
gacagugccuuuggaguau

SEQ ID NO: 1672305 - RNA, 19 nt, Homo sapiens
  misc_RNA (1)...(19): siRNA sense strand
guaaaggugcugagugaug

SEQ ID NO: 1672306 - RNA, 19 nt, Homo sapiens
  misc_RNA (1)...(19): siRNA sense strand
caucuuacauggagaggau

SEQ ID NO: 1672307 - RNA, 19 nt, Homo sapiens
  misc_RNA (1)...(19): siRNA sense strand
ugguaaaggugcugaguga

SEQ ID NO: 1672308 - RNA, 19 nt, Homo sapiens
  misc_RNA (1)...(19): siRNA sense strand
uuaauaaccgugagagauu

SEQ ID NO: 1672309 - RNA, 19 nt, Homo sapiens
  misc_RNA (1)...(19): siRNA sense strand
ugagagauuuccugagcaa

SEQ ID NO: 1672310 - RNA, 19 nt, Homo sapiens
  misc_RNA (1)...(19): siRNA sense strand
gaacaaagagagggucaag

SEQ ID NO: 1672311 - RNA, 19 nt, Homo sapiens
  misc_RNA (1)...(19): siRNA sense strand
ggguugcaaguaucaauua

SEQ ID NO: 1672312 - RNA, 19 nt, Homo sapiens
  misc_RNA (1)...(19): siRNA sense strand
uaaaagccccacacuguua

SEQ ID NO: 1672313 - RNA, 19 nt, Homo sapiens
  misc_RNA (1)...(19): siRNA sense strand
acaaagagagggucaagau

SEQ ID NO: 1672314 - RNA, 19 nt, Homo sapiens
  misc_RNA (1)...(19): siRNA sense strand
uggcaucacucccgugugu

SEQ ID NO: 1672315 - RNA, 19 nt, Homo sapiens
  misc_RNA (1)...(19): siRNA sense strand
uacaggaguugcaacaaau

SEQ ID NO: 1672316 - RNA, 19 nt, Homo sapiens
  misc_RNA (1)...(19): siRNA sense strand
ggaugccauuugugucuau

SEQ ID NO: 1672317 - RNA, 19 nt, Homo sapiens
  misc_RNA (1)...(19): siRNA sense strand
acauguggguugcaaguau

SEQ ID NO: 1672318 - RNA, 19 nt, Homo sapiens
  misc_RNA (1)...(19): siRNA sense strand
ggaaggacuguugcuggua

SEQ ID NO: 1672319 - RNA, 19 nt, Homo sapiens
  misc_RNA (1)...(19): siRNA sense strand
gagauuuccugagcaagca

SEQ ID NO: 1672320 - RNA, 19 nt, Homo sapiens
  misc_RNA (1)...(19): siRNA sense strand
gcacagacugaagcuggua

SEQ ID NO: 1672321 - RNA, 19 nt, Homo sapiens
  misc_RNA (1)...(19): siRNA sense strand
caaagagagggucaagaug

SEQ ID NO: 1672322 - RNA, 19 nt, Homo sapiens
  misc_RNA (1)...(19): siRNA sense strand
ugacuacggaugccauuug

SEQ ID NO: 1672323 - RNA, 19 nt, Homo sapiens
  misc_RNA (1)...(19): siRNA sense strand
cagggcagcuucgcacaga

SEQ ID NO: 1672324 - RNA, 19 nt, Homo sapiens
  misc_RNA (1)...(19): siRNA sense strand
gcauacaggaacaaagaga

SEQ ID NO: 1672325 - RNA, 19 nt, Homo sapiens
  misc_RNA (1)...(19): siRNA sense strand
gguugcaaguaucaauuau

SEQ ID NO: 1672326 - RNA, 19 nt, Homo sapiens
  misc_RNA (1)...(19): siRNA sense strand
gacuacggaugccauuugu

SEQ ID NO: 1672327 - RNA, 19 nt, Homo sapiens
  misc_RNA (1)...(19): siRNA sense strand
gcuuucaugucuugucugu

SEQ ID NO: 1672328 - RNA, 19 nt, Homo sapiens
  misc_RNA (1)...(19): siRNA sense strand
caacaaaugcugcaaaagu

SEQ ID NO: 1672329 - RNA, 19 nt, Homo sapiens
  misc_RNA (1)...(19): siRNA sense strand
ugucuugucuguugacuac

SEQ ID NO: 1672330 - RNA, 19 nt, Homo sapiens
  misc_RNA (1)...(19): siRNA sense strand
ccuccuggcuuccaacaca

SEQ ID NO: 1672331 - RNA, 19 nt, Homo sapiens
  misc_RNA (1)...(19): siRNA sense strand
cuacggaugccauuugugu

SEQ ID NO: 1672332 - RNA, 19 nt, Homo sapiens
  misc_RNA (1)...(19): siRNA sense strand
gagcaagcaguggucauga

SEQ ID NO: 1672333 - RNA, 19 nt, Homo sapiens
  misc_RNA (1)...(19): siRNA sense strand
gacuguugcugguaugaag

SEQ ID NO: 1672334 - RNA, 19 nt, Homo sapiens
  misc_RNA (1)...(19): siRNA sense strand
gaugcccaguugaugcuau

SEQ ID NO: 1672335 - RNA, 19 nt, Homo sapiens
  misc_RNA (1)...(19): siRNA sense strand
gcaaaagugcuagaagaaa

SEQ ID NO: 1672336 - RNA, 19 nt, Homo sapiens
  misc_RNA (1)...(19): siRNA sense strand
aaagcucuaugaaauugca

SEQ ID NO: 1672337 - RNA, 19 nt, Homo sapiens
  misc_RNA (1)...(19): siRNA sense strand
gcagaacacagggcagcuu

SEQ ID NO: 1672338 - RNA, 19 nt, Homo sapiens
  misc_RNA (1)...(19): siRNA sense strand
acaggacagugccuuugga

SEQ ID NO: 1672339 - RNA, 19 nt, Homo sapiens
  misc_RNA (1)...(19): siRNA sense strand
ggacuguugcugguaugaa

SEQ ID NO: 1672340 - RNA, 19 nt, Homo sapiens
  misc_RNA (1)...(19): siRNA sense strand
acuuauggaugcccugaga

SEQ ID NO: 1672341 - RNA, 19 nt, Homo sapiens
  misc_RNA (1)...(19): siRNA sense strand
aagagagggucaagauggu

SEQ ID NO: 1672342 - RNA, 19 nt, Homo sapiens
  misc_RNA (1)...(19): siRNA sense strand
cauguggguugcaaguauc

SEQ ID NO: 1672343 - RNA, 19 nt, Homo sapiens
  misc_RNA (1)...(19): siRNA sense strand
ccucuucucaucuuacaug

SEQ ID NO: 1672344 - RNA, 19 nt, Homo sapiens
  misc_RNA (1)...(19): siRNA sense strand
cuacagguaagcccacaga

SEQ ID NO: 1672345 - RNA, 19 nt, Homo sapiens
  misc_RNA (1)...(19): siRNA sense strand
guaaaagccccacacuguu

SEQ ID NO: 1672346 - RNA, 19 nt, Homo sapiens
  misc_RNA (1)...(19): siRNA sense strand
gcaaugcauacaggaacaa

SEQ ID NO: 1672347 - RNA, 19 nt, Homo sapiens
  misc_RNA (1)...(19): siRNA sense strand
ugacaggacagugccuuug

SEQ ID NO: 1672348 - RNA, 19 nt, Homo sapiens
  misc_RNA (1)...(19): siRNA sense strand
cuucuccucuucucaucuu

SEQ ID NO: 1672349 - RNA, 19 nt, Homo sapiens
  misc_RNA (1)...(19): siRNA sense strand
ccugagaaaagacaaaaua

SEQ ID NO: 1672350 - RNA, 19 nt, Homo sapiens
  misc_RNA (1)...(19): siRNA sense strand
gagugaugguggcuuucau

SEQ ID NO: 1672351 - RNA, 19 nt, Homo sapiens
  misc_RNA (1)...(19): siRNA sense strand
cggaugccauuugugucua

SEQ ID NO: 1672352 - RNA, 19 nt, Homo sapiens
  misc_RNA (1)...(19): siRNA sense strand
uuauggaugcccugagaaa

SEQ ID NO: 1672353 - RNA, 19 nt, Homo sapiens
  misc_RNA (1)...(19): siRNA sense strand
aaagauuuaccggaacauu

SEQ ID NO: 1672354 - RNA, 19 nt, Homo sapiens
  misc_RNA (1)...(19): siRNA sense strand
uugaugcuauugucuugga

SEQ ID NO: 1672355 - RNA, 19 nt, Homo sapiens
  misc_RNA (1)...(19): siRNA sense strand
guacaggaguugcaacaaa

SEQ ID NO: 1672356 - RNA, 19 nt, Homo sapiens
  misc_RNA (1)...(19): siRNA sense strand
ggacagugccuuuggagua

SEQ ID NO: 1672357 - RNA, 19 nt, Homo sapiens
  misc_RNA (1)...(19): siRNA sense strand
gaaggacuguugcugguau

SEQ ID NO: 1672358 - RNA, 19 nt, Homo sapiens
  misc_RNA (1)...(19): siRNA sense strand
gaugguggcuuucaugucu

SEQ ID NO: 1672359 - RNA, 19 nt, Homo sapiens
  misc_RNA (1)...(19): siRNA sense strand
caaaagugcuagaagaaaa

SEQ ID NO: 1672360 - RNA, 19 nt, Homo sapiens
  misc_RNA (1)...(19): siRNA sense strand
gaagcuccauuuaccaaca

SEQ ID NO: 1672361 - RNA, 19 nt, Homo sapiens
  misc_RNA (1)...(19): siRNA sense strand
uaauaaccgugagagauuu

SEQ ID NO: 1672362 - RNA, 19 nt, Homo sapiens
  misc_RNA (1)...(19): siRNA sense strand
gcugagugaugguggcuuu

SEQ ID NO: 1672363 - RNA, 19 nt, Homo sapiens
  misc_RNA (1)...(19): siRNA sense strand
gacugaagcugguaaaggu

SEQ ID NO: 1672364 - RNA, 19 nt, Homo sapiens
  misc_RNA (1)...(19): siRNA sense strand
uuucaugucuugucuguug

SEQ ID NO: 1672365 - RNA, 19 nt, Homo sapiens
  misc_RNA (1)...(19): siRNA sense strand
gagagggucaagaugguua

SEQ ID NO: 1672366 - RNA, 19 nt, Homo sapiens
  misc_RNA (1)...(19): siRNA sense strand
gacagugccuuuggaguau

SEQ ID NO: 1672367 - RNA, 19 nt, Homo sapiens
  misc_RNA (1)...(19): siRNA sense strand
guaaaggugcugagugaug

SEQ ID NO: 1672368 - RNA, 19 nt, Homo sapiens
  misc_RNA (1)...(19): siRNA sense strand
caucuuacauggagaggau

SEQ ID NO: 1672369 - RNA, 19 nt, Homo sapiens
  misc_RNA (1)...(19): siRNA sense strand
ugguaaaggugcugaguga

SEQ ID NO: 1672370 - RNA, 19 nt, Homo sapiens
  misc_RNA (1)...(19): siRNA sense strand
uuaauaaccgugagagauu

SEQ ID NO: 1672371 - RNA, 19 nt, Homo sapiens
  misc_RNA (1)...(19): siRNA sense strand
ugagagauuuccugagcaa

SEQ ID NO: 1672372 - RNA, 19 nt, Homo sapiens
  misc_RNA (1)...(19): siRNA sense strand
gaacaaagagagggucaag

SEQ ID NO: 1672373 - RNA, 19 nt, Homo sapiens
  misc_RNA (1)...(19): siRNA sense strand
ggguugcaaguaucaauua

SEQ ID NO: 1672374 - RNA, 19 nt, Homo sapiens
  misc_RNA (1)...(19): siRNA sense strand
uaaaagccccacacuguua

SEQ ID NO: 1672375 - RNA, 19 nt, Homo sapiens
  misc_RNA (1)...(19): siRNA sense strand
acaaagagagggucaagau

SEQ ID NO: 1672376 - RNA, 19 nt, Homo sapiens
  misc_RNA (1)...(19): siRNA sense strand
uggcaucacucccgugugu

SEQ ID NO: 1672377 - RNA, 19 nt, Homo sapiens
  misc_RNA (1)...(19): siRNA sense strand
uacaggaguugcaacaaau

SEQ ID NO: 1672378 - RNA, 19 nt, Homo sapiens
  misc_RNA (1)...(19): siRNA sense strand
ggaugccauuugugucuau

SEQ ID NO: 1672379 - RNA, 19 nt, Homo sapiens
  misc_RNA (1)...(19): siRNA sense strand
acauguggguugcaaguau

SEQ ID NO: 1672380 - RNA, 19 nt, Homo sapiens
  misc_RNA (1)...(19): siRNA sense strand
ggaaggacuguugcuggua

SEQ ID NO: 1672381 - RNA, 19 nt, Homo sapiens
  misc_RNA (1)...(19): siRNA sense strand
gagauuuccugagcaagca

SEQ ID NO: 1672382 - RNA, 19 nt, Homo sapiens
  misc_RNA (1)...(19): siRNA sense strand
gcacagacugaagcuggua

SEQ ID NO: 1672383 - RNA, 19 nt, Homo sapiens
  misc_RNA (1)...(19): siRNA sense strand
caaagagagggucaagaug

SEQ ID NO: 1672384 - RNA, 19 nt, Homo sapiens
  misc_RNA (1)...(19): siRNA sense strand
ugacuacggaugccauuug

SEQ ID NO: 1672385 - RNA, 19 nt, Homo sapiens
  misc_RNA (1)...(19): siRNA sense strand
cagggcagcuucgcacaga

SEQ ID NO: 1672386 - RNA, 19 nt, Homo sapiens
  misc_RNA (1)...(19): siRNA sense strand
gcauacaggaacaaagaga

SEQ ID NO: 1672387 - RNA, 19 nt, Homo sapiens
  misc_RNA (1)...(19): siRNA sense strand
gguugcaaguaucaauuau

SEQ ID NO: 1672388 - RNA, 19 nt, Homo sapiens
  misc_RNA (1)...(19): siRNA sense strand
gacuacggaugccauuugu

SEQ ID NO: 1672389 - RNA, 19 nt, Homo sapiens
  misc_RNA (1)...(19): siRNA sense strand
gcuuucaugucuugucugu

SEQ ID NO: 1672390 - RNA, 19 nt, Homo sapiens
  misc_RNA (1)...(19): siRNA sense strand
caacaaaugcugcaaaagu

SEQ ID NO: 1672391 - RNA, 19 nt, Homo sapiens
  misc_RNA (1)...(19): siRNA sense strand
ugucuugucuguugacuac

SEQ ID NO: 1672392 - RNA, 19 nt, Homo sapiens
  misc_RNA (1)...(19): siRNA sense strand
ccuccuggcuuccaacaca

SEQ ID NO: 1672393 - RNA, 19 nt, Homo sapiens
  misc_RNA (1)...(19): siRNA sense strand
cuacggaugccauuugugu

SEQ ID NO: 1672394 - RNA, 19 nt, Homo sapiens
  misc_RNA (1)...(19): siRNA sense strand
gagcaagcaguggucauga

SEQ ID NO: 1672395 - RNA, 19 nt, Homo sapiens
  misc_RNA (1)...(19): siRNA sense strand
gacuguugcugguaugaag

SEQ ID NO: 1672396 - RNA, 19 nt, Homo sapiens
  misc_RNA (1)...(19): siRNA sense strand
gaugcccaguugaugcuau

SEQ ID NO: 1672397 - RNA, 19 nt, Homo sapiens
  misc_RNA (1)...(19): siRNA sense strand
gcaaaagugcuagaagaaa

SEQ ID NO: 1672398 - RNA, 19 nt, Homo sapiens
  misc_RNA (1)...(19): siRNA sense strand
aaagcucuaugaaauugca

SEQ ID NO: 1672399 - RNA, 19 nt, Homo sapiens
  misc_RNA (1)...(19): siRNA sense strand
gcagaacacagggcagcuu

SEQ ID NO: 1672400 - RNA, 19 nt, Homo sapiens
  misc_RNA (1)...(19): siRNA sense strand
ggacuguugcugguaugaa

SEQ ID NO: 1672401 - RNA, 19 nt, Homo sapiens
  misc_RNA (1)...(19): siRNA sense strand
acaggacagugccuuugga

SEQ ID NO: 1672402 - RNA, 19 nt, Homo sapiens
  misc_RNA (1)...(19): siRNA sense strand
acuuauggaugcccugaga

SEQ ID NO: 1672403 - RNA, 19 nt, Homo sapiens
  misc_RNA (1)...(19): siRNA sense strand
aagagagggucaagauggu

SEQ ID NO: 1672404 - RNA, 19 nt, Homo sapiens
  misc_RNA (1)...(19): siRNA sense strand
cauguggguugcaaguauc

SEQ ID NO: 1672405 - RNA, 19 nt, Homo sapiens
  misc_RNA (1)...(19): siRNA sense strand
ccucuucucaucuuacaug

SEQ ID NO: 1672406 - RNA, 19 nt, Homo sapiens
  misc_RNA (1)...(19): siRNA sense strand
cuacagguaagcccacaga

SEQ ID NO: 1672407 - RNA, 19 nt, Homo sapiens
  misc_RNA (1)...(19): siRNA sense strand
guaaaagccccacacuguu

SEQ ID NO: 1672408 - RNA, 19 nt, Homo sapiens
  misc_RNA (1)...(19): siRNA sense strand
gcaaugcauacaggaacaa

SEQ ID NO: 1672409 - RNA, 19 nt, Homo sapiens
  misc_RNA (1)...(19): siRNA sense strand
ugacaggacagugccuuug

SEQ ID NO: 1672410 - RNA, 19 nt, Homo sapiens
  misc_RNA (1)...(19): siRNA sense strand
cuucuccucuucucaucuu

SEQ ID NO: 1672411 - RNA, 19 nt, Homo sapiens
  misc_RNA (1)...(19): siRNA sense strand
gagugaugguggcuuucau

SEQ ID NO: 1672412 - RNA, 19 nt, Homo sapiens
  misc_RNA (1)...(19): siRNA sense strand
ccugagaaaagacaaaaua

SEQ ID NO: 1672413 - RNA, 19 nt, Homo sapiens
  misc_RNA (1)...(19): siRNA sense strand
cggaugccauuugugucua

SEQ ID NO: 1672414 - RNA, 19 nt, Homo sapiens
  misc_RNA (1)...(19): siRNA sense strand
uuauggaugcccugagaaa

SEQ ID NO: 1672415 - RNA, 19 nt, Homo sapiens
  misc_RNA (1)...(19): siRNA sense strand
aaagauuuaccggaacauu

SEQ ID NO: 1672416 - RNA, 19 nt, Homo sapiens
  misc_RNA (1)...(19): siRNA sense strand
uugaugcuauugucuugga

SEQ ID NO: 1672417 - RNA, 19 nt, Homo sapiens
  misc_RNA (1)...(19): siRNA sense strand
gggcaaagcugacuucaug

SEQ ID NO: 1672418 - RNA, 19 nt, Homo sapiens
  misc_RNA (1)...(19): siRNA sense strand
gcaaacagcgcaaggaguu

SEQ ID NO: 1672419 - RNA, 19 nt, Homo sapiens
  misc_RNA (1)...(19): siRNA sense strand
uugaugagcuuaagguaua

SEQ ID NO: 1672420 - RNA, 19 nt, Homo sapiens
  misc_RNA (1)...(19): siRNA sense strand
caacaagcgugucgccuau

SEQ ID NO: 1672421 - RNA, 19 nt, Homo sapiens
  misc_RNA (1)...(19): siRNA sense strand
gaauugacuuggaggagaa

SEQ ID NO: 1672422 - RNA, 19 nt, Homo sapiens
  misc_RNA (1)...(19): siRNA sense strand
ccaaagaggagaagaagaa

SEQ ID NO: 1672423 - RNA, 19 nt, Homo sapiens
  misc_RNA (1)...(19): siRNA sense strand
gcaaugagaacgaugaguu

SEQ ID NO: 1672424 - RNA, 19 nt, Homo sapiens
  misc_RNA (1)...(19): siRNA sense strand
caccucagcucgaguacua

SEQ ID NO: 1672425 - RNA, 19 nt, Homo sapiens
  misc_RNA (1)...(19): siRNA sense strand
gaagaagaaacccaagauu

SEQ ID NO: 1672426 - RNA, 19 nt, Homo sapiens
  misc_RNA (1)...(19): siRNA sense strand
acacauggcuacaauaucu

SEQ ID NO: 1672427 - RNA, 19 nt, Homo sapiens
  misc_RNA (1)...(19): siRNA sense strand
gaaguggaccucccagaga

SEQ ID NO: 1672428 - RNA, 19 nt, Homo sapiens
  misc_RNA (1)...(19): siRNA sense strand
agaagaaacccaagauuga

SEQ ID NO: 1672429 - RNA, 19 nt, Homo sapiens
  misc_RNA (1)...(19): siRNA sense strand
gcacagcauucccgacauc

SEQ ID NO: 1672430 - RNA, 19 nt, Homo sapiens
  misc_RNA (1)...(19): siRNA sense strand
ucaagaaacuggagaccau

SEQ ID NO: 1672431 - RNA, 19 nt, Homo sapiens
  misc_RNA (1)...(19): siRNA sense strand
cagaugagguggucuugga

SEQ ID NO: 1672432 - RNA, 19 nt, Homo sapiens
  misc_RNA (1)...(19): siRNA sense strand
ggagcaacuucgacaacaa

SEQ ID NO: 1672433 - RNA, 19 nt, Homo sapiens
  misc_RNA (1)...(19): siRNA sense strand
ugaaaucuaugaccaggau

SEQ ID NO: 1672434 - RNA, 19 nt, Homo sapiens
  misc_RNA (1)...(19): siRNA sense strand
gcugcacacuuucaacuug

SEQ ID NO: 1672435 - RNA, 19 nt, Homo sapiens
  misc_RNA (1)...(19): siRNA sense strand
gaagaaacccaagauugau

SEQ ID NO: 1672436 - RNA, 19 nt, Homo sapiens
  misc_RNA (1)...(19): siRNA sense strand
ccaaggaccugcucuucuc

SEQ ID NO: 1672437 - RNA, 19 nt, Homo sapiens
  misc_RNA (1)...(19): siRNA sense strand
ggacgacgacuucuucaca

SEQ ID NO: 1672438 - RNA, 19 nt, Homo sapiens
  misc_RNA (1)...(19): siRNA sense strand
caaguacuuugccuccauu

SEQ ID NO: 1672439 - RNA, 19 nt, Homo sapiens
  misc_RNA (1)...(19): siRNA sense strand
agaagaagaagaagaagaa

SEQ ID NO: 1672440 - RNA, 19 nt, Homo sapiens
  misc_RNA (1)...(19): siRNA sense strand
gauccacaauuauaagaag

SEQ ID NO: 1672441 - RNA, 19 nt, Homo sapiens
  misc_RNA (1)...(19): siRNA sense strand
ggaaguccuuugacaucga

SEQ ID NO: 1672442 - RNA, 19 nt, Homo sapiens
  misc_RNA (1)...(19): siRNA sense strand
ccacacauggcuacaauau

SEQ ID NO: 1672443 - RNA, 19 nt, Homo sapiens
  misc_RNA (1)...(19): siRNA sense strand
gagaagaagaagaagaaga

SEQ ID NO: 1672444 - RNA, 19 nt, Homo sapiens
  misc_RNA (1)...(19): siRNA sense strand
ucaacacccucgucaagug

SEQ ID NO: 1672445 - RNA, 19 nt, Homo sapiens
  misc_RNA (1)...(19): siRNA sense strand
ggaggacgacgacuucuuc

SEQ ID NO: 1672446 - RNA, 19 nt, Homo sapiens
  misc_RNA (1)...(19): siRNA sense strand
agaaggagaagaagaagaa

SEQ ID NO: 1672447 - RNA, 19 nt, Homo sapiens
  misc_RNA (1)...(19): siRNA sense strand
gcaaugaccccaucaaugu

SEQ ID NO: 1672448 - RNA, 19 nt, Homo sapiens
  misc_RNA (1)...(19): siRNA sense strand
caaugagaacgaugaguuu

SEQ ID NO: 1672449 - RNA, 19 nt, Homo sapiens
  misc_RNA (1)...(19): siRNA sense strand
ccaucgagcuggaccugaa

SEQ ID NO: 1672450 - RNA, 19 nt, Homo sapiens
  misc_RNA (1)...(19): siRNA sense strand
caagaaggaguccauguuc

SEQ ID NO: 1672451 - RNA, 19 nt, Homo sapiens
  misc_RNA (1)...(19): siRNA sense strand
ccaagaaggaguccauguu

SEQ ID NO: 1672452 - RNA, 19 nt, Homo sapiens
  misc_RNA (1)...(19): siRNA sense strand
gcccaucauugucauugaa

SEQ ID NO: 1672453 - RNA, 19 nt, Homo sapiens
  misc_RNA (1)...(19): siRNA sense strand
aggacuggcugcacacuuu

SEQ ID NO: 1672454 - RNA, 19 nt, Homo sapiens
  misc_RNA (1)...(19): siRNA sense strand
aagaagaaacccaagauug

SEQ ID NO: 1672455 - RNA, 19 nt, Homo sapiens
  misc_RNA (1)...(19): siRNA sense strand
gagaagaagaaacccaaga

SEQ ID NO: 1672456 - RNA, 19 nt, Homo sapiens
  misc_RNA (1)...(19): siRNA sense strand
cgucccugauccacaauua

SEQ ID NO: 1672457 - RNA, 19 nt, Homo sapiens
  misc_RNA (1)...(19): siRNA sense strand
gcagcucaacccugucuuu

SEQ ID NO: 1672458 - RNA, 19 nt, Homo sapiens
  misc_RNA (1)...(19): siRNA sense strand
ggacgauccgcccaucauu

SEQ ID NO: 1672459 - RNA, 19 nt, Homo sapiens
  misc_RNA (1)...(19): siRNA sense strand
acacagacguccacuacca

SEQ ID NO: 1672460 - RNA, 19 nt, Homo sapiens
  misc_RNA (1)...(19): siRNA sense strand
ggagaaguccagugacauc

SEQ ID NO: 1672461 - RNA, 19 nt, Homo sapiens
  misc_RNA (1)...(19): siRNA sense strand
gaguggaggugcuguucug

SEQ ID NO: 1672462 - RNA, 19 nt, Homo sapiens
  misc_RNA (1)...(19): siRNA sense strand
ggacgccucuggacaucuc

SEQ ID NO: 1672463 - RNA, 19 nt, Homo sapiens
  misc_RNA (1)...(19): siRNA sense strand
caagauugaugagcuuaag

SEQ ID NO: 1672464 - RNA, 19 nt, Homo sapiens
  misc_RNA (1)...(19): siRNA sense strand
gccagaacuuccugcagaa

SEQ ID NO: 1672465 - RNA, 19 nt, Homo sapiens
  misc_RNA (1)...(19): siRNA sense strand
gggagguuguggugacuau

SEQ ID NO: 1672466 - RNA, 19 nt, Homo sapiens
  misc_RNA (1)...(19): siRNA sense strand
gagcuggaguccgaguuug

SEQ ID NO: 1672467 - RNA, 19 nt, Homo sapiens
  misc_RNA (1)...(19): siRNA sense strand
ggacagugcaggccaaggu

SEQ ID NO: 1672468 - RNA, 19 nt, Homo sapiens
  misc_RNA (1)...(19): siRNA sense strand
cagaggaggcagagaagaa

SEQ ID NO: 1672469 - RNA, 19 nt, Homo sapiens
  misc_RNA (1)...(19): siRNA sense strand
cagcagaggaggcagagaa

SEQ ID NO: 1672470 - RNA, 19 nt, Homo sapiens
  misc_RNA (1)...(19): siRNA sense strand
ccaaguacuuugccuccau

SEQ ID NO: 1672471 - RNA, 19 nt, Homo sapiens
  misc_RNA (1)...(19): siRNA sense strand
caaugaagggcaaggagaa

SEQ ID NO: 1672472 - RNA, 19 nt, Homo sapiens
  misc_RNA (1)...(19): siRNA sense strand
caacuggcgcuaccuguuc

SEQ ID NO: 1672473 - RNA, 19 nt, Homo sapiens
  misc_RNA (1)...(19): siRNA sense strand
agaacuacaucuccaagca

SEQ ID NO: 1672474 - RNA, 19 nt, Homo sapiens
  misc_RNA (1)...(19): siRNA sense strand
ugacgguggcuguguauga

SEQ ID NO: 1672475 - RNA, 19 nt, Homo sapiens
  misc_RNA (1)...(19): siRNA sense strand
agagguacccaucaagaaa

SEQ ID NO: 1672476 - RNA, 19 nt, Homo sapiens
  misc_RNA (1)...(19): siRNA sense strand
gcgcaaagacagccaagca

SEQ ID NO: 1672477 - RNA, 19 nt, Homo sapiens
  misc_RNA (1)...(19): siRNA sense strand
gggacgagaccgaguacaa

SEQ ID NO: 1672478 - RNA, 19 nt, Homo sapiens
  misc_RNA (1)...(19): siRNA sense strand
aagaggagaagaagaagaa

SEQ ID NO: 1672479 - RNA, 19 nt, Homo sapiens
  misc_RNA (1)...(19): siRNA sense strand
ucgacaaccuggagcucua

SEQ ID NO: 1672480 - RNA, 19 nt, Homo sapiens
  misc_RNA (1)...(19): siRNA sense strand
gcacccugcugacaucaac

SEQ ID NO: 1672481 - RNA, 19 nt, Homo sapiens
  misc_RNA (1)...(19): siRNA sense strand
cgacagcagcggacucuca

SEQ ID NO: 1672482 - RNA, 19 nt, Homo sapiens
  misc_RNA (1)...(19): siRNA sense strand
aggcugagcugcauuuacu

SEQ ID NO: 1672483 - RNA, 19 nt, Homo sapiens
  misc_RNA (1)...(19): siRNA sense strand
gagaaggagaagaagaaga

SEQ ID NO: 1672484 - RNA, 19 nt, Homo sapiens
  misc_RNA (1)...(19): siRNA sense strand
gaggagaaggagaagaaga

SEQ ID NO: 1672485 - RNA, 19 nt, Homo sapiens
  misc_RNA (1)...(19): siRNA sense strand
ccagagguacccaucaaga

SEQ ID NO: 1672486 - RNA, 19 nt, Homo sapiens
  misc_RNA (1)...(19): siRNA sense strand
ggccuucggucgcuacaca

SEQ ID NO: 1672487 - RNA, 19 nt, Homo sapiens
  misc_RNA (1)...(19): siRNA sense strand
ucccugauccacaauuaua

SEQ ID NO: 1672488 - RNA, 19 nt, Homo sapiens
  misc_RNA (1)...(19): siRNA sense strand
aaguggaccucccagagaa

SEQ ID NO: 1672489 - RNA, 19 nt, Homo sapiens
  misc_RNA (1)...(19): siRNA sense strand
cucggaagcccaagaagua

SEQ ID NO: 1672490 - RNA, 19 nt, Homo sapiens
  misc_RNA (1)...(19): siRNA sense strand
ucacugggcccucugagau

SEQ ID NO: 1672491 - RNA, 19 nt, Homo sapiens
  misc_RNA (1)...(19): siRNA sense strand
gaaggaggaaguggacaau

SEQ ID NO: 1672492 - RNA, 19 nt, Homo sapiens
  misc_RNA (1)...(19): siRNA sense strand
gacgauccgcccaucauug

SEQ ID NO: 1672493 - RNA, 19 nt, Homo sapiens
  misc_RNA (1)...(19): siRNA sense strand
gacgagaccgaguacaaga

SEQ ID NO: 1672494 - RNA, 19 nt, Homo sapiens
  misc_RNA (1)...(19): siRNA sense strand
ggacgagaccgaguacaag

SEQ ID NO: 1672495 - RNA, 19 nt, Homo sapiens
  misc_RNA (1)...(19): siRNA sense strand
cagagguacccaucaagaa

SEQ ID NO: 1672496 - RNA, 19 nt, Homo sapiens
  misc_RNA (1)...(19): siRNA sense strand
aggccaagguggagcugua

SEQ ID NO: 1672497 - RNA, 19 nt, Homo sapiens
  misc_RNA (1)...(19): siRNA sense strand
gcugagcugcauuuacuga

SEQ ID NO: 1672498 - RNA, 19 nt, Homo sapiens
  misc_RNA (1)...(19): siRNA sense strand
cugcaaagacggcaaagug

SEQ ID NO: 1672499 - RNA, 19 nt, Homo sapiens
  misc_RNA (1)...(19): siRNA sense strand
ccucuggaauugacuugga

SEQ ID NO: 1672500 - RNA, 19 nt, Homo sapiens
  misc_RNA (1)...(19): siRNA sense strand
gacuauggagccagaggua

SEQ ID NO: 1672501 - RNA, 19 nt, Homo sapiens
  misc_RNA (1)...(19): siRNA sense strand
cuucuccgcugacgacuuc

SEQ ID NO: 1672502 - RNA, 19 nt, Homo sapiens
  misc_RNA (1)...(19): siRNA sense strand
cagcauucccgacaucuuc

SEQ ID NO: 1672503 - RNA, 19 nt, Homo sapiens
  misc_RNA (1)...(19): siRNA sense strand
aggaggaaguggacaauac

SEQ ID NO: 1672504 - RNA, 19 nt, Homo sapiens
  misc_RNA (1)...(19): siRNA sense strand
gagcaacuucgacaacaag

SEQ ID NO: 1672505 - RNA, 19 nt, Homo sapiens
  misc_RNA (1)...(19): siRNA sense strand
ccaagaagcaggcguucca

SEQ ID NO: 1672506 - RNA, 19 nt, Homo sapiens
  misc_RNA (1)...(19): siRNA sense strand
ugagaacgaugaguuugag

SEQ ID NO: 1672507 - RNA, 19 nt, Homo sapiens
  misc_RNA (1)...(19): siRNA sense strand
agacugacauccgcgacaa

SEQ ID NO: 1672508 - RNA, 19 nt, Homo sapiens
  misc_RNA (1)...(19): siRNA sense strand
gauugaugagcuuaaggua

SEQ ID NO: 1672509 - RNA, 19 nt, Homo sapiens
  misc_RNA (1)...(19): siRNA sense strand
ccauugacaccaugaagga

SEQ ID NO: 1672510 - RNA, 19 nt, Homo sapiens
  misc_RNA (1)...(19): siRNA sense strand
cgccucaaguccugcauga

SEQ ID NO: 1672511 - RNA, 19 nt, Homo sapiens
  misc_RNA (1)...(19): siRNA sense strand
ugagggagcuggaaaacau

SEQ ID NO: 1672512 - RNA, 19 nt, Homo sapiens
  misc_RNA (1)...(19): siRNA sense strand
gauccgcccaucauuguca

SEQ ID NO: 1672513 - RNA, 19 nt, Homo sapiens
  misc_RNA (1)...(19): siRNA sense strand
ggacugcgccaaggucaag

SEQ ID NO: 1672514 - RNA, 19 nt, Homo sapiens
  misc_RNA (1)...(19): siRNA sense strand
ggaggcugagcugcauuua

SEQ ID NO: 1672515 - RNA, 19 nt, Homo sapiens
  misc_RNA (1)...(19): siRNA sense strand
guguccaucuucaagcaaa

SEQ ID NO: 1672516 - RNA, 19 nt, Homo sapiens
  misc_RNA (1)...(19): siRNA sense strand
cgacaaggagaacuacauc

SEQ ID NO: 1672517 - RNA, 19 nt, Homo sapiens
  misc_RNA (1)...(19): siRNA sense strand
gggcaaagcugacuucaug

SEQ ID NO: 1672518 - RNA, 19 nt, Homo sapiens
  misc_RNA (1)...(19): siRNA sense strand
gcaaacagcgcaaggaguu

SEQ ID NO: 1672519 - RNA, 19 nt, Homo sapiens
  misc_RNA (1)...(19): siRNA sense strand
uugaugagcuuaagguaua

SEQ ID NO: 1672520 - RNA, 19 nt, Homo sapiens
  misc_RNA (1)...(19): siRNA sense strand
caacaagcgugucgccuau

SEQ ID NO: 1672521 - RNA, 19 nt, Homo sapiens
  misc_RNA (1)...(19): siRNA sense strand
gaauugacuuggaggagaa

SEQ ID NO: 1672522 - RNA, 19 nt, Homo sapiens
  misc_RNA (1)...(19): siRNA sense strand
ccaaagaggagaagaagaa

SEQ ID NO: 1672523 - RNA, 19 nt, Homo sapiens
  misc_RNA (1)...(19): siRNA sense strand
gcaaugagaacgaugaguu

SEQ ID NO: 1672524 - RNA, 19 nt, Homo sapiens
  misc_RNA (1)...(19): siRNA sense strand
caccucagcucgaguacua

SEQ ID NO: 1672525 - RNA, 19 nt, Homo sapiens
  misc_RNA (1)...(19): siRNA sense strand
gaagaagaaacccaagauu

SEQ ID NO: 1672526 - RNA, 19 nt, Homo sapiens
  misc_RNA (1)...(19): siRNA sense strand
acacauggcuacaauaucu

SEQ ID NO: 1672527 - RNA, 19 nt, Homo sapiens
  misc_RNA (1)...(19): siRNA sense strand
gaaguggaccucccagaga

SEQ ID NO: 1672528 - RNA, 19 nt, Homo sapiens
  misc_RNA (1)...(19): siRNA sense strand
agaagaaacccaagauuga

SEQ ID NO: 1672529 - RNA, 19 nt, Homo sapiens
  misc_RNA (1)...(19): siRNA sense strand
gcacagcauucccgacauc

SEQ ID NO: 1672530 - RNA, 19 nt, Homo sapiens
  misc_RNA (1)...(19): siRNA sense strand
ucaagaaacuggagaccau

SEQ ID NO: 1672531 - RNA, 19 nt, Homo sapiens
  misc_RNA (1)...(19): siRNA sense strand
cagaugagguggucuugga

SEQ ID NO: 1672532 - RNA, 19 nt, Homo sapiens
  misc_RNA (1)...(19): siRNA sense strand
ggagcaacuucgacaacaa

SEQ ID NO: 1672533 - RNA, 19 nt, Homo sapiens
  misc_RNA (1)...(19): siRNA sense strand
ugaaaucuaugaccaggau

SEQ ID NO: 1672534 - RNA, 19 nt, Homo sapiens
  misc_RNA (1)...(19): siRNA sense strand
gcugcacacuuucaacuug

SEQ ID NO: 1672535 - RNA, 19 nt, Homo sapiens
  misc_RNA (1)...(19): siRNA sense strand
gaagaaacccaagauugau

SEQ ID NO: 1672536 - RNA, 19 nt, Homo sapiens
  misc_RNA (1)...(19): siRNA sense strand
ccaaggaccugcucuucuc

SEQ ID NO: 1672537 - RNA, 19 nt, Homo sapiens
  misc_RNA (1)...(19): siRNA sense strand
ggacgacgacuucuucaca

SEQ ID NO: 1672538 - RNA, 19 nt, Homo sapiens
  misc_RNA (1)...(19): siRNA sense strand
caaguacuuugccuccauu

SEQ ID NO: 1672539 - RNA, 19 nt, Homo sapiens
  misc_RNA (1)...(19): siRNA sense strand
agaagaagaagaagaagaa

SEQ ID NO: 1672540 - RNA, 19 nt, Homo sapiens
  misc_RNA (1)...(19): siRNA sense strand
gauccacaauuauaagaag

SEQ ID NO: 1672541 - RNA, 19 nt, Homo sapiens
  misc_RNA (1)...(19): siRNA sense strand
ggaaguccuuugacaucga

SEQ ID NO: 1672542 - RNA, 19 nt, Homo sapiens
  misc_RNA (1)...(19): siRNA sense strand
ccacacauggcuacaauau

SEQ ID NO: 1672543 - RNA, 19 nt, Homo sapiens
  misc_RNA (1)...(19): siRNA sense strand
gagaagaagaagaagaaga

SEQ ID NO: 1672544 - RNA, 19 nt, Homo sapiens
  misc_RNA (1)...(19): siRNA sense strand
ucaacacccucgucaagug

SEQ ID NO: 1672545 - RNA, 19 nt, Homo sapiens
  misc_RNA (1)...(19): siRNA sense strand
ggaggacgacgacuucuuc

SEQ ID NO: 1672546 - RNA, 19 nt, Homo sapiens
  misc_RNA (1)...(19): siRNA sense strand
agaaggagaagaagaagaa

SEQ ID NO: 1672547 - RNA, 19 nt, Homo sapiens
  misc_RNA (1)...(19): siRNA sense strand
gcaaugaccccaucaaugu

SEQ ID NO: 1672548 - RNA, 19 nt, Homo sapiens
  misc_RNA (1)...(19): siRNA sense strand
caaugagaacgaugaguuu

SEQ ID NO: 1672549 - RNA, 19 nt, Homo sapiens
  misc_RNA (1)...(19): siRNA sense strand
ccaucgagcuggaccugaa

SEQ ID NO: 1672550 - RNA, 19 nt, Homo sapiens
  misc_RNA (1)...(19): siRNA sense strand
caagaaggaguccauguuc

SEQ ID NO: 1672551 - RNA, 19 nt, Homo sapiens
  misc_RNA (1)...(19): siRNA sense strand
ccaagaaggaguccauguu

SEQ ID NO: 1672552 - RNA, 19 nt, Homo sapiens
  misc_RNA (1)...(19): siRNA sense strand
gcccaucauugucauugaa

SEQ ID NO: 1672553 - RNA, 19 nt, Homo sapiens
  misc_RNA (1)...(19): siRNA sense strand
aggacuggcugcacacuuu

SEQ ID NO: 1672554 - RNA, 19 nt, Homo sapiens
  misc_RNA (1)...(19): siRNA sense strand
aagaagaaacccaagauug

SEQ ID NO: 1672555 - RNA, 19 nt, Homo sapiens
  misc_RNA (1)...(19): siRNA sense strand
gagaagaagaaacccaaga

SEQ ID NO: 1672556 - RNA, 19 nt, Homo sapiens
  misc_RNA (1)...(19): siRNA sense strand
cgucccugauccacaauua

SEQ ID NO: 1672557 - RNA, 19 nt, Homo sapiens
  misc_RNA (1)...(19): siRNA sense strand
gcagcucaacccugucuuu

SEQ ID NO: 1672558 - RNA, 19 nt, Homo sapiens
  misc_RNA (1)...(19): siRNA sense strand
ggacgauccgcccaucauu

SEQ ID NO: 1672559 - RNA, 19 nt, Homo sapiens
  misc_RNA (1)...(19): siRNA sense strand
acacagacguccacuacca

SEQ ID NO: 1672560 - RNA, 19 nt, Homo sapiens
  misc_RNA (1)...(19): siRNA sense strand
ggagaaguccagugacauc

SEQ ID NO: 1672561 - RNA, 19 nt, Homo sapiens
  misc_RNA (1)...(19): siRNA sense strand
gccagaacuuccugcagaa

SEQ ID NO: 1672562 - RNA, 19 nt, Homo sapiens
  misc_RNA (1)...(19): siRNA sense strand
ggacgccucuggacaucuc

SEQ ID NO: 1672563 - RNA, 19 nt, Homo sapiens
  misc_RNA (1)...(19): siRNA sense strand
caagauugaugagcuuaag

SEQ ID NO: 1672564 - RNA, 19 nt, Homo sapiens
  misc_RNA (1)...(19): siRNA sense strand
gaguggaggugcuguucug

SEQ ID NO: 1672565 - RNA, 19 nt, Homo sapiens
  misc_RNA (1)...(19): siRNA sense strand
gggagguuguggugacuau

SEQ ID NO: 1672566 - RNA, 19 nt, Homo sapiens
  misc_RNA (1)...(19): siRNA sense strand
gagcuggaguccgaguuug

SEQ ID NO: 1672567 - RNA, 19 nt, Homo sapiens
  misc_RNA (1)...(19): siRNA sense strand
ggacagugcaggccaaggu

SEQ ID NO: 1672568 - RNA, 19 nt, Homo sapiens
  misc_RNA (1)...(19): siRNA sense strand
cagaggaggcagagaagaa

SEQ ID NO: 1672569 - RNA, 19 nt, Homo sapiens
  misc_RNA (1)...(19): siRNA sense strand
cagcagaggaggcagagaa

SEQ ID NO: 1672570 - RNA, 19 nt, Homo sapiens
  misc_RNA (1)...(19): siRNA sense strand
ccaaguacuuugccuccau

SEQ ID NO: 1672571 - RNA, 19 nt, Homo sapiens
  misc_RNA (1)...(19): siRNA sense strand
caaugaagggcaaggagaa

SEQ ID NO: 1672572 - RNA, 19 nt, Homo sapiens
  misc_RNA (1)...(19): siRNA sense strand
caacuggcgcuaccuguuc

SEQ ID NO: 1672573 - RNA, 19 nt, Homo sapiens
  misc_RNA (1)...(19): siRNA sense strand
agaacuacaucuccaagca

SEQ ID NO: 1672574 - RNA, 19 nt, Homo sapiens
  misc_RNA (1)...(19): siRNA sense strand
ugacgguggcuguguauga

SEQ ID NO: 1672575 - RNA, 19 nt, Homo sapiens
  misc_RNA (1)...(19): siRNA sense strand
agagguacccaucaagaaa

SEQ ID NO: 1672576 - RNA, 19 nt, Homo sapiens
  misc_RNA (1)...(19): siRNA sense strand
gcgcaaagacagccaagca

SEQ ID NO: 1672577 - RNA, 19 nt, Homo sapiens
  misc_RNA (1)...(19): siRNA sense strand
gggacgagaccgaguacaa

SEQ ID NO: 1672578 - RNA, 19 nt, Homo sapiens
  misc_RNA (1)...(19): siRNA sense strand
aagaggagaagaagaagaa

SEQ ID NO: 1672579 - RNA, 19 nt, Homo sapiens
  misc_RNA (1)...(19): siRNA sense strand
ucgacaaccuggagcucua

SEQ ID NO: 1672580 - RNA, 19 nt, Homo sapiens
  misc_RNA (1)...(19): siRNA sense strand
gcacccugcugacaucaac

SEQ ID NO: 1672581 - RNA, 19 nt, Homo sapiens
  misc_RNA (1)...(19): siRNA sense strand
cgacagcagcggacucuca

SEQ ID NO: 1672582 - RNA, 19 nt, Homo sapiens
  misc_RNA (1)...(19): siRNA sense strand
aggcugagcugcauuuacu

SEQ ID NO: 1672583 - RNA, 19 nt, Homo sapiens
  misc_RNA (1)...(19): siRNA sense strand
gagaaggagaagaagaaga

SEQ ID NO: 1672584 - RNA, 19 nt, Homo sapiens
  misc_RNA (1)...(19): siRNA sense strand
gaggagaaggagaagaaga

SEQ ID NO: 1672585 - RNA, 19 nt, Homo sapiens
  misc_RNA (1)...(19): siRNA sense strand
ccagagguacccaucaaga

SEQ ID NO: 1672586 - RNA, 19 nt, Homo sapiens
  misc_RNA (1)...(19): siRNA sense strand
ggccuucggucgcuacaca

SEQ ID NO: 1672587 - RNA, 19 nt, Homo sapiens
  misc_RNA (1)...(19): siRNA sense strand
ucccugauccacaauuaua

SEQ ID NO: 1672588 - RNA, 19 nt, Homo sapiens
  misc_RNA (1)...(19): siRNA sense strand
aagaaggccugaacgacau

SEQ ID NO: 1672589 - RNA, 19 nt, Homo sapiens
  misc_RNA (1)...(19): siRNA sense strand
aaguggaccucccagagaa

SEQ ID NO: 1672590 - RNA, 19 nt, Homo sapiens
  misc_RNA (1)...(19): siRNA sense strand
cucggaagcccaagaagua

SEQ ID NO: 1672591 - RNA, 19 nt, Homo sapiens
  misc_RNA (1)...(19): siRNA sense strand
ucacugggcccucugagau

SEQ ID NO: 1672592 - RNA, 19 nt, Homo sapiens
  misc_RNA (1)...(19): siRNA sense strand
gaaggaggaaguggacaau

SEQ ID NO: 1672593 - RNA, 19 nt, Homo sapiens
  misc_RNA (1)...(19): siRNA sense strand
gacgauccgcccaucauug

SEQ ID NO: 1672594 - RNA, 19 nt, Homo sapiens
  misc_RNA (1)...(19): siRNA sense strand
gacgagaccgaguacaaga

SEQ ID NO: 1672595 - RNA, 19 nt, Homo sapiens
  misc_RNA (1)...(19): siRNA sense strand
ggacgagaccgaguacaag

SEQ ID NO: 1672596 - RNA, 19 nt, Homo sapiens
  misc_RNA (1)...(19): siRNA sense strand
cagagguacccaucaagaa

SEQ ID NO: 1672597 - RNA, 19 nt, Homo sapiens
  misc_RNA (1)...(19): siRNA sense strand
aggccaagguggagcugua

SEQ ID NO: 1672598 - RNA, 19 nt, Homo sapiens
  misc_RNA (1)...(19): siRNA sense strand
gcugagcugcauuuacuga

SEQ ID NO: 1672599 - RNA, 19 nt, Homo sapiens
  misc_RNA (1)...(19): siRNA sense strand
ugaacgacauacaggagau

SEQ ID NO: 1672600 - RNA, 19 nt, Homo sapiens
  misc_RNA (1)...(19): siRNA sense strand
cugcaaagacggcaaagug
